United States Patent Application Publication US 2007/0067865 A1 - sequence listing, part 48

SEQ ID NO: 288715 - DNA, 446 bp, Zea mays
gctccgcagatattcaaaagcacgctctggtaatagtgttacatcgcaaaatgatgttaaccaagcatataagccaccaaatatcgaaatgtatgaaaaacgtgtccaagaactgacaaaaacagccgaggattctcagaagaaagcagatcagttgcgagaagatttacagttgaagacaaaacaagaaacagagatgcaagaagagttggaagggctaagagataccttgcaatctgaacgacaaagttccaaagacataaaaaatgagcttgataagctaaaatctctatgtgatgagaaagaatctgctttgcaggctgccctgatggaaaaaagtagacttgaaaccagattaacaagtagccagggccgtgagagagatactttgacaactgtaggcagcgtcaatagtgacattgagatgcttaccaagcttaaggagg

SEQ ID NO: 288716 - DNA, 269 bp, Zea mays
agaatccggaccggtacgtcctctgcgccgcgcctcctcggctcctcccatacgtcgccagcgaccagcgccgcccgactccgccccacgtcgcgtgtagctcaagaccaagcacgtcttgcaccgcctagctcacctctacggccgccgaacctgcctccgccgttgccgactccaagctccactcgcctgaggtcccctcgtccgaggtgctcgactggacttcctccccccgaggtcccctcctatccatcgccgctcctccccga

SEQ ID NO: 288717 - DNA, 433 bp, Zea mays
ctccacacgctccattaattcatgttatgaaggtcaaacctaacaaggtgaatttaataattggttctggtggaaagacaataaaaagcataattgaggagactggggtagatgctattgatactggagatgatggcacggtaaaaattactgcaagagacctaacaagcttagagaagtcaaaaattataatagctaatcttaccatggttccaaaagtaggagaaatatacagggactgtgagatcaagtcaatagctccatatggtgcttttgttgaaattgctccagggcgtgagggtttatgtcatatcagtgagttaagttcgggctggttggccaaggctgaggatgcttttaaagttggagatcgcatagacgtcaagcttattgagataaacgataagggtcaacttcggctaagttctcgagc

SEQ ID NO: 288718 - DNA, 401 bp, Zea mays
cccacgcgtccggcttttactgacgatggcagagtggtatcgctacgctgataaccgcaagaaggttgtcaacttctgctcttacattataagggggtcactggcaaagttatatgctgccaagtacaagttgcggtcaagggcaaaggtctataagatcgcgtcaagaaatcttagtcggccattgaaggataagaaaggccagtcgccagagtatcacaatttgctgagaatgggccttgttgattcaattgatggtcttcagtatacaaggatgtcgatggttcctgatcctgattacacgccgttaccatttggatggcggccagatcatgagaagatttgctggagtacataaagctcacagatcaacagacattgaaagagcagagaaactgcac

SEQ ID NO: 288719 - DNA, 388 bp, Zea mays
agcttctgaagatccacagctatctagcttctagaggagttcccttgagctcagctcaggttcagttctcgttactgagcatgggtgacgatcagatggagctgaaaagtgtgtgtgattcattgggcattcgcatcatcgcatatagcccgcttggattaggaatgctcactgggaagtatggtgcttctaacctcccaaaaggaccaaggtcagtgctgttccgacaaatccttcctgggctggagcctctgctgactaccctgagaaggattgccgaaaagaaggggaagaccatgcctcaggtaagtgcttaccgagcgcagaacggcttgctgaaacgattctatgatcgcaccagcctaccagcacgtcgcaactacgatgc

SEQ ID NO: 288720 - DNA, 458 bp, Zea mays
tagagacattggaaattaagcttgcagctgccaatgaaaagttaaagaggtctaatatgacggcctcggaaaccatgaccgagtatgagaacatgaagaaaatgctggaaagtgttcagtctcgccttgaagaggccgagcaaacaattctggaaggagagaatttacgaaaaaagttacataatacaattcttgagttgaagggaaatatcagagtattttgtagagttaggcctttgctgccaaatgattcaggagcagtatcatatccaaagaatggagaaaacttaggccgagccattgagttgttacataatgcacagggatattcatttacttttgataaagtatttgatcattcggcgtcacaagaacatgtgttcatagaaatatctcaacttgtccaaagtgccctagatggctataaggtctgcatatttgcctatgggcaaactggt

SEQ ID NO: 288721 - DNA, 275 bp, Zea mays
gcaaaagcacaaggttcttgtatccgcgcagtggacaaaagtgctggacattattgaatactaccttgattcaaaaggccatgctgtttgccgaatcgatggtaatgtgaaactggaagaaaggaggaggcagatagcagaattcaatgacgtgaatagcagcatgcgtatcttcctcctgagcacaagggctggtgggcttggcatcaaccttactgctgctgacacctgtatcctctacgacagcgactggaaccctcagatggatttgcagg

SEQ ID NO: 288722 - DNA, 605 bp, Zea mays
agaagcttgatgataggttcttttcttgatggtggtactgatgagaacggtgacagtgaaaggttcataagacggcgccagaaagctgatggtgagctgttaccgagggaggaaaatggtggtgactttctggcaagcgttggaaaaggcttggctctgaggccaaagtctagcaatcgaccagacatgaacaagagccagcagaatctttttgcaatggcggagcttttgtttggcaatggtttgcaaactgtaaggaaatcttccagcactccggagttccaggagccagagaccaacaccagttcatccatatggtcagcgagcaagtggagcataaatacagatgcttttgctcttcctctcccgatccctcgttttgacaacattccaaagcccattgctgcttggagaaacaagccggctcgcgactaataaactgctacgcgcatgatttttcctgaactccaggaggcccagaaagcgggatgtgttcatgaaggagctttacattaggttggcaccagcctctacagctttggaagcagagcagagcaggactgtagtattggcacctgctagctagaacattccgaagatcagac

SEQ ID NO: 288723 - DNA, 345 bp, Zea mays
gtctgctctttgcaagggcgatcagaggtccgctgacgttaaggacatgctgcgcaagtatatgtcacttgtacagcttctagaaagtgtcgacctcggtggaatgaaaaacgaggagaagcttgctttctggatcaacgtgcataacgcgatgatgatgcatgcccatatagagtacgggatcccacagagcaacagcaaaaggatactgcttaccaaggtatcctacatcgttagtggccagagagtaaacgcggactcgatagagtaccagatcctgtgctgccgagcacactcttctggacagttgcttcggctgctgctccacccgaaatggaagtccgg

SEQ ID NO: 288724 - DNA, 289 bp, Zea mays
caactccacatgatgaaattcagttacttctatattggtatcaaattttcccctgtagattgatagatttgttttggtacctgatgacacttatgttgtgaactgcgatgcactcgcaagatagtcctggtactcagccctcccgtaggaggccctaagagtaaaccagatctattcttcttgcctatccctactaacaccctgcccctccttatgtagagaggtagccctaacttaatagctaagcaacataacaaaccttatttggctagcactgttcacgcgctaa

SEQ ID NO: 288725 - DNA, 379 bp, Zea mays
aattgtgataagtaggctgagcaaattgtactgctagggtagtttgttttgtttgatttgtgtgggcacacttgaaattggcgtgagtctagtaacataacttgtgtcattttgctcagaagccttacatatgagttctttctggttcatctgatgtccacactgagtttatctgatgtccacactctgagtttatctgatgtccacacactgagttttggcaattaatttgcctgtttagaagcagagttctagaacctaaactgtctgtctgaagcagagctctagatcctgaactgtctgtctgattggttgctgcttactttgtgctgcactgaaattggtagtggtgtcttctagcccattggaagttttcttc

SEQ ID NO: 288726 - DNA, 372 bp, Zea mays
cccacgcgtccggctatttcaaagctgggatacaagaagtgcgtcgttcccaaaacctccgagaagttgctcagaccacttgatattgacattgagatcttgccctgcaacctgaagcaggttataaataccgtgtttaggccccaaggttgatgtaggcgtacaagatgcctggtttaggaaatctgacagtaggcagttatttagattagagtattgttgtaggtcaaggacttggctagtttgggttggtgtagcatagtgtggtcggtgccagttagaaagtgcatggggttcattgctgggcttccgttccgttgaattggtgtagcatagtccggtagtgccagttagaaagtggattgctggtgt

SEQ ID NO: 288727 - DNA, 292 bp, Zea mays
ttttgcccagtatcttatggacgttgttggccccgagttatcagagccagcaaataggattagctccttccaattggctggcttgcttgagactgcaatccgagcatccaatgcacaatatgatgactgtgatatcttggaccggataaaggtaaagatgatggatcatggggatggtgatcgtggctgggatgtcttctctttggagtatgatgctagggtccccctggacactgtgttcacagcttcagttatgaagatgtatctcaaggttttcaacttcttgtggaag

SEQ ID NO: 288728 - DNA, 352 bp, Zea mays
cggagaaattactccagacagcccttgatgtgtggagattcagcagaactaacagacagggcagcttcttgcttgaacctctgctgcatgggacgtgcagtgatcttcaagaaacctatgagagaaacttcccttgtgtcagtggccttgatgctgagtgtagcaatgtggctggtgtagcaaattgatgatccggatgcatcacttgaacggcagctaagcccaaatgttcctagaactgcggactgtcttaccatgagctcaccccaacgtctccaggaaatgcagaggcacagcctgaaccacctctgccaaccctaaagtcaccaggagctgcaggtgcagtgccaga

SEQ ID NO: 288729 - DNA, 355 bp, Zea mays
gacagggcaggtgatctcgaccttttcaactgggaaggtcccatatgttgtgaagctcaatcctgatgaggataagcagcatattctccttgccggaatgagcgataagaagattgtgcaatgggatatgaagtcagggcagattacacaagagtatgatcagcatttaggggctgtgaacaccataacttttgtggataacaacaggagatttgtgacctcaagtgatgacaagtctcttcgtgtgtgggagtttggcatccctgtggtgattaagtacatcagtgagccgcacatgcattcaatgccatcgatgtcactgcatcccaactccaattggctggcagcacagagt

SEQ ID NO: 288730 - DNA, 278 bp, Zea mays
cccacgcgtccggtgatggccatgaatcagaagctactatacgcaagaggagctcatccaaagccactgatggagaagccaccaattctggaagtgatcctgcccctgaaaaagcaccatcaaatgaaggttcatcaatttcaaactctaacttagtgtttggctacctcaaccttttctcagatggtgttcataacttcactgatgggatggctctcgggagtgcctttctgctgcatggttctgttggtggctggtctaggactttatttctgctt

SEQ ID NO: 288731 - DNA, 326 bp, Zea mays
gcgcgagaagatgctgcatcacatccaccaagaaatcccctatgtaattgagcatcgtctgatgggctggaaggagctaaaagatggttctcttagggtggagcagcacttcattgcccctaagcaaagccagcgtcagattcttgttggtaaaaatggctctaagatagggagaatcggtattgaggccaatgaagagctgaggtccatattcaagagagatgtccatctaatcctccaagttagagttgcgaagaagagaagtgcttgaacagatttttttttagtgcctgtatagactgctagtgatatgggaagtgcagttc

SEQ ID NO: 288732 - DNA, 373 bp, Zea mays
gaagaatcgttgcaaagttccaagcaaagaagagataatggcatattcttcgtcccacaaaggccgtatatggttctggggacacttcctcaacagttgctctatcctacgtggactgaagaggttcaacactcaccagataatgatgataaaaactcagcagatcctcttccgtttctgtccgaagtctccacatcagatctggtcggtgccaaatccgaggtgccctcgacagctgaactgatcgaagtccttgaggacgtcaagctgggttacatattgcctcgtttcaacggcttggactctacccatgactgggccagtgttctttcgctgggggagcagccgcgtctcgcgttcgcccggctattac

SEQ ID NO: 288733 - DNA, 298 bp, Zea mays
aaatgaaggaaaattctctcaaggaggaagatgaagaggagtaccaagagaaaatagaacagcagttagcaatgcaggaggaagacgaccctgaaaaaatcaaagaggaagcaaggaggaggaaagaagctatcatggcaaagtacaggcagcagcaatcgcagaaagaggatatggaatctaaaccaagtggcaatgatgaagaagtaagagcaatggatggaaacgaagctatacatcagaaagatgatatcgatagcagctttatgggcaatgtcgaagctgaaaatacgcgtga

SEQ ID NO: 288734 - DNA, 385 bp, Zea mays
tggaggcgctgctgcggagtgcggcggcggcgggcaaggcgaggaggctgggtttggtgataacggcgggcatgggagcggggagaaggtcctccagagcatgctgcttcctcagtcgtctttcaaggcaaggagtgggccgctgcgtacgctgcggggtcggggttggggtccttgatgtagcaaggcggcggtggcagcagcagcgccgcagatagcgggttggtggcacgggatgtagcgctgcagaacacccggctgctgcttgggcgagttcttgatacctgcgcgcttgggcgcaagagggatcacaagcggctggtgccatttgtggcgaacgtcgggtagaccttgccaacatatagcagcacaattttgagtgggc

SEQ ID NO: 288735 - DNA, 337 bp, Zea mays
gagacatttcaaatgcttgctgattgtactgatctgtgttgcaaatgctcgacaagtgaggattacttcaatgaacaagaggaagaacttaggcataaggtacaacttgaagcagaggaacgacagctggaagaggctctcgaatatcaacggcggatagaggaggaagcaaagcagaaacatcttgcagaacaatgtagaagtacacatgcatcttctgttattggtacagctagtctttcaagcactgtgagtttatacaggggtccggataaccatgaaagtgcactcaatcactcttcccgtacttatctcgaaggcataaggtttggtgatt

SEQ ID NO: 288736 - DNA, 290 bp, Zea mays
cagattgtgttacttgccacctgaacattcctgctatatcagtttaagaaaaatgggcagttgagttaggccggatattttactgtggttttctcaacaatcatttttctcatattgtatctccacaaacaactccttggttaaaacttttgtttgccttgagaaaagctttaggtttaggcctatattcttgttttaatgatggattgatgtttcatgtgcttccatgattgcttggaattgtactgttaacgcctttgttggtgcaggatttttaaatcggcagcatg

SEQ ID NO: 288737 - DNA, 288 bp, Zea mays
ggatcactccgtggttagtaccgggccacccgtgaagaataggcagcggggccagaagcagagctgtcagcctaagtcaccatagcctaagaagcctaagaagtctgctgtcccaccggagggtgggacaattaatgggcacgcgacccggaggaggggacctaagaagaatgtggggatgatgattaacggtattgagttggaccttgccaacataccaacaccagtgtgctcgtgcaccggagctccccagcagtgctacaggtggggtgcaggtgggtggcagtc

SEQ ID NO: 288738 - DNA, 339 bp, Zea mays
atggtccccatagtgatgaagaatatttagctagagtcaactggatgcataatagtgctcttgctgttcaagttcccgccggcgcgcgggcgaaacttaaattacttaagtttgatattagtacaggtgaaagagaagtcttactagacagagcagcatgatgtatggatcacattgcatgattgcttcactccactagacaaaggagtgaataataaacatccaggtggctttatttgggccagtgaaaaaacaggattcaggcatttatatgttcatggcaatgatggagcatgcttaggacctctcacacaaggtgattggatggttgagcacatt

SEQ ID NO: 288739 - DNA, 477 bp, Zea mays
aagattgtggtgctcttaaagttaacccttttgccagcaagaacaatactgctgtgtatcagtctaaattgggcacacaacctgtctatgttgtggcaactagggcaaattgttttgcttctggttcgatgcagacaaataacagtgataaagaacttgcatccagtgccatggaacggattgatagcgtgaagaacagaacaagtaaagatacaggatttgtcactgaagcttataacaatgatgcctttagtggtggtattactgaaaagggttttgcgcagttcagtaacagttctactcacataaagcccaatgcttctggccattgttcactacctgaatcaaaaactccaacaaatggaagtgatatcaactgcatcaagggctctttggttaatagaggtgatgttagcttcacaaatggctcgtttgtcaataggcccatcaacaacaatgaaccaaatgtagctaggc

SEQ ID NO: 288740 - DNA, 295 bp, Zea mays
aaaaaattctactgaaaggcaaaagtgataggctggatataagagacattgcttcacagtgtggtaaccaagagaagggtggaaacttttggattaagttgaacattaatcaaacaggattttatagagtccaatatgacgataaacttgcagctgcacttcaaaatgcattgcaggccaagaagctgtctgtaatggataaaattggcattgtggaagattcactggccttatctatggcctgcaaacaaaccttaacatcgttgctacgtttactgtatgcttaccgcgagga

SEQ ID NO: 288741 - DNA, 410 bp, Zea mays
cctgaagagaacacggtccggcaattgcatggacaaggcaggagcagtggtgttcaaggagcagagcatcgacgagaacagcgacttcctcctgccgctaaaaggttaagaattatgatcatgctactgggatgtcaagttatgatgtccaatggataagcaaggcatcagcatcccagcgtgctggaagagcaggaagaacagggcctggccactgttaccgtctctactcagctgcagcatatggtaaagatgatttattccctgaattcgctgaacctcagattaagaaaattccagttgaaggtgttgtcctgatgctcaagttcatgtctattgataaggttgagaactttcctttcccaacaccaccaaacaaggaaagtttggttgcagctgagcgttgctta

SEQ ID NO: 288742 - DNA, 452 bp, Zea mays
ccacgcgtccgggaccgtgcccgtccaggcggcctctgcgccacgggctgcaccgcgcgtcgcactacggtgatcccccccgccggtggctctccaagctccccgtgacttcgaggatattccccaccatgccacgcgaccgcgcggcctcaggcaataatcaagaggttcattgtgaaccactagaagttattcgtgaaagacactccacagaaccaaacatcaatgctgcagctattctaccatcaagacctgtgagcaatacatttaacctgcttctggaaggtgacatgaatccaagtcatggcaatgggcttgctgaaatagagaacataatcaaccagagatatttttctagggatgagacactacgtcttatagagatcatgcggtcaaggacttctgattttactgttgaagaccagagacctccagtatctactgcaaaaggt

SEQ ID NO: 288743 - DNA, 315 bp, Zea mays
accgactccctcgtggcctcgtcgcctcagctccaccaccaccacctccacccgcgcctccaaaatccaaatccgatcgatctccgcggcctccagatcccccggcgggcggagacggcgagctccaggcggccaagaagcccccccctcgcagcgctcctctcctctgcctctccgaatcccttaccagggggaaaaaacattgcctgaaagttcttcaggccctggtgtagcagctgaattacccagtttaatggcgaagaacgagctttagatggtctaaagatggagatgagatagaagcaccacaagtgt

SEQ ID NO: 288744 - DNA, 247 bp, Zea mays
atacgggacctggcccacggtcgacgggcttttgcacaggagtggtgcaaagactacttctagatgaaagacgccgattaaacatggcatttgatgtggccaaaggaatgaattaccttcatacgacgcagccctcctattgttcatcgtgatctgaagtctccaaatcttctagttgacaagaagtatactgtcaaagtatgtgactttggcctttcaagactgaaagctaacactttcctgtctt

SEQ ID NO: 288745 - DNA, 276 bp, Zea mays
cccacgcgtccgcccacgcgtccgaagttctctcccatccccaaagtatcatccaatttccctccccgctagccacaatgccgactcttcgcagcgcgacggcgaacgcgtcccccgtggccaccccatcccctgccgcggcgagcacgccgcgcagcgtcaagcgccggctgacgccaggccgcgccggcgagtcgcccaaagcgtcgcggcacacctcccctcaccgatcccctcacgccggcaccggaactgtatgcattccgaagctgctct

SEQ ID NO: 288746 - DNA, 357 bp, Zea mays
cggacgcgtgggttgatggccacatcacccctgagctgcttctccgcgcgtcccagacccagatctacgggcaccgccgtctggttgcttccggccgccgttctcctcctcctcctcaaccggtggtcgcacatggcctcttacccttctgtctcccctcgtggctccggctcggtgcaggtcgggcgcgccgagctttactcgaagatggcgcgtgacctcgacgagcgcggcgcggcgttcctgaagggcggcgagacgtcgcagtcgctcacgctctcggacctcttcgacaccgcagatgacggcggcgtcgtacccaggctcaaggccgccgacccgccagtgcgcgcgaat

SEQ ID NO: 288747 - DNA, 391 bp, Zea mays
caagatgagattgagcatgctcaggcacaggtagaggagcttaacatgaacctgaagaatactaaagagaactatgagctaatgcttgatgaagcaaactacgagaaggtttgccttaccaaatcagttgaaaggctagaagcagaagctaagagtgcgcgggacgaatggcagtctaaagagctaagttttgtcaactctcttaagaattcaagcagaagaaatagtcgctgtcaaagttcagatggacatgaccttggaggttgttaaggagaaagaaaatgaaaacactgagttgcaggagaagctgctgcagcttgagtctcagctaatggaagctaacagaatcagggaggaagccaacgctaaaactatccaatggaaggagaaa

SEQ ID NO: 288748 - DNA, 373 bp, Zea mays
aaccaatcaattaaaaggcaccctttggatgtaagcacaattcggttggctgcttccaattgatttggctacagatcaaatcctcttcaaaattgcatggtgtattttgcgttgctcaaagacaagaaatcattcaagatgcttacactgcccctatttattttctctgactggaacggggttggctaccatgacgacttagcaattggaatgccaaactctaggttcatcaatggttttgtaattttgaggtcaccagtgatttgttatacagaattgtgggtgaaaatgaaaacatctctggcaagtcccagtcagtttctgaccagtttttgacacagactggtctgatgttgattgtcacatttttgta

SEQ ID NO: 288749 - DNA, 291 bp, Zea mays
gtggtgatggtggtgtactgcgcgaaatagccagacatgattcagtggaaactattgatatatgtgagattgatcaactagttattgatgtttgcaaagaattcttcccaaacttatccattggattcaaagatcctcgtgtccgacttcatgttggtgatgctgttgatttcctgaggaattctcccgaacgaaaatatgatgctattattgtagattcatcagatccaattgggccagcacaggcactcgtggagaaaccgtttattcagacaattgctcagagctttg

SEQ ID NO: 288750 - DNA, 356 bp, Zea mays
ggacaacagaggggcagcttgctggagacaattgctaatcagaaaaagtttctgtcaagcctgccatcacatttgaaatcattgaagaaagcatcactgccagtgcagcaacagttggggatgcaacataccaagaaactaaagcagcaccatgctgctgagttacttcctactccgctttatatagcatacactcagctgctagggcagaaagaagcatttggagagaatattgaagtagagatcgcgggaagcacaaaggatgcccaaatatttgctcaacaacaagccaagaaggaaaacagagctctttcaagtggcgacaacagaatggatgatgatgtgattgatgatga

SEQ ID NO: 288751 - DNA, 329 bp, Zea mays
cccacgcgtccgcggacgcgtgggaggcacttggggcacggcctgcagcatcccgcccttctctgcctcccaccccctcgcacgccgtccgcgccgccgccgccgggatgaagaaccccgacttcgccgcagacaaagcgctcgccaaggacttcctgtccaacttcggcggccctcacggcgaccccaagtacctgaacatcctgcaagatgtcgccaacagcgagatacgcgcggtccagatcgagctggacgacctgtttcatcacaaggacgtcgatgaggagttcctgcagcgtgtcactgagaacacgcggcgctacgtcggc

SEQ ID NO: 288752 - DNA, 361 bp, Zea mays
  unsure (1)..(361): unsure at all n locations
cggacggtggngaggaaatcagggaagcactggaagagttatctcctacagggtggaaagaagaaatcagtaccaatattaaccttgaaatattgacctagttacttgaatcaggttcccaggacagacaataccttggacaaattttgcagtactctctggataagctgcgaaaactgtcttctcctgtgaaggaacacgagatgaagaagagtcatgatacattgttgggagaattggtcgaagctctaaatccaattataaagatccaaattcatttgttctttgcgttatcaagggtttgcgactcactatggaggaattacaggctctaaaaacagaagttactagagcacgcatc

SEQ ID NO: 288753 - DNA, 288 bp, Zea mays
agtcacacggtttaatcgaatggcttcgccgtcgtgtttcctcttccgcccccgtccgccgctgtgcagccgccgccgccgcagcagcagcaggtccctctacctcctctccaagcagagcctgcaccgacttccctcaccaagaacatgccgccgtccagtggcagagcagctcgtcctgcggtcgctgccgcccggtaacggcaggcggatgggggcgacgggcttcgcctgctactgttcctacgacaccgagaacggactgcccacgccttcaccggacaaggg

SEQ ID NO: 288754 - DNA, 373 bp, Zea mays
aggagctcttcataaaaagagctccagcacaggttgtcgaggccatgcgccaaacagtgactaatatgatgggcactttaccaccacaatttttcgctgtaactgtctcaacggtcgctgaaaatctggctcagcttatgtacagtgtcctaatgactggatacatgtttaggaatgcacagtaccgtctggaactgcaacagagtttggagcagattgctcttcctgaaccaaaagaagaaaaggattacgctcctggaactcagaaaaaggtaaccggggaagttatccgttggaacaaggccactggacctgagaaaattgatgctgtaaaatatatagaattacttgaagcagaaatcgatgagctgag

SEQ ID NO: 288755 - DNA, 281 bp, Zea mays
tggacattagagttatgttcttgcgccaatgaagtctcaagagattataagttactatgaggttttttgtttgatgctactgcttgttaccttaatgttagcatgcttttagatgtatagttagtttggtgttggttgttaggttcattgtgtactatgcagattaaattttgatttttattccttgctatccatttcagtgctgtctaggcgtgtggctgttagctaagggccattgtgttttgtgctcagatggaatcctaccaatatttcgctacaaa

SEQ ID NO: 288756 - DNA, 329 bp, Zea mays
gcatatgttttctcttcgggtctttccgtaaaccgtcaggaaaacatatgccactgctaacatccaggccatttgttttcctgacggtttacggaaagacccgaagagaatgtgttccttcatgagcagtgtaaaaactttgaatctcctctaacatactagtgctttattggtcgtagggtcttggtgcagtatgtggaaactgaataaatggcagtcctaataaaaataaaaataaaaataaaatgaccatcataggtaagctgtccagaacagaggcattgtcgatctttggcatcaaccagtaaaattcatgcaatgagcagcta

SEQ ID NO: 288757 - DNA, 275 bp, Zea mays
atcttgctgaaaacgtcgttgtggtgagagagggagggcggtcaaggagtaatttgggtcgtcgtcggtggttctcatcgatactaggtttccgttctcggggtgtggccgaggagggtcgccaacgcctcgggaagtcgtccgtgaccgcaattggaaggcgggacccgcggaccgtgggcgattgctcgccgtcgaccgaactccatcgtgggtagccctgttccgtgaccgggagtttctactgtgtcactgccgactgtaaccttgctgac

SEQ ID NO: 288758 - DNA, 139 bp, Zea mays
agaagttcgtcttcgtgccggacaaggacctggacaggacgctccgcaggccatcgacgactcccagctgccggagatctatggtggcaagctcaagctcgtcacgccggctgcaaaattaccaagccactttaggcta

SEQ ID NO: 288759 - DNA, 322 bp, Zea mays
gaaaccgtaagaagcgcagagtgtgagagagaggggcatcaaggacgacgtgggcaagatgatgcaggtgttcgtgaagacgctggcggggaagacgatcacgctggaggtggagggcagcgacgccgtcgagaacgtgaaggccatgatccagggcaaggaaggcatcccgccggaggagcagcgcctcgtcttcgcgggcaagcagctggacgacgacggccgcaccctggccgactacggcgtccagaaggagtcgacgctgcacctggagctgcgcctccggggcagcgagaggggcggctagcccatgggggtcccg

SEQ ID NO: 288760 - DNA, 291 bp, Zea mays
gtcgaccttgatgatgtgttggaagatgcttcagattctcatgggcacgcgtctaccctagacagagattggatccacaggcagaaccagtttcaaaagatgggctatcgggacggaataacacaagggcagaaggactctgcccaggaaggcttcaatgctgggttcaggcaatctgtaaacgctggctacaagtggggccttgttcgcggggttgccagtgcgctagccaatcttccagacagcttgaaagagaaactggtgccggacgtccagtgcagagggaaacta

SEQ ID NO: 288761 - DNA, 267 bp, Zea mays
tttcaataatctgcattgttgaatttgtgtgctttcgcgtcatttgttgctggttgcattgtgttcttccaccattcaaaccctagcgccgccaccatctcccgtttgatcacgccacaaaccgagtcaacatcgtttccttgtttttctccttcggttacgtcaaaaaaaaacagaaaaaaacaaaccgagtcaacggccgtttccttgattttctccttcggttacgaaaaaaaacagaaaaaaaacaaaccgagtcaacgaccg

SEQ ID NO: 288762 - DNA, 251 bp, Zea mays
gtgcgcttcggcttcaggctgtgagaaaaaaagaagaagaagaaagaaaacctcagcctgagggaacgatgcctctgattctgtcgattgtttgcattctttttctgctggccatatctccagtggctctttcgatttccaacaccacaagctgtaagtaacgtgttcttcttgtgttctggagaaaatgtgtatagtgcaaccttgtgcgttgtctgttttttattcccgatcccggtagacatgggaga

SEQ ID NO: 288763 - DNA, 281 bp, Zea mays
aattcttacagttgctgattgcctaactagcagaacctcagtctttgaagcttctttaagagctacacttgccaggattggaacaaacttttctgtttctggatttggctcaagcctggataaatcacctgcagcaactgctgatgagaatgcagacttgtcttttgctgggagggctgcgctggacattgcagctattcgcttaagtgatctgccagataagtctaagaagttcttaactgtgctagaacagtcaaaagatccaagattccatgctcttc

SEQ ID NO: 288764 - DNA, 266 bp, Zea mays
accgagtgaagattgcaaggctgtgtccaaacaggaggaagtttggaacgagagagatgtatctctgctttgcttattggagttgtaacagatccaactacatgatcaaattcgtgtatgcatcagtctcccagtcctgtgtggctgtgtccgtggatcgttatgtcagattagtttctgaaaaaaaaaaaaaaaaaaaaaaaaaaaaaagggggggccccccaattagaaacctcttccccccggaatttatttggggcgggacc

SEQ ID NO: 288765 - DNA, 247 bp, Zea mays
tgcagatcatttggctcaaataattggtagtccaacggtcacgatacttgttttggtttgggatttctgtggatgcttttgtctagctttatctatgttgtggttgcttttacatgtggttgtagggtaagtttggcaatcaaaaatccctgtagcgaagaactgatatttaaaactgggggcaggtcagaaatcattccgactgtttggttggagcacgccgttgtgcaactgcacgcgtggagtt

SEQ ID NO: 288766 - DNA, 276 bp, Zea mays
ggcggggatggcgtactcgttggagaggctctgctccggcgtccacaccctgaggtagagctgctgcccgaggtactgccggtcccacatcgccgaccgcaggttccacatcccctggttgtccagcgacaccaggatcgccgaccacccgttggggtacacctgaacggtgtgtcttgcctgcgcgtccaccaaattgtacgtctgccgctgcgtctcattccactggccatcgccgtacccgcggacagaagtccatgggcaatggtgtttgac

SEQ ID NO: 288767 - DNA, 254 bp, Zea mays
cttctccgacgcatcttcggcgtcgttaaagctggagcaggctctacgctccgatgtactcatccctgctccacaccggctcagctgcgtccaggcaatctctatttcatcatggattatcttcttcaggacaccatcacaactcttgttccactgcattgttgccctttcatgacttgttgaatgtttgaaggtgggttcgaccttcgcttatggtcatggaagatgcgacgatgccaaaactcttgcagagc

SEQ ID NO: 288768 - DNA, 357 bp, Zea mays
agatcatgatgccgtaccctgaggacgtcacgctctcggtgcagctgctgtccttcgcgtgcggcggcttctccgtcgtgtgggccaacaacaacctcctcaacgacggcaacgccatcaccatgtgcgtcaggatgtcgtccgagctggcacggaccggcgggagcatcgccaccgtgggagccgtgtcagtgaaccacgaccgctcgatgttccgcccgcgcaacccgccggcctacagcgacgcgctcgacgccatgttcgccacgtacgacgaccaccggacggtgaacgccctgacggccgccgccagcttcgtggagcgcctctactacgtcgaggcggccgacatcgcca

SEQ ID NO: 288769 - DNA, 275 bp, Zea mays
gagcggaggggcccgacgccgcgtcctctgctcctcgccacttgactgtctcgctttctacagcaacattattgccaagaacatttttgatgatgtactgcattccatagcagcattattgtccgtagcagatgatggcaattcgctgctagcactagctgaagcttccttaacttgagcgggaatatcaatcttaactgaaggtctgattgctcgaattggagctgccagtgattcctttgggccttgggtttgcgcatccttcatctaaaatg

SEQ ID NO: 288770 - DNA, 317 bp, Zea mays
gccgccttcgacatccgccacgtccccagggatcccgacgccaccgccgccgacctcctccgcgccggccgcaagaggttcaagcgcgcgggttcgtcttccaacgcctccaaggcgaagccctgcccctcgagctcgagggcaaggccggcaacaacgaacgcgcgtcgcccagccctcccccgacgcaacaacgagaggcggaggagctgcagccggtgccgatggtcgtcgagccagaacacggcgaggagtccgccggcagccacgaccaccacctgcagctgtcagggtggtcggaggaggacaccgacgtg

SEQ ID NO: 288771 - DNA, 246 bp, Zea mays
atcggcacacctggagtttctggttagtggcaggccgtcacgttcgacatttcagcctccatgttcctgatatttacagacagttataatgcaaaaggcgacattattttcattcagctgttaagttgggaaaaaacaacctgcttcgtatattagtcccatgttttcataaaagaaaaaaaaaaaaaaaaaaaaaaaaaaaaaaaaaaaaaaaaagaaagagagaaaaaaaaaggggcggccgct

SEQ ID NO: 288772 - DNA, 435 bp, Zea mays
aaatgcatgaggacgaagatgataaacgatattcacctgagcctatgcctcagcagacagataacgaatttgaagaggcagatggatccttttctccacagctaatgcatggcaatgaagatgaagatgcaattgatcctgaagaggacaaagctgagctggaccgaaaacgtgaagctgtaggtttggaggcttcaaagaaaagttcaggaagccatgaaaacaaaggcaagagtacctgatgagatggagatgaaggccataaaaacaatgggatctatggaggaaggagatgcagtatttggtgctggtgctgaagtgaaccttgattcacaggtgtactggtggcacgacaagtatctgacaagaaagcgcagtactcaatgggggcacctggatataatggataaatataccagactcatatgacatgat

SEQ ID NO: 288773 - DNA, 240 bp, Zea mays
cttaaggcaaactataaggtgttgaaggaagcccgcaagcaaagtggtgttggatggaatgaggccatgggtatgatcattgcggaaccaccaatatgggcaaatataattatcagtaatccaaaggtcaagaaatttcggtcaaggccattccctttgtataatcagttgtcagcactctatgatggcagttgtgccaccggtaaatcagattgatcagcaagctgaaggatgtaacaa

SEQ ID NO: 288774 - DNA, 643 bp, Zea mays
cgctactggtgatttggatgctttaactgatgatcctcggcagttgggaatcaaagcgtggaagaacgctcgtgacgcctctggcttcactcctgaggaatatgctccaaagagaggcctcatttcctatatccaattggtacaggacaaaattgacagaagggtgaccagagctcatgtctcggttaccatccccagcacaattgatactgtcggaaagcatggtagccgaatgaagcctgccgatcaaatcacatttggtgttgagaaaaaacaactaagcatcaaccaaacattgagctgcagacagtgtgtccagcaggcccagcagcttgcattccatccccggacaaataggtttctgtctaataggactgcgatgctttccttggtctccattgctgccgtctgcgtctgtgtgggattgatcatgaagagcctgccacaagttggttgtatgaagcctttcctctgggacaatatacgttggggccccaattgatagactgcagaagagccagcccgattgtatcagtgtatgatgaagatgtttgcgccgagcgaactagggctcttgtaatgtacatgtttcttatactaaatgtctaacttagttctgtttatagtataacctgtgaacttg

SEQ ID NO: 288775 - DNA, 433 bp, Zea mays
tcggaatcggctgagcaaaacctgggcgctaagctgaaggacattcttggggttcctgatacttctctggacgcaagatacatcactcttcatgtgtgcgaccttgtcgcagagagaggtgcacgcctggctgctgctggtatatatcgtattctgaagaagctgggcaaagacaaattgctaggtgactttagccaacaaaggactgtagttgctattgacggtggcctatacgagcactacaagaagttcagtgcctgcctagaggcgacgctcacagacctgctcggcgaggaggttgcctcatcggttgttgtcaagttggccaacgacggctcaggaattggagctgcacttcttgctgcttcgcactcccagtatgctgaagctgcatagttctaggagctcgggggtcctagtgtaaccttttttt

SEQ ID NO: 288776 - DNA, 576 bp, Zea mays
atggaggagtaaacaagaccgatacgatgaaatgaggaggaagaaggatgaggagcgtgaggcacaagagaggcaattggaagaagaagctagggcgcggaaagcaaaggaggaggctgctgctgctttagagtttgagaaatggaaaggggccttctctgttgatgctgaaggtacaacagagagtgagacacaagacgatggtcagggtttgctccacaactttgtggaatacatcaagaagcagaagtgtgttcccctagaggacctagctgcagagttcaggatgcgaacccaggactgtatcaatcggattgttactctggaaagcatggataggttatctggggtgatggatgaccgtgggaagttcatctacatctccactgaagagatgaaggcagttgcagagtacattaggaagcaagggagagtgagcatatcacatctggccaacaactcaaaccagttcatcgatctggagccgaagcccagtacgaggtggagagccagcaggatgacagtgcagaagcaggcacagaagcatgagaattccttgtgacctggcaccatgtc

SEQ ID NO: 288777 - DNA, 293 bp, Zea mays
agacaaccaagaagcaggcattggtggttcctgctgatagcaaagcatcagatattaaaggtaatgataaacgttcagctgccaatgaggatgtgaatgcagagggaagtaaggggaagagaaagaggggaaatgttaaggaccttcgtttcgaggaactggacaagaacatctcagcctcgaagaagcagaggaggaagcagcacctggatgagaagaaaaagaagcgcaaggacaataagacagaaactctaccagactttcctgggcgcgagaaagtcagatttggtgaa

SEQ ID NO: 288778 - DNA, 410 bp, Zea mays
ggcgcggtcaccggtatcaagaaccagggccagtgtggttgttgctgggccttcgctgcggtggcggccgtggagggcatccaccagatcacgacgggcaacttggtgtcgctatcggagcagcaggtgctggactgcgacaccgacgggaacaacggctgcaacggcggctacatcgacaacgccttccaatacatcgtcggcaacggcggcctcggcaccgaggatgcctacccgtacaccgccgcgcaggccatgtgccagtccgtgcagccggtggccgccatcagcggctaccaggacgtgccgagcggcgacgaggcagcgctcgccgcggccgtcgccaaccagccggtgtcggttgccatcgacgcacataacttccagctctacggtggctgggtgatgac

SEQ ID NO: 288779 - DNA, 280 bp, Zea mays
cagtggtcattaccattagaaccagcctcagtgtctcctggtttggaagcagagttctctcacctgaatattagacaaccttctcccccacctgtcctagctcaagtgcaccctgagcatggtcaaattcctccatcaagagttgctgatccaagaccaggacttgctacatctgcaaccggacgctatcagaatttgcatgtgccagtggcattaatggagtgtttcctgaggctcgctgagttaaataccgcaaagaatttggaaacctgtggaattc

SEQ ID NO: 288780 - DNA, 356 bp, Zea mays
gttatccgttctgttgcagaaaatggagatacggaagaaactggtgataaaaaaccaaagcttgaagttgaagcagtcgatatgaagtccaatggtcaatccaagcatgaagagaaagatgacagcaaggtggaacaagaggaactgaaaactgagctcagcttgcaagagagcaagaaagttagcttcgacaaggacacatggacaaaaaacaaaaaacaagaaactgaatcgcccaatgatgagttaggctcgaagaaggttagcagcagcaccgagaacgcaagcagggccattataccagaggatacggcgactaaagtgtcagcctctccaacgaaaccacagcatcagaa

SEQ ID NO: 288781 - DNA, 397 bp, Zea mays
gcttccggcaggatcagaatatcatcatcaatcaagcgctgaagcggcatagtgtcgatcctgaatggtggatgtgccctgccatacctgtgaaagacattaccccggcaccaccgccttcagtggcaatggccaaggtgacagacaagacgaagactaagaagaagtcactggggacaatatacgaggaggggagtccggagcctgccaatggcgatgacgatggagctttggcactgccagacacaggattggggcttagcttgaatacggagggggtgctcaaggcgtggtgtggcagaggctctgcgtttgctgatggcaatgggcctgacttcccattgtcccctgctcatgtggtagttaaacatgaagacaatgatctcttcccaaagaa

SEQ ID NO: 288782 - DNA, 253 bp, Zea mays
gtcagcgacgaggtgagctcgtcgaccttggctccctttgtgagcctggcgctccatcctatcgctgtctctccgcacaccatgggcatctgcgcgtggttccggcaggagcagcgtgaaccgtccccgtatggcctggcttttcaacaaacattcccaacgatctgggaacacgctgacgacgtaaacgccttactgaacaaaggcatggtcgcggacagccgcttcctgatgccaattatgctcagggagt

SEQ ID NO: 288783 - DNA, 373 bp, Zea mays
cggcacgctccacctgccctcccatggatccgcccctggccggccactacctcaactacaacacgctctagcggcatccagcaggagctggctgcggatcccgcaaacggtgccaagaccgtgcgcaagccggtcttcaccaccgtcaaccagttgcgcccccagatgcatggccacactcctgccgtccgcgtcgtctccgcccgcaccatcctcgacacatcttccatgcacattggtcgcacccgcaccgccaagtgcctcgtcggatacaacaccggcaccgtcctcatcacacccgcaacaattaggatacactcacggtgtgctggtgtgtatgtgtggaggaagagctgacggaggctggggagag

SEQ ID NO: 288784 - DNA, 444 bp, Zea mays
  unsure (1)..(444): unsure at all n locations
acagaatatgacatgatccagaactacaaggttcttcaggatgtgttcaacaagctgcggataggcaagaatattgaggtcaacaagcttgttaaaggacggccattggacaacttggagttccttcagtggttgaaaagatattgtgattctgtgaatggtggaattatgaacgaaaattacaaccctgtagaaaggaggtcaaagggatgcaaagaacgtgtctcaaagggttccaataagccatctaaatcattgcaagccaataggctttctggtgctgatccaacagatggaggccatggagttgggaaagtatgtaacactttttctgaagagcattacatagaacagattcagaagttgtctgaanagattgcagacctgaacatttctgtcgatagtactgaagaagacagagacttctacttctcgaagttgcgt

SEQ ID NO: 288785 - DNA, 322 bp, Zea mays
catgtactagctaattaattaagcaaccgagctctcctacccagttcagcgaactcaccgacgccgacgacgatgaccctgacggccttgggtcttggactagcactcctcgctgcggccagcccgtgcttggggttggggagcagcggcagcgacagcgacggcgcgtccgtgcctagcgtcgtcaccgaggcgttcttcgacggcatcaggtcccacgcacgggacggatgcgagggcaagaatttctacacgcggagccgttcgtgagcagcgccgggctgtcccgggcttcgcgcacggcggcacggaggcggagggc

SEQ ID NO: 288786 - DNA, 252 bp, Zea mays
atggaggcgacagctttgcgctcacacccatcgacctctttgttggcactgcagggttcctagcaaacaaggttgctgttcttcttgcagcgttcatgcctatgctaagtgactcaaagagtgaagatggatctggtgacagcagttaattggacttctttaaaaatatgttagtaatagtttcctatagaagatctgtattcaagactggaacggaattagctgaagtgcaaaggacaagtcctagtttct

SEQ ID NO: 288787 - DNA, 343 bp, Zea mays
aattcccggtccgtgccacgtgtgcagtgagctaccatgtccacgatgggcttcttccaggacacccgcgtcgtcggtggtggcagcagccggacggccaggtttctccagtaccagaggctggagtgctgggaggacgccggagtcgctcccagtcccaggtcccggtggcggtggccgtggctgccgacggagaatggtaagatggctcccccctgtttgttcaatgtcaagaggctgaagtggagcaagatcacctcggctctgatactaccaaggaaggttgctgagctctccgcaaagatccgtcacgccagcgccaggaccgaggccgccgccacca

SEQ ID NO: 288788 - DNA, 339 bp, Zea mays
cacaagactattctatgttatttcttaagatattcattaggaattgtaggttgtatgtgcagcttggatttccttaatgaagcttcagtgcggatgctcataggaagcagcagaaggataagcaagaaaagtcagagacggaggatgcggcacccaaaaacatggcagcctctagcaaccaggatcagaggcaaaccttgaagttcggattctctaaaatggctccttccaaggttctagttggtagtgccagcaagaagccaaaggttgccacgaaagtttcttctgtctttggcaacgagagtgatgaggactcgtgacctttgccagagggtggca

SEQ ID NO: 288789 - DNA, 267 bp, Zea mays
tctttctttttttttttcttctttttttttttttttttttttttagcttgttttttttttttttttttttttttttttttttaaaaaataaaaattatgttcaaatactacgcgtgaaaatggtatgttcaccttgttacaattgtattaaagtttgtatatacacatgcattcagctcgcgcattctgtatgcttatttgaattcagacatcacggcactcccacaaaccattcagttgtaacaaggtgaaaatggtatgttcacc

SEQ ID NO: 288790 - DNA, 335 bp, Zea mays
acgatggcaatgatgtgaagaggaaaaaacagcctgtggaattgacaaattgtggcacctctttagttgccaataaaatgaagcagagtaagactgggcaaacgatcaaatcatctggttatgctggtgcattaaccccaaaggagaacacaccaagagaaggaaaagaggttgaaaattcttttgttgagggtggtttgtcctcaaaactaaaaccaaagatggcactcgatgtaaatgagactgttctagttaaaaagataagtgttccaggataggatggacctaaggataagaaacagggtgcaagaggggatagtcttgtttgtggagct

SEQ ID NO: 288791 - DNA, 256 bp, Zea mays
ggaccgtggcggacgcgtgggcgcaccgtcgagttccgcgcgtcccaagcttctccaccgtggcggctgctcctccctgcgtccatctcccatggcgccttggagtcccagctcggcctccttcctgcagccggtcgtggttgcccctcctgcagctcgccgggcacgctcgccagcttccaaacacgatctcatcatcgtgtcatgcgtcagcaagacatcccaagtgttgggtgaagacggagccagcagcgtg

SEQ ID NO: 288792 - DNA, 306 bp, Zea mays
ttgtcatctaccagttcgtcaactgcgtgcgacaactgataatataatagattcttcgctcctgcatatatatatatatatagcagcatcgatctctcgtctatccgatccgcacgtatattatatactcatacgagtatatattaattcttccgagaattatatggatgtggtcccacacataccaagccaataaaactgtatttgtccagtgaaataaactgaattacccaaatactcgactatactcgtgtctcgtcatgtctcacgaaatacaaaatacgtaagggtatatatactattgtg

SEQ ID NO: 288793 - DNA, 293 bp, Zea mays
cattgatgcttttctatatgtgccagtgtggattttatatctatagcatcggtgctcttgttgcttgggaaacccgcagaaaagattttgctgtaatgatgtctcatcatgtaataacatctactctaattggagtttcatatctgactggatttttccgaattgggaccatcattctcgctcttcatgatgcaagtgatgtgtttcttgagactgccaaattgtgcaaatacacagaaaaagagctgggtgctagcttgttttttggtctcttcgctatctcctggcttcta

SEQ ID NO: 288794 - DNA, 253 bp, Zea mays
gagagaacgcccccgggatcgccccggaggttgcaggtgaaggcggccatatgggtcgtcaccaccgccctgacggtcatgttctccggcagagttgctccgttgatgcctgcgcccgtggccgccgtcgtctggtccatggccgcggtgacgatccttgcgggcttctacatgttctttcgtatgcccggacgccgccgaagagaggccgaccagcaaagttgttgccgaagcccgtagatagtttgtgtgt

SEQ ID NO: 288795 - DNA, 278 bp, Zea mays
gtgtttgaccacggcagcaagcgcctcgccctcgcgctcaagaaggaatttgatacggcatatggtccagcttggcattgcattgttggaacaagctttggttcctatgtcactcactctctgggcggtttcttgtacttctccgtcgacaaggcctatattctcctcttcagaaccgctctcgagccattagcccatccgcgatgaggggccatgaaacagtctactagctagcgcattctgtattcgacatttaactgtagaagggtaaggagagt

SEQ ID NO: 288796 - DNA, 316 bp, Zea mays
caacgcgatcggtgtctacacggcgccgaaacccgaaccaaaagcagttgggaaacaagctggtggtgatgaggccgtcgtcgccaggattgggccttggggcggggttggaaatgctctccatgacatcgcagagaggccgcatcgcctgcacagagtgacgatcttcagcgggacgatcgtaaactcgctggagtatctgtacagcgatggcgacgggcagcagcacaccaccggtccgtggggcggctgcggaggaactggtcgaaagattcatcttgcccctgaagagttcatagtggaagttactgggaca

SEQ ID NO: 288797 - DNA, 332 bp, Zea mays
gcaatgacgggtgaagtaacattaactggaagaatcctcccaatttgcggggtgaaagagaagacgattgcggcaaggagaagtgcgataaagacgctcatatttccggcagcgaataaaagggactttgacgagcttgcttctaatgtgaaggaaggcctcgaagttcattttgttgacacatacagtgaaatatatgatttggctttccagagtgacgccgggactgagacgagctgagatgatttagctttatgggattgagattttttccccctagacccacgacagaaacaagtccgtcaagaggcaggcataccagaccattgtaa

SEQ ID NO: 288798 - DNA, 375 bp, Zea mays
tgctctatcattacccattcaatgtacgacctcactatgcattgattgtgctatcgctcaccgtactggtaggtttatggctctatgctgaccctgattttagggtgcttgctgcatcatatccttactttgcgaaaaggctactgactgatcccaatccatacctcagagacgctttagttgagcttctattcaaggatggaagattcagatggaataggcttgaaaatcttcttgttcaagggcgccaagatagagagtttgcagccaaagatgcattacagcctgttctaaagcttctcctgggtcctgatggggaggaattgcgtgtgttggttgtgaaagaggcagttcgtgtaacagaagccatcacta

SEQ ID NO: 288799 - DNA, 368 bp, Zea mays
agctggattaggcacttcacagtcacgtatggttttcgccggctggcattcacctgatcaccctcttgacccggtgctgcgcaactaaggatctgagctgcaggagaaaagctcatacagaaggcttctttttgactgcgtgaatgttgctctaattgagatcggtgagaacgccttactgagcgccctcccatggagtaaaaggagctccagtacatggaggggctcctcatctcctgatctgggggtggaggtctggagtattctcaaggactggatacacggggcacggatgtttgtggtgagcaagagagataatgctgggatcatactggacagaattgtgaagcaggaggtcgaagcaagag

SEQ ID NO: 288800 - DNA, 316 bp, Zea mays
tgcatcggttgtgtcgagttgctggtcttagtttattcctttagagttttgagttctaccacgttttggtcaccacgagatccaccatcaccataaacttctctggttcgtttttgccgccacggatacatctcatgtccgatttggaagtttaaatacaatctggaaagcttatcttatcttctttccaacggatctgaccttgtctcaaaattcattctgagcgctccgcaatcatcgtagaaatttctggactttctatattaacaagatttgttaaatctgatttaaaggggttgttagcaatatccttatt

SEQ ID NO: 288801 - DNA, 274 bp, Zea mays
gtggcgtttctggaccagcagcggaccatactgaccgtcggcaacagccacctcaagcagcggatcgcagctcttgcccaggacaagattttcaaggacgctcatcaagaggcgctgaagaaggagatcgagaggctgcgccaggtctacgagcagcagaacctcaagatgtcagccggcgctgctgcctctgaccatgggcctccaccggtgcgcgcggagaaagagctcatgagctagctagccagtccacgcgtgcccgcccgcccgcccg

SEQ ID NO: 288802 - DNA, 380 bp, Zea mays
ggaatctgatgctggagttaaccgaaacattcgggcaaaccaagccaaagtggagctcatctccgttttccttattccaggatggtataattcataacatatcttgagtcgcctgtttttccatgatggggtagactttagaacacatactgtgtcgcctggtgaaaggaaattacgtctgctgaaaaatctctcttgccaaatatagtttttcttctgtattctagtgttgtattctagtgtggtagacagcgactctacactgactactgagggtgtgtttggtttggttttgacttttgctctctaaaaacgaaaagcaaacggcccgagccagaaagcagcttttttcaaaagcatgctttcttgcaatgcaaatt

SEQ ID NO: 288803 - DNA, 449 bp, Zea mays
cttctgggacatacacaaggtgtaactgctgttacctggcctgaacggaaaacgatatattcagcatcttgggatcattctgtgaggcagtgggatgttcaaacagtgaaagaaacatggaatatgttttgtgggaaggccttgaattgcttggactgtggaggtgagggttcttcattgattgctgctggtggctctgatcccgtgttgagggtatgggaccctcgcaaaccgggaacattagcgcctgtttttcagttctcctctcattcaagctggatcactgcttgtaaatggcatccgagttcttgtttccatttggtgtcttcttcctttgacgggaaagtgatgttgtgggatctaaggacagcatggccgctggcgtctgtggactcgcctccagataaggttttatgtgcggactggtggaaaggggacagtgtgataag

SEQ ID NO: 288804 - DNA, 310 bp, Zea mays
cggctcgagggctgggtagattaaaaatacgtatgaatacatactaacacgtcgccacatcggtgctgcgacactctggtaagaagaggacagcatgcaatggctccaagaacagcatcccccccaagcgcgtccggctgtccagaggagaggaggaagaagattggagtagctagcagctagggtgctccggtctttgtttgtttgctgcacgtgtaattgtgtatgcaggatcttctatcaaggtcgatccgattagatgcaggcaaaaaaaaaagagctgggatccagtcgacaagaaatatggagg

SEQ ID NO: 288805 - DNA, 396 bp, Zea mays
  unsure (1)..(396): unsure at all n locations
tacggncccccgcacacgtgatggcgcgggtgttctcgcagctcgactgcgtcgacctccttagctgctccctcgtctgcaagcaatggtaccatgactacgcggagctgagagaggactggaggatggagtacctggacgcttggaaccagttcgggttgtcggtgacgcgcgagccgcagccgctgtgcgctatcttgcgcgatcaggagcctgcgtacctgtgcccttgaccttggcttggcaccttgctgctctctgcatccatgcgcctgtaattttgatcaggcaggttgttggtgcgctcatgagctgcttgtgtcgagctcgtcgttgtgtaattgcaatttgtagctacattggtgcatacttgtgggtgtccagttgcaagtgtaa

SEQ ID NO: 288806 - DNA, 297 bp, Zea mays
agcaaacttaacacattttgtccaactggaagatcgtttgctgcagcgaccactgatggtgttttattgtactcagttgatgaatcatttatttttgatccaacggacctcgacatcgacgttacgcctgagaaagtagaggaagctcttgcagaaaaccaacaacaaagagcccttatacttagccttcggttaaatgaggatttattgattaagaagtgcatattcgcagttgatccagccgatgtgagagcaatttgttcggcaattccttacaagtatctccaaagattgatt

SEQ ID NO: 288807 - DNA, 453 bp, Zea mays
gtattttgagcttgaggacaatggtggattaagccttgctttacaggaagatagtgcaaaaactggaaaagttacttctgcgggcatgttctttctaggctttcctgtgtatcgatttgaacaaaacaattcagctgctgctgcgaaggatcctgacagtgctttctttaaaagattggatggctttcaaccttgtgaagtaaatgaactgaaagcaggaagccattattttgctgtatatggtgacaatttctttaaaagtgcaagctatactattgaggttgtatctggtgaacccttctctgctcaaaaagagaagctacgaagtgtggaggcaaagataattgcaaaacgatctgagctgtctaaatttgagtctgagtatcgcgaggttttggcaaagttcactgagatgactagcagatatgctcaagaaatgcaaacgattgatga

SEQ ID NO: 288808 - DNA, 555 bp, Zea mays
ctgtaaatagctaatgtggatagggagacaacatggcataagcatatcattttgttggtactttctactaacttgttaaccaggtcctgattttggttcccaaccatcgttgtcaaggcggaaattgacatctatactgcatgagagtgggaaaaaatgctcccttattgatgacatgtctattctagatcgatattcagatacttcttgcaattcaattgctgtcttttctgatgatgatgccctctccagatcaatgaaggaggtgaagaacgacaaagtggctttcatttggacccagttctcaggattgatctcttacttccgccgaagagctgaagatcccgaaaagttgaaatcatgtgtcgcagaggctattgcattaaaaacatgtgatacaaaaactgcttcaaaaaaagcaaaaagtcaaatttgtcctgaattaaaggaaattttgtgtgaattggataaaaagataaagcagttatatggtgccctacttgacaattctatgcttattgtatgcaccggccatggtgatactcctctagtacg

SEQ ID NO: 288809 - DNA, 254 bp, Zea mays
cagcacacctggtgattatgttcgcgcccggatcttggtgcccctgaaatctgggtgtgacattgataactagtgcccgtgagcctgtctgtctcgcacactaatttaacaatgtcatgttacttgctgcaccacccgttcggccacaatctatcgctaatcgctactggctggcgcctggcggtctagcccgttggacgcaactgccagtcgagatttgtcgagcagcgggcgcaagacgccctgattctgat

SEQ ID NO: 288810 - DNA, 348 bp, Zea mays
agtacattcaaatcggacaaactaccgctagggactgtctcatccgtttctgccatgcaatcatctcatgctacaaccaacgttacctccgtattcctaacagaaacgatgttgctcgcatacttcgtgtcaacgctgataggggtttcccgggcatgcttggctcaattgactgtatgcattgggaatggcgtaactgtccaactgtatggcggggtcaattttgtggccggaactcacgtccaaccatgatattagaagctgtggcgtcgtacgacctctggatttggcatgccttttttggaatgctaggaagttaacaacgacctcaacgtgctccataggtct

SEQ ID NO: 288811 - DNA, 440 bp, Zea mays
gctgcaagtactgcttttatgatctgtgccttgactgctgtgtggagatccgcagaggtgagattcctggaggagaagagataatgagagtaaagcctgaagatagaggccgagcatatctttttggtactactaactcaaaggatgggagtaaaaggttctccatgaggaggcacagctcatccctggagaatgagccttccaatgtagtaggttctagtgagggggcaaataactctctggagctgtggaaagcagaaagtgatggtagcataccttgcccaccaaaggagctaggaggctgtggcggttcgattttggatctcaagtgtttttttccagaaaagatgctttcaaatttagaagaacgagctgacagaattatgaggagcgaagtatttgcaaaagcagtagccaaaagaagtgaccagtgcccttgt

SEQ ID NO: 288812 - DNA, 354 bp, Zea mays
cccttatgtcagcatcatattcgagatcaaggagaaccaggcggcagagcattttcatgttcctctcttgcattcccctttctcgttcaccacttaccgtggaagctaagttttcaacttacgtgccattacctctgttgggatgttcgaagcaacttgtaaacttgacacttccgttgtgataataatctggttccatgtaagcaggctttatactttaataacaagtagtattatggaagtcaaatcttgtgatagtcttgctgatttgttcactaaattcttagcagcaaccatattcaaaaaaaaaaaaaaggggggcccccgaataaggaccctggccacccgggaatt

SEQ ID NO: 288813 - DNA, 354 bp, Zea mays
aaaagaacagtacaccatacaagataacaaataaagtgaatatgcatcaagtatgacattcgataacgcatttgttatggttagaaagaaacgggaaaggtctcgcagggggttaaatcttatgcactaatgacacaattggtttttaacaaaataattctgttatatatatttatatatactaatggaaacctaatcacttttagttgatcaacattgcacagggtaaacaattaactacgtgaatcaatagcataacggaattttaaattaaacttcctattttcccatagcatgaacagtgattagcctacttaaaatacagtaattatgatcacagagagtgaataaaat

SEQ ID NO: 288814 - DNA, 402 bp, Zea mays
tgtttttgtgcctcgctagatagtcgtaagggcacccatcgtcatagatacgattcatagcttctgccactacttgtgcgcgaagagccaagaaatgcgtcaggggttgtgaagggaaggagtgccgatggccggtggccacccggcgccgctgcggccggtggtggttgcgatgaaaggccacccagggtctggcaagtccacggcggcgcgcgccatcgcgaccgcgctttgctgtccgctcctggacaaggacgatgtgagggactgcatgttgcccctagagggcttggctgctgctgggctgctcaacgacctctcctacgccgtgctgtggcggatggccgagcgccaggtaaggctcggactgtctgtcgtcatcgattcaccgctgtcacgccg

SEQ ID NO: 288815 - DNA, 255 bp, Zea mays
gtggggtccgggcgtcaccatagctggtggggtccgccagtcagtttgagttttggtgcgtgaagacagtgttggtagcccatcggcgcgtagagcgccatacaaatacaatctgccgtacagttaccttgcagttgtaaaatacctgcgtgaaaaagagcaaaaaaattctgagtccaggttatccctccacatgttcatgtactcggaccggaaaaaatgtaatcactttgaaacccgattgttctgatatat

SEQ ID NO: 288816 - DNA, 244 bp, Zea mays
agagaaactaaaacttgcatcgatcgctcgctcgtcagttctttctgatcatcggtcgcctctctagctagtagctagctacctacctgatcggccatggctgaggagaagaagcaccaccacctgttccaccgccacaaggacggcggcgaggaggaggcgagcgccggcggcgaggtggactacgacaacctggagaagcaccacaagcacctggggcagctcggcgggctcggcgccatag

SEQ ID NO: 288817 - DNA, 286 bp, Zea mays
gggacggttcttccggcggctcattgacgaggagcggcggaggctggacgacggcgtcgagagcgagaacaaaagtatgatggctgtgctgctcactctgcagaagtcagaaccggagaattacagtgatgacatgatcatgtctctgtgcttctccatgttctctgcgggaacggaaaccactgcgaccacggcggaatgggcgatgtcgctgctcctgaacaaccccgacgtcctgaagaaggcgcagggggaaatcgacgcgcatgtggggaattcccgcctg

SEQ ID NO: 288818 - DNA, 295 bp, Zea mays
ggacatgttgcaaaagtctgcattgtcctttcccctctgcttcttgcagccttagtggcagtttctcgagttgatgactattggcatcattggcaagacgtatgtactggcggattacttgggttcacggttgcttccatttgctacctgcagtttttttccactaccatctgatgaaaatggactgtggccgcacgcatatttccgacacattcttgagccagagggtgacagccaagcgcaacccacgtacatgagccgtcgcagctcggttcagaacggttcctttcagtac

SEQ ID NO: 288819 - DNA, 261 bp, Zea mays
tccagaaagagcttcagaaagttgttgaatggcccatcaagcatgctgctgcattttctagacttggaataccaccagtccggggggtgctgttgcatggcccaccagggtgctccaagactactcttgccaaggctgccgcgcatgctgcccaagcttctttcttttctttgaggttcatcaggaaacaacattttattttacgataataacagttcactttccgttgtgtgaagaacatagaacttttagcccacagta

SEQ ID NO: 288820 - DNA, 259 bp, Zea mays
gtcatctctccgtgcaaaatgtgaagcgggttgtttcacaggcagatggttatcagcctcatttaattgctcctgagcaagggtaccgtcggctgattgaatcttctctcaattattttagaggaccagcggaagcctctgtagatgctgtgcattctgttttgaaagagctggtgaggatatccattggggagacacaggagttaaaacgatttccatctctacaaacggagctagctgctgcatgctataaggccct

SEQ ID NO: 288821 - DNA, 542 bp, Zea mays
agacggcgaggacgatggtggggagtggtcgccgacgccgaggctcgcgaggggccaccgtttctagctagctatgctatgctagccatagccagcggggactggtttctagcgcgcacagggagctacgtacgtgtcttttattttgtgacgctgatccatcggtcagcctgtgctgattgacgcgaccgctacctagctagcttcgttcgtggtgtgtcctctcgtgacccacgagagtggagtagaataatcatgcattgttgtatgcaacgtgcttagcagcttcgtggttcgtgcgtgtgccctctcgtgacacacgcgttgagtaaaaataacgtggatggatcagcctactgctcctagccaggctgctagctagctagcagctgggagtagctgcgtgcccttgctgatctcgtgtctctgtcagacctgttgtaaaatctagttgtactgtgttgtaaattgtaatctaatctagttgtactgtgtgctatcctgatcggatcaggctcctctgaataaataataaagtgggt

SEQ ID NO: 288822 - DNA, 301 bp, Zea mays
gtcgccaacaggctcatcgcttgcagcgtgctcgagggatctcactctcacgccgccgacgcgcccacgctgtcgaattcatcggccacaacggaggattggcttcacaggatcggctgcgtctagcagctagcattttgtgtctagagtctagactggacgaccagagtcgagagacatttcagtcgggccacggccatattttagttctttatttaaggaaacagtatattttcattcaattgtctgatgatgtagtaaaactagtaacacgtataggggtggtcacaaatcaggatcc

SEQ ID NO: 288823 - DNA, 561 bp, Zea mays
aacttgtcaatataatggttttgacttgggacttcccgaacctacgaagtacaatggagagttccatgtcaaagtagaagttaacataaacggcaagatgataagctgtactgcagcaaaccggaattcaaaagatgctagaaaagtagctgcacaagaaacactttcgaaactgaagaattatgggtacaagcataaaagaaagtcgctggaggaaattttgcgttctaccacgaaaaaagaatcggaactgataggctatgatgaagaaccaatcaatgttgaggatgacattgacatgcaaatgaataatctactgataaatggagaaagaacctccattcagagtacagcgggagataacaaggttgactggaatgatgctaatagtggaaggaataataagtccaatgtggtcatgcagaatggttgcctacctagaggggcaactgataaaataaaccaaaaagaatatcatggtgatatggtccgcaaaacagcaaggtcattcctttatgaattatgtgctgcaaactattggaaacctcctgaatttgagtt

SEQ ID NO: 288824 - DNA, 264 bp, Zea mays
caactgtgtggcaatattacagcggagttcaatgattgctcaaaacaagtccttgaaataatttccctgctctcaatgccagaatttagtcgcagcgatcttgccgatttactgaagggtgttcaagcacatgagaaagagaagttgcatttgacagctaagattcaggtgctgaagaaagccggcaggccttcagagcgcctggtgaaccacgcagactgcaggtcgcgcacatcggcccagcacgtgtgcgtgcacgtcaag

SEQ ID NO: 288825 - DNA, 307 bp, Zea mays
cggctgaggagcggtgcctctgcggaaggttctgcaaaggggaacccactctgcatcggtgtaggctttgaagatgttggcaccatcgtggctggtctctttggaggcgctgatctgggcatgacacccacctagacctggtggtactacctgcgacctagtcgtacttcaagaaatcaagagcacaacttgtaatcacagatgttgcattgaacaaatgtatagtgcagctacggccttgctagtgctaagtttatgtactctatgtctatatagaacacgtatggtaatcttgtttctggtatgt

SEQ ID NO: 288826 - DNA, 264 bp, Zea mays
gcggcctgctatttggattgtcctgtacacataggagtcctatgtggatacaccttaaagcttcatttggtaaacaactcttgacaagggatgagtccactaaattcattgcctttccttcattccataagctccatgcctgaaccaatggaatcaatttcatagaacattaataagtacctttttgctgcattgcaaaaaaaaaaaaatgccaccattcttacataagctaatagatttgggaaatccgtgatgtggtttaat

SEQ ID NO: 288827 - DNA, 265 bp, Zea mays
ccgaatcccaagctttctcctctccgtgcaggtgcagcagccagctcgcgcgtctctacaggaaacagagagcatccgagtcccaaagctcgcagctttgccagcaaagcaagaagacagttgcggcatggagctggagcttgggctggcgccgccgagcgcgcgccgtcccacccccatgacgatcgaccagcagcagcagcagcagcaacgccacctcgccgaggacgagctgagcagcacctcgtcggaccatcacccttgc

SEQ ID NO: 288828 - DNA, 610 bp, Zea mays
gttaaacctaactgcctctcctctctcccagtctctcgccgctcgcctctcagccgccgcgtgcctcccagtctcccgccctcgcctctctcttcctctcctctctccctgcgcgccgccgccgtgcctcgccttgcccagagactaaggcgccaggacagtataaatttagttcacctggttgtggacttctcgctttttggattcaacattttctgcttctctgctctggaatacagaagtgccattgtgggctcaagaggataatgtacgggaggcgtgcatcgcaactgctgaaggagatcgactcctctgaggctggccagctcgtgccattcaacagtgacgtgtttgatcaagtgattagagagtgcaatgagcacaactcacaatttcaatcgttgatcaggaaaatggtggagcaaaacttagatatcgagacaactagaaatgaagatcactatggtgcagctatccaccatctttccctgctccgtaacaaaagatgccttatggcttacatgtacaaccgagcagaagttatccagagttttagatggaaaattggccctgtgcttcctcatgacatacaagaaaagctccatttctc

SEQ ID NO: 288829 - DNA, 281 bp, Zea mays
cggacgtacctggtggccgccgtgatgtctagcctcggagtcacgtccatggccgtcgccgccgtgtactatcgcttcagctggcaaatggagggcggcgaggtgccggtgatcgagacgctgggcacgttcgcgctctccgtcggggcggcggtcgggatggagttctgggcgcggtgggcgcaccgggcgctgtggcacgcctccctgtggcacacgcacgagtcgcaccaccggccgcgcgaaggccccttcgagctcaacgacgtgttcgccatcgt

SEQ ID NO: 288830 - DNA, 247 bp, Zea mays
ggaagacggcacggagtggatagtggaccagcttccggccgtgggacgcgtacacgtcggacacgtccatcgacatagggaagcaccacgcgccgacgacgctgcccgacaaggcggcgtacctgatcgtcaagtcgctgcgcgtgcccatggacctcttcttccagcgccggcacgccagccacgcgctgctgctcgagacggtggcggccgtgccgggcatggtgggcggcatgctcctccacct

SEQ ID NO: 288831 - DNA, 248 bp, Zea mays
gatgctcttctttcacatttgctcacccattgatcatgttacttctgaatgctgaatttaaataaattgaactgatttgttttgaatctggaccatggaatttgagttagaggccagtgcatggtagggcccttaaatattttcttttcaggtgtcagaacggcaatttgtaggttagctcaaagtgttctctagtcgagaaatggaaaagcagaaaatgagtaagccttaaagttttaaccattaat

SEQ ID NO: 288832 - DNA, 399 bp, Zea mays
atcaatccgagctcggatggatctgcgttgcacgcgggtacagcaccgccagcgaggatgacgacgacggcagcgagatggtttctgggcgatagcgcgaggccgcggcggtgcttcgggcgaggaacgcggtggcggggagcaggacgcggcggcacggcaaccggtggcgttatttgggcatggctccatggatctagcaaccagcgagccggacagccctcacctccctgtggcactgcgccctgcttcctgcctccctccacggtccgtcgcgagcccatgctgttcgcccctcgccggcggctcggctcctccacagcggtcgacatcgtcaccaactattttattgtcccatcgcttcggtgatttgtttacattcaagtgctgatgtttatg

SEQ ID NO: 288833 - DNA, 314 bp, Zea mays
ggcgaagtatctcctccagcagaggaagacggtagctatgaaaggcagagaactttagaagaacctgatcgcagccctgatcggtaccatcaccactggcatcacagggatgatacatatgagagcagacacttgcgccacagggatcatcgcaagcgtagacgaagccaagaaccgggcgaagtatctccaccagaggaagactgtagccatgaaagggagagaacttcagacgaacctggtcgcagccctgatcggtaccatcaccactggcatcaaagggatggtacatatgagagcagacactcacgcca

SEQ ID NO: 288834 - DNA, 448 bp, Zea mays
  unsure (1)..(448): unsure at all n locations
cagagctctagtagaaatcagagatccagaggtctgaagctgaagacagctcttcagattagtctcttgcttctggtttctgtctggttgctctaccaagttaagcattcttacgagaagaaggcggcgtacagcgaaggtgaagtgaatgatttgcataaagatgacaagggccagggagaggcagtcagattgggcaggaaggatgtgcctccaaagatggaggctgattcttcaacactggatgagcgggttgaggatgaagagaacgatgaagtggagcaagaaatgaagcatgatgagaacgatgaggatcccatcgatgagcaagacctggagaaggacgaggatcttcccgagcctggtgagcattcttctgaaaaggatgaagatgtgggttgttagnnncncnaagagcggaaggagcggtcacaggaggatcaagaga

SEQ ID NO: 288835 - DNA, 277 bp, Zea mays
gtcctttacgtgggttttgtggtgacgggactgtcccattacctccaagcatggtgcatggagctgaaaggccccgtgttcctggcgatgacgaacccgctctgcttcgtcttcaccatattcagctcctccttcttcctgggagagatcgtgcacctcggcagcatcttgggtggagctctgcttgtggccggcctgtacagcgtgcactggggtaagctcaaggaagacaggaggtctgaggcggcggaacaggagaagaccaagccgcaggaag

SEQ ID NO: 288836 - DNA, 265 bp, Zea mays
accgcaccgtctcggacgcggctgcagctccgagcattggattccgaccaactgaccgagcggcgtgtcagatgatctcgccggcgatgtgtcgttcggcgccgcggcgggccgcgcaggtccggcgcctcctgtcgtcggccgcgcccccggcgcacgccggcgctgccgtgcctgggccctgcatcgtgcacaagcgcggcaacgacatcctccacgatccgtggtacaacaaggatacggcgttccccatgacggagcgcga

SEQ ID NO: 288837 - DNA, 219 bp, Zea mays
caggatctgttctataggatcgtaccgttgcatccttgattaataaaaggaggcaagcactttagcctggttgatgaggcatgacctgtgggccagagcgtgattaaacggccaggagttcagctctactgcttgctctggttgctgtagaggatcgttccttgctcaggcctgcctggctggggtggccttccgggttgtctgacaggctcccttttt

SEQ ID NO: 288838 - DNA, 397 bp, Zea mays
  unsure (1)..(397): unsure at all n locations
agcgacggcgtgatcacagccggtggggcgagctcaaggcagcggctgcaagggcggcttcgaccctgtctacaggggcgccgccacggagggcgccaagccttggactcaagccataggaggtcgtgaggtcgccgacgctcagggctgcacaacagatctcttgtttctcccttctttgattctcccttgtttctaaggtttcgattcttccttctcttgttctccccagcagtctggctatggcggcatccatccattctctaatagaagccaagcaaactgctgcgtgctccggcaactctggtggcgagtgacgacttcaataggctggtggtggtgacagtcatgtcccatccttatccatagcaacaggcaggcanagtcattttgaaag

SEQ ID NO: 288839 - DNA, 457 bp, Zea mays
cccacgcgtccgagaattaagagataactgccagacaatcacctctcctgttgtcctaaaaacaaagtctggaagtattgaatcaaaaaatccgaaagtttttgattcatgggagtggattgaacgagaatatgtgcttgttccggaaaactgtacttctatggaaatgtcttcactcaacatcaagtccacaaaggatgatatggatacaagaacggtcagctatggtaggtccactggcaaagggtctgttcagaaccaaatcagagactttactgacacagctactggtgtacaaagccatggatgtgctcctgtggtcatttcacaggagtcagccactgtggattgtagacgagggaaaccacctgattatattacaagacttcattctctgaatcatatgttcttgttcttacggatcttgctcgaggaaagctatctacagcctgtactg

SEQ ID NO: 288840 - DNA, 418 bp, Zea mays
  unsure (1)..(418): unsure at all n locations
aagtctacgccgtctcgcgccgcccgctcccgccctggatcccggcgncctccccggccgtcacccagctccacctcgacctcgccgactccgccgccgtcgccgaggctctccagcccctcaccgacatcacccacgtcttcttcgtcgcctggaccagcagccccaccgaggcggagaaccgggaggccaactccgccatgctcagtaacgtcctctccgtcgtcgtcccgaactgccccgcgctcgtccacgtctgcctccagaccggccgcaagcactacgtcggccccttcgaggccatcggcaaggtcgccgccccggacccgcccttcaccgaggacatgccgcgcctcgactgccccaacttctactacgacatggaggacatcctcttccacgaggtctcccgccgaga

SEQ ID NO: 288841 - DNA, 284 bp, Zea mays
acacaaagctcttgagctccaaatctagcagcaccactctagctatagcaagctagagctatacacacgactttgtgcaacaatcaccgacacacacagctagagctagagatggcggcgggaaagctggggcagcagctgatgacgaggctgcacctcgcgaggacccgatcgtcggcgacggcggacgtgccgcggggccacctggcggtgtacgtgggcgaggggcggaagcggctggtcatcccgacggcgtgcctcagccacccggccttcgtcacgct

SEQ ID NO: 288842 - DNA, 326 bp, Zea mays
cggcctcagcatcctccggcgacggcggcgagggttgctcggctcgcttcagcgcgtcggacttgctgctctcctcctcctcctcgtcggaaccttcgttgcccccattgaggcccaactccttggaatcttcggtacttggctgccgggcgcggcgcttggcggccatggaagcccgatcgatggtggagggaagggatttgcgattttttcagacaattcctttgaagccattataaaagatctgaattgcagacgaactactcaaaaagttgtcactacttcagtgccattagaaagcaattttttatccttaaataccactg

SEQ ID NO: 288843 - DNA, 422 bp, Zea mays
accgtgctcggctcgcccacggcactggacatccttcctccgcacaaagtacccgaaaaacgccccttaaaccaaataaaaggtaatttaacacgagaacggtcacccatttttactatggtttggtgttcgaaaaacaaacaaaaataaaaccaaaaaaaaaggaatgcaacacgaggacttcccaggaggtcacccatcctagtactactctcgcccaagcacgcttaacttcggagttctgatgggatccggtgctttagtgctggtatgatcgcatccgtcatatcctgcgtcctccttcctcttatgcccacacctccgtgctcggctcgcccacggcactggacatccttcctccgcacaaagtacccaaaaaatgcccaaaacgccctttttttgaaaaacaaacaaaaaaacaa

SEQ ID NO: 288844 - DNA, 400 bp, Zea mays
gctgatcatggttctcatccatattactatgtgccagctcagcaggtgcaaggagcaggtaagatgtatggtggccagcagggtcacccagtgacttatatgtggcagacgccgcaagggcaagcggcagagccccccgaagaggagcagcagcagtctgcctgaatgtagcaaatagacgataacagcaaagcaattacatcttgatctgaagttctgaacttaaggcctgtttggtgtggcgccgaaaccgccgcaccgcgtctaagccgcgacgctcgatttggtcgccacaactgcggcacaaaatctgtggcgcgtgtgggcgtgggcggcggtcaaccaaacatgctcttagttctctaaacaaacaaatatgatttggttatgttaattgtgc

SEQ ID NO: 288845 - DNA, 279 bp, Zea mays
tgtgtgtgcaaactcctgtacggcgtctcacgcctcacccaactcgctcccttccccgtgcttcccgccgtcgtggagaggtcacgcggctggttcccgccgcttccggacgggttccgagggaggaggatcagctgccgcgatgttcctcaggatctctcgtctcggggcgcggcttctgcgcgagtctggagcggagacgagagctggaaatttgctaagcagtccaggcattttgtatcaagctcatcttaaccagcattcgaccagagtgcggaa

SEQ ID NO: 288846 - DNA, 408 bp, Zea mays
acggaaaaggattcctctcccccacctgacgcctcgccgctacgcccgcatttcccaatccatcctcgtcgccaggtgctcatctcgcgtcgacatttacccggtccgatccccggcacgaaaaataaagaagctagtgggtacagacacaagacaatattatattgggactcaattagtttgatgtttggcaaagatcatgcaaccggtgaagtcgcaaagaccctagctgatggcgcgagagacatgagtaaggaagaggtgatgcgcgcaagtacgattccttgttggcacttctggtgatccttaggaagagatggctgctgaagcaactgaaaaagtgaaccgagttgtggtttggtgaattgaactactgttggatgtgttgccgagtgaaaaattgttggt

SEQ ID NO: 288847 - DNA, 319 bp, Zea mays
cctgaggctgcatctgctataccagaaacagacctgccagaatttgtacaggtgataagatcatgtcgagatggtatccacaaggtggtggaattactgcagcacaagtttccaaatgttccaaagactcaactgaatcgtaaagtgagggagatatctgacttcattgacaatcattggaaggtaaagaaagagattcttgacaagctagggttggattcgtcaccagtgaaacccaagaagaataaaagcatagccatgtacttctcgaagagatgtttacctccggaagaggctgtcaatgctctggctgcttctc

SEQ ID NO: 288848 - DNA, 319 bp, Zea mays
ccacgccgcaccgtcctttccagaaccctctggtctccgcgtgcggcggcgcgatttctttgcttctcccttcgacttcgagagattgttgattattctagagccagatccgggtaacagattcgaggttgcgcccgccctgttcggcttcagatatggggaacactacatctgtgcaagctgaggcttcagattcagcgcagagacctgccacaacatctcctgcacctgggtcacagccgatacagatctgctgtgcttgcccagatacgaagaagctgagggacgactgcatcgtgcagaatggcgaggctgcctg

SEQ ID NO: 288849 - DNA, 262 bp, Zea mays
ctttgtctctttcacccagtgacagcgcacagctcccaacctgctcgtgctcgacgggcgcaccatggagctctccctcgcgatgatcccgtcgccggccggctactgggaggagcacgtcgcagtcgtggaggccccggacgggaagcttggcgtattcgcgcacggtttccaccaccccgacggcaaagccaatctacactactatacgatcgtgcacgacaaggaagccgccggcgacacgaagcggtggcagctggag

SEQ ID NO: 288850 - DNA, 289 bp, Zea mays
ggctttcttcttgtacttaggctctcctcaccataagatctaagtggatgtgcagaacacttctggcaatataggcatagtggagttcggaatatagatggcgggggtaggtcttctggtgaggtcggccttacttggtagtgccgtcgtcgtcttgatatcgcatgggcgtggagagcttggtatgaaataatgcatgtaataatcaagtgaaccgatggaaataccaggtacaagtggagggctatgggaatggttgtgcttgttcactttctaaaaaaaaaggaaa

SEQ ID NO: 288851 - DNA, 276 bp, Zea mays
actaaaaccgaggttcctataaagattcatagtataggttttcgacttcgtcttcatttttaattctggattgttgcattccccacgggtctagagtagtagttagttctattatggtctatatatagttctgtctattgtacatgtgcatttcatggttggatttccagctcatttccgaaaaggtggcttaattgggttgcttctcagtttatcttcagttttaattctcggtttatatacaatatatgtgatgttatgtgcgaatactcgagt

SEQ ID NO: 288852 - DNA, 337 bp, Zea mays
attttaataaaatccagggacaatcactagcgcacggctttgttaaagcaggagggagcagaagctgtatatgcttgttgtacacatgctgtattcagccctcccgcgattgagaggctttctggaggcgtctttgaggaagttattgtgacaaactccatcctgctgccggaagacaaatgcttccctcagctgactgtgctttcgatggcgaatcttgtgggggagacaatttggcatgttcaccgcgatggctccgtcagcagcatcttccaatagcagaaacgagcgcgtacatcgtcacctcgccttgcgttcgtgtgctttgtatagagaa

SEQ ID NO: 288853 - DNA, 257 bp, Zea mays
cccacgcgtccgagaggatgtgcggtatggtagtatataaacagaagctggcaatttcagatgcgatgggactcatggagagagaatttcgtttccacattccaaactaatgcacatatacaattgtaccaaggaggccaatgccatccacaacctgagcttccccctctttacatgctatccaccacaaccagtcatgtttactgatccaggtttctcttatctgatcttatgttagacagccagcccatgagaaa

SEQ ID NO: 288854 - DNA, 233 bp, Zea mays
ccagcttctcccagccctggttcctgctcgatcttcttcctggcgcccagcagagctctctcctgctccctcccatggccggcgcttggcctcctgctcgccgcgccctgggccctattccagctcgcccagtcgagctcccttgccatggccgcgcccccagctcgtcttccccagcacgccgcgctgcagctccctgctcagctccctccctgctatctcccatggcgcgc

SEQ ID NO: 288855 - DNA, 420 bp, Zea mays
ccacgtcctcctccggctactcgctcgttccgccccggcgtcccgccctcagccgccgccgtcgccccctccctcggttcgcctcgtcgtcgtcatgggcaaggcctccaaggacaagagggacatctactaccggaaggccaaagaggaaggctggagagctcgcagcgccttcaagctcctccagatagaccaggagttcaacatcttccatggagtgaagcatgtggttgacctgtgtgctgctcccggaagttggagccaggttttgagccggaacctgtatgtaccagcaaaacagtcttctgattgcaaggaaggtgatcttcctctcatcgtcgcaattgacttgcaaccaatggccccaatagaaggtgttatacaagtgcagggcgacatcaccaatgctcggacagcaga

SEQ ID NO: 288856 - DNA, 278 bp, Zea mays
gacaactctactgaaacagcgactcatgacgatcctcagacgatgatgatgctgagcaagtcgtgctcgctcaccgacctcctcgacagcatcgactacgcggcgctctcctcgcagatgctcctcctcgacgcgccccacccccacgccgctgacccgccgccacacatggtctacccaccggcggcggcggcgacgcaccagcaagcaataatagctaataacaccaacagtaatgacgactactatgacgacgacaacttgttgccgactgctgc

SEQ ID NO: 288857 - DNA, 243 bp, Zea mays
cggacgcgtgggcgcgctggaggaggtgaaggctctcctgttgatgtcgaaaacagcgctgataaacgagagagccaggagacgacggttccgatggaagagacagaaacgagcgacggcacctcgatcacgtcgatggaggatgccctggaaccgaaccgtcatcacgatctcccgtcggagcctgaggatgtgggcaaccacactcctgatcctgatcagtccagcggcaagaactccaaa

SEQ ID NO: 288858 - DNA, 485 bp, Zea mays
ctagcttattacctgccatctggacttatattttgtagttagcaaggccgagcattccttgccccaacagtacattcacgcgttcaaagacggacaatttacgacatctccagtgtctcattctggggcttgattgtctgcacgactgccatttcttatttccttttgtttacatcagctagcttattacctgccatctggacttatattttgtagttagcaaggtaacccactgcacaacccgctgctccgcctcgagcgcatgtgctgagagtggctcggcgtcatcttcgagtcggagggggtcatcgttgaggatgatgccgaattggaaaggcaggcgtggttgaccctggcacaggaggagggcaagtcgctgcctccctcttttgtgttgcggagagtcgaagggatgaagaacgagcaggcgatttctgaggttctctgctgctctcgggatcacatcgagcttagaagtcttatca

SEQ ID NO: 288859 - DNA, 255 bp, Zea mays
ctgaaactgtctggcagctgactagtatttttcgtacagagacgaggcgtaatcaagttcccaggagctacctcaatgcgaggatgtgttttggcttttgagaatttgagcgtgtatgctgaagttgtctctaaaatctaacgcagctggtttcatctaactaaatgtgcgtcgagtgattttacaaaatttatataactgcataacgcgtactccctcctctgttggtttccagtacgcttcctttcgagcgct

SEQ ID NO: 288860 - DNA, 399 bp, Zea mays
gagctgttcagatgactggagttcacattcatcttctgctggcaacccagacataccgtatgtggttgtctccaagtcatcaattgtgactgctgtatgcaaggagattcttggctgctacaggaagttacttggcattcctgatctgttgaatcaaccaaacatgtcaattctgaagcaacttttgcagactttacagccaactgaaaattttgatgatgttctttccgagttccaaccatctcttgctccttgcaatgttgattacctgtattgtggagcatgtaaaatgttggaggatattatggattcagtgtcctcattttcataccttctgtcttctgatgtgttaattactatacaatcaatcgtaaattctgttgttgtgttgttggacaa

SEQ ID NO: 288861 - DNA, 245 bp, Zea mays
cggacgcgtgggcggacgcgtgggtcagaatcagatagtgtcgtcggagcctgcacatcaggtggattcgacatcttgggtcccttcttattttaatggctgatcttgcttgtggccttttgggtgttcttactttagaagcagaaggaagggtccttgctggttatggagagattagttgaatgttggaggtttgcttatggttcatggccatggttcattcctcgtttttcattttgatgaca

SEQ ID NO: 288862 - DNA, 473 bp, Zea mays
gttgatagagttgcgaaatggcggggaacaggcaagtcttatggtgctcaaatggtagtggatttattgatcgaattgtccttttaacataatgtgctggtacctgcagatggctggagtggctaaggcaggagatgttgtcggagaaattggggttctttgctataggccccaactattcacagttcgaacaaaatcattatgccagcttctgcgtatgaatcgcactgcctttctcagccttgttcaatccaatgttgcagatggaacaataataatgaacaaccttatgcagttactaaaacagcagaaagacaacagtgtaatggtgggtgttcttaaggagattgagaacatgctagcgcggggtcgtctggacttgccaattaccctatgttttgcggtaaataaaggagacgatttaatgttacatcaacttctgaagcgtggtttggatccaaatgaatcagata

SEQ ID NO: 288863 - DNA, 224 bp, Zea mays
cttcaccaagaaatcggctgcctacgatctatcagggaagtatgaggatatgtcacgggagcttgctcatgcttacaaagcagcgaaagtggagtgcgatggatcagtagagaatcaaggaggggacggcaaccaacaccagtcccgagagaagcaaactactaattgtactataaaggatgaacctgtcaccttggaaccacaagttttcgagacaccgtggg

SEQ ID NO: 288864 - DNA, 342 bp, Zea mays
aaaagatggtcttcgcattggagctatactgttcttttcaatcacatgcctgttcgagctggtgtgcctcctgctatacacattcgtcttcggcaaactacccatcgtgaagtactaccgtgcaaaggcagccgctgaaggcagcaagactgttgccagcgacctcgccgctgcagggatcatctctgaacaacagggacagatggaggaggatccagagaaatacaagcgtctgaccactaaagagctgctgatgcagaacatcgactacgcgctcgatatctacctgatatacgtcctaacgctgtcgatcttcccaggatttttgtctgaagacaccgg

SEQ ID NO: 288865 - DNA, 270 bp, Zea mays
gactagttctagatcgccgcaactgcccgtctgctcctgcttttcatccagtcgcaaaacaaagagaagagatctccgcgtccgcaaccgcatcgcttccctcccggcagaagaagaagattcggttgggttgtttgtctcttgcaaaccgcaatggctgctgctgccactgctactccggccgtggcgccggaggcggcgaccggaaggcggtggcaccgccggtcgacgcggtggatctggagctggagctggaggagaagcacgtgc

SEQ ID NO: 288866 - DNA, 277 bp, Zea mays
agaaaagtcaagaaaaggcagttccttgatttgtcccaagggtcaggtcattcttggtttcctgcctgttgtagtttcttggttgttctgtgagaactcagttggagtagaattggctgttgacagctatgaagttactctgatgtcatgtcagaatttcttcaaccgctatttttacctagggacaatcttgtatatcctgcgaagccatctcacatctcattgtggaaaaaagagttaactgactcagcatagtaaagccataagatatgtggtt

SEQ ID NO: 288867 - DNA, 347 bp, Zea mays
atctcctgctcggcagcctttccctgtgcttgtatttcaagccgcgcgctcctcaaattccaagctcctgctcatcttccacaaacgcgctcagctctagcccggctccccagcgccctgccgagcggccctctggtgcgcgcccagatgtttccctccggttccctgccggccgagctctccttgggagcgtcggcttcctgctctcgggtttggagcttccatggccggagctccctgctcggtccctctctgctcaccgcgcccggccagagttcctagtcgcgcgctccttctctgcgctgctctctctctttcccggcgcttcttctctgctccccgtccca

SEQ ID NO: 288868 - DNA, 212 bp, Zea mays
gtcaatggaggaatcatggcattctactttgtcttatggggtaaaggacttcttgcttgtggcccactagttgctctactggcagagtatgcaggtgctgttcttggagttctctctgctgctttatatggaaggaaagttaacatctggaaaaagattggtggacttgctgctatgttagtagcatattatctattgtcaattggatggtc

SEQ ID NO: 288869 - DNA, 235 bp, Zea mays
cagatatcaacaagaatgttgacatgattattgctaggcgaaaagagcaggagttcttcgattctagtcctgaatattctcatcttgccagcaggatgggttcagaatatcttgctaaacttctttcacagcatctagaggccgcgatcagatcacgcattccgagcataacctctctgataaacaaaactattgatgagcttgaatctgagatggatcacctcggtagacctat

SEQ ID NO: 288870 - DNA, 334 bp, Zea mays
cttagattgatggttcgacgtgtttctcaagcacatcgtgttggacgcccagtgctgacagaaggcttttgctgctccatgcattccaagcttctgccctttcgttcgcaccctcttcatgttgttggctggtagtggtcagatttagtcccattggtttagttggccctgggtccatctgaactgatgtattgttactgctatggaagtcattcctttagttttgctctggcagtggattgctgttgggtcgtgttttcagtctttattggttccgatcggacgctgttgcggcaaaccacccctgtagatactcttcacatgctgaagaaaa

SEQ ID NO: 288871 - DNA, 336 bp, Zea mays
tgctacttcaacacgggcgtcatggtgctcgacctcgcgcgctggcgccgcgcgggatacacggcgcagatcgaggagtggatggagctgcagaagcgggtgcgcatctacgagctgggctcgctgccgcccttcctgctcgtcttcgcccgcacctgcccgtccgtcgaccaccgatggaaccagcacggcctcggcggggacaactaccgcggactctgccggacctgcacgccggcgccgtcagcctgctgcactggagcggcaaggggaagccctgggaccgcctggacgccggaaggccgtgcccgctcgacgccgtctgggccaagtacg

SEQ ID NO: 288872 - DNA, 371 bp, Zea mays
ccgttgaagagctgctcaacatagatccggatatgtttcccgaagaaggatgtactgttactatatcaagcatcgtgcaaaatagcagatggtggtacccatcttgctccaggtgccacaaatcttcatctcaaacctcaactggatatcactgcacatcatgtggctgcacaaatattaaatttagatacaagctcagcttcattgctactgatggaacatgcgaacagagttcttttgttttgatagcatagccagaaaaatagtaggagaaccttggggcaaccttgttacagcagttacaacttctgagagtcccagcagccctagccgctattgtgtgtctgaaatttactcttgcagttgccatc

SEQ ID NO: 288873 - DNA, 374 bp, Zea mays
aactggcaagcctttcagctgctgctttacctaccgtgcttgctagttgtggcacagctggtgccactggattcagcaatggatatagttctatgcgagctcttctcaggcaacagttatggatgtgaagtcagttggattttgactacatggcctaattgtcaatgcgatttgcacaatctgatgaacaagatattactcccgccgtatctttttatttgtcgctggatagtgcaattttacactatccagcgacaaataaaaagaaacggaggaagtattatggagcagcagacaaagaaagtcatcgagctaaatccactcatgtagctaatggtgtggactactatctgctgctgtatagcctgcgacga

SEQ ID NO: 288874 - DNA, 224 bp, Zea mays
agaagctgaaaagagatcgatggcccagcagaaggtggtgctccggatctctaccatgaccgacgacaggacgaagcagaaggccatggaggccgttgcagacatctacggcatcgactcgatcgcggcggacgtgaaggagaacaagatgacggtgatcggcgacatggacacggtggccgtcgccaagaagctgaagaagctcggcaaggtcgacatcgtct

SEQ ID NO: 288875 - DNA, 444 bp, Zea mays
cgtcgatctctatctcggcggcgactgggcgaccgctgcctcctgttgccctggtctccattgggccctttgccagattttctttcgcctctccgccggcgacgaacaccaccaccaggaatgggcctgtggacgttgctggagggttttttgcttcttgcaaatgcgttggctatattgaatgaagaccgctttctcgctccgagggggtggagcatgtctgaagtatcaggaaatgggcaaacgaagtcgttgaagggccagatcgtggggctaatctatgctacacaatttctgaggatgcccttaatagcactcaatgttctgatcattgttgtgaaactggtgtctggctgaggctcattatctagttttcactgttgtgttggattgatatctgttccagcatgatgtaaaagttagtaatactcaaagctgctggaa

SEQ ID NO: 288876 - DNA, 477 bp, Zea mays
gaagttcaagattgctctttgccattctgctctatgtgagcaccgtgaagcacttcatgagatggaaggtattccttcaaaagtgagaacgctgaaaatgaatatgatgttagggaagctttatggaatatcaagaaatagccgtacagatgtagtctgttataaggagtgcttgaggcaatgcccttatgttttcgaagctatcacagctttggcggaaatggggctttcagcaaaggaattttctttattattttcacaagcaccaaatagaggaggcaagctatcgggtgacttcgtagacacacaacgttggtggagtcggtatgttgaggcgcagtgttgcattgcttcacatgattataaaggtggccttgacatatatctagaactaatgcaacgattccccaataatgtgcatatcttgttggaaattgctaaggttgaagccatcataggcaggattgatgacgcgat

SEQ ID NO: 288877 - DNA, 473 bp, Zea mays
cacaggtcacaatgcactaaaagtacagccacaccacacatgttgtagcagcactatcgataagtaatttatactttaggtgtttggtcatctgttttgacccttgcaatggtttgatcataataacagaaatatttacattgtctggtttacctgggcatgcagggctgagttggaaaaaatgttcatgggcctgcctgcagtttttaccggaatgctccaaggtgaggagctctcacaagcgtacgccagtgcggatgtatttgcaatgccttcagaatccgagaccctcgggcaagtagtgctggagtccatggcttctggagtcccagtcgtcgctgctcgtgctggagggatacctgatataatacccaaggacaaggagggtaaaacaagctttttgtttacaccgggagatctcgatgagtgcgtgaggaagatagagcaagtcctcagttcaaaggatctcaggg

SEQ ID NO: 288878 - DNA, 432 bp, Zea mays
aaaatgcggtggaatataatcaagatggctctggttttcctcgaccagctgaaaatgatgtgtctgctatgggagataattctggcttccatgaaaacaacatgggttctcttacggacctggatatggtgaatgactatgaactgaaggaaagcaatgattttgggagtgcaattaatggtgttgatacagattttctgaactacgacgatgatgacggcggggacttcgacgacgccaacgacgatgagccaaatcccaacgagtttcagtctctcgacaacagtggttggtcttctcgcaccaggggcgttgcaagatacctcaaggctttattcgacgacgagtctggtctggagaggaagagcgttgctatcgaccatctggtgcgcgggaagacgcggaaggaagcgtcgagaatgttcttcgaga

SEQ ID NO: 288879 - DNA, 452 bp, Zea mays
gctcacgcgtccgcgacgtgttcttcatttgaaggtgagttatgcggatacgttgtgctgctatttgcccctgtatttggggactggtgtacgacatttgatttgctggtttttgtaggcaatttgttgacatatgaatgcgtgaagcattggatcccaaagaactccaaaatgcgataaggccttgaatggactagtatcaggattgggagaccatcctgagaagctccatcaagcatgccttgttcacgcgtttcttaagaggcccttttcctgcactgttgatggttgcccctttagctatagcaggaaggatcatttgaacagacatttacttactcatgaagggaaactatttgtgtgccctgtcgaaggatgtggccgtaagttcaatatcaagggtaatatgcagagacatgttcaggatatccacaaagatgtctctccttgtg

SEQ ID NO: 288880 - DNA, 235 bp, Zea mays
ggcatgtgaaagcagatgcgaggacatatgatggggctagctcaagtgccaccgaatgggagaataagcttgattcattctggcaagatagaattcaaggtcaggatccattagagatattgaaagcgaaggagaagatcgatggagctgctactgaagtattggatccgtatgtgaggaaaataagggatgagaagtatgggtggaaatatggatgtggagccaagggctgcac

SEQ ID NO: 288881 - DNA, 284 bp, Zea mays
caggctcgtcgcctacacgggtgcctggacatggaagaagttcagatcaccgagagagtcatcggcggaattgagcttcggcgaatacaacgtcccagacggaggaggaggggagaatctgctcggatccctcaagtacagaaacgaggagctttactcggccggcaagcccatggaagaggtcttctggctgcctgtgcattcggcatggttcagaactgcagaacagctcacggtggaacttgaaagatgcaacgacaatcttcgtaacataatactaagta

SEQ ID NO: 288882 - DNA, 244 bp, Zea mays
atgccacccccgccccgatagctggtttgaagtccccctggaagctacgaccgcattgaagatgaggatcttgaaggatggacgacgattcggtgcaggcgtggacgcgtcacccgcgtaggcctaggccgcgccccagcggcgcctcgcctgctctcagctcaagcccctagccgtcttatggtgctattcagaggaattcattggctcagatatgagcgcactacagaaaagtgaagaagca

SEQ ID NO: 288883 - DNA, 395 bp, Zea mays
cccacgcgtccggacccacgcgtccgtctcctttggcatttgcttcttgactacagcacaaccatttggactaggaagggagaagaacctcaagttcattgtgcagggttgggatcgagatgcccacgatcaaggtgcggtcggcaatagtagcttccccaccgtcctcaattgcgtcgtcaatagtcaacacgcctgagcttccatatatgcaaggcagaatatgttgatcaatgtcttgcgtgccattcctacatgtttctgcaaggaggagtgtcctgccgtgctcccacatgcgcttgttgtagcgttcgtcaagaccgataaagatttctaggctatggctgacatttgtgataatagatgagtgggttgtgactagcatctgtcggtga

SEQ ID NO: 288884 - DNA, 535 bp, Zea mays
cttcttcaagttgtgaacaatatgaatgcagtagtaaaagctttcccaggacaaaatggagcaaccggttctagggaaaaagcatcaattctttttattgagagtgacttctggaggcctgagacagatgttcagttattgaaccatctacgcgagcagaagaacggtcagttgtcggatgggcacaaggtagttcttttggtcacctctgaagccgacaaggacaaatatggatccatatttgatattgtgatgtgtaagcctataagggcaagcacaatcgcttcatctattcaacaactgctcaaagtagagatagccgaaagaaaagataatcaaaaccggccgtcgtttcttcgaagcttgctggttgggaagaatatattggtcgtagacgataataaagtcaacctcagagttgctgcggctgcactcaagaagtatggtgctaatgttagttgtgttgaaagcggcaaggatgctatcagtctacttcaacccccgcatcgcttcgatgcatgttttatggatgttc

SEQ ID NO: 288885 - DNA, 258 bp, Zea mays
atatgccatcttgtcgggcaccttgcaaggtcattccagactgatctcctcgtacaatggaacgaagcaacatctaagatcaacagatctttactgttcgctagagttctgtttccatgttttgtatctgaactggtcctcggagggcagtatcttctggctgggttcgtcatctcgagatggatgcacacacatccatctctgggcctgatggatatcaccgagaccagtgtgcgatgcttccttcaaggccaggtt

SEQ ID NO: 288886 - DNA, 217 bp, Zea mays
agaaatctttgaggataacgttctgctccgcgagttccttgaggagaaaggtcacggcagggtcctggtggttgatgccggtgggagcatgcgttgtgcagttttgggtggcaaccttgcccagctgatgcagaataatgggtgggctggaatcgttgtcaatggctgcatcagggacgtcgacgagataaatggctgcgacgttggtgtccgggct

SEQ ID NO: 288887 - DNA, 339 bp, Zea mays
gatggttgcagcatctgcaaataccctcaaccaggtgtttgacataaaaaatgatgctaaaatgaaaaggacaatgcgatgccccctgccatctggtcgcattagtcctgcacatgctgcgatgtgggctacaagtgttggagttgcaggaacagctttgctggcctggaaggctaatggcttggcagctgggcttgcagcttctaatcttgttctgtatgcatttgtgtatacgccgttgaagcaaatacaccctgttaatacatgggttggggcagtcgttggtgccatcccaccacttctggggtgggcagcagcttcaactgaactgtcactaaa

SEQ ID NO: 288888 - DNA, 377 bp, Zea mays
cccacgcgtccgcccacgcgtccgcccacgcgtccggctgcaaccctgtgttttcttcctccattaacccccagcgacgagcgtgcgagcactccctcgccgcccaccgcgcctcgtggcggcaactgggcggccgtcgctgccgccctacgccaggtgccgaggtgattttccgccccttggccggcgacgagcactaccagatactctgagcctggctgccgaaacttcctttttgagtccctgttacattcggattcgtttttgatgacttcatcaagaagcaacagcaggagccacagtcgcagcaggagcaggagcaggagccgcagtcctcagcgaagagataggttgcgacgacgtgcaccccgccgcag

SEQ ID NO: 288889 - DNA, 401 bp, Zea mays
tacagcagcaacaattgctgccatacaaccagttctctttgatgaatcctgtcttgtcgaggcagcaacccatcgttggaggtgccatcttttaggtgactcagaggattaagattaattcagcacggtgcccctaataacttgctatcagatccaagtcgctgcagaagggagcaaacaaagggagatgaagctcagagtcgtgtgcaggaagctgtatgactatgtgcggtatgacctcaaggagatagccttcccgtcgtcactcccggaccctcctcacatcaagaagcggcccaagctctcatggcatgaacgctggtgcatcctcaaggaggccacccggctgtacggcgcgtcatgggtccggaacatcggccctgagctgaggcctgacgact

SEQ ID NO: 288890 - DNA, 241 bp, Zea mays
aaccgccgggaccgtgggttggcacgtgctggtcatttagaagaagcatgggattttattgaggaaatgcctggcaaggtagatgccgtcatgttaggcgctttgcttgctgcttgccggaaatgcaagaacactgaggttggtgagagggtcatcaataggattatgaagctggagccatcaaactcgtggaactacgtggtgtcatccaagatttatgcgacctcagataaaatggatg

SEQ ID NO: 288891 - DNA, 413 bp, Zea mays
cttgtgtgaaaaccctaacgcagcactccttttctactggaatgagatgaaccgtcaggtaagagttgaagggtcagttgagaaggttccagaagctgaatcagataaatatttccacagccgcccacgtggaagtcagcttggtgccatagtcagcaagcagagtactgtaattgctggaagagaagttcttcaacaggattacaagaaattggaacaaaaatattctgatgggagcttgattccaaaacctgaatattggggcggctacaaattgacaccgacactttttgagttctggcaaggacaacagtctcgactgcatgaccgggtacaatactcgcagagagaagtagatgggagcacagtgtggcacatcgagaggtttgccccttgactgataagcctgcaac

SEQ ID NO: 288892 - DNA, 220 bp, Zea mays
gcgcacacagccaaaccatcctcctctccgccgcccgccgcccgccgcagcagcacccaccgggctagatgaagacgatcctggcgtcggagacgatggacatcccggaggtcgtcacggtcacggtggccgccaagctggtcacggtggagggcccccgcggcaagctcacccgaaacttcaagcacctcaacctcgacttccagctgcaggaggccgg

SEQ ID NO: 288893 - DNA, 425 bp, Zea mays
catgtttttgcatcggcaaaatgtcaggccttaggggagcttttaccttctctggcaaatgatggtcacagagtactcatatttagtcagtggatcacaatgcttgacatccttgaatgggcattggaaattataggagttacatatagacgccttgatggagggaccgctgtgacagataggcagactatagtggacacgttcaacaacgatctttctatatttgcatgtttactttctacaagagctggaggccagggtctgaaccttgtaggagctgacacagtcattatacatgatatggattttaacccccagatggatcggcaagctgaggaccgttgccatcgcattggacaacagaaacctgtcactatctataggctagtgacaaaggattcagttgatgagaacatctatgagat

SEQ ID NO: 288894 - DNA, 238 bp, Zea mays
cgcccgtggtagggcccctttcttgaactgtttcagatgaacagcggcgcccttggattgtaccactgccgcagcggcaacgttgatctttgggtgttacaggatcacgggagctggtcctggtcgatgaaccaccggatcaaattggacgtgatgtttttctccctgctgccggtgctggacccggaaggagatgtgcgtagtgctttctaaaagaggggaaacaggcatcctgtgg

SEQ ID NO: 288895 - DNA, 278 bp, Zea mays
tgatggctacgtgacacatgtgattggaatccaactattctccgaggcaaacatcgatctcagcagcgtgtcgtatccggtgtacaagcaacagaccaacaacaggcccagcattcaagatctgaactcagcttcccatgagcatgctccgaaagtccagagtgcagaccactgcggtatacttcagttgtcagacgagtccctcgacaaaatatgctgtctcggctgtcacctagagatgtcgcatccattggatccgtctgtaccaggatgcatga

SEQ ID NO: 288896 - DNA, 343 bp, Zea mays
gataagcaccgccatggcgatagctagccaatctcttgctgagaatcaacataaatacttcattttgttaatagtcactgatggcgtggtaactgattttcaagagactattgatgcgatcataaaggcatcagattttcctatatccataattgttgttggagttggaggggctgatttcaaggaaatggagtttctagatccaaacaaaggagagaaactggaaagctcaaccgggagagttgcatcaagggatatgatacagtttgccccgatgaaggatatgcacggcactgggatatccacacttcaatcacttcttgctgagtaccaggcaattcat

SEQ ID NO: 288897 - DNA, 459 bp, Zea mays
gtgtttcgaagctgtggggtcaattcagacaaagcaaaagaaatgcaaagaaagatgggtgttttaagtgtggcgcccctgatcacctagccagagactgcgatcaagacggtgagcagaaaaacaaaggcccaagttatgttctaaaagatgaaaatacacaacgtggtggaaatcaccgtagaagctatgatctagtatttgacgaagacgaagctgattgttctgaagagagagatcatgaaaatggccacagaagaaagaatcgaagaatagatgatcgaaaatcagagctaccacctcgtggtggtcgtgatagaaatagccatgagagaacacacagtgatgagaaaggaagcaagcatgggaaagatgataggaaccgaggggatcggaaacatgatgactaccacagttacagtagatccggtgacagaagctctggtagaaacgatgatc

SEQ ID NO: 288898 - DNA, 327 bp, Zea mays
cgaggtgcccaggtccttgttgacccagaacttgttgactatctgatttctacccttgaacaggtggggaaagttggtgtttcatgcactcagattcctttgcttgctctagaatatgaaccaccaaggaccaattcatttaaaactgtagaatcatcgctcagggttgatgcccttgccagtgcaggatttaaaatctcacgcacgaagcttgctagcttgataagttctggtgatgttcgtgtgaattggacaccaacaacaaaaaatggagtaccctcaaatctggagatgttgtttctgttagtgggatgtgaaggttaaaga

SEQ ID NO: 288899 - DNA, 333 bp, Zea mays
ggtatctgacagaaaaattactctttacaagcggggatttttttttaaaaaaaaagataatggaaacgaggttgcagcctagaagtggggaagtgatttgagtgtttgccatgaatgaattgatgtctgaaatacttaactgaagatccgttgtcttgaaattgagccaaactatttgtttcatttgaatgtacaagtcataattgatgtcattgagatttatgcctttgcttcaaaaggaacctacaatatttttcgcagctgcatcttttcttgtctgccaacctgatctctttgtggttcggtacaagtttaggacaaagtaatctgatg

SEQ ID NO: 288900 - DNA, 532 bp, Zea mays
gtcctggagaacttgcagatcgaggaatgcagcagggttactcttacgggcattcttgcgttcctcctcaactgcagcccaaagtttaagtctctctccctgtccaagtccgtcgggatcaaggacatctgctccgcacctgcacaacttccggtatgcaaatcactacgttccctggccatcaaggattgcccaggcttcaccgacgccagccttgccgtggtgggcatgatctgccctcagctggagaacgtcaatttgaagtggccttagtgcagtcaccgacagcggcttccttccactgataaagagttcaaacagtgggctggtcaacgtcgatttgaacggttgcgagaatctcacggatgcagctgtttccgccttggttaaggcccacggcgcttcccttgcgcacctcagtctcgagggatgcagcaagattaccgatgcaagcatgttcgccatctctggtatgtgcagccagctcgctgagctcgacctttcgaactgcatggtcagcgactacggcgtc

SEQ ID NO: 288901 - DNA, 352 bp, Zea mays
attgatgccaggaattaggcccccgattttaccagctccaggttatcctggtcctccaccaaccatgcagcaaccaggcgccccacctgggtccatgccacaaccgggcgctccacctggttccatgccacaaccaggcgctccacctggttccatgccaatgcagatggccccactcccaaggcctccaacgctaccgcctccaacatctggagtcccaggtgctcccattcctaacagtggagcacctccagccatttaccaagcaaatccacaagcatctgcaggtccaacttctggtggtcctccagctccaccgactgctccacagcctgcgttctcctatgctccc

SEQ ID NO: 288902 - DNA, 303 bp, Zea mays
cttcatagctcgcgagcggccgcccgcgctctagaacctctcatgcacacatgtattttgaaagttatggttcagattgttctcaaacatttgttgttgccaagacaaagagcactgttgatgttctgtggcagaatggaactgtatctcttggtctagaaccccaggcattactccctgcgagtacccttggtgaccatgatttttggccaggtcaatttgtcctagaaaaactgactgtagaagatgctgcaagatgtccgcgaacggcaatagtgagtgatgtggatgcactggagcgaa

SEQ ID NO: 288903 - DNA, 403 bp, Zea mays
agagccatactttactgtatctaaaaatattacttttttacactttgacatatgagaagtgatcttgtttaagtttagttgacaactaaacgcttacaacctattaaaatataatatattaaatttagttgttacaagcttctttcatcatccaactgcagcactttcagtttgtgttagtccaattacatcatatggtgtatgtatatttgatcaatattattttctgagtcctaaatctactatcacatttctcatacaagtgttctttcaccagttgatactcgtatacttatttctgtattctaaagtcattggtaggtagggcataggtcacatattgtttctttctcatatcttttgcactccattctgttttaaccattgacttttatgtttacct

SEQ ID NO: 288904 - DNA, 321 bp, Zea mays
atctgcctcttttggcatcgacaatttacttcagtagccccaaacaaagctctggattgtcctattcccatgacaaggctatgctcttctcctgcagtgaaaccaaaaaaggaggtgtgctactgttcttctgtattgatgtcaatgcaacagcaggtacaagtagtcttcttgggagctacccagtagttgagtgagaaattaataagctattctaaattaaatgtaaatatgtatttctgaccatagtatgaagttaaaaggtgtttctgttcctttcctgtgtataagataaacattttttctaacccttcttcctta

SEQ ID NO: 288905 - DNA, 235 bp, Zea mays
gcaatggctagtgctgctcagtcacacatcaaatgaggaatacaatctcacatcaaataaatttgaagatcttttatgggaggaaatcaaagtcacaaagcctactggatatttagataaaagagttgtctaccttgatttccaccaatatcttacatttgaaatcaatttcacaaagtggtgggctgtgggagtgcgggcaaaagcagggggcgatcctggaaggctggccgga

SEQ ID NO: 288906 - DNA, 261 bp, Zea mays
cccacgcgtccgccttcttcttctcaggagtaggaggaggaggcggaccagcagcaacaacaccttttaccatcgtcgtcagctcatcataacgacgacgacgacctcttcctcactgacgaccagattctcgataatatcttgacgctcatcattgccgggcaggtgacgacagcgagcgcaattacatggatggtcaagtacctggctgacaacaaagtcttccaagaaatcttgaggtcagttcagctggagctgaag

SEQ ID NO: 288907 - DNA, 285 bp, Zea mays
gacgagacaaatatcgcaacccaaaaggttctgaagggttctaaagataaaagaaaggaaacctttgcagaaggcaacactcaggaggaatgcaagtattattcaacacctggaggatgcaaattcggtaaaacttgcaaatacctccaccgtgagggaaatggagggaaaacagaggttgaaaaagctgagctgaactttctaggtcttccactgcgaccaggtgaaaaggagtgcccatactatatgcgcactgggagctgcaaatttgcgactaactgcaat

SEQ ID NO: 288908 - DNA, 280 bp, Zea mays
gtcatttaccagaacataacctttgaaaacgtacgtgtcggtatagtgataaagacagactacaacgagcacccagacgaaggcttcgacccaaaggccgtccccaccatcgggaatatctcttacacctcaatccatgggcatcgtgtgcgagtaccggtcaggatacagggaagcgcacagatccctgtgaagaatgttaccttccatgacatgtcaatcggtatagtagacaagaagcaccatgttttccagtgctccttcgtccaggggcaggtca

SEQ ID NO: 288909 - DNA, 280 bp, Zea mays
gcctgccgaattctcctcgtcctaaaaaaccctaaccccaactccccacactcgtctcgccgggggcggcgcgatgagggctatcaccggcggcgtcgtctcctcccagccctgtcccctccacaaggccgccctcttcctcaaacgcttcaccgagtctgccgcctcccacctaccctcctccgactgctgtaactacctccgcaacgccgccgacgccacaacacagctcagccgcttccgcatagtaatcggcggcagcacaagcagggtgccgcca

SEQ ID NO: 288910 - DNA, 295 bp, Zea mays
ctcttcaaggtggtgatcatcggcgacacgcggtggggaagagcaacctgctgtcccgctacgcgcgcaacgagttcaacccccactccaaggccaccatcggggtggagttccagacgcagagcatggccatcgaaggcaaggaggtcaaggcccagatctgggacaccgccggccaggagcgcttccgcgccgtcacctccgcctactaccgcggcgccttcggcgcgctcctcgtctatgacattacccgccgctccaccttcgacaacgtcggccgctggctccaggagct

SEQ ID NO: 288911 - DNA, 438 bp, Zea mays
cccttcagcgtgtctcctacctcaacatgacagtctacccagtcacatcagtcttcatcctaatctatgctctaagcccggtgatgtggcttatccccgatgaagtatacatccagagaccattcactaggtatgtcgtgtaccttcttgtaatcatcgtgatgattcacatgattggctggcttgagataaagtgggcgcgggtcacatggctggactatctggcgcaatgagcagttctttatgatcggctcaacaagtgcatatccaatggcagtgctgcacatggcagcgaacctactcacaaagaagggcatacacttcagggtcacttccaagcaaacagccgcggacgacaatgacaagttcgccgcctttatgattttcgatgggtgccaatgctcatcccaacaatggcagttctgatctgcaatgttg

SEQ ID NO: 288912 - DNA, 424 bp, Zea mays
acaacatgcagttccacttcatccggcccacccacagcatgttccccttctttacggtcctcacagatgcgtactccagggtgctgaggccggcagagggggtgcctgcactgctaaaagagctgagggaggggtcaaaggacctgactacagtgttggagagatgcttgaaccggttggagtgggatcggtcgcaggagcaggcaaggcagcaggcagaggatgaggttgagcaggaacggatgcagatgtcaatgattgactggcatgattttgttgttgtggagaccattgaatttgcagatgatgagtatgaggggcttcctgtgccacttacactggaggagttgaagcgccagaagaggatggagaacttgggagaggaggaagcgatggatttgactgaaccttctaaggaggttga

SEQ ID NO: 288913 - DNA, 374 bp, Zea mays
ggaagaacttaacaatggacgatgtccatgacatccatggtctacggcttgtggttgaaacagaggaagattgttatcgagcacttgacatagtgcacaagctgtggccccgagttaccggaagatttaaagactatatttgtcatccgaagttgaatgggtatcggtcgctgcacactgtcatcatgtgtgagggtgtccatccatttgaaatccagatccgaacaaaggaaatgcacctacaggctgaatatggattcgctgcgcactggaggtacaaagaaggtggctgcaggcactcctttgtgctccaaatggtggaatgggcgaggtgggtgctcacatggcaatgcgagacattgagcaaagagcgt

SEQ ID NO: 288914 - DNA, 365 bp, Zea mays
ctcacgataacttggaacaccttgcaatgatggatagagttctaggtcctcttccacggcacatgctggaaagagccgaccagcatgcggagaagtacgtcagacaaggaggattgaactggccacaagcaataacaacagtagagagcgttagagctgttctcaaactgcctcgccttcagaacctggtgatgcagcatgtggatcactctgcgggggacttcattgaccttctgaagcgcctcttagcctatgagccctcgggaaggttgactgctcaagaagcgttgggccatgtcttctttaccagataccggcaataacaagtcgcctcgccatgacatcttcgatgattggctatggca

SEQ ID NO: 288915 - DNA, 294 bp, Zea mays
aaaaattactccaacaatggccaaggaagcaatggacaaaatgctgacgagagacttcttccatcttatagcttttctgcaggcagtcacttctctcaagaaaaagatttaccatcgaattccagtgaagcagacaaaatgcaatgcatatcatcttctgccagcatttctgaggatgataatagccgagctagttctaactcacagaagaactctggatctagataccttcctcctgatgctgaagtggttatccgtgttccaagtttgcctcttcgtgatcattttggatat

SEQ ID NO: 288916 - DNA, 267 bp, Zea mays
ttcagaatcaaaacaaaatctgctgggtgcaaatggagttttggaagacaaggagcatatgatggaagggccttcctcatggtcagccgtcaaggctaaattaaagcctgcaactatgaggcccattcctcactctcgaaagcaacaaatgcatccttttatgggttttcctgaaacttcccttcacgaaactagtattgtgaagccaggcttgccagctgcgccaactgtgaagcacaattcagtttcttctgccacaaccacgca

SEQ ID NO: 288917 - DNA, 303 bp, Zea mays
gcgtagaactcggatcggctcgagtgcatacctacaatacgtagggctacgtacgctcgcgctcccactcgcaccacagcacgccaccgctgctgccggctcctccccgcgctcgcattgcgatttgcgacctagcgcgagggtaccgggggtggtgcgcgtgctccgtgatccgggaagcgccgcgagatggccgggggcggaggcggcggtgccgcgccgaagcacgacgacttcacgccgcaccccgtcaaggaccagctccctggggtctcctactgcatcaccagccctcccccgtgg

SEQ ID NO: 288918 - DNA, 265 bp, Zea mays
ggggcggtgctccagttcctcttcctcaccatcgcccgatgtgtgcgacttcgacgaagagttcgaggaggacgaagaatgggagtcggaggtagataccgtcggagtttgaggacgatgaggcttatgcgcgtgcgctgcaagatgctgaggagcgtgaggtcgccgcacggcttatggctctcgctggtctcagcgattggcgaccagtggacgtggagcatgaggaggatcatgcgaatgatccacaggaggcatggcaaga

SEQ ID NO: 288919 - DNA, 355 bp, Zea mays
ctcccacgagcatgtatctttctggatgtctggttacaatagcagctactcatgtggttgagaataaaatacaaaagataaagataaatattcagatgatcgtcagtatagtctcatccacgacaagttcattatgatttacatagacttcatttgtacacccaaaaccaaaagaaaataaaagaggaccggcaataccttgcctacgttagtttcaggctggcccatcggatcctcaatgctatctgttcattttggtcgggaacaagattgatttagatggcgggagcaaacggatggtcagttttcctgaatgcgcaagctttctcatatatatatattcgaaataccctgc

SEQ ID NO: 288920 - DNA, 303 bp, Zea mays
gtcaggaaggcgaacacctggattgaaagactgctctctcagttcagcattgggtcgtcaaggagaacaaaatgatggtaccttcagcgtgaggatcgatgactgtcaatggagctgtgcaaacacaatcgtggcaaagctggctgtggcactggcgcctatgccatttatgagggttttgcttgaccgttttgtggctgcaactagtggtgtgttcccagacaaccaagagctacaagacagaggtaagctctcgggttccgtcctggggcaatggggagctgttgatgatcctgagtccat

SEQ ID NO: 288921 - DNA, 238 bp, Zea mays
caagaagaccagatgaaactggatagcgaaccgaggaaaacttgaagcgcttggtctatacgactgcagcaaacagtccaaaattaaccccttcagctcttctactatcagttctgcaacaagacccagacgttaggatagctggctacagagtaataacaggactggtcatccgggaatggtgcttaagggaggtttgcttaaattcagagataatcagatttgttacggatccaac

SEQ ID NO: 288922 - DNA, 404 bp, Zea mays
cccacgcgtccgaggacatacagtgcaggatctgttcatgataaaacagtgtcacctgttgctccgttgttaggccagagtgttcctgacaacagcgtgcgccatgagatcaggaatccaatagtcccaggatatcatgcaggatatgcagcaccaggggatcgacctatttatggtccgccacctccaaatacaagcagagctccacaaggaaattttccttgccctcctgtttccacacaccatagttctatgatgccaccgccacctattcaaacctcttttgttcgtcctatgtatcctggtccagggagtccctgggagaacactactccaaatccaccgcgcttcagccacgtttctcctcgcatgatgcctggaagtaacttccgtgttaatccagc

SEQ ID NO: 288923 - DNA, 365 bp, Zea mays
gcttcttggagctgggtgcgacctcgtccggttttaaggtctgcagtgtcgtggtctcgctcctcgcggcgtcgcttgtttcctggatcctggatttctcctctccaaatctctaaccgagcaacatacattgttaagtgatatttttcattacagttaggttttatttggtcttagatttctatggttagtttttcatatgatgtttggccattccctacacagctagtcgttctttcatcaggcttgttctatagagcttgctagcctttttctaaagtgcagatttatatatattctcattgtgttgtgtgctgcctatgcataatattttttaaaaggagctaactgagtatagtagttgt

SEQ ID NO: 288924 - DNA, 332 bp, Zea mays
ggcttctgacgaagaggtcaccttggggttctcgtagaatcgtacgcaccggggatttgccggttgctggtgttctaccatgctcccatgtctaccatgccgagtgtctagagcggaccacacccaaggggcagaagcacgaccctccttgccccgtgtgcgacaagctggctggtaaagataccgagcagtggtcaatctgcaggttgaaaaatgggttcccaaggttccgctcgctaggggaagggccttctcgggttttcagctgcgctgatgctggagattgcgttgctggggccgttcagattccaagatcaaatagcatcgggcta

SEQ ID NO: 288925 - DNA, 280 bp, Zea mays
ccatggccatcgaccctccccttccattgaggtcacgcctctgctcatcctcgctactccacacaacatacgagcaggcgacggtccaaggtctctgctcgctgacgcctatggctgcctcctctgcctccgatccgtggcaacatcgtgggctcgccctagcccggtagctgtcggttgtcgtcgccctacccctctgcacgccggcgccctctcctggagctcaccccgccagccgcgcccggtgctcctccaccaagcctcgccggggtgctcttca

SEQ ID NO: 288926 - DNA, 554 bp, Zea mays
ctaagagttgtgtaaaccctgattacatgtccagtcagcaagatataaattcaaagatgagagcaattctgattgactggctgattgaggttcactacaagtttgaactgatggatgagacgctatttcttacggtaaacgtaatagatagattcttggaaaaggaagtggttccaaggaagaagctacaactggttggagtcacagctatgctgctcgcttgtaaatatgaggaggtatctgttccagttgttgaggaccttgtgctgatatctgaccgtgcctacacaaaagggcaaattttagaaatggaaaagttgattctgaacacgctgcagttcaacatgtctgttccaacaccttatgtcttcatgaagaggtttctgaaagctgcagatgcagataaacagcttgagctagcgtcatttttcatgctggagctctgcttggtagaataccaaatgctgaattatcggccttcgcatctggctgctgctgcggtttatactgcacagtgtgctatcaatcgttgccagcactggacaaaggtctgc

SEQ ID NO: 288927 - DNA, 406 bp, Zea mays
cctgaacagactttgcccagttgatgtttttttgaaggcaatgctggatgttccatttgtgttcaagagagtagatgccatgctttacattgccagcttctatttggagatcaatcggctgagaatgtcgtatgctactcttgagggggcttgccaggagatgagaagcagcaggctgttccacaaagtccttgaggctgttgtgaatttcggcaatttcatgagcaccaattcggggtctccaagttcaaaaggcttggagccaaacactgttctgaagatagctgatgtgaaaggagctgatgggaaggctgctctcatgcagttcattgtccaggaaattgtgaaacctgaaggatatgatgtgatgcagcatggttcaggtgcatgcaagatgagcacaaac

SEQ ID NO: 288928 - DNA, 316 bp, Zea mays
atctagctagtgtgggtcgtccactcgtcctctcgccccttggcgttcctcgttgtgagcagatgctatagatggagtatattgcctggctagtatgctgctgatagcctgatatgaagaaccaccctcgagacaggttgatgtatgtaatgtaacgagcgggtttttgtgatgcgcaaacgccacgccactcattcttatctggaaacatgaatctaggttttattctttctccccctttgtcactccttcggtcttccttgttccatcatcatagcttcccaagggctacatgaacatgaatcttacagtttgc

SEQ ID NO: 288929 - DNA, 317 bp, Zea mays
tgcaactgcacccagtagtctggcaactcttcagacaattaaggaagatcgtgtaaatccttgcctggagcgtcttgatcgacttgagtcaatgtttaatcagctgagcaaaaagcctccagagcttccagaggacaaggaccgggccatacaagattcttttgacaggataaagtccattgagtttgatctgcagaagacaaagaaggtattgcatgcaacagttatcaaacaaatgcagatggcagaaaccttggaagctgtaacggagccggatcttaggcggaggaaattttgtacataatacacttacctgc

SEQ ID NO: 288930 - DNA, 317 bp, Zea mays
cccacgcgtccggccacgcgtccgggcgcatccacaccaagtggtttcacagtgggaaaagcgtggggatggccatcctcccgtgtttagcaactccagtccctctctcttcggctatgatctaacaagctctggagcccagcaaaccccggcgagcaagctaaagacggagctttgagcgacgatggatggtagacagcattgtcaggagagcaggctgaacatatgcggtgggggcgcacagcgacatgattccagcaagttgatcaggtcaggctacaaacgggctgggaatgttgatgtggagcgcagggaga

SEQ ID NO: 288931 - DNA, 186 bp, Zea mays
aacaagtacacagccgttgcaagctatggtccggtgcacacgggcgccagatggttcaatgacatgatcaacgtgccattcacgtcgaagccgttcgtcgctgggttggtagcctatatcctggacaacaccctccaggtaaaggagagcgcggtgcggaaggacaggggcaaccactggtgggag

SEQ ID NO: 288932 - DNA, 413 bp, Zea mays
ctctcgcggaaccacgagacttttggacgctccgatacactagtggtcttgacgatggcagtcttgtgatctgcgaaaggtcattgactcagtccactggaggtccttctggacctaacactccaaattttatcagagctgaggtgcttcctagtggttatctgattcgaccctgtgatgggggaggttccatgatttacattgtggatcatgttaatctgaatgcttgtagtgtgcctgaggttcttcggccactctatgaatcccctaagatactggcacagaagatgactgcggcggcgttgcgacacattaggcaaattgcacatgagtcaagtggtgaaatgccctatggtgctgggcgacaccggctgttctcagaactttcagtcaaaggctcagcagaggcttca

SEQ ID NO: 288933 - DNA, 208 bp, Zea mays
caagcactccttgttctgttcgtctcgccgtgggcgacttctctacgcttcaaatctgtgctgctcgccctgcatacgctcactcctcgtccatcgggttttggcgtgttcgcgtttatcgtcgagtcgtcgaacccgtcatctcctgctcgaatcccacctcgccagctcgctccagacacaatctcatcgtcgttccgcgagtcat

SEQ ID NO: 288934 - DNA, 284 bp, Zea mays
atcgactggagcagggtggtgtcgcagtacgtgcgcgacgagacctacgagggcatcgaggccccgcactgggccgacctctccgaccccaacgccggccgcgccgccgtcgacgacgaggcctggttctgccgccccgattgccagcatccgaagacggccgacgatttcctcaagctgagccccagccccaagggcaagctgctgcgatcggtttccgccatgctgccgttcgccgaaagggacgccaacgccaccagcctcagggacggcagtagcaatct

SEQ ID NO: 288935 - DNA, 404 bp, Zea mays
ggacgtggcggacgcgtgggcgatgccagcccctccggtggtgtggccgtctcggcacaccttcgacacggcaagccgcaagcggaggagttcattgcacaagatgcgcgcgccactgcaggcaacggttccgttgcttctgccaatgccgcgtcgctgctctctggggcgctgtccatctctttgtgctatatacagaggattttccggtctgggtctcggcatccacaacctcggattttgtgcctgcagggatctccagatggacctgaacaatatgtggcagtgatgaattcaatattttctgctcaacgttccatggtaccaattgactcttgtattgtgggaacccaggattctgctttcttgcagcaggcttcgtacataacaggaggagtttattt

SEQ ID NO: 288936 - DNA, 329 bp, Zea mays
gtaaaagtgaggagaaagaagagaggaaacaggaaagagtacaactcggcggcgacaccaccgctcgcagcctcccgccgcgatggcgatgcgttcgctcgccaggctccaccgccaactctccccttctctcctccaccgccatagcacacggcgtgggtggcctcccgcttctgacgcggcctttctctggcgcgggctcgcctcgtcatcaccttccgcggccggtcgggagaagagctcgagacggactttggggtaccttctcggcgttgcggtcgccatggtcggcgcctcgtacgccgccgtaccgctataccgtcgcttct

SEQ ID NO: 288937 - DNA, 269 bp, Zea mays
agcgccagcatcttcaatccactgttgaagctcttcaagaagaaaagaagctcctatattctaaattgaggaacattcctgtgaatgagagggcaactactgtagagaaaccttcagttgataaaaaagatgcatcaaccgtgacagaagatttagatactggggaaatcagctcttcagagacactgaccagcactgttgacatattggaagacgctggaacatctgttttgcgttccaacattgtgtctgattttccttcctcggaa

SEQ ID NO: 288938 - DNA, 245 bp, Zea mays
cccacgcgtccggttaccaaattagcacttagtcattcagttctaaagaatgtttttcccccataatttaactacatacaataaagaatgctttagttgaatcttgattgatcaaataaaagaacatgcgctaaatttctatcgtgcgtgtggctgtacttatctgatcatgtgttaaatcttctgtccagcttagcacaaatatttatagagatgacgacagcaatgtgtatggtgagttgatg

SEQ ID NO: 288939 - DNA, 338 bp, Zea mays
cggacggtggtcaggacgcgtggggccagttggaatcacaacttgggtggtcactgttggagctatcaagaaaacagtttcacgtctactcatcctttctatctcaatgggtttccgtgttgttcgtccaactttgggaggtctcacttccaaggtgttgctactcggacttacatatttccgggcgtctgagttgctggacattgcagaaaatgttggaacaattaatgatatatcaggcaaagcaaggcttttcctggtccttcctgatgcatttttggatgcttttctcatactctggattttcacttctctttcccgcacactagagaagctac

SEQ ID NO: 288940 - DNA, 254 bp, Zea mays
ggctgctgcttcagcacagctgttaatttcaaccgccatgatgcatccaccacgcattcagagcgcagcaacatgcatacctcctccaacaacggtccggtcagtgtcgatgacggacatgggcacagagatgacgcccatcgcatgccaagagccgtcccggaccgggacgccggtgagggcgacgagtccaaactgctcccagccaacgactccacggcggacgctcggcggccccagcgcagtcggctcct

SEQ ID NO: 288941 - DNA, 298 bp, Zea mays
ggaccccatctctatctctatagaggagtcgactgccacgcctttgctggtcgataattttcacatgaggctcataaacttggaaaacagagttgcgtttgctcggatattcttcccttctgaagccaagcttgtcatgcgcatcgcacaagccgattcaacccaagagtttgccggcatcaccaacttcagcagactcaaggaagttgatctaaacgaaaccccatcgatgcagaataggaggcttcgcgaacgccttgatgccttaacaaagacagttgagctagggagacgatac

SEQ ID NO: 288942 - DNA, 226 bp, Zea mays
tttggttcaagtcctttggagaaacttttatgaatcctaaaataggattttggtgtgtcacagaaggctaaaacattcaagagaaggcctttatttaggaatcagatagttatacgatgtatgtaagtcttgttctattttctttgaacacacatgagagctgcatatcttctttataataagaagcaaagtacaaaggtccaaagtagaccgacacaaacaaaac

SEQ ID NO: 288943 - DNA, 372 bp, Zea mays
gctatgcacactttcttctgtgtaatgcaacttcattagtgttgctatgcacactttcttctgcaccaaccacaatattctcttgggatgctgtcaatgggatgaatgaattgcatattttagggtctttgctacactatagagtagatgggttataaatatacaaatctcagcttcctatccattctttctatctagagttgtagacaccacatagtatacagcagcaggagcagtgctttgctcagtccacctttgttgaagctgggctgagagtgtaggagtgaagccccaaggctctctgggccatcgaggatcgatcgggcggcggcgccgtcgggcagaagcggtcgtcaccggacaagatgcaca

SEQ ID NO: 288944 - DNA, 447 bp, Zea mays
cccacgcgtccgccttcatgcccttgcaacccgtctgaagaagaacactgccgcgtatgagaactaccgtcgaatttatgtgcctttaggcgaaccacttccatctgaacctggcgagccgttgagagtgaacgtgctattcaagcatattcaggcaatgctgtctggcgacacggctgtcatcgcagagactggggactcgtggtttaactgccagaagctgaagctaccggaaggctgtggatacgaattccagatgcagtatggatcaattggctggtcagtgggcgcaactctaggatacgcacaggctgccaaggataaacgtgtcattgcctgcattggagacggcagctttcaggtgacggcacaagaagtgtcaacgatgctccggtgggggcacaacagcatcatcttcctgataaacaatggagggtacacaatcga

SEQ ID NO: 288945 - DNA, 231 bp, Zea mays
gtctgatctagtctgacatcaatattttgtgtgacaaagggtgtgcgataaggttcccgagcagcatgggaggcacctgccaatgatgaatggaatcaaggaggatataaaaacactgctgacgttggaattagggagccccctattccatgaagtgctggtcaacctctcggttcgcctcaaagcgttgcaggacaacaccaaggagcacttcaaggaagaagagagtga

SEQ ID NO: 288946 - DNA, 268 bp, Zea mays
aattgccattcaaggaggttgatatagcagtcccagagatttttgttggtggtttattaggctcgatgcttatattcctgttcagtgcatgggcttgctcagcagttggcaaaactgcacaggaagttgttaaagaggtcaggagacaatttattgagaggcctggtatcatggactacaaagagaagccggattatggacgctgtgttgcaattgtggcatctgcatccttgagagaaatgataaagcctggacctctagcatttat

SEQ ID NO: 288947 - DNA, 232 bp, Zea mays
gtggacttccctaagaagtctgatcgctgtgactaagagtaatcaattgttctctaatcagctatgcccttttcagaatacggtgtgtgtcttgatttggaaattgtcgtaggtcggctagctaaatcaacagccaaaatttagtttattcagtagctatattggggacctcctcatgtttctgaaaaaagatatactgttatgttgcactatgaatgagaaactgtcgaat

SEQ ID NO: 288948 - DNA, 400 bp, Zea mays
tggtcaggtccgcgacgctggcgacgtggacgcgcgcattttctttccgaccagccgagcgccgccaccctccggcaggtcttcttccatgccacgaccacccacgccaggtcttcccggccccgaacgcgagcacccagccctcctccaggtcttccccggcgacgagcgcgtagaagaggggatccttagcacaatggaagaaggagcaccagggccgtcgcaagccatcccggattctggagacacgtaccgcaacagctccaccgcgcccgtgggcagcagctcaccgtctgtcgcgaactccggaagctgctgttccggcggatgctcatcggcgtcaacgacggccgctacttccacggcctgttccactgcatcgacaagcagggcaacatca

SEQ ID NO: 288949 - DNA, 278 bp, Zea mays
gttaatttttccctgtcattttaggtctaatttgtattcgacactctcatcgtagtaactgcctcgtaggttttgtgccctctgtatacatctctatcggctccatgtccaaggcactgcaccatcccttttgttatcaggttttaaaccggcttttggaattgtacacatggatcaatttgtgggagtggaaattagagcagatttctgtgcttttttttttccagcacatctgccagactagtatcatcagcaattgtccatcgcagcatagatct

SEQ ID NO: 288950 - DNA, 466 bp, Zea mays
tgccgttcctctacaaagccacagcatcagtggcccgtgaagccaaagaatttcaccctcgacataatctatctccacgacaagccaaatcctgacaactgcccacagaaggtatatgatgccttggtcgatgttcttgagcatgtcagccagtatgaggggtacattctcgagactggtcaagggcttgctcgcgtgctctttcgtcagatgtgcattcttgtatcccatcctttgcaacgttgcatgcaagatgaccttgatattcccaaacaagtcgctaagaaaatcgtggcagccgaacccgcacagaatgaagatgccgctccagtctccggccaacagtagggccttctagtcgaacggtatgcaaacatgaagttactcgcaagcggttggcattaccgttctacgagatcagaatgcctgttctgtgtgatggagattccatcccagaatttgtgta

SEQ ID NO: 288951 - DNA, 278 bp, Zea mays
ggatcgagctcggcgtcgattgggcgaccgccgccgcctcccccgggtcttcgctgggcccgtcgccggcgacaagcacccaccagaaagagagcaaaaataaaggagctacaggacaatgttgttgctgtcaattttactccatccaacaaactggggaaaatgctaatggctaaatgtagaacattgcgagaggaaaatgtagatattggggtgatggcatcaaaaggataagcatgtgttcttcctgcccccaggagatctttctgtggcaatta

SEQ ID NO: 288952 - DNA, 443 bp, Zea mays
cccacgcgtccgattggaagatgggcatgatagcgcactgcaaccttgttcaatgagtgaaagagatagtgccatgggtcttgctagcctgggagcggatactcaatcatgtgttgatgtccattctgacaattggacatctgtcagcattagtggccgtgatgaagttttaactgctgccaaaattgcatctaggaaaaggagcaatcctggagacagaatagaagatttagatgcttcacttgtgggaagcccaaaccaagatgagtgcagtggagggagatgttcagttcgaccgagattgatactagagatttcctcagattctgtttagcacacatttgtgttggctgatgtctgcatgacttggagaaaaggaaggggggtggatgtgatgctgtctaacgcggtcagcgaactggcaagcagctagaggcctctcc

SEQ ID NO: 288953 - DNA, 271 bp, Zea mays
ctcatttgttgctctgcacgccgcacttcagccgatggtcgacggcacttggccggctcactactctcaaattcttattgtcagtctattctttagtttttgcttttctccccctcctccagtgatggccggtatgggtagccgagtcaaggacggggccctacagtgcctactgccgctgagctcatcccctagggcgggtgtgccgccgtcagtagggtccctggcggtggtccctggttggcgttctgtggtggcaaggtaagttcga

SEQ ID NO: 288954 - DNA, 326 bp, Zea mays
cccacgcgtccgcaaatatacatggcaagagaacttttcaacctactcagaaaatccagtgaagagaaacaactgcctgggttcaggctcctgaattggcacttctttttcacggcaatgctgtacacttatgggcgctttcttagtcggcagctggtgaatacagtgacttcagatcacttgctttataaggtcgtcagtggcctaattaagtatcagatgtttatctgctatttcctttatattgcagggtttgtatggtttattttgactctcaagaaaaagacataccagtatcagttcaaacagtatgcctggacacacat

SEQ ID NO: 288955 - DNA, 295 bp, Zea mays
gataaaacagggacgcttacagaaggaaaaccagtagtgacttctattgcttctctggcatatgaggagacagaggtccttcgtcttgctgctgcagtggagaaaacagcattgcacccaattgcaaatgctataatgaacaaggctgaactactcaagttggatattccgatcacaagtggtcagcttacatcgcctggatttggttgtttggctgaagtagatgggagtttagttgcagtgggcactttggattgggtgcatgatcgttttgaaactaaagcatcgccaactg

SEQ ID NO: 288956 - DNA, 334 bp, Zea mays
attaaattgctcccacagcaaatccaaaagttgagccctgagtagctcgccgcagcgggcagggcatcttgtcccgttgctctttccttgatcgtccatccatgcatccatggaccacggtgcttttgcagctgcagcaaggctctcccctccggctactatagcggttactagtgcgtgaatgctccttctgcacctcgcttgccatataccttgcatcagcagcagctacccagcagctcgatcgcgctcccgcgagtacactagaagatgaacagtgcagtggaagtgtagtggagttgcagccattatcgatcgccaccacactgctcct

SEQ ID NO: 288957 - DNA, 234 bp, Zea mays
cccacgcgtccggagattaacaactgaagtgagcactgaactctgaacagagttcagaatagactggctgcagacggttgccggagttgagcagtgagcagaggcgagcgccggagctgagcagaggcgagcgccggagcacgggagcagagagcagacagtcaccggagctgaggaccaccggagttgaggaccaccggggcagaggaggcagaggcggcagcttagggtttt

SEQ ID NO: 288958 - DNA, 255 bp, Zea mays
atagttagcctcgagctccaccgacgcccagatctgttccttctctcttccacgccgccgctcgccgccgccgccctcgaattttcgaatcctcagcaacaatcggccggccgccatgagggagatcctccacatccagggcggccagtgtggcaaccagatcggtgccaagttctgggaagtggtgtgcgcggagacggcatcgacgccaccggccgctacggcggcgactccgacctgcagctcgagcgcgtc

SEQ ID NO: 288959 - DNA, 302 bp, Zea mays
cccacgcgtccgcacgtctacgcctctcctctgctttcccctctggcccttccgatggactactcgagtggcgcgacggagtcgcggagggtgcgagcacgttggtgctactgccgctgcttccgccgttggtgccgctgcttctgcggctgctactgctgcaactgcttccccgacgagccccacgacgaccgccgcgccgcagcgtacgcttaggctcctggactctccactcgcagtcgcagggagacccgcatatgggcactatgagggaactgaatttctgtcctcatgtacactag

SEQ ID NO: 288960 - DNA, 222 bp, Zea mays
ccagaccaaagcagagctgcttgcttctccacgccttgtgcttccacagagcaaccagttctcatagcaatgtccgcacccctggtggacgccgagtacatggccgagatcgagagggcacggcgggacctccgcgctctcgtcgccagcaagaactgcgcgccgatcatgctccgcctcgcgtggcacgacgccggcacttacgacgccaagaccaacaca

SEQ ID NO: 288961 - DNA, 349 bp, Zea mays
ctgaagataagaagtatcaacataccaacttcctgtttgactgcattatagagtcactggattcaaaattctgcaatcttggcaaatgtggatacaaggcttggctgaagttgcctcacagtttgagcaaagatctgttgaagcgccagctattggaaaacatcagcaactggacggagtcaagtgggactgctcttagacaagtttctgacaaagaagtggaccaagtgactgacaggtgggatgcaaaccttgaagcatttgatataagcattgcaatcgagaacgacattcttgaggcgcttgtcggtgagttcgcagttgacctatggtgaaacggcgtattgac

SEQ ID NO: 288962 - DNA, 294 bp, Zea mays
cccacgcgtccgcgcaatttgttccatctttatcagatctccaccttatccacctgcagtcgagcctgctgtaccctgggctccgccgtcccgaccatgtcggtccgacgatccctatcccgtcaggaatcagcaccgacctgaccatcggaggcgcaccggcgcgcgacggcgtaccgtgtaccctctccgtcggtgccagcaagcagaaccccgtcgccgtcaagccggcggggctgatgctcttcggacggaccatactaaccgagcatcagatgagcctcagcagctccg

SEQ ID NO: 288963 - DNA, 237 bp, Zea mays
atttcaaactgaacgataactttgagaaagaaatttctccccagtttcatgacagcatcaagagacttgtaagcgacgaaacggagaaggtcaagggtttcccattggaactcaacagtccctttcagagaaagattgaagttattggcagggttagttaaccccgatggcctggacctgaggtccgcgggagaggaacctggttcaggcttacaatgaaaagccagtcctctcaag

SEQ ID NO: 288964 - DNA, 297 bp, Zea mays
cccacgcgtccgcccacgcgtccggcgtactgcactgtcgactagactactacccttgcaatgcagagggcaccggctgtgtgtcttctggccaccttgttggcattctacttcttggttccctccattgctgtagctctctcaagggtgcaaaagatggccatgcaagaggatggtcagataccatcggttcaaagcagcactctacagccaaagatgagaaatgagaagtttgtgccagaggatgatgaatccgtgatcaccgcgaggatggccttcgagacacacgactacgct

SEQ ID NO: 288965 - DNA, 439 bp, Zea mays
aacctacctagcaaaaatgaggcatcaggttcctggtcctcttacaacaataacagcacaggcagtgcaagcagcacgggaagcactaatagcagtgctctctacaaagtagatcatgaagcggattgtctggattatgagatcctgtgggaagaccttgtcattggagaacaaatagggcaaggctcttgtgggacagtcatatcatgctttgtggtatggttcggatgtggctgttaaagttttctccaagcaagaatattcagaagaagtgatactgacctttcgacaagaggtatcccttatgaagaaattgcgccatcctaacatactgctcttcatgggtgcggttatgtctccacaacgcctttgtattgtatcagagtttctcccccgtggaagcttgtttcgcttacttcaaaggagcgctaccaagttg

SEQ ID NO: 288966 - DNA, 293 bp, Zea mays
agataataatgactatggtggatccttctttcctttgcattctagcattagtttgtaacttaaaataacccagtgctaagctttagactcgcggtatagtggtatgataatccttccggtcacaacatgaacttacatttgactttgcatggtctttaatgcgtatctttgaccactaattacttctataatatattcataaaatgcttcaaatataagatattttgcatgtgctttgaacacaaatcgacacatataactgaataattatgataggaaactatggaagcact

SEQ ID NO: 288967 - DNA, 517 bp, Zea mays
ccaactagtgagaaaggatcatttatgaaaagtgttcttcgtgagacgctgaaagccttggaagaattctcagcttctgatagctgaccactacggcctgcagtggaaaagttcattgacgatgcacttggtgaagctgttcctttggccatattggctgcatatgggagaaatggagaaaagatttcaagatctatagctatgaagttaggccccgaaagaatctcaaaaataaagattgttggaaacgttgaggttgaagaaagcttttatgggcaacttgttcttggtaaaggagccacgtccggtttggatgagcaacttgtcagggaagcccagaaggctgcttctgcagagaagcagaggattgcagaaaaggttgcatcgatcctaaaacttagtgttgacatcacagcatccgaaagctctgacaaggtaatagctgccctccgagctggttcagaatacgttgggtgcgacgtgcaaaactgcatccttgttgcgggcagccaatctg

SEQ ID NO: 288968 - DNA, 463 bp, Zea mays
cagccgcgtctcggcaaaaagtcctccgcgacagagagcgtgcagccagccaccgaccacccgcgcagcaggacttggggagcaagcaaggcgaacggcctgccatggattccttctcgtcctcgccgtcgtcgtcaggtcccggcgctaacccggacgttgttatggaacagatcaagacgcagctcgcacaggcttacgcgcaggagtttctcgagaccgtcgggaacaagtgctttgaaaagtgcgtgaccaagccaggatcaagcttgagtggaagcgagagcagctgcatatcacgttgtgttgacccctacattgaggccactggtattgtcagccgcgcattgttcacttcccagcgctaagatcacatgaataaggagatggtttcgaagatcgctcgtgagagtaatgtcgccatgagttttttgacttgtcggaatacaatgacatttgatgc

SEQ ID NO: 288969 - DNA, 494 bp, Zea mays
tgaagtttctataacaaacttggagacaatgttagggggataattcttggtaggggtcatgccattgaaactacatcaaactgggagtaatggtgcctaaatgtgtgctgtcagacttattttctctgaactagattcagttaactgaaatctggaatttcactgttggtgctcagtttggagttcttttggtgaccaaatcatggggttttaggttaggagttccataacaaagtgaaataccaaggtaaggcaaacaagtttcatgtgaatagttgggcttgttactatgaagaaattggggggaaacctattgtaaaattctgtgtcagacttgctatattgttgttttagttaagctgaaactggacttttcagtagattttgttctactttagtgcatcatagctattgctctgtgtatttttagtcttggagtgttataccaaagtggagagcaatacttagggaatagatttggttcagtaagtggg

SEQ ID NO: 288970 - DNA, 327 bp, Zea mays
cgaagattcccccgttcctgtctctgcttactcacctctcccatgagacgaagcataaaatcaaataggatatgtgggttggaaataggtcgtgaaattgattgaaatacctggggcttgagcgtgatatatagagggtggtagagaccaagcgacgttgggcgagcggcgccgccggggctgcgttggtcccttcaccggtgatgcgcatccaccagatacaggaatgaccaacattgtgtaggcacctcgtccagacatctaaggcgaaatatgctgcgcctgcaccaccatagtgcacctgtctctccgcacgctgcgatttgt

SEQ ID NO: 288971 - DNA, 384 bp, Zea mays
gttgtagaagctgcaatggaggggagtacgtcgatgtccgttggtcccaccatcacattcatggtcgtttcggtcacccacccctccacccaaactggcatctccttgctccctggtgagtttttctcttgatctatcttctttgttagttgttttcggcgttgtcaaaatctcaggtgccacaatggacgaaagaacaacatgaagaattgggttccaaaggacttgagggctacttcatcacaacctgtaactgaagattttgaataactgactacatcaccatgcaagactaaagtttttgttttattaagaaaatgaccccaaagaagaagaaactatatgttgcagtgcaatctacacagtcatacgttgtatgttagt

SEQ ID NO: 288972 - DNA, 251 bp, Zea mays
cagaatcaaacagatgcaagactggacaatttgtgggacccagtaaaaataatgctgataatactatttcttgtggagagagaggccaacagtcagaaagaatacaggatgcaaatggaaatggccagtcaattcatcattcacagtattttggtgagatcagtaacggcaatgctatgcctacatctgctcaacaagagaccagtcatggcaatggcacgcccgcccgacaagagaccaataatagcaat

SEQ ID NO: 288973 - DNA, 240 bp, Zea mays
tccttttctgctatccatatgtacacaccttgtatcagaaatgctgttatttttttttctgtggatactccacggagatgtctccgtgttgtatcccacacggcgccacgcctatctgtatctttatcggatatgtatctgacgtgggatatgggggtgacatgatgtatccatgcgactcaggcttatctttgtcgctagcactcttgctgcattacttagtcgtattctattagttga

SEQ ID NO: 288974 - DNA, 365 bp, Zea mays
cttgccaatgcctacctgttttatgtacatgcccaaattgacatgtcatcaggaaggtttgacaatgcggtctcctccatagataaggctaggataatagatccaggaaacactgaagtggtaaacatgcataacaaagtgaaatctgtggccagagcacgttctctagggaacgagctcttcaattctggaaaattttcagaagcttgcgttgcttatggtgaagggctcaagcaacaccctatgaacaaagttctgtactgtaatagggcagcttgtaggttcaagcttgagcagtgggagaagtcaattgaagactgtaatgaagctctcaagattcaatccaattataccaaggctttgct

SEQ ID NO: 288975 - DNA, 241 bp, Zea mays
gacccacgcgtccgcccattgtcgcaccaggcgacatccttgacataccattgtctgcttgctcctcagcatttcctaactctgcttcggactatggattgcttgtggcaaatggaacctatgcactgactgctggtaactgtgtggagtgcagttgtgggccagcgaatctcaatttgtattgcacaccgtcttcactatcagcatcatgttcaagtatgcaatgctctaatagcagcct

SEQ ID NO: 288976 - DNA, 364 bp, Zea mays
ggacgtggggcggacgcgtgggtaagaaatccccacctggacatcattattccaacgtcagccatgagtctcataatccagtggaagaacaaaaaccacatcaatcacatgataaccccaatgaaagaatagatggcattcttggtggcaacgagttcctggtgtgtcgacctccaggatcgatgcaatgaataaaattgacaagggtaaggtaaaagcagctttggagaagcgaagaaaaacaaaaggtgatattaccacaaaggtagacgtgatggatgatgatgatctacttgagagagagcttgaacatggtgttgaattggctattgaggatgagaagattaagcaggataagatgcag

SEQ ID NO: 288977 - DNA, 284 bp, Zea mays
acagagttctggcgtgcctgggataggatctctgactcagattcacatgtacgcaagatatctaagcatcacgaggagaagcataggtccctagaatctcgtggcgcagactttgatgccgagcggcgcctgtactctcatgcgttcaagaagtcctcatcacttctgagccgcttaatgaagcacaagtttgggtgggtgttcaacaagcctgttgatccagtcacacttggtttgcatgattattttactattatcaagcacccaatggatcttggcacaat

SEQ ID NO: 288978 - DNA, 242 bp, Zea mays
gggagggagagacttcgtcaggtgtgttcgattccgtgacttgaggtgcctggcacagtgttgctggtttcttgagctgcggcctgttgatcttcttcgggtttgtcagcggcggcgcacagctcggaagagatgcttctgagcctgctccaaaactcctcgtcgtcttcatctgggctcatctgcagcattgaggacggaacagattaaaatgctgtatgcaacaagtttttttttttgaa

SEQ ID NO: 288979 - DNA, 282 bp, Zea mays
agacaatgatagatgtcatccagaatacctttcacaatctgtataatgattataaacatcagtcatcagactcatggaagaatccatctgttctctgttactctagaaacagtaattcttgcatgggctctgtgtacagcaatggggatgattctaagaccttttcgcgtatcacattatctgatgctcgacggggacttgatcagtatatacaagagacctcatcagggcaatccttgaagtctgacttggagatgtatctcgaggaagcagtttttcgtc

SEQ ID NO: 288980 - DNA, 314 bp, Zea mays
cacaaccaccgcacgttaggtactaccgagaggcacaggccggcaagaaccgagctagctaataatcagggaagctgcctggaaaaagtctcggccttcgtcttcgcagcgctgtgtagacgagtactcgatcggcgcgatggaggggtcgacgacgacgaccgaatgccacgtggttgggatcccggtgagcaccagggcttatggcatcgaggagcccgacttcccggcggaggagacgcagacgcccgaccacggagaattcccgagctccttccagtacgacggccatggtgagggaggctgttcttctt

SEQ ID NO: 288981 - DNA, 328 bp, Zea mays
agcgcagactccaatatttatgtatggcaccatgaaaaccaagacgaggcttcactgaaacacgcggaaacgatatggtcctcagagcgcttctactccaacaatgcagccatcgcaataccatggagtggcccgagacccagaaacccggtctctctggcctcccaaatcttgtcaccacaaggagataacttgtggtgcatgagtaaggctgtcaagtgcatgttcgactcagagcgaagattctgctatcaacagtgttgtgtcaaggtttgctcctggtattttcaatttgaatcaggattctcctctgagtccacttcagaag

SEQ ID NO: 288982 - DNA, 292 bp, Zea mays
caagtcacttcccaacttggacatggcggtccaccccatcttcccgaaactgctcgtacgatctcaagcacggctcctccctagttgtcggctctcggccgcatcaccatccccgtcgccccgagcagtctcgttctccagtgaaggtgaaggtgagggtgaagcagcagaatgggtcggtaggctggtgctttgcacataaacccaaagaagtctggtgctgttgcgaagcttgcatgccagaaatggtggcctggccttaaacaaacagaatgatgacaagtgcatcagg

SEQ ID NO: 288983 - DNA, 318 bp, Zea mays
actcgagccggtcctctttggatcctcttatttcttcttaatataatgatgcgcaattctcgtgcgcgttcgagaaaaaaagttactgttttccatgaccatgagtttgatatacttttgctttgtcatgatcataaagtttgcctgtcgatatctctacatgacttactgttaatgaatctttaggagctgagttttgatgcttgcatgatttgtttcatattgtactgcccccaattttattacaatattttggttccctagatccttttttttggtgcaagttcaaatcccagcccaggatatgaagagcccaat

SEQ ID NO: 288984 - DNA, 206 bp, Zea mays
cagcaagtgatgctgttgaccctcagaatatcaccactgcttcacctttaagtggggtgttctcttttgaaagaatgccagtgaatcaggacaggaagctatcagaaaccatgatcttggaatgtgagtcctggagtggaagtgtgccaccaaagcagttcatgcagtatccaaagcataaccatgagcgctgcgaccttctagga

SEQ ID NO: 288985 - DNA, 222 bp, Zea mays
ggacgcgtggcggacgcgtgggatcggcgttgctcgacctctggtcggcgtccatccctgctggcagtccagcgcttcttccccaacacgattttctctcccgaggtctctccacggcgcgccggttcttgctccagccgagcactcctgttccccaactcgctcggcctccaactcggatttccattcccctacgcgctgaacccccaaccatggcgtcgc

SEQ ID NO: 288986 - DNA, 427 bp, Zea mays
cccacggtccgcgacgcggccgcgtgtggggacatcgaagctgcccgccgggtgttcgacggaatgcccaccaccaacggcatggcttgggcgaccatggtgtccgcctactcggatggctgcctccaccatgaagcgatgcgtctgttcgcccacatgtgccatggaacgccggtcctggacggcgatttctactcccatgccatcgtggccgtgctgcggtcatgtacccgtgcaggcgagctacgtctcggtgagcaggtacacgctctcgtcgtcaagaaaggcaggatccacggtgacattggcagctcgctagtgcagctgtactgcgatggaggcggttttcactgcagcgcgcggcgagttctcgcgacgacgatgcagcaccactgtcaggaaccagtccctgaggctgcctggacga

SEQ ID NO: 288987 - DNA, 422 bp, Zea mays
atgagtctgtgtttcaaaaaaaaagtcttcttcgttcttccaatctccttcctattcctctgttagggtagccagtagctaacagctaggtcctgctctgctggtacgctgtcatcctggatctaccgcgcgtcatcctccttgcctaggcgtacgctcgggcggaaccgagctgcggccttaagcatcgacaccgtcctcgacttccccaccagtacctacagtgaaggccgaccagattgaagtgaagcgccaacgccgacctgtagatctcgcctccaccgccgctagtgccctccatcccctgtccgcgagtctcggcaaccaaatctgagttttgaagctttgaaccccaggcggttactgttgtcgtagaccccatatagagtgtgaaggggaaagtagttattgatgtattccgc

SEQ ID NO: 288988 - DNA, 370 bp, Zea mays
  unsure (1)..(370): unsure at all n locations
gtcctcattggcgataagcacgggaagggcgtgatcaggattaggccctgcggcgtcgcgtactggctgatcaccttcttccagctacctgccgctgtggctttcacagggtatattgtatacgccaagaggaagaaacgcgctgttcatagcgaaagccaagaggacggcagcaaggcagaccttgcggacgcaggagtggaagccttgccactacctacactacctctcgccgctttcgtcaccggggctctgagcggcctcttcggcatcgggggagggctgcttctgaaccctgtccttcttcagatcggaattcccccgcagaccgcggcagcancgtcttcgttcatggtcctcttctgtgcgt

SEQ ID NO: 288989 - DNA, 224 bp, Zea mays
gtggcgcgtcgcgtgcggtcagacacgatgagttgcggcacgatgtgtgccgggacagctgcagtagtagcggcagccaggagttcaggcggtcgtggcccagcaaagtcaccgctgatgattcagtggcgcctgcccggagctcggatgtcgcagcgccggcatcgtggattgataggaagctgcttgttgatccaaagatgatgttcgtttgggacaagatt

SEQ ID NO: 288990 - DNA, 243 bp, Zea mays
cccacgcgtccggtcaatgcttgtgcaaatccttggggcgcgccgttgcattgaagttggtgtgtttactgggtattcatcattagctgttgcactggcccttcctgaatctggtcacttggttgcttgtgagagggatgacagatgcctagaagttgccaagaagtactaccaacgtgctggtgttgcacataagattgatgtgaaacatgctttggctgcggattctctaagatctcttct

SEQ ID NO: 288991 - DNA, 237 bp, Zea mays
ggacgcgtgggcgaactccagagtggcctgggttatttaggcatggtgtctcaaagcctcgagaccgcctttggcgtcgtggggagcttgcccgatgctgctggttctttcagtgacgagtacaacagcaacaggtcaagtgcagacttcatgtccagcaacagcaacagactggagcagcgggtgggcggtagcagcagtggaagaggagctgccacgaggaggaaatcagatgga

SEQ ID NO: 288992 - DNA, 336 bp, Zea mays
  unsure (1)..(336): unsure at all n locations
gtcaaaaacagcgaaacactcaggagaatctcatatgttgccttcttttacaaattgggcatgattgccattagcgacgttctaatgtattacctgaactccgtatttggctttgacaaggatcagttctcagagattctaatggttgtcggcgtcggttcaatcttttcgcagattctggtcctccccttccttagccaaataattggtgaaaagggcgtcttatgcattccaatactcgcatccattgcttatgctttgctttatggtgttgcatgggcttcgtggggcccgcagtntagctcttcattgggtatcatctatgttctggccaaa

SEQ ID NO: 288993 - DNA, 271 bp, Zea mays
cggacgcgtgggtctcgtccactccgtcgccgtcgtcttcctctctcccctcccgccggccgatgcatccctacccctagccctccggcgcaaaaccctagatcccgcccccgcctgcatggatccctcatccggatccacgtcccgccacgggcgtctcctcatctcgccgtcgctatccaccccgaccttctccacccactccccgtccccctcatcggccgtgtcccccgtgccgtaccgtaactccacatcctctccgaagcccctc

SEQ ID NO: 288994 - DNA, 212 bp, Zea mays
gtgttgaagaagcatgttgcagaagatgcagaatacaaagttatagtattctgtactactgcaatggttacaagacttgttgctgaggtactctcccagctaaaactgaatataagagagattcattccagaaagacacaatctgcaagaactaaggtctcagatgaattcaggaagtcaaagggtctcatattagtcagctccgacgtatc

SEQ ID NO: 288995 - DNA, 178 bp, Zea mays
cccacgcgtccgcctctcccgtcccttctctttattcctctccgcgtgtggacgacaactggacacacgacacgacgcccacggaccgcttttgctgaccgacgtcacgtgctgcagggcgcgggccgtgggctggccgccggtccgcgcgtacaggcgcaacgcgtgcacgaggagg

SEQ ID NO: 288996 - DNA, 220 bp, Zea mays
ggcagataggttggatgatggttgtgcgtctgttatctctgaggaggccaacataatggggcttcctggtaatgttgagggaccaagagaacaaactcaaagatgcttcaccttagaagaggctacggatacaattctcttctgcagctccattgcccatgacattgcatacagggctgcaacaattggactggagcatgaacagcattcagaacttgct

SEQ ID NO: 288997 - DNA, 432 bp, Zea mays
atgctttatgatgaatgctttgattcatacaagtggctttttgatagttttaagatcgccatgcatggaaaacagcctgcagtagctttgatagatcaatctattccattgagcagtgcaatggcagccgcctggccaagtaccactcaacgaatttgtgcttggcatgtgtatcagaattctctttagcacctcaatcatgttttccaaggttcgaagacattcgcgaaggacttcggcaaatgtgtctttggctatgaggatgaagatgaattcgtgttttcatggagaagtatgctggagaaatatgatcttagacataatgaatggttgtcgaaagtgtttgctgagaaggaacagtgggccttggcatatgatagacatatattttgcgctgacatcataagtgcacttcaagccgagagtttcagt

SEQ ID NO: 288998 - DNA, 479 bp, Zea mays
ctcgagccgtcttgtatgggtcagttggatatgtctgtggcataattggtcaaggaattgctaatatgataatgactgccaaaaggtaatagtgtgccattattcgtgcttctgcacatcaaaatctctatctgctattaattaaatgactaagttcataggtgaatacttcccattttggtgtttagttgatccgatcacactattggattctttgcacatagatttataggtttcctattaatattgtgtctgcttcacccatgctcagtaatgctgattaatctttattttttccctgctatcttgacttgtatacttatgtttgttccttgttcaggagtgtcaaaaaatcagatgaagatattcctgttccaccacttgttaaaagtgcagctctatggggtgtgttcctcgctgtatcatctaacacacgctaccagatcatcaatggcctggagcgggtagtggaggcatcg

SEQ ID NO: 288999 - DNA, 486 bp, Zea mays
gcagctggttcaaatggagacaaataaaagatcatcagattctctagaatctcttccaaaagttatgtcaaatgtgcatgattacttcatctatgttgcttctaaggtggaaaatcttcatcaacatgttgaatcaatgaaaactgaatatctcaatgaacaacgccgcaccggcaatgggggtgatccatttctggaggcaaacagacgagaagcagctaaacaagaagcagctgccagaagggtccatccaacactgcatctgcctacccccgcgcagcccacggcacagatcgctgcaccagctacaagccaaccgcagcaaccttcctttccgtccgctgcgacttcctcaagcgccttctcaacctttagcactccggcttccgctccatcctcgtctagtctgtttgcaactccaacaactccagctccatcgggcaacctttttggtgcgccaggatcggctcagttgaccacaccatt

SEQ ID NO: 289000 - DNA, 333 bp, Zea mays
gcggcactcagcatgcttaacctcttcgactacatcttctgggcacgctgctactccacaggcgtagacacgctgcaagtgcaagtcgtcggactcggaagcgtcggcggtgagcagcagggtgacgaaatgacacccctgagtgctgagattaatatgactgggtccctgaaaacaagttcagccaatcaatcaactaaactagcgtacgtcaagtgtaggtatcttgcctgctttcatggtttttcttcattcgcaactatcttagaacatatgtgtgtgtgagggttagattaatctcacaaagcgatagatagctgatcacaattaacg

SEQ ID NO: 289001 - DNA, 271 bp, Zea mays
cgacccacgcgtccgcacagcgctagcgtcatagccggcgacagaaacaaccgatgccactcctcgccgtctgtccccgccgcgttccgccgctttcgctcgcgcgccgccaccgccgcagcttgtatcgggcccggtccctcgcgctcaaatgcgaggtctcctctcctccgctacttctgacccggaggatgtccgccgctggctcgctgcttgtcgctgtcgtccccgtccccgcgccgtcgccgcaactccccgtcgcctccgcgtc

SEQ ID NO: 289002 - DNA, 332 bp, Zea mays
aaccccatcagcgcatcccttttcgcccgcctgcacacgccgccgccggcaatggccgcctgcgacgacgacgtcgccccgtcaaccgcctccgcctaccttgacccctcttactgggacgcgcggtttgggaaggaggagcactacgagtggttcaaggacttctcgcacttccgccacctcctcgcgccgctcctctccccgtccctctcggtcctcgaggtcgggtgcggcaactcgcggcttggcgaggatctcctgcgggagggcgtcgccggcggcatcacctgcgttgacctgtcccccgtcgccgtccagcggatgcgcgaccg

SEQ ID NO: 289003 - DNA, 369 bp, Zea mays
gcgcacctcaccgcgcgcctcgagtccgctctacaggttttgcaggcgtttctcgagcaggacaatgagttggctgaaaccaggcagagactgcaagagcgtactgaccgtctgggggatctgaagacgcgcgccaagaaactgtcagaggatgctgtggttcggagggaacagctttgtgtcaagatcagaacgttggcaggggcaagcaaggctctcgaggctgcacgcagcaatctgaaggaagctaatgaattgctgtcaggggaaaatggttgtgggcgccttaaagatctggaacagcagttacggatgagacagcaatatatggtagcgcaagttgctcagatatatcctgtgaggcctttg

SEQ ID NO: 289004 - DNA, 503 bp, Zea mays
gtcgttccttccagttagcagctatgattccttggagagagcatttgcagaagctggcacctcaggaatggaaagattttattgtccctttccaaactgttcagtgctgttagaccttagtcagcacttctctagggcaagttcatcaagccagtcagatctcagttgtgtcgagtgcccagaatgccatagagatatatgtatcaactgtggagtgccgtggcacatcatgatgggctgtgatgagtaccagagcttgcccgctgaggaaagagatgctggagacctatctttgcatcggcttgcacagaacaataggtggaggcgttgccagagatgtcgacgtatgattgaactgacacagggctgcttccatatgacttgctggtgtgggcacgagttctgctactcctgcggtgctgactacgctagcggcgttcaaacgtgccaatgcgtgttctgggacgacgaagccatggagccctcctccgccgcacggtcca

SEQ ID NO: 289005 - DNA, 367 bp, Zea mays
ctgcagagttcattccataagccatctaaagcaaatcaagctttgaagaggtctacaagtcaaaaggatttctttcattctagagacagcagctccagccattcttcaattactgatgatgagtctaggagttcactctcttttcatagcagaaatcagaaggctgtctgtgcagtttatggtcccgactaggagcacggaattgatgatggggctggaaatgtattgtacgatgtaatgcgaaaagaagttaggcaagctgttgaggaaataaggaatcagcttgaagaggccatgacaaaatctgaaccttcagaaaaggcaataaacagtgatgcacaaccaacccaagttattactcagctcc

SEQ ID NO: 289006 - DNA, 558 bp, Zea mays
tgcgatgcagagtttactggtataggtgaatttgttgctgaactgaaagagatggctcaggttcattaccagaaacagttaggcaatcagattacaaatggagaatttgtagacataaagaacattggtttggacccgattgctgatgcttcacaatcaccttctcgctggccattagaattcgagaagaaacagcaagagctcatcgggctttggcacgcgtgctgtatttccttagtccacaggacctactttttcttgctattcaagggagaacaagctgattcaatctacatggaagtggagctccggaggctatcattcctcagagatacctactctcggggaaacacccctagcaatgcggtggtaggcagcttgaactcttcccccgctgcgagcgccaagaagctgcagcgtgaacgggagatgcttgcgtaggcagatgcagaagcggctcacggcagaggaaagggagcgcctgtacaccaaatggggcatttcgctggactccaagaagaggaagctccaggtcgctcgccggctctggaccgaggc

SEQ ID NO: 289007 - DNA, 595 bp, Zea mays
cttctgcatgcccattgagcactccaaatgggagattggaaggtgactttgagatgaagcacatcgacaaggctggatcatcaacattcaatgttgcaattgcgccattctccctgtcaattcttggtgacgataatgatgttctgctatgaactacactgagggcttgtttgggagcaaagggattgaagggaattaagggggctacaaaagggattttagctctcgatccccttctgcaaacaagccctgagatttaaactagacacacaaacacaaatatttattgtaagtgatgtaattgagcgcaaggttcaggtggaactactatggttgacttatggctggagccaagtgccctggtgcaaggtcaggtagagttctctgggatgttgaatctggaccatgcgagtatcaattgtgaggcacaataggacatcctaccaattgtacttctaaatgtacagcatggaacttagagcttgctacatgtattatacagtacctttttatttttcccatcacggtatcaccttagttatcgcggcctttgattatattgtatatcagctcagcaaatatggtgttttttgtt

SEQ ID NO: 289008 - DNA, 498 bp, Zea mays
agaagggatcctgcagttgagtcctctacacatgaacattctgtcagcaattctctgcccatggatgatgaccataaagagtttgaaggagcacagtttgatggatctttgtgtgagaagtcagtatacaatgcagtcgagtgcagacatctaccaaatcagatgcctgcagattcaaatacggtgaacactgcactagatgtttgtgaccaagataatggagctcagtgttcagagtttcacatgtcactgccgagcgatacttcaaacagtcttaggggatcaaagtgcatctgtataggagatgttgtgtggacaaggctctttggccgtcgagatgtccaaccaagaccatgaacaacaatgaaatggataacacattcagtttggatctgacatctacttcagatgggtgctgttttgccatggcttggagttgtaaattcagcttcatctggagttgatagttcatgaagttgtacatgcttcaactactat

SEQ ID NO: 289009 - DNA, 273 bp, Zea mays
ctcaaatggtgctgcaagtgtgccgcctcccccggcgcctaccgttgtccgcgatttctctctcaaccaggctagatccatccggtggaacctgacagcgagtggaccaaggccaaaccctcagggttcctaccactacggtctcgtcaacaccacaagaaccatcaggctcgccaactcgcgggcaaccatcaacggcaagctgagatacgcagtgaacggcatctccttcgtcccggccgacactcctctcaaggttgctgatttctacag

SEQ ID NO: 289010 - DNA, 322 bp, Zea mays
gctgatttgagtgatacattaatggaccgcatggttctgaatgaagctaaccttacaaatgctgttcttgtacggtcagtcctcacacgtagtgatcttggaggagccatcattgaaggtgctgacttcagtgatgctgttattgacctatcacagaaacaggcattatgcaaatatgcaagtgggaccaaccccatgacaggggtgagcactcgaaaaagcctaggatgtggcaatagccgtcgaaatgcatatgggagcccttcatcccctctgttgagtgccccgccacagaagattcttgaccgagatggtttctgtg

SEQ ID NO: 289011 - DNA, 269 bp, Zea mays
ccttttcgccacctccccgtcctgaatctctccccccgccgtggatctcgcgccagccatgctcgccaatctcggctatgcccgccaatttcggctagcccccgttgtaccctcgcttaccctcgcaccctctcacacatgcgcatggaagtagcctcctcgtgttggaataaaggcccccctcgctctggaaggaaggcccattcgtgctggaggaatcctcgcccaaaatccatagctgtcgcaccaccttccatccttggcagttg

SEQ ID NO: 289012 - DNA, 324 bp, Zea mays
cggtggccccagcgcagtcggctccttcatcagccacggagaatgcagcagctcggagctgagcgagcaggagctgcagaccaaaaccaggagggagatcatgctccttggcacgcagctaggcaagaccagcatcgcggcatgggcgagcaagatggaggaggagaaggacgcgtcgctctcgctgaaaccggtgcccatggaccagtcgacgcagaacataaccgcgatccgcgcggctgcttgggaggaggctgagaaggccaagtatttggcgagattcaagcgagaagagatcaagatccaggcttgggaggaccatca

SEQ ID NO: 289013 - DNA, 312 bp, Zea mays
atcgttttgtctcagatggacgggggcgatatgataaccgtcgaggatttggagacaagggtagggatcgtagctacagccgcagcccggacagaggccgggcacggggttatgacagaagaagtgacggcaggagcattagtaggagcaggagtcgcagcaggagctggtcacgcagcagaagccgcagcaggagctggagccgaagcagcagccggagtcacagcaggagcaggagtcgtgaccatggggcagcaccggagcgcaggccccgagcaagatccggcttcgatgtgctgcctcctgcaactg

SEQ ID NO: 289014 - DNA, 344 bp, Zea mays
cgccttgtgccacatagctcaaggctgcaagaacttaacagaactttctattcggcgtggttatgaggttggagacagggcattggtgtctatcgccgagaactgtaaatcgctcagagagttaacgctccagttctgtgagagggtatccgatgcagggctatctgcaatcgcggaaaactgccctctgcataggctaaacttgtgcgggtgccacctaatcaccgataccgggctgacggcagttgccagaggatgccctgatctagtctgcctggagatgagtcgttctgcggatcgtaggtgacatagcgcttgcggagataggcgacggctgtccgaag

SEQ ID NO: 289015 - DNA, 287 bp, Zea mays
gtggagcttccgatggacgggtttccagacgttgtgattttcttcttcttctttttgtataaatcttattctgatagctaacgcgtctgtctcataagtgttttgttttcggtgggttggaggaagttggggtggaatttcctgtgattatgtactgcggcgtcctcaatttgatttttagacatgtaggattgtttgtgtaaagtattctgatcactaggtgggatggatgtcttgtcctggcgccctgcagtgtacatggtttaatatatgaagcagttttattt

SEQ ID NO: 289016 - DNA, 375 bp, Zea mays
gtcgaaaagacagatagttttagtgatcttgtcaacaggccactggaaggatttgatcctattgaactagacgaagctataattgaagagaacaggtcagattcagttgaagaaagctcaagcacattggacgtccaagcatctgaacaacgcgatgatcagagagagagtctcactaataatgacgtgaaaactgatgcagcacatgaaacgggcaccgctatatctctatccaccagcaatggagagcacagtggcgtcaagggtgataaatgtcagaaacatgagactgatggtccagatacagatgatttcaacccaagagatgtggagcctggcacaaaagtaagcgaggacacaacggatgttaagagc

SEQ ID NO: 289017 - DNA, 370 bp, Zea mays
agcaagtgtttgggatcctgatggagctgaggcctcggtgaagtatctctgtttggcagtgcattttattgattctgattggaaacttcaaaggaaaaccatcaaatttggcgtgttttggtccttgcctactagtttggaaaggatgatacagtttaaggaggcctgtgtgctagattctgatattggaccatttaatgtcatacaggaagctttaagggattggaatcttgatcagaagcatttcagcttgacatctggcagtgaaattagaaacgacgagagaacctcaaagctgatggacttgctcatccaaaggaaatgccttcctataagaggtgagctatacaatatcgattgtgtgaatgat

SEQ ID NO: 289018 - DNA, 238 bp, Zea mays
agtcacaagaccagagagagatcagccttgatggatttagaaatcgtcggttcaatgttcttgtggctactgatgttgcagggcgtggtattgatattcctgatgttgcacacgtgattaactatgagatgcctagttcagttgacacatacacacatcgcattggaagaacaggtcgtgctggaaagaagggggtggcaacttcatttttaactttagagaacactgatattttctt

SEQ ID NO: 289019 - DNA, 290 bp, Zea mays
taaggcatgtgcccattctcctccttggtaatgacaccattgggatatatcagcagctcccgtgtgtctatgcattgtgttagttgtattaccagtgcgtagtgaacaaaaagggagccagcttatgaggtgttgagatttctgaccaagaggtcgatttgggatttatgggagtctttcaatgaacctcttatagttcggtacctcagtaaccgggaactgggaacatggccacgttcctcgttccatgaacgttcgttccgttccaggaacgtgggaacaatctcgtt

SEQ ID NO: 289020 - DNA, 281 bp, Zea mays
gtgcgtggcgagtctcggttctcggaccacaggcccgtgtacagcgtattcacggcggaggttcggattccgagccagcagcaggcagcggctcagttcggcggcggcggcggcggcattactcgttccgcgtccctcctggggctggcgctggacgagctgccttatccacgcagttacatggacatcaatttttactgatcgactgcgcgtgtctcgatggaggacgaaaggacgcagccaagccaagggttcaccttctgatggctggctctggctgg

SEQ ID NO: 289021 - DNA, 371 bp, Zea mays
ggcccattggcatgtaccaatattagctatgacggcagatgtaatccaagcgaattttgaaaaaatgtatgcagtgtggaatggatggatatggtcaaagccatttgaagaacagcagctctactctgctgttgctcatttcttagagactgatgaaacagaataacaaatccaacttcgtaggagattgatttgccgcaacactgtttcaacatctgccaaaagaccatctgttcaacaggttctgaaaaacagcgatcggcagcatatttgcaatggaattgaggtcccagttcttatatatagaacttgctccaggaaacaaaatacattggactcccactgaccagaagaaagaagataagatagta

SEQ ID NO: 289022 - DNA, 347 bp, Zea mays
tcccgtactgttttgaagtcactggccccaattcctgagtgtgaagaggagtccctttgtcgtgaagaggaagaggaagaacttcctccacgagttcagaagaccgacacttcttctatcgctaagcctgaccaaccagcaaccaaactggtcctcgagaacaaaccttcagctggaccaattctccatagaaaacctgcaactgaacctctaaaggctgtggttccgtccacttcgccttcaaaaccccagggttgggaagccatcccaaaaccgaagagtcattcaggccttgactactcaaaatgggacaaaattgaagaggattcaagtgaagacgaggacga

SEQ ID NO: 289023 - DNA, 250 bp, Zea mays
ctgagccaactagctgtggtgaaccctatcgcctacttgcaatagcagatgcttgcatccaacccacttgctctggcaaacgtagctacataccaacaacaacaattgcaacagtttctaccagcgcttagtcaactagccatggtgaaccctgccgcctacctacaacagcaacaactgctttcatctagccctctcgctatggttaatgcacctacatacctgcaacaacagttgttgcaacagattg

SEQ ID NO: 289024 - DNA, 387 bp, Zea mays
gttcgatccttggtgaagaaaacagtgacaaagatgggagccaaagtgaaggttctattgatgaaatggactatgaccacaagcaagcagaagcaaaaatgggtgccaaaggctcccaatcagattttggcattgacaagtcaatatttatcaaacccgaaacgtttcacctgacggttcttatgttgaagttgtggaacaaggagcgtatagataaggcctcggatgtgctccagtcagtatctacacaagtaaatgaagctttggaaaatcgacctatttccatacagcttaggggtctgacatgcatgaaaggctttccagctaaggctcgggtggtatatgttccagtgctggaagttgtgtagcgaagggcgcctagctcgt

SEQ ID NO: 289025 - DNA, 398 bp, Zea mays
ctttgatcagtcagttgggaaaggtcggaaaggttgaagaagcaggctgcttgtttgagcagatcatcagaagtggcatgaagccagatgttgttacttttaatacgttaatcagtattaatgcgaaagctggtaggctaaaggaagctggcaaatatttgaggaggatgatcagagaaggcattgcaccaaaccatgccacagaaacaatattgattttccttgataaggagattgaaaagacaaggtagcagcacaaattagctggcaaaaaaaaaggaacgaaaacagtgtgatatctgttatttgtattaaccattacaaggattgtgatgattgatgctgaattttttattcctcagcgtacagaacagcatcacgctatcaggtatggacaa

SEQ ID NO: 289026 - DNA, 290 bp, Zea mays
acaagtctcagtgattggcaaggctggtggtgacatgtggaagtccttgtctgatgccgagaaggctccctacgtatctaaggccgagaagctgaaggttgagtacacaaagaagatggacgcctataacaacaagcagtctggaggacccacagagtctggtgattctgacaagtccaagtccgaggtcaacgacggggacgaggagggtgatgagtgatggatgacgggtgaaactctgggctgcccaagtgcttgcagtcagcagggaaatctcatcgtcgttgggc

SEQ ID NO: 289027 - DNA, 304 bp, Zea mays
gaagcgagcaaaggatgaggcagcgagggatttgcagagtgtgaggagagagagtgaaaagtcaaagtctgaattggctgaaattagtaaggtgcatcaggccaaactaaaggaagaggaggatatatcgaagagcattatggatcgtgagaagcggctaagtatattgtaccaaaagcagggaagggcgacccaattcgcaaacaaagctgctagagataagtggcttcaaaaggaaattgaagatctcaagcctgtacttttatcaaataaaaagcaggaaggtttacttcaagaagaaatc

SEQ ID NO: 289028 - DNA, 385 bp, Zea mays
atagatttgcatggcgagaactgcagattgcgactgataatttcaatgaaagaaatgttcttggacatggaggttttggtaaagtgtacaagggagttcttccagatggcactaagattgctgtaaaacgactgactgactatgagagtcctggtggggaggctgccttcttgcgtgaggttgagcttatcagtgttgcagttcaccgcaatctcttaagattaattggcttctgcacaacacaaacagagcgcttgttggtctatccatttatgcagaatttgagtgttgcctaccgcttaagagattttaagcctggagaagccatcctagattggctttcaaggaacgggtggctataggtacagctcgtggactggagtat

SEQ ID NO: 289029 - DNA, 257 bp, Zea mays
gaaattcttttattgtagtttcttttgcacggtcatttctaatatcctgttcgtgcatgttatgatcaattgtaccagcttctgccgccacctcgatccacatgctgatgataacgtatacgtttacgcactgcgtacgcagggtggaagtgcaggactgcagacacgtccaaaaaaaaaagaaaaagaaatgtacgcgtcgctcgctcttgtcagtcttcttcggtaccaaaccggaaagaaatggcagggttgga

SEQ ID NO: 289030 - DNA, 311 bp, Zea mays
gagttttgcatatagtgattttgagaatggagaaaataataaacttttgctgaaactatgtggaaagggactagtatctacccatttgactggtctgttgagaggcagaagctcagtgctgatgaaaaccgtaatctctatattgctcagagtgcgctgcagactcatgttgtgcagactccactctggtctaaatcccggatacactttcaagttatggagggtgaaacttcagaagcagacattgctgatgtaatttcaggggaagttgaagtagagaaagtccagaccctcaacatcgagtcaaggtc

SEQ ID NO: 289031 - DNA, 252 bp, Zea mays
tgggcccagaggatgtgagtacagttcactgattctaacaggacccatcttgttggtgccctggtgggggaatggggtttcgactgatttttctgtcttctgttggcacgtagctcaatcggtctaccaccggcacctacacgttcatcttctcgggggacggcagatgaattggccaccggggtgagttggtgttgtaaaggtctgtttggttcactgcctaacttgccacacattacctaacttttctgc

SEQ ID NO: 289032 - DNA, 347 bp, Zea mays
aaaatgtactaccaagaacctacatatctacatacaatgacacctctcctctcctcacctgcccgtgacgcggagtgcctttgcccctccgccgctgcctagatgtttcatttcatctttcggcgtgtgaggcacacgacacgataaggatggatgttgggtggggctgctccctctttcaatggaatgacagtcaatatcacgttggggagggactttagtgtactcctgaaagacttcagagtattgttgcagtaaggcttgaatagccagacgaagagtgtggtgcctacagagacaagctgttgagatgcagaatgaaactagaaatgcctttgttgagaagc

SEQ ID NO: 289033 - DNA, 368 bp, Zea mays
gcaacggtgaccattgatctttagcccttactacagtgacatggaaacccaatatggcctcaaaggaagaaaaagaactgttggtcctttggaaatctattgctcactgaatgatgccacatcgctggtcccgtgttgcttggcatatctgccgtgcctattcacatcttattgtgcctagactttcatggggaagctgaggaaattataatggaaaagatgagatttattctatatcggttgcccaaggttgaatgagtggttaggaaaaatcagatttgggttcagtatgtttcttgcttgcatttgacttggtacataggacagaacaagtgcaacgatgccgctgatactagctcactttgggg

SEQ ID NO: 289034 - DNA, 269 bp, Zea mays
agatacccctctgttacttgcagaaactggagactgactgcaccttggagtggatcgaaaatcacagtgcctgcgaaattcatactcagcaagaacgacgtcggcctgcagtccttcggaaccgagaagtacgtcaagagtggcgctctgaaggagaacgttccagaccttgaggtttcgatcatcgaggggcaccatttcgtccagcaggaagaggccgggacagtgaattcggaaatactctccttccttgacaagtttcccagcga

SEQ ID NO: 289035 - DNA, 323 bp, Zea mays
agaagagaacatagtagtaggctaccaaaaaaaaactgcgagagcaacaccaagtggttaacagaagtttatagggcattggaacatttttttagtagcagtagcagtctagaggtgcagcgaggtgtcgacgtcgacttcaccagagacatgtttgtagttgtaagtcttactgggccacagctccaccgtgatggggtcgttatcgccgtggagctggaagcttttgcattcacaggccgggaataaggaggcggcagcggtgtcccgcagtggcctgcacgggtagagcagctccggatggaagaaccacttcacgggca

SEQ ID NO: 289036 - DNA, 347 bp, Zea mays
gggaaatcaaggaaagggcagaaagtaaaagtagaaatgtgcatgaaaggtgggtttaaggacagcttgatgacggcgtagctgacgaacagcacttgaatcaccagaattcatgatctggactgttttttcttagaccaataacagcaggaaaatgttagcttatcttacttagggctagtttgttaactccatttttccaagacattcttatttttctaagggaaaattaactaattttccttgggaaaatggaattcccttagaaaaacgaggttgccaaactagcccttaaagatttgcctatggattatttcctgcttgctatcggtgcgatcggtatacct

SEQ ID NO: 289037 - DNA, 291 bp, Zea mays
gatcgctccgtgtccgaggagagcggcggcggcgcaaggagtcttcctgtccgacgccggcaacgtcgacaccgctggcaaacttctctccgattgtccctgctccagtaagagtaggcgaggatgagcctcccccatcttgggtgttggtgcctgacccattttctcaagttttgctatggatatgagcaatagagatcaccttaggaggagggaggaggatgatgatgacctcttccttttcattctcccttccctacatctcttgggctatcttggacgtagtaaaaa

SEQ ID NO: 289038 - DNA, 424 bp, Zea mays
  unsure (1)..(424): unsure at all n locations
gttgaacttaaaaatcccctccaaattcctgttgctgtttctggcatctctattatatgccagctttccagcactttggatgcattaagttctgatgttagtggactggacttggatggtggggaagataaggttaacacagagccatctatttcaatgttggagactgatggagataagtttacattgtcaaagcttgacattgtattaggaggaggtgaaagtaaaagagtgcaacttgatgttactccaaaggttgaaggtattttgaagttggttgggataaggtggactctttcagagtcagtagtaggttatcaatactttgaatttaatgcacagaaaaaaatcaagaaagggaaaagaggcccacaccgttcttggaataacagcctggttgtaatcagggtttacanaacttaca

SEQ ID NO: 289039 - DNA, 242 bp, Zea mays
gtgaaattcaggagatccgtacaccaggaggcaaccaaaagtggaagaacaagggcaagaaaacgctcaagagggccaaggataggaggaaatgagactggcgtgctagccttgtggtccagttgtgagagaacagattggagaagtgaaccaaggagcgccttcaaataccccctctctcgatttgtgcggggcatatagattctggttccagtgtagtgtgatgaacttcagtaacatga

SEQ ID NO: 289040 - DNA, 343 bp, Zea mays
gcacaacaaagtaatcctccgaagaaggcttcactgaagcctctacattgggtgaaagtcacgagagcaatgcaagggagtctctgggctgatgcccagaaacaagggaatcaggctaggtctcctgatatcgatttatccgaactggagagcttgttctccactgcagttgtaaccagcacaagtgaaaagggggcaacaagacgtggttcagctattaacaagccagaaattgttcacctggttgacatgcgacgagcaaacaattgtgagataatgcttacgaaaattaaaatgcctctacctgatatgattaatgcaattttggctctggacacttccg

SEQ ID NO: 289041 - DNA, 232 bp, Zea mays
aaacaactaaaccttgctagatctgctggaccacctgaattacgagattggacagatatggctgagtcgtatgacaacctcaataactctgttaaagttgctttggttgggaagtatactaatctgacagattcttacctatcagtggtgaaggctctcctacatgccagtgttgcctgttcgttaaagccatctatccagtggattgcagcttcggatcttgaagatgcaa

SEQ ID NO: 289042 - DNA, 479 bp, Zea mays
ctccgcgctcatcaccgagaccaaccaggaggacgccgtcaccgcgcactcaagaacggtgttaggggcctgatgctcgacacgtacgacttcgacaacgatgtctggttgtgccactcgttccaaggaaaatgctacaacttcactgccttccaacctgccatcaatgtgttcaaagagatccagacattcctcgacgcgaacccggcgcaagtggtcacgatcttcctagaagactacaccgcggtagggtccttgccgagagtgttcaacgcctccggcctcacgaagtactggttcacggtggcaaagatgccgaagagcggcggcgactggcctctgctcaaggacatgatcagccagaaccagcgcctgctagtcttcacctcaaagagagccaaggaggcgagcgaggggatcgcgtatgagtggaactacgtcgtggagaaccaatacggagatgagggcatggtaacagc

SEQ ID NO: 289043 - DNA, 261 bp, Zea mays
  unsure (1)..(261): unsure at all n locations
atcgcttatctgttgtaaaagaaggaggttgcaggaccacacttaataattgctccaaaagcagtattaccaaattcggctaacgaattcaaaacctgggctcccagcattgggacaattctgtatgatggccgtccagaggagaggaggctgttaagggataagaattttgacggagagcaatttaatgttttgctcacacattatgacctgatactgaaaganaagaagttcctaaagaaggttcactggcattatttg

SEQ ID NO: 289044 - DNA, 437 bp, Zea mays
cggacgcgtggcggacgcgtggggctctgcgcttgcaagcccatcagcgaggaggacctcgccgcattcatcgccgacagcatatacgaccaggacaaggccaacaaggtgctgcccattggcgggccggggaaggcgctcacgccgctggagcagggggagatgctgtttcggctgctcgggcgcgagccaagttcatcaaggtgcccatacagatcatggacgccgttatctgggtgctcgatggattggccaagctgttcccgggtttggaggacgccgctgagttcggcaagattggcaggtactatgcctcggagagcatgctgttgctggacccggagaccggggagtacagcgacgagaagacgcccagctacggcaaggacacgctcgaggagttcttccagtgtgtgataacgggagggatggcgggg

SEQ ID NO: 289045 - DNA, 451 bp, Zea mays
ggcgcgcggcggcgctgctgctgctgctgctctgcctctgcctcagcagcctgtacctcctgcttctccatggctcctccacgccgctggagcccgcggcggcggcggcggaagcaagagttgccgaggcgcaggcggaggtcgaggaggcgccgctgccgccggggaactccaaggtcgccttcctcttcatcgcgcgcaaccgcctcccgctcgaactcgtctgggatgccttcttccgcggtgacaaggacgggaggttctccatcctcgtgcactcgcggccgggcttcgtgctcacacgagccaccactcgatcccgattcttctacaaccgtctagtcaacgatagcatccaggtggattggggggaggcgagcatgatcacggctgagcgcattttgctcagccatgctctcaaggatccactcaatgaccgctttgtttttgt

SEQ ID NO: 289046 - DNA, 187 bp, Zea mays
attggatatcaggctggaaaatttaccagaaattacctgattgaagagctcaatattcctgagtctcgattggtaccactaaatacaatccaggagtatgctgatgcccttaagcgtggaccaaaagatggtggtgttgttgcaattgtggaggagatgcccctatgtggagatcttccggtcatac

SEQ ID NO: 289047 - DNA, 378 bp, Zea mays
ctagttctagatcgcgagcggccgctcgcgatctagaactagtttttttttttttttttttttttttttcttaccaatcaactcttcatcatataatcaacattggtctcattaatcagaaacaaaaaaaggcctccaaaaaaaaacaagcacgccacatcaaacaaggaagaaaagggaaaaagagaaagagagaagcaaaaaaaaaaaaatgattgagcctattgcgccaatatcctactacctacaccgccgcaagcggacagcacgcctcgggacaagcagatatcagctcctccacacagtatcccgtcatacgctcatgctcgccttcgtcgtcttcctccccgcgctcgtcgccgctagaggctcacaatt

SEQ ID NO: 289048 - DNA, 439 bp, Zea mays
aatcggctcgagtcgacattgagcacacggatggcgagcggtactttacatgggatcattctgccttccccaatccagaggagatgcagcggaagatagcagataaggggaggaagatggtcaccatcgtggatcctcatatcaagcgtgacagttcattccacctccaccaggaggcaacagacaaggggtactatgtgaaagatgcaaatgggaatgactatgatgggtggtgctggcctggatcatcttcctatcctgacatgctgaatcctgagatacgcgagtggtgggctgacaagttctcctatgaaaatcaaagggataactccgacatctaatttggaacgatatgaatgagcatctgtcttcaagagcctgaggtcacctacgccaggatgcgatgcattatggagatgttgaacaccgagaattgcac

SEQ ID NO: 289049 - DNA, 494 bp, Zea mays
ggaggagaggcctaggcgggagcgccggaggtttgaggatgtcggtgcgaatcggaagaatggtgatgtgagtaagtcgagtaaggaaatctcatctcatgagcagaagggggagttatcaattaacggagattcacagaacggcaatgggcctaatgctggttctcagcaactgctcagtgccgttcctatgccatcttctgttcccattccttcaaaggtatcttcaattactaccaacaatgcaaatgagggagttagtattagatctgatgaggttaccgtaaaatcgagtacagatggacgtgcaagatctgctgctggcataagtagtaacctatctcttgatgctttagccaaagcacaaaaagctttgcaactgaagacggtactgtcagatatactcaagagattacctatgcttaataataagcttggtacatctattactgctacacaagtttctagagaagaagcaaaaacttctgtatcag

SEQ ID NO: 289050 - DNA, 371 bp, Zea mays
tgaacatcactatccggagccggagcctcagtctcacaggagggagagggacagcggaggagaaatcgcccttcttccagtttcattcagacaaattccttcccagttttgactgtcgttgctcctgctgcttccgtgcgctccctgaatcccagtctcctcccccgtcgcgtcccggatcggagctcccctccggcacgggcgtctccactcccctcggatcggccagccccgtcgccgcaagataagcaagctatgaggtgcctgcctttcttgcatggagacgtcagtgagaaggatcctgtcactaagtcggcctctgtacggtccatgagcacaacatcgcgctcccgctccggttcagacttcac

SEQ ID NO: 289051 - DNA, 279 bp, Zea mays
cggacgcgtgggtcggcacactggtgttgtgctctgtaaacaacatcgacatggcactgagagaaataaagcgagtcctaaagcccggtggtctctacgtgttcattgaacatgttgccgcaccagatggtacgttgctccgcttggttcaaggtgcgcttgatcccttgcagcaattggtagcggacggatgccacctcaccaggagaaccggacagagcatccgagatgctgggttctcgagtctgagcctggacggtgtccgactgtcgaacgcct

SEQ ID NO: 289052 - DNA, 387 bp, Zea mays
gaaggacaaagtgcacccttcatttgttaaagaccgccgggccatgaagagagaatatgaagaattcaaaattagggtaaatggccttgttgctaaggcacaaaaagtccctgaggaaggatggatcatgcaagatggcacaccatggccaggaaacaataccagggaccatcctggaatgattcaggttttccttggtcacagtggtggtcttgatactgagggtaatgagctaccccgtttggtctatgtttctcgtgaaaaacgtcctggattccagcatcacaagaaagctggtgccatgaatgctcttgtccgcgtctcagctgtgcttaccaatgggaaatacatgttgaatcctgattgtcgatcatacatcaacaacag

SEQ ID NO: 289053 - DNA, 216 bp, Zea mays
ctggattggcaagatcaggaagggcggcgactgatgcgccgccactcaagtacacttctcactgaatcatgtagtctatgcagatagctatacataagcttatataggtgttctactagccggtgccagcgaatctatctggtgctgcttttgtaaaagctgttcgatgacgattttgaacaaccagtaatgaatgacgagtggagagtgttttga

SEQ ID NO: 289054 - DNA, 461 bp, Zea mays
tgctcgccgcgctgaacgcgtacaaccgtggcggtagcgaggagcagcagcagaccgagggggagcagcagcacggcggcgacggcggggttaacgatgacggagacgaagatggtgacgacagcgctgaagagaacaatggcaacaacagctcacagtaagctgtaagcccgcgacgacaagcttggggtgacgatgatgatgatgagcagggattccgccaccatgatcgcattttcctggtagcgctaaagaatttcggcgtgtcttgttcgctggaggatcgccctgagctgtcgccggactggggttaggatgattggacggaggaaaccaaccgcgggatccaatcatagacgcacaaaaaaaaaggaatggtgcgctactatttgtgcaggaagcaagcaaagcaagccgagcgaatgcaggagcaacacttctggctagttcattagttcttt

SEQ ID NO: 289055 - DNA, 298 bp, Zea mays
cggacgcgtggggcaagcgagagcgcagcaaccttgacgtctacaaagatttcaacaggctgccaggcgcggatccatgccacagccacggccacggccacggccagaccactgccggggcttccgaccagagcgggaggatcggcaggaagaggaaggaaatgcacagcgacgaggaggacgacggcgaggagaaccctttccaggagggcgacgagccctccgcggctaagaagccgagagtcgtctggtcgattgagctcaccgaaattcgtcgcgcgtcaccagcttggatgat

SEQ ID NO: 289056 - DNA, 369 bp, Zea mays
gtacggtccgaattccggatacaccacgcgtccgggacgcgtggcacgacactgctctccctccctgtgtacgtcgcagaagaggatgttctgttgataggacatggaggtcaacagcacgggaccccgaaccatgtcgtcgacattaaccgaccgaccaaccgaccgtgaagctgacgcgactctctgccaccagccagccggagccatttttgacctcgctgccgccgccgccgaagccgacgccgccgactctcacctaacaccgaaatggaagagaagaccggcggcgcaccctgttggctgctgcttcccttttcatgccgccccttttttgtagtgcctcgatttggccgtactctgctggcg

SEQ ID NO: 289057 - DNA, 474 bp, Zea mays
ggtccgtcgcaccgccccaccaccagcagcagagaagccaaagccgccccgagccgtcagcgaagaagaggcgcgcgcctggctgcagcgcctggacagtctcgagtcgctgtgcggccaccttgccaccaggcctgcgcagatcccggaggacaaagagcgcgtaccgctgagctcgttcgagcggatccggtctgttgaggctgacctcgagaggaccataagagtgctgaacgcgaccgtggcgaacagataggcgctggtggaggaggtggctctggagtctgtgcaggagccgcctagagccaagaagaggatgttctgttgataggacatggaggtcaacagcacgggaccccgaaccatgtcgtcgacattaaccgaccgaccaaccgaccgtgaagctgacgcgactctctgccaccagccagccggagccatttttgacctcgctgccgccgcgaagccgacgcc

SEQ ID NO: 289058 - DNA, 396 bp, Zea mays
ctagttctagatcgcgagcggccgccctttttttttttttttcaaaaaagaaggaagcaaaccgaaccgaacaacaatgatggctcagatcatttttacagtccccagcgtggggaatctagccacctagtgactccgtcttcttcacttggtgctgcgaggatctcaatgcagatgtccaatacagccgaaggatttctgcaattgataagcttgctaccctccagcaaggaaccgtccagcatccagctctcccaaacatcaaaagaatggcttgcaaacaccaactccatcttcctattaatctgtagtagcttaccgccagcaacaaaggatcggagccccatagtatccttgtttttgaaagtaacaaggaactgagcagcggggtccctg

SEQ ID NO: 289059 - DNA, 260 bp, Zea mays
cccagatcaataggggcgaggcgacaccagcgaggagacgaaatcgtttaaaggcgtcagcttgtcttctgttccatttgtggtttcatttcctctgcaaacgatttccattttttcggcacgccgtcagctgatccttttcgccgtagtatccccgatcaaaagtcgaaaacccttttttttatgcgctgtactgtttcgccatctctgttcgtctcatcgaggcaccgactcaatccccattcttggcatctggcttc

SEQ ID NO: 289060 - DNA, 485 bp, Zea mays
cacctctactcgccgggccgcgcgcccgcgcgtgtctgctcaaccgtagcgctcgcatcccctttcttcctcgttgttctagcaccaccggccgggcttctccctcgttgagtgcccttgcctacagccccgacgtgccactgctctggccctgccttgttgtgttcatggatatggacagcatcgacatcttcattgtggcgcgtcactgtgatctccccacgccatgccatacacgcccgccaccacgtcttgctcctgctgcagagcaacaacacgctcgccattccctaatcaacctcgtcgtcgttttcaacaccgtcgagacactcctctgctcaacgcgtgtctcctgcttgtcggaatgtgtgactggcctcctcgaccttccagtgggctggttcacgtcggccaccgtgtatccaacttccgcagtaacgttgttgtactctccttggtgctcgttgccgactctgctacccggt

SEQ ID NO: 289061 - DNA, 406 bp, Zea mays
agctttcataacttcacgaagacaagttagaattgaagactatgtccatgagtactactcagttgaacgtttcaaagctacttattagtttgatattaacccgatggttgataaggctcagtggcccgtggttgatcctgggtttgtgatggttcctccgaagttagagaggcctgcgggtaggccgagagtacgtcgaatcagaagtagtggtgaggctgggaaaagaggcccttaccaatgcaagagatgctttcagtttggtcatattgaaaagacttgtcgtgagccccctgctgaattgggggatgagctcccatcaccgcctaaaacacaaaagagaaacggtgatgctgtcccgcacacaccaaaaaggtccaacacggcaaaaacaactgcatcaact

SEQ ID NO: 289062 - DNA, 399 bp, Zea mays
cgagagtcgctgaagccatggcgaccacggcgaccactgcaatcctccgcctcactccagccccttctccccgcaccgcgcgccctcctcgctctgctaccttcctccagcccgcgctctccgtttccctctcccactccctccccgactgccgcaaccaccgccttgccgccgcttccaaggacactgctagcagcaaggggcaggaacaagaccaagagcccgcaccgtcggcgccacaggaaggaggaccggagaaggtaacggaggtgggggcagcatcgcccggggagaagagcccggaggcggtggcggcggactgaaggaggtgctgatggcgcggaaggaggcggaggccgccgagggccgcggcggttggtgggcaggcttggcgcagaa

SEQ ID NO: 289063 - DNA, 439 bp, Zea mays
gcacattgttcgcttggagaaatccaattttctactcacggacgccgcccctgtgcctcgccatcgcctcaggtacgcaaggcggccgaacacgagcgcccgccttcgttcttgcctgcgctgcccctctcctcgccgtttattcgggctcctacctcttgttacaacttgcgcggtgggggcagtgaggcagcaagacgtgaggtccaggatgatgaacaacaacagtggcggcggtgccggaggccctggagggggcatgggtacgggagtgggtggagggggggacgggcggcacgacgacgaggctgcgctcaccgagttcctctcatccctcatggactacacccccacgattcccgacgagctggtggagcactacctcggccgcagcgggttccactgccccgacttgcgcctaacgagacttggtctgtag

SEQ ID NO: 289064 - DNA, 351 bp, Zea mays
gatggttgaagttttgaattgctggatgccacaaagaagtggcttgaattctacagcctcattgtttgaggggcaccaactgtgtcttgactaccttgttggaaatcttctaaagctttatgtggatattgaattcactggctcccatacacaattttttgacaagtttaacattcgacataatattgctgagcttctggagtatttatgggatgttcctagtcaccgaaacgcatggagacaaatagctaaagacgaggagaagggtgtatacttaaattttcttaactttctcataaatgatagcatctatcttcttgacgggagtgtgaacaaaattcttgaactgaa

SEQ ID NO: 289065 - DNA, 331 bp, Zea mays
gagaccgtggccactgctaaagcacttggtgattctctgtatgatgaaaacctaggggaacccactgagctcaaatacttgtaatttgtgggcgtaataagaagctggtcaatcgattgcaatccataaattggaaagttccagttcaggtgaaaggctttgttacaaagatggaagaatgtatgggtgcttgtgattgtatcattacaaaggcaggacctggtacaattgcagaggcaatgatccgtggcttaccaattattctaaatgattatattgctggacaggaagctggcaatgtcccctacgttgttgaaacgggtgttgggaa

SEQ ID NO: 289066 - DNA, 362 bp, Zea mays
caccagcggagtgtttgcccaatgtcccttgcccaattgccccgcgccgccgcccccgcagcagagtagcagaccagcggtggatgtgatggccgcgagcggtatggaggatgagagagtgagcggggaggtcagggagcaggaagacgacgacgacaacgtgcctcaactcagcgctgcggcgatggaggcgctccgggagtttctggcggaacagcatcgtccggaggagcagaatgaagctggaggaggggaagacggggtagagctgagtccgagagactggcggttgagccaattctgatatgatgagcgtacgcgcgacactcgtggagcggtcggtcgcttgtctcccttctgga

SEQ ID NO: 289067 - DNA, 236 bp, Zea mays
cctctgctcctccccaacgtcgctcgccgagcaccctctgccccggctcctccttcctggccgcgcatcctgtgcctgctcgtgcccagcctgtgcttcctctctaccaccgctcgcaaggctccctccctcagcttgccggtcgtgagtccctggtgccgtgcgcgcgcgtccctgggcccagtttggtgctcaccccgccatggagctagcgctgacagcgccctctccagcca

SEQ ID NO: 289068 - DNA, 528 bp, Zea mays
gagcaaccctaccccaggcccagcttgcgcgctctctctctctctggacgacgacgcctacgccagggccccaggtcgctgccgccctacgccaggtccccttcgccggcgacgagcaccaggtctgttgttacttctctggtgatggaccggatttcagctcaaatctgaaagattggaggagcatattccagtttgaagggtaattagaggatctcccccatatgtttgatgattagctcattgagcaacatacagcaacagatagctacaaatcgtggcatatgactccaaaatggagtgcatgctcttcaaatagctacagagaactaccttcacatgaaaatggagagtgcaaatcaaccttaacagagtcagtcccttcacctacaagctgttttggcttgcacactgcaaacacaatgtgctccttatcttcacaaaagaaggatggtaatgtttataaaagaaggaagatggataaggattcgaattctcctataacatttgaggatgctaaagaaatgg

SEQ ID NO: 289069 - DNA, 415 bp, Zea mays
cggacgcgtggggcagcctcttcgccgcctgccccatatccaacaacagtatcactgcttctgcctctgacttccacatgtccatcaaggtccccccatccacccttgttgcggcagtgagcactccctcattatcaatccaagggttcaaagtggtggcatcagagtacaagattccctggccactcttctgcccccgtggaaagggcagcttctgtttcatcaggttggggtcctcttgtcgtcggcagagccgcaaagccttgaagcggcttaaggttagcttgactgccttatggatcgaaaacattgaggctatcatgactcactgtcagtcccagggagccaaggctaaggatctgctagttgcagttcaagtgaaggaacagagtcatacatgcaaatcccaaggcct

SEQ ID NO: 289070 - DNA, 315 bp, Zea mays
cccacgcgtccgggccaacgtcaggttccatgtcagtccgtgcgaacacttcagtcggacacgggcggacggcaagaaggtgatcgacagagggtctcatttcctcatggttggcaaggaggagttggagatcagctttgaagcctgatgccgtaagaggaaaagcgttacaatttacaggtgtcgccgggaaagttggtaacttcagcatacaacacaagaagtcgagtaatttataattcattcatatttgcctcatcaaaatgttggggcttttacatgtgatttattattaagcatatttatctatccaat

SEQ ID NO: 289071 - DNA, 257 bp, Zea mays
caatcacaagggtagttcaaagtccagaattccagactcgcgttcgcacgccgcctttcgcgctgccttagcgccttagcctgctagggctcgtcgattcatcgccggctcgacttctgatctcgcgggcagagcagcgcgccggcgcgatggcttcggatccggatgtgtccggcggcgagcaggcggagccgcccgacgatgtggacgaccccgacgtcgacgaggtcgaccccaccggccgctattcaggtaca

SEQ ID NO: 289072 - DNA, 444 bp, Zea mays
cggacgcgtggtgttttttttttttttttttttttacattcaaaggcatgtcacgttgccagcatttcatattgaaaacagaaacatcactgaggccgtgttctggagtaaaagttctctgggtccggtaatagccagcctgctgcatacttcctccgcagcaacgcgatgcaggagttgtgatcaaagcggaagcgtccacgaaacattaattggcctgggaaactgagagccaccatcacattttcgtagcagaattcagcacgtaccggctagacatttgctactccaacgacataggcgttccaagcatctccttggttgaaatgctgcgattcttcgtacttcacgtcccggttggcgttatactccttggcgtttccacctgactgggtatttggcatctccctcatccaaacgtggacccacttgaatccagcctcc

SEQ ID NO: 289073 - DNA, 316 bp, Zea mays
gttttcctctacttcctctgctccaagagcatccgaaccaacctgcagaaactgcttggcttcgcgccgccacgcgcggctgctgcagccggcggtggtctcttccccatgcccgatccgaaagttaattgaggctgatttccaagacgagtgaatccgtaccaaagatagcactagtcgcccgggaaagactctgtgcgactgcaccggtatccgtacccaattcattttccacagctcaccggtttgttgttgcgcaccggtgattgcaaacctgaaggttggcttatttattgcattgactgaaacaacgaac

SEQ ID NO: 289074 - DNA, 359 bp, Zea mays
cggacgcgtggcagctctttgcgcggtgttcacccaccgccgcctcgtgtctcccaattccgtctcatcctgcagtgattccacaccgcaggtggacagccatgatggcgtgcgccctcgccgtcgcctggcctgcagcgtctctcgcgccatccggcaagaggaacctctccggcggccgtcccccatggctgccgtctcccagaccttcaggcagcagaagggcgtcactgctgctgccccgccggcgctcgcagaagacggcgttcgtggtgggtggtgccgcgagcttttgcacggcctcgctgaagcgatcgccgagaatgcgaggccacggagaacaggtttgtgcaacgcgg

SEQ ID NO: 289075 - DNA, 300 bp, Zea mays
cccacgcgtccgcccacgcgtccgctgttttcagcacccgcaccacctgactgtctgttcgcagcacccggacctgtgtcaatggccgctgcagccgccgctccagcatctgtggcgccgtcctcgcccaaggccgccggcgacaacaggaagacggtggtgtccgtggacgcgtcggagctggagaagcacgtcctagcggtggacgacacctctgtcgaccgtgccgtgatcgccaggatcctgcgtggctccaggtacaaggtgaccgccgtggagtcagcgacgcgcgcgctggag

SEQ ID NO: 289076 - DNA, 342 bp, Zea mays
gcctcgcctccattccgtactctcctgctgaagcttttttctctgaaactagtatatcccccatctgtttggtcccgacgattttccgctttgggagcaccaccaagctcttcctagcttgcagggctggagtctttgccagggacagcaatggtgccgacgcatggcgatacagccggaccgagctccagccaggatgacccggcagccaccgtgaagacacgcaacagcaacaggcctcagtatcaaacgtttactcagcaacagcttccagcttgcaagcctatacttgcgcctcagacagtcatcactgtactcctgtttgtgggcgtatttttatcg

SEQ ID NO: 289077 - DNA, 332 bp, Zea mays
gctgcatgcacctgcaaacctaggcacaccattcacggtggatgcatttcggtatggacaagttgaggggtgctcggcctatttccttagccactttcatcatgaccattacggtggattaaccaagatatggtgccatggccccatctattgttctgcactcactgcacgcctagtgaagatgtgcttgtcagtaaattccgagtatatctgtcctttggagcttgataccgagtatgtcatagagggagtgacagttaccttgttggaggccaaccattgccctggtgcagctctaatccacttccgactaagtgatggaaagacctgtc

SEQ ID NO: 289078 - DNA, 313 bp, Zea mays
gagagccggaatcggctcgaggcgccggggccatggtcccgctgccggagcgcagcgtgtgggcgaacggcgccccccgcttcggcgacatggtctgggccaaggtgaagtcgcacccgtggtggccgggccacatctacagcgtcagcctcaccgacgacgaggaggtgcaccgcggctaccgctacgggctggtcctggtcgccttcttcggcgacaaaagctacgggtggttcgagcccagcgagctcggccccgtcgaggagcacttcaccgagaaggcggcccagggcggcagcacccgcagtagttt

SEQ ID NO: 289079 - DNA, 273 bp, Zea mays
ctctgacctgcctcgtcccttctgagttctggcggctctcccgcttggtcactcctgcttccttgccgttcgagagctatctgacacctgaacggagttccagttcctctatcggcctgagggcattgggtttcttgatgggagacagcaggaggcacgaaccgtgggttatcctccaaccggatggctggctgcgcaggcctgcgttgggattgaacagcctgatgcagattcccgataagattcagagctctcttaaggtgcaatttgggc

SEQ ID NO: 289080 - DNA, 376 bp, Zea mays
  unsure (1)..(376): unsure at all n locations
cggacgctggncgagacgcgtgggctgaggatataccccaagggcactcgagtcacttcatcgaactacaatccgttcgtaggttgggtgcatggtgctcaaatggtggcattcaatatgcagggatacgggagagcgctgctggctaatgcacggattttacaaagcgaatggcgggtgcggttatgtgaagaaaccagatttcttgatgcagacagaaccacaagtcttcgacccaagagaaccccagcctgtgaagaaaacgttgaaggtgaaggtgtacatgggcgatgggtggcgaatggacttcaagcagacacacttcgatcagtactctcctccagatttctacacacgggttgggattgctggagtc

SEQ ID NO: 289081 - DNA, 329 bp, Zea mays
cttgtcctgttcggccagaacgaactgccaaccatggcattggtcctcaacatctaggcgtcggtcgccccagttcatcttcctcagctcgcccctgcgcgcgctcctcccccatggcgaacttaccctcaactccctgcctgctcgagctcgcccaggctgcgaccttgccgaactgcacagtccctgctctctttctccagccgtgcatacaccagtccagctcccttgccatcacccatggttgcctctccttggcccccttcctgcagcaagccccatctctgctggcggcctgatcttcagtcatcccttggccggcgtcctct

SEQ ID NO: 289082 - DNA, 420 bp, Zea mays
cggacgcgtggcgagacgcgtgggcggacgcgtgggcaccaccgcgctccactcgcagttccggccaccgactgcgcgctcccacccatctccgtccgcttccacactcgtattcctcctcctcccgcactcgcggctgcgctcctgtccgggcctcagcggcgtccgcatccgcgccggcccagcgggagatcgccgcgggcgtcccgtggggctgcgagatcgagtccctggagagcgcggcatcgttggagcggtggctcatagactcgggcctaccggagcaacgcttggccatccaaggcgtggacatcggcgagcgcggcctcgtcgccctcaagatcatacccaagggggagatattgctcttcgggccccttccctcgtcatcaccgccgattcagagtggggtcgcctgag

SEQ ID NO: 289083 - DNA, 484 bp, Zea mays
ctcgatccgaacagacaggataggctgcataaacatagagctggttcgtctgaacatttacatacaacccaaaaggtcacatcgcttcccagaagagattcattataaacaagagcaggtaaacccaaaaggtcggttcgtggtctttgatgatcccttccaagagaaagtagggaaaagaagaggaagaaaccacgaagaaagatgatacaagctcagaagacgttttcttcttcacagcacaccaacatcactgcaaggaagtgtctaagaggtaaacactggacactcagttaccgtcctcttctggccaggaggtgctgttagagatgaagagaggtcagatgtcttcagaacgcgcagcctcttcacccgaagaaacatacatcccccaggggacatcgccaaccagcaccctatcgccttcataatcctcataaaccagagtgtactccccagttccatctagtaaacccgatatcgc

SEQ ID NO: 289084 - DNA, 319 bp, Zea mays
cgtttccacctcaacccgtcccaccgctcccagtcccgggacgtacggtgaccccacaccacaccaccacaacccctccgtcctcttcgcggctgcggtgcggccccgggagttccttgattcggcgggcatcgccatgggagggcgtcgctggctagctgtggtaacctgacctcgccgctgcagctctgtaggtagctagtattccagaggtgatttctcctctcctgatcgacagagggcaaatctggttcgtgaccccccagtatcatatcagagagggccacggttttgcttatcaaagtgttaggagttagga

SEQ ID NO: 289085 - DNA, 315 bp, Zea mays
ctcgagccgctgcagcaccgacgggaacaacgggtgcagcggcggcgtcatggacaacgccttctcgttcatcgccgccgccgccgggctccgctccgaggaggcggtcccgtacctcatggaggaaggggactgcgacgacagggcccgcgacggcgaggtgctcgtcactatatccgggtacgaggacgtgccggccaacgacgagcaggcgctcgtcaaggccctcgcccaccagcccgtcagcgtcgccatcgaggcgtccgggaggcacttccagttctacagcgggggcgtgttcgatggaccgtgcgg

SEQ ID NO: 289086 - DNA, 371 bp, Zea mays
cggacgcgtggcgagacgcgtgggcggacgcgtgggacatggaccactcttccaagcatgactagggcacggcagatgtgctctggattcttcatggatggcaagttctatgtcatcggtgggaaatctgagaggcacaatgagatccttagttgtgctgaggagtttgacttggagagcagcacctggcgcttgatcccagatatggcacagggccttaatggtggaagtggtgctccacctcttgttgctgttgtgaataatgaactttatgctgctgactatgcaacgaaggaggttaggaaatatgacaaggaaaataatgcatggatcactcttggattgttacccgggaggtatacatcagttca

SEQ ID NO: 289087 - DNA, 386 bp, Zea mays
  unsure (1)..(386): unsure at all n locations
catccacatccttgtccgcggcgaaacacaatttcccacagcgagcgaggttcccctcccgactcggtgatggcggcgccggcggcggacgaggcatggtgccgaaagacggtgccacgggtgatggaactggtgtgtcggcgccttccgcagcgggacgcatgcgcgctgcttgctgtcagtccctggtgctaccgtgccctcgttgctaactccaggctctgggaggtacttgatctacgtgagatgaagaatgctggaaaccgacttatttcagcactttcactggcaaggtatcgtcacctcaaagtattaaaccttgaatttgctcaagatattgaggatcgatatttagttcatctanaagaaatgagtggcatctcact

SEQ ID NO: 289088 - DNA, 394 bp, Zea mays
agcaattcaaggagaaagaggattgctaaaggatgaccttcaaaacaaaaaaaagctcattaaagaacatgggcattatgaaagcacaataggatccaaagagttatgtgggtttaagcaagtcaaggatggactgctttctgcagtttcagaaatgcaatactgcgctagagagatgaggaagattgttgactcgctatggacaatgaatttgaatgaagtgtcgtcgagacttcaagagatggctatgtttctcgaaggtgcagttgatcgtggtcatatggctgctgaggagcttagtcctccccgcctcaatttctaatgatttgtatgcagaaaacactatgtacataggggaactgggaggggtaactgatgccgactgggcacttga

SEQ ID NO: 289089 - DNA, 505 bp, Zea mays
gaaattagctgaggaacttagggatgaaatacagagattagagagtagtatcacacaagctggcattgataatgatgtgcttgaaactaaattggaagaaaagattggtgagattaattttttgcaggaaaagataagtttactcaaccaagaaattgatgataaggagaagcacatcagggaactcagtgcatcactttcctcgaaggaagtagactaccaaaagctgaccgctttcacaaatcaaactaaaaagagccttgagcttgcaaattctagagtacaacaactcgaggaagaactaagtacaactaagaacgctctcgtttctaagatatcttctattgattcactcaatactaaacttgaaaccgtgaactctgaaaaggaagaagctgacaaaaaaataaatgagttaatacaagagtatacagacctgaaggttgcttcagagacaagggcaagccatgatgtcaaactactgtcagatagagatgatctgata

SEQ ID NO: 289090 - DNA, 254 bp, Zea mays
gaaattagagtaagatatgctactgagcacagatgtgccgtggttgtcaaaggacctaagctcagtgggtacatttctggcacctgatcccttcgaaggacaactcgcttagcttctgaacgctgaaccgttggatgactcacgacgacgcgtaaaacagtgcagctgtgatcaatgagctttctaaagagataacgcacatactgggttctcaccccatcaatgcacatcgtgcagctgaggagaagaacatc

SEQ ID NO: 289091 - DNA, 440 bp, Zea mays
aagtactggaaagggaagttcgcttgtcgtactttgaaaaaatcaagcagagtatcgaggatgctgctgagttagaagaactgctacccccaaaagctgggcctaatttcaaattccatagcgatgaaagcaacgaaagcactgatggcctgaagttatccaaggaacttattggcttgattagaggaaagaagtctacatatgatattattttatgggttgaggaacaaataattccaaaaaatggtactgaatttgcacttgatgttgttagccagacgcttcttgacatgggttcaaaaagtttcacccatcttgtcactattttggagagatatataagataatctctaagctatgtccaaatgaggaaatgcagctactgttaatgaatggagtcagtgcttattggatggacaagtaccagatgactgctatag

SEQ ID NO: 289092 - DNA, 284 bp, Zea mays
cagacgctggtcggtacgcgtgggcgatacgccgccgcgtgaaccattcgttagccgagccgtccgcaaccactgtcctcgttctcggggtgtggaagtgaagcccgggaagccctacactctcacccatggcgacttcgccggccgcctgcgcctcacccaggcgacgctaggggttgatgtcggcaagggggagaaggctaccggcgtgaagaggtgtgtgctacagtgcagtgccgagaacagagatcccgtttttctttgcgtcctcatgccggagcagt

SEQ ID NO: 289093 - DNA, 371 bp, Zea mays
aagactcctcatcttatccccgctaagccgcgagacagcagagcagggcgggcagtgcagaaggcatgtttccgatggcgtcttcctcactgtcgtcgccgccgctatcacttatcctcctccggccgctcccgtgcatacccgtcctcctcttgagacaaaggaagccattcccagctgtccgcgtagaagcaaggtctcagcagcggttgcagcggaggccggtgactggccagtggaggaggagctgcagaaggggcggaggctacgcgtgtttctcctacaatgccaagaacaagacgcccccgccttcagataagagttcagacgagtgggcgatcgttcgccgatgggatgtgccatgggaatgg

SEQ ID NO: 289094 - DNA, 352 bp, Zea mays
gagacagggcattccttatggctggagtggacattactcctatctatgggagagggaattcaggttcggctatggagaaggtcgcagaggatggtaacgcatctggccccaagattccaccaaggccacatgggaatcggctagagagcttccggcagcagttccaccatttgcgacccatatctagacggcttggtgaggcacatggttttctgtctacgtggaggcgcattcttgatcggcatttagcgaatagcatgagtagatttgaagggcctcctgacccatctgtttcagaaactgctcagcatgcaagcagtcttggtcgaatgactactaggttgagagcaag

SEQ ID NO: 289095 - DNA, 304 bp, Zea mays
gattaatgtatcttctcgttggactcgaatctgccaattgattattagcattgttctcacaaaggacggagatctgtcgtcgaagacacctggctgtttctcatggcaggcttgcttgctctagcttggcacaataagccacttcaggcttcagtcggttatgtgatcaccggaacattatgggctctaaagtaggacttttgagaaatgccagacgatgttgcatgcatgatgaagttgttgtccatgagattaacatgattgatcagaccacgcttggtcaggtgacagacatccagctcag

SEQ ID NO: 289096 - DNA, 296 bp, Zea mays
gctgctgccaactgaagggatgcgagccacggccaccgcaggaggccgtgcaggtgttccacctccaacacctccgcccgcgcccgccatggcgagctcttcctcctgctgccaccacgcacctctcccgctccgcgccagcaggcgagccgaccaccgttgcctccccaaaggtttcttagtcaactctagaaccgaggatttcaggagtctctttgtgtcggcgtgctcatgcaacatgtagctattctttggatgacaagttacagggagagctagtgatacacagggagaac

SEQ ID NO: 289097 - DNA, 430 bp, Zea mays
ctcctctccacccgacagcttggccggcgacgagcaccaccaggacaccaggtattttctcccccttggtatttcctccctgctgtccgaagacgtgcgcccgtgattcgtagatttgactattttatgagttcacaagccacccagcatgaagtttttagaatacacccccttcgacagtataaatttgttcctcgagcagctcgaccttggtgattgtacaatcagagggaaccttgaggccttctcatgcaagcacactgcgacagaccgccggctttcaataagcctagaacatgagattcttgattaccttggcaagtcctctgatagtgacccgtcttcaccagtggagcacttggcctccagatcaagccggaaaacattgatatatctagttctcactcttggccacatatatccagattat

SEQ ID NO: 289098 - DNA, 454 bp, Zea mays
  unsure (1)..(454): unsure at all n locations
cgaatttggaaaagccttatgtaagcatattcttaagcatccctacagttcttgatccatcattagctgccgaaggacatcatatacttcatatatttactaccgcaggcatagaagactgggagggtctctctaggaaggaatatgaagagaaaaaagaggtggtggccaatgagattataagaaggcttgaaaagaagttggttcctggccttcaagattcaatagtcctcaaagaggtaggctcaccaaaaacacaccgaagatttcttgctcgaaatgacggtacatatggaccaatgccgcggggtaaaccgaaggnattactggctatgcctttcaatactacctcaatagatggcctttactgtgtcggtgacagctgtttccccgggcaaggtgtcatagctgtagcattctcagggatcatgtgtgctcaccgagttgctgcaga

SEQ ID NO: 289099 - DNA, 355 bp, Zea mays
ggacctggggatcgcaaacagccgccctttttttttttttttgtccaaatcagagactccagaattaaacgtgtcatctttaaaattgcgaacctaagaacaaaacaaatcctgagctttacacatgtaccagaaagtaccattcctgatgatgccattgccatgctacaaatttaccatccatcgcctcgtaaaaaaaaggagcagggcatcggctatctactacttatatggatcgtcaacgttggcagcgattagaatgtcccttctaaatcttcaccgtttgttccgagtcggcgttacacataagtagtagatagccgatgccctgctccttttttttaccatccatcgc

SEQ ID NO: 289100 - DNA, 303 bp, Zea mays
aaaaaaaaaagtaatcaacaacatctatctcatcgccgtcatgtcgccttgtgcccatgcagagcagcaagagcctgacgctccgcctctccacaacgaccaccatcgccaccaaacttacgtggagctgtaccaccacggccttcaccacgtgaagtcgtcggcgctgctgtgcgcggttggactaggcatccccggcgccatccaccgccgcggcggcgcaccaacggtctccgacctcgtcagcggcacgggtgtccacccggccaagcgcgcgcagctccgtcggctcatgcgcatgct

SEQ ID NO: 289101 - DNA, 301 bp, Zea mays
gaaatggagcgagcaaaagataggcttgctgttcagagagctacaagagaagcacatgaaagggcattcgccgaggttcgagctaaggctgaaagaatagcattagaaaggatcacctcagcacgtcaaagagcatccgcagaagcccacgagaaagaagagaaggcgaccgctcaagcagctctggagcaggcttcaagggaagctagaatgaaagcagaacgtgcagccgttgagagagcaactgctgaagctcgggagagggcaattgaaaaggcaaaagctgctgcagatgcaaagg

SEQ ID NO: 289102 - DNA, 313 bp, Zea mays
tgctcatctggagaatgagctgaagaaaaagagtgggcagcttgacaggagtaatgcaacagttcagaggctggaaatggagaatgcagagatacgtgctgagatggaagctgcaaaactgagtgcatcagagactgaaaaacaatgccagggtctcttaaggagagagaagaaggatagcaaaaggcttgaagtctgggagcgccagatagcgaactcgaaggaggacattgctgaatgcaagacaaatattacacaagctgaaagggagcttgctgaggtcaacaaggcaataaaaaatatggagaagaag

SEQ ID NO: 289103 - DNA, 276 bp, Zea mays
gtgaacgggaacgagatcaccaagacgatacgccacctggcggtcaggttcgcatctcacggcctcaccgtggaattcttccggtccgtgttcctcgtgcaggagcgccctgccccgcggcatgcccccaagagggtcaaatccactttgaggcttgacaggatggataatttcagccggaaatggcgcaattcggacgtactgattttcaacactgggcattggtggacaccgaccaaattgtttgatacgggttgctattttcaggctggacgt

SEQ ID NO: 289104 - DNA, 291 bp, Zea mays
ggagcttgaaggcatcttccggagcggtgtcgggtgggagctgctcccggtgccgctggacgaggacgagttcgaggtgctgccggggcacgtcgtggaagtgggcggcgccccgccggcggcgcgcgcagtggtggagcggctccaggtggtggccgtcagaggcgaggaggttgtgcaggagtgcgctgtttgcaaggaagggatggaacatcgggagctcaccactgggctgccgtgtgggcatttctaccacgggtcgtgcattggtccatggcttgccatccggaa

SEQ ID NO: 289105 - DNA, 272 bp, Zea mays
cttctcggatcctctaccgtaatctcccggcgacgcgccgccatgtcttcccagtcttctgcaggaggtccggcgatccatcatccccactccaactaccacccgtacatctttcagcatgaccctccgctccactctaattcccgccgtcgccgccgtaaccatgatgacccatatcaaccctatctgcctctaccccacgctcactcccacggagccactgccgtcgttaccggcaccgttcgttgccatgtcccccgggatccacttgt

SEQ ID NO: 289106 - DNA, 297 bp, Zea mays
cggacgcgtggcgagacgcgtgggctcggtctcgcacctctcacgacggcaccaccccagcgcggcgcgagtggagacgccgctgctccgtgcttcgccgcgcctacctaacccaagacctgccagacctgagtggctgagtgttcgtgttcggtcaaaacccaccgcgcgagcgcctccagagtccaaacccgctacaaatctcgcgctgcgcattctccccgtacgatacggcggcacggcccacgagccaggcggtggcggcagctagctagctgcggagtacaccagccaccg

SEQ ID NO: 289107 - DNA, 307 bp, Zea mays
cggaccgtgcgtttttattgttttttccacgtccaactgactaaatttaatacccgataaaggacattggtccgtcaatttagactcttacattttgtttcaattatctttccccttttcctctctaaacaaatgtgtatccagcttacaaataacacctcttaaagcatacaaataaaactagatcacgcttgtgtttgtgtgcccgagttaccgacagagaactagcgattctgcacataaactaccaagtcggctatcatctttaagcagcatcagtgtcccctgtggatttcttgtactctgg

SEQ ID NO: 289108 - DNA, 246 bp, Zea mays
cccacacgtccgcccacgcgtccgcggaccgtggcgacctggcgtgccttcatctcccagccgacgcaagcctggaggcttcatctgcatcacgacacctccctctgcgctcagctcccgacaaatcttgcctccctccgcaatcggctgctggagcttctctctgcgcctctccctggagttgagtccctcacgctcggcctcttctccaccttcctcagctcgcccaaccgagctcccggcgtt

SEQ ID NO: 289109 - DNA, 307 bp, Zea mays
atgctgtagtaccaccatcctttcctctagagttcaaaaatctactgatctagaggcgggccggcctcccatgccgccaccgccgcctccaggaccacctcaccagcgccgtcgccgcggcgcttcttcgcagcttcgccctctggccgtgggatcatggtccagtcacggcggcgcacggcaactaccgttgcccgcgccgcgccgcactgccggcggagcgctcatgctcttcctcctcgccgccgtcgcgctgctctacgtctccccgcagcagctcgcagaacaccccgtgctcgcttactcc

SEQ ID NO: 289110 - DNA, 514 bp, Zea mays
gattcttcctcttccccacacctaaaagatccgaatctagggacgaccgggttcctccaccccaggattctcgtggcgacctcgcaacaaccttgctcttcgcatcttttcagttgccgaatctctctcgccttctctgcttcaggctatagtcagtctgttcttggtgataggtttagtcacagtaactcttctactatcgtttgcttgctcctccgatttgcgccgagaagcaaccgctatagttttcagcggtttcttttgttccacttgatgttgctttcgcttaaagggcggttccttcctccatttgcctgccaatccacttttgacgagacagatatttattggatctagttccggaagaagataagattttcctcacagattatcctttttgctttgctctattctctttgattttgtcagctttgcccccccaattttcaaccggagcaagacgacccgagcattctttgatttctttcccccacggccatgtcgctgagccgat

SEQ ID NO: 289111 - DNA, 411 bp, Zea mays
ccgacacttaaagattgttgatctctcagcggacttccgactacgcgacatcaatgagtatgctgagtggtatggacattcccacagggcaccggaacttcagggggaagctgtgtatggtttgaccgaacttaaacgagatgacataagaaatgcacgcctggtagcaaatccagggtgttatcccacatctattcaacttccgctcgttcctttggtaaaggcaaaactgatcaagctaaccaacattattattgatgcaaaatctggagtcagtggtgcaggacgtggggctaaggaagcaaatctttacactgaaatcgctgagggtatccatgcttatgggataacaagccatcggcatgtgcctgagattgagcaaggacttacagatgctgctgaatcaaaagt

SEQ ID NO: 289112 - DNA, 289 bp, Zea mays
tcgagaaatcaatgggatcctgcttccagcttgtctttgcaccaatcgatgagcttttccctgatgatgctccattggtatcttcaggctttcgcgtgatcccgttggacataaaaacagacggaccaccctctggaagaacgttggatttggcctctagccttgaagttggcgcaaccacgcaacaagtggcagggaatggatctcaggacgtttgcaacctgagatctgtgctgacaattgcctttcagtttccctatgaaacacatctccaggacaccgttgcagc

SEQ ID NO: 289113 - DNA, 304 bp, Zea mays
ggacgtgggggcacacggcggcaggctcgtggctgaggttcgaaagatgcggctgtggcgctgtgtgccttctctgatccgatccgtcctgactgtgaagagagaacctccgcctccgcctcggaggtgcaggtgcagtttcctcggccggtaaaatttgcgtagtgggctcctgcattcatctgtaacagaattttggggcctcatgtgtggatctctctcaaaggatgtaaacagcacacaggagcgcgactaggttaggaggcgtcctggtgccagacgctgctggtatcttgctccactt

SEQ ID NO: 289114 - DNA, 460 bp, Zea mays
  unsure (1)..(460): unsure at all n locations
ctgacaatccagattattcgctccgcacttttacaggtcattcagcatctgtcatgtcacttgattttcatccgaacaaagaagacatcgtttgttcgtgtgatagtgatggtgaagtgcggtgttggagcataaataatggtagttgtgtgacctgcgttagggttttcaatggaggagctactcggttaagatttcaacctcgccagggtaaatatctggcagctgcctcagaaaagggaatatccatactggatgccgagacattacaagtttgtagaactcctttgcagggccacgtacagattattcagtcagtatgttgggatgccgcgggcaactatctggcgtctgtcagtgaagattctgtcagggtgtggtcatttacctcagggaactacatcgaatgcatacatgagctgatctgcagcgggaacaagttccattcgtgtngttttca

SEQ ID NO: 289115 - DNA, 320 bp, Zea mays
aaacgcgtcacccgaccgccgccacagctgctgcccagccgctcgagcaggcaagcaggccgcccagctccggctagccgcacgagcagcaaggaggacgcccagctccggccagccgcacgagcaggcaagccctccggccagccacacgaccagtgcacagcagacagcaccagcaagcagccgagcagctgcttctcatccggcgccaggtatagtgcgcgcgtgccttatctgctgcagctgcttgccgtcctcgtccgtcgtccctcggcaccggcaggtctagccttctcagcgtcgttctccgacgctgcgct

SEQ ID NO: 289116 - DNA, 494 bp, Zea mays
cccacgcgtccggattagcgttgataatccaactgaataatgaaggcatacaaacattcttcgaagcctttttcagggtgccgagatggatgtggcgaggctttcttggctcgaccctttcatccgtcgatctcatactatgcgcattctacatgtttgcgatacctccaaatcaattgcgaatgaaccttgtcaggcatctcctctctgacccaactggctcatccatgatcaagacctacctgaccttataaaaccatttgcaccaggctgcaagctgcaagaactcttagaaactgtacagttttgtagttgtacataagttagagaggatctgggggttacttggccgcggatttaagggataagccgcattgcaatattcccctgtaaacctttaatggttgcaatggtgattggatagagaagcacaccgtgttgcgtgttgtgcatgatggaagattattaggagagttcaggtgatggccatggtt

SEQ ID NO: 289117 - DNA, 348 bp, Zea mays
gttcaatcttctaatttagataggaatctgcaggacaacttagctaattcttctttgaatggtagccttccaaatagtggtcaacttgatggggaatgtgacaatggggtgacaagggttccaagcgataggacaaattacagtagcgatgcatctggcgaagttacaaatggtggtggtgcgcctgtagcctcctctgttcctcaaagggagcatttgatccctccaagactgggtatgggtactaaacaatttatcaggcgacaaccatcagacaggggtttcccaagaattatttcttcctcaacaatggatgcacgtatgatctctctgccatcgagaatcagg

SEQ ID NO: 289118 - DNA, 620 bp, Zea mays
agggcttacatcgtaaattacatggcaaggaatggctctcttcgccaacaactttacaaagaaatcgaggttgctagtgtagactcatttcagggtagagagaaagactacattattctatcttgtgttagaagcaatgagcaccagggaatggggtttctcaatgagccgcgcaggttaaacgttgcgctaactcgtgcacgttatggcatagttattcttggtaatccagaagtactaagcaagcagccactttggaatagcttgttgacacattacaaggagcatgagtgcttggtagaaggacctctgtacaacttaaagcagagcatggtgcagtttcagaagccaaaaaagatatataatgaccggagattgttcctgggcggtgctcaaggcgttatgcatggagctaacttcggggctggggcctcaagccaagcagcagataagagaagtggcagagggaaagggacaatcgtttgctccttatggccctccaaatggggtgcataagcctggtgtgcacccggttggctatgctgtaccacgtatgccattacctccatttcctggggctccacattctcaaccatacgcaattccaacccggggtttgc

SEQ ID NO: 289119 - DNA, 423 bp, Zea mays
actgtctctaatccaacaggtttccttgggaggcctatagttccacctgctgctcctttgccccaaacaccaccaccaattgcaacccaaggtggcacaccacagaattctcaacgaccgttttacccgtcctatccttcaggacctggtattgtcccacctcaacctttatggccacaccctcatcctccacaacctactggatttcagcagcctcccttccagtactatccagctggtcctgtaggctctcttggcaggccaataactggggcttctgctgcaactatggcctttgccaatgtgcaaccacctggcgtgtcaactggtggggataggaaagtacaagcatcaacaaatgcaggatctgaacagtccactcatgctgcagctgagccagattctacaggacatggaggtcaa

SEQ ID NO: 289120 - DNA, 277 bp, Zea mays
gaacctccgtcgcggcgcggccgaaccggcgaaggcgccctcctctcgttccctcccgaaaccccggcatgggccacaagaagtcgaagcggagcaggagcaagaagaacaaaaccaacgccgaccaggccctggccctagactacgtccgcgcctgggtgctccccgtgccgccacccctgaagccctcggcggccgacgtcgacggcttcctgccggtccaggctacacgccggggcgatgtgctgtttgagctccactcccactcaaaccacag

SEQ ID NO: 289121 - DNA, 337 bp, Zea mays
agcgtgcaccctgacatcctcagcacggcagttatcttcggcatgctcatcgcgctgcccatcacctctggtgtactacatcctgatggggctgtgaaaaagccagacaagctgctcgttcccgcaggccaacagcgatgccggatggggatgtggagcaggaggagactgactaggggggacaagacaactgcgcaggggcaccggcgcgcgcggggggcggcaggttaattcgtaggagtatgcttttaggtgtagacatcatggaacgcgattagagagcaaacaaaaaatgtttttaggacaaacccaacgtcatatgcaaaaatccttgggg

SEQ ID NO: 289122 - DNA, 418 bp, Zea mays
cccacgcgtccgagtcaaccaagtctgacgaggcgaccaaggagcagagcccgcagaacgacgacgccgtgatacgggacgtgccggccgatggttgcagcccgacggaatcgagcacgaacaccgtgagcaccggcggaagcagcagcagtggtggcggcggccatgaccaagacccgctggtgaagtggcttttggaagaggagcctgccaccggcgacgaggcgtggctgaacttcactggcagtgtcgacgtggacgagttcagcagcattgccgccggtcggagttgttgccgtgggatggcgcgaccgactggctgctcgactaccaagattttggattgggggactcgagctcggtcgatggctacatggtcaacaacaacagctcaaacggagcaaagttctagctagct

SEQ ID NO: 289123 - DNA, 398 bp, Zea mays
tgtaatttcagatttcagagcgcgcaagaacccttttgaccaccggcgccgccgccgcgaagccaagccaaactgagtaagcagctatggagggatccgccgccgctccgctccgcacgcgcatctgcatcatcgggagcggtcccgctgcgcacacggcagccatctacgcggcccgcgcggagctcaagcctgtgctcttcgagggctggatggccaacgacatcgccgcgggcgggcagctcaccaccaccaccgacgtcgagaacttcccgggcttccccaacggcatcatgggcgccgacctcatggacaactgccgcgcgcagtccctgcgctttggcaccaacatcctctccgagaccgtcaccgccgtcgacttttcggcctgcccattc

SEQ ID NO: 289124 - DNA, 435 bp, Zea mays
ctcgagccgctgtcacatcagaggaaataataacatctacaggcggtggatctgaatccacttcattgttgactgaaaccactgcagaaaccacagagacagttacatcagaagctgtatcagaagtggttcagagttctgtttctgtggcggtcgatggtgttgacttggtagatgacaagggagatagcgatgatgacatcgtcgatcaccatggggatgaggacaggatgactgatgtggagctgtggcagcaacttgaaagtgagttgtaccggaagacggagggagaagaagatgacatagtcgaagagatggctgaaagtacaattgctgaggaggtgggtggcgtggctgaagatgtgctcagcgagacaaaggaagtgcataggttctaccctcctggaaaaatcatgcacatattattctccagca

SEQ ID NO: 289125 - DNA, 270 bp, Zea mays
gatgctcctatgctgcttgccttgctctggtgtggtggtgtctggtcaagtacgcttccgaattaaaagcgctctggcctgcaacctgctgtctgctccgtcctcccacggccggccgcctgcccgcgtcttcttcgccacccctcttctccggtcccgcacctgcatttcttgaccccttcctccaccgcagccaaacaatgtctccggcgccgagttcgcatcacgcgcagatcaattcgaggaaggagaagcggatgaggaaggtgg

SEQ ID NO: 289126 - DNA, 302 bp, Zea mays
acaagagtggcttgcgaaaaacattgttaagaaggttgagaaaccagctatgttaaatagcggtagcatgctagacaaaggtgctgcaggatttagtgcgagtgcgaggttattaccacaatctgccaaagttgttcgtcctgagacttctcaaatggttatttatgatccaagacagatgaaaggcccagagtttgcagcaactagcagtgggtacacgaaggaggttgaagccacgctcaaagtgctatcgccgtcgatggtgtcctttattaagaatttgcctgctattgaaggaccat

SEQ ID NO: 289127 - DNA, 610 bp, Zea mays
cagacgcgtgggtgacgctggaggaagccagttctatgcctgggagcgtgaccggttcgccccatttccgttgactgcctgtggactgcgagataagctggtggacctcacagcagcagtctcatagcacatcagagccttcatctgctccaaggaggctattcgggcaatggctcggcgtcggcaggtcgtcccctgaaaatagaccacccgagggctcttcgtatcggcaaatgatgcctgtggactgcgagacaagctggtggtcctcacagcatcagtctcatagcacatcggagcctacatctgctccaaggaggctattcgggcaatggctcggcgtcagcaggtcgtcccctgagaacagatcgcccgagggctcttcgtatcggcaaatgcactcgccacggatgtagaccatcgctgctggcaatccaatttaatttggaacccgagatgcttgtaagaaacgatgggaaacccattgtattatgttaggccaggctgggccgtaaaactttgggacgatgttcgaggggcgagaaacaggaaatcatccggctgagaggataaaaaaaaaaaaaaaagggcggcgctcgcgatctagagc

SEQ ID NO: 289128 - DNA, 224 bp, Zea mays
gattatgtaatatgttactagtttattattgctgcaaggttgaatatttgaatttatttgaagaaaatcatatagtgatttatctttgttgtattgttgaatagtcaagttcatagcaaaaatagttgcataaagatattattctcaataaaacaattagctaaaacaaccaaatgataggaaggtcattgcagcctcaaaattcacttttctagagttggatg

SEQ ID NO: 289129 - DNA, 229 bp, Zea mays
cggctgtcgtccacaatgcccgcgccgctgatactacccacagtcgcgcgcgagctaggcagagctcctcgtcgccctctccgccgcccgcgcgctcccaaaaggacagcagctccacggccatctcctcaaggctggacacgtccccgccaccgcctcctcccacgcgctgctcgcgcaccacctccttacgttctacgcgcgctgcgcgctccctgacctctccctc

SEQ ID NO: 289130 - DNA, 1447 bp, Zea mays
tctcgagccgaatcggctcgagcacactcgcactcgcacgtacaccacactagttaccacagacgacgggcgccatgaaagtcccggtgcttctcctcctggtctccctgtgcttctcgctcgcgctcgcgtggcaaacggacacggaatcgggctcaggcaggccgtaccactacggcgaggagagtttccggcactggacgcgctcccggcagggccggttcagggtgctggaacggttcacccacgagctgctggaggacgccgtcggcaactaccgcgtcgccgagctggaagccgcgccgcgcacgttcctgcagcccagccactacgacgccgacgaggtgatgttcgtgaaggaaggcgagggcgtcatcgtgctgctccgcggcgggaagagggagtcgttctgcgtcagggagggcgacgtcatggtcatccccgcgggcgccgacgtgtactcggccaacacgcaccagtcggaatggttccgcgtcgtcatgctcctcagccccgtcgtctccacgtctggacgcttcgaggagttcttccccatcggaggcgagagccccgagtccttcctcagcgtcttcagcgacgacgttatccaggcgtcgttcaacactcgccgggaggagtgggagaaagtgttcgagaagcagagcaagggggagatcacgacggcgtccgaggaacagatccgggagctgagcaggtcctgctcacgtggtggccgcggcagccgcggcgagggtggcgactcgggttcttcttcttcttccaagtgggagatcaaaccgtccagcctcacggacaagaagccgacccattccaacagccacggcaggcactacgagatcaccggcgacgagtgcccgcacctccggctgctcgacatggacgtcggcctggcaaacatcgcccgcggttctatgatggcgccgagctacaacacccgtgccaacaagatagctatcgtcctcaagggccagggctacttcgagatggcgtgtccgcacgtctccggcggccggtcgtcgccgcgccgtgagcgcgggcacggccgagaggaagaggaggagcgggaagaggagcaaggcggtggcggtgggcaaaaggcgaggagctacaggcaggtgaaatcccgcatcagagagggctccgtcatcgtgatcccggcggggcacccgaccgcgctggtcgccggcgaagacaagaacctcgccgtcctctgcttcgaagtgaacgccagcttcgacgataaggtgttcctcgcgggcacgaacagcgcgcttcagaagatggataggccggcgaactgctggcgttcggggcggacgaggagcagcaggtggaccgtgtcatcggagcacagaaggacgccgtcttccttcgcgggccccagagccacagggtctcgtcggtgtaagtgcatgcttgagatgta

SEQ ID NO: 289131 - DNA, 490 bp, Zea mays
ggcacttcggcggggacgctcaaccgccccgcgggcgtcgtcgacggtcggttcccggcggcctcgcggaggttgcatcccgtgtcgaatcgaggtatttgtcgtgcaggcaggatcctacgccaaatgcctctctttgataagaaacctttctccttgctggagccccctaaggacttggattcaaaggagaaggtgttccaaattcgattcacgaaggagatattccgagattatgaagaatacctgaagaggctaaacctttatcgtcaaagagtttggacatgtaatatatctggaaaatctaatttaacttttgaagaagctttggtatctgagcacaaagcgatggagaaggctcaaaatttgccaactgagctaatggctcaagttcttcggatgactcaatacagccctcttggtttatatgaacttgttgataagatatatgctagtctgctggaagaagtatttgagggaatagaattac

SEQ ID NO: 289132 - DNA, 325 bp, Zea mays
  unsure (1)..(325): unsure at all n locations
ggcgggatcggatcggatcggatcgacacccagccagcgcgtggtgagtagaacacccccaagaggccaggactgagactgaccatgggagaagcgtgcagggacgcggcggctgcgggccagcagctgcggcaggacgaagagggcggaggaggagggcgtcacgcggagaaggagctcgtcggtgacccaataacccacgactcggtcgtctcggcgaactgtacgaggacgtgccggcgacgccgatgatggcgctcaaccacatctcccgcctgtgcgtatccgtcgacgcctccgtccggttctacgtcanagcgctcgg

SEQ ID NO: 289133 - DNA, 280 bp, Zea mays
ctcttcggcataaagctgtctctttttgcgcaccatctgttacctaaggtttttgccatgattactactatataccatgcgaaggttgtgggttttgaagggttatatcagttactcatggtctgcccaattatccaagctatgctccttccttcgtctgttatacctgttttccgcatttcctcgtcgagatcattgatgggcagataccggatatctcgatgtgttgaaatattgtgcttcctagcatttcttctaacactgcttacaaatatcattt

SEQ ID NO: 289134 - DNA, 479 bp, Zea mays
ctttccgctgctgtaaacagagtcgagcaacagagctgtgaccattgagaggcgagtggttaggacctaggcctctgatccatgcaggtccctgtgggtttcctcggcaagctctggagcttcgtttccttcgtgcccttcttcgtcctcctcctgcttctgggatccatcaaagctgccatagtcggcccggtcacggcttccatcgtgttcttcgggagctctgcagttattattggcctctggcctgctcatttcatctggacatactactgcgttcttaaaacagaaaggatcgggctgcagttgaagattcttactggactactgctgccattgccactgcttctcttgccagtacttgctagcatcgggagtctcctgggtggtaccggatacggagttttcgtacctctcatggcgaccttcgaggctgttggcgagggtgtgactgacaagctgacccattgtttcacgga

SEQ ID NO: 289135 - DNA, 234 bp, Zea mays
cagacccccgatcctcccaatggccaccgcattttcgctgcgcgctgcggccccggccaccgctccccgcgccgtctcccgatccacctccgcggcgagggtcgtgcccatggcatcggcactggcgggacgcggaaggctggtggcgcgtgcaccagttacagcaaaggcggatgtgccatcgagcacgtccgacggccatgaggtcttgctgtttgaagctcttcgtgaggc

SEQ ID NO: 289136 - DNA, 571 bp, Zea mays
catagccagcaagccagcgcacgtcggtaggcacgccaccatgccggggctcaccatcggcgacaccgtccccaacctggagctggactccacccacggcaagatccgcatccacgactacgtcggcgacggctacgccatcatcttctcccacccagccgacttcacgcccgtgtgcacaacggagatggcggcgatggcggggtacgccaaggagttcgagaagcgtggcgtgaagctgctgggcatctcgtgcgacgacgtggagtcgcacaggcagtggaccaaggacgtggaggcgtacggcgggaagcagcagcagcagcaggcgacgacgacgaaggtgacgttcccgatcctggcggacccggcgcgggacgccatccggcagctgaacatggtggaccccgacgagaaggacgcggcggggcggagcatgccgtcccgcgcgctccacgtcgtcgggcccgacaaggccgtcaagctgagcttcctgtacccggccaccacggggcggaacatggacgaagtgctgcgcgctgtcgactcgctgctcaccgccgccaagcat

SEQ ID NO: 289137 - DNA, 407 bp, Zea mays
gccagcaagccagcgcacgtcggtaggcacgccaccatgccggggctcaccatcggcgacaccgtccccaacctggagctggactccacccacggcaagatccgcatccacgactacgtcggcgacggctacgccatcatcttctcccacccaggtacgtccgccgtaccgtacgtcgtccgctcggccatatgcatgcttgcacagttgctcgcgtgcacctgctgatgggagataagatgatatggcagccgacttcacgcccgtgtgcacaacggagatggcggcgatggcggggtacgccaaggagttcgagaagcgtggcgtgaagctgctgggcatctcgtgcgacgacgtggagtcgcacaggcagtggaccaaggacgtggaggcgtacggcgggaagc

SEQ ID NO: 289138 - DNA, 440 bp, Zea mays
ctcagctagtgaaccagcagccaatgcaggcacaggtacctaggcaaattgacttcagcgccgggagcagttccaagcctggtgtgttggttacaagggcaggtgtcctggatggtgagagtgcagaggtggatggcttgtgcaaagaggaagggccaccacctgttatggaggaccgacggccaaggaagaggggaagaaaaccagcaaatgggagggaagaaccacttaaccacgtcgaggcggagcgccagagcgagggagaagctcaaccagcggttctatgcgcttagagctgttgtgccaaacatatcgaaaatggacaaggcgtccctgctgggcgatgcgataacgtacatcactgacctccagaagaagctcaaagagatggagacggagagggaaaggctgttggagtcgggtatggtggacccaaggga

SEQ ID NO: 289139 - DNA, 353 bp, Zea mays
ctcgcacacgcacctgcacctcgcactagctagtcttgccaattaagctaggtatagaccagcatggcttctgctctcaagatgacggccatctgcatgctgatcctgaccacgggccagctgatggcaactgccggtgcaaaggcgccgctggtgcaggcggacgccgcgcctacggctcgccgtctgctctcggcggaccatgagcgctcagcctccgggaggacgagcaactgcccctgcaccgccatgactccgtggtgttgcttcggtttgcagaggacggcgacggagaactgcccctgcaccgccagaactccgtggtgttgctccggtttgcagaagacggcgct

SEQ ID NO: 289140 - DNA, 383 bp, Zea mays
tcctccacatcgactccggctccaccttctacattgtcaactccggtaaattccagatggtgcagatcatatgcagcgtggactcctccgatagccttggctttggacctccttatcaggccttcttcctcggcggcgcaggggacccagcgtcggtcattgccggttttgggccgaagacgcttacccgtgccttcaacgccacctacgacgagttggcgcgtatcctgttgccacgaaccggcggccccatcgtgtactacaccgcggacgcgagccagagagcggtgccgccgaagacgagcgcgggcaggtcgacgggcacgacggtgtgctggacaggggagcgcgacgcgaggtaactggcgcttggatgccgggtg

SEQ ID NO: 289141 - DNA, 412 bp, Zea mays
cagcggacgatatctttctgacagatggagccacctcagcgatcaactgcaagatgcagatactcatcaggtctcacgaagtaggcatcttgagccctctacccgaataccccttgtactcggcctccatcatactgcacggtggaacgctggtgccgtacaatctcactgcagataacggttggggcctagagatctttgaagtcaagaggtgcttggtagacgctcgttcggctggcctcactgttagagctatggtggtactaaatcccggcaaccctactggacaggtgctatccgtcacaaaccaggaggagatagtagagttttgtcggaaggaaggtctggttatacttgctgatgaggtataccaggaaaatatctacgcagagaacaagaagttccattcctt

SEQ ID NO: 289142 - DNA, 298 bp, Zea mays
taactttgctgagagcaataggcttggtgaaggaggctttggtgctgtctataagggcatccttcgtgatggtcaagaaattgcagtgaagaggctgtcacagagttcagggcaagggatacaagagctgaaaaacgagcttgttttggttgccaagctccaacaaaagaaccttgttaggcttgttggtgtttgcttgcaagaacatgagaaactgcttgtgtatgaatacctgcccaatagaagcatcgacaccatccttttcgatcctgagagaaacaaggagctagattgggga

SEQ ID NO: 289143 - DNA, 276 bp, Zea mays
gagttgccgagttgtgactctggagctgtcgcctgcggcctgcctctccgtctccgtccacatcgcgtcataaatccccctttccgagccccgacctagcacctacccccgccacccgcccattccattccccaatccgactggtgcacgagccccgaatccactgtcgcatttgttggcggcctctagctcccgctaccctttccgtcccagagaggcggtcgccttgcggtaggcggaagggggatttaggtgaacaagcatcttgatttttga

SEQ ID NO: 289144 - DNA, 489 bp, Zea mays
cgccggcgctggcggcggcggcagggcttcctcgtaagcaagtcatccatgcatggatggatgcgcgcgtgcgtgtctgtcagtatcagcagggtcgtcgaggaatgctgtgttcctgtacgtgtgggtgaccgtcctttggtcgtctttctcccccgagtgtgtgttacgtatgtcctggtgttcgtcgtgtgtgttcatcgccgctccagttgaattccggtgtctgttcatcgccgctccaggtcggagatgtgaatatactttgctaggggaataagtgataagtctgtctggaagggtaaagtttgagctttgctagtgtggctgggcactctagtcactggatgtgttgtgcatgcatcagctgtatgcccgtcgtctgttatggaaaatattggtcaaatgtattctcttgctgaataatttgtgacatctaattgttaaaaaaaaaaatgtatcgtctctttgctgaataatcagcttctg

SEQ ID NO: 289145 - DNA, 296 bp, Zea mays
aagagccttgcgatcgccaccacgtcagcgcggaggatgcacggccaccagcagcagccgtacccatacgggctgcggcaagacccgctgcggcggatgcgaggtctggacgtgaaatcggcgctccaggccagcccgcgcacgtccacggtggccacggccgcactcgtcgtcccgctgggtgccgcgctgctgtgcgcgtcggggatcgcgctggctgcgaccgtgaccggtctcgcgctcgccacgccgcccctcgtgattttcagcccggtgctcatacccttcgcgctggc

SEQ ID NO: 289146 - DNA, 489 bp, Zea mays
agacgcgaggacgctggcgcgtgggtgccgggtggcacgggagacggaggcgacgagtgcggcggcagcgatggcgcgcgtgtggcgacgtcgtggtggacgaagctggttaacagggtcgtcggaggggcggctggcggcggcgtcgcgcggaggcgaacaggaaggccaagaagaagggcggcgcgtcggagccgtacaacctatacgacagcgagcccgggttccggaacgcgtacggctggaccgtctccgtcgacaagcaccagtacgagcccctcaagcaccccgacatcggcgtctacctcgtgaacctcaccgcggggtcgatgctggcgccgcacgtgaaccctcgggcgacggagtacggcgtggtgctgggcggggaaggcacggtccaggtggtgttcccgaacgggtccctggcgatgagcgaggtggtgcgccccggcgacgtgttctggatcccgcgctacttcgccttctgcc

SEQ ID NO: 289147 - DNA, 310 bp, Zea mays
gcatccatggccgacgatacagagaacggtgaccgggcgaatgctgccaaaggccgccagcccatgcccaccttttgtgccggctccatcttcttcgacccgcacgagcacggctgccatttcatcgaacaagcgccataccggacatggcaaccggatcccctcgccgccgtcctctgccgctcctcctcctgttcctgctcctcttcgccgccaacggcagggccaatgccgcccgccccggcggccccagccccataaagaacgtggtggtgctggcgctggagaaccggtcgttcgacgacatgct

SEQ ID NO: 289148 - DNA, 503 bp, Zea mays
gtgatcttgatgaacaaggtcaaaacctccccgggaatgaggattgaattgtcctgaaccggatgtcaaggtcacatgggtacttccaaggagcagatcatgaagcatggagggaaggtccagaattctgtgcttggtgctacctgtgtcgtggcttctccggctgagagagacaaaggtggctctggaggatttgctgaagcattggagcgtggaactcctgttgttagtgagaattggataatcgatagcattgagaaaaaggaagctcagccttttgctgcctatgatattgttactgatgttgttctggaaggccgaggactcccgctaggccaacttgatccaagtgaggaggccattgagaccttagctgcagaggttaaacttgctggcaagagatctgtccacaaggattccaaactcgatacagacggtggatgtgtctttgagaaggatggcataatctacaactgcgctttagctgtttgcgatctcggatg

SEQ ID NO: 289149 - DNA, 308 bp, Zea mays
cggcactacggcagccagccagccagccagcttctgctggaacaagaacagtacaggtacagcctcctccctccacagcagcgacaccaatggcatcgtggtcgtggacctctgttcactgcagcagctaccccctaccggggccgtcggcacgcttcacgccttctctggtctccgcaacaacaccggcgctcaggcggacgagggcgaggaggcagctgcagcgatgcctctgttcccagtacgccggcgaacgacagccgccgccgccgccgccaccgccacagccggagccggactcgtcgcag

SEQ ID NO: 289150 - DNA, 318 bp, Zea mays
gcagtgactctgggacctacgacagcgagggcaggttcatgccagtgaacttcgagaacctgttcagcaagtacgcgcgcacttccccggacaggctcacctacagggagctctggtcgatgacggaggggttccgcgacgccttcgacctctacggctggattgcggcgaagctggagtggacgatcctgtacgtgctggcgcgggacgacgaggggtacctgtcgcgggacgccatgcggcgcgtgtacgacggcagcctcttcgagtacgtggagacgcagcgcgcgcacacgccaagatgtcctagctagaggg

SEQ ID NO: 289151 - DNA, 606 bp, Zea mays
ctctcgccgtccgcacagccgctcatcgtctcccactgcctgccctctccctgcgccggccggtgccccgacgcgccatgtcgtacaacaaggccccgtccatcaccgccgagaccataaatcccagggtcaagatcatcagatacgcgccttgcggggagatcgtcaagcacgcagcgcggctggagcaggagatagaggagaaccctgcttctatccctttccaagagataatatactgcaacctcgggaacccccaggtccttggtcagccgccactaactttctttcgtgaggttctctccctgtgcgacaacccagccctcatggacagagatgaagctcgtgccttattcagcccttgtagcataagaagggccaggaggatcctaaactcgatccccagcaaagacactggtggatatactgattgccggggaatcaaatgcctgcgtcaagtagtagcagatgggattaccgcaagagacggttttccatcgacagcggacgatatctttctgacagatggagccacctcagcgatcaacttgatgatgcagatactcatcaggtctcacgaagacggcatcttgagccctctacccg

SEQ ID NO: 289152 - DNA, 281 bp, Zea mays
gtgcaatctgatcttgcaggtaggcactcagttgatatcagctgcaactgtcatctatgctctaagaaacctgagccatgcttctacaacagctgtggttctgagaccttggtgcattgcactagtggcagctgcagctatcgaaaggcttgcaggattggcgctaggagtttccatggagcgcgactcggttgtgttgcaggaacaaacaggcctgttgcattagctcaagctaatgctgtgctcaatcgacttgatctagtttgtgagacagttggtgc

SEQ ID NO: 289153 - DNA, 298 bp, Zea mays
ctccctcgcactggaggcctccggcatcgacgccacggtgagggcccacgccatggaggcatcgacagcgcggcagtggctgaagacatcgaagcgggcagggcggcggccgagcctgaactgcgcttgcctagcgacgcagcttggccggatcacgcctctccgtgcgcagatcgaatggtacaaggcggtgttcgacgcggagatggggtactacgacgcgtttaagcagcgcaggtcgcccaggaagtactccaaggtgaacttaaaccgcatgaagctgggccagttctgggac

SEQ ID NO: 289154 - DNA, 336 bp, Zea mays
gtggagaaattcttcgacagaactgaagaactgaacgaggagagacaccaaaggaggagaggcatctctcaggcatggagctcaatccgaccgaagactctgtgatctccgagttcgtgatcgttcagagatgaaacatatagtccactctttctgtcatgtgagtgaacaatttagcccccaaaaatttactctctgaaacatgggtgatcttcccgagccagaagctgccatggccgtgccggagccgtcgtccagcctagcactccgagtcttctacctgcgggtgagcaggtgcgaggtcgacgagtccatgctggatactctcgccctcac

SEQ ID NO: 289155 - DNA, 285 bp, Zea mays
gttctagatcgcgagcagctgccctttttttttttttttgaaacttaaccttcacatcacttattcacatctccgaacgcgacggatctgcgatgaacagataccggtacacagccgactccaggccccagcctagggcagcactacacacgacgaacaccaggatatttatcacgcactctgggaagactaccaaaagacggttacccacgtacagagaagagcattccacgacgactctgctgacattgacacgcacgcatccatggatgatttgcttattta

SEQ ID NO: 289156 - DNA, 350 bp, Zea mays
tgagaaaatgatggagttgaaaaatagatttggtggtctgttgaatcaggccagtcgattgtttggtcttggcgatgagctgaacgaggatgcaatgcttgggagacttgagggtatgaaggacgtgatcgaacaagtgaacaggcaatttaaagatccagacttgacaacttttgtatgtgcttgtatcccggaatttctttcattgtatgaaacagcgagattggtgcaagagttagcaaagtttgagattgattcgcacaacattattattaatcagttatatttgatgagggaattgtcgagtcacaaattcgctaagagcagcggataaaaatgcaacagaaata

SEQ ID NO: 289157 - DNA, 205 bp, Zea mays
ggccgagctgcagcgcgccgtggagcgcgcgtccgcgctgctccgcccgcacggcgccgccgtgggtggagtacaccagccaggcctacaccaagagcatcccgggccactacgtcgtctactgggagctcctgcaggccaaggggggcgccgcggtggacggggagacgctggaagggtgctgcctcgagatggaggaggcgct

SEQ ID NO: 289158 - DNA, 335 bp, Zea mays
gcttctccagtctccacactacacaacagagcagaaggcagcacgggcgctgatggcgatgggggaggcgctgcgggcggctgccgctgacgcggtggtgacattcctgtgggtgctgtgcgtctccacgctgggggcctcgacgacggcggtgacgtcctacctgaggctgcagggcgtccacttcgcgctcctggtcaccgtctccctcctctccgtcctcctcttcgtcttcaatatcctttgcgacgcactcggcggcgctagcttcaaccccaccggcgtcgccgccttctacgccgccggagtcaccagcccctctctcttctccatcg

SEQ ID NO: 289159 - DNA, 369 bp, Zea mays
cgcagttcgctgatcatatacaatgaatggttcagttacgtgctagctgcgtccctggtctggccgccggcgtgatggtctgggcgaggcagaggaagataggggagctatgctcggaggtgatcatcgatgcctcttcgtcgtcgtcgtcggacaagacaacgatggatagcatagtggaggcgcacgaagcctgcagaaagtgcacaggtacatcgtgaccgcgaacgttgccatcctcaggctgtggtcgattgcgctacaaggtcgccaaagcacacagagacggtgatctggatgctggccgtgtccgcggcggtggtagccgtggtcccgttcaggtacattctgatcgggctggtggcgggg

SEQ ID NO: 289160 - DNA, 336 bp, Zea mays
acagtctacagtctacacacagctgaccagagaggcagagagtgcaagcgatctagcaagttttaatcttggaagaagccagctaggcgcgtgaatggatcgcctcactgtgatggcgccgccgctgctcgtcctcctcctgctgctcctctcgctgtgctcggcggcggcgccacggcgcggcgggggctggtgggaggagggcgagggggagtggaggccgagcgaggaggaagagaagggcaaaggcaaagggagggggctgttcctgctgcaccgggtggagaaggtggtggagtcggagggcgggcacgtgcgcgtggtgcgcggccagcc

SEQ ID NO: 289161 - DNA, 282 bp, Zea mays
ctcttctaaatttggcaccgagctctcgtcgccttcccgtctttcagaattcagagggccgcacacgttccctgccgctgcctctacacctctccgggctctccctcccccctccaccgtctctacaccgccgccgcacacaccccaattcctctcgccccattgccggccgcctccctccgtcctctcgcctcgcttgctgcaggttcaatcgccgccgccatttctgcagtctttaattcccacgtcctgtcccggccgtgcacaccaaattcttccaac

SEQ ID NO: 289162 - DNA, 401 bp, Zea mays
agcagtacgcctccgaaatcctcgcgatactcctgcagaacagccccgccaatcagaagcgcctcggccagatcaacggagtcgacgccctgcttcaggcggttgccatgtacaaatcaagggacccaaagacgtctgacgaggaggagatgctcgagaacctcttcgactgtctctgctgcgtgctcatgcccctggagaacaaggagaggtttgtcaaggctgaaggtgttgagctcatgatcatcattatgaaacagaagaagctggcatacagctctgcgacccgcaccctcgattttgccatgaccaagttcccgcctgcgtgcgaacgatttgttgatgtgcttggccttaagactgcttttgcggccttcatgggcaagattcccgtgaacaag

SEQ ID NO: 289163 - DNA, 304 bp, Zea mays
gtcgggcttgacgcgcagatcgggctcgtcgagctcggcgtccccgccgtgcagatcgttggcaccgcgctcatgctcgtacgctgtcgtcttctttgtcgttcagatggagagaggctaccggcacagcctagccatgcacggcctgaacctgctcatagccgggccggcactgtggtgcctggggtctgtgcaaaacatctgccagttctacgagcgtgcgagcgggcacgtccagctcctgcagaagagcgtgcagatcccgctgctgctggggagcatctcttcctcatcgccggcatcg

SEQ ID NO: 289164 - DNA, 334 bp, Zea mays
ctccatatacacaggggtaacgctccgcctcgcagccagcaggacaccactcatcttccttcccccccgcctcgtttccatcgccgccactctcttgctcccccgtaccatccctcgccaccgccaccgccgtcgctatgcagagcctcctcgtgcccactgctgcatcggccccggtggcggctccgcgggctcggcggaatctccctatgcgcctctccgtccgcgcctccgcgacggcggcagcggcaccgcggcgggagacggatcccaagaagcgggtggtgatcactgggatgaggttggtctccgtgttcgggaacgacgtagacgc

SEQ ID NO: 289165 - DNA, 267 bp, Zea mays
aatgaaacatggctcctctgtctcctagactggtagtgcccgtagacgtgaagaagctgccgcgggagcaaaaggtccctctccacaaccgctggcacccggatatccctcctgtcgctgatgtaaccgaaggggaattgttccgcgttgagatggtcgattggagtggagggcgggttagggatgataactctgcagatgatctgaaattcatggatttcacaattgctcattatcttagtgggcccctaagaatacttgattctg

SEQ ID NO: 289166 - DNA, 344 bp, Zea mays
atggcctgtacttagatggtcaacactgcgaactcggcaagcttttctcctacatgagaaaatcaggtatgatccctgatagctttacctatacactactgatacgagggcagtgcatgcttggctatgtcttgaatgccatgatgctctatgctgatatgatgaagattggtgttaaaccaacaaggtacaagatagaatgccctgagatctggtcatgggcaccactgaatgacctccaaactgttgtaagttaagaaatggattttgactacatacttcagatttctagagcaaaagccagttcacaggttgtggaactgtttagtcaaactcagtcatca

SEQ ID NO: 289167 - DNA, 384 bp, Zea mays
cgccgcggttccacccgatggcgcagatgtcgttcaacgacgactcgttcgtgttcgtcgggttcagcacccacatggggcaaaaccacccgcagttcctggccgggaagggctccgtgctgcaggccattgggaagaaggtgctggcgctggcgctggggcagcgggacccgaccgccgtggacaagctgctgtccgcgcagcgcgagtcgacgatactgccgtgcgtatcgtgcgctgaggagctggcggagaaggccgaggaggagaggaagcgacgggaggaggaagggggagggaaagggaaaggaccgggagaacgtgagaaggaaaaggcgaggagggaacgggaggagaaggaaaaggaggaagagcgggagatgg

SEQ ID NO: 289168 - DNA, 304 bp, Zea mays
cttgcccttgccagccagagcgagactccaccgcttcctctccgccgcgtcctcctcccctccctccgttcctcacggctctccggactcgccccgcggctggccgtgctgagtttcgttctctggccggcaaagaagcgatttttttgtgctttctggacggatcccggccggagaagggaccgaatttccacgacctcgaccgccggctgctcctctgctgggctctccgtgcgcaagaagagcctaccaaggtgaatccggagatttgagctccgggcccgcctcatggagtccatggcgc

SEQ ID NO: 289169 - DNA, 484 bp, Zea mays
tggaagaagagcgggccaggaaggagcaagagaagcagcggaggagagagaaagaggaggaggagcgtgcacggagacgcgaggaggaagaaagagagagggaggaggaagaagaacggcggagggaggaggaagaaggtggaggcggacgtggtgacgagccagagagggaggaagaaggcggtgacaagccgccataccggttgtccaagaaactgaagaaacgctaccatgcacgtgccggtgtgttcagcaggagtggctgagtgagcagccgagcagagctggcctctgctccgtacaaataaacaggtggcctcgtacagatggccaattgccacatcaccaccactcgtacagagtaccacctgccagtcggctatgtatgcgttcgttgtgtcgtttgttaagctttgctgcatgctgagtttagattccgcttgtataaaacgtaccctaaataagcagacaagttttcaggctc

SEQ ID NO: 289170 - DNA, 310 bp, Zea mays
agcaaaaataccttcatgctgatgaatgtacattgaggagttggcgagccaaaggggtattggtcccaatgatacattcatcggcatgaaggcttttcgttcccagcaaaaagaataaatcgtggatgggtgcaaacatgcggtgtggatagaacatatttctgatgtaagtaggtagtaagaattgttcaaatattcctctgattctaactctcggtgattgttgtatgtgttctgtttgtgtttggaggtagtaacatgtatctgtctaccatggataattgatcgtcaaatgttcagatcttttttt

SEQ ID NO: 289171 - DNA, 304 bp, Zea mays
acgccagaagaggtttgatgaatgcccgttatctcccttgtcactgaaaggtgttaaggctgctgggtatgaacagatgactgctgttcaggaggctactcttcctattatacttcaagggaaggatgtactagccaaagcaaagacaggaactggaaaaactgtagctttcttgctaccagcaattgaagttgtttcgaaattgccacctgttgatcgtgatctaaagaaacctcccatcagtgttgtagtagtgtgccctacacgtgagcttgctgatcaggctgctgcagaagctaacaag

SEQ ID NO: 289172 - DNA, 455 bp, Zea mays
ccggcgtggtggagcggcgggaccaggagaaggtgtgcaagacctacggcaagaccatccacttctggcaggtggaccgcggcgacggctcccgctcggcctcccgcagatcatgatggtgctcacccgcgagggccagcttcggcaggacctcgctgactgtgtggagaagaagttcggtgtctccttccagaaggagagggagaaccgggcgtacatgagcggaccggagcatggtatccacccgctagcgaacgctaccggcaagggcctgaggaccgagatccgtgaggtcgatttgccggcgagtactaccgccggcgccgggagggtcttcacttgatcgccgtatcgtgtgttgccgcggcgggtctgcgtaatgtagactatatagacggtgcttggtttggtctgtagttcgtgagtacgtgctcaatcgtttgtgttctcttaag

SEQ ID NO: 289173 - DNA, 299 bp, Zea mays
gcataacgcgagggagaagctgccggcggacaagggggcgacgcgggaggacgccgagagggtggtgtccgccgagatacggaacaagctggacatggcgaccacgccgggcggcgtggcggacgcggtgactacagcggcccggctcaaccaggagcgcccgaggccataggtcgtcgtggcctttatatcccatgtggaacagtggaagcgtgcgatcagaagcctgcgcgcggatgagcgtgcttaatagcacagtagcgcgtgccgttttttttttggacttactaagaaaacta

SEQ ID NO: 289174 - DNA, 388 bp, Zea mays
agatatttcagttgtatgaagctaaatttggtgacacacgcctgcgtgctaatcaacacccaacatctcttggttctggtaagaaaaaaatggcatgggatgaaatctatggtgatgatgactatgatggtgagctttctgtgggaaggagaccaggttctagttctatctctactgctgcatccacttctgagctggcatcttacttagatagtgatactattactgagtttgatgaggacttcaatgtcctatcttggtggcatcagcataagctcacttatcctattcttgctctacttgctaaagatgtattgacagtcccagcttctactatatcttcagagtctacctttagtcttgctggcagggtgattgaagagcgtcg

SEQ ID NO: 289175 - DNA, 175 bp, Zea mays
cacacgccacgccagcgtcttgttccttatccaggattccaagctgagaccatgagaccacgacggggctcacactgtgcacgctctacggccatccatagcgccttatccagcattacaccagcagcagcaggtccacctccggcacaccagcaagccaacgaatccagctccg

SEQ ID NO: 289176 - DNA, 292 bp, Zea mays
cctttttaaatgcttcaaatcaacgaatagctgcatataaaagctattgtatgagtatggctattcgtcctcgtaagtttggtgttgacatggatgttagatggaattctacatacttaatgcttaaacacctagtaccatacaagtccagcttttctgcttttatcaaaactcagtatcctttgcattctgatggtactcctttactcactgatgatcattggacaattgctgaaaaagttctttctttcctagaattattttatgaatccacagttgcattgtctggtgt

SEQ ID NO: 289177 - DNA, 349 bp, Zea mays
tactacttgctactcttgctacaagctaggtgaggagtaggatcgtggatcgtacgagtagctcaagaaggaaacaaaacggcaggcttgcagttccaatccatcccgctggcatcgtctgttcttcgtccttccatgctctatagactagctagcgttgcagcgcagagcatgacacaggcaggcatggagtagtgacatatagatggagctggcctggagctgctgctgcttcttgctcgccgcctgcgcgcgctctctccgtcgtctgctccagctccccgcgctcctctgctgcgaggccatggcgtgggcggtcaccttcctcgccttcacgctccgaaggctc

SEQ ID NO: 289178 - DNA, 246 bp, Zea mays
gttccccatttgctgcgtctccttgcacgccccgccgctcgccgtttcccccccgtctccgtcctggacctgcactccgacgacgacgacaacgatgacgacgacgagtcgctggcgcattcttactggggcgacgagaagccgtccacctctgagagctcacctccgtccgagcctttcctcggggcgacctctccatgcttcagctactacaggcacagcctgcaggacaagttccgcgagatg

SEQ ID NO: 289179 - DNA, 293 bp, Zea mays
ggcgacctcttcttctcaacgcccggtgcccaggtctcggccaagctcgcctccagctcgagctgctcccatggcgccggtctctgccctgttcctcccactcgcccggccgcgtcttcgaccttgctctctggtacgctctctggccggtcgctcgacccgagcagctgcgcatccctagcgcccagtctctgtaccgcgcggcccctcctctctctctctcttagctgtcgctccctgctgcttccgtttatccttgagcgccaggccgactcctctcctgctccagctcg

SEQ ID NO: 289180 - DNA, 365 bp, Zea mays
gcggcaagatgcgctcagcacgatcacggcaacaatgggcagagccgttgtttttggtgattatgtgctagacttggaggatggaatggactccgaggatgttgacagtgatgctgataatgatggccgtgggacagaaaacactcgtaggatgctactatttattatgcgccaagttgctcaacatcaccaaaaccaaaggctccagaatgcgactggtgcatctgacaatgctgaggacaattatgtggtgagcagtggtgccaatggaaccacaccatactcttaccccttggagggggaggacgagaatgggtctggttgtcgccggaggagaagcactgatgtgctgagaccagagagga

SEQ ID NO: 289181 - DNA, 167 bp, Zea mays
tgcatgcaccgtagtacgtaggctttgtttgctgcagatgctctgcaggcttacgacccgagtacgcgtatagccgtataggcggtgtacgcctgctttgtaatgtaccaagtaatgctgttttgctttcaataaatctaagaggccgcgcatgcaacagttaagaa

SEQ ID NO: 289182 - DNA, 296 bp, Zea mays
cgctttctggctcctcccctcctccgccgtcaggctcgccgcacagcggttttacactgtttcgacttcgcctcttcctccgcgtccgcgaccgcgaccgcgcgcgatagaccaaacagcacgggtcaagggccgaccggttcaagtctcggcggcgactcggattccactcgaccacgcggacgccatccgtgacattcaagtcccttgccgcgttttacttggccgctgagacctgagtctatcgggacacgagcagagttgcagagcggcagggaggttgctggtcgcgcggc

SEQ ID NO: 289183 - DNA, 305 bp, Zea mays
aaacggcaagtcgatcgatctgaaaccacagatcgatcgacgaccagcagaagacgacgtacgtgaaaccgcgagacagtgcgaggacgactggggtgtggcggtgcgatccatcgacaaggccatgggacaacggcgctttgaggacgaacgcgcactctggcgactgtggcaagcttgctgctcatcctaacgacagcccaagctgctgctgctgctgcttctggacgccatctgtctttgcccacgcagaaggcggcggcggcgcgcatgaacgacaccagtagtagtgacatgcaggtcat

SEQ ID NO: 289184 - DNA, 396 bp, Zea mays
gccgaagccgcggcccgctccgaagcgggcctactctccggcgcagtgggtgccactgaactcccaccccgtgttctcccgacgcgacggcgacggcagcggcggggacgcgcgtgggacgccgcggcgtcgcggctgtacgcgtgggacccttcagcgtgcagcgtccaccgcattggcgtgcggactagggacccggacgcggagaatggtgaggtggatgtgaccgtggaatctgccgtgccttccgagctgttgacgccagagtccgatcttggttatatggtcactcagatatcacttaacactgatggttcatcaatgctgcttgttggatcacatagcttaaatatcatgtatgtacatgagaggatatctgaagatggggatgcaatc

SEQ ID NO: 289185 - DNA, 269 bp, Zea mays
tcatcgcagagaggacagcagcacctgagattgacggcggggcagcgcgcgggcccttcccttcggagcactcagcgtgagagatggggaggcagccgccctgcgacaaggttggcgtgaagaagggcccgtggacggcggaggaggaccagaagctcgtcggcttcctcctcacccacggtcactgctgctggcgcgtcgtccccaagctcgcagggttgctgaggtgcgggaagagctgcaggctgcggtggaccaactacctgagg

SEQ ID NO: 289186 - DNA, 320 bp, Zea mays
gaaggacgggaagctctggatagggtccgtcctgatgccgttcatcgctgtctttgacctcgcgaaggcgtcttagccgcctcaagtttgattggaaacattgttgctttaagacatggagtccatggttaccgctgcacgcttctgagaggatcagtgatccaaataattcggttctggtgcaacctggagctgtatataatgctccagcttcttttagtagcaaatgtaagttgctgacatgttctttagattgtcactagaactatgaacgaacagctcgtgcttccgagtccagaattaccagatgtgcttcttgt

SEQ ID NO: 289187 - DNA, 559 bp, Zea mays
gcagggggctcggcttctcgcatcgggcggagatgagctctctgcccgccggatgctgggtggtcggcgacgacaggcgagtgttccacctcctgctgcacatggttggcgttctgctggaccagtgcgaatgccattgccatgacctctgctttgccgtggacactgttccggtgggtgaccaagagaccatgtcaggctcaggccttcctgattggatcacccccaacttctctggctgcaacacggtgtgcgtcaggttccgatttgggatcacaagacacttcagagacggcttactgctctcgtccagcccacgacctcaagaaagaatcacaagacgcaccagcgtcagcatcagttcagccagctccaagacgcggctaagcatcgctacgtgcaacaagatcgtgcaggtgagctctgtctgtctctatgtacgtacgaaacaatgtttgctctatgtatgtagttagaaacatagcaagaacttaaaattgttaaaccgatggcgtcagatgattgttgatgatcatgctccaccatctgctgaacctgc

SEQ ID NO: 289188 - DNA, 314 bp, Zea mays
agccagctccaagacgcggctaagcatcgctacgtgcaacaagatcgtgcagatgatgaacggcaagatgtggtgggaatccacgccagcgtccggaggccagcatgaagagcacatgagcctcatcctgcacttccagctcgtctatggagtggcatcaccctctgcctcctccccggcaggcggcggcggattctaccacatcggtggcagattcggagtgccctcgccgtccaccagtgctcctcctcagcacaacttcaacggcctgcgcgtcctgctcttgaacactgatgacaccagccgggaggtga

SEQ ID NO: 289189 - DNA, 278 bp, Zea mays
atcgcgagcagccgaccttataaaattattttttcttttttccatagcagtcaacgagcaaaccgctgatgcacaagccacaatagcaatagcaaagctgaaacttaaccttcacatcacttattcacatctccgaacgcgacggagcggcgatgaagcagataccggtacacagccgaccccaggccccagcctagggcagcaccacacacgacgaacaccaggatatttatcacgcagtcggggaagacgaccaaaagacggttacccacgtacag

SEQ ID NO: 289190 - DNA, 394 bp, Zea mays
cttcgtgccgctgccgccgcgaccagctgtggcttcatcagacgatggtgactctgatcagatgatggacctgcgcaagtcgcggcctttgcactcggacaagctctgccccggctccttgcgcatgaaggacgaggtgatccagctatacctcaacaattcggcagcacttgccgcaccaagggaggtgtgtttgcttggtgccctcaggtgtcatggcatcgggatgattgtaggagcattgggagtttccaaggagcaactgaaggatgcactcttggaaggtaatgtacatggtttgggagtggaagccttgcagatgctcactcagatggtgctcagcaatgaagaagagctcaagatcaaatatttcaaggatgacttcctgaacaga

SEQ ID NO: 289191 - DNA, 949 bp, Zea mays
  unsure (1)..(949): unsure at all n locations
atctttccccaccattgtatgttacaattttctaactacatctgttatgtttgggtgctcttgcattctcgcaaagtgctatagaggagcaacggtaccaggacgcgtcaaggttgacaaagctatctgggaccacttttgtaattgccaactcttcactgattattttcctatatgttgctccagaataaatggatcatagtgcggtggtcatgggattgggatctgctccgtatttgcagggtgaagccttcgtgtctcctcgagggaaagtcactgacctttcttgggacgtggaccactgacggcccccgtcatcccccatgacggtgatcctagggtgaagccttcgtgtttcctcgagggaaatctaccagtgcgggattgatttagtcagcaccattggacacagggtttagttccattgcctggacccatcaatgaatcatggtgccaaggtcttgatggttcgacttcaaggtactgatattctccaggactattgttagcatcccttgtggtccatctgcattagcagtgaagaaagtcgcatggggacttgcttgatatgttgttattgctcagacatggctgagaaggaggaaacaaagggccgctgccctgcctgccacacacgttatgacaaggatatgatcgtcaagatggccgccacttgtgacaggacagtggcagataaaaatgcggagaagaagcaaaaggcccaaagggttaagccaaaggcagcaccaacagcaacaacaacatcaaccgtagaatctaagaagcatcttgctactatcagggttatccagagaaatctggtgtacataattgggctacctgcgcatttatgcaatgagagcgtacttgagcgtagggagtactttggtcattatgggaaagttttgaaggttttagtntcccgtccgactgnggctccctctcagca

SEQ ID NO: 289192 - DNA, 357 bp, Zea mays
  unsure (1)..(357): unsure at all n locations
cagaagcactgcacgatccatcaatcgatgagtaaagactgtatgatgtgatcccccgcctctctccttattttgaaagacgagatcacacagataagaactggctgtcttgtgatgtcgcctcataatacaaacttcaagggattgggaagaaaaagaatcggcaggaatggaacggcttattcaggcctccgcttccacttctttcctgccgctgctaatgcttgttgctagtgataatgtactccaagctcaatggcaccatcctagctatatcccgctgctgaggaaagaaaatagagagatgcgaatcgcacgacgggggcttctcgattgaagggggaaatggtggngaac

SEQ ID NO: 289193 - DNA, 444 bp, Zea mays
gtacggtggcggacccatcgacgcggcgggcgagtaggggcttcgtgcgggaagcaggcgggtgcgcggaggtggacgggggactcggcacggagctggaggcgcacagcgcggaccagcacgacgcgctctggagcgccaagtacctcgcctccgccccgcatactctccgcaaggtccatctggacgacctcgaagcaggtgcggacgtcataatctcggcgtcctaccaggccacgatcgaggggttccagtcgaggggcttctcgcgggacgagagcgaggagctgctgcggcgtacgtgcacgtcgcgcaggaggcgcgcagggtcttcgcggcggagggcgacaggtcatcgcgccgcggacgcccgccggcgctggtggcggcctcggtcgggagctacggggcgtaccgggcagacggctccgagtacagcgggga

SEQ ID NO: 289194 - DNA, 319 bp, Zea mays
ttggcattgctgaacacatgggtcggacacttcaaacaacttcaatttccactaacataaacgaaacgctagacttctcttgtgctctctttggtccagatggtggccttgttgcaaatgcacctcatgtccctgtgcatctaggagccatgtctagtactgtttgttggcagcttaacttttggggtgagaacctcaatgagggtgatgttcttgtaacaaatcatccatgctctggggggagccatcttccagacataacagttgtcacgccagtctttgatcacggtaagcttgtcttttttgttgctagtcgagg

SEQ ID NO: 289195 - DNA, 436 bp, Zea mays
  unsure (1)..(436): unsure at all n locations
tccgattgttccaagaaagtgagtttgataagctggtggattctactgtgcctgagattaagcggtgtaacctctcaaatgttgttctgcaactcaaggctcttggaattgatgacatcataggttttgattttatggagaaaccatcaaggactgctattttgaaatcactggagcagttaatcttactaggggctctgactgatgattataagctctcagatccagttggccatcagatggctaggctacctttggatccaatgtactctaagtcattaatagtctcaagcaaattcaagtgcttggacgaaatgctcattgttgtatctatgctttcggtggaatcaattttcttctacgtgcgtgagaagttagaagaggcaagagctcgcaggcagagattcgaaagctccgnaggagacatatcacattg

SEQ ID NO: 289196 - DNA, 389 bp, Zea mays
attgatgataatggtgaaaagcgcttccatggctgggaaacaacggtagccggaggaatcttcgaggtggtgttacgacgtacgacgttatataacagtagtacgtcttaattaataaaataagctacacccgcgtttcccttatatatatgtcttgctatgcatagagatatcatggcaaaggcataggaataaagtgcgtgcgatatgcatgtacgtgcatgttcgtagtcatcttacagagattacgcagaaattttattaaaagcagtttgatttcacataaggaaggaatttaggaacacgaaaaatctctctcaacatgccctataaatatagtcctgcggttatattagttgtcttgtctaaacaagcttatatataacact

SEQ ID NO: 289197 - DNA, 374 bp, Zea mays
cccgcccaaagccccgccgcatcggtgcatccgcagctcatgttcgccttcttcggtctcatattggcatccacaagtctcctgtttcatcttgctcttcgctctcaatcccccttcgcccctcccatctttctctgcgctaacttccctaatcccctttgttgagactcacaattagatcgtctttctcctttggtgtttgttgtcggcggccggtgaatcggcaactctagagctcgggctgctcaaggttagcaagttctttccttctcctttgcgatttctagaggagcatcgtcgacggcttacaagtgacatggtggatgtcttatcctacatcaaagactgggagttagcgaactctcacatgcagc

SEQ ID NO: 289198 - DNA, 511 bp, Zea mays
ggtcaaggttgaaccagacgaagcaggacctcgatcagagggaggaggacatcatcaaagcatactcgaggcaacatgaaatggagaaagcactgatcaaggcgagcagggatttgactctacaagtccgtcagatcaataacctgaaggttatgcatcgcaggaacaagcacatacaacttcgtcagttcacaagacgcactttctacgaaggttattgaagtggataagcttaaacaagagatgctgaagaagaatgatgaagtagctttgctgcattcagagatcgagtccaaggaacaagagcttcttgtagctaatcaggccattgcacgtcaagaagcaacaattagggagcttcgaagtgaaactaaaagaaaggaaactgaggttgagagattaaatgaattggcgaaagctaatgaagacaaactgaaatttgcagaacaggaacttgagaagcagaattcaggatggattgcagcacagcaagagttaaaggaattggcac

SEQ ID NO: 289199 - DNA, 314 bp, Zea mays
tatcaatacactacgccgccgccgctcaaatctcccctcccaatggcaccccgtcgctcacgatcaaatactccctcccctataagtgcaagatcgccaacgaggaggtatagccatccgccacacctgccgctgtccctttgccatttctggtcctagatctgtgttacctgcatttttctttgccacgggatcgggatggttgaggagcagctggtggggatcaacatcttgcttcagatatctattctcgtgctctcgttcatgctcagatattgatggcgctattggtggacccacctgacatcaagagg

SEQ ID NO: 289200 - DNA, 319 bp, Zea mays
accgggctccgtcccgtcccgccgcctgcatcacccaagggaagtacagccgagcccccactcgcgttccctgccgcgcgacctgatcgtacggccggggacgctgccgcgcctcctgacactcgcttccgcctcgcctccccgaccggaccagcggcctccgtctgaagatgcagggcggcgtctccggattccagaacgcgccggtgacgcgggcggtcgtcgtcgcgagcagcctcctgtccgtcgtcttcagcgcgcacggcgcgcccgcgccctcggcatctcataccaggacactataacgaattttcgttta

SEQ ID NO: 289201 - DNA, 300 bp, Zea mays
ccagccacaggctcccaaaccgaccgggcggcgatggtgtcggactcggagctggtggagcggctgcaggaggtgctgcggtcgtcggacctcaacaccacgaccaccgctgccctgcgccgccgcctcgaggaggacttcggcgccgacctctcccacaaaaaggccctcattcgggagcaggtcgacctcttcctcgccgaggtcgccgccaaggccgagctcgcaggagcccaacgaggacgagcccgacgaggcgccggtgcctaaggaggaggagccagaggagctcgagggggt

SEQ ID NO: 289202 - DNA, 362 bp, Zea mays
tgcaaacggtcgccgaaatttcaaaatcccacctcccaatgagcgggatcctcccccatttcaaatttcaaatccacccactcccacttctcacgattcacggctcacgagcccgccgatctatacagtacatcccatccccatcgcatcccgtggtctctcatccccatcccatcccatccccatcgcatcccatcccttttcgtcgagcgccgccgatggagtcggacggcgactgcagcgaggtcggcatgaactcggtccctgacggcgtcgtccagctcatcctgtcgatgctcagcaacgcccgcgacgtggccgcctgcacctgcgtctgccgccgctggcgcgactgcgtcccc

SEQ ID NO: 289203 - DNA, 398 bp, Zea mays
gcttggtaaagcaggtagtaccaacaacttcgatatatacttttgaaagttcaattctgatcttagaccacttgatttttttttgttgattctgattgatagattcactgctcagtaggtttactagctgtttgctgctggtgtttgctctgaatgataggttttgtcgaatgagcattttggatttcatttcaaatctgttgttagccattgtcctcgactcgtggtagcaaggacaccggcatagtgacatctctaccgagtccgaaatgaatgtcatatcataaaatggccatattcctgctgcacgcttgttcccggtgcaagtttctgatcgatagctgactgagctcgtggtactctcatgcatgcagtcatgcttcattcaattcattata

SEQ ID NO: 289204 - DNA, 348 bp, Zea mays
agccggaccagcccggccaagggcaccgaccgccggacgccgctggacgtgcgcacgcccgacgcgttcgacaacaagtactacgtcaacctggtgaaccgtgagcggctcttcacctccgaccaggacctcttcagcaaccccggcaccaggcccctcgtcgagaagttcgcgcgcagccagagagacttcttcgaccagttcgccttctccgtggtgaagatggggcagatcaaggtgctcacgggcgacccagcggcagatccgcaggaactgctccgcccgcaacgcaggcatgacgtggtccgtcgtcgacgaggctgcacagcagagcttcgtgttctagac

SEQ ID NO: 289205 - DNA, 301 bp, Zea mays
tacggaagataggggtgacagtgattctgggagcgattcacttcaaagttcagatgaggatggtttcttggaggaggacgatgatggtaacatggttatgggatattcagacagtgaagatgatgattcagagtctgatgatgaagagatggcatacaatcagggtaggggcaaaagttcagttgttattgaggaaattgaagaggatgacaaggctgctgttgctgaagtgcagaagggattgaagaagcaaagccgtgaaaatggtgatgagtctcaactccagcttgctgcaagaaat

SEQ ID NO: 289206 - DNA, 516 bp, Zea mays
acttgctggcggtttcttctcgtccggtcgccatggtgcacgagacgagatcacgggtgcacgcagctgcccaggaagaaggcaagctcgcctcaaaaaagcagaaaccagataatgaaaccaaggaaaggggccagaatgtgccctccaagaacaagaagtctgccgacaacgaagggaaagacggggagccggagggccaacaaagagcaagaagctcaaagctgaggaatctgagccaaatgggagggaagctgctgcaagagagtttgcagagttttgcaaggccataggagaacgcctctccctcgaggacatgcgcaagatccttcaagccaatgagcaagatgcttctggatcggaggatgcggtcgttccaagatgtgaggatatgatgttctatgggcctctcgagaagtgcccagtatgtgagggtcagcttgaatttggggagtggaaatgccagcgcactgggagctacggcgagtgggcacgctgtactttcagtactagcgc

SEQ ID NO: 289207 - DNA, 306 bp, Zea mays
caagcgccaagctgctgtgctgtgccgtgggtggcggcggcgggagtggaagtggaaccgcagccggtgctgtgatggacgcgcacagcagctggatttggtcatgcgtcaccagagcatggccaccgtctgcgagagcgaggacgcgctggggtcgtcggagtcggatcccgcgaggccggcgcgcccgcgcggcaagaggagccgcgccgccgaggtgcacaacctctccgagaacaggaggaggagcaggatcaacgagaagatgaaggcgttgcagaccctcatactcaactcgagcaagac

SEQ ID NO: 289208 - DNA, 464 bp, Zea mays
cttgccctaacagatcatgacaccatggctggcataccagaagctgtgtcagcagcctccaagtttggcatgagaataattcctggagttgaaatcagtgcgctatataatccaagggaagttgctggtgcgggtgagactgttcatatccttgcatactatggtatgtgtggtccgtcaaggtgtgatgagttggacggcatgctattgaacattagagatgggcgatacttacgtgcaaagaacatgctggaaaagctaactacactgaaggtgccaataaagtgggagcatgtgaataaaattgctggtgacggagtggcacctggccgattgcatatagctagggctatggttgaaatgggttatgtagagaatttaagacaagcattcaacaaatacctcggcgatgatggccctgcatatgccagaggaagtgaaccatttgctgagactgttgtgca

SEQ ID NO: 289209 - DNA, 356 bp, Zea mays
ctagatcgcgagtagccgccctttttttttttttttttttagtttttttttttttttttttttttttttattgtactaagagcaggaacagcatatggtcgaggctgaaacagaagactagtatacagatccgtgtaggaaagaaaaaaaaaaactagctttgaacacgctgaaaacgacctggacactgaatgcaaacatcacccgccgcggcgggctctcctcacagctcgtcctccgaccggtacttgtccacgtccgccctccggtgcttccacttgccgtcgacggcggcgacgtcgggcccagcgaccctctccttcacctcctccagcctctccttggccgtgtccgcc

SEQ ID NO: 289210 - DNA, 292 bp, Zea mays
cgagactacgacgccgatcctagctagctctcccgtttctgctcgcaagtcacacacagctccggtagatccgcccctcgcctctgggctccaggaagagattagcttcagacggcagggatcgatactagcaagcaagcatggcgcacgacttgtgcgaggacttggagctcgtcgccgacgacggcggcttcgatgactactactgggacgacgacttccatttccacgacgacgacggcttctccgcctcccctaagacccccgcaagcgttggtgcgccccgccagca

SEQ ID NO: 289211 - DNA, 409 bp, Zea mays
tctataataatatccgcatatttttgtcacttaaagatgtaaagccaaatccatccgtaggtgctttggaatcagtcgttggtgaggatttatcgtttggtggagctcttgaacccgtgcaagcagatttcgagtggcccgaggtagacgccctcatggaagagatgcggagaacagagggtgtaagacatgtctataaaggacggttcttccaaagcccagggttagctccgacgtttcaggtctacatggcacctgtggtcggtccgaaatacaagctcctggcgcggtatgggaacagcgtccaggaggtgatggtggagacggcacttggcaaagaagagttgaaggaggcagtcctgatgtgcactaatagggttagctaggatctccatgacgcgcatttgct

SEQ ID NO: 289212 - DNA, 279 bp, Zea mays
caaaactggaggacctagcttcgccgcagatgtcgtcggtcccggacgctgatctcgcctcagattccgtggccggcaaaaaaagacacgcatctctgtattgatatgatatattgtatttatcacggacaaaagacacaaggacacagtggagtcaagcacgaaccagttttttttagcatccttaaagagtacaatttaccaagacatcgtgcacaaaagggttggaccaaggaagcttggaataacaagacgcagcgtatgaatgaaaaatctgta

SEQ ID NO: 289213 - DNA, 302 bp, Zea mays
gagacgaggagcacagatctggcgcgagccctggtggcgccggacatctaccaccccgacggcaccgcggccgacgagcacggccaccaccacatgagcgtgttgcagcagcacgtcgccttcttcgaccgcgacgacaacggcatcatctacccttgggagacgtactccggatgccgtgcgcttgggttcaacatgatcctgtctctcttgatcgctcttgtcgtgaacgggaccatgagctatgccacgctgcctgggtggctgccgtcccctctgttcccgatctacgtccacaacat

SEQ ID NO: 289214 - DNA, 191 bp, Zea mays
agcagatatgggtagaactacaactttgatttaatcaaacgtgtttctagcttcatcatgctatatatgctctgactgaagctttaattcttgtgctgctatcattcctgcgttctgcagatcatttagctcaagtaattggtagtccaacggtcatgatacttgttttggtttgggattagctttatcta

SEQ ID NO: 289215 - DNA, 432 bp, Zea mays
agaaaaacatgcttcaaatagctatgccaaaatggttatatatattgaagcatgtgaaagtggcagtatatttgagggattaatgccagaagaccttaatatttatgtcacgactgcatccaatgcagaagaaagtagctggggtacatactgtccaggaatggaaccaccgcctccttctgagtacattacctgcctaggtgatctatatagtgtctcttggatggaagacagtgagactaacaatctgaaggaggaaacaataaaggaacaatatgaagtggtgaagaagcgtacttcagacttcaatagctatggtgcaggctctcacgtcatggaatatggtgacaagaccttcaagggcgagaagctttacctttatcaaggttttgatcctgcaaatgccaatgtcacaaataagctgctttggtc

SEQ ID NO: 289216 - DNA, 442 bp, Zea mays
gccgcgccgtgcggctcaacttcccccaccccggacacctcggacgacgagtaaagcggcgctagtttttgtcgccgctcttcttcttcctcggtctaccagtccctacgccctacctagataggtgtagcagatagagcaagcatagcaaccaggtggacccaggacagacggagacggaggggcgcgggcagtcgcggtcgcagcgcaaggtgttcgatgggctgcggatgagctccatccaataatggagttgcgacgtcgacgtcaggggcggaagcctagcgtgcgagctctcccggtctcccgtagcagggtgacagacgggtgcgggactgcgggcgggcgggcgggcatgtagctcaagcaagacggctatgtatctctcagctttggcataaagacgtgtaaaggaaaaaaatatatatatactccccggcaa

SEQ ID NO: 289217 - DNA, 462 bp, Zea mays
cgccgcggcggcgagaaagagagaacgcgctcctcttccttctcgactcgatctgccccttccagcccgctcgcccctcatcgagcggcctccgtagccctaggtgatccgcgcctcctttcgccgcagcggaacaggacgcctgaccgtcgaccgtcgaagcgattcctctctcgcgggcgtcctcgtctcgccctcctcgcctcctcggtgccagtgggtcggcgcggggaggcatccgtccgggctacggtcgatttgttctccacttgctgttgaactttaaatagacaatggatctggagacagaaaatcgtcttgcttctttactacttgaagaggcccgaagattacaattagaggctaacagggaaggtgttcaagcatatctgcgaaaacctaatgttaggcatcgtccaaactcacggttcctcacagccacagttcgtggagttcagcaag

SEQ ID NO: 289218 - DNA, 378 bp, Zea mays
gctagtttgaagctcaatgtaagaaaggaccgttctaaagctaattcaaccagaggttcaagtggttggatttctataaaagcacgtacttctgattggaaccccggagaaatggcaaaaaagcggcgcctatctgaaaatgcacgcactgctttgagcaatggtggtgatgatccatttgcatttgatgataccgatcaagaaccttcaaattgggatccatttggtccaaaaaggaaatcaccacagaagcgagcgaaacgatctaatggtgaactagtgctggatgattgtgagactgcattaatgggaagtcctaaattatgtcaacctgaagatatttatcagtcagttgcgacttctggttctcaagttgta

SEQ ID NO: 289219 - DNA, 406 bp, Zea mays
cttcttcacgagatgggcctctagaacactcacgcactctccttgcttcctatctctcatgcatgccatggtgtcgagtttcattcccttcatcttctccctgcactagcgtttggcttcctagtgcatgtcctgctctgccacgcactcacaccttcccgctgtagcatcggcagcagtaggcgcccagtcttcaagctcggacgttttagggtcctgtgccgttgtcaacctcgcgtccctttttgtcatcagcagacacgtcgcccttgctccctccccagctgtgtctgtggtcgtcgagcatgccagctgccgcgggctcgcctcacccggctgtcgtctccaaccttcgcctcgacgctgtcgttccttgtactcaacacggggttcgccattggtccct

SEQ ID NO: 289220 - DNA, 449 bp, Zea mays
gtgagcctcgagtcacagcattgttatctgctgttgctgcaggttccctcccatgcttggagggcctgagtgaggctggtgcaaacccaaatgtcaaggctggtgcagcaaccccattgcatattgctgccgatagtggaaatatagaagtcatcaaatgtttgcttaaagctggagctgacccaaatacctgtgatgatgatgaattgaagccagttcaggttgctgcttggagaaataaccgtgaagctgttgaacttcttttaccgttaacatccccaattccaggtgtttcaaactggaacgtagatgggattatagaacacatgctccctaaagagtatgaggaaaagtctcaactgaaggaagcgacatctctgaaatcaggcctaacacaaactattgaggtgtcatctgaagcaaaaaagaggtccttggaagccaaatca

SEQ ID NO: 289221 - DNA, 324 bp, Zea mays
ggagcagcagcagagtacgcacgtacagcgccacccacaccacacccatggcccagcaggacaaggcggcgtccggcgggaaccgcggcggcgatcgggccgcggcgccggctggggagcagctggtgataagggcgccggtgcactgcgatggctgcggcaggaagctgcgccgctcactccagcgcctcgagggtaagaaagagcaagcaagcaaacgaccggccgcgtgcgcgcagctatactttgtgcctagctatctccttgtctctgagctatgttactgcactgaacgagtgagtaatggcaagtgttggagaggtg

SEQ ID NO: 289222 - DNA, 303 bp, Zea mays
aaaggaagcaggagcaggacgagccccgagatctcgcctcaggattgatgcatcattggcgactgcactgcacttcttcgccatcgatcctgtgggtcccctgattctccactccactatggcgccactaatccactccactccatctaatcaatttccagtgtatcgccaaaacacgcatgctttccttcctcgccatgccaagcatcgcccgcccgccctcgcacaagagagcatgccatggcccatggcctccgcggcgcgccatgccatcctcatatatacgacgaacatgtgctaagc

SEQ ID NO: 289223 - DNA, 316 bp, Zea mays
ggtgccgcctcgggcgagatccgctccgcgtgccccgccgctgccgaggtgagctccgaacgcccgccctccgccgttgccgagatagagggtgtcgtccccactccccagcatctggttccacggagagttgttgatcttggatacctgatccgcaatttggggctgattgagtcacttgaccttttcaacatctgccccgttcctgctgccttgctcgctataagaggctggcctggttccagagatgattctattgtgagtggagatggattctgtgagaagttggttccagaagttccagccgagagacaaa

SEQ ID NO: 289224 - DNA, 287 bp, Zea mays
tcaagtgagagtgatacccgcgttcttcttcctcggctcttccacgcattcagaacatggaggatcggatcggagctacgatggagcaggtcgtgaacacggtgatggacctggtgatgccgccggcgagcatggtgatgctggcgttcgcgtggccgacgctgtcgttcctgcgcggcgtcgagtgggcgctcaagaccctcacgaaggaggacatgctcggcaaggtcgtcgtcatcaccggcgcgtcctccgcaatcggcgagcaaatcgcgtacgagtactgc

SEQ ID NO: 289225 - DNA, 256 bp, Zea mays
gcgacgacgtcgaggtgtacgccgagacgctgcggctcatgtactgcaaggatctccgccggagctgatgcgggaggatgtgaacaaggtccttggcatcctgaaggtgtccgcagccattgtattcgatgccggggtgttgtcttgcttggagtacttggaggctgcgccttgggctgaggccgatgatgagaaggtggctacattgttgacgcagctgcatcttgagaactccggggctggggaggtgcttaaa

SEQ ID NO: 289226 - DNA, 481 bp, Zea mays
aggacaagcaccacaatgaggttcgcgtgtttactgatgcagggcgaatcctcagaccccttcttgtggttgagaatctgaataaaatcagaaaacctaaggggcgctcattctctttccatgaattaatgcaacaagaaataattgagttcattggtgttgaagaggaggaagatatacaatgtgcgtggggaatcaggcatttgtttgagagtgaaggtgcgatatctagttatactcactgtgaactggatccttcctttcttctgggattaagctgtggtatcattccttttgcaaaccacaattttgctcggagggtattgtaccaatctgaaaaacactcgcaacaagctattgggtactcaacgacaaatccacacatcagagttgatactctttctcatcaactatattatcctcagaggcctcttttcaaaacagttatagccgactgtcttggcagatcagattatgcttc

SEQ ID NO: 289227 - DNA, 310 bp, Zea mays
tgtggagctggctgtgacggccatggaggagctggttcggatggcgcagctaggacgagccgctgtggaacgcgccggcaggcgggcacgacgggtctgctgagacgctgaacgaggaggagtacgcgcgcatgttcgtccctgctggagggctcgggctaaaaaagcagtacgggttcaagtcggaggcgtcgcgcgacagctccgtcgtcatcatgacccatgccagcctcgtcgagatcctcatggacgtgaatcagtatgcgacggtgttctcgagcatcgtgtcgagagctgcgacgctggaggt

SEQ ID NO: 289228 - DNA, 310 bp, Zea mays
aagcctcctgaccctggttagcttctgttttttactccatgcaaggacgacaatggcgaccgcctccgtcgccacctccctccccttcggcctccttctccctccgcggctattccgtgggaggctggtgaggtggccgcggcagattagggcttcggcgtcgagcaacgcgagtaacgtcgcaggcggggagaggaaattgggggctctcaagggcagggtaggagatctgagggcgcttgtcgcctctatgcctgatgccgttggctcgatccagaaaaacattggcccaaattttgttgctggtttc

SEQ ID NO: 289229 - DNA, 347 bp, Zea mays
gtccgctcccaccgggtctgcgcatcagagaccgacaagactgggaaatccagagatgcatttttctaccgatcagctgatcggctcggcgttcattgcctttgggctcacattgttcgtgtgtttcttctacgttgccgtcgtgtccaagctgcttccgccacatcaaaatggattcctggccgccatccaaaacgactggtattactgtctgcttgtgccgttgacgcttcctgtaataatcgtggctgtctacctgcactggctcagcatgaagatgttcaagcacgcatgaagcagtcatgcagcttccttccggtttcagaatcctggtcaaaatcgaggag

SEQ ID NO: 289230 - DNA, 758 bp, Zea mays
ttctgttcaggcattcgaccgatagagaggttgccttgatggctctcatggcctatctatcgtatatgctggcagagttgctagagctgagtggaattttgaccgtgttcttttgcggcattgtcatgtcccattatgcatggcacaacgtgacagagagctcaaggattacaacaaagcatatatttgcaaattatctttcattgccgagacattcatcttcctttacgtcggtatggatgctcttgacattgataagtggaggacatcataggaaagcttcaagacatccatcggtatctttggcatcctcatattgctcatactactgggacgagtggcatttgttttccctatatccatttggtcaaatatcatgagtggaagttctgaaagaaccccgatcacattcaagcaccaggttgttatttggtgggctgggctcatgagaggtgctgtttccattgcactagcatacaatcagttcacattctcaggtgtaacatcggatccagttcatgccaccatcatcaccagcacaataatcgtcgtcttcttcaccactctggtgtttggcttcttgaccaggcccctgatcagtggcatgctcccgcaccagtcgagggcgctgtccagaggccatagcacaggcagctcctccccgaaggatgacttcaccctgccgttcctgtcgggcgatgaaggcgcgtcaggcagcggtatcgtcttggagcaagccatgaggagcttgtctatga

SEQ ID NO: 289231 - DNA, 294 bp, Zea mays
gaatgatcctaaatttcctggttctgaaccatttttcgctggtatctgaaatctagtgtcagaatgcaattttttttctcacgcaagagaattgcgcatcattatattaagaagatgtacaaaaaaaggtccagcaggaccagtactaagccaggcaccccttacggtggccaaaaacaggaatacacaaaagaatccacacattctagcaaacgaaactctactcaagaccagggattggggttgtagtcattggaatatgtccttttagttttataattttgattatttggt

SEQ ID NO: 289232 - DNA, 387 bp, Zea mays
gagaagggcaaagacaaaaggagggggctgttcctgctgcaccgggtggagaaggtggtagagtcggagggcgggcaggtgcgcgtggtgcgcggccagccgtggccgccggcgtccttcgcagcctgccgcgaggggctcatgcacatcggcttcatcaccatggagcccaagacgctgttcgtgccgcagtacctcgactccagcatcactctcttcgtgcagcggggggaagcgaaggttgggtatattcacaaggacgagctcgtggagaggaagctcaagatgggcgacctcctccacatcgacgccggctccaccggctacagggtcaaccccggcaaatgccagatgctgcagatcatatgcagcgtggacgcctccgat

SEQ ID NO: 289233 - DNA, 307 bp, Zea mays
cagagctcgatcgatcaccaaactaattaacaatggcgtccgcagcaagaagcactgggtctctcccggtggctaacgtccaggcgctcgcggaggcttgcaatgacgacgggggcgacgtccaggtgcccgagagatatctcagcaaggatcccagcagcgcggaggaggtcgtcgtcgtagccggcgacgacagcgcctgcagggcgattcctgtcatcgatctccgtaggttgctcgatccggagtcatcggaggaggagaccgccaagctggcgtctgcctgcctcgactggggcttcttcca

SEQ ID NO: 289234 - DNA, 431 bp, Zea mays
gtgtacgtgacggtagccgacgcccggttctgcaagccgctggacacggcgctgatccgggagctcgccgccgagcacgaggtgctgatcaccgccgaggagggatccatcggcgggttcggctcccacgtcgcccactacctcagcctgaccggcctcctggacgggcccctcaaactgagatccatgttcctgccggaccggtacatcgaccatggcgcaccgcaggaccagatcgaggaggcagggctgacgccgcggcacatcgccgccaccgtgctgtccctgctggggaggccattggaggccatgcagctcaagtgaacgacgacgacgacgataacgacgacctagcttcaccatcaccaccaacagataaataaaaagcaaaccaaaccaaggcgtttgtacagtacaggagatgggtccaa

SEQ ID NO: 289235 - DNA, 235 bp, Zea mays
agctcgaattcgcctcgagctcgctacactgcatcttgccgcgtccacgtaggaaccatcacgcgctcgcctcgtcggagcagccacaggagcatccgcgcgtccgcgcttcatcctcgccgtcgtcgagtcgtcactttggagctccaccagactccacgaggtcgccttgccgagtcgccgacgtccatggcgcggagttctctgtcgctgtccacgttccatcttcaacggc

SEQ ID NO: 289236 - DNA, 301 bp, Zea mays
tatccccgtgctagatgcgcgccggccgccgtgtgtgtgtatgccttaacgtcgatgcgtgccttgtactcctgtgtggccgtgtgctaggggcagctgctcgttgctgctcttttacaacggagttttactgacattgtccaacagactattccattccggtgtcagagcagagattttagcatcgttactcggattaggagggtaggatccggctatggactcaacgctgaaccaggtgaaggaggagagccatgggagaggaggagatttgatggcaggcacggtggaggccgcggat

SEQ ID NO: 289237 - DNA, 361 bp, Zea mays
tcgagaacaaggaccaggtgctgtggtacacgctggggttccaccacatcccgtgccaggaggacttccccatcatgcccaccgtgtcgtcaagcttcgacctcaagccagtgaacttcttcgagaacaacaccatcctcaagcagcgcccgaccaaagaggatgatcagcccatctgtactgcctccaccgccgcgtagcctactaggagggccgggggcgaactgattaaccggagacccatcaatcagcttgcatgcattgctgtgtgttgtgctcttgctaagctttattaattagtacgtaccacgaacttaacgcatgggccggatctcatagtactccgacagttctatttaat

SEQ ID NO: 289238 - DNA, 401 bp, Zea mays
ggctttgcgcatgcatcctgttgttaggggttcggtgacaatgctgtctgcttatggagatttcaatgctttcccaaggagactccgggagggatgccagagaactggagtcaaacttgttgatgttcctaatggacggaaagatgctgctgataaggctatactggttgatatgttcctttttgcacttgacaatcacccaccatcatccattatgctcatatctggtgatgtggacttcgctccggcattgcatatacttggccagcgtggatacaccattgtcattgctattccgtcttcagttaccgtctcatcagctctgagcagtgctgggagtttcgtgtgggactggcctagccttgcccgtggtgaacgtgttgtgatccctaggtccttgg

SEQ ID NO: 289239 - DNA, 387 bp, Zea mays
gctccgacgccggatttcaaccaaagcgcctgaagagaaaaaagaggcgcagacagccaaaaaaaagcagggcatttcggacgtgacggatccggcaggcagcaagacgtagtacgacgcccgggaataaagacggcccgaaacgcatggtagaaacgtactccgaatttcgtgagcttttttttttttttgcaacagtaggcactaggcagtcagccaccacaaaagcccacaacggcatcgccagaaaaaaaaaaagcaaaggttttgcaggttgacaaagctgagagagacgggacgagacgactgaaataaaaggtcctcgagacgatggggattgggcgtagtttgctctgttttgtaattttgcgaccaatttccgtttgt

SEQ ID NO: 289240 - DNA, 423 bp, Zea mays
tgcagtgccacaggaacgagcaagacgatccatatttggagaggccatttggcatccagagcatccagataaacttgaaagagcaagaaaaacgaggcctcgtttcttgcagtgcctgtgcgtgcggcggcagcgcatgcgcattctcttccctccccgttctcctctccccggacaacccggccgcgccgcccccactttcttccaccctcgttggtagagtaccgatatagttccccccatcggccaggaatcctcgcatcgcatcacgacacccggttcctctccctcccttcccttcctctgcttccggggaggacgacacgaaacacacagacgaagggcgcaccgggaaggaggacctggacgaggaggcacacaacacaatccttcctcttgcacgcggagtcctcaagcgggcct

SEQ ID NO: 289241 - DNA, 278 bp, Zea mays
agcaaatcccccgatcccaccacgtacgttttttaagagcaccacttacgatctccttcgccaaccgcgccgctctctctctctctctcgcacgagccgcgccggcgccgccaccacgcgcgcgggagacacagaccacagccgcagccaccggcgggcggaataggaatggtggcgccggggggaggagcaggaggaggtccgtcgcggtggccggcggcggaggagcttgacactgtacggaacaaggtggtggagattagtggaagggatgaaca

SEQ ID NO: 289242 - DNA, 207 bp, Zea mays
aaaattggatccccgcaaggtccgggcccgaaataaatccccgggccccaaggtccctaaatagcgggcccccctttttttttgttttactcaagtttgtatatcgcaggcgcaaaataattgtggcttgtattacatagaggcatagagcagatataacatgtactagcacggaagctccttgaaacagcttactattttttttac

SEQ ID NO: 289243 - DNA, 404 bp, Zea mays
ccgatgcaaaagtctctctttgattccgtccctggtacaccagtgcagaaatcagtatttgattctgttccgagtacactgatgcagaaatcagtatttgattctgttccaagtacgccaacgcagaaaccattctttgactcttttccaagcaccccaatgcagagatccctgtttgattctggcccaagcagagcagaatctcctactgctggcagcgtgtacggcaaagagcaaaagggattctttgattcttcagttccgagtacaccaatgtacaactcaaacctcacgcccagatacagtgaagcaggagatgattcatttgacacaatgtctcaatacagctccttcggcatgcacgacaacaattcttttggacagatagacagcttctcaagatt

SEQ ID NO: 289244 - DNA, 314 bp, Zea mays
cccctctgctggcacaccttccacacgcgcgtagcttcttggcgctttctccatcacgctctctccagcgcccatctccctcctctactcggtcctcctctctgcgcgcaggagcttctcccatggccacggcgccctggctcctgctctccacgtcgtgcgcgcctgggcacttccccaggtggccgtctgccctcctgcatcgcgcccagccgagcctgctccctgagctccttccctgccgcaccggagctccctaccatggcgccgagcgacctgccctcggcttcctagttgcatcgcgcgccctcgtc

SEQ ID NO: 289245 - DNA, 405 bp, Zea mays
ctccatttctctctccaaaagatgagaagcaaaatgtggagaaagcaaaagccacattattgaatgagaaccttgatggatctagttctgtaacagataataaacaatccgatcacctgctaatggtaattgcatacgacaaatggtcccgcatactgctacagaatggtgataaatctgctcgtcagttttgccattcattctacttgaatagtactgtgatgcacatgatcagggacatgcgtcttcagtttggtaccttgttagcagacattggacttatagatcttcctaaagatactctgaggcacaaggtgggcagtagaaaaaataatctcgagagctggttttctaatatgtctcttccattcaatgcctatgctcgctgcacctcggttattaagt

SEQ ID NO: 289246 - DNA, 407 bp, Zea mays
ctctatttgtttataggaaaaattgagtctgtatatgcatagtcagatgctgccataacatcaggtgtgtaagcatctgactatgcatactcagactctatttgtttataggaaaaattggatatggaactgcaagtgaggctttggcctgcaagctaccattagtgtttgttcgcagagattcactcctacgaagagccatttttgcgaaatttgcttgagcacgaccaaaacagcattgagatggtcagaagtgatttccttgctggacactggaaaccgtaccatattcgtgctctcacacttcaaccatgctacaatggcccaataaatggtggtgaggtggtttcccagattctacaggacactgctattcggaacaaatgtatttctgataaagctagtgg

SEQ ID NO: 289247 - DNA, 687 bp, Zea mays
ccgagcacagcacagaccgccgctgacaaggctagggagacggccagcactcacgacactgatagggaacagggacaaggtctgctgggggcgctggggaacgtgacgggcgcgatcaaggagaagctgacgctgggccaaggtcagcacgtcgacgtccggctgggcggcgaggacgagcgcgcggcgaaggaacgcgcggcggagaaggcggcgtcggtgtacttcgaggagaaggaccggctgatgcagcagcgtgcggcggagcgggtggaccagtgcgtcgagaagtgcgtggagggttgcgccggctcgtcctgcgtgcatcgccaggggaagatgtgatcatgtgatgccgtggcgcgcgcccgcccctacgtgccgccccctactgtggcgtccgtgtatggtcgatgagcgataataaataaacttgttaaactagtagcctcccgttgtgttttgggctgtatgttttcgctcctttagtaacgaactgcaggtgtattggatagagtaccactaccagagtacacctgccgttcgttactaaaaaaaaaaaaaaaaaaaaaaaaaaaaaaaaaaaaaaaaaaaaaaaaaaaaaaaaaaaaaaaaaaaaaaaagaaaaaaaaaactaagaaaaaaaaaaaaaaaaaaaaaaaaaaaaaggggggccccccgcttttt

SEQ ID NO: 289248 - DNA, 295 bp, Zea mays
ctttatgacaattgttccaagaattaataagtattccagtgagcgtctcaaaaatggaatcaagagatgagatggtaactagctgaaacccaagagcgattttgcgacgccctgctgtgagccgaccctagcagtcaaggcttctgctcccgtttgatctgtcagatgggcttctgctactttcaagtagtgctgctgctttcgagtggtgctgctgctttcaagttgaagtgagttgctgttgacttccacaacaagctgccacttttagtggaagtgagtacaaaacaggctg

SEQ ID NO: 289249 - DNA, 342 bp, Zea mays
gcgctgctcaactgtgacctaattggcttccacacttttgattacgccaggcacttcctctcgtgctgcagtaggatgctgggaattgaataccagtcaaagcgtgggtacattgaattggattactttggccgcactgtcgggatcaaaatcatgccagtgggagttcatatgggtcaattggagtcgggtctgcgcttgcctgataaggaatggaggctttctgagcttcaacggcagtttcaggggaaaactgtcttgcttggtgtggatgatatggatatctttcaggggagcatttgaagcttcgcgcctttgagaccatgttcaggacacatccca

SEQ ID NO: 289250 - DNA, 454 bp, Zea mays
ggtatatcaatactgttctacctacggaaaatatatccagatgaatttaggaacttccttcagcggatagattttgaagtgaaggatgaagaagaacttaaagataagatggatgagatctgtaattgggcgtcttataggggtcaaactctcaccagaacagtaagaggaatgatgtactacagaaaggcacttgaaatccaatgccttcaagatatgatagatcctgctaaagttgaccaagacagatcaataggatcctaccaagagttgcaatctgatattgaaatggcacaagctattgctgatatcaaattcacctatgttgtctcatgtcaagtttatggcatgcaaaagacatcaaaggatttaaatgaaaaaggcgctatcagaatatcctcagtctcatgataatgaacccatcactacgagttgctttcattaatgaggtcga

SEQ ID NO: 289251 - DNA, 315 bp, Zea mays
tgcagtccaagttttgttggcaggttgtttcatcatgctcttgacgagtcaagaccaaaatctgttctggttcattcattgtcagtgtgtatatctttattggaccccaaaagactagcatcagtctcataccaagcatttagaagcaacttaactcacgggacgctggttacagccagtccagaaacagttgatggtatactggagagtctaggtgacttgctgaagttactggacattacttcttctcaaaatgtttttcctacaacttatggatgtttgtgtccgcctcttggaaaacaccgtttgaagatt

SEQ ID NO: 289252 - DNA, 309 bp, Zea mays
gtgaattgccatgacttaatttgtgtaggggcaggaggtataaatctttgctcgttcagaagaaagctgttaggttgagagtgaggaggaagttttagttacatggtggatatgttagttccttggaggaaattgaagtcacacaaacgttagatgagatatgagcatatgacatttctttttgttttgaagcttatgccttctgcagttttatgttcacctacctactgggcagcgattcttatcaaaagcatggtggatatgttagttccttggaggaaattgaagtcacacaaacgttagatgaga

SEQ ID NO: 289253 - DNA, 253 bp, Zea mays
gcggcgcctcgcgcctcttgctcccctcccgccgccagccccgttggggagaggaaaaggtggattaggaaattcttgtctgacgagtagcagaatttctctaggtcgttgggtgcagcgaggtccgggccttcgtgggatttttgatactctaaagtcgtatgatcgattctacatattgaagaaaaaacaggccttcgctatggtgcgcaaaaaagaaaaataaaaggagggaggtttccatctttgccat

SEQ ID NO: 289254 - DNA, 344 bp, Zea mays
cgacgatgtgaacacatcgatcgatttcggcaacctcctgccccgagcccccagttcgcacaggaaacacaggagccggagcgccgatcctcgcaaggcaggaggccgcggcgacgacgaggagaggatgatggacaagcttctgatgcactacagcaagaaagggctggacagggaggagcgcaaggagagagccaacaagtcccggaccccgttcccacgagacgaccagcgcggcgacggagccggagaactgtctagcaaaggaggaggagcatctgcacaccgccctgaaagagccgcatccttgccttcagaatccgcaagccccaaggcaaaggcga

SEQ ID NO: 289255 - DNA, 326 bp, Zea mays
gtcaattctcggaatttctcagaagattggagacgggcgttctcttttcatttggagttttggactagtcgaactgacgaactggcagagcgttcaggatagacatggctgccacctttgccttcatccctctcctgctactggtctgcgtccagagcgcggctcctgttctcggcttcacaaggagcgagttccctgaagatttcgtcttcggatccgctacctcggcttatcaggtgacggatgatcccatccgggactcccgtgcatggattcatagggctttcttgcggctcatcataggcaactaattctttattttgaaa

SEQ ID NO: 289256 - DNA, 302 bp, Zea mays
ccaaaacgcgagaccacctccctcctgcgctctgcaagccctgctccgtcgacggtttaagcgaaaccgtgtgcgtgcccgggctctcgttcttcttcttcttcgcatccgataaacaggggcccaaaaccagccgtgtttcggagcgactggcgactgggaccgattggccaaacgcccgctgtggaacgtgtcaaaaatcttgcgaaaaaaggaagagggcaacggccgggaggtgcaggtggagccgtgcaacggaaggcggcggtcgcgtccggcgcaaggaaaggaaagctggcgac

SEQ ID NO: 289257 - DNA, 294 bp, Zea mays
tgagcttgctgtccccctccccctcgctctcgtcgtgctcgtccacgtcgccggagacgaagctagcaagtaaggaatgaactggcccgccagaaggagactgttgttagcttggacctccatttgtaatcctttcttgtttatttatttacatagtaggtctccgatctctcccgtcgttgtggattagcagtcgcaagcgcgtgtcaattctcatagttttctaaataatcgtttctacgtacccccttttttatgccgtacgtctgaaattcaagttcttcatatttctcg

SEQ ID NO: 289258 - DNA, 185 bp, Zea mays
tagaaaggcaataacagaggattgttcattagttccttatcaagggtcatgctgttttgcaaactaggcttcccatgaaaatatatgcttttggattcataagtaatgggattggaatttgttttttggtaatacgatttgttgtcttgtgatcattggcacggcaatggtctttttccattgtt

SEQ ID NO: 289259 - DNA, 864 bp, Zea mays
ctttgatatgctggtaaggaaagatatgtattgagcttttactacgatacacttcaaacttttggactgaagtttttcatatatggattattgctaaagtgctgaaggccgaagccaatctgtgacctgtcaattacttggacactaatgacctgtttggttcgttgcctaacttaccacagtttgccgcacataaggttaggcaagtttgatcaacttaggcgcgtgtttggtttgtagtcacagttgtggcaagatttgtctcctgctgcgttggtcccactcatcaatgacttataaaagtgtagcatgattctcttaggcattgccaaaatgcggcaaagaatttgagcgcctaacctttggcatgtgtggcagaaaatatatggcaatttatgacaccttagccgtacaaccaaacagacgctaaaggtcccagtttgtataattgtgaggccatcatgaactgctatgcttttgttcgtaggaaacaacataagatatatttatgtgtaaattaatagattgttcatatctatgttcattcggggtaaggagtgacattacaatgtcttggttgaactcaatttatgtgatcgccaagtggttcaagtgtgccccaatgttatgtttgttcactttccagtgcttagtttgccggatgctgttgcccacagaagatgcccccccaaacaaacaaaattgttgggcatcacttgtaatatatttctcccaaatgcaggttgtttggggttagacttgttacatacattcttcacctgctcatggattttgtccaactactcatagggttatcgttcacatgtgtaacttattcagcacactactgtgattcttttatag

SEQ ID NO: 289260 - DNA, 330 bp, Zea mays
cacgtgagatcccttcactagcatctctcttcctcaagcgccatccctcgcttctcccacgccgagcgtctccaatgcccaaacctccatggccgacgtcgccctgctcaggtccaaccagctccccttcctgttgttgtgtccagccgatgcccctccctccatcttcctctctgcagcaaccctaccatggttgtgcccctgcttccatggtgacctcgccccagccccaacgtcggacgtgccgtcgccctcacgtccagctcctccatccccctggttcgctccctgctccgaccaggtttgccaggtccgaccgttctgctcgcc

SEQ ID NO: 289261 - DNA, 473 bp, Zea mays
aacccatcaacaacaatgaatcaaatgtagctagacttgaggcgatgggaaagttgaatgatgagatgcaaaaccgctataactatcatgctcctggtattgaccctcatgttgcagctagtgctagccggaatgccaatggttttatgcctatgcaggccaattttggttgcatgtcctctacagttcaatctgttgttgatgtttcagtatccagcacatctcaagatcagtgtgatttgcaacttggatttggtgcacataagcagcagatattttctaaccatggagagcttagaacggctacacctggatcccctctgcctgggagcattgccagaaaagattctgtacccactgaaccctcacattttgggagcatgaatgggcctagatcttttcccactggaacatctcagtttgggggctttgcaaagcctacttttgtgcctgctgcgccttctcagtttggg

SEQ ID NO: 289262 - DNA, 318 bp, Zea mays
aaacgcctagacctagcaaccatggctggccagagggtttatgagttcaataaccagcaggatgtagcagctgggctggtagtgatgtcaaatgcatatatttcagccggtcagatcgataatgctgccgctgtgcgatcaagcatgaggctgcgtggcatacggaaggatcccgggtgcagctggattgaagtaaaggataccccccatgtgttctatgctggtgcagtatcatgcgctggtgcgtgggcagataaagttctgatgttgctagatgaattggagagtaagatgagggagagaggttacacggggaga

SEQ ID NO: 289263 - DNA, 283 bp, Zea mays
ctcgagccgcaaaaaagaaagtgaagtgaagaatcaaccaacaatggccggcggaatccaccgaccacaatgctgattttgtttgagccatctggactggactggaccctataaaaaacacgtcagatctcccccaaccctcgcttccccagcctgcaggttgtcgtcgccctcttcctcctccttcgctgttgctgttgctgttgcttccgcttccgccgccgccgccgcggaaatcagactaacctgatcgagaccacagcgtccagagagacgcccaaac

SEQ ID NO: 289264 - DNA, 302 bp, Zea mays
ccggagggggcgataaccgtaatggtcgcgtccttctttcacgcccgcgcgatattaaaaggccagagggtgtcagcttgggaaccatcgttcccggtataccccacgccaatatacacctattcgatctagatttgctcacgggaattggaggcaaggttgccgccaggttcaccatccgtgtatgaaccactcgctctcagctcaccgttgccagtgaagaacagcacaggccctaatggcgagctcgacaaatcccgaaggtgaagaagatgatcgtctatgccgttgagcatgctttg

SEQ ID NO: 289265 - DNA, 245 bp, Zea mays
ggccgccctttttttttttttttgatgcgaatatggtgggccgaggctggctctctccttttcgagctgaattcttgagaaaaaaaaggcatcgtaaacatgtgttacacgagcagcgaataaacaaaagcgagattctttcatgagccacacgccctatatactgcttttaaaaacgtaacagtatctcgtataataacatgcagccgtttcagtatcactgaaggaacccgcgccgcttagac

SEQ ID NO: 289266 - DNA, 363 bp, Zea mays
gtgcatcagcactgcaggggtctactgacgcactccaagtggggaactggcggaggcgactaattcgagcttgggcacgtaggcgtcgctcctgccatcgccgcagcggtcactggactctcacgccgccgccgccgccgccggagaccattagttctcctgcgcggcggctccgcggctcccgccctctcccttaccttcttcccgctagggttttctccgatccccaatcactgctggttcacaaatcgcttcatctcagcatgttgagatggaggctgcgaaacttctacataaacttatccaggagtcgaaggatgagcctgctaaactagcaacaaaactttacgtgatatgtcagca

SEQ ID NO: 289267 - DNA, 338 bp, Zea mays
cgatattagtacccaagaatcacttatttcttttgtacaaaatgaaaggacgggtcaggacaatggaaaagagagcaacagtaaagttactcagaatgccagtataatgcaacatggacgagaagatcccacttggaatcatactcctgagaagaatctccaccagagtgttgatgatgatcaaaacaagttgctcactgaaaaggatcatgcacatataagtaaagaagtggggaaattcacttctcagccaaagccccatgctaagattagaaagcctgatgagtttactatcaagggaaaggtggctccaaatcctaagcctgtaagcaacctta

SEQ ID NO: 289268 - DNA, 358 bp, Zea mays
attacatagttttctccagcaacttgattatatggatggatggaatggaggcgagtttgatcctgcttgcatgtgcaatcagaagttcggaattgttcagagttccttatgtttgttcactaaccatcctcctgtcaatgttctttgaaaatcaacttcacacatatgctcccttaatgatttgttagtgaatctgcggttttgggagatgttgaacggtggaggtttgcttcgttggtttagaaatgttttatggctatttttatgtcaatcatggtgctgtgaagattgccacggactaattagaagcttgattgtccttaattgacaaaatgctgtagagggctaaaggtaacag

SEQ ID NO: 289269 - DNA, 324 bp, Zea mays
accacaacttgggaagggtaatgcatacatgtgtattgttatttttgaggccattcagttttgaatggatcgacgctcaaggtaaggtgagatgtgagagcgtgaccggacaaccgtcggtctacgggagtgcttaatcgtagcgcttgattatatacatgttctacatatgtatatatgaaggctgcgctgtggagtatttacttttccgggaattcggtaccccatggatgtgtatgggtatacagacatgggaataccgagaagtgtaatgtacttgcaacgacgcacctacgctccaggtaagaggtgagttaccataat

SEQ ID NO: 289270 - DNA, 347 bp, Zea mays
acgcggcgcacctcgctgggtgctctgtgagcggcgcctggagcggacgctcacctgcgcgcgccgcccctactactgaccgaccgatagacgatgtatctatcatcctccatggacgacgtgctacgggaggatgatatcggttgccagctgatgagagaaggtgctgtgctgacagatgacgagggatcgatgcaatacaatgcaagcaagcttgtccgtgatgtgtctgttcatagtcgcgtatcatgtgagacggctctagctagtgtatcgtgtcgactactcgtttatcacctacgtatatgtataatttctgtatctaataacatgtgccctttctcttg

SEQ ID NO: 289271 - DNA, 318 bp, Zea mays
acgccgcctccccttccctctccgcactcgcttcctcctcgtcgtcaaccgccgccgcccccaacgccttcttccaaccctttgcacgagccgaggcctctccacctctcgctcaagcccgtcttacccctccccaaaccgcatgcgctctcctgctccgcgccgcacatcccccgcgccgccgctggggacggatcgggcgtcgggaatggaggcaaggatggaggcggcggcgggggtggcgaggatgaagacgactgtgacgatgcggacttcggtccgctgctcggcttcaacgaggtgctgcaactcgccgcg

SEQ ID NO: 289272 - DNA, 293 bp, Zea mays
tcagtcctcatccgccactccgtcgaacgcccctgcgcacgctccagctgctatgctcctccgcccgcgcccctccttcttccgagccgtcgtgccgccgccgctcacccgtgcctgtgtcccctcccgtcgcacgctttcagcttctgcagaggcgggaacagcctccccgaaggatgcagcgtcagcgccggttccggcggccacgcgcaagaaccccaggaaggccgggtcgccacctatggggatcgtgaagacggcgctgttctgcgccgggtggacgggatcgtgtg

SEQ ID NO: 289273 - DNA, 430 bp, Zea mays
cccagtgccagagtgacagtgggagacaagaacttggtaattttggaaaacaaaatgtatcacctggaaagggttgtgatgatagtgccttgcaatttcagccaaactgtaccagcagtgaagagaaagatttggctccacatggttcaagtagtgagatgttggccagggatgagatagttgaggaaatggctggagctgatctgggaaatgatctccaaagtagagaaccccacagctcgaacagaggtctttcaggtacagatctaaacaccagctgcagctgtgcaacagaaaccacttcctattgtgatcagcatgccaaattcttgaaagaaaacagaaagagcaagcgtctttttgagcttcttgagatggaattgctagaagattataacaaaaggttagctaagacatcaccaaaggaaag

SEQ ID NO: 289274 - DNA, 301 bp, Zea mays
cacgcctccttccttccttcctagcccttccgtcctgtccagactccagactccctccacaccagtagggactccggaggacgccgccactgcgacctgccggcagacgtctgccccctgcctccggcatccggactcccctgcgccgcagttacgttacgccggcgatctcctcggctcaacccggggcctttctctctgcgccccgccagcccagctgctagcaacccagcaggtgaaggagaatggcgggaggtggcacgggcatcaggacatacatgggggctcttaaggacaccac

SEQ ID NO: 289275 - DNA, 384 bp, Zea mays
atcccaccttttttttctaggtgggagccaagtagcatgtaaatttgaatgtgtcgcgactcatcaagtcatcagaacagagctccgctgtggctaagcactttgtcatcttacatttcgtgtgaaccccataggaagctagaaacggcggagataatagtccagtgctggtaacgcttcacggtgcaatgccatgcctgtcttcactattcagtcttgacaacaatatatttcagaaaactgaaagtgcccgacgtagctggaatataccaagtgtggggctttcagttctggaggacacggggctgtggctggcggatttcttgtaattgatggtgatggagcccttaccaaaaaaaaaaaaaagaaaaacatgacgaagaa

SEQ ID NO: 289276 - DNA, 253 bp, Zea mays
aggatgtgcttgagccagagatgttccaagtggatactggacgaccttacaccgtggacacgtcgaagatccatagcatactgtggtgccaaggagagaaattcctaggaaccgggtaatgaagcgagatctgtgcaacaactgccaggagctcgaccgaatgtctaaactgagagccgttgtcgccggcgcggtcatcaaatcgattcgatcgtggtgagccaatttattatttcggttattgaattggata

SEQ ID NO: 289277 - DNA, 342 bp, Zea mays
gttgacgcatccttctcaatcctgtcggacttctcctgtacggctctgctgcctgagatattttccatcacgcatacatgcgctagcctctggccatggcgttcaagttctgctcggctcctccggccaggctgccgcgctcacctccgtgagatattccagcgccgcccgtgcttggagaagaagatcctgccgcccgaccgcttttcctcagatgtttgtcgccggtcgccgccatccctgttctttttatatgcgcggcagcagcacccagggagccggactccaccgttttcttctccagccgcgcatctctgctctactcccacaagctcggcctcc

SEQ ID NO: 289278 - DNA, 279 bp, Zea mays
caatagccgcatgtcatcagagatgctgagagcaaggagcagccgtacatcgtcgatcacaccagccgtcgggcgcgggaatagaagcttcacagtgctgtggggatcatgcgggtcgatcggggaggatgaattcctcgccgaaacgctagctgtccgccccacgagatgaccgaccggtgagaatcccctttacctgtcatccttataccctccttggtgtgttagggacctcggatttggacaggttgcgacatgggctgctctccgacgaacaca

SEQ ID NO: 289279 - DNA, 411 bp, Zea mays
  unsure (1)..(411): unsure at all n locations
caaagatagtgtgggggtgaaacctgtaaatctgagagagaacaagacagctcccgtggacaaagataatggtgccgtgattttagaatcttctacagaaaataaggcacaccaaaagactcacaactcaattggtgagggacttgtaacactgaaaaatgctaaggaaagccatggtactgataagtgccttgagcttccttctatgagtggagcctccacaaagctggatgtctttaaggatgtgtcaggttcatttccggaggctcgctcatcagtaaatgccagcgatcttggagaccatggtaatattagtccaaactttagtcatttagcaggaacatcacaagaggacatcaccagtanactggtatcagaagtatcttgcgatggtgggatgcacacacttct

SEQ ID NO: 289280 - DNA, 290 bp, Zea mays
gcagtgtgcgtcattcatacccatctgtgtggacagaaggaagcctgttattggaatgtcctttcattcttgtaatgacgcagaggagttctacaaatcatatgcacatgatggagggttttcagtgcgtgttggttctcaaaataaagctcttggtgaggttattaacaagagatatatgtgttcaagggctggttttaagaaggtgaaagaggccgatgatccccctaaaaaccaaaagaaccacgcactaacaagatgtggttgtggatgcaaacatgtatgtcaag

SEQ ID NO: 289281 - DNA, 463 bp, Zea mays
aaatggtgcatgatgggcaaaggagggcctgagaacgtcaactgcgtgtaccgcggcgtgaggcagcggacatggggcaagtgggtggcggagatccgcgagcccaaccgtggccggcggctatggctgggctccttccctaccgccgtggaggccgcccatgcatacgacgaggcggcgaaggcgatgtacggccccaaggcacgcgtcaacttctcggagagctctgctgatgccaactccggctgcacgtcggcgctttcgctgctggcgtctagtgtgccggctgccgcgttgcaacggtctgatgagaaagtggagaccgaggtggaatccgtggagactgaggaggtggtacatgaggtgaagacggaagcgaagaatggtgacttgggaagcgtcaaggtcacctgcgtcattcagtccgcggaggagactgtgctacacaaggaaggggacgtga

SEQ ID NO: 289282 - DNA, 270 bp, Zea mays
gcgtactcagctcggagcccgatcgaggaggcagagacgggtggaggaaaagcgcaaagtcgccgcccgccgctcgccgctgatcggtcggtgagctcgatgcgctgtaccgctcggcctcgtcgtgttcctccgcgctgatctccgcctgccgcgacgcccgattccagaggatcgcttcttcggtttggccggccggtgcttgggggttcaggaggcggggtctcggcggctgcaatgcatgctcgcatctcgtgccggcgtttcatc

SEQ ID NO: 289283 - DNA, 314 bp, Zea mays
cagtggcaatgcaaaggaagaacctggtgcaatagtttgtcgtgtagcaccgtcttttttacgttttggttcgtatcagatacacgcttcaaggggcaaagaggacattgagattgttcgtcgtttggcagactacacgatacatcatcactttccacatcttgaaaatatgaaaaagagtgaaggtttgtcattcgagacagctataggagattccccaacaatagatctcacatcaaacaaatatgcagcttgggcagttgaggtggcggagaggactgcttacttgatagctagatggcaaggtgttggct

SEQ ID NO: 289284 - DNA, 304 bp, Zea mays
agatcaagaagccccgtggcctaggtcagtggcccgcattgcacatggcaggtgcgctggcttaccatctccccaagtgggagagtggacgtcataatttatggtagacgggtacgcgttcgcgcggcccctgccaattctgataaatttaattctggtcctttgaagatttaaaagtttgggtagctttattgttcgctgtactgtttttagagtttcaaaagagccaattctaataaatttatttctggtccttacatttgaagatttggttagctttattgtcctctgtactgattttaga

SEQ ID NO: 289285 - DNA, 300 bp, Zea mays
agaccagcaggcggcggcacacagcaagcagtcaagcaccagccgccaccgcccaccgccggtcgccagtcgccactgctccatggcgtgcccccaaatcccgtgacgggctgacggcgtgactcatcttcctcctctcctctctgtaacagtaaaaactgtgatccgctgtaatggctagtgaaggtgaagcttcacctccaccaaagcgtatgttgttggagttacctagtgaacatcaaagtcagaacttgacatcctcacctcatgcaaatacaactcaaccttttggtgtgtctg

SEQ ID NO: 289286 - DNA, 364 bp, Zea mays
atatgcggcgcgcgttggccagctcgttgtccagccgactgcgggaactgtgcatccgtcgacggcggcccgagcgacgcctctactgaaggcaagccagggagggaggagcgacacagcgtctggcaaaagggcaatccggcggttggctggctcgccggcgcggcttcccctccgtagatcctaaaccctaaacgccatcgccaaagccttcgtcagccagtcctccaaggcacaggaaagttgagggaagcacgggtggtatttggagttttgtgcagataagaccaccacgcatccaatccatccctgtcttctcttcccacttcccagtccccaatcgcgttctcttccttggcgacat

SEQ ID NO: 289287 - DNA, 325 bp, Zea mays
gtccaccgcaaccattcggctttcccaatcccggcacggcggcacgggacctctccctctctctcccgctggcgggcgatggcctcctcctcctcttcctcacctgcgcccgccttggccggggaggcgctacgccagaaacgcatcctctccagcaagctctacctcgaggtcccgtccgccaaggcgccggtggcttactcgccggcatacgacatctccttcctcgggcttgagaagctgcacccgtttgaatccgccaaatggggccgcatctgtaggtgactcaccagggaagggtactcgacaagaaacggatggtgga

SEQ ID NO: 289288 - DNA, 386 bp, Zea mays
gtcgctgcaggatggaaccgtaagcgcgatggctggagcttgcacggttgtccgtgatgtcaccgatttctgcttccactcgtacttctctttcatggatgatcttattgacaaaatgggggacaatgaagaagcccctctcgacatcaagttgtcttatctaccacggagcatggtcgttgccttaatcgccgttccagtggatgtgctgctgataagcgcagtggctttgtggaaaagcccctgcatgttgttcaaaggatggcagaggttatgtgaggatctagttggaagggaagggccgttcttagaaactgtctgcgtgccttttgctggtttggccattgtgttatggccacttgcggtgattggggggttacttgctt

SEQ ID NO: 289289 - DNA, 323 bp, Zea mays
agggtaatgatgatagatacttggtggttgtaagatatggtcaggatcatgggagacgtgtaggttgtaggtgaagcatcttcagaagcttagacggttgaaggtgatagtgccctgttaggtgttattaaggtggggtctgggtcgaggatggggttgcacggcagttggtagtattcacctatatgcttccttcatctcttaggtgtaggatttaaacctttttaaaaacagcatcatttgcatccacagtacctgttctgagctggcggtgggcactctgccatagcagtaacatacgtcctaaccccaaaccagatgtc

SEQ ID NO: 289290 - DNA, 407 bp, Zea mays
acgctgctattgagctccatctagcctgactgatgatcagcagaactctaatcttgatttgcctttcaagtttattgaaaatgggaacagttcctgtgaagaagcaaattcttgtgagggatcacagcgacacttgtcggacaatgaggaaattattccaccttcagaatctcatggcgttttagatgagggatctctggggattcaagttgacgacaagggttccagctcttcaccagtacttggcacacaagatatatcttccaagaagccccaggaagacaatgttgatattgttgtgcctgtctatgtaaatgatggtcctgtgatgcccaattctgttgacaatgaagcaagattgctgttggaggaagccaatcctgctcaagtgttacagcacattgatg

SEQ ID NO: 289291 - DNA, 304 bp, Zea mays
cgaaaacagaacaagcgcagtaggatgagatggatttcttgtcagaagatgttgtcacaccgcgagcccatcatctgcagctggtcacaggtgatgggccacatatggaggttccaagcacagatccataagagcataatggcctcaacaaaactgacatctgaacacctggagcgctgagtgttgaatgggaaggattctcgtgtgacagtaaatgcttattattgcaacggaagacccggacgatttcatcagggaatgtcacctggagtttagtcagggcatcagttcacaacttcagatt

SEQ ID NO: 289292 - DNA, 353 bp, Zea mays
gcggcacacttcctttgcggctgttgctgtaatacctattcttggggataccactagccggtaccagatcaaagattctgatcttaggattgaacgtttccgatctggtggccctggtggtcagcatgccaacactacagagagtgccattcgaattgtgcacattccgactggtataagtgcaacatctcaaaatgaaagatcacagcacatgaacaaggcatcagcaatggcagtgctccaatctcgtcttgatcagcttgagattgcccgccaggcacagatgaatgcagagcacacacaatcactcaacgaaatcagctggggcaaccaaataagatcttatgttctcc

SEQ ID NO: 289293 - DNA, 271 bp, Zea mays
gcaggacgttctgcctcccatgtgtgcagttggaccatctacagcaggactcagctcgtcgcgatcgacgcgggacacgtttgagaacgtggcccaggacgacgacgacgacgacgacgacgacgacgctggcgctggcgctggcgccgcaggtcaggtggagattggaccgtctcagttgcaggatgctcctacaactcagccatcacagctgacaccacgtagaaggcgtccacgagacccttacactccaggcaccgacgctcttggg

SEQ ID NO: 289294 - DNA, 327 bp, Zea mays
atcgtttctgttcacaactcttccgagcatgccgtcgtctcctttgtcatcatcatcagctcagatctagcaacttcgccttctcagagtgttaagtggaagcaacatatgaagctgacatggaaaaggaagatggaacgacactccacatgaagcttgtaaaaaaggagtcaaactcaatttagtctagtgtcaaagttgataatgaagggacttgtactctgtttctatgtgatattatctatttgtacgtgtgaacggtgatgatcttatgtgtgggatgatggatagattaactttgatggatattagtgatatcgaagtcaa

SEQ ID NO: 289295 - DNA, 306 bp, Zea mays
tggcaaaggaggaaagctggacaaggccgttgagatgtttgctgctgcgcaggagctgggcctgccgatcgacgagaagatgtacacgaacatgcttagcttatatgggaaagccggtcaggttcttctgccctgtgcaaagaaaacaattagagcccttctcattgatctgtttcacccaccaccgacttcagtctcctcctatccagttctaagcctgtggatttttcatgtgttcaggcaggcatcaagaggcgtctttgatgttcaaaagatgagggagatggcatcagacctggaagatca

SEQ ID NO: 289296 - DNA, 309 bp, Zea mays
  unsure (1)..(309): unsure at all n locations
ccaccaagagccagtcttgaccgggatgaggcccacagacaggttgtcatcagcttgtcccactcaagccaccgacctacaccacagacacagtggagccgcgctcttcgccagtgacacgtggacaaatgcgggctcagcagcccccccagagagggtcaggccgagccccatttctcgctcctcttaggtcattgtcagcagacttgaatatctagagctctcttccaatgagaccctcgaaactatgatagtttcanagnnaatggtgccacgtgntctctgatttggtgagctcagacttggtgc

SEQ ID NO: 289297 - DNA, 463 bp, Zea mays
actcggctcgagaccaagaaggtgccggaggaggagaaggagacggcggcgctcgtggagaggctggaggagctggaggagtgcatcgacggcctggaggccggcagcgacaaagcgttcaggagcctcgtgcagaccagggttgcgctgctcaacatacacacccacatcgtctagctccagagtccagactccaatctactaattagtagttaagcatatgcatgctgtttacttgttgattagcagtcgtcgaaaaatgaagatgcatgagtgtaactgtaactctgtaaatacgtgagctttttgtacagttacgcttgtgtatgtttactgctgaatcattatacgtgctttgattatggaaaagaagaaaaaggggcgaccgccgatgaggtggttctgaggcccgggatttaagtcctatccgggaccggcagtgtatccgggtttcccagaagtg

SEQ ID NO: 289298 - DNA, 478 bp, Zea mays
ggatttaaaaactggaacggtgaaggtgacagcagtcggttggagcgagcatcccccaaagttcacaatgtggccgaggactttgattgcacattgttgtttttttaatagtcattccaaatatgagatgcattgttacaggaagtcccttgccatcctaaaagccaccccacttctctctaaggagaatggcccagtcctctcccaagtccacacaggggaggtgatagcattgctttcgtgtaaattatgtaatgcaaaatttttttaatcttcgccttaatacttttttattttgttttattttgaatgatgagccttcgtgcccccccttaccccttttttgtcccccaacttgagatgtatgaaggcttttggtctccctgggagtgggtggaggcagccagggcttacctgtacactgacttgagaccagttgaataaaagtgcacaccttacaaaaagagtaaatgaacaa

SEQ ID NO: 289299 - DNA, 371 bp, Zea mays
ctagagctgaaacctgcagaggaagccccgttaatctattctccttgcatccacaccgagcggcaattggtgcgccgtcttctccgtccgcggcggccatcttggtagcggcccgcatcccctcggccctccaaatcaacgaaccagcgcgtccccgctcctccccacgccacgggaaacttccagcaaaaggtcgcgccatcgataaggggagaaaaggagaagtgtcgccgtccccgtcagcgacggcgctggtaccgacggtccccgcgtcgtgtgccttcctcctccgcgagttcgacgacccgctgtgcgtctgctctcttccgcgcgcccaatcctcgtcgagtcgtcgtgccgctgattgacac

SEQ ID NO: 289300 - DNA, 321 bp, Zea mays
ggaaaaggtcccggagagctgagcagtcaagatgtgtgacttcaccgaagaccagaccgcagagttcaaggaggccttccagctgtttgaccgaacaggtgatggcaagatcctgtacagccagtgtggggatgtgatgagggccctgggccagaaccctaccaacgccgaggtgctcaaggtcctggggaaccccaagagtgatgagatgaatgtgaaggtgctggactttgagcactttctgcccatgctgcagacagtggccaagaacaaggaccagggcactatgaggattatgtcgaaggactgcgggtgtttgac

SEQ ID NO: 289301 - DNA, 401 bp, Zea mays
aggctcggaggaggcaacggtgcaactttcttcggtcgtcccgaatccgggttcatccgacaccagccacctccaccatgccgcccaagttcgaccccaacgagatcaaagtcgtgtacttgaggtgcaccggaggcgaagtcggtgccacttctgccctggcccccaagatcggccccctgggtctgtctccaaaaaaagttggtgatgacattgccaaggcaacgggtgactggaagggcctgaggattacagtgaaactgaccattcagaacagacaggcccagattgaggtggtgccttctgcctctgccctgatcatcaaagccctcaaggaaccaccaagaggccgaaagaaacagaaaaacattaaacaccgtgggaatatcacttttgatgag

SEQ ID NO: 289302 - DNA, 907 bp, Zea mays
gtggaaactggtgttctcaaacctggtatggtgggcacctttgctccagtcaacgttacaactgaagtcaagtctgtcgaatatgcaccatgaagctttgagtgaagctcttcctggggacaatgtgggcttcaatgtcaagaatgtgtctgtcaaggatgttcgtcgtggcaacgttgctggtgacagcaaaaatgacccaccaatggaagcagctggcttcactgctcaggtgattatcctgaaccatccaggccaaataagcgccggctatgcccctgtattggattgccacacggctcacattgcatgcaagtttgctgagctgaaggaaaagattgatcgccgttctggtaaaaagctggaagatggccctaaattcttgaagtctggtgatgctgccattgttgatatggttcctggcaagcccatgtgtgttgagagcttctcagactatccacctttgggtcgctttgctgttcgtgatatgagacagacagttgcggtgggtgtcatcaaagcagtggacaagaaggctgctggagctggcaaggtcaccaagtctgcccagaaagctcagaaggctaaatgaatattatccctaatacctgccaccccactcttaatcagtggtggaagaacggtctcagaactgtttgtttcaattggccatttaagtttagtagtaaaagactggttaatgataacaatgcatcgtaaaaccttcagaaggaaaggagaatgttttgtggaccactttggttttcttttttgcgtgtggcagttttaagttattagtttttaaaatcagtactttttaatggaaacaacttgaccaaaaatttgtcacagaattttgagacccattaaaaaagttaaatgagaaaaaaaaaaaaaaggggcggcc

SEQ ID NO: 289303 - DNA, 306 bp, Zea mays
ctccaagtcccagcgaacccgcgtgcaacctgtcccgactctagccgcctcttcagctcgccatggatcccaactgctcctgcgccgccggtgactcctgcacctgcgccggctcctgcaaatgcaaagagtgcaaatgcacctcctgcaagaaaagctgctgctcctgctgccctgtgggctgtgccaagtgtgcccagggctgcatctgcaaaggggcgtcggacaagtgcagctgctgcgcctgatgctgggacagccccgctcccagatgtaaagaacgcgacttccacaaacctggatttt

SEQ ID NO: 289304 - DNA, 424 bp, Zea mays
ggcctccggggcaccgaccgctataaggccagtcggactgcgacaccgcccatcccctcgaccgcccgcgtcgcatttggccgcctccctaccgctccaagcccagccctcagccatggcatgccccctggatcaggccattggcctcctcgtggccatcttccacaagtactccggccagggaagggtgccaagcacaccctgagcaagaaggagctgaaggagctgatccagaaggagctcaccattggctcgaagctgcaggatgctgaaattgcaaggctgatggaagacttggaccggaacaaggaccaggaggtgaacttccaggagtatgtgcacttcctgggggccttggctttgatctacaatgaagccctcaagggctgacaaaaaatagggaagatggagcacacctctgggg

SEQ ID NO: 289305 - DNA, 319 bp, Zea mays
ggcagcacaaactattggagtgaaagcaatgatggtgccaattactgctgggatcttgtctgctttaaggagagtattagctcggcgtgtttctctcaagaatcaacttaaaaggcggctccatgctataactattgcttctgctacttgtttcctttttccgtttgccatgtgggatacgatcctaggttcggcatctgacagcattgttattttttcaactaccaagttgggcatactttagtactgttttatttggaatggtgcttatattctatgttgacaatgttgctgaagaaaagttgcatctggtcttctc

SEQ ID NO: 289306 - DNA, 326 bp, Zea mays
atcgcatggtgctgtgtatgagttacttcacgatacctgaatcactagcaaggccagtaagacgtggacggactggcaagttgaagtagcactgagacgaagccacacgggttcagatgacactgctggcatcctggtcacattctctgtctcctggaatgctcccacctcaagtggagttagaaggaaggtagaggggctctcccccaggatttcggtgttttgactaacgccagttcctgaccaacctctgttgccaccacctttccttccaggccctaagcacgtgcagcacagcacaccacagcacctttgatagcctctct

SEQ ID NO: 289307 - DNA, 208 bp, Zea mays
gagactttccacttcaaacgccacgagcacctaacccgtctgggatgaggcctccaggaccatttatgaggcctggatctatgggtctcccaagattttacccagcagggagagcacgtggaattccacacagatttgctggacatgaatcttatcagaacatggggccacagagcatgaatgttcaggtaactcaacacagaactga

SEQ ID NO: 289308 - DNA, 380 bp, Zea mays
ccaatcctggtctcatcccttccggattgaaccctgctgtgatgcgagacagcgcaatgctggcggcgcgggaggcgaataagcggctgcgcgcagccgatcgagcgaccctccccaccgacttctcactgatccctacaacaccaattatagttggggaaggtgaacctccctcttgggatccggtaccaactctaaaagttctacaatgagtatgtcattacgagatcctattagaaggaggagggacgaagaagatgatgacatgatgttgtttattttcccagaaatatatctgatgggttcaactagaagtggggggacaaaagaagaaacgccatacatcagatgagacaactccgtatgtgtattgtcaagta

SEQ ID NO: 289309 - DNA, 278 bp, Zea mays
cccaacttgggaggaaaggagttgagaaaaaacatagacgaatccgcgcctgacacaaacaagagggacctctagaaaggagagagttaagccatccctccatgaccaaaaatcacccacccactcactaaaacctggagcttagcagctccaaccaggcaccacaatctaacttcttctctgctgaagtttggggctaccgaaagggaaggagaggcaccctcaaaagcagagatatttctcttattccaaagggtccaagcaccaaaaataacgaa

SEQ ID NO: 289310 - DNA, 289 bp, Zea mays
gtggcagccatcaggtgagccaagatgggtgcatacaaatacatccaggagctgtggaggaagaagcagtccgacgtgatgcgcttccttctaagggtccgctgctggcagtaccgccagctctctgcgctgcacagggctccccgccccacccggcctgataaggcgcgaaggctgggatacaaggctaagcaaggttatgtcatttacaggatccgtgtccgccgcggtggtcgcaagcgcccagttcctaagggtgcaacctacggcaagcctgtccaccacggtg

SEQ ID NO: 289311 - DNA, 388 bp, Zea mays
gcggtcccgcgggtctgtctcttgcttcaacagtgtttggacggaacagatccggggactctcttccagcctccgaccgccctccgatttcctctccgcttgcaacctccgggaccatcttctcggccatctcctgcttctgggacctgccagcaccgtttttgtggttagctccttcttgccaaccaaccatgagctcccagattcgtcagaattattccaccgacgtggaggcagccgtcaacagcctggtcaatttgtacctgcaggcctcctacacctacctctctctgggcttctatttcgaccgcgatgatgtggctctggaaggcgtgagccacttcttccgcgaattggccgaggagaagcgcgagggctacgagcgtct

SEQ ID NO: 289312 - DNA, 203 bp, Zea mays
cgagtttcttgaaggtatacaattctacccattgttgaagatatcccacgggcagaattgtataccttcaagaaactcccgggttagaacttcagaccaggagtttcttgaaggtaatacaattctacccgtgggcgttcttcgataatgggcttttcgccctcatttatgcttaccattcaccctggttaatgtcttgaatc

SEQ ID NO: 289313 - DNA, 654 bp, Zea mays
ctgaccagcaccatggcggttggcaagaacaagcgccttacgaaaggcggcaaaaagggagccaagaagaaagtggttgatccattttctaagaaagattggtatgatgtgaaagcacctgctatgttcaatataagaaatattggaaagacgctcgtcaccaggacccaaggaaccaaaattgcatctgatggtctcaagggtcgtgtgtttgaagtgagtcttgctgatttgcagaatgatgaagttgcatttagaaaattcaagctgattactgaagatgttcagggtaaaaactgcctgactaacttccatggcatggatcttacccgtgacaaaatgtgttccatcgtcaaaacatggcagacaatgattgaagctcacgttgatgtcaagactaccgatggttactcgcttcgtctgttctgtgttggttttactaaaaaacgcaacaatcagatacggaagacctcttatgctcagcaccaacaggtccgccaaatccggaagaagatgatggacatcatgacccgagaggtgcagacaaatgacttgaaagacgtggtcaataaattgattccagacagcattgagaaggacatagaaaaggcttgccaatctatttatcctctccatgatgtcttcgttagaaaa

SEQ ID NO: 289314 - DNA, 444 bp, Zea mays
cccaattgatcccgtcccaatcccaaccctactcccttgcctccccctaatgacatcgcctggcggcgtcttctccgccgcgctcgtcgccgaggacttcccttgggtgcgtggcttgtgctggtccagcccgattcgtccatttatttgttgagccaggagaggtggacatggaggcggagatggggatggccccggacatgtaccgcgcggtgttcgacctcgcgcagccgcggaacacgagcctttcgcgcccgcctcttcgacgaggcaatatcctgttacactaaagctcacaatttgcgctcagatccaattatacctggcaatcgcagcttgactcctgccggttacgtcaactgttgcgggcgcgatcagcagctgactcctgcatatcacacttgaatggccttgcatctacaactcatgcagagttcactctgc

SEQ ID NO: 289315 - DNA, 359 bp, Zea mays
gccggaacctcggaaacgcgatccttcgctggcttgatcgcatgaagccatcagcggagatccgcccccgtcttccaggcccaccaaacggcagcacggccgagcagttcagacatgtatcgagcgcgacaggggcgacggtgcacagaagacctcctcttcctccaaagcttcgccccacgactccagcgggaagatgctgttctcgcgcctcaacattgggcccaagcacttcccggttctgcccacgctagcacagcccaacaggatcagcgcgacagccagtgatggcatctcctactcctagccgttccgcggtcactgcagagaaggtgtcttcgcgaggacagcgatgatgt

SEQ ID NO: 289316 - DNA, 388 bp, Zea mays
gtggagaaaagaaatggactggttgctgtctcctacaacttatatggttgagctggttccaacaaagcaaagcggagcagatggatgtacatttgagattatgactccaaaggcccgctcagattcccatgtgaaccttcctgcccttcagaagcttgacatgatgctcattgaagtaatggactcaatgatagatacagaattctggtatgaggagagtggcagcagagctgatggtcgggggaaaattacaggtccaaggaagagtaaaaagtggtggctcccgtctcctcgtgtccctgagcaagggctatctcaattccagcggaaaaggcttgtttttcaggctaagcttgttcaccagatcctcaaagccgcagaatccatc

SEQ ID NO: 289317 - DNA, 323 bp, Zea mays
ggaaagaaccacaggtaattgccttcctgtgtcgggattgtagctccaatccactccgcgccggccgggtgcgctgccatccggatcagacgccctcgcatctctcgcccgtccggcatcgtatcccctgggcggcacggagtacagatccgacccgcttgggattgtttgcgtctcctttttgcggtgcgccgctggactccagtgctgcacatgctcgacgacggtgctgagctcctgcactggcccgaagaaatgccggcgcaatgcagcgggcaggttcggctgggtcggttcaggactggtcggcattcgaccttcgc

SEQ ID NO: 289318 - DNA, 267 bp, Zea mays
catcgctggaatgcagccgccagaatgtagttcaatcccttcgtgacttctgaccgatgcaagaaccgcaaacggcatttcaatgcaccatctcacattcggaggaagatcatgccttctccgctttccaaagaactgagacacaagtataatgttcggtctatgcccattcgaaaggacgacgaagttcaggttgctcgaggacactacacaggccagcagattggccaagtggtccaagtgtacaggaatacatacgtcatctac

SEQ ID NO: 289319 - DNA, 347 bp, Zea mays
cgcgacaatacgagaagcaaacatgtttaccgtgtctgatatattcccgcttgtgctgcagccatgtctctagtgatccctgaaaagttccagcatattttgcgagtactcaacaccaacatcgatgggcggcggaaaatagcctttgccatcactgccattaagggtgtgggccgaagatatgctcatgtggtgttgaggaaagcagacattgacctcaccaagagggcgggagaactcactgaggatgaggtggaacgtgtgatcaccattatgcagaatccacgccagtacaagatccctgactggttcttgaacagacagacggatgtaaaggatggacaata

SEQ ID NO: 289320 - DNA, 329 bp, Zea mays
gtgaccaggcctgagctccctgtctctcctcagtgacatcgtctttaaaccctgcgtggcaatccctgacgcaccgccgtgatgcccagggaagacagggcgacctggaagtccaactacttccttaagatcatccaactattggatgattatccgaaatgtttcattgtgggagcagacaatgtgggctccaagcagatgcagcagatccgcatgtcccttcgcgggaaggctgtggtgctgatgggcaagaacaccatgatgcgcaaggccatccgagggcacctggaaaacaaccactctggagaaactgtgcctcataccggggg

SEQ ID NO: 289321 - DNA, 285 bp, Zea mays
caagaacgaagagatgctgaattccctcaagtacgtccggactggtggtgggttcgagcccaacttcatgctcttcgagaagtgcgaggtgaacggtgcgggggcgcaccctctcttcgccttcctgcgggaggccctgccagctcccagcgacgacgccaccgcgcttatgaccgaccccaagctcatcacctggtctccggtgtgtcgcaacgatgttgcctggaactttgagaagttcctggtgggccctgacggtgtgcccctacgcaggtacagccgccg

SEQ ID NO: 289322 - DNA, 783 bp, Zea mays
gccaaccggaacaatgacgccctgcgccaggcaaagcaggagtccactgagtaccggagacaggtgcagtccctcacctgtgaagtggatgcccttaaaggaaccaatgagtccctggaacgccagatgcgtgaaatggaagagaactttgccgttgaagctgctaactaccaagacactattggccgcctgcaggatgagattcagaatatgaaggaggaaatggctcgtcaccttcgtgaataccaagacctgctcaatgttaagatggcccttgacattgagattgccacctacaggaagctgctggaaggcgaggagagcaggatttctctgcctcttccaaacttttcctccctgaacctgagggaaactaatctggattcactccctctggttgatacccactcaaaaaggacacttctgattaagacggttgaaactagagatggacaggttatcaacgaaacttctcagcatcacgatgaccttgaataaaaattgcacacactcagtgcagcaatatattaccagcaagaataaaaaagaaatccatatcttaaagaaacagctttcaagtgcctttctgcagtttttcaggagcgcaagatagatttggaataggaataagctctagttcttaacaaccgacactcctacaagatttagaaaaaagtttacaacataatctagtttacagataaatcttgtgctagaatactttttaaaaggtattttgaataccattaaaactgcttttttttttccagcaagtatccaacc

SEQ ID NO: 289323 - DNA, 508 bp, Zea mays
ctctctttcgctcaggcccgtggcgccgacaggatgggcaagtgtcgtggacttcgtactgctaggaagctccgtagtcaccgacgagaccagaagtggcatgataaacagtataagaaagctcatttgggcacagccctaaaggccaacccttttggaggtgcttctcatgcaaaaggaatcgtgctggaaaaagtaggagttgaagccaaacagccaaattctgccattaggaagtgtgtaagggtccagctgatcaagaatggcaagaaaatcacagcctttgtacccaatgacggttgcttgaactttattgaggaaaatgatgaagttctggttgctggtgttggtcgcaaaggtcatgctgttggtgatattcctggagtccgctttaaggttgtcaaagtagccaatgtttctcttttggccctatacaaaggcaagaaggtaagtccaagatcataaatattaatggtgaaaacactgtagtaataaattttcatatgcc

SEQ ID NO: 289324 - DNA, 317 bp, Zea mays
cgatccatgtccctcatttcagctcaagttccctgttaagccagctgatatcaagaaaagaatagagagcttgatcgaccgggagtacctggagcgcgacaggagtaacccccagatctacaactatctggcttgacaacgttttggtggatcgttcccatttcattactatcagaaaaaggcactgtaaattaatttattttccggtttcttgttctttcatgcttttcttctctgggaggaagttgtagttgtagctgctgcaacgtgtttatatagaacaattttttcggcatcagtataaaatcaggttcctt

SEQ ID NO: 289325 - DNA, 305 bp, Zea mays
gcaggcggctcggaaggggcacggtggagacgcagcggaccactcgcctcttctcctgctcctgctgcccggtactcgccgagggagacgctgctgacctgacgagctgagcccacggacgagaggggagacgagaaggaggggcacaccacgcaggagaccggaggagagcgcgcgcgcggatccacctcgatgttggcaagaccatcagcaccgcctttggtgactgctcaaactcctgaagtcggcatcttcattacagctcgcaacgtctcgggtgcactggtcgccaagctcctggtaac

SEQ ID NO: 289326 - DNA, 463 bp, Zea mays
tcaccacagactcagagagaacccaccatggtgctgtctcctgccgacaagaccaacgtcaaggccgcctggggtaaggtcggcgcgcacgctggcgagtatggtgcggaggccctggagaggatgttcctgtccttccccaccaccaagacctacttcccgcacttcgacctgagccacggctctgcccaggttaagggccacggcaagaaggtggccgacgcgctgaccaacgccgtggcgcacgtggacgacatgcccaacgcgctgtccgccctgagcgacctgcacgcgcacaagcttcgggtggacccggtcaacttcaagctcctaagccactgcctgctggtgaccctggccgcccacctccccgccgagttcacccctgcggtgcacgcctccctggacaagttcctggcttctgtgagcaccgtgcggacctccaaataccggtaagctggag

SEQ ID NO: 289327 - DNA, 372 bp, Zea mays
agataagtaccaaggggaggcagtggagccggacattaagaagctttacatgaggctggaggcactggaggccgatgaggagtcgatgaggcaggcccttgtggcaatgcgcacagagaaggcacaacttgtgcttcttcgtgagattgcgcagagcttgccaaagatggagttccagttgggccgggagctggggcggggccaggtgtacaccatttacctagaaaacacacagttgggattgtagaaaggagattcacagaggacaagaaggcgatacttgtgaagacattttccatggctgccttgtttaagtggatcctcgctttattgggcaagaaaaagaagctatctcaaagcaggtatactttt

SEQ ID NO: 289328 - DNA, 272 bp, Zea mays
atgaatctagctacgtaccatctctttcgaatcgcgatcacgtttatttggcgcggggtcggaacaggaagatgggtaaaacatgggcgctcatcacccacctccacgctctcgcagggccgagtctcactctgatataccctctgtacgcgtcgatctgcgcgatggagagcgcgaccagggtggacgacgagcagtgcctggcctactggataatctactccttcatcaccctcttcgaaatggcggccgagaatgtcctctactggata

SEQ ID NO: 289329 - DNA, 370 bp, Zea mays
atttgccctacctctctccctaccccattccgacgcggcggccgatgagcacctgcccggaagctatagcttcggccatggcgccagatgccggcgaaagcggtggcgaactcccgccgcccgtaaagaagaagtcaccggcggaggaggaggccgagacgaggaggaagaagcttacacctgggagcttaatgacagggcattatacggtctgggagcggtgatgccacccctgcacagggcgatccggttatacttcattgcactactcggacaattgatggtatcgttgtaaattctacaagaagggagcatggaggtaaaggaatcccactcagatttgttttagggaagagcaagatgatcctag

SEQ ID NO: 289330 - DNA, 416 bp, Zea mays
gtgaagccaaaggaaatacatatagaatggggtaaagggttggttcagaaacgagaagctgagtctaggttgaaagagattgaagctgagaagagtaaaccttttgctcgaacaaaggatgatcctgagcttgataatatgctaaaagaaagaatccgatggggtgatcctatggctcatctggtcaagcggaaagatccagaatttattttggaagacttgggagatgatgaaaagatgaaagaatctggcttcatagtaccccaaagtatacctactcacagctggctgaaacgtggagtggatgctcctccaaaccgctatggcataaaacccggtcgtcattgggatggcgtggatcgcagtaatggatttgagaaggacatgttcaagctgaagaacgagaagcaagccat

SEQ ID NO: 289331 - DNA, 273 bp, Zea mays
gccgaaagcgaagaaggaagctcctgcccctcctaaagctgaagccaaagcgaaggctttaaaggccaagaaggcagtgttgaaaggtgtccacagccacaaaaagaagaagatccgcacgtcacccaccttctggcggccgaagacactgcgactccggagacagcccaaatatcctcggaagagcgctcccagtagaaacaagcttgaccactatgctatcataagtttccgctgaccactgagtctgccatgaagaagatagaagacaac

SEQ ID NO: 289332 - DNA, 316 bp, Zea mays
ctcagaaagaacaagtcctcgaagtcattgcctaccagtaccagttgaggcatctttaagcttgtgtggtagctagacaacttgttgatcttggatatgtgcaagtgcatcatcgacctgcagagttaactccactgacgagcaagattcctatccatcaaggctgatgcggtgtataagtagagaactccgtgatgttggtagttgaaggcaaccaactgattgttgatgtccctcctattctgtgatctccggaatatttgttgatcattgggtgttaattcatgatgatgccttggggttgtttccccttgtc

SEQ ID NO: 289333 - DNA, 373 bp, Zea mays
cgaagggacactgcgtggggaggggaagggcggagagcgccagccacgcggttgggggaaaacccgtcaagagaaagggctgtgtacctttcgctttgttgcctggctctggtattgggttccccgttctgctgctcagctcagcccagccccagagcccctgacctgccgtcctccctccttccctccccgtgagtcgccgtacggcgtacgggatcgccaccgcggcgtccagggatggcggacgggagcctctacgcctggtggtgctgtgccttgggctgggcgctggcgcttgtcgcagcggacggcttcctcgtggacatcacctacgtggaaagcgccgtggccaaaggagcagtgtgtttggatg

SEQ ID NO: 289334 - DNA, 327 bp, Zea mays
cgatgagcgctcactacgagcgccacggctagaataccctggcagggagccatcactcacatgggcaatactcaagtcattctggcgagaggccgcggtcaatggcacatttgctgctgtcaacacgattgtgtcgtatgttggaccttacttgtaccactattttgtggactacctcagtggcaacattgctttcccccatgaaggttacatccttgcctctatattgtttgtagcaaaactgcttgagccactcactgcccgacagtggtacttgggtgtggacatcatggggatcctgtcacgtctggcctcattgccatggtg

SEQ ID NO: 289335 - DNA, 306 bp, Zea mays
taggagtcggcttgctatgctactgggagatggacagattgatatccagtcacctcccaagactacaactcctaagaagatgctagtgaagaagctcacaccaaggaagctgaagaaaatgtgacaagattgtactaacctgctgatttctatgttatctaagattttagtaagctagtgttagaagtgaaccttgttatgctatcagatgaactatttggatggatatcgtagttattttgaaccttgttatgctatcagataaattgtgttctttctgaaactgtgttcattcagttaagaatg

SEQ ID NO: 289336 - DNA, 310 bp, Zea mays
acttttgtgaaagccattcggcacccctgggaggaaaagaagatctatttcacgcagatgcaggaaagtcaccggaaagatatcgagcgcgcattcagtgtgcttcaagcacggtgggcagtgcttcgtggtcttgcttacagacgggatcgtaaccgtctaaccgagatcatcactgcttgcataataatgcacaacatgatcattgaagatgaaggggagtttgctgccaacaccgactttggagacaatgcttctgccactgcacattgcgaactcatacaagagggaaggtccgattgggtcatcg

SEQ ID NO: 289337 - DNA, 291 bp, Zea mays
ggacaacatgtcgacgtcaaaatccatttgcataaaatgcgatccttcagaatctgatgttacatgggaatgcatggagacgtggacaaccttaattccaccaatcactgtggtgcacgtgccagagcatacagccaatagtgagttgatgggtgaaactgtgaccgaacaagtgactgaacatgctcagtgtgatgacgacattgttgctttggactcagacatatgtttccccaagttggtggctgatgacgtgaaagcaacagtagagacatctgaatctagtacctt

SEQ ID NO: 289338 - DNA, 458 bp, Zea mays
ccaagcttatggaaaattcgtctaataggcatttgattgagacctggagaacaaatggggctttgtatacttcaccaagtgggtcaaatgatgactggtattggctatatgcagcgatcaaactaaattgtttgcttgtgactaatgatgaaatgagagatcacatattcgagcttctagggccgtctttttttccaaagtggaagcaacgccatcgggtaaagtacacctttaataaaggaaaagcggtgcttgtgatgccacccccttactcttcagaacttcaagagtcggagatgggatcttggcacattccaattgaagagaagtctgggaatgagagaggcaggatttggctttgtattggcaggggaggttcctgcaaagaacatggcgaagttccttcgactaatggagctgtccacaaagttcctcaaactgaggcatctaacgtggtg

SEQ ID NO: 289339 - DNA, 287 bp, Zea mays
tggccagacaggtcaaaatactgagaaaatttggcagatcttatcagtaccgatttgactgagttgatgtctaagacagccttggaatcatggcttgatcaggctcctgctgacccaggtgctcagaatttgacacagacatcgtctgccagagtttcttttacaaaccgcatctttgagcgaaaacctaaattgcacacattgttagacccatctggcagtaatggattaagcgttctatatgccttctcgcctgaggtttcacccagatcacgtttgctagtatg

SEQ ID NO: 289340 - DNA, 325 bp, Zea mays
agccgccagtgcagatattcacactccacccagagaggctaaagtggagttggcatccaatgctaagagcccatatgagcaaaaaccccagaagcagtacaagatgatggacgtgaacactgatgaggaggtgaccatggtctccaccttggaacaggatgagacacaaggcaagactgtagcccccgtaccgtcagcaactgcagaaacccgcaattcaagttcagacgcggtgatgaaggatgcggaggcttcgtccgtggctcaagacgatgatgaagtgcaggtggttgacaagatgaaagaggggtagctttttttcgca

SEQ ID NO: 289341 - DNA, 300 bp, Zea mays
gctccgcctatgaattcagaactctacgacaacagaagagttcagcagctgggatgcctcatatgcggcaagataactggattgaacagcagtctgcactctaaagtgtttgagaggtgcatttattagcattattagttcaggacttcttatggttttttgcacataacagcagtaccaaactaccagcatttgcgtgcatgtatagaacagtttttttttggcgttgtataaaacccacccaaaagatgcctgctgccttgtagactaattatggggattcttcctatgcctaagctt

SEQ ID NO: 289342 - DNA, 192 bp, Zea mays
aaaccaacttatatgtagaagtatttgtttcttagtgtttgtacacataggattgaacgcaatcattgccccccttggtacttttagttcatgtgatgtattgcttacttacctgacctagtgatatctagtactcagtcacgtctggttgtgttcgagttaatttgcaaatgcagttgcattctgacgagt

SEQ ID NO: 289343 - DNA, 308 bp, Zea mays
agacgctcacacacctggaccatggaccctggggaatgcacgtgtatgtctggagggatctgcgtccgcggagacaattgcaaatgcacaacctgcagctgtaaaacctgtcgtaaaagctgctgcccctgctgtctcccaggctgtgccaagtgcgcccgatgctgcatctgcaaacggggctcatacaagtgcagctgctgcgcctgaaactcacccatggcactaggatatatcctgggataggaccacgctgtacctgagacaatcgattcgactcgtataataggtcgcgcatgatatatgtg

SEQ ID NO: 289344 - DNA, 298 bp, Zea mays
gggtttttaccaaagcatgctcggtcaagaagagataggcttgagatatctgctcgtgaagctgctacacaaatattctatgttcctccccatggcattcagcagtttcttgttgatgctgcttcatcttttggcgattccaggcattgtgttgtcgcaagggagatcacaaaaatacatgaagagttttggcgtggaactttaggtgacgcaaatgaagcttttgcaactcgacaaccaaagggagacataacagtgctcatagaggggatgttaatttcggctgacgagattccat

SEQ ID NO: 289345 - DNA, 288 bp, Zea mays
ctcgctgaccccgctctcgacattgctgccgaagagaggcaccggatggtttcctgccttctgaatgtgactgtccaagagagtgacgagccaatcacactggggtatagtgtaaggctgtcatccggagaggttgtggatgtgaagtccagccgaatggtcaggtgggagagggaggattctaagctgtacgtgcagagtggcgacgtcgagcccagctagaaagagaagatcgagttcgcgacatacttcgcagaggagatctctcagggcctgctctttgagatg

SEQ ID NO: 289346 - DNA, 339 bp, Zea mays
caactaccctccagcacgccatccgcttagccgccccggagtgacacgcccattgcaatcgtcgctatcgtcgccgccaccttccctcccggtgtggagctggagagagcccgtctgcactcagtggctggtttaatccggtgggagcacaagtcgtgtctaaaatattcagattgctaagatgttgggtcatggtctagtaactgatccctcaagaaccttacgatgtccagttaattcaaggggatcaagtgcacccttggggcttgtttcttcgttgaatttcaacaggggatgcaagggaaagaacaaaatcttcaatgtggatagacacaccag

SEQ ID NO: 289347 - DNA, 314 bp, Zea mays
ctggcggcagccatcaggtaagccaagatgggtgcatacaagtacatccaggagctatggagaaagaagcagtctgatgtcatgcgctttcttctgagggtccgctgctggcagtaccgccagctctctgctctccacagggctccccgccccacccggcctgataaagcgcgccgactgggctacaaggccaagcaaggttacgttatatataggattcgtgttcgccgtggtggccgaaaacgcccagttcctaagggtgcaacttacggcaagcctgtccatcatggtgttaaccagctaaagtttgctcg

SEQ ID NO: 289348 - DNA, 545 bp, Zea mays
agtagctgacagcattcgggccgagatgtctcgctccgtggccttagctgtgctcgcgctactctctctttctggcctggaggctatccagcgtactccaaagattcaggtttactcacgtcatccagcagagaatggaaagtcaaatttcctgaattgctatgtgtctgggtttcatccatccgacattgaagttgacttactgaagaatggagagagaattgaaaaagtggagcattcagacttgtctttcagcaaggactggtctttctatctcttgtactacactgaattcacccccactgaaaaagatgagtatgcctgccgtgtgaaccatgtgaccttgtcacagcccaagatagttaagtgggatcgagacatataagcagcatcatggaggtttgaagatgccgcatttggattggatgaattccaaattctgcttgcttgctttttaatattgatatgcttatacacttacactttatgcacaaaatgtagggttataataatgttaacatggacatgatcttctttataattct

SEQ ID NO: 289349 - DNA, 376 bp, Zea mays
gagaaaaatagtgttcacaaattctgacaaagctcacgcggaggaagctctgtgcagacttggtttacagggttgcttcgatggcgtgatctgcttcgagacactgaatccttgcaatggcccgagcacgttccgagacggcaacggcatgctgttcccagatgaaacgtcccccaatcccaacttggctgatctgaatgaatccgatgggttcagacccatatcacccatcctctgcaagccctccgttgaagccatggaagctgtaactcggattgcgaacgttgatcccaagaaaacaatatgtggtctctgacagcactcggaacatagcttcgggaaaggcagcaggcttccatatagtgattattagcag

SEQ ID NO: 289350 - DNA, 286 bp, Zea mays
gtcaagattcctcctccttaacctgccctttcgtgttgccgttgttggtggtttggtttgtgattgcgctggcgctggagttgcggtgtgtgtgaagcgagggatccgagattcttgtgcgattctgttcggacctttcgattgctgctgatcctctctcccgtgcgacggcacaagcggcggtgtggggagagcatccgccgttgcccggccttggagggccccggtccgtctatggaacttggcgccccggtgccacgccccggcccggaactgaagtgctcag

SEQ ID NO: 289351 - DNA, 178 bp, Zea mays
gggtctttgctcaagtttcgaaccaaatcctagagccagctgataatatgtaataatctagaggagagaataatgatgtaccaataagtggagattcctccttatgatgcatgctaggttatggaagatgtaaaatattcaactttttcctcctttacatggactttctattttactg

SEQ ID NO: 289352 - DNA, 306 bp, Zea mays
  unsure (1)..(306): unsure at all n locations
agctgagcgaagagttgatgaagcactggatgcactggatgaagcagaacgggttgctgttgatgcaaaacgaaaacagactctaactgcagctgaagtttcggctttgaaaagatctatctctgataatcggcagaggctggcagatcagcttgctgaagctgcttgtcagtcttccactcgtggtattgagcttcgagctgcggcttctgccctcaaaagacttggtgatggcccccgagctcacagcctcttactcagtgcacataatcaaaggcttcaatgcaacatgcanactatacatcc

SEQ ID NO: 289353 - DNA, 296 bp, Zea mays
gcgcatcttgcaggctggcacgcaggcctagcttctctctgattccctgtagtgagctgtgctttgctttgcggccatggtttgcttgcgagctaatggattggccgtcaaggatgcctctcccttttcgctgttcgtggtcaccaactgccactgactgttggatcatccgtcagactgacgaaacgtgaaacgcattttgcaccgtcgcttggcttaacaaatcatcgtcaaagacactgaaatgactggtctaaatatacatggggattaatgctttaggggatgtttgtttg

SEQ ID NO: 289354 - DNA, 303 bp, Zea mays
actctcatgcgtgcggtagtaaaccctagcggctggatggggtttagttcgccccggttcctgctgatccggctgggttccctcgttggttgattcctacttcctagggggacgcatgggcgcggagacggtaggcctaccgacactcctgcgggagatccaacggatcgacaccatccggctctacgcggttggaagcattggctggcaacctggaagatgcggcattttccatcattagacatgccccaaagttgaacctatcacacatacatagagtatcaaatgtaccagaatggaagc

SEQ ID NO: 289355 - DNA, 334 bp, Zea mays
ggatccagtattaacagatccgggttcgagcgtccagtctcgccggacctccgactggccggcgctgctatctctctggtaccgcggtctcttgcgcgcttctctccattcgctcccactcaccggcttgggggaatgaaggatgtggtagggagcccggggacctggagtggcatggcgctgcggttgtcgcaatgcgtgtccgctggcgcatccatgggcgctatggccacagcgtacggcttctccaactacactgctttctgctacttgattgcttcaatgggcctacaacttctttggagttttggccttgcttgtcttgatgtctact

SEQ ID NO: 289356 - DNA, 381 bp, Zea mays
tcgattggttgttgttgattgcactgcattgcaggttgagggcaccagcagatacgactgcttcgagcctgggacggtcggccggatggagctcctcgtcctgatggcgctcaactggcggctccgctcggttactcccttcaccttcgtcgacttcttcgcgtgcaaggtcgacccaggagggaggcacaccaggtgcctcattgcccgggccacgcaagtcattctggctgcgatgcatgactcgagttcttggaccactgcccgtcatcaatggcggcagcggccgtgctctgcgccatcggtgagacgccgtcactggagtcggtcagccctggggctgccgtcagctggtgcatcggccttgcagaggaagggatc

SEQ ID NO: 289357 - DNA, 316 bp, Zea mays
caaggagattgggtggatctatgggtcggtgacagaggatatcctgacggggttcaagatgcactgccgggggtggaagtccgtgtactgcacgccgacacggccggcgttcaaggggtcggcgcccatcaacttgtctgatcgtctccaccaggtgctgcgttgggcgctggggtccgtggagatcttcatgagccgccactgcccgctctggtacgcctacggcggccggctcaagtggctggagcgcttcgcctacaccaacaccatcgtgtatcccttcacctccatcccgctcttcgcctactgcacaatc

SEQ ID NO: 289358 - DNA, 280 bp, Zea mays
gggacaagtacccgcgggagaccgtcatggagcaggacgtcgtcgtcaacctcacaaggttccggcccgtgctgctgcaggcgctcgacaagctgcagcagtgacgaggaatggattcaccatagccggccggcaggaggaagctcgctcaggtcgtcgggcatgggattggtaatttggttggttcatctgccggttttgttttgtttgtcgtaagaaaagaagagaagagaacatacatacactacacacgaacgaacgagaattctgttcattcttc

SEQ ID NO: 289359 - DNA, 584 bp, Zea mays
ggacttcgagctagagatggccacggctgcttccagctcctccctggagaagagctacgagctgcctgacggccaggccatcaccattggcaatgagcggatccgctgccctgaggcactcttccagccttccttcctgggcatggagtcctgcggcatccacgagaccaccttcaactccatcatgaagtgtgacgtggacatccgcaaagacctgtacgccaacacagtgctgtctggcggcaccaccatgtaccctggcattgccgacaggatgcagaaggagatcaccgccctggcgcccagcaccatgaagatcaagatcatcgctccccctgagcgcaagtactccgtgtggatcggcggctccatcctggcctcgctgtccaccttccagcagatgtggatcagcaagcaggagtatgacgagtccggcccctccatcgtccaccgcaaatgcttctaggcggactatgacttagttgcgttacaccctttcttgacaaaacctaacttgcgcagaaaacatgatgagattggcatggctttatttgttctttctgctttgttttggcttctttttt

SEQ ID NO: 289360 - DNA, 352 bp, Zea mays
ggcgcctcggaggcgttcagctgcttcaagatgaagctgaacatctccttcccagccactggctgccagaaactcattgaagtggacgatgaacgcaaacttcgtactttctatgagaagcgtatggccacagaagttgctgctgacgctctgggtgaagaatggaagggttatgtggtccgaatcagtggtgggaacgacaaacaaggtttccccatgaagcagggtgtcttgacccatggccgtgtccgcctgctactgagtaaggggcattcctgttacagaccaaggagaactggagaaagaaagagataatcagttcgtggttgcattgtggatggaaatctgagcg

SEQ ID NO: 289361 - DNA, 303 bp, Zea mays
gcgcagaagtgttatggaaacaaatggtgtaaaatggtcaaacatttcccagggaggacaaatgatgcactcatagaacattggagaagtcctatgtaaagaaaactggattcatatttggcctcaggattgctcgaacatgttccagacctgcaagatgatgtatcatttccacagacacagaacaatcaatcagatattccaaaggactgcaaagctgcatctgatagaaatagattttcatcacgtttatcaacagaccccaaacttaaacaagagctcacagaactggatgaaaatggt

SEQ ID NO: 289362 - DNA, 295 bp, Zea mays
gtgaccatgggagggaattggagctaattgacgatggcaagaatgaagaaacgcctctgtcagttcttcaggtaaatgctatgagaaagttggggtcggtggaagaggtgcctgtcccgctcttcccgtccaagggtcttcggttgaagcaaaagattaaggactggttggaagggttccagaggctcccttatgtatctccatatgagaatttcagccacatcaatccgggtagtgatgtttcagagaagcgggcagtcggggtgctccatgagctgcttagtctgtttgtgac

SEQ ID NO: 289363 - DNA, 258 bp, Zea mays
ggccgacaacctgatcaagcccgtggctttgctgctgctgctcctgaacctgtgcatgtacgtcatcctggccatcatcggcggctgggctctgaacgtggccatcgaccgcggcttcatcatcggcccggagctgcggcttcccgcgcatttccaccctatcttcctccccatcggcaacttcgccaccggcttcttcgtccttcctatagcgggcgtcgtcgggatcgcctccgccatggtgggcttcaaccacct

SEQ ID NO: 289364 - DNA, 290 bp, Zea mays
ctggaggtttgtcccgctagggcaaagaggcgcgtgagatgtcggagcctgcaccgccgccgccatgctccgcctccaaaaacacctctcccttcgcctgcatgaacatctccttcccctgcaccgctccgcctccctcatacagctctccctccagcgctctctcctctccaccggctccgcgacctattcctctccggctcacttcgccgccgatgactacctcgtctccacatgtggccccggacaagccgcgaatgccgccaagtgcatctcccactggaagtcgt

SEQ ID NO: 289365 - DNA, 399 bp, Zea mays
tgaagcgtgtgtgatacttgacagcggacaatactctggagatgttcttgtgtttaaacatcctgggctacattttggcgatatacatatcttaactgcaaggcaaattgatggactagagaagaattttattggatattcaaaaaatgcaatactttttcctacttctggacaaagatcattggctgatgagatggccaatagtgattttgatggtgacgagttctgggtctcaagaaacaatatgttactaaagactttcgagaagcgaagtgagccatgggttgaactattaaaactgaaggagacccagcacaggcttagcaaacctggggatttaaatgaattgattctcgaaagagtgctatttaatgaatgcttgacgactatgtttatacc

SEQ ID NO: 289366 - DNA, 359 bp, Zea mays
accgaattctattcctcccgctgaatcctctcagtttgcgaagcaaagcccaatctagttctgtgccccctgctaatacctctcagttcaggggcatggctggacaaaattctgtacctcctgctcagtcttttgggagcacggttcgaccaaattatgtaactccagaatcctcacagtttgggagcatggccagaccaaattctgtccctccacagtatgttaacatgcccagccaaaattttgtgagctcatccgagccaacactggttttggggtatgcaccacagattggaagtggccctccacctcaagtacagttaggatgggatttgtccttgccaaggatggttactggc

SEQ ID NO: 289367 - DNA, 380 bp, Zea mays
agccgggaccaggggctggcagccatggacaagtacctgcaggtcaagagcgtcatcaccgcgctcccggactcgccatggtactgagttgagccagggaccgatggaaccccatcgatctcttcttgtgcagtgtacatgcgtcatgcgtgcgtgctcacacagctgggttgctgctttgtgcttgtgttcgtctctggtttgtggctcatgtgttagtctgcaccctatccttctgtacgtagctgccggacatgcatatagtatgttaagtacaccatataaactcttgttttataaattcaagtttagcttggagccttgactcaaaaaaaaaaaaaaaaaaaaaaataaaaaaaaggggggggcccccatttttt

SEQ ID NO: 289368 - DNA, 308 bp, Zea mays
agatcggcgagcaggatgagtccaccaccggccacaaggattagcatgccccaaggacggtcatgtgcggacgccgccggtgacctcccatgaagttgatcgctgctgtccgtttctattttttttggttgacagtccccagttgcgtggggaatatagcagcaagctcatgcatttgcatgatggagtttatgtagttggaggagaggctgagagataaacgagccagtgtatattagatgcacatgaagccataatcgccttttttgttagtatatgaccaacacatatttagctgtatattaaag

SEQ ID NO: 289369 - DNA, 495 bp, Zea mays
gtctgggtgctcaagggcgccgactccatgcccgacgacgtcaaggagtggttgcgtgagagcttggacgacaagcagtgcttgctggtgcgaggctgggctccccaggtcgccatccttgctcaccgcgccgtcggcggcttcctcacgcactgcgggtggggctcgactctggaggccattgccgccggcatgcccatggccacctggccgctcttcgccgagcagtttatcaatgaaaggctcgtcgtggacctgcttggtgttggggtgtctgtaggcgtgacaaagccaacagaaaacatcctcactgccagcaagctcggagcggatgtcgaggcggaggtgggtatggaacaagtggcgaaggccttggagaggctgatggatcagggtagccaaggggaacacaggaggaggaaggctcaggagctcaaggccaaggcaactggagcattgcaggatggcggatcatcctacatgaatttggagaag

SEQ ID NO: 289370 - DNA, 517 bp, Zea mays
  unsure (1)..(517): unsure at all n locations
agcttttcagacatctgggggtgttcctggtcttgaagaaatcggggatgtttccaacagaggaggaagagaattatcaacagaaaggtctacaatgtgacgatcatggcaacgcaatcataatggaagaagaagacattacaacaaggatatcaaaggcagagcatgcatcatctcccttggagacgatgtgtggtgtaactaaatctgctgaagctcccacaacagttcctactgtgacacggaaaaaagaggtacatggagttcagaggaccaaagagagggagaacatgacaacagcagatagtgcatgtgaaaaggacaaagggtcttctcagagagtacaggaggaaaacgaaagtgcaaggagattggagaaagatagagaagttgaagagaaggaaagaaggaaattggagaaagaaagagaacttgttcgacagaaggaaagaaggaaatttgagaaagaaagagaacttgccgaagagaaggagacgaganaaatggagaaagaaaa

SEQ ID NO: 289371 - DNA, 350 bp, Zea mays
ctgggttgaaggtgctgaagttgcacatcgaagtccctagtttgaacactgaagtgacaaaaccatcccaagagctggcaccacctcccctcaagagtgggatatcgatggttcatgttgggttaacggccggtgtagtcgctctcagtggcgcacagtgatggtttacttgaaacgatctcaactgtgatttcgaaaatcggaggatgttttttaggagcttgattatctgaaacaagcattgccatcagctaatgcattctgaagctttgccttcactcggtgccatttacaagctaagaactgaaggaatgtacagaaatgaagaccacatctgtgatcttttgatg

SEQ ID NO: 289372 - DNA, 308 bp, Zea mays
ttgtctcaccagcgactacttctgatggtgtggctacctgagcagcttgtaccgattctgccttagcttgccgatcaacgctgtccaccaggacagcgctgaaaacttgaaatggcaagaccagaaccctgaagttgaagtgttgccaagaaactcagataggtggatgaacgttgtgagccacctagctttgagcttgaagacgacagatggtaggtgttagaaatggaaggccatgcggctcccatgttatggaaaaaaaacccaatcatgaattttggaaagctcaagaacctttgttgaaggag

SEQ ID NO: 289373 - DNA, 414 bp, Zea mays
gtttcaaccggaagaacaagaccctgggctccctctttaaacagaaacgtgttctggaattgctagagaagaactacaagactaatgcagtctctccaactgtgcaagatgcagaaatgggtgaggagaagatgtccgcagacgatgtcgcgttgctggctaatatggttgaagatatgagcatggagactggctatgataaggaagatgatgaaatggaaatggatgatgcagacatggctggagatggtgctgcaagctttaaagaaaagattatgggtatattgcagcagggcgattttgcagaaaagagaggttccaagctgagccaagttgatttcttatacctgctgtccctcttcaacaaagctggtatacatttctcgtgattggtggtccagcttctcttcagta

SEQ ID NO: 289374 - DNA, 302 bp, Zea mays
catatggacgtctgaaacttggaggttcagatttccatggaagaggtggaaaagatgaatctgatgttggaacagttaagctcgctattacaactctgtgctgtgtgttgaagatggctaggtctatctggtcttctgctatgaaagacatcctgcttaagtttgcagaggaaccgtctgctgcaaatctaggaaacatgctcaagtgtggacgtcttaccatatttgctggtttttctccaataaactatggtagtcatgttgttgatttctgcttatctgcgtggtcaagcaatgatgat

SEQ ID NO: 289375 - DNA, 504 bp, Zea mays
gtggaagtttggaggttggatattctgactggtctccagacttcactggtacagacatcagcaagggcccttcaggtgagaagtccactagcaggtatgatgatgccaaagggagcaggaggggatcatcagagtattacaatcttgaaagacaccactctacagctcaaaaacaatcaagaaatgagcacagcactacaagacgcaggagacatgacattgaagattatcatgatgaaaaaaatgacggaagaggggaatcccgaaagcataaccgccatgaatcaaacgaccggtgggtagccacaaatagtgatgttgattcggatgtagatagatatcagagttcaagctgtaaaggcactaggttgggaaggaaggatgatgatccaggcattgaagttcggcatcagaggtcaggtagaagtacgaaggatgacaagagaaggaaacatcacagtggaaacaggtggcacagcggcactgaagagggtcctcagattc

SEQ ID NO: 289376 - DNA, 531 bp, Zea mays
gtcggaggatgtcggtcgcaccatcgacctgtccgtctttggctcgtacgaagagctgtacggtcagttggccgagatgtttggaatcgagaagacagaggtaatgagccacctttgttaccgtgatgctgctggcgctatcaagcgtactggtgacgagccgttctgtgacttcatgaaagtagcacggaggctcaccatagtcgagagcaccgatggggaggctgcagaaacctctcgtcgagtacatggcttgattgcatgactgttcgataaggcactctgaagcttgaggaagactgaagcttggagcgaagtaactgctatgttttcgtttgcgtttgtctgccgtgaagcggaatcgcgatgtctgtctcgtcgtgtgaaagaaactcgtgtatcggatgttcgtctgtcgtcgtgacttagaactctgtcgtggtcagttgtcttgcgcttgcgcttggcgtcgaagttgataaatggcctctttgacgaactagcttggaataaagttcgagttgtgtggtt

SEQ ID NO: 289377 - DNA, 275 bp, Zea mays
tgcgaatgctgcttctgagctctgagtttgtcgctgccgccttccctgccggaggtgatttgcacgaggctaattccagtgtagttgtacttgatgaattcggtggcgtgtccgcttacatctgtgctctgatgaaatggaaattttgatcctgaaattcagagtcaatgcttactgactggagcattaagaatttattatgttgacacatctagagcttgttgtttgttgatcagccgtagcttaatacctagcgtttcagtgcaacacaaaaa

SEQ ID NO: 289378 - DNA, 274 bp, Zea mays
tgatgatgaacatgagctaagtagtcatcgtcatcgtcgcaatcaaattcgagacaagaagagaagagattttaattgttactgcatactactactactacaacgtgcattcgagccgttgatcgatgaacactagtgcatgatcagcaatgtgtggatcatatataatgttattagctagtagagctagtgtactgttacttgttgagcaatcttgttttgggtttcattaataatttggctaccttaatgcaatgcaaagataagaattttc

SEQ ID NO: 289379 - DNA, 391 bp, Zea mays
agcctgtttattgatgccttcaagcttgctagctgagctgcactatgtcctgcttggctacttctttgcacgctcttgatcaccacaaacatgactatatatgacatacatcatttttgtattgttgtatgtgaagattgaatccagtttacatagccttttagtttacatggaattcatctctgctgtgcaattttgcaaacttgaggttaatccaagctaattctgaactgagcggcagtaaagttcctattgggttactgtctgttactgttgcctgccaaatttataaagtccttcagtaatatcagtgtgtcttgatcggctgcagcaatgcgacaaacatggcagattccagtgatgctgtatcaaaatgtgtttgcctgtttgg

SEQ ID NO: 289380 - DNA, 288 bp, Zea mays
cacaaactaggaaagtcagaaaagacggtttgggaaaaaaatgacgaacccggtgatgaggtcgatgttcagcaaaatggctggggaacatggaaacaaaatagtacgtcagcttggtcttatagagcccttaggagcagcgcccttggcccgacgatggcacttctacgagggaagaacaaccagaggggtacaccaccctatcgaaagaagggccagtaattgcctatgtgtttagtgtttaagttcaacgatacctatgtaatcctgtgttggtccatcttttag

SEQ ID NO: 289381 - DNA, 261 bp, Zea mays
gtgtcgtgcctgctggtgatgtgcagcgccgacgacgagtgcgtcgcggcggtgctccgggaaggggtggtcccgtccctggtctccgtctcggcggccgggacggggcggggcagggagaaggcccagaggctcctcaagctgttcagggagcagaggcagcgggacaccgcgccggcgccgcaaccccagcagcacctcttgcaaacccattgcgcgaggccgggattggtgcgggtgctattatcgcgtcccaccacg

SEQ ID NO: 289382 - DNA, 291 bp, Zea mays
ctcgctggcgccctcatcgtccattgacagcatcccatggcgctgctgccctcatggtctacctgctgcgagagttgcctcctcgcactcgtcgtcgggctcgaaccgggtgtgcgcacccgtccgcgacacgtcgaccccgcggcggtcttgtacttgtgttgcttcccgagctgagaccttgcacgcaacagcaagtcctggatcccctctgcatcgcgtgtttcgctgggtctgcgcagccctgcacgtcgtcgtcgaagtcagcgcactccgtcgatgtcgtgcctc

SEQ ID NO: 289383 - DNA, 452 bp, Zea mays
ccggtcggctcgtttcactagttgacagcgacgggaaggaggttggcaggggcaagatattacaagcgccagggaagagcccagccccagtggagagccgcatctgcacggttgatgtcaccgagctcaggaccgagaagtggagggagctcccacacccttctgaggcatctgggaggaccgtccaggaggcggaggcgaggaatggtggaatcatgagggtctcttgggactccggcaggctgttgcctgtagtgtagcaaggcagaaacttttcgtcaggttgctgtataccgctaggcacaaggtgagcagagggagcctttggtttagggcgagagactggatcatgggattcttgggggcctaagtaacactgttaaaacctgtggttaactgtgggctatccatcaactaattgtctcaagcaatgcaggtacggagtagttact

SEQ ID NO: 289384 - DNA, 470 bp, Zea mays
ttgctcgaaggttgcaagggatcacaaagtcgatatcaaggtaccccacatccaagcgccgcttcgacgcccttgtgaaggctctttcagaagagcttgcaaggacaatgggtggtaatcaatctgctaatgggtctcaggtccggaagataagaagtggtatcgtccgaatgcttagtcagagatcactagggaaaacaacaggcatcccgggcgatgatcatgaggctcagctaacaagcgatggtttcacttcatgatgttctggaggtgttcaactgtaacctcagtttgaaaaggagatgctacttttctgtgttattttgctaactggatacaaagaactgacacttctgtatgaagagtttagcctcaaccatctcgaggatgggttgtttgttttgaggactgtatctggacaacactgtaggaatactttgtaacagaaaggcaaagatatgtccttgttc

SEQ ID NO: 289385 - DNA, 566 bp, Zea mays
ctggaggagcgaacgcctacagcctgctctgaaattcctggtggtggtcgtgcatccatgaggtgtggctcaggcaactatttcagtgcatgcttgatgagcgaacgcctacagaagtatgcaacagactccaactatggatccactgaggcacacacggatgagcatgaaccaaacagcactggctgctgccggccaaaccaccgctgccgcgtatgtccgaccaacccaagcagacatccaaaaccatctctttcctgtgcagcaaagccaggcaccacgatcgcaacaagtgccacgaacaacaaccccgcctctacagcgggcgccaccgcacctgcaacctcccagtgtaccaccgactgttccaagcacacctcaggctggaccttcgcatggtcttccaccggagctccctgtggatgatagctggcgccccacgggacagatgagagggagtctgacaggcaatgcttacagttctgcaattaggcactatcggggccattctgagcagcagcagggcgagcctcggcctcccaacacttcaggtgcgcgaagcctca

SEQ ID NO: 289386 - DNA, 433 bp, Zea mays
cttatggagatgatggagatacgggaagctgtcagtgatgccagtgattctcaaaccctggagaagatccaatctcagattaaggcaaagctcgaaacctggtccgattccttccaggaggcatttgacaggaaggattttgaccgtgcgatggaagccacacagagaatgaggtactatgaacgtgcagtggaagaaacagtgaagaagctctgagcctctgatcttctgttacagctgccaaaggtggtgaggcttgtgtctttttcgtacgttccttgcagatccccctgtgctcacgcagctacattgcaacagtaacatatataggtgtacatttgtgctgtacctaataggccggcccaaagcacacaatttttggcacggctcatatctggcacggcccaacctaattgtgggtctgggccggcac

SEQ ID NO: 289387 - DNA, 399 bp, Zea mays
atggatactattgtaattcaagaatttatttctgaataataaatatatttgtatataattaaaatagaaaagatccaatctcagattaaggcaaagctcgaaacctggtccgattccttccaaggaggaatttgacaggaaggattttgaccgtgcgatggaagccacacagagaatgaggtaatatgaacgtgcagtggaagaaacagtgaagaagctctgagcctctgatcttctgttacagctgccaaaggtggtgaggcttgtgtcttttcgtacggttccttgcagatccccctgtgctcacgcagctacattgcaacagtaacatagtccaaagtaggcactttttttacctaaacggtgcaatggattatatgactacattggaatatgtta

SEQ ID NO: 289388 - DNA, 222 bp, Zea mays
tacaagcaacctccttctactgtttttaagtgtgcaaatccaccgagttgtaaagagtagttcacttccttaccttacagttcatattttctgtccgtgtatgagtataatcatgacaaacgtcttggaccttggtgataattgtatatagctgaaagtattgtttatgtgcgcacataaacaatactttcagctatgatacattatcaccaaggtccaaga

SEQ ID NO: 289389 - DNA, 342 bp, Zea mays
attatgacatggctgaatatctgaagctggaaatgctgaaggaaacaggatttgcacacatgagaatctgtgatggtgttggatcatttcttcagctttctggtctacttgccaagtttgcgcttgtgagggaaactgcaaaagcaccatgaactcgttgtattacagatgataatagcttgtgtcatgctgtgctatcatggtaacctagttcagttaatagcgctgtcatgcgtggcttaatttctacagacgtgatgtatctctgtaagatagtgctttctgaagaaacaactatcatgtttacccaaaaaaaaaaaaaaaagaagagttgaataagaa

SEQ ID NO: 289390 - DNA, 378 bp, Zea mays
gctaaccatgacgagaaaacacagattgaaacaagaggcattattgttacttctctaaatcagccaaacttaggcgcctcagtgccatttgctagtgaaaacactgactttggaggggataacaaattgaactcaactgacgaggaagaaattatgccacttgtgactagagatgtctcactaccggcactgctgccagcctgatacgactgttaggtggcttaagccctcactgattgttacttatcctggtggtgccacgagaatgcgacttgttacgactgtggcggttgcggctgttttgtgtttcacagcttgtcttgttcttttccatccgcatggggtaggggtgcttgcagctccagtgaagaggtactt

SEQ ID NO: 289391 - DNA, 259 bp, Zea mays
gaaagctatttgtttgagggtctttaggattcgcgccgctgtgtcactcttagtgagaccaggcattctcttgctgtgaatcttgtatcatatcttagtcacaccttgccttggtccgttggcaacgaatgtaatgtttgatacgttagacccttccatctgatctatctatgatgcgtggatactttactcgtgttagataccgtatcagatactgatacttcgtggatatgtatccgatacgcatcgaatatttttg

SEQ ID NO: 289392 - DNA, 263 bp, Zea mays
agcaggccatgaggggtgttcactggtggtgcatgggcggcatgcatggatcgacgtcgtgggtttggactatggtcaagaggacaatgtcagatggagaatgataagtatataagaggagaagtatgtggtgattgttgtcacgacgtccgtattgtgtcctcgttttagtcgatactcgatggagtatctgttgactgttagctgttacgttgagtctgtgtaaccgtttcttcgtcaatcggtcaatcctgcctttggac

SEQ ID NO: 289393 - DNA, 457 bp, Zea mays
gtacgacgtgggcatgttcgaccgccgcagctgcaggctgtacctccgctcctcgccgacgggctctgcgcgcgcccttcatcccgtccaaccccaagctggggctcaccctcgtgagggaccgcgcggccacggcgcccaggggccgcgcggcatcttccaccccaagactgcgctcatgtacgcgccgggcaccggcggcaagtgcccgccgtactgatgtgatggtgcgtacgtggtctggactcgggagtcggagcggcgccatgagggggtgttcactggtggtgcatggccggcatgcatggatcgtcgtcgtgggtttggactttggtcaagaggacatcgtcagaggcaaaaaaaataaaaataaaaaaggagaagtatgtggtgattgttgtcacgacgtccgtattgtgtcctcgttttagtcgatactcgatggagtatctgttga

SEQ ID NO: 289394 - DNA, 285 bp, Zea mays
ctccccctctctgctatcctccattgcaagttgtttggagcttaagcgaacagcatatcccggtgagtttggggcagatcctggcgaccgagcatcgattttcgatgagaacccgacgaatctcatcggtcgcagccgctgcgcgctaggtgggaactcgagcaaggcgagatcgaggcgggatccagaggctaagctacggtttccgacgcggatccggcggttctcggtcgctgcgcgccagatgagaatcgccgttgttgctcggtaaccgtcgtgttgtgt

SEQ ID NO: 289395 - DNA, 252 bp, Zea mays
gcaagcagttcgcggcacaaattctgtgtctctttcgttccaatttgcaactgtgtgtgtgagccgatgatagtgagtagagagcttcgttcccaactccggtgagtgccagaagagccaacaagtcctgcacgaacaccagtcgtcaccggagagcttcctgccggtgtcggcaaggatgcaaaggtgccaagagaatcgctttgtgtgtgaccttgtgccccgaaataaaggaattgttcttgtttaaaa

SEQ ID NO: 289396 - DNA, 333 bp, Zea mays
ggaaaggatgtaaaatggtcattcctgctttactgagatgctcatgccacatgttaacgtctagtctgcggctcaatgtcttgatccaagcactgctagaagcacttgaaagacagtcgagcagcacttgttcttgcctgctgatggtgattttgctgaaatgtatagcatgctttgtgtatgatgaatggtaacttggagccatgtcttgtgatgatatgtaatcgtgttgtacatgtcttttccttcctttgatgtatacagaaatttggaatgaagtgctcattgattgatgttttaaaaaaaaaaaaaaaaaaaaagggcggccgccga

SEQ ID NO: 289397 - DNA, 384 bp, Zea mays
aagaagaggttatccacgtcagattttggagggaatgtccgaaaccatcaagaattcttcaggcagcaccaaagcacaaggactgttcaccgattatatcccaacatgagaaagcattgcaagacatttatcctgatgatgagaccattggatcaatcattagaaacgtgaaaaagaagagattagtgacatcaaatttctcagcgaatgtagaagcccaagagtctttgagaaatattaacctccaagatgaaactgttgtttctaatatcatggatgcttctgtaaatcatgggtctgatccagtcaataacagtgacaatactgttgaagatgaacttttggatgattttgaaactgagctagtcaataacggtggcaata

SEQ ID NO: 289398 - DNA, 290 bp, Zea mays
tggaggcgcggcggtctgccacgcagcgctcggcgcgcaggtaatcccagtcaagaacgacagtggctcctccttggtgtgaaggatggctcccacgtgttccgtttgtcgtcgtcgtcgtgatgcaacgtttctagtagtagctatgtatgcatgtggtgaagcacgtgctcgtcggtgtgtagtgttcgctcttctgatccattgtctgtgctctgtactgtagtgatcagcgtcgaaataaagaaatgcatgtccttgtttaaaatacaaaataaaaataggggcgg

SEQ ID NO: 289399 - DNA, 186 bp, Zea mays
cagaagacttcctcccttgcctatgttctagctacagtttgctgcttgataatgtacgactagataccaacatgtgcattcttcagtaatatattgttcttaatacatgcaggcacccatggatctcttgtctgtatcttgcaaatgctatttgcagtgttatatgctaattctgtaattcatgct

SEQ ID NO: 289400 - DNA, 288 bp, Zea mays
gcagcgatgactctgactcagataggcataggcgcaggaagggcaggaaggacaggaagagaaggaggagccaccgcaggagagacgactcatcggatgaggtgtctggaggtgaagataggagacgccaatgtcaccgcaagcggagccatcaccaaagggatgcatctgactgtgacaaaggtggcagtgattatgcagatgaaaagaagcaatcgagcaggcggaggaggcaccgccagtcagaaagcagtgggttggatgaggatgagcggcgtgatccccgag

SEQ ID NO: 289401 - DNA, 283 bp, Zea mays
ggccatcctgctggaccattggacagaaaaaagttttttggagattttaagtatatcattggtggatgtgcttattcactgtcagcaatccaaaatggcattctacgtggcaaccaaaggccaccgtacaacattgccaaacctttcgggcagaaagaccgaagatccaaggtggcccttccataccatgaacctcttgttcactttgctttggtatgtggcaccaaatctggacctgcacttaggtgttactcaccaggggatatcgataaagcattgatgg

SEQ ID NO: 289402 - DNA, 288 bp, Zea mays
ggagattgatgatcagtcacagttcatttcatgcgtctgctggagagggcagtcttcaactctactttctgcaaattccagcggcaacattaagatcttagaaatggactgaggactttgcatctgtttgagtctcagctataaatagaccgacttcttaggccgtgctcaacaaatcatgcatatagccgtggtagatgtcactgtctagggagttgagtttaaaatgagagattggatgagtaatgctgctagacatagcttaccaagttgtgcgcgtgcgtggct

SEQ ID NO: 289403 - DNA, 609 bp, Zea mays
atcacaaaagaggatctcttagatcatgcgtgggaatatcgtttcatcaaagcagcacctgattactggaggaaccttgatccatcatggaagcacactggtccacctatgcgacgctactttccacccgatggctaccacagtgcagaccctcatgacgccgtgtggggtggccatgagtgcacctacaccgtcataacgagctttgtcgacgatggccagatcagggagcactacgtgaggatcaaccggtggccgccgatgaaggtgtcaaggaaggacgactggagctgggagctatcgaaccacctgtaccgctataacagcatacctgattcccacaggaaaggatgcactggtcctctgttcccagtttggtgaatgcacgtctacggtagtaatcagcggctacggttcatgcatgccgccgaatcttatctgctagtagaaatcaagcttgccatacgttcgtaactgaggacaactgaaaaatggaatgtggcatcaggaggttgtatttggtacggctgccgagggtcaaggctaggtgtgtatgcaatatacataaacaaagtatatatatgtattatatgttttgtacttttgtgg

SEQ ID NO: 289404 - DNA, 257 bp, Zea mays
gacttgacccttggtgacaatgaggatgatgaaggggaagaagctgtggaaggcaacactcatgctggaatggtggaatgagcctcatgctggaatgattgagagctacagggagaagcatggccagaaaaagctcaatgcgttgtttggcctctagtttcagtttattctaggtttgtaagctatgtttccactgggatcgacagcaccgaattgttggtaggaacgtgttttttgtcagttttactctatggtag

SEQ ID NO: 289405 - DNA, 150 bp, Zea mays
ggctggcagcatcactgctcaagataatgtttggggcgcatgatttgaccagtccggatcattacttttgatgatgtgttgtagcagcacgttgctctcaacaaggttggtttctttttttcttgaaaaaaaaaaaaaaaaagggcggcc

SEQ ID NO: 289406 - DNA, 380 bp, Zea mays
ctttcattcctcggcctccgcagctagcgcaacgcaaaggcagttccggcgggggcggactgggaacacatgggaatgagatgagatcattgctcggtcgtgctggcctgggccgtcggcgcgcgttgatcttgcatgtgttctcaggtcgcccccggagggccttccttgctgctgtgttccgctagacctggagtatctcgacgacggtggcaggcacacgcagtgacggcaccactacgtctgttccgccacgagagcctatgtaacgcactagcaaggctcgcgctgcagcactcttcgtcctagctcatgtcaactgccccgacaataagaaaccagtgcaggcatgtctataaagaaaaagatctacgtggtac

SEQ ID NO: 289407 - DNA, 326 bp, Zea mays
cgaacctctactggggagtgattccacttcatctaccattggcaaatagcatggaggataacttcaacgcaaccatgagcctgatgaggtcgaagggttcagtgaaacccggagacacggtcttggtggtatcagactctgatctaaaccaaccttgtgctgccacctcggtgttccaatccattcaggtccggctagtggagtaggttccatgagatgagatcctactagccgtttggttggctaaaatgtaacgtaaccaactactactatgcgttaccattgcaaaccattcccaccgtctataattagatcctatttccatc

SEQ ID NO: 289408 - DNA, 388 bp, Zea mays
atcatctaccagtcgaggcatcggtcagtgataacaaagcaggagagagtccacaagatcatcgcgagcattcctaatatagctgacaggagttaagttgaggggcatctgacgctgttgaaggagctcggtccagactggttctccgagaaaaccgcacgcagcggcgatgctctgtgctgcgtcgatgccactttgagccagtcggagattcggcagagactgtacgctgctgctgctgctgctgagtaggaccggatgcgaagaggacgagcagcggaaaagagcactcagccaagggccgtcagtttctagtgttgttgtgatagaagccttagcttagatgaaaatggatgacttatgtatagtgaagccattctgacaactg

SEQ ID NO: 289409 - DNA, 302 bp, Zea mays
caacatgcttggtccaaatggattacataaattgttcagtagtattatgcttcgacgtgatcagtgtgataagaaaaagggaactccctctaaagtagcttttgggcttttgatctcttgtggagagtagaactgcaattggcaagcatttatcttgatcttcgcatcaaaaataccatggcggcgatgctccttcttgacccgacgacataggtgcattccccggggcgccatgatctttgatcttgggaccttgctcagatggtgagacaacattgtaatttgccggtgagggtgctatg

SEQ ID NO: 289410 - DNA, 285 bp, Zea mays
cgcggagctaaccacctgagtggtcgcggcgacgtacaccaagagggcttctccgacagctggaggcaccaagatagcgcgcctttgtgaggagcgccttcacgttcccgagagcttcctcggcctcaggggtccaagtgaagcactcggccttccttaagagcgcggtacagaggcagacctctttcgccgaggcgtgagatgaagcggctcagagctgcaagacatcccatgaccctctgtacgccttttaagtccttgatgggccccatactggtgatggct

SEQ ID NO: 289411 - DNA, 295 bp, Zea mays
aaaaagcagcaggatgtgatatcagattcagctgtgacttgtgagcgggtgaaatatgttgcattgttaggcgtcgccatcggagttgtacctttcagcgcgctctggctgtttggcatcgagctagctgatctgtacctctcgatgtcgatcatcatgtcattggcttagcctacgggagatgaggaaaccacacacatacgaagacgcgcgcgcgtacgtacgtcatatggcggtggctcacaccaccaatgcgcatttcgtctttacctcttatatgccggccgcagcttgt

SEQ ID NO: 289412 - DNA, 301 bp, Zea mays
ccatcgtgtgcgtgccccggatgtcggaccagcgcaccaacgctcaacttgtcgtgcgcgagtgagcgcgccggcgtgcgcccccaggtgagacgatggtggcgtgctgccagcggcggaggtgcggcggtgcatcgacgaggcgatggggaatttggaggccgccgcggaggtgcgacgcatggcggcggagtggaagcacgtagtgacaaagcgccatgcgaaaaggagggtcgtcggatcgtaatctcatgacgttcgtggatggcgcgaggaacgccgtttgaagattggcatgtgt

SEQ ID NO: 289413 - DNA, 310 bp, Zea mays
caacaagtgaatgataagctcctagaagctgtacaaccttaagcactcgagcaatggagcaatgtggtatgatgagagcataggaggtttgtcgagatgaggtcgaaacatggccccaatgtaactagaccagagcaattgacaatctaggcaatatccgctatctggtccattgtttctctcgtgggtccattgtttctgtcgtgggtcagacgtcttcgacgtgaagagaggttgttttgtcatttccacattctgaagcgtaatgtagtgcagtggacgcatatagctactacgtatgttaaagttg

SEQ ID NO: 289414 - DNA, 239 bp, Zea mays
  unsure (1)..(239): unsure at all n locations
agncaattggccttcgctgacctgggattatctaactactagcaactctgagcagactcaacctggactgggtatgcattggccccaggcatcgttgttgcgaaatttgtctactaatgagaaacaaggactattcatgaaccttttgtcactgaatgttgcatgttttgtatgtgtggggcatttatccggttcttaatgagtctcaatgttacacaatattatacatctactggtcc

SEQ ID NO: 289415 - DNA, 298 bp, Zea mays
cccagctctgcagacgaacacccgctggcactggaaccagtcggtcctcaacgtaaccatgaacgtgcggaagatagttccgcggacatggaccagcaggctgcttcaagcctgccacgacaacttccaagacgacgaggagaagcgggcccgtgacatgaggagcggcggaggctcatgtgggagcagctggagcgaagtgccgctcgcgggtaccaccagccgacgacgatcgctgccgatgcgagcagcttccccgcgccctcttcatcggctcgtcttgtatccctcaccgtga

SEQ ID NO: 289416 - DNA, 258 bp, Zea mays
ctcctttccatctactgaccgtgaactagacatcttggtgctagggttcttgggtccatgtggattgctcatcgagttcatacgttgtggcctaagttcagctatattggtgtgtaccatactggctagacaatgagaaagttcctttgtctgtacttttcttgagacatagagttgcagtctttggaatagcaagcacattggatgttcgtgcaaaaaaaacaaaaaccaacaaaacgaaaacacaagcacccaaca

SEQ ID NO: 289417 - DNA, 374 bp, Zea mays
gtgggaagagagaaaggttgagatggcggctatagctgcatccgaggtgctggtggacagcgcggaggaggggtccctcgctgcggcggcggactggccgctcagaagcgcgaacagagactgcgcaaattccgggagctgcacctgatgcggaatgaagctcgtaaattaaatcaccaggaagttgtggaagaagataaaagactaaaattacctgcaaattgggaagccaaaaaagctcgtattgagtgggaactaaaggaagaggaaaagagaaaaggaatgtgcggcaaagaggagaagactatgagagagtgaagttgctgggagatccagtgcagaagatgcaggaggatgggagacggaaaagaaga

SEQ ID NO: 289418 - DNA, 709 bp, Zea mays
accatgaatccactcctgatccttacctttgtggcagctgctcttgctgccccctttgatgatgatgacaagatcgttgggggctacaactgtgaggagaattctgtcccctaccaggtgtccctgaattctggctaccacttctgtggtggctccctcatcaacgaacagtgggtggtatcagcaggccactgctacaagtcccgcatccaggtgagactgggagagcacaacatcgaagtcctggaggggaatgagcagttcatcaatgcagccaagatcatccgccacccccaatacgacaggaagactctgaacaatgacatcatgttaatcaagctctcctcacgtgcagtaatcaacgcccgcgtgtccaccatctctctgcccaccgcccctccagccactggcacgaatcttcatctctggctggggcaacactgcgagctctggcgccgactacccagacgagctgcagtgcctggacgctcctgtgctgagccaggctaagtgtgaagcctcctaccctggaaagattaccagcaacatgttctgtgtgggcttccttgagggaggcaaggattcatgtcagggtgattctggtggccctgtggtctgcaatggacagctccaaggagttgtctcctggggtgatggctgtgcccagaagaacaggcctggagtctacaccaaggtctacaactatgtg

SEQ ID NO: 289419 - DNA, 280 bp, Zea mays
ctcgagcggaagaagcaggctcggtaatgccatccccatagggccatggtgcagagaccgaagtgccttctaccagcagaaacccaaaccttgacttaaatcaagattctgtcctgaacgatgtggggaatgattgccaggggcaacatggccatccagaagttgaaaagttagatcaggtcgaggtgaatgaagatacgatgacacctgatatcaaattatcagtttgtagggatacaggagagtactctcctgtaagtgaaggtaagagggcggttcc

SEQ ID NO: 289420 - DNA, 465 bp, Zea mays
cagagttacacataatctggcatttttggcggcggtggcatggttttatccataatcactggccttttcggaatcaacgtcgatggcatacctggagcgcagaacaccctctgtcttttggtttgttcgcgggacttctcttctttgtagggatcgtcctaatcggcatggggatgctgtatcttgggttacagaatccagttaacagtgagaaggtgatggtgaggaagctggagctccagcacctggtttcgatgttccagcacgaagcggagcagcatggcaaggtcagggaaggtgttagccggcatggcgcctcgccgagttcatccacggcctctgatgaagggtacattcttatctcctgagatgggagatttatttgctgacgtgcaaggtcttgttttgaaaggctggaactgaagagaagtcgggtaaatggtatactacacgtgtcttaagaat

SEQ ID NO: 289421 - DNA, 304 bp, Zea mays
gtaaatttggtcatagagaggtatcaatctatgactgaagtaaccagcgtcatgagaaaatcgtcactggtgatcaaattcttattagtgactggtatactagccgtgctcacggtcatgagcagatcggacgctcacatgattaatttatggaattaaatttaatttgtcattttcatcgcattaggattatttattattattctgattactatggtttggtatttacttacaattagtaactgctaataaaattttgaccatcttataaaagcatgctcagcttaacctttatttattggcc

SEQ ID NO: 289422 - DNA, 287 bp, Zea mays
ctggtggtcatcaagggcaagaagaaggtttggaacctcaccaagaaggaaagctacgacctggtggacggagattttctcttcacacctgccggggatgtgcacagggtcaagtactttgaggacacagagttcttcatccgttgggatggccactgggacatctttctcgacgaggatctcgacactgcacgcagtgccattgacgcggagcttgcagctgccagcaagtgagatcatgccatctatgtgcagtgatggcaagcttctgaaggtgctatgctcac

SEQ ID NO: 289423 - DNA, 268 bp, Zea mays
taatagataagaaattatgggacataggaaagctgccggttcattccttgctgttgtgcttgagcagtggagggacatcgagaagccaaccaatgggggtgcgttacggttactaaggctagctgctaagatcgacttggtgagaggagagattagaagtgctgggggggcgttagtcttgtaggctgagtagattttcagagtactgaagagcttgtagttctgccaggaacatggttattagttgaagcaagaatgttgatggtcc

SEQ ID NO: 289424 - DNA, 230 bp, Zea mays
cccctactagctagctgaggtcatcaggtcgtagcgacggagccccactggcgccgccggcggcagcggagtacgtaggttcatcactcttctctagttcggtcacggaaaggctgttttgtggtgtgatccggtggtgttcttggtgttgttgccaactgctttggtttggtgtatcagcttttgttgccgggtaaaacgcctgtgagctgtgatgtgatgcttcacct

SEQ ID NO: 289425 - DNA, 135 bp, Zea mays
atggtagttgcacagtgtgtctgtgtgtgtggatggtctaggcgcctaccatattgaataaacgataaagaaatcagcttcggctgcgtgattatgttcagcacgatcacgctacaaaaaagagaacagggggaa

SEQ ID NO: 289426 - DNA, 381 bp, Zea mays
caagaagcatggcgaggatggatcagagagtggtggtattggagattacctgaagttggcacagggtttcatgaagaaacaggatggggaaggggacagtgggggcggcatgggagactacttaaagcttgcagaaggtttcttgaagaagcgctgattaatcttccatatcatgattcaggaaggacttgtttggttagtcacttgtcctgtttattgtctccaagtagtgacattttcgaggtttccatcataggatgtaatacaagtgcattgcttatgttgtctgtgtgttgtgacttgaatgcttaatgtgctgctgggataataaaagcttggatgctctgctattcatgttgtatattagttctgactaaaata

SEQ ID NO: 289427 - DNA, 265 bp, Zea mays
atcttacttaccagcataaggatgcaggaaacagaggcagttagcagtgccatgacatctccgagattttggcacaaatgggaagctctgatagaagtggctaaactggggatttgtgaacaagtctaggcaagttgggaatttaggaacaagattgtcataatgtactaccatcaaaccagttttctggagtactaaacggttcttacattactagaagcatatctgaaaatgtttcgatgtttcttttagtacggggaaaacc

SEQ ID NO: 289428 - DNA, 332 bp, Zea mays
cgttgggccctgcccctgctatcgggcagctgacaaccgattgtgagcctgctgctgctgctgctgcaacgaggggcgatgctgatatggcggacggagacgaggaagcgttcctgacgctgggatggaacggcgacggtgagtctgctggcgccacggccccggccccggccccggccccgttcatggagggcagggtccatggcagcgggctgcttgctctgctcagctgctctggtaatggcggcgcctcggcggcttcgtcgactggcatgcgcacctggatgtgatgttgtaggttcgagtagtgacagtgtcttgtcgcaatgcct

SEQ ID NO: 289429 - DNA, 389 bp, Zea mays
attgggtagcatccatgtatctataactgtgaccgcaactttgaagaaacacatgctgtggctcatggcctcgagataaaaaaaggttaaattgcaatcgacaacaatctggttggggcagaggtaaatatcatgccgtgctcctgtcatagacatggttgcctgtattttatttgaatgagggttgaatagcttataacattgtgaggaagtcctaccacatattgatttttcatgttggtgttttttttgttggcattctctctccagttgtcataaaaacaatgaactgtacataatttcttagaagggctgttcttaagtgttgaggtggaatgagatgaaaaaaaaaaaaaaaaaaattaaaaaaaaaaaaaaaaagagaaaaa

SEQ ID NO: 289430 - DNA, 369 bp, Zea mays
cacaggcatgccacctccgccacctggcccgcagcagcctggacaaaacccgcctcagtagttccttacctggataagcttcttgcgatacacctatgggagattttttttgtatcgcgagaaaggatcataaatcacacctatggaagacgaagacctgtgaattgcaccaatgctttcaccattctgtctcatatcagggtatctagtcctagtagtttcctttgggtattgtgggagagaaccatgccagtgtgtaccactcatcctttgatgtgtgaggggactttgtatgtaaagaggccaggactttaactgttggtattggttaagttaggaaatatggatacttatttcatagttgtctta

SEQ ID NO: 289431 - DNA, 326 bp, Zea mays
tggaccacgaacgtgactcgacggcctccatggacaacatgagcctcgacgaaggttcagccgcggacccaaacgaagcccaggagcaggagccagcgctgacccgcaacttcacggtcaggacggtcgccggaagcgcccacgagaaggcgctgtcgggggcggtggatgcggtcgttgccggcgcagccacgaccagagttggtcaggcctcgacggggtgacgcgggtgaactcgctcgtccagcttcccaggttctccgacgagaaggcgatcggctgaggagctgtgcaattctttggtcgtcagtgaacttattatcgtc

SEQ ID NO: 289432 - DNA, 253 bp, Zea mays
ctctctccttagagctcttgtacatagtacccaagcattgccggtatattgcaaggcatggtatattaggagccaggggcaatgatatcctattgttccagtccagtcatgttgctgaataagtatttttgtgaatctgttttgttgccggaggtaacaaaatatctgttcatgttttttttttctgtattcgttggaagtgtaccgatggagctatatgctggtttatatgcatcaataatcttgtttggat

SEQ ID NO: 289433 - DNA, 386 bp, Zea mays
  unsure (1)..(386): unsure at all n locations
ggcttgcgtaggaagtttcagtgctcttgctagacctccatcctgactccggagcaagtcaactatggaggagttcctttctcccacacaggattcagtatgccatgccataccatgctcattatatgttgaagatgcttcttgcaacgtaacacttgattggttatggtgatcgcccatccttctctagaggatgttattggatgtttcttttgtcgcaagatgcaactttaaatgttttttgaagcaaaagtttgatgccagtagctctaccaggttcttgcttgccctgctacatgtgtgatcccattcttcaattgtaagatgtgtntgttgagaatatgtataatagataatacttctattatgttagattgtagacagta

SEQ ID NO: 289434 - DNA, 354 bp, Zea mays
gtttcctgcgagcggaggagaggaggatggaggccgcccgggagacgcagaggatgcggatggagatggcgcttcggcaccttgatgcacagaggaggctcatggacgcgcttgtcggccgcatcgtcgacgccttggactgaagtggtggcacaaaggtgtctcatcgaggtttcttgcttgtcctcgttgcatgctagcttgcgagtttaggagtttcttagcgctgtttatgtgtggtagctgtgatggatctgtgatgtagttgaagcggacaagccttagtgatttcccacccttgtatttgcttaaaaggggatttcttatgaagaagaggttgcacgtctgttgcct

SEQ ID NO: 289435 - DNA, 674 bp, Zea mays
gtgaagggacagctgaaggttactagagcttttggtgctggttttctaaagaagccaaaatttaacgaggcactacttgagatgttcagcatcgactatgttggaacatcaccatatatcagctgcaacccttctgtacttcaccatcgtctctgtgcaaatgatcggtttcttgtactgtcctcagatggattgtatcaatatttcagcaatgatgaggtagtttcgcatgtgctgtggttcatggaaaatgtaccagagggagacccagcgcaataccttgtagctgaacttctttgtcgggcagccaagaagaatggaatgaattttctcgagctactggatatcccccagggcgatcgtcggaaataccatgacgatgtgtctgttatggtagtctcgcttgaaggaagaatctggcgatcttctggatgagtgttgaaacatgacctggtctgttccttgcagccttgcttagtgtagtaaatcgactcaatcaggaaaggcaccaatgtcttgctgtctttatttttcaaccatgttcaaattctggcaatccatgtgccttctctgtcttctacgttttggatttgcgctgcattcttgggcagtccgaattgacgtatacatgtttttctcttttgttattaggaagaaaaggttctttggagggc

SEQ ID NO: 289436 - DNA, 366 bp, Zea mays
gatcaccgacatggtgaaggagatggagaccgaacggcctctcgtcgggcaatgcctcccgctctgggaggacctgcgtggcaaggtcaggggctggtgccgcaagttcaacgtggacgaagccatcgccatgagcgtgctggagaggaggttcaggaggagctaccacccggcgtggtcggcggcattcatcctggacccgctgtatcttatcaaggacgtcagcgggcggtacctcccgccattcaagtacctgacgccggagcatgagaaggacgtgcggaacgacgacgacagggacctgatcacgaggctggtgtcgccggaggaggcgcacctggcgatgatggagcttatgaagtggcg

SEQ ID NO: 289437 - DNA, 423 bp, Zea mays
ggtagcgccctcgtccttgctgattggggctgcctgatttgcggagaacagagcctgacacgtcgcgttgttccatccgcatgagatctgtagcagtgccataatacttatctgatggtatctaaggcaaaattagtaaacatgttctatgtacacctttacgtgtagccattagcaaaaatgtaaggggttcgctccgctctgatgctgtacatgcatttgaacatggtgcctggtgccggcagtgttgtgcctggcaggtccgcaggtcttcgatccgttcgttgctgaagtcgatgcacttctgagttgaaaaactggacgttcttcctattgaatattccagtaacatgaattatgttgcctgagaaatgtgcaaggcattagcctgatggctatatgaacaattcatttagccactct

SEQ ID NO: 289438 - DNA, 450 bp, Zea mays
acctggaagatctcatcgtggaatatcatctggtggtgatgtacctatgactgatcagactgatgatgacccatatgaggatgaatttgatgaagaagatgagatgaacatgtaccgtgtccaaggtacattgagggagtaggtcacaagagatgaagtccgtcgctttattgcaaagaaatttaaagaatttcttctgacatatgttcatccgaagaacgatcaaggagagtttgagtatgttcggcttattaatgagatggttttagctaacaagtgtagcctggaaatagactacaagcagtttatttatatacctccaaacattgccatctggttggctgatgcgcctcaatcggtgcttgaagttatggaagaagttgccaaaaatgttgtttttgatcttcacaagaattataggaacatccaccaaaagatctatgttcgaat

SEQ ID NO: 289439 - DNA, 287 bp, Zea mays
aagggttttgccatgggtgttctctttcttggtagctttgttcccagtcacctatctgctcgaaggacacttaagagccaaaagttttgcagatgaggatgaagcagagtagttcaccaacatgttggctatagaaggggctagaatgtcacttttgggtctctatgctgccatcttcatgacatattgcattagaaatcaagtttgagctgactttgctattgcgtgaaaaggctgcagacagaggtatgcatggtccatctagtcggagtgctgccatcccaccc

SEQ ID NO: 289440 - DNA, 276 bp, Zea mays
gaactgcaaatgtccgaggtaccagacatcggtacctctggcatgaatgaagagaacggcgatgactatattagagaatgggagagtgaataattggtcgatctgtagttaaccacttgtatttcgacatcgtaggcatattaatcaggtctaagatatggtgtaatatagacgtgcctacgttggagacacgtttgttatatagatctgtttgatttgactagagaaaaaagaatgcgacaaaaagcccgggccgaaccgaaaaagaaaagaggg

SEQ ID NO: 289441 - DNA, 294 bp, Zea mays
gcgagaggggggaaccgaggagatgaggctggtcggcctgacgggcgggatcgcgtccgggaagagcactgtctccaacctattcaaggacgccggcgtccccgtcgtcgatgcagacatcgttgctcgggatgtagtgcagaaaggcactggaggtttggaagaagattgtcaaaagccttcgggaatgatattttgttggagggtggagaaattaccagagcttactataggacaaattgtcttttctgacccatcaaaacgtcaacttctgaaccgtcttctggcgccaca

SEQ ID NO: 289442 - DNA, 302 bp, Zea mays
taggcatgactccgcgtatggctttgtgaccagaataagatcgaggttattggctcttatttaaccaaatccatcgtccaactaacatgtaaactctctcctccctctatataaaaggggaacaaactgaatactatgggcatacattcagaggcacatgagtctcccaacacagatacacaatcctaacaaactaaagaggtcgctacgccacctctttggaggattcatccagaaccttagggattcattcccacatagggtccaataacctataactcttgctagagcacagtgcaaag

SEQ ID NO: 289443 - DNA, 163 bp, Zea mays
cttctcttagcttagttgtgattgtgagacctgtgtgataaacttgtcttgaacttatgtttgttaaaaacttatgtttgagagttggtaatacttatgttggtacaacttggtatgaacatagacatgtttatgaaaaacttgtgagatttgtagttttttg

SEQ ID NO: 289444 - DNA, 331 bp, Zea mays
aaagtatatatgagaatacagacttgggccggcgacatggttgaagctcgtagttttgaattgttggcataatgatttgccaatggattcattgagcgagatggcacagcaaggtgagtttctgattggactcctcaatgaactagcctgttgggctttggcacctggagcagagtcattcttcaggtcccttctgttaggaaggatttggatgcgctccttgtttgagtgctccaaatctgaaaaccaagcaggtaagaagatgtaaaggcattggtccaatcagtaattccaagcatatttagggcacatgcattaggagtccaagtgt

SEQ ID NO: 289445 - DNA, 345 bp, Zea mays
gtgttcctcggctcagcccaacagcaaggtctggctggacaatgagaacaaaaacagcatggtgctgcaggccgttgtggatgcagacttgcggttcagagacgtcgtcagtggctggcctgggagcatggacgacacgtgcatccttcgcacttcaggcctgtacaggttgtgtgagaagggcctcaggcttggggggcagatggagcttcccggaggttccgcggttagggagtacctagtcggagatgcaagctacccgctacttccctggctcatgaccccgtaccgggaacatggcctccaggcggccaaggtggaattcaacaagcggcacacggccgc

SEQ ID NO: 289446 - DNA, 532 bp, Zea mays
gagagctgcttgagaagatgactcaaatggaggagagtatggcccaatataagcaacaagtacagcaacagatgcaacaaatgcaaaattggatgctacatcagatgtacggaggtgccggaactcagttcggcatgccgccttttcaacaaccccctatcatcacacatccggtgtctggacaatcattggaccgctccactgcagcggcggatggatcacagggttctgcaacttctgtccaagaccaattgatgccattgggtgtgataggagggcaaatgatgtcgtgggcacctcgccatccaggcatttggccaccgatgcaaacacagatgtcaccgccgatgccgtggggatttcctcctcgtgggcagtcacaatcaccaggattgccctcacactcaccaggatcaggttcgggctcacatcatgctagtccgcctccggatcagagcacgtttatggacttattgatgaacacaagtggcggcggctccaatgacccaccaacggaatgaattaatatgga

SEQ ID NO: 289447 - DNA, 364 bp, Zea mays
actaggtgagcagcttgatcttctccagagggaactacaagcaagggagctctcgcaaatgcaacttaaagatgaagttataagaatcgagaccgacatcatggatgcagttgccaaagctgggtctaggtctgacaaagacaatgagcttttaaagatcttatctgacgtttcaccaaggaatgtccagaacctcaacagccttttgaatgctaaggatacagaaattgcgaggttgagagaggaaatcagaatattgtctgctcactggacgaacaaaaccaaggaacttgaatcacagtttcaaaagcagcgaagaactgatcaggagctgaagaagagggtcctgaagcttgaattttgc

SEQ ID NO: 289448 - DNA, 597 bp, Zea mays
tcctatcatcacaaaactcatgatgctccggctgctcagttccctcctccttgtggccgttgcctcaggctatggcccaccttcctctcgcccttccagccgcgttgtcaatggtgaggatgcggtcccctacagctggccctggcaggtttccctgcagtatgagaaaagtggaagcttctaccacacgtgtggcggtagcctcatcgcccccgattgggttgtgactgccggccactgcatctcgagggatctgacctaccaggtggtgttgggtgagtacaaccttgctgtgaaggagggccccgagcaggtgatccccatcaactctgaggagctgtttgtgcatccactctggaaccgctcgtgtgtggcctgtggcaatgacatcgccctcatcaagctctcacgcagcgcccagctgggagatgccgtccagctcgcctcactccctcccgctggtgacatccttcccaacaagacaccctgctacatcaccggctggggccgtctctataccaatgggccactcccagacaagctgcagcaggcccggctgcccgtggtgactataagcatggcggcaggtggaactgg

SEQ ID NO: 289449 - DNA, 313 bp, Zea mays
actccctctccctcacacacatctcttgcctctcccatttcaaatctttggagaggaatctttgagtgagcttgagagctgcggtttttgtgctccatctccaaatccctcttgctcttcttcattcgagctttggtactacatcgagttctttgtggattcattactcttggagcttctagctcctagacgactaggtgtctcttgtgagtccccaaatcttgtggaagaccacaagaaagtttgtattacccgctcgtttgagcaaaccttagtgtgtgtgcttgacctttgtggtcggcaaatggaggat

SEQ ID NO: 289450 - DNA, 475 bp, Zea mays
ggagaggcaacaggaattagaggaagaagaaaggataaggcaactgaggaggaccgagctggttcctaaagctcaacccatgccatactttgaccgccccttcattcccaaaaggtcgactaaaccggctacagttcccatggaaccgaaattccacctcaggccagaaaagatatcctgttactgtcgacagcaatgtatggagcttggaaagctgaatccacaacagcagtgccaacatccactatggcaatcgagaagtacagagcatcaacacacatgatccaaaaaatgtttccatccctgtcttcgtcattcttgattcgtcgtcttccatatgtgaagaaattgctatcaggcgtgtttttcagctttgctcggatcgcctggcctctaatttctgttatgtacatgcatatgcaaatcgttggctctgtgcttcagatgcaatcccaccaaggttggaattttgctg

SEQ ID NO: 289451 - DNA, 430 bp, Zea mays
gggaagagttcaaggcaatagagcaagcaaaatcagatccgaatgattggaggacaccaaacatgaggtagtatttggagaactatcgctggaatatttagttagtatttttggaaaggatttaaagagaattacttggaaaatatttgtatgacattttgataagaattttagagagaatatagagcactatattttctttgttgaagtcaattcgcatacaaatattttaaaacgaaattctacaatttttcttgaactcgttctaaattcaaaataaattttaaaatttcgttttaaaatatttgtatgcgaattgatttcaacaaagaaaatatagtgctctatattctctctaaaattcttatcaaaatgtcatacaaatattttccaagtaattctctttaaatcctatccaaaaatactaact

SEQ ID NO: 289452 - DNA, 284 bp, Zea mays
caaacataagcatcctcagtatgcaatacctgcacatatccgtgagctgcttgaaagtagacagacacctgatgtcctatatgatgagttgagcatgataaactatgcagaatatttcagcactcttatagtcatggaagaactccatttggaggaggatatgagagcatatgacatggagggtgtcttaatgagaaggacgggtatgcactttttgtctcttgaagtccctggtttggcagacagaaggccatcactagtccaaggagacttcatattcgcta

SEQ ID NO: 289453 - DNA, 275 bp, Zea mays
atcagttctgttcctcttgctgtcaatcccatcactcgttgtgtaccggacatatggaagcatatccatgcaccacaacattgctctcatgtttctctctggttactttgtgaatggtccatactctctgatcaccacagctgttgcaactgatcttggcacccaagacgctatcaagggaaattcacgggcgctggcgacggtttctgcgataattgacggcactggttctgttggtgcagctctgggtcccttgcttacgggttacatctcaa

SEQ ID NO: 289454 - DNA, 285 bp, Zea mays
tgtacggatcaagtatcaaggtcttcatcatggatccagctacttggagcacctcaatttcttgtctgctataagggctcaaggtgcatccggaccatctgtgaacttaagtgacggcctactatctgttgccgtcggtgtggctgggcaattatcaatcgagcagggccggtttgtaaccatggaagaggtcttaggtttgtagcctggtgataattcaggcatcctaatgtactgtaaaaccttttgtgtattattaggtatatgttcttaataatgctgcgg

SEQ ID NO: 289455 - DNA, 289 bp, Zea mays
caacacgatccaaagaacgacgcgggggagcgagcgataaagccagaacaagaggagcgatccagaggagaagacgaaagagtcaggggagctgctaaggaccgatggccgaccccagctattggatagggatggacatcgaaacctccgtcacgatgctcgtcatcggtctcgccaccgccgtcgtgagcgtgtgcctcttcttcattttcatgtgcatcgtgcaatggtggtactcgccacggatgcgcgtcttcaggctcggcggcgtcaccaccctgaggcagaa

SEQ ID NO: 289456 - DNA, 479 bp, Zea mays
ggccgcagagatggtcatggaccagttcatcatcagcgtggccatcagccaacatacattaggactcctactctggctgttgtagcaggagcacctcccccaccgcctccatttgttagccctgctactcctcaggcaccaccttatggcacacctatgggcttccctgacatggcaccacaagtttactattacgctgcacccacctcggagggcattcaaggcctgccttttatgcctcatccagcaagcccccaagctgttttaattgatccttttagaaagggtcttctggaccagatagaatactatttcagtgatgccaatttgtgcaaggacctatacttgcggcaacgcatggatgaccaaggttgggtgccattacccctgattgctgggtttccccaggtccagaagattactaacaatattcagtttatcttggaaacagtcatgctatctaacgttgtggaagtgca

SEQ ID NO: 289457 - DNA, 331 bp, Zea mays
ggtacatcgccctgacactccatccttgcacaaacgcaactacgagagagaaggacaaggaaaaaaacaggggacaagatcgagtgagaaagaggagatatggcgtccataataacaggagatttcgcggaggcctacgtacggaagaacgcctgcgaagaggagacgaggaaggcagaagcaagcaccgccggcggggtggcggcggcggcgacaccaggagacaagaaggccgacgctagtgcatcatccgagaagaaagtggccaaagaggctgcagctggtagcaacaagggagaaggaggcagtctcttcgggctgctgaagaaga

SEQ ID NO: 289458 - DNA, 282 bp, Zea mays
gtcggccgtcgtccctgcaggagcctcttccatggcgcctagtcttctccccatggccagctcgtccagccactcgcctccactacatgtgctgtttcccccctcctccccttttctcaagtttggtcctcggcacccaagcttttgtgtccctgcagcacgtcgtgcctgtgcagccccggcagtggccccgtccatcccgttcggagcgctctgggtgttcgatggaatggttgtatggagctttgtgttgtgtgcagccccatctgcgacaccgtcgaa

SEQ ID NO: 289459 - DNA, 285 bp, Zea mays
agtagaattcacagtttaacaagtagaattcacagtttaattttgtctcaatacataaaatagtgttatattatatctgataataaagataatgttgattttgcggaaataacgaatgcccagcgtgtcgcacccattgtgcaagcagacgttctttgagggatgatcccaattatgatgcactgattgcagccctatatccagatattgataagtatgaggaagaggaatttgctttcagtgagtaggagaggattcagcaataaaaggtggactcatctgctt

SEQ ID NO: 289460 - DNA, 263 bp, Zea mays
gccgaactggcccgatgtcgctggttgcctacgatgcctcctccgatgaggaagacgccggcgagcctgccgccgccgcggcgccacaccctgcccccatcggtccgcagccaaggcctccgtctcctacggcagtgagccctgctcctcggcctacgcctacgcttacgccgccgccgccagcagccagccagagtgtagcaccaattagttcgagtgatgtctctctgaccacatcatcattagatctcccagatgttgca

SEQ ID NO: 289461 - DNA, 473 bp, Zea mays
cagattgtgaaagtgagatgtcggtgcaaactgatcttcctatgcatgttcacatactgacaaacaagatgtgctaaaatgtgagtctcttatggtagttcttgtttgtcagtatgtgtacatgcataggaatatcagattgtgaaagtgagatgtcggtgcaaactgaaatgataaagacattgtggacatgactgtggacatgactgtgatgcaactatttggattcctagttgattctgtggttggtactttccatacacagaattttactgaaaatttatcaagaaagcaaccaaccttttatgaacctagtggcaaagttttctcagaggaagagatgttatcagaacatagatatcatcttggggacggattggatgacccaataccaagtcttactagatatagctgctagggctctggaaatccattccccaacctttggaaaccttaattgtacttacctagcc

SEQ ID NO: 289462 - DNA, 394 bp, Zea mays
  unsure (1)..(394): unsure at all n locations
gccgcacgaccgcgacgtgtgaccanctctgctccaggctgtgggatnccgccaacgacgnnnanntcgcccttcgcggccagcgccggaacgacggggaacaagcgccgccgctccaacccgcgtggcacgccgctccctcccccagacgcgtctggggacagcaactcccatgactacaatgggctcagctcctctgctcccggtttgtttccggatggttccaacggcgaggttacgttttaccttgagcaagaaagcgggcagctgggcaatcatgaaggcgctgctcttgtagcagatagcaaattcgatgttgttgtgcaggagcagcctgaggccgtggttactctcccgaatgggaacaacggaattggcagtgagatgagtgcgg

SEQ ID NO: 289463 - DNA, 293 bp, Zea mays
ctaaagaggatccttcacaccatactcgaataaaaaagtggcttcaaaagcttaaggcagaagatgtcctcttgcgtgggttaacatggagcaggcttttggaccctgataagaaagggcagtggtggttgtctggggatgttccatctacagtagctaagattgaagatgttgcagctgttataagcaaggatgttgcagagacaaaaaaacttcttcagcttgcagctgctcaacggatgaacactgacatacgaagagcaatcttttgtattataatgagtgctgaagac

SEQ ID NO: 289464 - DNA, 288 bp, Zea mays
caaataccccgaacgtccacagcgagcgagaggccgcaaactcccgagaccgtacgaaccagacgattcaccaatcaccatggcggcgccggcgcggcgcaggtcctgcatctcctccggtggagccggagcgcctccttccgctgctgcttcgcctcttctccgccctccgccgcccgctgcgaagccggtccaaggccatgctcaaggggatggactactgactactccgaacccgcgataaggacatgccgcaagacatgtgtgtgtttcaagtagttcgttgat

SEQ ID NO: 289465 - DNA, 380 bp, Zea mays
cgcaggataagcacttcttacaggggacaaattaaatggttggatcgattactagcactcactgaaagcaactgttgttggatataatccattacttgtttgcaatgggaaagaaacaagaaagctcgatgtgccatttcaacatatttttgcaaaatatgaagtgaatgcatacataagcatgggtgggtcttgtggttacttccaccgagacaactcgatactgtacattggacaccccagtagccctggtggtgcccaaacaagtgtagatggttttttcttgcacagagttagacccctcgagatggagtcaatgttgataaatgtagaaggcaagctagttcagagatctgttgttcagcagcatggaacgggag

SEQ ID NO: 289466 - DNA, 321 bp, Zea mays
ggagcatggtgttatcccagcgcctaataggaatgcaaacacttctctggattatgtcttccagagccaagtcaagggaaagattcccatggttaagcctaagtttctgatacccaaccaactagagcatggaaacataaaatttcatcagagacgtgtgacatgcttggagtttcatccaactaagaacagtgttcttttatcaggagacaagaaaggacttctgggtatctgggattatgttaagttgcatgagcaaatcacttatgattctgtgcactcctgcattctgaatagcatgaagtaagagtattccttgat

SEQ ID NO: 289467 - DNA, 367 bp, Zea mays
aacaaatcccccgcacgcctccgcagccgacgatgaccaccgccgcggacgccgacgtcgacgactaccaccactccgacggattcgtcatgtccgacgtcctcgccaagggccgggaggctgactacaaggcacgggatgccttctacgcgtgcatagagaagcacgcggacaaaaagcccaccgagatcgccaccatgggcctcctctaccccgccgactgcaaaaagtcccgcgccgacttcgtcagcaactgccgccccacctgggtcaagcacttcgaccggcagtactccgccaagaagcgggtgcagaggttgctcgacggcgatggggaccgccggggccccatgtcgctgccccagcc

SEQ ID NO: 289468 - DNA, 466 bp, Zea mays
gaatattgcttcataatttgctgtcatctttgagccggtcaacgggaaaacatgctggtgctctagaaatggtcagatctggtgtttgggggaagttaatccgctattcggaagacatgcagctagagagccaattacgagtctatgcactacagctgatgcaatgtatcacaggaagaaaccttaaatctcttccaaatgaaatggtgtgtcaggttgagccatgggaatcatggtatgagcatggagcgggtgctgccatagctgatgagagtatcaactcctctagcagcatcacagggactcttgtcgcacttagatctactcagatggtcgctgcagttctgcctgacgctaatatcagtccagaaaacctagcaactcttgactctgcagtatcttgttttttaaaattgtcagaacgtgcttctggtgtgagcgttgctgtttttgaagcagtgctaga

SEQ ID NO: 289469 - DNA, 164 bp, Zea mays
acaccatcctcggcatgaaggaggaagagcgactactggagctcgtgaaggatgagcaggctgatggaatcttggattcattaccaattgacctggaggccaagaatggcgatgcatcactcattactgaagcgatgaaaaaggaggaggagcagcttgaagac

SEQ ID NO: 289470 - DNA, 288 bp, Zea mays
ttgcatgtactactactatctatagctagcttccaacaagatctgcgcttcagacttcttggaggtctacttgggtgacatttttcagtaaggtccatgagagaactgtgtagcttgtggactaggtagaggacagcaacatcgacagtccagcaaatgacatcaaggtatgtcgaggaagattggagctttcaagtcgataggtacaagtcacaagccacagtccgagaatctgaaaagcttaagctaattgttggtacgtagggagataccccgctcttgcttctc

SEQ ID NO: 289471 - DNA, 350 bp, Zea mays
ccattttcctggatcatcactgaagcaaacaagctatacgatctagtgtactagctctgtcgattagattcttaatagtttctgtgcttgttattgtttgtgctggaatatcttctgttgaagcagtgtttgatatcttgatgtttctagttcgcggtaactgctgaaaggctatctgtgagaaaatgctctcatttatgtttgcttgttactagaccagaataaccgtattgatgagtttcagcattatttgccaatcaattattttgatatgttatcatatttttggatgttgttatgaaggtaaaggactcaactaaaagaataccaccaaagcataattgagaatt

SEQ ID NO: 289472 - DNA, 308 bp, Zea mays
catctgcatagtcttcacaaacagaaactaaatcatcacatcgtggtccacaacaatcacatatatctaatacatctatagaagggtcggctgatacctctcaagcaagtgtagcttcagatagcacagatggcaggccagtgaagtacaagctggtagccgatttgctatggcggttgagcaaaaaaatttatacagatgaagaagcacttctcacagagatagaagaaccaacaagctaccgtgaagcctcaatactatcggaagaacagttaagctgatatccttatcaaagtcattaccagcag

SEQ ID NO: 289473 - DNA, 284 bp, Zea mays
tgggaaaactggaggaagttattcttataacaagcatccttattgttgcctttttcacaacattgacaaagctacatccgaagatgaagccgtatgagtatggattccgtgtgttcttgttgacattctgttacgttatggtctctgggtacaacactgggaaattcactgatacagctacaagcagatttatattgattgctattggtgctgctgtcagtcttggaatcaatgtaggcatctacccaatactgggcgggagaggatttgcataacttgatagg

SEQ ID NO: 289474 - DNA, 285 bp, Zea mays
gagacatctcgttttggaaatgcatttcatctgtgtcgtgagattttacgacttacgaagttggctattgatgctaacatccagttccgtctgggaaatgtggatgccttccagttggctgatggtctgcactatatattttctcatgttggacagttaactggtatgtataggtacaagtaccgattgacgaggcggtcgatggggagggcgacggtgacgaggacgacgatggggaaggcggtgacgaggaggatgatgatgaggaggtggatggtgatgaga

SEQ ID NO: 289475 - DNA, 484 bp, Zea mays
caatggtcccatagtccaagaaatgcatcactctctcaaagtaaaggatactatagtgaaagacatcgagatggtcgcttacacaacaatatgcccaagttttcgaaaggatctccacaagctcatgccaactttggagcaaaaggccgtccagcccaatcaaaatctccacgccatacctcttatcttgatgaattacctagaacacatggcgagaataaccaatttgctgcatcacgagtgcccaatgactggggaattgagaggcatggagcagatgccagttcaagtcttaggtttgacatgccatcccaccaacagaccttggaagaacttgagatggagtttaaaaaagaagctacacaattagctagagctccgtgaccaagaggaggatgcaagagaactataggcatcgagagtccctgagagtgattagagaacattacatggagagagtgattaccttgaggactgtgcatgc

SEQ ID NO: 289476 - DNA, 395 bp, Zea mays
gtgatgtagaagtacaagaaccagtgactgttggaactgaaaagctatctgatatcaattcaaagaaagatcacaagcttggttcttccaccggatctgagatgactgaacaacccaaggttgttaaagacaatgagagtctagtagcatctgagttatccccagagacaaatgatggtgataaaaagcagctaacagagtctggcaatataactgctgacgaatcatcaaaaccaatcgatactaaacctgcttctgttaaaccaaagaggggccgacctccagcagcaaagtctcaggagaaaaagcctgttggaaagaaacaggcatcaaacctaaaatctccaaaacttgatcctgtcactgattctgtagggagagctaccaggcaactg

SEQ ID NO: 289477 - DNA, 433 bp, Zea mays
cgatgtcgaagcgaggacgtggtgggtcctctggtgcgaaattccggatttccttgggtcttccggtaggagctgtaatcaattgtgctgacaacacaggagccaaaaacctgtatatcatctccgtgaaagggatcaagggacggctgaacagacttcccgctgctggtgtgggtgacatggtgatggccacagtcaagaaaggcaaaccagagctcagaaaaaaggtacatccagcagtggtcattcgacaacgaaagtcataccgtagaaaagatggcgtgtttctttattttgatgataatgcaggagtcatagtgaacaatataggcgagatgaaaggtctgccatacgagaccagtagcaaggagtgtgcagacttgtggccctgattgcatccaatgctgcacattgcatgatctccagatatttg

SEQ ID NO: 289478 - DNA, 445 bp, Zea mays
  unsure (1)..(445): unsure at all n locations
agagggaggctgcccattattaaccctccctccccacacgcagaagacgacgaccggaagcaaaacagccagccaaccaaccaaccagaccagggatggatggtgcgcaaccgagccaatgatctgcaagaagagaggtaggatttaggcacggcacctatagcccctgacgagagagagggagagagatttggtcttggataagagtggagagactggagacgggtgggtggagtgagagaagtcactcggggagcctccagattctgaatctcccgcaacccgtctcatcgccggagtggagttccaggcgagtgattatcgagccagtaagccatttgcaagcactgaactgaaccctcagagcgttgttgcgatggaccaatcgctacccccgacgaaacagcacatgcctctgcactatncagtcataagctgtttgatg

SEQ ID NO: 289479 - DNA, 426 bp, Zea mays
gaaagagaagaagaaaaagaggaaggtggaggttgttgatgaagggaacaccaccgataagagtactgatgctcctgtagatgatcagcagatcggtgatggtgctgatggcattacatttgatgagacattaaagtccaatcttcagaagcagtttgagatggctgcagcagaagctggtatggtcaaagggggcagcagctcaagcgcttcaccagtgacaccagtcagtgggaaagtggcaacaaagaggaagcgctcaaagtctgccgataagctgtctgaagcttctgatgggggtgatggcagcgaaggtaatcttcttgcccaggatggagataagagtggtaagaaggtgaggttctcgatgaagaataatttagtttggaaacctcacaatcctttgccaccgcagtgtttgaggct

SEQ ID NO: 289480 - DNA, 122 bp, Zea mays
tgaattccacaattgtggtctagcgaggaagtgcctttgcttggtaacttgttcgcgccatactcctggggctgtatcatcgccagaccatgcgacgcttacttatttcctttggttctctg

SEQ ID NO: 289481 - DNA, 288 bp, Zea mays
gttgctgtagatggactactggaggatgcacaagacgaatgtacgatctctaatcttgaattctattctttgttcctactctatacatcctgggatacatccttttctttttcttttgaaagaagtcgttgagtagttttttttacagaaaagtttttccagcttcgggtcattaacagtcatttgtgattggttacagggaaagatgctggaggacgaacacaagatactgacttttaggatggtaattctcccccatctgaatagcagttgagactttgcttgatc

SEQ ID NO: 289482 - DNA, 500 bp, Zea mays
gggatataagactccttagatgcaccgaataaatgtctatgtagtttctattctgtttcatgggaccttgttgtaactcgtgaactttgattgagcacctattcggatttagtagcacgttcagaaaatcattcgctgcttatcttttttcacacttccgagttagttattttgtgtgtttttttactttgtgttcaactaagtttccttctaattttgattctttaatgcaatttattataattgaggtgtacatttgtccatcaatgtaaatatgtgaaagattctttggcactgtaatccaggcacagggaactgactgcctttgctgactgaagtttttgtacagttgttactagtgttttgcttgtcaagttcctaatcaagcttgaatcatttacggtctgttctcatatagctcaactctatctgtttcttaactcttttttacaggttatgtttctaacgcttaatgttttcctcatgttcttttttgtctt

SEQ ID NO: 289483 - DNA, 290 bp, Zea mays
cccattagtgacaccaaccagtactaaacttttgaaccttttagtattggatggtggcaaaacccagtggaggagggtgaaagaaccttaaaattctaattcttaaaataaggcctctcattttttctagtcaaaacacatgcaagaaagtaatctatttagatgtgcaactatggttgttaggtgtgtttctatctctaccataaaagagttatgcaacttacattccaaatctatgctagcctagcaagctaaactaggaaataagaacacaacctagttaaacaata

SEQ ID NO: 289484 - DNA, 297 bp, Zea mays
  unsure (1)..(297): unsure at all n locations
caataatatataacttatattatcatataaaggaacatattagcttttacttccatacaagcttaagagtttcttcaacagatccatttcatgggtgaacctgcatcctggtctcaaaggaatggacctttgatttggccagtttggggctgtattgctgtaatttacaaagagcaatcctaaagaaaacatataaacatgagggatcagacatcggtataatcggtttctactgtagtaaaaaaatacaggctgctagttgctacaccgcaagcatatattgtgncaaaggttgct

SEQ ID NO: 289485 - DNA, 302 bp, Zea mays
cggattcggctcgagtgccgcgacatcgacaaagttgatctagatctagaggttctcggtgatgaagtcggtggggaaggcggagttggcatggatgcttccaacatcggaggccatgaggaccacatagcgcgggcgctcggcgtcggcggtgaagaaggcctcaaagttagcctggcgggtgaggtcaagcttggcgtgggtgtgggcctcgacgcaggtgaagacaagcatgaggaggcgacacacgatggtttaaccgacaagatcgttgcgcccgacgacgagaaccttgcgtcttg

SEQ ID NO: 289486 - DNA, 309 bp, Zea mays
gctcgagagcgctgcgtgagaagccatgagcagcaaagtctctcgcgacaccctgtacgaggcggtgcgggaagtcctgcacgggaaccagcgcaactccgcaagttcctggagacggtggagttgcagatcagcttgaagaactatgatccccagaaggacaagcgcttctcgggcaccgtcaggcttaagtccactccccgccctaagttctctgtgtgtgtcctgggggaccagcagcactgtgacgaggctaaggccgtggatatcccccacatggacatcgaggcgctgaaaaaactcaacaag

SEQ ID NO: 289487 - DNA, 291 bp, Zea mays
agacggaaggagagcttgaaaataatgaccgaaacagccaacaaaaggaagcagattgatcaagttgtccactacttagaggaaagactgagagaactcgatgaagagaaagaagaactaaacaagtaccagcagctggacaaacagagaagatcacttgagtatactatattggaccatgagcttaatgacgcaaggaatgaattagcttcggttatcatccatcgcggctcgagctcgagccgaaaaaaaaaaaaaaaaaaaaagggggggcccccaaataatgggccc

SEQ ID NO: 289488 - DNA, 285 bp, Zea mays
attcttccttcctccctctagatctcgccttcacaacaacgacgaacagcgggtacgtacttggagatccaagaagctaagaaatgtcagcccagtttgcatccgagcatgcttgctatgtcaactgcaactattgcaacactatcctggtggtgaatgtgccaagcagttgttcctacaacgtggtgactgttaaatgtgggcattgtacaatggtgctgtccatggatctcagtcccttccatcagcaggcacgcactgtcccagacaaccaggttgtccaga

SEQ ID NO: 289489 - DNA, 201 bp, Zea mays
aaggtgccccggatctatctgctcgttagactctaacaggtatcgacaccggagttgccttttgattgagcaaccgtcctgcggagtaaattgttgcccatttttccccgctgcccccaactgggcagctcgattgtggttgacagagttgtaaagatcatcaatttactgatatgatatgataagaaggagcactttcac

SEQ ID NO: 289490 - DNA, 287 bp, Zea mays
gtgttttgagacaataaacagcacattgtcccaactcgtagtgtcatcctctcgatgagagtaagagtctcgttgcttacacatatgagggtttttatctgtcttaagcgaagtacattctggatcttcttgatcgggcctctcttactgatagcggacagttgaggctcctatggaactcactattcatctatgtgccacggctggtgagcctcttgaagaccctaatcattattgtcacattgttgggcctcttgtttacgttggtgtgactcgtcctgatatct

SEQ ID NO: 289491 - DNA, 360 bp, Zea mays
ctaatctgttgggaaccttaatttttgctggcctgctgtttatatcaactccacaagaccagaccgaatcatggttcagccatcttttcaaaatacccctccttgtggtgtctctaatataccagctctattagggtcttgaactgaaggatgctgccacgagatattgttatttcaaccctgttgatacttaagctattcggttcaatggtgcaaggactacactctaatacgattttgcatcgtccgatacatatatttatggtagagcgccctagcttccttgttctagtgttttttaagggtcgtgctggttttgccaccagtccattattggctgatgagatagcaaatgtccga

SEQ ID NO: 289492 - DNA, 322 bp, Zea mays
gaatatgttcaaaaaatcacgtgatgaaaatgctcgaaacgctgaggctgagaaaaagaaactggaaaaggaaaaagaaaaggcaagtgtgtctgctaaataaggtttggaatgagactgctgctctgccaaagttgcatctttgtgaagctgtcgtgctggactgacaaagaggacctgcagtataatttgcggcagtgcagaacctcctttgaaacaccttctgtacgtacagagatgctgtgccaggagtctcgctatctggttgccatccattaaatggtttcctttgcgaattccaaggtctaggagctttcgtgct

SEQ ID NO: 289493 - DNA, 278 bp, Zea mays
cggctcgagaatggattgtattcaagttgttcttctctgttgatgaatacattttaccaaatattcattaaaataaattatacaagtaataataaagattcaaatatattatgctatttttgatattatcataacaaataatgccgtagagtctaacatatggaccccacatctttgaattgttgtccattttcaattttgaaatgatgacatctgaaatgtgatatatgatttaatatctctactatatttaaatcaccagttccaacggtcgtcca

SEQ ID NO: 289494 - DNA, 299 bp, Zea mays
gctgtgaatagttattttctttgcactcatctttgttggctttcatgaggctctaaaagtgagagttggagaaatacaaatcggtggacacgcatgaccaaacattcatagccgtggctataattttttcttcagacatggcgcttaatattgtctacgtgtagtctacctatatgtgagcagatttggcctctaggagcgagcacgtgtgtttgcatatggcatgcatcgtgtgggttattagagtgaactcgaaccacgtccatcggagttgcacatcatgtgagttggcagagtgt

SEQ ID NO: 289495 - DNA, 311 bp, Zea mays
gtctctctctctcccctccgtgtgtccctccccctctcggagtctcggtcgtggcgacgacgactgggcaggccgacgagcacccaccaggaaaagtattgctacctagcctcctacagctagttctttgtatgattaagctccaatgaaggattctacaggatattcagagcacaacagagttgcagtcatcagccaccgggtactaatgacgtgcaaagtcagcaaccaaacccgatgaaccactgatgctcctgcaggaaattcgggctccttgtctatagctcataatgcacgttagcaggtgtctc

SEQ ID NO: 289496 - DNA, 283 bp, Zea mays
caatcgaggatggagtacgagcttgctgggccagaaatgtctctctttgaaccattgggcagagcggaagggaagcgatgaaggatggatccattacgaaccctgctgatcgtcatgccattggatgacacaaccaaacatcgtttgccagaaggtcgggcaaaaacatgccagtccgtggcgaggtggggcggggcatcgaccatccactcggggagcataacctggcgcgcgaaccaccgacgcgcttcggagccgcggacctgaagtcggcggcggcccg

SEQ ID NO: 289497 - DNA, 301 bp, Zea mays
caacaacctagaggtcgaggatgagtggcaggacgggacgaagttcgatgcagtggccaccttcaagatcctcggcgaggttgacattgctcaccttaattagactttagaaacccagtcagctgcttctgcgttggtggtgctgagttcgtgcattttagagtgtttgctgctactgttagtgatactgctcccctttttggttgttaccacgagctcagatttcataagctaatcgtcgttgttagtgaaactgctcattatgatcctcattgttctgtaaattttcaagtttaaacaa

SEQ ID NO: 289498 - DNA, 294 bp, Zea mays
gcatcttattattgggatggttaatgaaaacaacatcatggacattgctggtatcctgatcagtcatgttccaaagtcagacccagagttcgcaagtgaccttcttggggctgttctagcagcatgtgggcataatgtgtatgagatggtggtggattttgattggtatgtttcactccttgtggatatggcaagaactctgcattgtgcccagggggatgagattggtcggcagtttgttgatttaggactgagagtgcaggatgcgcggccagagcttgtccgtttagctcg

SEQ ID NO: 289499 - DNA, 294 bp, Zea mays
gtctgacaatccgagtgctagaatgttctcgtaggactatgaagccaatgcaacaggacaacgctgaggactgcatccttcgcagcaattgctgaccttaaagacccgtatcgacatattcttgtcagcaagattggtgatatttgatatataattaaagtaagtctgacgtagctcattcgatggtaagtctagtctctgccataacatgaaagatccactaaccaatcgatttgatggacttgatcctcctcttaacgtagagacatgcatgtattcctacaatatattagt

SEQ ID NO: 289500 - DNA, 341 bp, Zea mays
gcttcaagaaggtggacggtcggagggacgggctacatgggtggctgcttctggtagcttcggtcgcccgccgcgccgccgccaggtgagtggaaggtagggggaagcaaggtaccagagggtgtgatgtggatgtagaggattggatgctataatggcgcaagctgctgtcgagcccgctttgaatggtggctctttgattgggaggcagccggtggttccaaggatgaagaggaagacaccgtctgaactgaggggtgagcaactgaagcggcgtacctctgaaaagcttggagatgatctgttaccttctgccacattggataggtcaaacatggact

SEQ ID NO: 289501 - DNA, 286 bp, Zea mays
tatacgtacagttaatagcagctagctgttggtgtggattgctatgcgttagtagcctatagtaggtaaaaggaggcactcactcatctcactataggctactatacgtacagttaatagcagctagctgttggtgtggattgctatgcgttagtacttgttaaaagaaaaataaaaaaaaggggggcccgccgcatagagggcccatcaccccgggattaattccgggccgggaacatggaggcgtacctcgcttcccaatggtggacctttttaaagtttgggt

SEQ ID NO: 289502 - DNA, 366 bp, Zea mays
ctaagcggcccccaatttctactgtaagcagcaatggcgctctcctgttgcttgctcgccggcgcccgggcggcagcctccccttccttctcatcctccgctgccatccgccggcgggaccaccgtctgctgaccttgtccgtggttccgcttccgctctctcagcgatgtcgccacggcctccgcgtgtgctgcgcctcctccacctcttcctcatctccgccgccggcaactcccgaggagcccgacgactacgagttattggacacagctgggaattgtgaccctctatgctcggctgatgaagttagctcacaatactttgaagctaactacaaaccaaaaaatgaccttctaaaagcttta

SEQ ID NO: 289503 - DNA, 285 bp, Zea mays
ctcggttgctgagaagtataaaaagagtccatacaggcaagtgtcagcttagctaattacagaccttacgaaaatgtgtctgcttcgtcactttcaaaagaaaggaaaaaggtcaagagtttaaccgatacagtagtttcctttagtgccatgaaaaaggaacagtaatattggcattcaacagtaacaggtgtgtattttaaatgctaacatatagaggtataacaagatgcagggtaaccttgcgtgaacaaatatttaggttgatattaaaaccataaactt

SEQ ID NO: 289504 - DNA, 354 bp, Zea mays
cgatctcttctctctctctcgtctcccacatctccagcccttcgccctcttctcggcccgaccttgacggtgttccaccatctcctaccctcttcttttcccgcccgcgccatccctttctccgctgtagccactgcaagccccgcgcgacgcacacggcagtggtccacgtcgaccaaatcgtccacagcatcgcgttctcctcggcgagggtctgtagcctgccggcgaggagctcgcagcgaagatccgtgcaagccaccctccagatcgtcacagtagcagccagacaacaaccatgagtcttgcttgtcatgtatgccatggcatgagcagccctcgcactctcttaga

SEQ ID NO: 289505 - DNA, 284 bp, Zea mays
gcaaagtcaaggtttcaatctatgctgtccacaaaataagataaaattagatatataattggtcatagttccctcacgaccaactgaagtgccttatctatacccctatatatctcaccacttcaaaaattgcaaaagccaaccaatcaaatgtccaccatagtctacacctcttctaaatgcacccagatcaatcccaccgttataaccaatgaacaagatcaactcaaacctttcatttctcttactcactcaaatccaacgatcaatctttagatcatccc

SEQ ID NO: 289506 - DNA, 234 bp, Zea mays
agccacaccagcagcttcttcgagtcccgccgtcctagccagaacaacgaccgcgcgccgctgacggacgatgggggcacgctctgcagtgcacagccccgggttgcgcacgaacgagctctggttgaacaccaggaactagcagtgcatcggcactgtcagtactcgcagaggtcggcaggtatggcgcaatacagatccatgcgcagcttgaagaagagcgacatctcggtg

SEQ ID NO: 289507 - DNA, 221 bp, Zea mays
gatgcactgtcgagcgagacgcctcgtggggatatttgcatcagaggggacaccttgttctcgggatgctacaagcgagaggacctaaccaaagaagtcttggtcgatggctggttccacacaggagacattcgtgagtggcagtctgacggaagcatgaagatcattgaccgcaagaagaacatcttcaagctctcacagggagagtacgttgcggttga

SEQ ID NO: 289508 - DNA, 276 bp, Zea mays
aaactaccaaagagctaataggcggcagatggagcttcaaacgcaagctctcggctcgcagtacacacagcatgaccattacaatgcgtcaccgagcacgtcatatggaagccaaccgctgacactggaagacttgtctcggcgtcatttccagcgagacttgcgcaggcctttacgccctcaccctcgtgtcggtgtgctcggttcattgctgcagcaggagatcgcaaactggtctgggaactgcgggccgcattctgggtacagactaggtga

SEQ ID NO: 289509 - DNA, 288 bp, Zea mays
acttgatgcagagatgttgggaagctactccgactgatcgcccttcatttgaggagatcattcctgaactagaggatatccaggcacaagcacagagaacatcaggggaaacgagccagacagaggaggaccactcatgcagtaaagattgattgaccccctctgtacatacatgttgacaattctctcatctgatcactaaaatgctgagaaagtagcatatcatcagttttgatgccatagaaaaaaagtagcgaatcattttgtcaagttttgtcagaacctttt

SEQ ID NO: 289510 - DNA, 287 bp, Zea mays
gcccttgcatacacatcttgaagattgagaaacacactccactcacttggaacatgtacttcatcacttaggtgagactagaacactcctagtgcatggtgtagtgttcatgcttcttgtggcactagttgagtgagttggaccgattctacacctattactcttgatgattgtcattacctagatggcccaatgattgtgggattgttgaaggttttggtgattcttgtcaactcagatctattcttgtgtggggttcttatgtctattctcgtgggagatctaag

SEQ ID NO: 289511 - DNA, 296 bp, Zea mays
cgacaggaagctgctgcagctgttatggccaggcttgctgtttacagggcagagacataccatgttagagatgttatacgatggcttgacaagatgcttattcgctttactgctaagttcggaaactatgttcctgaagatccatctacatttcggctgtcaacaaacttctccttgtatccgcagttcatgtactacttgcggagatcacagttcattgatgttttcaacagctctcccgatgaaactgctttcttcaggttgatgctgaatagggagggagttgtggggtctct

SEQ ID NO: 289512 - DNA, 284 bp, Zea mays
ttgtaatcatttgttaagtaattatggtgtggagaaggcagtatctcataaggttagattatgtgtcttgcctttacatttatgcacgatttatcttagatgttgtttacatttccttcactcatttcttacatcttcatacttttaaccaaccttatcttcgaagaggaggaactaaaggatgaagattaagcttgatctaattgtgttgccttgtttttgatatcctgaatgagatcagaaatgagtgaccagacattggcgccacatccagtgaactcaaa

SEQ ID NO: 289513 - DNA, 247 bp, Zea mays
cagggactgtacttctgatccttcacctatgggtgccttcgccagctgggtgccttccagtctgagcctgttccccccagcaggctcttcagctgctccaatccagctatggttcccaaatgacattgcccctgcctctcactcggacccatctttgctgctgtcgttcttgtccttctcaccactcctgaggaccaagtgtaagcactcccctccatacaggcccctgtgacctctttccacacaa

SEQ ID NO: 289514 - DNA, 348 bp, Zea mays
agccgcagccgcctcgccctctcggacggtcggaactcggtcgacgacgagacgacggtccctctcgcggttgtctcctagctgcctggcttgcaagcaacttgccagctgcccagctttgtctccagttccacttccacgcggctagctcctgcatgggtcctggcttgcaagcactagcagtagcaggtgcagccgtgcagtgcggtgtccgccgaccggtgaggcactgaggccgtgccgtactgcggaggactagtagcagctgtgcagctgtgcggctgtgtctccacgctcacatccacaggcccaacaaggcaacaaccaccacctcctccggcggcctct

SEQ ID NO: 289515 - DNA, 432 bp, Zea mays
gctatatagcacagcacctggaagcatgggatatctctgagaacacttcttcgtagaagtgagaatattcagggtccatgcctattgattgttggagatatgcaaggggctgtgtttggtggcttattgaacagtcctctgcggcccacagagaaaaggaaatatcagggaacaaaccagacgtttgtgttcacaacaatacatggtgaacctagacttttcagaccaactggtgcaaacagattctactatttgtgcttgaataatgctttagcatttggaggtggtggaagcttcgcattgtgtgttgatgaagatctgttacatggaagcagtggatcatgtgagacatttggaaactcatgtttggcatatagtccagagtttgaactaaagaatgtggagttatggggattcacacattcatggagc

SEQ ID NO: 289516 - DNA, 389 bp, Zea mays
tgacatggaggagtacctggagagcatgaaatctctccgctcctacatgaacgatctggaggacgacgccgcgaacgctcctgtcgaggagcagcagcagcgtacagccatcgacgctcacgacagcgatgtcgcgctagtgatggcgcaacccagcaggcgagcgagctggccgagcggctggccacaccgagggctaaggtaggcatgcagatggccgagaagcagggaaggattgccacgctggacatcgagtgcgccacactgaagcagaccttggagctcctccgtcaggaaactgcaagtacatttgtgaaactctgtgagaaaagattgttctacacaaagagaacagaaaccttgacgtcaactacaggagcaacaggaat

SEQ ID NO: 289517 - DNA, 330 bp, Zea mays
gcaagggttgcccaggggaaatattattacctccctaatgcttcagatgctgtaatttctgctgccaccaagaccgccctgacagacttgaagagctcatgattttgcagcagcggcacccgttttctgtaccttttgataggggtggtgaaccttcattcatgcagtagtttttgcgtaggcctctacaatgacagggggaaacaaacccgagcatggcatcgtgtaaagtgttaaggtccaatggcctcctgtccacgtttggcgatgtaaatcctccgtaacatagcttgaaccattgagtgtcacgtagtgccatggctagcagtt

SEQ ID NO: 289518 - DNA, 477 bp, Zea mays
  unsure (1)..(477): unsure at all n locations
cgcgcaccaccccctccatccgttccggatggtgccttcgaaatcccgtccggcgccctagcgtagctcgggctcggccaggctccgggcccgccgcgccgttacgcagtccagctccacctccagatcttttcttgagtttaaggaagatgcttgcgcttatttagaaggcccttattggtacgtcagcagtgttctttcctataggagtaaatgccattccgtagcatcgtgcgtgatgtaagggatggtttcgggagcttgtctaggacgggatttgaggtcaggtttctgagtcatcgcagagggccatctcatggtgctgtccatgagctgcacgacccagtgcttgtagcgcagagtagctgctgggctagcttgcctcctgaattacttcgagatgtgattgagaggttggagaccagtggggatacatggccttcangnaaacatgtagttgcttgtgcagctgtctgc

SEQ ID NO: 289519 - DNA, 287 bp, Zea mays
cctagcacgacagcacttccggcgaccaggtcccaggctcccagcgtccggcggtcccagccgtccagcacgacagtcgacagcacttcgggaccacggctccgcgcgttctgctgtgcaggttctagcgttctgctgtccacggctccgcgcgtccaggaggtgaccaccagaccaagcctccgctgtaccagacccgggggcaggggctgggtttacctggctcaaggcttaggtgctagcttgttggggtatacaaacaagtcacatttggggtccgttggaga

SEQ ID NO: 289520 - DNA, 294 bp, Zea mays
acacatacaactcacatagtgctaacagaacccgacgggattcaggttgacgacgtgacggcggaacccccttcgacccctgctccacggggagacctggagatgatgaccgaggacgagaaggagaaggccagattgtttgctgcctgatttgaggcgaactccacttctagtacgcggggtccggctgtggaggagatgacttcgaatgaatctgttagcagtaatagcatctcaaactttaaatggggtgcaccaataggcggtctcggacgcatttagaggacaaggaga

SEQ ID NO: 289521 - DNA, 528 bp, Zea mays
caaaggcaacatccacggcgtgcacgaagagctaaatttttccacagaaaccatcaaagaaaccacatatagtgatacttacagctccactcttcccatattccaaagcagtttggaatgcaacatccattgcatctggcatctcggtgttatctagaagaaaataagttagttagacacaagaatcaatacaaaaggtgttaataagatcagggttcctaaccatcacttttccgtaatacatgtgatatcttctctgcacgatcatatgccttcataaacccactttcaagccaagaaaaaatagaagccgtccgagtgaaatccaatccttgtactacattcataggtgagtggccactcttagcaaggaaatgttcttgacaagatctagagaatttttcaccatctgatgtatccatgagcaagctacatgcatcaagtgcctctttccagatagttaataatacaagttcaattgataacgcctccaggtacaggcctttagatagcttttcccgagcaagt

SEQ ID NO: 289522 - DNA, 478 bp, Zea mays
caagaggtcacaacctgctactacaaatgggaatggccctgcaaacaagaaagggagaggaggaatgcacaaccagcttgtgaacagagcttttgaaggactgtctcgtggtggtagaggcactggaagggggcgtggcaggggtcgccgaggacgaagagggtggggtggctaccgctgagatgacctggaaactctgttcaaacctgacatgggatgagctttctgcttccacttgagagtaaatgcaaaggtcgatatttatttgtgtgcctcagcgcaacaagtttaaattggaaggcacacaacagcagaatgcgtacagaaagagtaaaaaagaatgcttgagaaatgtccgcaagatctgtgcatctttcctattcatttgccatcaagccgtgttctatgccaccctccgtcgcttcacatgagttggctgtttgatgaaatgttggcaagatctgtgcatcatctttca

SEQ ID NO: 289523 - DNA, 348 bp, Zea mays
aggtagccgcccctcctctatccaccccttcacttgcttggtcttccactcacacctctctcgttattcacccggtctcctctcctgcaaagaggaagatgagctcgctacacgccacacgagcggagcttcagcctggttgtcctgtacctgaacaaagccgaggcccgggacaagatctgcagggcgatccagtacggctccaagttcgtaagcaacgggcagcctggcactgcgcaggaggtcgacagatcgaccaccttggctcgcaaagtcttccggctcctcaagtgggtcaatgatctgcatgctcttatcagcccgccggccaaagggactccgctcacc

SEQ ID NO: 289524 - DNA, 398 bp, Zea mays
cagaaaactcccaaaatactcttgtcccatattctgcctataactctcctgttcatactaagtcagacgattcattcgtcactattctcaccaacagtgaacttcactgtgctacaccacatacacccagctataaatacacccagctaccctctctctctccacacacactcaacaccctcggccaaggaaaacaccccacccactcagttactctgctctgccggctacacgcatagtgtcgcttcgcctccagtccaccctcctgttatcggagcgttcgtgccgtctcgtggaggccagatccgcaagtctacgctaggcggtggagccagaagccagttccgcgagctccccttccctcttcgccgaataagcacgaaaaaggagatcgggta

SEQ ID NO: 289525 - DNA, 290 bp, Zea mays
cgtgacgtatctaaattgtctatcagtactgacttttcacactcgggtatagaaactgtcggcacttgaagatgaacaaagcgaaattaccctcagaaaaagcccctagaaaaccaaacacccctaagacaactatcgattagctaggatcacgaggtgatgaatggtagaacggctcgatttatcgtgttgacgaggtggcttaccagctaggtaaacgagcagacgacccgggcggcctgttggccttatctggcttgtcatcgcgacaacgctgactttgttgttga

SEQ ID NO: 289526 - DNA, 329 bp, Zea mays
ctcgagccgcaattcgcttcgaacagggcagaggtgagacttgagagaaggaagaaggccatgtcgtcggcggcgcactgcagcagaaggcggcggcagcggagcaggaggaggtggagcacgggccattccccatcgagcagctccaggcttctggaatagctgcattggatgtgaagaagctgaaagattctggtctccacactgtggaggctgtggcttacactccaaggaaagatcttctgcagatccaagggataagtgaagctaaagctgacaagataattgaagcagcatccaagatagttccactgggatttacaagtgcc

SEQ ID NO: 289527 - DNA, 283 bp, Zea mays
gcagcgacggcgatgcggttgccatctgccgcctcggcgtcccgccttccctcgtccctctgctgacaaccccgcgcaaggacaagatgcatcccatcctcctccctcgcctgtcgggcatcttcttcatcagccgctggcgctggtgacggcggctcgcggaagccgtggctcttcgtagggctgggtaaccccggaaaggtgtaccagggaactcgccacaacgttggattcgagatgatcgatgttatagcagcacctgacggtatatctctgagcagta

SEQ ID NO: 289528 - DNA, 195 bp, Zea mays
ggttgataaatgaattttataaccatataaagtattagaaaacattttggtagccggcagtgcctctgtgaagataccatatccctacccatgctattcaatatccagtatcaatcactgttgactgttcgagatgaaaggggaaatgaaagtctgctgagctatgtttcatcaaaaaaaaaaaaaaggggcggc

SEQ ID NO: 289529 - DNA, 279 bp, Zea mays
cacaaaacaacaatttcatcattccagcagcatcaaacaacaatttcaccaccaaacaacaattttggtattcaagtagcatcaagttattggacgataatacaagcaatatttgtggaatgataatgcacaacattctagcaacaatataatttacccgcgatgagcccaagacttgatcacttgatatgatttctttctacggaagtaaatcgtttgtggcattttgttatagacgcacagatttaccatgttcttgatgacaaagccatccattat

SEQ ID NO: 289530 - DNA, 271 bp, Zea mays
ctcgctcgcagtcgcagcaagccgggaacaacacgagcagggggacggggagaagaggagacctaccataccatacattcggagccagatactcaatcagtatcctgtaccattaccaccaggcgcgcaccaggttaccaaaatctcgtgtggagcgatatggcgcccagcagctacgaggtggcggcttccatcctcctctgcgccgaggacagcagcagcatcctggacctcgaagcggaggccgatgaggaagcgctactggcgctga

SEQ ID NO: 289531 - DNA, 224 bp, Zea mays
ggagtgctccggaacccgccgccgcatccgcacgacgccacggctgacgactgggagccccgttcgcctccaccgccacctccccgcgtagaagctttgcagcgagaagccgagaaccctgtcgatctctcctgaagcaatccgctcctgtcgtgagctgaaccctacagttcgtatcacctcctctcgcagcagctgcagaaagagcaaggggggatggccaa

SEQ ID NO: 289532 - DNA, 313 bp, Zea mays
gcaccagttgtaatatcccaaaggcgccgagtaaccgaagaagagaagtgccttgctctcagaaaggcaatggagttcaagtcgaagcaccctttcaccatgcagataatgatcgagtcttatgtctacgtgggatttttcatgacatcgcctgcgagttcgtcagggagtcgctcccccgcacgagcaagaagatgacgctctgggacccgatggggaagccgtgggacgtcagctacgtctactacggcgaccgcgccgccggctccttcggtggcggctagggtacgttcgctctggggaacaacctgga

SEQ ID NO: 289533 - DNA, 280 bp, Zea mays
catcatatatatacacacacacctcaaaacatccaaaattacaaatagacttaaccatccaatatcatcatttgcatacaaattccaactgcacaaatcgaaatcaaaccgaaaattttcaaaaggaaaacgaaaaaggtcaaaaccagataatccgagagccttttgtaacgtgcgtgcgtttaattacaaggaacagtccgtcgcttgagaaaacttgctactcatcatcaccggccttcttcgatgacagagcccaggaactgcgacgaggcgtgcg

SEQ ID NO: 289534 - DNA, 274 bp, Zea mays
ggggtatcttgaaatatccgatgttaactgtgaagcactcccagaagctctctcgcgttgttggaacttgcaggcccttcatgtattagcatgctcaaaacttgcagttgtacctgaaagtatcggcaagcttaagaagcttagaactctggaactgaatggtgtttctagtatcaagagttcaccagagtctattggtgattgtgataatcttcgaagattatacctagaaggttgtcgtggaatcgaagatataccaaattccttgggaaaa

SEQ ID NO: 289535 - DNA, 297 bp, Zea mays
ctctactcatctcctccctcttggctcttgcagtgcaggcctctcctccgatccctcccacggtctcaccccaccgcctcgaccacacagctagcttaattagcttgcccctcctcacgctctcctcgcccgaatggggttcacggcgagctataggcggagtagctggccaatgtgcggcggcgacagaggaaaggtgcggctgcggctcgatggaaggcagcacacgcacaggtaggagaagggcgggcgtgcgaccgagcgtgcaccattggctcccactgcctgtcggctgga

SEQ ID NO: 289536 - DNA, 293 bp, Zea mays
agggaaggcgccaagacactggtcggatctcatgctgctagtgctagccctgatgcgaggctgaaggccgtctaccagaagtacgccacggagcagtttgggcgtgtggctctgcacccaccggcaccgactgctcttcccgaccttgtctagagtttttacttgacaagctgagggatttgagttgagttcgctttgattgacaagttcgagagttgttttcgtatactctattctcgcgagtgtattagacactagtagtaacaactattcataactatatgaataaccac

SEQ ID NO: 289537 - DNA, 431 bp, Zea mays
gggaaagaaaggtatcagtgggcacatcaatgtagattataagaatgaagctctgtctgttgagctgacaatgcctcaagatgcgtctcgtgataccattagagacactagaggactttcaggtggagaacgatctttctcaaccctttgcttcaccttgtctcttcatggaatggccgaagcaccatttagggccatggatgagtttgatgtattcatggatgcggtgagccgcaaaataagcttagacaccctagtagattttgctgtcgcacaagggtctcaatggatatttataacccctcatgatatcagcatggtgaaggctggggataggatcaagaagcagcaaatggctgctcctcgcggttgacagtgttgagacccctgacccttgtaaatgaagcctgagagccttgggcatgggagtg

SEQ ID NO: 289538 - DNA, 304 bp, Zea mays
tgctaatgtaggcctttacaaaagtaaagatttctgtttttcacaggagccgtgtaaatgttggtcctgcaaaagccccatacaaccagaagattctggacagttggaggaatgctggagctctggatgcaacccctcctggctccaatgacgattggtattggctgtatgcagctgtcagttgccgttcgtgccttgttccaggggatgagatgcgagaccacttgttccaactgcttggcactagttttttccctaggtggaaagtcaaacatcaggtcagactaactttctccgggcatgg

SEQ ID NO: 289539 - DNA, 283 bp, Zea mays
agaaatggtatgacccgtccatccaaatattttgaacagtgcagagaaaactgttgaggccttttattctcttcatagctgagatttgcattatgtgggtagccacctttatcttctctagttcctttttttaacttgatgttgtgttatcacttaagtatatttatgtgtattcaggaatcatgagtattactatagtcatgaaccaacctttaagatacctatgtgggtgcagtaatctggcaatattattatgaccgatgtgctgtgtggtgttgaattt

SEQ ID NO: 289540 - DNA, 279 bp, Zea mays
cattattctgagcggtcatctcaccaggaagagcatgcagacttctcaggagacatacgccgacttggagaagatgagtttcaggatatgcttgcagagttagctaactctgagcttcggatgtctgtatggacggatgatgtctacagctttaggcgctcgcaaatgaggcgtcgaattcaaagttctgacatttctcaagattttgatgccatgagagagcagctagtatcagatgctgcaagagtatgtaggtcaaaagttccggagtcgctgatg

SEQ ID NO: 289541 - DNA, 278 bp, Zea mays
agcagaagaaaaaggttctgctgatgagaaagatgaagatgaaggtgaccagaagatggaagagaataaggaggagactccgaaccatatgaaggcatggagtgccagggatagaagccagggaaatggtaatgaacatgatggatcaaaatctagggaagccaaaagtttgctgaacaccccaagcccatatggtaccgatcgtcctcaacgtgagaggaaaatagtggagaggttggttgaggtgattgagaaagagccaaacaggaatttcgtgg

SEQ ID NO: 289542 - DNA, 293 bp, Zea mays
gccaaggatttgcatggcatgaaatggatgttacgtcatatctatagaggtcaacctcgaaggcatcttctgacaactggatggagttcatttatcaataagaagaaactagtctcaggggatgcagtcttgtttcttagaggtaatgatggtgagctaagattgggtgtgaggagagcagttcaactgaaaaatgaagctctacttgaagctgtcaactgtactgattcgaagctacttatgctgtctgctgtcgccaattctttggacaacagaagtatatttcacatctg

SEQ ID NO: 289543 - DNA, 274 bp, Zea mays
gattgctactagtgttgctgctagaggattagatgttaaagaacttgaactggttctcaattatgatgtccctaaccattatgacgactatgttcatcgtgttggtagaacacgtcgtgctggtacaaagggctttgccgctactttcatttctgatgaggatgagcgctatgcaacagaccttgttagctctggagctctctgagcaggctgttccacaggacctaaaagccctggctgatagatttatggctaaggtgaaacagggaactga

SEQ ID NO: 289544 - DNA, 388 bp, Zea mays
gtagacaccacggagctcctcgccgagttctcgtccacccctcctccggacgacctgctggcagtggcagtattcggcggcgacgagcagccgtgacgcaagggacgccatgcgtgccgctgcctcggtttccggtgcctcaccccatctacagcagaccggcgatggtacctccgccgccaagcaccaccaagctagctcaactgcatctggagctccaagcgcacccgtccaaggagcgcatcgacgcagccatcggagatgttttagtgaagccatggctgccgcttccactggggctcaagccgccgtcgctcgacagcgtcatgtcggagctgcacaagcaaggcgtaccaaaaatcccaccggcggctgccaccaccaccgg

SEQ ID NO: 289545 - DNA, 643 bp, Zea mays
gaaggaatcaacatttgatatgtcgagtactgttggtctatcctctaaaggatgaaatgactcttcctaggacacttctacgtacatcaataagagactaaaattgaagttcaccaaagcatggctgtcttttctcaagttaccactaccacttgatgtgtacaaggaggtccttgcttcaattcatcaaaatgtcattcctgcaatgtcaaacccttccatctgatgtgatttcttgactagatcatatgatattggtggtgttatcagtgtgatggccttaagtggccttttcattcttatgacacatcacggttctgagtatccaaaattttatgaaaagctttatgcactactgactccggctgttttcatggcaaaacaccgatcagtgtttttgcaacttcttgacacatgcctgaaatcttcttatcctcctgcctatcttgctgctgcgtttgcaaaaagattgagtagacttgctctttcagttcctccagctggagctcttattattattgctttaattcataatctgctgaggagacacccctcagttaattttttggtccattgggaggttgatgagagtgatagcaatgccacaagagaagctagtcaatctaagaagattggttctgat

SEQ ID NO: 289546 - DNA, 455 bp, Zea mays
cttcaataagaggaaatgatactccttacaaaactcctggcggaactccatcttggctcggaggatctgctgtttctgaaataccatcatctgatgggaactattcattacctggacaaagtactcgtgactctgataacatgtcattcctttttccaatcaatgaagatgatgaacacccagagttccctggtctcatgagtacacctggaggggtatctagtgtagctactggaactaccggattaggaagcatgtcggctaggacagggctgttgcacttatctttaaggatcatccgtcttcaccctcagatgatcagcctggaaaattcagtttgaacaaaattttggaagggaaacaggatacaggctgcaaggatgttctatgagacaacggttctgaagagttataattacattgatgtgcaacaagcaggatccatatggagccat

SEQ ID NO: 289547 - DNA, 445 bp, Zea mays
cactttcgtggtacactggtgagaagaaaagtttgtggagtgcttcagctcaggttattggtttacttgttggcgaccacacattacaaatgggcaagcaccttaaaagtattctggctgttgttaagaaaataatggaatcatctattattgcttctggagctatacaattaggtttatctgatgaagctgtcctgccattgtggaaagagacttactactctgttgccatgatggagaggttacttcttcgctttccggagttgtattttgagcaaaacatggaggacatatggataatattatgcaagttgttgatccatcctcattcgatgttgcgtagtatttcaagctctctggtagcatcatattttgctacagcggataagaggcaagatgaacaggtattgggatgctccatcatggttgcttgttcaaccgacca

SEQ ID NO: 289548 - DNA, 519 bp, Zea mays
  unsure (1)..(519): unsure at all n locations
gccagttcggctgtcgaaccggaactgaagcaacatttgttctgtggaaattgggatggctctggctagggtttcaccgtcttccttagcgaaccttataccgcccctgctccaatccttcttccgccctttctcctcggactttcccatccgcaattcccgccgaagaagctcccccgttgctgccgccttctctcttacttcacaatctgcccacgctgcgagggaggggctggtcatggaggcgcccaggccgagctccaggtatccttggaagcccacgtgtttgtactacacccagggcaaatgcacaatggtttgtgcgtccaactgcaatgagtgagcaaagaacaacagaatacatagaagggaaatatggaaaatttggggttgaccgtgtttggcatgacactgctacccctttcaagcaagtgctgcaagagtttgaggactggcttggaaatcacaacctgtgganaaaggagcaaggtggatcactcaaccgtggagcatttgtta

SEQ ID NO: 289549 - DNA, 273 bp, Zea mays
ccatcccatatccatggctggtctttggtgagaaggtgaaggtgaatgctgtcttcatccgtgattcaaccggagtatcagactccatattgattttgtttggcggtgctgtagcaaaaggaggcatggccgggcacttgaagatgctcgatggctacattgatttcttcatggaccccagcctgtctgaatgcttcctgcaacttaaagaagaactcgataaacttatacagcagaagcttgaagacccaaacttcgacatccacaaggaag

SEQ ID NO: 289550 - DNA, 290 bp, Zea mays
ggatgaaggtagcagcatccacagtccatactgggtagcttggcagtatacataatgttgcagacgtcaactgcttttgtttctcgtaattagaatggattttctttctgaaacatggaaagggagaaatgctgttcttaatttggtagggccattcggtaaccaaaatgtctggtttagcccaacgcagtgccattgactgtcctgttgtcttattgctgtattacttgagatgcttatgcatgctaattgtgtacctgtgcttactaagatgaagtatgtttatatac

SEQ ID NO: 289551 - DNA, 264 bp, Zea mays
tcaataaccgaataaggtctaacagcctacaatagcttatgtggtcaaaaactatgaataagccaacacaaaggggccttaatcatctccactccatctgtcggtgccgtgagccactgtttcccactggaacgccgctggttcgagatctcgcggccacgcatgcaaattgacttccccagtctggaaccatgtgcatgccaaatggaagccagtctcgtctcgcgcggcaaccccgatcgagattatggatgaaaacggatg

SEQ ID NO: 289552 - DNA, 257 bp, Zea mays
ggataatggtggtggcattcttgtgcttggtgaaattgtggagccaggattagtgtatactccacttgttccatcacagcctcattacaacttaaatctggaaagcattgctgtcaatggtcaaaagctgcccattgattcctccttgtttacaacatcaaatacacaaggaacaatcgtggattcaggaacaacattggcataccttgcagatggagcctacgatccatttgttagtgcgatactgctgcagtctc

SEQ ID NO: 289553 - DNA, 279 bp, Zea mays
tgaaataacatacacaaacaatctttgaatcttgtggttgtattatttctgctcatgtcaatgactgtacaatgtccttaggtgcttacaatattgtcactcagtcattttttgtgccactattccatcattttcccttgcttatcaatgagagtctttatatgaaactaatgcttgatgaattgctttcttttccacaactcaatgttttcctggtaggactgatgttcaatttttgcataggtggcaaaaggttttggtgtattagatgctgggaaa

SEQ ID NO: 289554 - DNA, 221 bp, Zea mays
gcttgcctgggttctggatcctagattaatgggctggtgcgttgcatagatgtgatgggaagtgttgctgggacgggcgaggattcaggtagtagtccccctcagaagactcatgcgcggactgtccggatacgtacccggaccgttcgtgatgatatgcggaccgtccgtcgttgtatgcggaccgtccgactggatagggtaaatgtggtgccctatgt

SEQ ID NO: 289555 - DNA, 267 bp, Zea mays
ctctagctctcgacgacagcctacttcgtctaatctgccatttgggctggtgagccttcagtctgcactatctgaagctatatcttgccttggtcatgagccaagcaagattgcagcaatggcggctttgaaagattacgatatgctgtatcaaatgtctgccacagcatcaactcaaaccagaagaagattaccagagctcaagctcagatttccaaggatcaaaagtctatccagcaggcgtagtaagtgcttgtttgtgatatc

SEQ ID NO: 289556 - DNA, 457 bp, Zea mays
aattgatcagactcttcaggcactttgtctgtacaaattccacagaagtctttccgttccttgagccttcgatttcatggagacatagccaataatgcagaaaatagtgctgtcaaaaggaaagaaggcacattaaccaacactactaccggagccgaaaatgatgttttggagaatgatgatgtcaataagtctactaaacatgcacattccatcttgcgcgacatccataagtccatatttgaggagcaggtttttgatttggtgatccaggagacatttatccaatctcaaggcatcaatgttactggaatgtgtgaggagtttctccagttagcgattggccaggaatgttctttgtgccgttcgcttgagctctctgggcagaataataactcggggacagtagggcaggaagatcatatggatatagatcatactggataccttgcagtag

SEQ ID NO: 289557 - DNA, 286 bp, Zea mays
gtcagtaaaagcggctagcgttgcttctcaatggttggaattactgcatcaggacataaggggacgtcttgctgctttaaagcgcacaggaagagagtcagaaatgctcttcacacggaactgccataccttaccgcgacagaattttcatctaatcaagagaacgaatcatccattgcaaatacttctgagattggatgtactgacaaagcggtttcagaagctcatgtggcacgatggaggtctctgtttgttcagatggacaaaacacttcagggaggaggga

SEQ ID NO: 289558 - DNA, 276 bp, Zea mays
ggatcaaaatgatatttttgatccacttcaattaaatatctaaactgttagtaatttgttgaattttagatatttaattgaatcggatcaaaatgatatttttgagccgagcagctgatataggctcctcgaactacagtgtgtcgcctgtgccaaatcatcacaggttcatgctccacacgaactataattgtgcttctcaaactgtggtgtggagcttgagccattttagaggagtcacacactgtgtgtgtattttaaaaaaagcggatctgg

SEQ ID NO: 289559 - DNA, 389 bp, Zea mays
gaatatttcatgtttctcctcagcacacgtgctgaagaaactgggttgaacttgcagacggcggacactgatcttatatacgacagtgactggaaccctcaaatggaccaacaagctgaagaccgtgccaccgtatagggcagaagaatgaagtgcgtgtgtttgttcttgttagtgtcggctccattgaagaagagatcctggaccgtgcaaaacaaaagatgggtatcgatgcaaaagttatccaggctgggttgtttaacacaacttccacagcacaggacagacgagcattgctgcaggagatccttaggagggggacaagctcgctgggaacagatatccccagtgagcgcgagataaatcgtttggctgcacgaactgatgaa

SEQ ID NO: 289560 - DNA, 278 bp, Zea mays
cgggttgcggggatggccctcggcatcgcacctggcgccacacacacacgacacgtacaacgatgcccggtggatggtgtgttgttgcatgagctcatggggctagaattgtcagagatcatgaattatattttctagtgtagtctatatgaccatgttataaggaataaaacttctctaatcagtaatcatagatttaaccttttggaaagaaaaatttaagatcaagaattattcttgcgtatgacttgaaactatgtttgagccattgtgttggc

SEQ ID NO: 289561 - DNA, 294 bp, Zea mays
cgtcacgtcatcgtcacccccttttatttaccttgccgcctcggttcggcacgagcactgactgactcccggcctcttcgctgtcggctgtcgctgggtctctcccctcacgatcggccggggaagacgaacgagggcgctggctgcggttgggcttcgttccgtctcccccccccacgcgacgtggctgccacgcttctctctctctctctctgtctctccttgtctctcctccacacttggtcgtggcgcggcggtcaggaacgaggagatctcacttcagtcccggcaagt

SEQ ID NO: 289562 - DNA, 468 bp, Zea mays
  unsure (1)..(468): unsure at all n locations
ccacattccagcagcagagacacctaaacaagattatatccatgtcagggcaaggaggggtcaagcaactgatagtcatagtcttgcagagagggcacgtcgtgagacaataagtgaacgaatgacagttctccaagatcttgtgcctggatgccacaaggttattggcaaagcatcagtacttgatgagataattaattacatccagtcgttgcaatgtcaagttgagttcctgtccatgaaactagaggcagtgaatgcccaggcaaaccagggagttgaagtatttccagccaaagattacggttctcagacatacaacacagctcctgggctgacatttgatacgcaaaccagtagagaatacgcccagggcacgtcgacctcggaatggcttcacatgcagattggcagtggctatgatagggtttcatgaacgagatgaatccaggcagccgctanataaag

SEQ ID NO: 289563 - DNA, 301 bp, Zea mays
acgcggactatgagagcggacgggccatacccaataaccaggtgcttggcaaaatcgagcgggccattggcctcaagctccggggaaaggacattggaaagcccatcgagaaggggcctagggcgaaatgaacacaaagcctcgaaatcagtgcgctccagctgatctcgttccgccggttccccttggccgccagttccgttctcctcacgggccgaacggaacaaggggtccagcttgcgggggacctccccagcccattcctgctgtcaaacaaacaaaaccttgcaaagcgcaaaaa

SEQ ID NO: 289564 - DNA, 413 bp, Zea mays
cgccggcggcgggaggtccaggtggaggcgcaggcggctgcggcgagacgggtccttcctcgacctccacgagactggcagggccaggctcgacttctcgccgccggcaccttcccccgcgaaggagccgcccacttgccttcattaagctttgctgaaatagtcgtgagcaattgagcatcacgcgggtttccactgattggttggacttgggggcggttcaggaggggtggaggtgggtgctcaaggcggccatcaggaagttcaaggcgcggcacggcggtcccggcaggctcccctgctccagatggtcctccccatgctgtgatgatcgatcgatcgatctcgcgcgctcacacgaattgtgcttgccttttgtttccacttgttccatcacagttctattcattgca

SEQ ID NO: 289565 - DNA, 271 bp, Zea mays
taccattcgcgccatggaagtaggtcgtgtttattgcctgtggtgggacccatgtccgtgccaacgccaattgccagccgcgtagccgttgatgaagaaaaagccattcgcttggccgctctttaccttgtagcgttaaagggtaaggtggtgtttgggaacaaagtttttctgcggttttggaagaatactgcagtattctcaaatactgcagtattatataaaaaaaaaaaaaaaaaaaaacaaaaaacaaggcagcgcttcaaccgcg

SEQ ID NO: 289566 - DNA, 284 bp, Zea mays
gaaaaaatgtttttcatatttctcccttttcccagatgattataaatttgataagtctgagattattcgtttatgggattcaataggaatcataggttctagtatacagcaaaagaaaatagaggacataggatcggattattttgatgaactattagatagtggttttcttataaaagggagcaatgatttttatgtaatgcatgatttaatcaaaaaaaaagtaaaaaaaaaaaggggggcccccccaaaatgggccccttcccccggggtattttttccgg

SEQ ID NO: 289567 - DNA, 310 bp, Zea mays
tgtagaacctccgacacaaaacgatgcacaggcaggtgaaggccggtgatgaaaaatgcctcaaaaacaaccaattcgccctcgggctcgggggcctcctctgcccccgggacccaaccaaccccgccgccaaaataccctaaccgttgcatatcctgcacgcagaccaacaacatccgcgaaacaccgaattccactgtatcacccggtcgcaattccgccgccgccacagtgcccgagagatcttcagaagacgcctcggccatcggcgtggtcgcagcagacgaggaggaagacggcatggctacgt

SEQ ID NO: 289568 - DNA, 303 bp, Zea mays
atgtcctgaaagaaatgttggaagaggaggttggaaataatacacagaaaaataggtttacatatagtgatctttgtgttcaaattcctgaacccaaacttcgcctctgcttgttgagaaccctagagttcttattttcattgatgtgctcatactatactattatgagcttctcttcaggagataagaatattgactccaagggcccagatgaagcatataaggatggcacatctcagaatagcagcgaaactttagttaatttaggaagaggtcattcaagtgcagcagtcactcaggatg

SEQ ID NO: 289569 - DNA, 288 bp, Zea mays
gacaacatgaccaggtgtgtgaaacaaattaaatggttcttccatttctaccttcgtgattcagtattgtgcatattgtcatccatctgttacaaattacaggtcgttttagtttttctagatacatagttttcttatacacctagctacatacatagcaaaagctaaaatgatttgtaggcaccatgtagtcctttcatttggtcggtttgttttgctataaatctgccattattttttctaaccgcatgcaccatgtgttggaaggtgatgtggtggcatgctctg

SEQ ID NO: 289570 - DNA, 262 bp, Zea mays
tgaagtatggcttattaataagatctggcttttggtttaatgctacatcattgcgagactggccactgctaatgtgttgccttagtctacccatatttccccttggtgcatttgcagtcgaaaagttggcattcaacaatctcattagtgatcctgctactacctgttttcacatcctttttacaacatttgaaattgtatatccagtgctcgtgattcttaagtgtgattctgcagttttacaggctttgtgttgatgttt

SEQ ID NO: 289571 - DNA, 279 bp, Zea mays
attgttcttcctcagtagtgtcatttacgcttctctgctctgcagcaactatgcctaaccctaaggtcttcttcgacatgaccatcggcggtcaatctgctggccgcatcgcgatggcgctctacgccgacgtcactccccgcaccgccgagaacttccgcgcgctttgcaccggcgagaagggcgtagggcggacggcaagcccctccactacaagggctcgtccttccaccgcgtgatcccgagtttcatgtgtcagggtggcgacttcaccgccgg

SEQ ID NO: 289572 - DNA, 419 bp, Zea mays
agaggacggatgcccaaagatacagcttggtaatatgaaaatcgagcttccacttcacctcttatctccagttgctattgccgtagctgctgctggaatagctgccacactggcgtgccatcctctcgaagttatcaaggatcgcttgactatcaaccgagaggtttatccaagcattggccttgccttccgcacgatctataagacggatggtataggtggtttctatgctggcctgtggccaacgctgattggtatgattccttacacacatgttacttctttatgtatgaaacgatcaagacctcttactgccgcttgcataagaagtcgtctctgagccgccctgagcttctacttatcggcgctctttcaggtcttactgcaagcacaatcagcttccctctggaagtagcaag

SEQ ID NO: 289573 - DNA, 522 bp, Zea mays
ggggtgggagcaagaaaaaaccggaaccctgaaccatgggttttcgatggtccttgagtccagatggtctgtttgtgtagtgcctcctagttcctcaatcactacaaagaaaggtttcagtatggttccattgtactacagggacaagatcgtgcttgttgcttttggagggaacaaaaaggaaccatccgacaaggttgaagtactagtggtgctgcaaaacgagcactgtttcagctggcggtctgcgcccgaggtggaacccttactgtacgacgagtctcctccaggctcaagggaactcgccgaccatctcagcagctgcgctccaccgtatcctactagctccgcggcgaggagcggtctcgccgccacagcggagaactcctgcgggaggaaacccctcccggactcactgctacggacctcgaacctcgggggctcgtcgctccgcaggcagttccgtccagaagaagagtgcagcaactggcgcagaagctgcagaaactgatcgacgacgac

SEQ ID NO: 289574 - DNA, 278 bp, Zea mays
taaggattaattcagaagagtgtttaaatagttagttaagttgtttcgatccatacttcgattttggtgtcccaaaattatgattctaagtaattagtctttcggtgttcgctttagtcaaagagaaatgtggaactcatatgatctattcttttcctaatgactgagctaggtccttttaaacagatagcaagtgatgtatgagctacctccgaataggctggaaaggtgtaattattataattaattatatatcgctagttagtatttgcttaatg

SEQ ID NO: 289575 - DNA, 275 bp, Zea mays
gatcgaggagaaatcttttaaaccttcaaagcaggtgcgcgatatggtattggtccttttgagaaaggctgggcagctcaagaagcacgaagagcttgttgaactgatggttgatcggggttttattagccagcctcctaatgatgcattgtggagtgcactatctgcttgctgatcttcatgtgccagattgttatggaagtgtagtcacacataaaaggtatcctttcttatgtgttgtacccaaacaaggcttcctgagtaaaattctttgg

SEQ ID NO: 289576 - DNA, 300 bp, Zea mays
catgacgagaacctcaagcaaattgaggctgaaaagaagaaagcccagaaagaagctgaaaaggaggcaaaccaggacaaaactcctgtaaaatcaaaaaatgggaatgcagataaatcgccaagatcaccatcaaccttctaatgatgtacggcagaacttcacatggtcatcatttcttcctcaacgaatgcccgcctttgctggcctgggcacaatttcgcaagcatgaacagtatacaaatccataaattccttgtggacaaatgcttacaagacaagatggttttggttcaacat

SEQ ID NO: 289577 - DNA, 455 bp, Zea mays
ggtcttcttaagccctgcagaggtatattactctttggtcctccaggaaccggcaagactatgcttgccaaggctatagccaatgaagctcaagcaagttttataaatgtctctatgtcaactatcacatcaaagtggtttggtgaagatgagaagaatgttcgagcactgttcacgttagcggctaaagtatcaccaaccatcattttcgtcgatgaagttgatagcatgcttgggcagcggaacagagctggagagcacgaggcaatgaggaagatcaagaatgaatttatgacacactggcatggcctcttgtcaagaccggatcagagaattcttgttcttgctgcaaccaaccggcctttcgatcttgatgaggctataatccgtaggttcgagcgaagaatcatggtaggtctgccatcgatgggaagtcgggaactcataatgcggcg

SEQ ID NO: 289578 - DNA, 409 bp, Zea mays
gccgtgaagtaaagactgatgacgatactagcggcgatatcacaagctcttcatggataggcaacgatggttcaggttattccaacacttcaagcaaagagctgagaaagcgccaggtaaaggattcagatcctatcaaacaaacatcgctagagatggtgttaagagagaacttaaaagcatgtgctgttttccatggggatgcagcattcaacgctgccatcggcaggatccatccatcttcgtttgctcagctgcaacaggccctgaatactgcataagagtgcatagctgcttactggattgtatggagcattacgtggagcaggcattgctttgtgaggtcatatagattggtgggtgataatagaaacccacaaaagactgcatgcttaactggtgcttgctt

SEQ ID NO: 289579 - DNA, 327 bp, Zea mays
aaagcatgtgtgttcgtcttcttgcctgaacccagattgactctagactccaaagaggtagcatggctgatcgacactagctagaatggttgatgcatggcaacttgcattgacatgtggctgtctcttatcaagacatgtgattctcttatctctctctcttttatataaaggtatcattgtgctgggcttaagaagttattctcctaagggctaacaaaacaatcatgcaacgaatcagtgttattgggggggggggggctcttcatcattgctgacctttacctggccacttgggctcgctaaaatagggctcaaagcactctg

SEQ ID NO: 289580 - DNA, 288 bp, Zea mays
attctttattgtgtccttatccgtaaacatgcataatgacactcataagtgcaatatagtaatcgcagtatggttgtatgaaacttagaggttgtacaagttgtactgacaataagctgggaatactgtaatctcgcagctactgctaggacagtaggccacttgtccaagagcactgaagtgatgaaacttgtcaacagcctcatgaaagccccggaggttgcagccacaatgcaggaattcagcaaagagatgacaaaggctggtgtgatggaagaaaggtcaacg

SEQ ID NO: 289581 - DNA, 300 bp, Zea mays
accttatcaaggttttctcctgttcttcggatagttgagatcctaagagcaccttttgctctgctatgtcctcacacaagagcatgggcttcggctgatcagccgaagcagctttttcccttctgaacttgtattgctcacaagctttagctccatctgtcttatggattgcttttgagtctgtcaaatttccttcggcccttctggcagcttcctgacttccatgaatagcaatgcgccccttggtccgagtaatcttcatgcaaagataactggatgaagaatgcttcaagacatgag

SEQ ID NO: 289582 - DNA, 279 bp, Zea mays
gaagaaaactcatcctgaatgtgctcgattttcacctgatggtcagtaccttgtttcatgctcagttgatggaataattgaagtctgggattatcttagtggaaagcttaaaaaggatcttcaatatcaagccgatgaaagctttatgatgcacgaggaacctgtgctgtgtgttgattttagtagggattctgaaatgctggcatctggatcacaggatggaaagattaaggtttggcgtatacgaactggtcagtgcttgcgagccttgagcgtgca

SEQ ID NO: 289583 - DNA, 297 bp, Zea mays
ctgacgtacatttacctgattgggtatgcttaaactgtgtgtctagagaaaatgatatcatgttaaaagaaaatgataccaatggttcctgggtttgtagtgaactagataatggttcctgtgggaaaacttcagccctttgtatgattttgaatcgacccggacttgatgttacacaaaccacatctgtacctgaccggttatcttcgtcttttgagaaagaaagtgaaaatgtggcaacaagcagtgtcaaagagacaaaaccttttggctcagctgtttgtgaggttgacagaa

SEQ ID NO: 289584 - DNA, 279 bp, Zea mays
tttggagacggccgtcatccctcgcgcagcggctaatcgttcgacacggagacgaccgccgccggcagccgagctgatcagtctgtatctattccccacgggagcaaaagcaaggttggcgaatgtcaaggagcttgacaggtagtctgtagcgccctggcccctgggtcgccgattcggtcgggggcgccacggaaccccgatgataaccacagcttgtttgtgccccctaacttacttgcgtctcgtttttttccttttcccgacttttatgagctg

SEQ ID NO: 289585 - DNA, 379 bp, Zea mays
ccctgcacctgtagatgccttaaattccgatcccggtggtcctatggatactgatgtcgtcacagctgcaacttcacacgttaggtctaaagatactgatgttgtcacacgtgcaccagttagcgatgatcaggagaaactggaactcaaggttgatttgggtaacaaggtgtcaatgtatgatgaagagcacaatagttctgataccatgaatgaggactgcaagcccatcgtatcaaaaccaaacaatcaggtacctgaggttagtccagatttagggtcccaaattaagtgtgagtcgatttctactgataatctatcatctaacaaaaagaatactatacaagataatttaaatgctaataattttgattagaat

SEQ ID NO: 289586 - DNA, 294 bp, Zea mays
cgagagacagaacaagaacataagggagtccgcagcggcgcgtaacagaagagcaagcagagaatgggtcgagtgagaacgaagacggtgaagaaatcctctcggcacgtgatagagcgtcactactcgcgcatggaccctggacttccacacgaacaagaagcgtctggaggacgtggcgataatcacgtcgcagaggctaaggaacaagatcgcggggttctcgacgcacctgatgaagcggcatccagaagggacctagtgcgcggcatctccctcaagctccaggaggga

SEQ ID NO: 289587 - DNA, 463 bp, Zea mays
ctatttcaataccttgccgctgtatttgcaactgatttacactctagagcttttctgcgccttccaaaaactcttggagtggacttccgtgcttcgtgtttctgccataagaagactattgacatgggatatgtctgttcaatttgtttgtcaatattctgcaagaatcagaagaagtgttcaacctgcgggtcagaattcagtcgtgccatgcctgatttgaactccgtgccggatcaaagcaagtagtgtccagtgcgaagttaacccatcaacagacaatgcttttctctgtgcgtctcacaggttcctttcggactagcaccttcacgtgtgcagtgtgtacgagacgtttctttggtcgatatgtgaatcaattgccatgtctgaatattatcggggttttttttaaaaaaaaactgaaactgcagaattattttcaaaaaaaaaaagagaggaagaa

SEQ ID NO: 289588 - DNA, 295 bp, Zea mays
gtaagacgaacctattacacctaattagtccatgattcgctcgtgtgatgctacagtaaacatttgttaattatagattaattaggcttaataaatttatcttatcgtttagtcttcaattgtttaattaattttataattagattatatttatttatttaatggacattcaaacatttagtgtgacaaactttagtctctggaaccaaacactcccagtcataacctatggtctacaatcttagtccaaacagtgtgattctctgaatctggaggcaagtattgcgaacggtaa

SEQ ID NO: 289589 - DNA, 644 bp, Zea mays
  unsure (1)..(644): unsure at all n locations
tgcaccgatgttatggtcaatgtatttctcagcatcacaataaccaatcttgggtgtggcgctccgaagcccagatggcttaaaacctttgctctggttggtcattncagacctcgcttttaaattaactccaggtgctgctgttccaaagcttaggcctcctgttgtcacagagggtcattcatctggaacagcagcacctggagttaatttaaaagctacttctgaaagtacctaccaggtgctgctgttccagatgaatgaccctctgtgacaacaggaggcctaagctttggagtaggagggcagtcattgctcttcctgagggagggggacagtccatttcaactctcggatgtatggctcatcctccctacggtggaagcagttgaagccccagatatcacagagctcatgctgtccatggagctgctaggtgaaatgcttggtgatgcacggtcagcatggcccttagctgggatcctgttccctgatgatcttgagggtatagttctgctgatatcagattttgatgacggacgaacagggaccctctgagcaggtctattcttgatgcttagtgttgctgatttagttttggcttctggcttagtgtccatcaacatacaatgggaagaagtgcg

SEQ ID NO: 289590 - DNA, 304 bp, Zea mays
ctcggatttcggctctagaacaaacagaatgagagcgaaaacatgcaggactccgacaacctctcgatgctgacttccatgaacacaggaaacacaggcagcgtgctcccattctcgaaacacaacaccaatccttttgaagtgaccagctcaaggctagagttcggcctcgtttcatcggattcactgatgagttcccctcacagttccttggagaacgtcaacctgctcggctcacagaggatgaatgaacaccagaacccagcctccctgcaacacttcgtggactggcccaggacgcctg

SEQ ID NO: 289591 - DNA, 289 bp, Zea mays
cgtttatttgctggtatcagttttggttcagttctccaaagcacggttttagtttgtgctgcttctcttggttcatgcacatgagctgtttttttttgggttcatgacctttggaaaggtgaagcaaaagtctcggtgcttcctcttgctatccagggcagatttttgtttgatgctgcttgacgtggaggaactatattctagtactgactttatatatcctaataaatctacttgttgtgctattcaagtttttgtgttggagcttctgacgtgaggtgattgtttg

SEQ ID NO: 289592 - DNA, 329 bp, Zea mays
ccgcgccttcttggtaggggaaacgatggttccatgaggcttgtgagggatttatatgtgatgcttgataaagtaaattctgaggaagcacctcttgacttgaaggttccagaaacttttgatgaatttatctgggacatgaagaataatgattatgatttaaggtcatttgcttttaagctgaaggctacgatggagagcatggataagggattgaggtcatcaaggctatcagagcagttgaacaaagcactatgctgcaatggcaatcccaaagggccttaatggctttcaatgcggttaactgatgaatactccttcaattgccc

SEQ ID NO: 289593 - DNA, 289 bp, Zea mays
aattgcgcgacgacatcaaagcacacaaagatattgcacattttgaaacggcatatgttgtgaaactacaccgcatagcgacacttgcacctccacaacaggtttttactttcacccatccaaatttctcaccaaatgccagcaaccaaaggtacaccaagttgcaatttgaaatgctgccagacatgggttcatgccttgtgcacggatttgctggctattttgactctgttctttataaggatgttcatcttgggatcgagccagacaccgctacaccaaacatgtt

SEQ ID NO: 289594 - DNA, 365 bp, Zea mays
attcccccgcggctcctctcttcctgtcttacgtcgctcgccgcatttcgccatttttggggagggtgtgttccagccttgcaggccgccgagatggtgggaggcagcaagccgctgggggaaagcgtattcgcggtccacgcggtcgccggtgcggcggcgatcagcgcctccgccgtcgccgtgtaccccctcgatacggtcaagacactcctccagctgggagcgacggggcagaagcagaagatggggctccggcaggtggtggaccggctcatggccaattccggccctgcaggtttttacaatggcattggatggtccatattgggtaaacttcctggattgggagcacgttttgggac

SEQ ID NO: 289595 - DNA, 295 bp, Zea mays
catcagattgtgtagtgttgttgctcatggcagcacctcgagaggctacagtgggcttgttgacaagtcttcctaaattaagcactgtcatggacttgctgaagcatgacagccaccgatgtctgattcgcttattatatggcctagccttctcatgcagacaatacttagcccagggaatgatcctgtcaatatcagtgccagctttgatgcgagttgaagcacttgtttcagttttccagggctccaatgatagccttcttgctgatgctgcttcttatttgagcgccgaact

SEQ ID NO: 289596 - DNA, 157 bp, Zea mays
attagattggaaggctttctggaatggttagggtgtaatgttgtacaataatctaattcgcattggtgtggccctagttcagttgaatgatgttgacggggttgaaggcaaacataatgtatttgttgtagtcatcaaacgtgttgcgtacaatcac

SEQ ID NO: 289597 - DNA, 271 bp, Zea mays
tattggaagagcttcatggactctatgaatctcagaaagtactgagtgcagatctaagtgatcaacttcagacatttacagaaaagaatgaaggaaacagagtgcaccctagcggatcttgaaacgagatacatgaaggcaaatgatactattaaggagtagcaatatttgatagaaaatcttcttaaatcagaaaaagttcttgttggtgaagcacaaacactccgatcagagctggagaatacagcaggggactacatgggctattttc

SEQ ID NO: 289598 - DNA, 319 bp, Zea mays
cgattgctcactccatttgacgctgctattgaggtcgaggcaccctttgagtgggaaggttttgctcatatcgcccttcattgctgggcagagaagcagcagcttagaggttcccaatctgtcgagttcgaggggaaagcaggagcttccttatccgctattgtgcttcatgtagccatcaggttgctctccgacagtgagcctgttttcaggaaggcctggctcggtcgcagcaaaggcagcgacgtcgtccagttcctgtacatccaaacgactcacctggaggctcttcgaagcagccagaggtcaactttcgacg

SEQ ID NO: 289599 - DNA, 139 bp, Zea mays
atgatacatatattctcaccgtatgcatatgtatgtatgtgtacgagataataaacccaaggccagggggtcaagccaaacaataatttgatgtacttggaattcagatgtgttattcaacacaacttcgtctgccaac

SEQ ID NO: 289600 - DNA, 271 bp, Zea mays
ttcgttacaaggatcttcttgatgatgtttactctgatatatcaaatttgctgaaatcaagcgggaatgtttgctcaattatatattgccttgaacgggcagcttgtgatgatctaagcatgcatttgtcacagcagggtgtctcttgtgctgcttatcatgctggcctaaatagtaaagtgcgaagttctgttctcgatgactggctttcatcgagaactcaagttgttgttgcaactgtagcatttgggatgggtattgatagacaaga

SEQ ID NO: 289601 - DNA, 271 bp, Zea mays
agttatgatcactacctctactatattatgttttgcagcacttgaagcatcttcgaaaggaaataagtacatcaattcgtgcttgaggtgatcagcttgaccacaatgttcttctctctcatcttggcatgcgattagtgtgctagtacagtatgtagacagcttatattctaacactgaattgtaataattctggaattaacagcaaactgcagatttcaatattggttaaaaatcttgctgattacatgattattgtgattcttaaagt

SEQ ID NO: 289602 - DNA, 294 bp, Zea mays
gacgatagtgtttcccttaagaactctttcaggtggtttacatcgatgattggcagaaaggcaaacttaaagttattgatctcaaaggttcgtgaggctggggcatcagtcgtgaaaactactgaatttgtacaaggtcatacagctagatggggccttgcttggtcattcattgctccgaaaccaagaaaaatagtcctcggctccagtgctccagcataaaaaacaccattcctttatgcttcaggggcttcgtcgtgaacatggtgcgttccaaactctgaaatcaactga

SEQ ID NO: 289603 - DNA, 334 bp, Zea mays
agctaattgtgcgcctcgagcatattgaggccctgggatggtggtcgctggaccctctactcacttgccatggtaaatcctctcaactctggatgtcttccatttttttcttattaaagagttttcacctaatagttgattatgggttggtacatcaaggctgattcagttcaattttagcaacctttactgtttattaggtgcatttccaatattttgtgttttggttagtaatttcttttgccagtttcatcaaacattgatcttctaaacaatttgtttgttttttgtgtgcctgccaaacttcttcatattaatgggttatgagattcaa

SEQ ID NO: 289604 - DNA, 398 bp, Zea mays
attctgaaaaaataaagagagatccatcaattcctgaaaacccagaaccatgcagaaaacctgctgctgtttccatgattaaatctggaaaaaaggatgatatttctgaaatgaataggggcatgtttaactgggcttcaaggtggtggccatttgggaaatcagatgcagatagtagtacaaccaacataaatgccactgatgaaccgaggactgactctattgaagaatttgaatcttcaaacgctccaactaatggaagtgcacaacaggtggttcatgaaatatttacaaagcctgacttgtggtctgttttggagcaacagttatcagaacctcttgggtctgaggttgttttgaaagccaagacaaggcaggaattggcacacagattgcag

SEQ ID NO: 289605 - DNA, 298 bp, Zea mays
acggaggcgcaggctcctacttcgccgtctcctcctcctcctcctccccgggagccgactgcgccgagatccttggccggagcgccgcgtcctccaatggaatctcgctctaccgcgggtggagcttcgactccgaatctgctataacccccaagatctgtatcacgggaagcacatctgctagcctacaccagattcttccatggttgtattatcacaaggtcattggcgtttcccatttctttctttttgttgaaggagaggctgcaaagccagctgtcacctctgttcttgaatc

SEQ ID NO: 289606 - DNA, 283 bp, Zea mays
aacctagtgatgggtggctatattatgttgaagtgagatgtaactagatacttggtaactatagcaagcctgaagctgaagctttacaacgggcttttggggctcaaaagaggcggcggttgaatcgtgtctttgatgttatcgtcttcttttatcttgactatcccatcatggtttaggattcgaagaagagaaagaagaaagtaactacaaggcagagcaaagttctgaaggtgcaatctaaatcaactccccaagcctcagaggaaattctggtaaatat

SEQ ID NO: 289607 - DNA, 273 bp, Zea mays
agccctgaacattgtcatcatcaaggattataatatgaggactacaaacatgtctaatggtgtaatcaagctacgcactaaaagacttcttgcagagaaagaatctattagaattacaaggtcaaaaaaaactgctgcccagcctaatggtactgaagtgtttgacaacaacgatggccatacccaggctacagttcaagctagtgaccctgctctatttgacgagtacacccacatggctaatggaggtcattccattgctcgccctgatgg

SEQ ID NO: 289608 - DNA, 310 bp, Zea mays
cataacaaggaaatgaaattggaaactgtgacagctgctatgtctgatggcaagttgctttcccaaaagcaacaacatggtattgaatctaaggtggaggaatgtggcattcctatgtctgaggaagaagccgctgcattcgctgctgctgaggctgctcgagctgctgctatagcagctgcacaggcatatgcatctgtagaggcagagataagtgtgcctcgtgagcttccaaagataccgtcgttccaatcttttgtgatgcgtgatcaccatttggacgaatctgatgcaagaaaaagaacattga

SEQ ID NO: 289609 - DNA, 312 bp, Zea mays
gttcgatctcctctacaccagagccatcgtgctccagagaaggattggtgtccgattcctgtgtgcttcccaggccttgatggtcgttgccctggttctctgcatgatacgacgtgaggaaggcgcccacaataacaagggtaatgtcgcgattaccgacacaggattcagtggcgccatttttgtggagacctgctgtgttgctgcggcgattgcgtcgccttggacaagggcacacttgaaggagagcagctgccttcatggtctcagtgactccttgtttgaggctgttcatctgtgcaaatccaccgc

SEQ ID NO: 289610 - DNA, 351 bp, Zea mays
cgactacaaatgttcctagggtaattggcatgatacataatatagattggatctaggatgttcctatgaatgatttactatttatttggccctagatttggttgatagtgtgtttaatcctggtgtcttcttagcctattgttgcgctcgtggttgtgcatgtttacttttgctttcaatgaatgtttactttcacttatttagttgataccgacctagtaaagctgacaataacctcatggtagcgtgttaatgtaattagtacatgctgatccacatgatatggcaggaatttgatgttttaatctgttattgtgcatctatagagtaatttaatgactacattacacc

SEQ ID NO: 289611 - DNA, 315 bp, Zea mays
gtggaaaatttacgagaccagctgcagaaggagagaagtttgagggcttctctggagtctgggctaatgaatatgcgaagaggacaagtgtccttcccctcaacgatagacaccaagactaaggctgatcttgaggaagttgctgccgctgaagctgatattatgaacttgaagcaaaaggtttctgatcttcgggggcaactcaactaccaagtccagttgagttccacctcgttatgtgaatcatgcaacaacaagcgggccataaatgcagacaagcttgtcgaaggtgaacaaaatgctggcctttctcca

SEQ ID NO: 289612 - DNA, 357 bp, Zea mays
ccatgcaaatttgtttgtgtctatattgttgtggcgttttgatgacactttactcgttgatgggtctgttgcggttgcagagatggaggaagatgaccaagttttcgacctagcgctagaagcaagattgcatgctgcggaaacgatcaagcagagccggcaagaactgatcgtggttgcgtcattggtggaacgcataccaaatcttgcggggctgacgagaacgtgcgaggtcttcagagcagccggtctggttgttgccgacaagagcgttcttcaggataagcagttccggctgatcagtgtgaccgctgagaaatggctgcctgtgacggaggtccccgtggacagcgtgaa

SEQ ID NO: 289613 - DNA, 130 bp, Zea mays
tctcgagccgagcaggatagcttaaattgctgcagttgatgtccacttagtgcctctccaggtggcataggaatgcaggagtgtagatgaatgctgctgattgtgttgattctttgccactgaatttgtt

SEQ ID NO: 289614 - DNA, 304 bp, Zea mays
catatgtccagttgcaacatgattacattttgggaaactatcctgtcggcagggatgatgcttcacaactctctgctctgcagatcttggttgagattggattcatcgacaatcctgagtcctgcgtcgaatggatatcacttttagagagatttcttcctagacaagtggcgattaccagagcaaagcgagactgggagcttgacatcatttcacgctttcagttaatggaacacttatcaaaggacgatgcacggcaacaatttctcagaatcttaaggactcttccatatgggaactctgt

SEQ ID NO: 289615 - DNA, 306 bp, Zea mays
gttgatccgaacaagctcatgcagatcacctcggtggatcgctacatcaagtaccatgtgcaggagttcgagagggcattcagggagaggttccctgcctgcacactgtcagccaagagacatattgactccactaccaccatactggacgtccatggtgtggggttcaagaatttctcaaagaccgcaagggagcttgtccaacgtatgcagagaatagacagtgactactatcccgagacgctacatcagatgtatgttgtgaatgcaggcagtgggtctaggaatcccttaacactgttccag

SEQ ID NO: 289616 - DNA, 372 bp, Zea mays
acgatctctggagcaaatttttcaagctagccagacacttaactcacagggttggagatataagatgcaggcctcaatgttggagatttacaacgagactatacgcgacttgctagcaacgaatcgcatggctgctcaggatgttggtgcttcaaagtacagtatcaagcatgatactaatggtaacacgaatgtgtcggaccttacgatcattgacgtaactagtatcaacgaagtttcttctctccttaggcgggctgctcagagcagatcagttggtagaacacaaatgaatgaggaatcatcaagaagtcactgtgttttcactcttcggattttcggtgtaaatgagggaacggatcaacaagtgca

SEQ ID NO: 289617 - DNA, 369 bp, Zea mays
ctgttccaaagactcaaaggttaaagtttgggacacagtggctccttcgagtggttcatcatcatgtgtaggcagtgctcacctcaactcaaacggtccagcaattgctatgaaatgccatgaatccctttgctatatcgctgctggagctgaagtgacagcgattgacttgaggacaatgaagaaggcttctgtccttgcactccagaaccacagaagactttcttgtgagatgatgccttctgaatggtgaatatgtactggcacgaaagacagggctcttctatgggacatccgcaaggctcaggagctcccaaacacagtggcggagatgcaatcgagcggcccggtgacattgcttcacttgga

SEQ ID NO: 289618 - DNA, 272 bp, Zea mays
cttaaagatcagccccctgttgtccctggagatggccctattgggcttattatggctcctactagagagcttgtggtccagatacatgcagacatcaagaagttctctaaggtgcttggcatcaactgtgttgcaatctatggtggttcgggagttgcacagcagatcagcgaattgaagaggggtgccgaaattgttgtttgtacaccgggaaggatgatcgatatcctttgcactagcagtggagacataactaacctgcgcagagtgac

SEQ ID NO: 289619 - DNA, 268 bp, Zea mays
gcactggatagatgattcttggcatatgcagaagagatttgtggggtgttttcatgtagacggaaggcatactgctattaagttggcacagtgctttactgaagtgatggtaaaatggtttgctgagaagaaattgttttcattgaccttggataatgcatcaaataatttagtggcagtcaaagacattattcaagatcttagagtgaatgcttcttcttgtttgatttgtgatggaatattctttcatattagatgtgcatgccac

SEQ ID NO: 289620 - DNA, 247 bp, Zea mays
gtaatgttgtgtcaagagctccctctcctgatttcagaattaattgaattgcacttgctggcagatgctgtgtcatcagccttgttggcaccttttctggattgatgcttgctgttgtggtccatgaactcttaaatcattggagttcaaaatgataaagtagtgtgttcacagttgagcctgtgatgattagctatacatatggaattaccatcagatttacttgtgaagtctgtttctggcttta

SEQ ID NO: 289621 - DNA, 284 bp, Zea mays
cacctgaactatgcagctccatagaactgtgtacttgtagttcaataggactggagatagaagacccataagaggcgggattgtgtggtaattctgatgctgggtttccatcgtggcttgctcaattagttgggaaaccaactatttcaagcatttttgacagtgggaatgaaattctggatcacaatgacttcagatgcatctccaacttccacagcaacatgttcagttcaaactcaagttgtttgaattccatgtcgactccagagcagtcgtacaaggtt

SEQ ID NO: 289622 - DNA, 278 bp, Zea mays
gcctgctccgtgaccgctgtggctttggtgatagtgcatcatcggaggctgcatgatagaacattagagaaggcagcattccaaccaaatgatgtcaagtccacaacccaaggaagcgcaagtcgcaccgtgtgagctcttgaggaacatgatacagacgtcttggagtggagtcacatgacattgaacggctgatggattatctgcggaaacccctatgctgcctgctccgtgaccgctgtggctttggtgatagtgcatcatcggaggctggagaa

SEQ ID NO: 289623 - DNA, 401 bp, Zea mays
acgtagctcgattcggctcgagagcacgggtcgcgccggaagtcgaagcccgaccggaggagccgcaccatcacccgttccacgggctcgggcattaacagcggccggaggcgatgctgctcctgagccagtgacgggatcggacggttcgtgtcatggtgatatgaaaaagaaccgtgtgctctggctcgactcaactagcttttctccattcctcaaggctgcaggggtcggaggcagtgatgggatccgtcagtactttactgacactgcttggtgcaccatgcatgagaactttgatgtctcatgtagtagtcatgtctgcttcgcttgttggtaattctatgcttcagttcggatgccaggatgtaatacgagtctacgactctacgagacaacat

SEQ ID NO: 289624 - DNA, 296 bp, Zea mays
aacaattacctcattaaacgatgtcaacctatgtgatatatagaaactatagcaatgcactggcatctaaaaatgcaatggtatgcaattctacatatttgagaaaaaatgttggacatcaacatgtaagaaactagatagctttaatatgtttgttctattatccctaagacatttgcgctaattgtttattactccgctattaatttttaaaacagccttataaaattatcatccagacaaggttataattattttccatgtcaatgtttttggacacttgctggttttagttg

SEQ ID NO: 289625 - DNA, 436 bp, Zea mays
ggattcatgacaatgagccattgatttctaaagttttccaagctaacctatttgctttgtaggcaagaaggtgagcaaggcacctaagatccagtgcttgtgaacccttgaccctacagaggaagcacactagaatcattgacaagaagattgccaagaagaagtctgaagctgtcgagtaccaaaagcttcttcccataggctgaaggaatagagaccgccacaatgagagcttggccaagagaagatccaaccgccaaggcttcctctggcacctccgcttaagaatgttcagtgcttttgagatgttttcaagacctatcttgttactgcttaggtaccttatgctgctatagcagtgttgcaattgcccctgtacttgacagatttgcattagatgctcaagctatagagggtaggttcctaattgtgacca

SEQ ID NO: 289626 - DNA, 293 bp, Zea mays
cggctcgagcagaaacagggtcaaataaagaagcgtgggaaaaagttaaaacatactatccatgttgaatccagtgatttggattttgagattcactatgcctttcatgatgaacctcatattttactagctcagattgccaaaaagatagctaggactagtcttgtgaaggcctgcaataacattgatcattgtaagatcgtcacgccaatgcacaaccatacgcgtctagagaccgccggagtgacctttgaagtggtatggactctcagtgaatacatcagcgtcaatga

SEQ ID NO: 289627 - DNA, 286 bp, Zea mays
cctactctcatctctctctttcatgatagccttcaccctgtgaacctctccccatctccaaagaaaacattccaaagcaatctacccaatgctcccataaagattggccatgcaccagtagtgcgcaaatgttggcttgataactatttcctatctggactctacttgaaagagaaaacaatgcacactctagtctccatcccactgttatatcctaaacggtttaaacgctgtttaaatgctactcagtagctaaacgtttaggttgtttatgctgtttcatccg

SEQ ID NO: 289628 - DNA, 296 bp, Zea mays
ttcaagaatcactcccttcaccatcaccatcaggagggaccacagcggccgaagcgatggggcggccgaggcccaagagaggagaacggcggatcgacgccgccattgaccacctctcccagtacggcttcgccaagccccaaatccgcaagattatcaacaacctcttgcagctgtacgggaaagatgggtggttgttcctggaggaggcgtcgtaccgtgttgtgcttgacaaactcctggaagaacaggcgcaggatgatcagaaacaaaagcagtggctgcagaagaggcat

SEQ ID NO: 289629 - DNA, 296 bp, Zea mays
ggccgccggcgctggagatggtggtggcgccggtgatgggtgcgagcactgccaccttctcgctgctcgaggactggctgctcgatgacatgccggcggcaggccatggatgggttcatggggatctccgccggttgctgtgcggatcccatcatgttctagttgctgtatcgtcgtcgtcgtggctgtctgtcatataggcttcgttctcaatggttagttcttgcacttgtaatgttggttgatcgaatgacatgatcaggtcgatcggccctatgtttccggtaataagccgt

SEQ ID NO: 289630 - DNA, 292 bp, Zea mays
ttctgtatcatagacatacagagagtgttcctccaattctagtccatgctggtctacactatgctgccattaccgatattgcatggtcttctgatgctaagtacctggcagtgtcatcacgagatggctactgtactataatagagtttgagaatgaggaactgggacagcctcacatactccccggatcaaaggaagttgctaatgggaatctgacacctgagaccaagaagcctgtatgtgcagatagcatgaaggttgataatagtgccaacaagcttaagatggaagc

SEQ ID NO: 289631 - DNA, 360 bp, Zea mays
ttcgcatccaaactgacaaggataatggaataataacaattactgattctgggattggtatgacgaaacaagagcttattgattctcttgggactattgcaagcagtggaactgccaagttcctgaaggcattgaaggagagtcaagaagcgggcgtggacaacaacttgattggccaatttggtgttggtttctattccgcatttcttgtttcagagaaggttgttgtatcaacaaagagcccaaaatctgacaaacaatatgtttgggaaggacaagcagattctggttcttataccattagagaggatgagacccggagcagctcattcctaggggaactgcttactctctatctca

SEQ ID NO: 289632 - DNA, 390 bp, Zea mays
cggcctctgagcagatcgtctctcgtactcgtgcgcctcgcttcgcttttcctccgcaaccatgtctgacaaacccgatatggctgagatcgagaaattcgataagtcgaaactgaagaagacagagacgcaagagaaaaatcctctgccttccaaagaaacgattgaacaggagaagcaagctggcgaatcgtaatgaggcgtgcgccgccaatatgcactgtacattccacgagcattgccttcttattttacttcttttagctgtttaacttcgtaagatgcaaagaggttggatcaagtttaaatgactgtgctgcccctttcacatcaaagaatcagaactactgaccaggaaggcctccccccgcctctcgcgcccacctgctg

SEQ ID NO: 289633 - DNA, 304 bp, Zea mays
cgatgctctgcgattaagcccagctaaactcgcgccgtttgtgctttggcgcacgcctggagctctcgagacgctcgcttggcgccgaagcggacgaggagcagttgtcggcgtccgctgccgtgtcctcagctccgccatctccttctccagctcgacgatcctctgcttcctgctcgtgaactccagcgcggcacgtcgagctcggcgcacagccacccgttctcggcttccacccgctctgcggtgtccctgcacctctggagctcggtcttcttggccgcgagctcggcctccaggactg

SEQ ID NO: 289634 - DNA, 462 bp, Zea mays
ctttcagcactatccagcactttcagataaacacaaggcaagctgctaaagcttaccatacactggctcaaattattttacatgactttatctcaggtcaaatttactgaccgactgaataatctcagatcaaatttattgattgcctttcttttcacagagttgtatctgcaacgtatttgtacctgtcatgaaagccatgtggcctggtttatatggtaatgctgggggtagcactcatgttatttcaaagaaacggaaacttgcggttcaagcttctcgtttcatggtgcaaatggtgcaaacccaattattttcaaccgaaagtatggaccaagcttcaaaaagttctgaaagtgcttcaggtttagcagatgcgtcaaacaattttgacatcagcgaggaaggacttgctatccgtatagcactagaggtagccagttgcccagataagaagaccgc

SEQ ID NO: 289635 - DNA, 368 bp, Zea mays
cagacccttcacattcccagttccctctgcgccccgtaaaccctagccgcgattcatggcccgcaagccccgcgcgcacttcgcctcctccgcctccgcaggaggcagtcgtcctctgaggaatctggctccgaagagttggaggagcctcctcgcctccccgagctccgtagtcctccgcaggccgcggccaacaacgccgactcgtcggaggcggacacggactccgacaccgacgctcaagctttccagatgcgccaggtgccccgctccctcactaagcatacgcatccagttccccagcgagaatccgatcccgaagaggaggagggcgagtcatcggagtcggagcatgagaccctgtgcct

SEQ ID NO: 289636 - DNA, 286 bp, Zea mays
ctcggacttgtctcccccgagtgtcgtgtcgcacacctgcgcctcctcctcgtcggactcggctcccccctagagccgtgtcgcacgcctcaggtacttctgttctccgaggttcctttggtttggttctgctcaaggtttacgatggttgcctatcgctgccctctgtgctccgtgatgtctcgaaggtcatgtctagtaggtccacgaacgatccaagcaaactggtcatggggtagctgaaagcactctgcgtggttgggatatagctaccatgggttcagta

SEQ ID NO: 289637 - DNA, 313 bp, Zea mays
aggtgcatggcacatgcattggtacactgattaagctgatggaggtggctaagccagcaacaatacaggagtcagctggtcgtgcactgcttgctctgtttaccttgaagtctaataggaagggttttgtcagggatgagaagagtttaacaatatgtgtgcggatgcttgatccccggtttcaggagactgataagaagtatccactctcgatctttctagttcttgccatgcgtcgcgggaacgggacacgacgacgacttgttgatgcctggttcttgtcagcatctacagaagctggctgatgctgatg

SEQ ID NO: 289638 - DNA, 500 bp, Zea mays
gacctatgagactttggatgccatagagattcaaattgttcttgaggggaaaaagttggaagtgagatgataactctcttgatatggatgcttgctggttttattgcaggaatataagtagcattgcagtagtctacttttacaacgctttcccctcattcttgatgtggtgtaattgcagggtgtgaaatgctttgtcaatcatttgtcacatttatccagtttgggttattctcattatgacacctattgcaaattagcatcccatggcaaatatattttgaaaaaataaagaactatcaggattgaaaacagctcttttgaggaatgtcaattagttattaagttgaaagtaattaatgattttatgtttggttactctactagatttgataaaaattgtgcctttagccttctatatacatcagtggaaacttaagatgcagtaattatgttccagattgaccatgaataaactattttttaatctaaatgtagag

SEQ ID NO: 289639 - DNA, 266 bp, Zea mays
aggcgctgatgaacgcaacggcatccgggcgagcatgaccaataacgccatggccgacgccctccgcgcggctccccaaggtcgaagggatcgaggagtacgttaagggtctgcagccgggtctccgtgccgcaaacggcggctaagccggtgattgaggagcagaagcaggagagtccgcttccgcgtggccgccgcgtcacggcccagtcatcggagcccattgaggcggaggaagacaaggaaaatgatgcaaagcgacagtc

SEQ ID NO: 289640 - DNA, 327 bp, Zea mays
gcaacatctgatactcctgatgatgctattcgatcatccagtatcgcccaatgcttcggtactacctctaatgatgacacggcttgtaaggatggaaactttgccaaccagaacgacacctgtaagggtgaaaattttgtcaaccagaaaaatgtcacaatgtaccaatctaatttgaccatggaacctatacctcgagctcatataaatgtggattgtttcacttcttcctgttcaatgactcctgaaatcaaggactatggcaacagaggtgaagatcgtgcgaaagaagcactagtgaactcacaaaacatgacaagtaatgaa

SEQ ID NO: 289641 - DNA, 308 bp, Zea mays
  unsure (1)..(308): unsure at all n locations
ggagccagtcttggggcccgcttctaccggcagatcgaaagacatccggggatcatcccggtgatcggcttaatctgcctgggcatgggcagcgctgcgctttacttgcctgcgactcgcccttcgcagccccgacgtctgctgggacagatagaacaacccggagccctggaaccgcctgagccccaatgaccagtacaagttccttgcagtttccactgactgcaagntgctgnagaaggaccggccagacttctaagccaggctgggctgccagtgccatgcaagccacagccagccagcccatc

SEQ ID NO: 289642 - DNA, 287 bp, Zea mays
atcagatgcccaaaattcccggctcgaagactgcaggcatcggacgcgccccccgccgagaagctactcgaatcccctccaaaattcggaggcgagagccactgatctatcgcaaaacccatcaaattacacaattcaaatcagccaaccccacctacagccaccaattcgtgcgcatcaagtctagccccctaccccttcgcaatcagtgaacccccaatccacacacagcctgcaaatagctggatcaggatttggtctcggactctcgatccaccattccccga

SEQ ID NO: 289643 - DNA, 420 bp, Zea mays
ctctctttgttcctcatatggcgtgaccgtcgaggcgagcggagcggcgagtgcaagagcagcaggaactgggaactcgaggggagcaggtagcgaggaagagcggcgagaggtgcaatagacgagaagataaaaaagaaagaggagatggaacaatttgaggttgagcttaaagcaatgcgtgaggctgcggaatggagacgaatacaaggtgtatcactcgcaggtgatgatgaacttttagcaggtccaaaagagtcacagagaccaacgagagatgaatggatgaccacattgccacctgagagaaaagcaggagtaacaatgcattcaactacatcatttagtatgaatggtaaagaaggacgtggagacacaagtgtctggactgatacccctcttgatagagcacaaaagcac

SEQ ID NO: 289644 - DNA, 240 bp, Zea mays
cgtccactaatgcgttcagcattgcaactgctgctgccaaatgctgagcattcgttgccaacatagatggtcactctgataaaactgtcaccctcaatgggaggatgctcacgttttgagaccgaacctatatgtaccaccaaaacaatatcctaattgcaaggaaggtgaccttcctctcatcatcgcgattgactagcaaccaatggccctgataggtgttatgcaagtgtagggcga

SEQ ID NO: 289645 - DNA, 326 bp, Zea mays
aggagaaattgcatgcatgatgggtgctcattccatggctcgtataaggagctttgcaagcatgtgaaatcgaagcaccctacagcaaaacctcgtgaagttgatcctgctactgcagatgagtggaaaaggtttgaatgtgagagagagcggcaggatgccatcagcactatcagggccatgaacccaggatctgtgatcatgggggattatgtccttgagttgaatggtggtggcaacaaccatttgctctcagatggagataactttgacttaggggaaaggctcaacttcttcacatccttagatcgtactttgaatgagag

SEQ ID NO: 289646 - DNA, 312 bp, Zea mays
  unsure (1)..(312): unsure at all n locations
ataatgaccnaaaagttcacagccaagcagaagctgaggtgcaggatattatggttcgtactagctgctcaatatctgaagttttagctcagaaagttaccagcaaagaacagccctcccaaaaaagcatagaagttggggatgagtgctttagaccttctcaagatatggattatgttatgatgtttgactccagcaaagatgagaatggaccaaatccagaaagattgacagctgaaggtgattgtggcgatcctcatgaacgtctggatttagtcacagtaggtgataccggaaaaagggttgtagaca

SEQ ID NO: 289647 - DNA, 385 bp, Zea mays
cggagaccagggaggtcatggagttcgacgccgccgacgtccgcccgcacctcgagtgggttgacggcgagtggcgctccccagataacatggagatacccaagacaatgccatatgcaaaaggaatgcaaattgaagtttccaagtcgcaagacaattctgttgttgcttggtcacctgcagttgtcgcaaagacctatctggaagaataacctattagtcgactacactctttcaaagtgttacggtactacattgtctgaggagattgttgatgtgaagcatgtgaggccttgcccaccacaagcatcagagattagtttctgcatcaatgatgaggttgaagcattccaaggtgattgctggtggctaggggtgattacta

SEQ ID NO: 289648 - DNA, 467 bp, Zea mays
  unsure (1)..(467): unsure at all n locations
cgactggcagatgtggagattggctccggcgggacgagtagcgctggcggccgcagagatcggcttccgtggtctgcgcgagattgacgacgtcgatgccctacaggggaaaatggaggtttcgggaggatcagcgagctcgtggcagggtcccctccagagcgaggatgtcaagctcgtcaccgcatgagacatgccagtgagcagcagtttcgccggttctttctttatgaagtggatgcaattagaaaggcgtgtgccagcttggaagagtgctaccttcctccatgtacgatcagttgtggtgctgaagcgccatcacacactgtgttgtcctaaagatcatcattcacgacaacagacagatcgacgtgganatatgttgccagaatggcagcatgactgggtctaacaatgagtgtgatgcagtcaagtgcatggtagagatgatcgaatggtattgagta

SEQ ID NO: 289649 - DNA, 420 bp, Zea mays
ctgatattgcttcttcagttgctgatcaggaggatcataaggaccaagatgaaaaggaccttgcagatgttggaagtgaatgctcagatggtatcaactccatagatgttgaactagaccacagtgacatcgatgaccgtgagattgctctacagcactgtgtctttgaaagagcacaagatagggaagcacatcttgtttcaactaaaggtaaaggacgtgaagaagattatgcaccagaatcagctgggagttcaacgatgccatttcatgcagtccccgaactgcttatctgggaagatggagatggtgacaacagccttggtgctaaaccttctttccaacttaacacagtagttacatgctcagaatgggtttctactaccaagtcacctgtggagggcgaatctgatactgggg

SEQ ID NO: 289650 - DNA, 333 bp, Zea mays
acgggacgagaaagcgaaaccctcacggcgccggaaccccaccagtcctccaccacctcccaattccggcagcgaataaacgccactagattccggccgcggtccctcctccagcgccggcgtcccctcgattggctgcgaaccttgcggcttcgttcgcgccatcgcagatcggggctggtttgtctagatagaggtgctctgttgcactaggagagggtgggggcgtcagagctgccggcgttttattttggtcctttttcagccggtgagctgcggctttctcgctaattactcggcgcggcagcagacttgggctgcacaagcttgcta

SEQ ID NO: 289651 - DNA, 284 bp, Zea mays
gcagtcagcacgtctccgtccccgacgatgccggggagcaatgccaatggagggcgcagctgtacggacacggccgaccggccatcttcacccccctctccttgccgccctcggttccggactctgctcccctgccccatacccccaccgctcctcacgcctcgcctgactgccgaggcaaccccggaagctcctcccgcgcgcgaacatgatttggcctgcaacaacgcagaggaggtgatcttatgtaactacaaaagatagtaatggggatatccaaggtg

SEQ ID NO: 289652 - DNA, 483 bp, Zea mays
gccattgccaaaattcgtcaagaattgatgcgtgacataccgttcttagtcataattgataatttggagagtgagaaggattggtgggataagagagtcataatggaccttctgccacactttggtggggagactcacttcatcataacaacacgtcttccacgagtgatgaacttggaaccaatgaagctttcttatttatctggtgctgaggcaatgactttaatgaagggaggtgtcaaggaccatccactggtggaaactgatgcactcaaaatcattgaggaaaagcttggaagattacctcttggcctaagtattgttggagctatactctcggagcttccaatcactccaactagggtacttgacacattgaatcgtacaccgcacatcaggtactttgtcatggaatgatagagaagttctcagcttgaagaatcatgaaatccttgtccgcctgctggatgtgtgcttatcaat

SEQ ID NO: 289653 - DNA, 286 bp, Zea mays
caagagaaagaatgtaacctatagaggaaagaaactccttccattgttcgacgatgctaccgtggaagctggaaacgtcccccaaggtaatgatgcacagcattcaacagaggtcacactggaccttgctagagagcaacataagcttgcaattgccaatgaaatcgatcaggtacacgagaggctgcatgctcttgaggcagatagggaatacataaaacagtgcgtgaggactttgaagaagggagggaaagggtttgatcttcttcaggagatattacagcat

SEQ ID NO: 289654 - DNA, 297 bp, Zea mays
atttcgattcgatttgccggcggtgcccgcggcggagaggatggcgagctccttctccttcccgctgatgaatccggcggacattgcggaggcgctgcacagctactgcatcgcgcccagccccggcctccgcgccgagcacatcgtcaccccgcagcccggcctcgtcgccgaggtcctcgccctcttcctcgccaacttcgtcggcgacgacgagcccgacgagcagctagagtttcaggcgctgcaggcgatcggctacccggaagcaccacatgcgcgccatagcgctctcgc

SEQ ID NO: 289655 - DNA, 381 bp, Zea mays
cgttggtattacttgaggctacttcagacacgcaaggtacttcaatcgccaccggcaacagtggaaatggaattgagaaccgtgtcttggataaacaaattattgactggaagcttaccttacatcaaataggccttgatgttctgcgcactgaccgcaccatggtattttatgagaacaaagataacatttcaaagttgtgggatattcttgctgtctatgcatggatcgacaaagaagttggttattgtcaaggaatgagtgatttatgttcacccatgatagtgctactccacaatgaagcagatgcattttggtgctttgagagattgatgcgtagactgcgaggtaatttcagatgcacacaacagtctgttgggg

SEQ ID NO: 289656 - DNA, 300 bp, Zea mays
agtgccactcgctggagcggctcgacatcactgcctgccctatgatcacggacaagggcctcgtcgctgtggctcagggttgcccggaactgaagtcgctcaccatcgaggcctgctccggcgtggctaacgagggtctcaaggcaattggccggtgctgcgccaagctacaggcggttagcgtcaagaactgcgcacatgtcgacgaccagggtgtgtctggcctcgtctgctctgcgacagcctcgttggcaaaggtccggcttcagggtttgacatcactgatgcttctctcgccgt

SEQ ID NO: 289657 - DNA, 306 bp, Zea mays
gccagctagcaactcaaaggaggaagactagaagatatatagccttctccttgtgtgacactcataaataaactgttagcagcttgcgagcactgcaagatctttctgctggcatctgaatagtcagctgctggcatctatccgggcacctctcgaccagccagaggcagatacctgatcccaaactagctggccaacatggcgaacgatgaccctgtggacgacgaaaaccccagatcccacaccactaataacagcatccatgacaagttggctgaagtgttcgacatggtctcagtccacaaa

SEQ ID NO: 289658 - DNA, 381 bp, Zea mays
cagaaattggtcagcttgtgccttggccccttggtcagcatcttgaagatatcatcactgatatttcagaatttgctgccttatttccaccccacataaagttgacaattatgtctattgcaaggaggaggaggctcctgaatgatgaagttttgacttctcttgctgaaagttcctgggaaatcctagatatatctggatctgatgtaactgatgctggtttggctactgtagcgaatgtttgtagtaatttacgagcagttgatattagtcgctgtgaaaaagttacgacttctggtgtgtctggagattgtatgccaactccgtccttggagatattgagatgtggaggctgccaaggattgaagtaccggacgatgt

SEQ ID NO: 289659 - DNA, 296 bp, Zea mays
gtgggatttgcaactggtgggaagactttcttcttgtggggtggctgtatgatgatgcatgctgatgattttaggcaagaccggtacggcattgtcagtggattaagagatggcggttactcagatgatatgacactcgctgcaatagcaggacagcacaaaaggctcatattttcaccacctgttgctgtgtttccacacccccttgccagtgatcttagcttctccagatactggaattacctcaggaaacaaacttttgttctcgagtcatatgtatcgaatgtaaactggat

SEQ ID NO: 289660 - DNA, 317 bp, Zea mays
ctcgtgtctcacaagcatagcgcaccaccacgggccacggcaatacggcatcatctccaaactcccgaggggggaccatcaccgctgctgagcacgcccgccgcctgcccttcctcctcccacccgtgccgcagctttcgattcctgcccgcctcattgctacctggtcgggccgcggaattaatgtcgcgcggacgaaatccggtaagctccggcccgattttcaactctcccctccctcatcctcgattggggttgagaaattgaatcaaaccccccacacccacccacccaaaacagtcgcccttcctcggacg

SEQ ID NO: 289661 - DNA, 369 bp, Zea mays
gattcttccttttattgagcttgaccttaaggaaattgcacaaactttttctaagtttgcctgcaatgcgcataccatatgtgaccctgaacttaggcctcttgggactggactgtaccctgtcatatccattattaaccacagttgtgtaccaaatgcagttttgatatttgatggtaggacagcatatgttcgtgcattgcaaccgataaataaagatgaagaggtatctataagctacattgagactgcggcagtcaccaagaagagaaacaatgatctgaaacagtacttcttcacctgcacatgtccacgctgtgtaaagggatttgatgaggatgcactacttgacgggatcaggtgcaagag

SEQ ID NO: 289662 - DNA, 353 bp, Zea mays
ctcatcctgccgcactgccccattgtgtctgcgactctgcgagtgcgcatccttcgtctttccccttcccagccgccctcttccccccctctcccggtcgcctctaacgtcgctggtgactcacgaagacctccatcgacggcggtgaaactggggccgacttctggagggtttgacttgttggatacagcgccggctcttccaatcgccgggtgctctctgccactctgtcttgcggagcccccaccgcggaaaccggttggtgcgcgtggccatggcggtggcgaaggtcaaatcggtcgccctctccgtcagtcacaagtgccggaacatcttggccgccggttgggaag

SEQ ID NO: 289663 - DNA, 304 bp, Zea mays
ggaaaagcctaggaaagccaccgctcaccttctccggagcacccccaccaccaaacacagctaacagcttggtgggatggggggaaaaggcttccctttggcttgcctgtgagtgggatctcttcttcctcccccagagcccctgccctcttccgccgacagcgagaaagcacgcggcgcacagcaacacgtccctgccgttccttttgactccggggatccctctcctccttgcctgccgaggaacccactagcttcctactacttcccctccgtcctctcgatccctctccccgttcccttg

SEQ ID NO: 289664 - DNA, 404 bp, Zea mays
  unsure (1)..(404): unsure at all n locations
atacncgccgtcctccctgctcctgctgccgcgtgcccctctccggccacccgccgccggcgcagtgtccatgaactggcacctctttcttcgcccggtacccattcagttcgtccgcctccttctcttcgagtttgggtgcccatggagaccagcagtgcgcccgccgccgccaccgaggccggctggtacgtgcttggaccgaaccaggagggcgtcggaccctacgcgcttgctgagcttcgagaacatttcgcaaacggttatttcaatgagagcacaatgctctgggcagaggggaggaaggaatggatgccactctcgtccatctctgagctacactccgcagtcgcagcgaaggatcaatctgaacaagatgctccagatgttgatgatgattttga

SEQ ID NO: 289665 - DNA, 408 bp, Zea mays
acgaattcggtcattatgttagattggcaactcatgtcaattttcgtacttttgtgaagtcagctggcattgatttttacccattgggtggtgatcctctcattatggctcagtatatgacaaaaaacaaagggtttttcctggcggcaccgacagagattgccattcatagaaagcagcttaacgaaatcatcttctcacttctacctgcatgcacagaacctgatttggatactggaacacctttcagagctcaggcaataatcgcgaatcctcctgcttatggtcatctacacatagcagaagcacttggagcacctctgcatatcttcttcacttttccatggacgccaactaatgaattcccacatccattggcacgaatgcctcaaagtgcaacttataggc

SEQ ID NO: 289666 - DNA, 272 bp, Zea mays
cacttggaaagattggggcgctcatttgctgggaaaataaaatgccacttttgaggacagcgctgtatggtaaaggtattgagatatactgtgcccccactgctgactccaggcctgtttggcaagcctccatgacacacattgctttggaggggggatgctttgtcttgtcagcaaaccaattctgccgcagaaaggactatcctcccccaccggggtatgagtttgcgggtttaggtgaagaccaatccgcggacactggtgtttcccct

SEQ ID NO: 289667 - DNA, 484 bp, Zea mays
ctccttcttctccggttctcgctcgtgcccttctctcctggcggagacggctgggcgagcggcgcggcccgttatcacttcccaggtcttcggcggcgacgagtttccaccaggctgaccggaacgcactgcgtggagaaccggtgagcagctgcagccatgtccgtggcggccggcgtgagcgacgcggccatcgcggtgcgcgacaagctccgtggactcgttggcccgaccaaggtcatacggtactggccggggaaggcgcctgagtgggccgatgacgtcgatgaggacgtcgacctcaggacggcacggctctcgctcgacaaggcgttccccagggacgaggacggcgatgttcccgccaaggatgaccgccggctccgacggctcgcggatacccgcgcggagaataaggaggagctgagtgcggatcaccgccgcatacggcatgcggagatcgtgtcaaccgcggaggaggaga

SEQ ID NO: 289668 - DNA, 284 bp, Zea mays
ggctcctcccaacccaaacgacgagaccctagcctcctcttccgtgttatgggatgccgtctaaaccctatccccactccctgacctcctctacttcctccgccgccgtggcccccgccccctggatgtccgcatctgcatggacggcgcccgagtcctgatcgccgctagtgccaccgccgtctgctgcctcgcctgcgctgtctggatcttccgctcctcttcctcctcgttccccgcatcctcaaataagcaccaaccccctcccgccaacttctgcggct

SEQ ID NO: 289669 - DNA, 370 bp, Zea mays
cttccctttgccccgctctcccccagcctcgctcgccatataatacgggccggccggcggcagctgggtccccgcggatgggctcggtctcgcgaggctagggtttggtcggtcgtctcgccggcgtcgaggccgccagcgctgctagctcgctctctcgcgttagggttccccgtagccatggtgctgcagcgcttctcgtggccgtacggcggccggagcgccaccttctgcggtagcttcaccgggtggagagagtgtcccatggggctggttggggccgtgttccaggtcgtcttcgatctgccccccggagtttaccagtaccggtttttggttgatggtgtctggaggtgtgatgagacaaaac

SEQ ID NO: 289670 - DNA, 304 bp, Zea mays
gccctgctcgccgacccctactgctggatcgcgtacggggtcatggagacgctcacgctgcacaccggtgtactgcttgctggagggcagcccggagtctctccaggatccgctcaccagttgctgagatgagatcgttttctttactaacaaagatttctctcctgagacagtcaacgctaaaaaaaaaaaaaaaaaaaaataaagaaaaaaaaaaaggggggccccccaataagtgaccccttcccccggggatttattccgggccggttccctgggggggaacaattttccccaaaatggg

SEQ ID NO: 289671 - DNA, 298 bp, Zea mays
cctccccgccatcaacgctctccatggaagtcgagtccgcgatgctcgcgtcgtccctaaaccccgccccgactctctccgcgtccgcgacaacccgatttccagcgtcctccaccccgaatcgccgccccggctctctcacatggaaggcgcgtctgcgacagcccgatctccgtggaaggcgtgtcctcctccccagatcgtcgtcccggctctctccacgcccgtgacagcctgctctctatggaaggtgagtctgcgatgctcacgtggattgggtaccccgcccccgctctct

SEQ ID NO: 289672 - DNA, 418 bp, Zea mays
ggaaggcatgggcgcggtcatgccgagtgatggtgcgcgtccccctctgctccgttttccaattagtgaaccagataggagtcttcttcctccccgaccacaccgctcctctccttccaagccctcgtcaccaccagcctgctctcattcctgtgccacctggatctcaactgcttgcgctcaacatgctccccacacactctcgctgcggcgtgtgcccgcccaacccgtgcatcgctctcagtcgcctccgcctcatcacaggtgatggcgtcgtcgtccccgcagtagcacaccgaggtcggctcgtcctcgaacctcgcgcaatttaggaataccagcattatatccatgaacatggacgacatcatctgtgacatctacgacctcgagaccgtcaacgctgccgcggcagcgt

SEQ ID NO: 289673 - DNA, 327 bp, Zea mays
ctaagtatggatggattgtcacttctgctgaaacctgctagtcaacctgatgattctagaatgaactcttctactcatcaatctggtgcatctcaatctgaccctgtaccaacaacaaataagaagcctggcagaccaaagtggctgaaaaggtaaaatccagaataatcttcttgccattgtggtacaatagttaaaaggggaaaaacttgtcaagttctcgggagaatttccattccctttcaatcttcttaagcgctgtgtacacagctctcatgcggattttaggaggataattccttatcgtcttttggtaagttagcatat

SEQ ID NO: 289674 - DNA, 349 bp, Zea mays
atttccctagcactgcaagctttacagatcagatatggtattcctaacaaaagcaacccatataggcagttcttgactagcaaagttactcaagtgaattacttgggcttccgtctgtatcgtgctttaccattcttgtatgaattgcggtgtgtacttgattggtcttgcacaaccacatctttaacaatgtatgattggctgaagatttatagtagtggtaaccctacaaatattgccaatcccattgttgatgtaagtgttaagattgatataaaggcacttggtgggagattaaacttgtttaagactactgcttgtgaaaaaataccttggacgtacttgaagg

SEQ ID NO: 289675 - DNA, 302 bp, Zea mays
cgcgtccctttcccttcttcccatccacgccagccaagttcaccgccgcgctctccggcggcaactactgttggatcgtagggcgaaggaaggaaggaaggggagccatgggaaacgcgtcgtccatgctgacccagtacgacatcgaggaggtgcaggagcactgcagctacctcttctcgcagcaggagatcgtgtcgctgtacgagcgcttctgccagctggaccgcagcgccaagggcttcatctccgaggacgagttcctctccatccccgagttctccctcaacccgctctccaag

SEQ ID NO: 289676 - DNA, 150 bp, Zea mays
agagaaggtaggtgaggttgctgccctacagaatcctttttaaaaatttgtcaccatcagatattctacctaatggatgcaccccaaatagatccatagcagagactcagcagagactcacatcaggtcccctgtccttctgttccacac

SEQ ID NO: 289677 - DNA, 297 bp, Zea mays
attggcgtctagatggcctgccctcatcagttcaccgcggatcagctcggtgctcgaagatgacagcttatgacctttgagaatgtctactaagaatcgccctttgtataatactactagatcctctcttttttgtattttctttcctaggactagcttccagtgttactgggctcttttcgtggtgtttctattatgactaagattacacagagaatgagagatggatccatctaaataaaggttccagatttttttaaaaaaaaaaaaaaaaaaaaaaaaaaaaaaagggggggc

SEQ ID NO: 289678 - DNA, 309 bp, Zea mays
ggccatcagagtcggcggccaggccatgtcgaggttctggaagccagggtcggcgaagccgagcaccctactcgtcgacgacgaggagggcggagtcgtcttcctgccctcctccagctccgtctcctcctccggctttggttacgcgagtctagagagacagcggcaacggctgccggtgtacaagtaccgcaaagccattctctacctcgtggagcggcacccaccaccattgtcgtcggtgagactggcagcggcaagtcgacgcagatccttcagtacctgaatgaggcttgtgggctgactttg

SEQ ID NO: 289679 - DNA, 293 bp, Zea mays
aaagaatgcttcatcagtgccacatgcccaaccctcaccaccaagtgtagctccagaattggcacccactggtagatctcatgctcagggatggaaatccagtaatcccaataacaaaacaaatagattacctgccccatcttatccaccgcctcgtgctcaagggcccgaggtctcacaaagcccaagacagactgggactataaactatactcaccatgcgcctccaccattccctcaaggacaccctagctttcctgtacactcgtcatccccttcacgagcctcatcgg

SEQ ID NO: 289680 - DNA, 291 bp, Zea mays
ccatcctgaaacctgtgccatagacgaagagccacacaactgtgaggcagctcggggttggaagttgacactgctctgcttgggcctgttcatgtttgctgttggggagggctgcatgcgtgcctgcgtaccacccctcggtggagatcagttcagcgacagtggacccttagaaaccgcagctcaagagtacgttcttgaccaggcttaagctcgcaaactctctcggagcgatgattggattggccttcttagtgtggattgagaataactggggctgggacatcgggt

SEQ ID NO: 289681 - DNA, 257 bp, Zea mays
atttaaaaccagagtcattctctcgtcgtgtttgcaggcctttcagattgaaccgattacttcaacggtgtcatacatgattggtagggatgtgatggaggggagggggcaatgcaggtgcaggtgttgtactgtttcttagaattatccagcaacttcgatgggaggaattttgtttgagcttgtgggcccaatttgagaagttttacatatagagtaaaaaaaggtcctgctctcgtgttttcgtgtaaaactgg

SEQ ID NO: 289682 - DNA, 299 bp, Zea mays
atcttaaagagaaagataacggcagttctccagaatcttcaccattgaaagacaaaacaacagcagacgatgattcgtaccaatgtttgcttggttctgcaagcgatgtgcgtgatccaataactactccggtgtggttcttgttaatttctttgcctaaccagaaagaagatccacaactgcctcagttatcaaagagttacatgagaatcaaagaccgcagtttgcagatttcttctgtacagaggtacatcatgaagaagctggatctagctaatgaaaacgaggtggagatcatc

SEQ ID NO: 289683 - DNA, 310 bp, Zea mays
tatggctccacaagggaagaagaagaagaaagggccatctgagcgaccaaacacaccccacctgcaggcaatccggagctccgttcagtgcatggctgacactctccagagagtccagaaatgtctgtcagaacagatgaagccagaagagcaagctctagacatgctggtgtcacatttgcaaggaaccggtgccgaagccctggacagatcgcccgtatcttggacgagagcgcacagctgccagctccgaaatcggtggccggatcgcccattctctagagtcgtggaccgcgcctgcgtgatgaga

SEQ ID NO: 289684 - DNA, 372 bp, Zea mays
catggatcaggttgaccaagcggggatgctgaaacaatctggctgtgtgcttcctgcattgagcgatgccattgacagtgtgctttcctcagctgatcatttttcaaatgactctgagaagctcaggcaggctttaggttttgattatctgaatgaagccaatgctagcagcaagagtattgcacctttcggggttgcacttactggcagccatgcctttttaaatggcaatttctctgcttctaggcccacaaatggtcctttgaagatggagctcccttcactccaagatactgaatctgatccaaatagctggctcaagtatactgtggctcctgcaatgcagccttgattagtagatccttacctgca

SEQ ID NO: 289685 - DNA, 221 bp, Zea mays
cactctggactagtctcgtcttctcttctcgcgaatggcggcgctgtgagatctccgtcgctgccccctccgccagtgatttctgggacgcgcgacgaacacgagttggaaggaggtggtcgtgctttgggcggcgaaggacctgggcgctacagcctcagaccctgacagatcacaacctgacagatcacagagtgctgagtggaagcaacatatgaagc

SEQ ID NO: 289686 - DNA, 306 bp, Zea mays
cagaccagagatgggcaatgtgagcggtcgagcggaagacctcgtggacgccgacattgatgacggcaacaacatgcgacgtgcctcttcctcctctgcgggctacgtccggggcggtgggtcatcatcatccccgccggcgagcccgccgaggccgcattcaccgcggatgttcgtgccccagagtcctgtaactccattgcaaagagctacagaagtgtctccctccggtgttcaaccagatattgatgaatccacagcaggaggcttctgatggcccgcctcaaaagaaaattcccacgttgc

SEQ ID NO: 289687 - DNA, 294 bp, Zea mays
cacggcaccttccgctccaagcttcagccaagccggagatggcggggagcctgcaccttcccgtggtggacctcgcgttgccggacctccgcgccgccgctgaatccatccgacaggcgtgcgtggagcacgggttcttctacgtgaccaaccacggagtggaccgcggcctgctcgaggcggtgttcgcggagagcaagaggttcttcgacctgcctatggaggataagatggcgctactcaggggcgcaaaccaccggggttacacgccgccctacgccgagaagctcgacg

SEQ ID NO: 289688 - DNA, 314 bp, Zea mays
cgtccgcctccccacgccccagaggccaagccaaaggtccagcaatggcgaggtctccccggcttctcgcgctgctagtggctgtcgtctggatatgcggcgcggccctagtagcgcgtggcgacccgatgctcgagaggttccagcagtggatgggcaggcacggccggctgtacgctgacgccggagagaagcagaggcggctcgaggtgtaccggaggaacgtcgagctggtcgagaccttcaactaccatgggcaacgggtacaggctggccgacaacaagttcgccgacctgacgaacgaggagttcag

SEQ ID NO: 289689 - DNA, 303 bp, Zea mays
ctcggccaaagctgactacagcctacaagcgaacgctagaagagctcttcccgatagccatggccaagcccccgcttcaaacggctgcgatcatcctcctcgtactcctctcggccccgtcgtgcctccacaccgtcgatgccgccactttagggttctgttggggcaagtgcagcgttcggtgcgcgggggcgaccgcgcggcaggcgcgagccgcgtgcatgagctcctgtggcctctgctgcgaggcatgcaactgcgtgccgcacgacatccatgactcctgctaccgcaacatgctca

SEQ ID NO: 289690 - DNA, 277 bp, Zea mays
ggtccctcctgtgtcgcttgtccctaattggattgtgcacagaaagctactacaccccttccggaagcaggtgggtgggtccattttatcagccaaacttgcatttgagagaggttgggctattaatgttggtggaggatttcaccattgttcggcagatgaagggggtggattttgtgcatacgctgacatctccctctgcatccattttgcttttgtccgtctaaatatctcaagtgtattgatcatagacctggatgcccaccaatgaaatgga

SEQ ID NO: 289691 - DNA, 268 bp, Zea mays
cggtgtggctgtgccgttggtcctgtgcggtcacttagccaagatgcctgaggaaacccagacccaagaccaaccgatggaggaggaggaggttgagacgttcgcctttcaggcagaaattgcccagttgatgtcattggtcatcaatactttctactcgaacaaagagatctttctgagagagctcatttcaaattcatcagatgcattggacaaaatccggtatgaaagcttgacagatcccagtaaattagactctgggaaagag

SEQ ID NO: 289692 - DNA, 362 bp, Zea mays
cagcaagtcagcctcaccctctcacaccaccgccactcactcagtgctccaccccaagaaccaagcagctcacccccatggcgtcctacgacaaggccttcgaatcctacaagaaggccctcaccaccgccgcgtccgtcgctgcgtccatgatgctggtgcgcagcgtcgtgaacgagttggtgccgcccgtgttgcgcgatctggtcttctccggcttcggctacctgcgctcgcgcacgtcgtccgaccacagcatcatcgtcgagaagaagaacgacgggttcgctaacaactacgtctactgcgctgtgaagacttacctcgccacgcgcatgaacaccgacatccagcagcgcctg

SEQ ID NO: 289693 - DNA, 370 bp, Zea mays
gggttgcccaatggatgcttcaaattcctggtgcatcaagttacataggttgcatcgggaaggataagtttggtgaggagatgaaaaaaaatgcacaagctgctggtattaatgcccattatcatgaggatgagaatgctccaacgggcacatgtgctgtttgtgttgttggtggagaaaggtcacttattgctaacctgtctgcggcaaactgctataagtctgaacatctgaaggaacctgagaattgggcacttgttgagaaggcaaaatatatttacattgctggatttttccttacggtatccccggattctattcaacttgttgctgagcatgccgctgcaactaacaaggtgtttatgatgaa

SEQ ID NO: 289694 - DNA, 296 bp, Zea mays
cgcatatcccatcaatatccagagagtttgagagagcgagcattgcgagagcaccatccgacatggaccgcttcatcacccagaccgaggggaggagggaccgcaagcatatcccatctgtatctagagagtttgcgggagcgagcgctgcgagcgcatcgcctggcatgggtcgctccatcgccaagtctgaggtgaggtgggaccgctttgtcgagactggtaagggggagatggtgcaggatccactgaccacggagactgggggcaagatggagcacgacctgctcatgtac

SEQ ID NO: 289695 - DNA, 294 bp, Zea mays
catgaagagccagcattccagaattttatgcaagaatcgatggcacaatactggaagagatacaatagattggagactttagcacacttcacttgtttctagaagtccagaattttggacctccacgtgaaagaactgttcttacctctgaactgggggctcccataagggataattttcctcataatagcaaggtttctcttattagaaaaatcttgtgactcaggtgaagtcagggatagaagacccttggacctggcaggttaatgccgattattccttggcctttccctt

SEQ ID NO: 289696 - DNA, 307 bp, Zea mays
atcctaatccccgcgtctaccggcctcttccgattaataatgcgctcctcacttgattcctggatatttatgtgtgcgagcatgtgcatccctttccccatctagccatatttctcgggccttcatcacgatctgggcatggcagtggtgccttgagggatgaagctgccatgggcgtgcgcagagaaagccgggggccgccgcatcgaagctgggcgtggaggagagcagtgcccctgcagccgtacgtagtgcccgtggggcgtgccgtcggggttgaccagcaactgattgcagcatgcttgtt

SEQ ID NO: 289697 - DNA, 295 bp, Zea mays
taattgctgagaagctgctgccagcataccggtcattccttggcagatttccacttagcgggaagcatccagagctctacattaagttctccgtggaggacctggagatagctgtgggcgatttctttgaaggtgttcctccttccccacataacaggaggaaatcacatggatgagggacttgtacctcaggtattcaactggctgatgttgctatgtattcttgtattcttcacagagaagctggttctggtatttgggctcggtttcgtgctgtcctgatagatgtgagtat

SEQ ID NO: 289698 - DNA, 286 bp, Zea mays
ctggacgagatcgctgcgctggagaacgagttctcaggcgagtgcgagcgcgtaggattctgccataacgatctccagtatggcctcttcatgatcgacgaagagacgaggctactgaccatcattgactacgagtatgcaggttttaacccagttgcttatgacattcgcaaaccattcctgtgacatggccgcagactaccattcaggaaagcctcacatattggactacagcacatatccagataccgatgagcggaacaatgtgtgcggacatacctgagct

SEQ ID NO: 289699 - DNA, 174 bp, Zea mays
cccaaaggccggcgccaacttcccgctgtccacgcgcaccgttacggccatctccgaggtggaggcgttcgcgctgcgcgctgacgagctcaagttcgtggcggggcagttccggcgcctgcacagcaagcagctgcagcagaccttccgcttctactcgcaagaatggcgcac

SEQ ID NO: 289700 - DNA, 227 bp, Zea mays
ctcatctccaccattgtttggagccccaacgcataccaagtcggtcgtcggggtataccgaacgggtcgacaaccctacatggggggaacatcaagcaccgagataatactcgtatgagatcaatcctcataccggggccgcaagatcgcgtgtgcagggccacaacggtcacaaacccggctcaggaccaggtcccgcaggatgagcatcatggatgatgcgacga

SEQ ID NO: 289701 - DNA, 289 bp, Zea mays
ttcgatccgtcatggcgactgctgcgccattgttgctcttgccacggtctcctcctccgcctctccctggcgctcggcgccatggcgtgaacgtgaagcccggggagcaccacatcctcaacaggcagagcttccccccggggttcgtcttcggcacggcgtcgtcggcgtaccaggtggaggggaacacgcacaggtacgggcgcgggccctgcatctgggacaccttcctcaagtatccaggcactactcctgataacgcgaccgcggacgtgacagtcgacgagta

SEQ ID NO: 289702 - DNA, 321 bp, Zea mays
cgcacttttggtagctgccactgggttggaaggggatgatattcctgtagtaaggtttctgcgccctagtcaggtggctgctggtggaatggagatggtgagcacaagtatacttcggcgatccaatcaaggggctgctgcaattgagtccgggacccctgagctccgctttcagagggtgatacagattagccagcagcacagcattgtgaggccagcatcagcgaaccacagtcaaggggcagctagtacagatgcggataggcttgtctgggcaatccagcgcacacataactcttatgaagcagcaaggcggcaaaa

SEQ ID NO: 289703 - DNA, 581 bp, Zea mays
tgattcactggaggtaacatggggtgtgagagtgcacatttcaagctaagccacgagatgactcaattgctggatccatctggaactatgaagagtgatacatggaaccaatttctcaggttgtgtgtcaaaggatacctagcagcaaggaggcatatgaatgggattttaagtacagtcaacctaatggtggacagtggccttccttgctttagcaggggagatcctatcaataatcttcggaagcggtttcatccagagatgaatgaacgtgaggccgctaacttcatggtacgaacatgtgctgatgcttacaacaagtggactaccgcaggtatgacttgattcagtacttgcagcagggtattgagaaatagtttgtttctcgttttttaagtggcgttcgtgtacatcaattgtatgtagccactatctttttatgtagaatttattttttgagttgtatcatcgggcaaggatggaattcatgtgattaacgtaggatgcttggtgcaaagaggcaattctttttgtttccttgcactgtaaaactgccaagaaagtagctagtaagttgatca

SEQ ID NO: 289704 - DNA, 269 bp, Zea mays
gtgagagtcggatacttcgtagattgagggagtttgcctctactgcggtcaaagggccggacagacgaagcacccctagtgtttaggcaatattctgcgggtcaggcttcagtattcctgaacaccatgctccataaaggtatggtgacgttctgcaattctgctgctcttgtaatggaatactaacatttttaggaacaataactacatacaggcatgccttgttttctttaagttgattacatacttgcgagttacgacgtgggggc

SEQ ID NO: 289705 - DNA, 374 bp, Zea mays
aaggaccccgcatccccggcgatctctcgtcagcgacgaggccggctacgtagacgccgaccccggccacggcttcgaggacatccgggagcaggtactcggctccgccgacaactccgcggtgccgcccccaatgtccggattcgcccagaacgcgcgcggcatgggcctacggcatgccgcagaaacgtcatgagcggcttcaagcccgacgccgtccccagctacgcctccctcgccgacgacttcgccgtgttcgaccgctggttacgcctccgtgcccacctccacgcagcccaaccgcctgttcgtccactcggcgacctcccacggcctcaccttcaacgcccgcaaggacctcatccatggtttct

SEQ ID NO: 289706 - DNA, 395 bp, Zea mays
agcagttatcattgaactcttcttcatcctcacctccatctggctgcaccaggtctactacatatgtggcctcctcttccttgtgtttgtgatcctgatcatcacctgcgccgagatcacaatcgtgctctgctatttccagctctgcagtgaggactacatgtggtcgctggaggtcttaccctacctcaggatcctccgccctgtatctcttcctgtacgctggtttctacttcttcacgaaactgcagatcactaagctggtgtctggcatcttgtacttcggctacatgcttctcgcctcctatgccttcttcgtgctgactggcacaattggcttctgcgcctgcttctggttcactaggttgatttactcttcagtgaagatcgattag

SEQ ID NO: 289707 - DNA, 296 bp, Zea mays
gttttatatgaagacaggcagctgcaaatatggttctatttgtcgcttcaatcatcctgatcggccagttgtggatatagcttttatggctccagttcaagctactcttccttttccagcacccattgtccctgcagtggcgttaaatccggctgcaaattttctgcaaagctttgatttccatgcaactcacgtgccggttgagcctatgccaatgatctatcctcaaagacctggagaaattgtttgtgctttttacatgaagacaggaccttgcaagtatgcctcagaattgc

SEQ ID NO: 289708 - DNA, 440 bp, Zea mays
tagagaagtagatgcacgtcatatggtgcaccaaacagattcaagcaaccaaagacatcagatatctgtggatgtgttggcacattctgccagtaagcctgcatggagaaatgattttcagcatgatattgtttcagatgatggaattgactggtcttctaatcaaaatttgataaaccagacatcattgaaacctgtggatctccctatttgttcttttgctgctgctggtaattgtccttatggggaagggtgccctcaaatgcatggagatctgtgtgcaacctgtggaaaactgtgcttgcatccttatcgtcctgatgagacggaggagcatatcaagttatgtgagaaaaatcacaaacgccttgtagctctgaaacgcagccaagaaatagaatgcagtgtatgtttggatcgtgtgctttcaaagcctactg

SEQ ID NO: 289709 - DNA, 359 bp, Zea mays
  unsure (1)..(359): unsure at all n locations
caagtctcccaacggcgaacgcgtcatcgctggtgccatcgttgcccagtcgggctgctggagcatgctcaagggaggcatgaccgcttactcttcgggacccgcagagatctactttgagagccacgcaccagttgacatctgggtggacagtgtctcgctgcagcccttcaccttcgacgagtgggacggtcacacccgccgctccgccgacaaggtccgccggcgaaccgtgaaggtggtcgccatgggcgccaacgacaagccgatggcgcatgccaacgtgagcatcgagctcctccgcctcggcttcccgttcggcaacgcggtcaccaaggagatcctcngcctcccggcat

SEQ ID NO: 289710 - DNA, 487 bp, Zea mays
gggaggagatgcggcgtcccgtgcacgccttaaaaacgagatccctggggtcaccactggtcaactgcgtcactgcgccgaatcactagaaaccccaacaaacggaatttcacacatccagcgggcgctaacgcaccgcaggtaagatcaaagaggaggcgatggctggcggcgggcaggcggcgatttcggtcatgacgcggatggcgaaggtggcggcggggttgggcgtggcggcgtccgcagcctccacgtccttctacacggtggacggcggagagcgcgccgtcatcttcgatcgcgtccgcggcgtgctcccgcgtacgatgtcagagggcacccatttgctggtccccatccttcagaagcccttcattttcgacatccgcactcgccctcacagcttctcctccacctccggcaccaaggacctccagatggtcagcctcacgctccgcgtcatgtcgcgacccgacgtcgaacacct

SEQ ID NO: 289711 - DNA, 266 bp, Zea mays
caagcatccattggttcttatatggatccagtcaagcaagggtcacagaagtacaccaaaaatgttgcttcaatgttgtgcaaatcacctgaagaagtggtcagtgagagacataattcaaagagttatcaaccttcaatggagcagtgtacacagaaatctaaggaatcaaagcaagtagttgatgaccatcgttgcggatttcttgtatgagaatggaattccattgaatgttgttaactcaagaagctgggaaataatgttag

SEQ ID NO: 289712 - DNA, 302 bp, Zea mays
ctcatgtgattgtattttgattttttagttttatttttgttgcatgtataatccaatcgccgagatcgacctctaccgtctcgagccataggacctcccctccctcttcaacatccgcagtcacaacgccaaggggtagttcttcgcccgtgcggtcgaggcggtcccagcaacaggaccaaccacgcacacgccgatggggtactggagatccggacggagtagcattcttgctggcccacggtcgagctcttgtagtcgatgatcttattgccacccgtgtgcagctgtcaaacttatcg

SEQ ID NO: 289713 - DNA, 361 bp, Zea mays
agatctttcatttggtggatgaaagttctgcttggctgcttccttcttatattagtgggctatgtcttcgtgaaattgggggtcccctttgtctttgagaaggttctcttgccaatcatgcaatgggaagccagtgcttttgggcgtccagtattagctattgttctcgttgcatctttggctctctttccagttattctagttccttctggaccttctatgtggttagcaggaatgatctttggatatggttggggtttcttgattataatggccgggagtactattggcatggtggttccatattggattggttcattgttccgtgaacgtctgcatgtatggctgacaaagtggcctc

SEQ ID NO: 289714 - DNA, 288 bp, Zea mays
ctccaatccagaaaccctagccgccgtagcttgcgcgtcttgctctgtcttccccaatccagaaacgaggaacctagccgccatctctcctcctctcccgagagatctcctctgccgatggatgttcgtccgagccaattggtttgtgatgctgtagaagcggcgcgtgctgctgccgtcgctgcttcggaggcgagatgcgcggcagttattgcagagaaggaggccaaggctgcggtggagttcgccgccgttgccgtcaacaaggtcgaagcagtaaaggtctcc

SEQ ID NO: 289715 - DNA, 301 bp, Zea mays
cgacggccgtggactactacggcgccgctgaaccgccgaccttcttccaccaccacctcgatgatggcggcaacagcttcttcacgtccgaccaagaagctcaagccgccgccgccaagtgatccgaggcatggcggccatttcggcaccgccacagcgagcagctaccgcgacagccagcagctcgtggacagcgcgagcagcagcggcgtcttcttccatcagtatgggtacggctacagcagcagcaacccgttcttgaacttgaaccagcagcagcagctgctactcaacagccaca

SEQ ID NO: 289716 - DNA, 219 bp, Zea mays
gttctcaagaattccagttgtggttacaaaccaagtacgcagccagagtaatgatgatggttaccatttttcctttgaagtggacagcgaggatggtagtaactgtgctgaaaggtttgatcctcatcttgttgctgcacttgggattcagtgggctcctgctgtaactgtccgtctagtctttgaatcccattcaggccacaggttcattaaggtggc

SEQ ID NO: 289717 - DNA, 258 bp, Zea mays
gatggcttgattacggcgattgacaagaatgctgaggcctcatttcttatggttgtagtctttgcagccgaggtcgctaaacacaggctaaatgctaagtcctccgaggggttccaacctgaggttgctgctagaatcttggtggcgttctcttgtgtggaacatcttaggcgactgcgtctccctgagtaccctgaggcagtccggagtgctgtgcttgccaatcaagagaatgtagcagctactgctttgttcatc

SEQ ID NO: 289718 - DNA, 304 bp, Zea mays
ggagaagcgcgagggcgccgaccgtctcctcaagttgcagaacgaacgcgggggccgtgcactcttccaggatgtgcagaagccatctcaagatgagtggggtaaaaccctggaggccatggaagctgccttggccctggagaagaacctgaaccaggccctcttggatctgcacgccctgggctctgcccgcacagaccctcacctctgtgacttcttggagagccacttcctggataaggaggtgaagctcatcaagaagatgggcaaccacctgaccaacctccgtagggtggcagggcca

SEQ ID NO: 289719 - DNA, 257 bp, Zea mays
gacgcccttcttctcaagcggtcatcctactgcaacgccgacaggggcgccgcgaagctgaagttgccgccggtgccggctgaaggaggtccgtcccgggcgccttgcctcccgaggaagccccgcgcccgacaaaagtatgactaaatccacgggggcccagagcagggacggaggcgaatgcaatggcgcgacggcggacgcggcggtgagcacgtagccatgctgctgcagtgtgcagtccatgaagcgcctcg

SEQ ID NO: 289720 - DNA, 116 bp, Zea mays
ctggtggagagctctttgagaggatttgcagtgctggaagattcagcgaagatgaggctcgatatgtcttccagcagctcatctcaggagttagctactgtcattccacacgacat

SEQ ID NO: 289721 - DNA, 347 bp, Zea mays
gctttaaattacgacactgaatgcctgttcgcacagtggccgtggattttttagttctacctacagtattttgtaggaggcaaatcacagctgcagctttaatctgcggtgaacaccccttcaattccatgattatagagcccgcattttttcattcatgtatgaagtgcttttgatgaacagatgtgtccccattgtcttttttgtttaatctattggtgaaacaagggactatagctggcaatatttttttgttatatatgtgtaacacatgttggcttctattttctgccatttacaatatatatcatctggataggttgttggttgccttgttgagcatgata

SEQ ID NO: 289722 - DNA, 519 bp, Zea mays
gctttccgctgtcggcatccggtaatcagacgtcgcagagtggacggagacgaggccgggtcctccagcacctctcaaacgtcatggcaccggcatccggcagccagcgcggtccttcccaaccactcgttcccaacccatcccccttcctcgcccgccgtcataaatagccagccccatccccagcttctttccccaacctcatcttctctccttttgctcggaacgcacacaccgcccggtctccgatctccgatccccggtcccctcgtcgatccaagagtgcagatcttcgtcaagactctcactggaaagactatcaccctcgaggtggagtcctctgacaccattgacaacgtcaaggccaagatccaggcaaggaaggcattcccccggaccagcagcggctcatcttcgctggcaagcagctcgaggacgggcgcacacttgccgactacaacatccagaaggagagcaccctccacctggtgctccgcctcaggggtggcatgcagatct

SEQ ID NO: 289723 - DNA, 330 bp, Zea mays
gacaagaatgatccccacttatgtgacttcattgagacgcattacctgaatgatcaggtgaaattcattaaagagctgagtgaccacgtgaccaacttacgcgagatcggagcccctgaatctggcatggcacaatatctctttgacaagcacaccctgccacacggtgaccagagctaagctgacgtccccaaggccatgtgactttactggtcactgaggcagtgcatgcatgtcaggctgcctttatctttgctataagttgcaccacaacatctgcttacaagttctttaatttgtaccatttcttcagataaagaatttggtacc

SEQ ID NO: 289724 - DNA, 290 bp, Zea mays
agaatctattattggtcaagaagctgaccatgatgatagctctgcatatatcagttatgatgatcaaaatgaatgtgaagttactgcatgtcattcagaaggtgctcaaggggaatcaaatgtaattcaagaaggtgaggataaaactgcaggcgctgaaaataaactggaatttacagcatgtgaatcagtagatgcttctttaaaacctgctatgcctcaagaggctgctggagatattagggccacagatgcaaccaaagacattcgtgtactgaagaactaatgat

SEQ ID NO: 289725 - DNA, 291 bp, Zea mays
caatttctcacaaaatatacctttttatactgcagtttctaaaacatacgagtactggtgaagtgtatgtaattgctttaggtagttatatcttgtgcttgttcagagggtttaggattcatctatgtatttccttgtacatgcagatatattcttctagtccttttaaatgtcagtatctttccagtgtagactctggcattagtaagaactatggctaattgaatctttgcagtagctttgctacaaattttgcatctgttttaatggaagaagactatgtttttttat

SEQ ID NO: 289726 - DNA, 310 bp, Zea mays
ggcattgagcctggtgtggagcactatgttgggatcattgaggtcttggggaagtcagggcatctcaacgaggctctggagttcattgagaagctgcctttcgagcccaatgccatggtgtgggagtcactcttgaacctggcccggatgaatggagacattcaccttgaggaccgggcagaggagttgttggtgtcgcttgatccatccaaggcaaatcctaagaagctcccaaccccacctcccacgaggcgcctgggaattaacatgcttgatgggaggaacaagctagtagagtacaggctgccac

SEQ ID NO: 289727 - DNA, 311 bp, Zea mays
taacagcagagtttagcagaaaatgcagtgctatcagagctttggatttagctggcaatcaaatatcaggaatgatgcctgataacgttggtttgttaggagcccttgtcaagatggacatgagcagaaattttttggagggtcaaatacctgccagtttcaaagatttcaactgcttgaagtttctctcattagctgggaacaacattagtggcagaataccatcctgtttgggtcagttgagatcactgagggttttagatctctcatctaattctcttgctggtgagatcccaaataaccttgtgaca

SEQ ID NO: 289728 - DNA, 471 bp, Zea mays
tataagtttagttcgaccgggagtttacttctctgttatctgtgacttgcccgaccccgacttgatgtgcattgtagattatcagaaattgattaatgatttaatcacagattttaatcaactcaacacgtcgagaagaatatttttgtgctcatagttttttagttcaagcaatgttaatactagtggtacttccctgagttcatatcaatgcttagtcttgggctcctcagaaatgcaaattctttctttggcttgcaattagaaacaagtgttggactgctgataatctggagaagaggggttgcagcacccaagcagctgccctttgtgtgaccaagaaagggaaacgatacaacacatcatcactacctgtgtttttgcccggcaattctggtttcttatctttgacactcgggatgagtcacctcgctcttagggctgatgagcggtcgtttgaggactggtgga

SEQ ID NO: 289729 - DNA, 291 bp, Zea mays
cgttgttaaaggatatgggcaagtaagcgctcgacatctaaggctatctacccccctcacataactacaagataagtccccgctcgaggaacaggcgtatggactgattaaatatccaatagatgatctgctagtaaggcccattgcagatgatccggctttatctaagagacctactctgctacagattttagagtaccaagatgttctgtgggagatctccttatggtatgggatttctgctcgtcttttgggagggttctgaatctgtccccatttccgctaacagat

SEQ ID NO: 289730 - DNA, 286 bp, Zea mays
cgagcctggccgccatacacgccacggccttcagctgcctccgccggcgagcggccggggagcagctgtacgacctcaacacgaaccctgctgccgtagtggacgaggagtacaggaaccagcgtgcggccaacaccttgggttccaagggcctgttccagctgatccagaggctggggtcttcgaggaaccttatggcgctccccatcaccgacggctcagtcaccaaagcctggcatgtaggtgccactgacggcggtgggtcaatcttggtggtaatacaagc

SEQ ID NO: 289731 - DNA, 284 bp, Zea mays
tggagagatgaaacatggacttgacgccaattgagaaattacgatttaaaggtaacatatagccattgcgatctggcagaaatcatctgttccaaggtgaaatctacttttttgtgcgcgtcagtatttttatgcgcgcgaacacatgtatgctgttattctgttccaatgttagaacatattcgatgcgaaaggatccctgatgatcctgtccaattgatgtgcagaaatggcacccggacaaatgctcctcctcctccatcagcggaagcacatggaggaag

SEQ ID NO: 289732 - DNA, 299 bp, Zea mays
gggaacaatggcagaagggcaagtcttctgagtgcctcacttcacctaatggacaagccgccaactccttcggtaactttgccaactacgcccacatgggcgaaggtactcagacacaagttttttcatcctcatgtaggcatcccatagattgggtcatagattcaggagcatcaaagcatgtgactggcatatccacttttttcaaaacatacattccttacacacattctgagtctgttcaaattgctgatggtacatctcaacaaatccatggtgtagggtctatcgagtgtaca

SEQ ID NO: 289733 - DNA, 301 bp, Zea mays
tgacgatgaagtctggagtatctcactcgttcttactaattgagatttgatattttaaggttttctagttctctgtcttgttagattaaaactatgtcaattttagcttagatctaatgccatgttttttttatttttaccctctgacaggcaggttgttgcatgtcatgcacattgattagagaatagctctcgagaaaagacctctactactaatgccacgatctcttaggttgttgggtttatatgttttttgcgatgaaagtgattattatgttgtttcttttgatattacagttgg

SEQ ID NO: 289734 - DNA, 294 bp, Zea mays
cgacagcgaatccatggcggcggcggcgtggtgggagacgctggtggtggcagcggcggcggatggaaccggtgggagcagcaccacggtggtgtccatctgcatgttcacgacggtgctgtgcctgtgcctcgtcgcgggccacctcctcgaggagaacaagtgggtcaatgagtccatcaccgccctcgtcatcgggtgcatcataggagtgatcgtatttctgctgaccaaggggaagcactcacacatcctgcggttccgatgagcaactcttcttcatctacgtgcttc

SEQ ID NO: 289735 - DNA, 281 bp, Zea mays
gcagcttcctctggtgtgcatgatatgcattcctctaacgggcagtctaaacactaccaatcacaagcagcagcttcctctggtatgcatgctatgtcttcctctaatgggcatcctaaacactacttcaagtcacaagcagtaccttcgtcgggtgtacatgatatgtcttcctccaatgggcagcctaaacattttgtccaatcacaagcagtagcttctggtgtgcatgatatggcctcaaacgggcagtctaaacccttgttccagtccaagaagca

SEQ ID NO: 289736 - DNA, 293 bp, Zea mays
agcggaagtcggaggcggcggggcaggactacgcgagcatgtacctcaagcggcgcctcgaggaggccgaggccgagaagcagtacatcttcgagaagatcaagctgcaggagaaccagcatgccacgagcagcagcggcgggggtgcccgcctcggcggcggagctccctccgccggggaaccctcgcaggcgatgatgctgtccaagatccaggacctgctgaagaacgtgcgcacgtgccgtccggcaagccagatgggcagcgctccaagtagcagtagcgtcgtgggg

SEQ ID NO: 289737 - DNA, 202 bp, Zea mays
gggaaacaaacaggacttagtctgtaatgctacctgtttaccgtcatgggcagatatgaccctaaacttggttgaatttgctgtcataccgttttttatgtttttgtatataagttgatagatttctgactaactaaattagtcccttgcgacttttaataagtgaacctgtgtttttgagatttaccttgtaaagtggaag

SEQ ID NO: 289738 - DNA, 353 bp, Zea mays
atgcgcttggtgtcgcagtcttggcatgcttttgttgatgattcagtttactcaacaagaatagataagcttaactgtaaaaggcagaggatgtctggggataaagatagcgacagagccagttcaactaaccagtataagaatggttctggttgtgataaagaagtcgacgattcacggaagcttttcctcgatgctaaagagtgtcgttatctattagagagaacattggaagatctgcaaaagaaggatttgttcccttacaacgccaagcctcttcttagaagcttggcccggttccaggagctgggtgagcaggggtgacattcgagttaaacctgctgaggaagcta

SEQ ID NO: 289739 - DNA, 297 bp, Zea mays
acaaaattcagttcacaacgaatttttgtaaaatcaaaatttctcctatatggaaagcgagaattgagccaaaatgtcgttttttcgtatggaccatgttgtataacataattttgactgcagacaacctacaaaagcgaggatggccttgcaatccaatttgttgtctttgcaacttatcacaagaaactatgcctcatttaggcaaagactgcccgtttttgtagaggtttggaacatgatcctatcttgggccaaaaaaaaaaaaaactagagcaagacaaaaaaaagaggggg

SEQ ID NO: 289740 - DNA, 300 bp, Zea mays
gattattagtcgaatacgtgcttgcaattcaataaggcttgcagctgaaaaccgaaggaaaatgcaagttttctatggtgttcttctgcagtactttgcagttttagctacccaaagtccagtgaagttcagaataattgacatacttgttaagcctttaattgagatgagtggagaaactccatattttgctgccatctgtgcaagagagcgacttattcatacacgtacccgtctatgcgaagacattaaggttccagggaagagcagctggccaatttgaagacattactctgctga

SEQ ID NO: 289741 - DNA, 292 bp, Zea mays
gcagattcctgaagattttgtccgatgggacttttcagtatacaagtacgactcatcgagtggttcatgggtaacttctgtgagggaagtgttcgttggttggagaggaggtgataatagtgtcatatgtgacggtgtcctgtacggcttgattcattccactggtgctcttggcaatgtcaacccccgtcatggccttatcatgtatgaccttgccggtgaaccatccgagacttcgttgatgcaaacgtcaatctcagtaccttgttctctcacgtgtggccgtctggta

SEQ ID NO: 289742 - DNA, 279 bp, Zea mays
tgaagaatgataagctccgaagacaacgtgagtcttggggtggggctagggctgcatgcatgaagggctcaataccatggcctggtcgataggcaactactgttgatgaacgtgtcaaacatatgtcaaatgttccttcatatttacagcgtaaagaaacttctgagcatcttcaagacaaggcgctgaatgttggagttcttgagtggggtcttcttgctaactggtctcagcaacaaaagcatgagctcgctagaagccatggagcatctccatcca

SEQ ID NO: 289743 - DNA, 432 bp, Zea mays
ttaaactgcaaacaagatctagatttagaaaaggttcatgatgaagaacacacttcagatgatgattttgtgggcaatagtgatgacgacgatgacaacaagccatcttccacaaccaaatttaattgaacatcgaatacaatgaaattcttcctcatggaagataggccaatgaagaatggctatgtgggctggggttcaaaagagctcatggagttcctttcctctataggcaaagatacattgaattccctagatcaacatggtgctactgaagttgtgaaggtgtacattcaacaaaaaggtctcttagcaagagataagaaaaaacttgtcatatgtgatgacaagctcaagattttgtttaggagatcaaaagtgaggtacaacaggatatatagcttgttaggtaagcatattgctgtgaatatg

SEQ ID NO: 289744 - DNA, 516 bp, Zea mays
agcatccatttaaaaggaatgagtgagatcaacgacagagtgaaggagcttcggtcaaaaggttgtggtgcagatagtgttagggccaaaaggaaatcaaccgccaatactggaaatggagtggttctaataaacgaggaagcggctgcgctgttacggatgttatcaggaaatatttggtacctgctgaatgcttacctttccatgaaatagtctgcttcaagaatgttgacatcctccgatctgcgctgattggaaacccaagaagaatgattcaactcgatcttctgaggtcacagagccatctgaaatgctctagttgcagtaggagtggtgctgccgtgtcaggatcgttgcacgcacatcaatcctgtgcagtctagcccaagagtagggtgacatgattaacctccatgactggtacacggcctttgaagggattataaagagcacaaactcaaaagccaaagggaaatcttgcagctctccctcgaagaagaagaagaaatcaaaccc

SEQ ID NO: 289745 - DNA, 270 bp, Zea mays
tctagtgcatatgaggtgaaaagttgttagctgctggtttgttccattttatgttctcatatcctttttaaaactgtcagaattatcttcataaatcattatgtgggcatactttatgttctttaggtacgcaggcgaatgtccaaattgagacaaacaaatgctcttgttttattatggcaaattaatagcttctgagcatgttatgttacaattatactgtatcaaaagagtagtgtttgctatttgatgaattgcttctgaaatttg

SEQ ID NO: 289746 - DNA, 289 bp, Zea mays
cacgagtatgagataagtctggattccagaacatctattgaagtttgtgctgatgatgatagcaacatccctaagcagcagtataatttccggaagataagtgaaattgagaacattgagaaagatgctattttggacttgattggaattgtcacatcagttggcccttctgtcacgtttatccgaaaggatggcgtggaaacccagagaagaacacttgaactgaaagacatgtctggtcgaagtgtacaacttaccttatgggggaagttgtgtgttgctgaaggca

SEQ ID NO: 289747 - DNA, 282 bp, Zea mays
ggatgcctatctactggactgggacacgcggtaccggatcgctctgggtgctgccgaagccctgcggtatcttcacagcgactgcaagccgcaggtcattcaccgcgatatcaaatcgaacaacatactgcttgatgagatgatggaggctcatgtgggggacttcggtttggccaaacttattgacatttccaactctagatcgatgtctgctgttgctggttcctatggcttaattgctccagagtacgccttcaccatgaagtcactgagaagtgtgat

SEQ ID NO: 289748 - DNA, 290 bp, Zea mays
gaaatcagagatgtttgtattggaccatggctgttatgtggtgattttaatttgattttcaagcccgaggataagaataattccaacatcaataggactttgatgggtaatttcaggagtctaattaactccatggagctgaaagaacttcctttgcttggcagaaacatttacttggtcgcaccagagacaggatcccacccttgtgaagctcgatcatgttttttgcacttctagttgggaggattttttccctgattgtctgctgtatagcaacgcctctgtttgct

SEQ ID NO: 289749 - DNA, 293 bp, Zea mays
gcacagggagctcagctccacctctccccatggctgcgagctcccttctccagctgcgcgacgccctccctgctcctccttgtggcgagcggctgcagcagggactcccatggccggacctctgctcctctcttcacggcgccccttcttcctcctccttcacggcagcaagcaccttccatggacgcgagctcccaaccatggcgccccaatcccttcttccccctacttggagcttcccatggcgcccccttctctccccttggtcgtggcttcctctgctccttgctcca

SEQ ID NO: 289750 - DNA, 291 bp, Zea mays
aaaccagactaggaccaatacccatcaattccttcagtgttttacgccggtcaccgtggagctccgtgtggtggggttcggcaaggaggtggtgctaaagcagtggtggcggatgcgctggcgacttcgcctggccatgctactccgcctagaagcgcccacatccggtcgtcgccccattcgctggtgccgcgctccgatccaccccgcccctattccgcctaggctgagctccgcctccactgtagctccgcctcaacgtctggcccaaagtggtctttgccacgttct

SEQ ID NO: 289751 - DNA, 109 bp, Zea mays
ctctcaacaaatgaatattctcggacaatcatgcaacgaatcaaacaacggaagctactcttgttcgtcgccggagactggtagctcctctaacattccacacaacata

SEQ ID NO: 289752 - DNA, 296 bp, Zea mays
ctttcttctatcttatctataaagacgtgcaagtctcatgtttctttcaaaaaaaagttttaatactatggtaaaaaaatattgtgagtatgtcttgacatttcaaaactgaagtatttcaaaactatagctttcaaatactttgtttccaaataggacctgattgtaaattagtccggtcgattggagtcttcaactatccaccagttgcaaattcaatctataagttaattgtaattttcctttccaatgtattatcaattggaatacccgaatgcttttgaactgccactgtg

SEQ ID NO: 289753 - DNA, 252 bp, Zea mays
atacaagccagttgtgcgtcaaagaggggcaggaaaaaggatgaaactgggagtggtggctcttccatcaagaggaagaagcgagagaatacctcttctgctgctacaattagcactagtataccaatcactcctgctattcctatcaggcaagtgccagaggaagatatgagatccctaatgaaggcgggaagtggtccaaggggcatagaagtagttgttcagaacgagaagggcaaaccatcacctttg

SEQ ID NO: 289754 - DNA, 346 bp, Zea mays
ccccacgcgcacaggcagagcgcacaggctcgccggcgtccatggcgtggcacctctgctctgcctctcgcagcgcgccctgctccttctccctcgcacagcagcagccgagcgccctccctgctcctcctcctggcgagcggctgcagcagggagtcgtcttctccgtggtcggccagcaatcgagctccccagcgtttccctctgctgtccatggcgtgggcgagctctgatccatggcgccctcctccccttcttcttcctcaagccagcaggcgcctccccctactccctgggcacagcgcccccttctctccccttggtcacggcttcctctgcttcttgc

SEQ ID NO: 289755 - DNA, 403 bp, Zea mays
aaagggtggttgcatcccatatgcttcagaaagatgatctcattgagcattctgatgtgatgcaaaatgtaagaaggcagctgagagaactttgcagtgaatatcaagcaaccggtccagtagctaagttatttaacaagcgtggaagctcaagggactcaccacgtgccttaatcaatagtattagtggcagatggaatttgtctaatgacccttcaacacctagtggaggagccccaagtgaacacgagaggctgaaatttgttggcaggcagcgaccccgaacagaagttgtgagctttgatgggagcactgtcaggtcatatgcacttgatcctgagcacaatgaagaacaatcatccatacaagacgtaaaaccagatccagaagaaacagacagcaa

SEQ ID NO: 289756 - DNA, 283 bp, Zea mays
aaaaagatgtgctctcatattgccatcctcctgttagcactgaaagatatttctggcttagtgttggaattgacgcttctgttgttcacacagacttgaatgtacctgtctacgactggagaatttctttcaattcaattcttagacttgaaaataaacttccctatgaagctgagtatgctatatgggagatttccactaaaagtaatatgtttgaaaagcagcatggtattgtcccttcgggtggaagtgtatttatctattcagcagatatacggaaacc

SEQ ID NO: 289757 - DNA, 301 bp, Zea mays
gttcaataaaaaaaatgttgaaatactctagaaaccaccaagcattgccattgttgattcattgcaaacaaaaatacaggtgtatgtactcgtaaaacgtagcattgtgtttgtgtatccttatgctgcttacttatgagcaaggcttcagcctgcgcctgcgaatgcgatcagagttatgtacagaattatggtgacagtaacgcttcctcttaaggaattatggttagatccatatttcttttgctcgagattgtaaaacaatatcacaaatgtgattattcagtccttatcattgttc

SEQ ID NO: 289758 - DNA, 318 bp, Zea mays
gctcggaatggatctagctcaagcatcgcgtctggagagcttagtctttttccgtattgtgctaatcaagaggatttggctacatatcagagatggacaacaagagatactgttgcagtcgctgatgtgtttctttctgtgaatagcccttctgttttccgtttaaggtatggttggtgttcccttgttgagcttggagcaggagtaagtgccatatctttaacacattttgaagattgcatgagaccggaagtcatccaagtcaaatcaccatcaggagataaggcttgtgtgcaaaaggatggtactttgctcagt

SEQ ID NO: 289759 - DNA, 408 bp, Zea mays
caattcgtgcctttttggtctactttcatagttttcctttgttattccaagttgtgtatcgatgtcgctataggccacagccgcctccagcgcacaaagagaccacgtctcctcccctcccttagccttacccccacccaatcctcaacctctcctacaacaccttctccggcccgctccccgacgacattgcgcgcctcgctttcacagcggcgagacagggaagatggacattaattttaccttaatgtttttaatacacgatttagacttttcataatataatcttcattttccttgcagacagcaagtgtggagtaatctatagtttattttctggtatactggttccattgaagaaagatccccgtgctccatttcaccatatccagatgccatcttccaaac

SEQ ID NO: 289760 - DNA, 150 bp, Zea mays
cgactatgtaaatcaatggttagttggctaccagcaaatgaactggggggaatcctggatctgaaccagaaacacgttaagctgttgcttcactgcaaagcaatcacacgatgttggcactatatatgtaaaagatagccttctttggtt

SEQ ID NO: 289761 - DNA, 498 bp, Zea mays
ccctactgtttcagctcctccagcttctgttatgcacatttcacaatcaagtgcaagaactttatgtggcaaggaacctgaaggagctgaaacagtagggacaaaacctggtaaattgaaggggtagcacttgatgtgaaatgtgcataacagaagctggattcgagcttacaagagtgacattaattgacattaaaggatcggtggtgctagatagactagttaagcctgctaatccaatcactgattacaatacaaggttcagtggaatcactgctgagatgttggctgacgtgtccacatccctgcatgaaattcaggaagagtttgttggacttgtatatacagaaacaattcttgttggtcattctttggaaaatgaccttatggcattgcagatatcccatggtttaatcatcgacacagctgttttgtacaagtataatcgaggatctcgctgtaagattgctttgcgtgtcttacaaaaagatttctcgg

SEQ ID NO: 289762 - DNA, 155 bp, Zea mays
gtcttatttaatgaaactctcccggatttgccgacattgattcatagttgcaagggtgctatatctgtgtgatgaacttgttcagtacacataacgctagcaactatgaatcaatgtcggtcttatttaatgaaactctcccaaatttaccgcct

SEQ ID NO: 289763 - DNA, 208 bp, Zea mays
cgttcatcagataaaagagatcgaggtacacgtggatgagagtctggacgtacgtacggtcataaggctaggtaactctgcctacatgatcgtcaggatacgtttggagtcccttgtcctgtaccgtgtccttgtgtgtagctgctttcgagacagaagctgagcagaaaaagaaaaaaaaaagagaatggattgttgttacgttttc

SEQ ID NO: 289764 - DNA, 488 bp, Zea mays
cggcagggtggccggtaacaaggacctgtacttgggcactttcagtactcaggaacaggcggcggaggcgtacgacatcgctgcgatcaagttccgcgggctctacgccgtctccaacttcgacatgagccgctacgacgtggagagcatcctcagcagcgagctccccgtcgggggcggagcacgctggcgcgccggcaagttcccgttggactcgctgcagccggggagcgctgccgccatgatgctcgccggggctgctgccgcttcgcaggccaccatgccgccgtccgagaaggactactggtctctgctcgccctgcactaccagcagcagtcggagcaggagcggcagttcccggcttctgcttacgaggcttacggctccggcggcgtgaacgtggacttcacgatgggcaccagtagcggcaacaacaacaacaacaccggcagcggcgtcatgtggggcgccaccactggtgcagtat

SEQ ID NO: 289765 - DNA, 206 bp, Zea mays
tagagacataggctttgttttaccttcagttagctttgtttttaccttcagttaaacagactacagctagttacagagattcctaaattgtcaccgttttcgtccgctcactgctttgttaactttttttccactgaccccctgaagaattgtgctcaatgtagccaattagccagggaaaaaaaagaaaaatactattttctatt

SEQ ID NO: 289766 - DNA, 268 bp, Zea mays
  unsure (1)..(268): unsure at all n locations
atctgctggtatttcttgagcgatgtaatgagcatcaataactgctacagcaatagtgtcagcagcagcaacagcagtggaggaagaaaaatgtatcaaactcgagcaagagcacgagcagatcttgcacaagacatggaagaatgactgcgtcacccganctctcggcgacantattagtaccaccnacgcacttggtgggaatacgagtatnngctgtggtcttgggagtcggagtttgatttcaaggcgagcaaaatcttgcaga

SEQ ID NO: 289767 - DNA, 274 bp, Zea mays
gcgtagaggtagagatcacctcacccctcccgactccggcgcatccattcggtcgctgccggatgcgcgctcgacccggccatggatgactctgtctctttcaatgacctcggtccctccaagcccccgtcggcctctttctacgacgatatgttcgagtcctacttcaatcgcgcggccgaggcccccgagccctctcctaaggcttcttcctcgccgtcgacgccgccgcccgtgttcgacaagccagtcttcgacgacgatccttacacgg

SEQ ID NO: 289768 - DNA, 344 bp, Zea mays
gtcgacagtctgatatgtgcaatgggagggctcaaattggttccaatagattgagaggcaattcagcgaccgggataacactgcatgcatttgtggacgtccgatcccgcaggcgatggttcagatccgatggttgaacagcaatttcttaaacactagccgcagtaccgactgcattttatccagctgccatgtcgattgagcattttatccgatggtaaagtatgggaacaaactattgttgggagctctctgaaatctacattggtttggttcagatagagccatatagattccagctgtaccaggcagcagatccatgtgtaaagcctatatgatgttgt

SEQ ID NO: 289769 - DNA, 280 bp, Zea mays
ggaggaggccgcgagtgctgtacccccccggacctgcggggatccgcagcgatctagccgagataggcggcaggatgtggagcggtttctcgatgctgcagaacaacttggccgtggccgtgatctccaggatcgcctcgtcgctcctgccgttcgggctaggcggcgcggacgacggggagtccgtgcccggcatcaccgaagaggtggtggtgttcgtcaggcacatctccacgcggcccgagacatggctcgattttcccctcttcatcagcgagcg

SEQ ID NO: 289770 - DNA, 138 bp, Zea mays
caaccaaccgaatgtatcgtgtgtgtacagtggccgtctgcctcaatcttattacaaactaaacaagggtttggatattacatgctgacttgttttcggatcatgccagggtcaatccaaaattcatttaattgtagg

SEQ ID NO: 289771 - DNA, 235 bp, Zea mays
gtcaagtgggaggaggagaagcccgtgttcggtgccagcgagacagtctacagcgaggagccgagctccttcactgcctgaccttccttcgtcgtgtgcagaagaagaggtgtaaatatctgtgcatttctttcctccccagcacgctcccttagagctgtacccccatccgtcccgtcgcagatcgtccgtcttgtgtggctgttcagttgtttttgcaaagtagactggtgga

SEQ ID NO: 289772 - DNA, 208 bp, Zea mays
cgaacaatatgacacagggtaattacagaaactttctcagctagaccaagtttttgcctgcacaggaaattatacgatagatcagcaacttcagttctgtagtatgaaataaaaataaacagaaaacacgcatatttcaatggttagacgactctatctgataaaaaaaaaaaaaaaaaaaaaaaaaaaaaaaaaaaaaaaaaaaaga

SEQ ID NO: 289773 - DNA, 439 bp, Zea mays
gaacaatggagatctattcaaacaccactagatttgcacttgcatgcaacacatcatcaaagataattgaacccattcaaagccgatgtgctatcgtcaggttctcaaggctctctgatcaggagatcctcggtcgcctcatgattgttgtggcagctgagaaggtgccttatgcgccagaggggctggaagctatcatatttactgctgatggtgacatgagacaagctttgaacaacttgcaagctacatttagtgggttccgctttattaatcaagaaaacgtgttcaaggtgtgcatcaaccacatcccttacatgtcaagaacatggtgaaaaacgtgctcgatggaaagtttgatgaggcatgctctgcactgaagcaactttatgatctgggatactctcctactgacattatcactactctcttccgtgtt

SEQ ID NO: 289774 - DNA, 257 bp, Zea mays
gcattctccgcggagttggcaccaagggggagagcaacatggccagaagagcagctgccatcatctgattcagtgacaccgtcgtcgtcgtctgctttgcgtaaatctcagtataagttcctgaagacttcttgccagagtgccgccacgcatgcctggggccaggtcatagtcactgcaggttgggatggaaacatcaggtcgttccagaactatggtttacctatgcaagtgtgacacatcgtacaagacatgca

SEQ ID NO: 289775 - DNA, 284 bp, Zea mays
ggagcacaagatatatatgcagatgtaatagcttgttcctgaccaattcctcgctgtattatgctgattgtgggagcacagtgttctgtagtggtcaggcgctaaagaacattgcgccaaccttattcatgaaagcatgccaagcccttacaaataatcgctggatgcacttttgttctccttacacacatgaggaagagataaaagaattcatttccctccggcaaggtatcaacagcactcaatgatctcgacgatactattttatggaggtggagttacag

SEQ ID NO: 289776 - DNA, 274 bp, Zea mays
gaagcatgctgcaaggagggaacatttggatgcgttgcttgaggaatactgagtgagatgttcttcgcttgagtcggttaattccaccgttgcagtggttgtatatactcggaaacataggggggcaggcacatcatccttgaaaggcttcactgccactcactcactctgcagataactatacatgtacatctgtgacgatcagtaggcatgcttagttaaagcatctgtggctgcaaaatcgtcaaggcgatccaacaaaaggagaaccttt

SEQ ID NO: 289777 - DNA, 279 bp, Zea mays
tgctaaatgaaacgatcttccctgaattcttcgcccagctgcctgctccacatacttagcaagcgatctttctgttgtgatgggttactctgtacacttcaatagtgcactcacaagattatgaattaaaatatatgggcactattggacacatggtgcctctaagtagcgtttcagatagatcctggcctgttttggaaagcaaaatgtggggatctcatagttctgttagcctagacatctgaaagcttcatcttgtcccaaataatgatgactagg

SEQ ID NO: 289778 - DNA, 399 bp, Zea mays
ctcggtttccagaatccactcgacacggttcctcgtaccatggtcgcctcctatattcatctgatgaagctcggctccctgggaaatccttcgtcaacgcccttacctggatgtttctcccttgtgcgggcaagccgtccggcgcctgcagggatccctgtgggtgctccatccgtttcctttcgcctacagcaacctcgctgggccgctttgcgactgtgttcagccccgagccatcgaccactgttcccaacagcgccgcgcttctctgaccctgaccccaaacatacacaaggacctgacacgacgtgctcctcatcgaagcgctcgacaaaccttgcctcgccaacgtctcgccaagttgtcagacccgtcctcgagtttggtggagtcccaagc

SEQ ID NO: 289779 - DNA, 264 bp, Zea mays
gtcccgatgaagacgcaacggtacaccgcttcgccgccggtgtgcactgttgaacgccgcccgacgtcgaccgttctatgacgttgagtcaccgggaacgggctcgtcggacttcggtgtccgccgtcgccgtcagagtatagctctcaagcctctgtgaaccgtctgtgcccttgctggtgttcaccttggttcggggtagctgtggatgagctcttattggtcagaggggccctcaccggcgaggcgtgaccggctgttggc

SEQ ID NO: 289780 - DNA, 437 bp, Zea mays
gtacgatgctgctggggaacttggccatgtccgtgacattatcaagtggggttcagattacttcttgaagacctttaattccacagccgatagcatttgatcgtgtcattgcgcaggtgggaagtactgcaacatcgcctggctcaaggcagcccaatgctcgttattgttcgatgaggccagaggacattgactacccacgtccagtggttgagtgccacgcttgttcagatcttgccgctgaaatcgctgcggcattagctgcagcgtcgattgtattcacggacaacaaggcttactcacagaagctgtgtacatagcgctaccactctcttccagttcgcaaggtgacggcgtgggacgtatagcgcaggtggatcgtatgctgcaaagttctaaaattcaactagctactcggatgagtttctgtggggtag

SEQ ID NO: 289781 - DNA, 389 bp, Zea mays
ttccaaatcaaagtttaccagaaagtgttcttccacaataagccgtcgataggtttctcctggacaaggtgacagattgaagtctcaaacgttgtatgaggatgactaccgtgcagggaaaaggagtattagcaaagtttctgatgttagtagaggggtcaagagtcgactggtgaattctgtagcatccaaagggaagaagcttggtgcatccgaaggagtcatacgaacaaagaagggtggtgctaaagaagttgatttggatgaggaggctgttaatagcaagaagtcagatgacttggatcttattattgaagaagagaagctcgccctcgccttactcgagtactggaccagactggtaagaaataaagccgctaagacagtgt

SEQ ID NO: 289782 - DNA, 297 bp, Zea mays
tggagagcacgggattcgtgacaagggaggcctgcattgatttctgggtgaataacaatctgatgagtatggatagtgcaacccaagtgtgcacaatgctgaagcaacagaatcacaattaccgcacaaaggaggatttgaaaccgattcggaaagccctgggggacaaccatcctggtcgggagtttgtaaagagcacacctgaattgcaagagagatatgctgagactgtcatatatagaatatgctatggcttgaatcgaattgggagtggacatctaacacttagggagctga

SEQ ID NO: 289783 - DNA, 294 bp, Zea mays
aacaacggaagccgtgcagcgagccaagtacgaggacctatggacaagttcttgataaagaataagcctccaaaatcatcatctgaactttgtcgagaggatgctgaaagtacgagaggccaacaggcccttgttgactgggtttggaactactttgcaagtgtgcgctctgacagattagccacacagcgtgtcactgttagcaataaaacaccattgtatttccaacatcaaggtcattcaaggacaatagttgggattcaaaagaaaccggatcgtcgtggatctcaagaa

SEQ ID NO: 289784 - DNA, 337 bp, Zea mays
cggctcgaggctcgggacgctcgtcttcgacttcgtcggcacgcatatgtacgagcgcaagaagcaccacgccgatgcggaggaagccgccgtcgtcgttggcaatgccagtgccagtgccaatgcgagcggccacgacgtgatcgattgcgctgctacaggacggcgcgctcgtggcgagcactggcagcagcattgggagagacgggggaggccacaaggaccccatgcacatcgtcgccatgcacgcgcatgccgcagcacataggcatagccacgcccacgggcacggcccatgtgatgactgtcacgatgggcatgatgagagccgtcccaa

SEQ ID NO: 289785 - DNA, 292 bp, Zea mays
cactaaaaggtgaaataaatttcttatagtgtgcattattatcccttttttcatttctaagtaaaattcttaacaacttctgtataataatgattggatttatgactgttgtttgcactaacatctggtctaatttcattattcttgaacttcttttgtgcccatgcttcattacacatgtaggtcgctcgaatgcaactgtctggcctagcatccaatcgacctcaaccactcttcaccccacgagtgtgtggagctgatgaacttgtcgatgtgtactgattttttctca

SEQ ID NO: 289786 - DNA, 443 bp, Zea mays
tgctgttgctttcctccgtggaggagtgcacattttctcaggtccaaattttgatcaggttgacagctaccatgtcaatgttggctctgctattgctccaccagccttttcatcaagcagttgctgcttagcatcagtttggcatgacacgctcaaagatcgaaccatattgaagataatacgtgtgcttcctcctgcaattcttagcacacaaacaaagatcagctcagcagcatgggaacgtgcaatagcagatagattttggtggagtttattggctggagttgattggtgggatgctgttggttgtacacagagtgctgccgaagatggtatagtttcacttaacagtgtgatagcttctctggatgcggacttccatactcttccgactatgcaacagaggcagcagcactgtcctaaccttgataggactaagtgta

SEQ ID NO: 289787 - DNA, 310 bp, Zea mays
ctatgttgcaagagagagaaacatagatggtgcaagtagtgcgtcaaatattgtgaactctaccccacgaggaacacttagtggaaggcctccatccattcatgttgatgaatttatggcaaggcagagagaacgtcaaaatcatgcgccagccccaactggagatgcacctcaagctaaaagtcagacaacaagtttagatgacagtcttcgtactaagccagagaacttgcgtcaacccaagactgatctcgatgatgatcaagaaattgaaattgtctttgatgaggaatcggttcggatgataaac

SEQ ID NO: 289788 - DNA, 343 bp, Zea mays
gaaatagccagatccataccctatccccctacccaccattccagagccactgcatctagtaggctgctgagctacccaccctccccgcgctcgtgacggctcacccacccccgccgtggttccgggcaacagggaagaagatcccgccctggtgccaccacgaggcacccggcggctttgatttcctctccgcccctggcgtctggcgtggtgctctggcccccagtttgtcggctgctttctacctgtacttgcagagctgtaggtgggggtaaacatggtgaggtggtcttgccaggatgacaccttatcatgttccctatccccgtgctagatgcgcgcc

SEQ ID NO: 289789 - DNA, 187 bp, Zea mays
gacgctgtggttgctgtaaggggtcgtccctgcgccacacggccgtcgccatggtgaagctgatcaaagaggccaagcagagactacagcagctcttcaaggggagccagtttgccattcgctggggctttatccctacttgtgatttacctgggatttaagaggggtgcagatcccggaatgcctg

SEQ ID NO: 289790 - DNA, 403 bp, Zea mays
ggcagtttttcgctatctctggcttctatgtggtttttaaattttttaatttgactgctgatgcgactctaggtgatgttcaaaaaagaggtcaggaattttgtgaaaaaccatggaaagttgcaaagagtagtgttcctccacagccttttgtagaacaatattgcttcagagctccttatatttcatcactactgagagagggattgcagattaaagatagtcaggtgataattggctctggcagtattacttggactcatggagttgctttgctggaggctggtcaagcattgtcttcacgactagatattcaaggatatcgaatactgcacagggagataaatccaaatattctcatagtactgtttctgatttcaattgtgttggtcatatgtgccat

SEQ ID NO: 289791 - DNA, 286 bp, Zea mays
agacttttcaacgagaggaactatgggttagccacaaggatttgggggcaaatggtgtcacaggggtgtagtcctgatgttgtcacttatactacttctgtgcgggcatactgcaatgaaggcaggcttgatgaagcagaaaatgttgtgacggcagatgaaaaaatgtaggaccattgtagatgcaatggcatataacactttgattgatggccatacaagtattggacagacagatcgtgcagttacaatcttgaagcacatgacgggtgttgcttctatgcca

SEQ ID NO: 289792 - DNA, 306 bp, Zea mays
tgcgagctccaagtacccctgtctccctcccgtcttgcgggcttgcctctgcctgttccatttccggctcctccagttggtagtgtcgtttcaatgcgagacgccgtccttcacgagcttgattgcccttgaaagcgaagttggtgttggtgtcgttgccggtgaggaggaagaggggatatatggctcccacggaagaggcagcaggggaggacgagccgctgctgaaggatcttctcgcttcttcgtcagataaggaaggagaggatgaagagagtacaaagacacagtccgatgaatctacta

SEQ ID NO: 289793 - DNA, 273 bp, Zea mays
ggaacagaggcgcgacagcttgcaggagaggccgaacactagaaacgacggtcgggtcgctcatgagctcggtatgggcaagctagtttccatggtgagcgacggcgacacgaatagtgctaggcgcggcttggctggagaagacacaagtcccagcgagcagagaggcacggtccgagcacagggtgatggggcgcgctggagatggccgagaaggagaagtccaagcgtcgtccatagaagaaacctcggctgggcgtgcgctgggcgtac

SEQ ID NO: 289794 - DNA, 446 bp, Zea mays
tcggatactatatcaatggtagatgatcttattccattggttgcaaagcattctggatgcttgacccagggatcaagaaggaggagggttactttgtttatgatagtggctcaaaaagcgatgtttggattcaaaaggcagatggcagtctcatcctctgggaggtgtggcctggtgattgtgttttccctgactatacatctgaaaaaacacgagcttggtgggctagtttggtaaaggacttcatctctattggtgttgatggaatatggaatgatatgaatgaacctgctgttttcaaaactaccacgaagacaatgcctgaaagcaatattcataggggagatgctgatattggtggtgttcaaaatcattcatactatcacaatgtctacggaatgctaatggcaagatctacttataaaggaatggaaatgggcaatgca

SEQ ID NO: 289795 - DNA, 304 bp, Zea mays
ttttgatacaatgatggcatcatctagtattagaaagcattcgattcgattttacatctctacgtatagaattgaaaatgtatacgatatcaagaaaacaaaaggtaaaaaaatcctaatacattttgaacatctaaagaaagtatgtagatgctctaagacaaaattcgactgttctcttccttttcaggattgttggaacgacaacaacagatccaataaggaacagaaccactaatgtcttgaagtcatacaactctctaactgatttcagatcgcctagggctctaccagcctttacagt

SEQ ID NO: 289796 - DNA, 274 bp, Zea mays
taccaattcggggtggttccttgtgcccttcgtagaaggcgcaagtcagagacccttcgtgctcagtatattgatgtcagggagctcaggatttgtgactggaacatggaatgttgcaggcagacttccacctaatgatttggatatccaagaatggttggatatggaagagccagctgatatatatgttcttggatttcaagaaattgttccactaaatgctgggaatatatttggcgctgaagacaaccgcctgtagcaatgtgggagcata

SEQ ID NO: 289797 - DNA, 300 bp, Zea mays
gctccatatctctctctcttgctctgcttgttcttgctttaggttgcaggcttgcagcccctggatggctggatggtgcatcagaagcagcttgcagtttgttgctttatactggaggacgaggtacgactagcatcattgaatttttttggggggaacggggttttaattgagggcttgtctctgtgaggaatctggaggtgaagaacttggtctggagttttcagtggatatctatcaagttgcttatctatctcccatccctgggctctggcccatgcacatataagatgataatct

SEQ ID NO: 289798 - DNA, 216 bp, Zea mays
actagttctagatcgcaggcgtccacggattggcgagttgatttatgattttttctagttggttaatgaatggattagctagatggattagtcgcgatgatgttgtgattatattaagtgttgtttcgattctatttggttgtggaaatacttgaattagaacttgctattgatgctaaaaaaaaaaaaaaaaaaaaaaaaaaaaaaaaaaggagc

SEQ ID NO: 289799 - DNA, 477 bp, Zea mays
agatagctctccgattggagatttgtcagaagtgtgtcacacagtgccgtcatacacttatgtggatggagattgcacgggtcccatagaatcggcacgggctgatgggttctctgcgaaagatagagttggcgtcaaggccgaccatcgtggcctgctgtccgatgagaacgtattcaagcttctcaagaaatggctcggtgtgagcgagaagaagtcagagtggcgttgcgtgtctaaatcctactccaaagtgggtaattgggttgccctgtagttcttcaggaagactgctattgtggcctttcctcctgaagagaagatgaaacaaaattctggtgattgtattgaatgtctgcacgatgtaaatccctgcgagctgcacggaacaagggattagtgccccttgtacgatgtatcattgccagacatttcttttgaagcctagggtcatatattcattgccccttccaaaaa

SEQ ID NO: 289800 - DNA, 284 bp, Zea mays
catatctagatacttttcaacgccttttagttcatttggagtaggatttataatggcatatatcttgcttgacatcatcagcgataactgacacgtacaagaaccaggtttacgtgtactcactacatatgagtgttgacaggatgatgggttctctgcgaaagaaagagttggcgtcaaggccgaccaccgtggcctgctgtccgatgagaacgtattcaagcttctcaagaaatggctcggtgtgagcgagaagaagtcagagtggcgttgcgtgtctaaat

SEQ ID NO: 289801 - DNA, 415 bp, Zea mays
cgtgaggagctggagaagaggcatgggcggtactggattgccgacggggcaatcgactcgtcctccactcccactctctctcaggtgcgagcaaggagcacgagcgcgagcccagccatacgacctcggcaggacacctcacagcatcggatccagcaactccagactcagctagatgatgagaggaggcaacgtgaggagctggagaagaggatggcggagttgttcgcgtacgtgcagagccttggcgccgcacagggtcatgctccaccacctccgttgttccctgcagctgactctgctgagttcactactcctggtcaatcggcggcgtcgaacaaccctcacgcttcgtccagccccttcgccgaaccagtccagatgcccacctcattgatgacctgttttgtgatga

SEQ ID NO: 289802 - DNA, 300 bp, Zea mays
aaggcattgcagatgaaatgggtctagaggcatcgtttcccgtaaaacgtcgtgccttgaggaagaaacaatttgatgaaagtaatgatcaagaagaaattctagaggctgaaagggtttttaaagtgaaatatttttggttgtagttgatatggcaatcacttctttgaaaaccagatttgaagaacttatggtgttcaaagatatatttggttttttattgagatcaactatcctgaagtcattgaatgatactgaactagaagagtcttgcaccaaacttgcagacactttctctca

SEQ ID NO: 289803 - DNA, 296 bp, Zea mays
gatagaccgggatagctgacaacacaaatcgaaccatggcagtccttcctgccaagtttaataagtgtgccttccaaccggggagtggatccactatcttatcaatccattgcatgagatcacttttcctcaattttttgtttgaaagtggcagtcccagataattgcatggaaaaatagaaatttggcaactctgcacctcttgataagcacattgttctctatgttttcaattgcaaatgttcagttagcaaattcaatacttgaagaaaggctgaaagataaagcaggttctt

SEQ ID NO: 289804 - DNA, 302 bp, Zea mays
acgagaaacaatttgagttggctgaagcagtaaaactgcccatgtttcttcacatgcgtgctgctggtgaagacttctgtgaaatcatgacacggaatttgcacagattccctggtggggttacacattccttcactgactcagcagaagatcgggacatgctatatcctcttgagaagatgtttataggtgttaatggttgctctctgaaaactaacgaaaatcttgaggttctacgaggcatcctgtcgagaggttgatgatagaaacagttctccatattgtgacataagaatactcat

SEQ ID NO: 289805 - DNA, 463 bp, Zea mays
agccagcacgttccaggagagctccaggagtttgcttcagaagtaccggcccagatctttctccgagcttgttgggcatggtgttattgctcagtctctttcgggtgccgttttgaaaggaaagcttgccctatctacctcttccattgtccgcatgtcgtgggcaagacgtccacggctagaacgtttgcagcagcgctgaattgccgttccccaggtgagaaccagccatgtggacgctgtgacgagtgcatgcccatattctcgggaagcagcagcagtgtggtagagattgatgcttccaaacttgattgcaagtctagggtcgcggccttgctcaggaatgcctgagaagtccttgcctcttcacacttcaaggttctgatcgttgatgattgccagcacatggacaaggagggatggtactctatctacaatagcctgaagggattcctgagagcac

SEQ ID NO: 289806 - DNA, 300 bp, Zea mays
gttcctggtgacgacaagacagtaggcacgtacagtctcagacgcgttgcacacagccattcccgtcccgccttctgcgatcacagacagtgtgggagagcaggcctccgaaatcgtcctccgcagagagacacttgcacgggtgtccgtagagagactgctcgcttcgtccgctcgaccagcactgatcaagttcctcgtcgccgtcgccgttcgtggaactgcactgcgtacatctgcctgcgtcgattgtgtacgactacatcgaacatacacacaaaatgtctcgtgtgaatggag

SEQ ID NO: 289807 - DNA, 369 bp, Zea mays
gtccgcagaacctactcctgtcgctacgacgacgacttccagttgcccaccacgctatggtcccaaacccacggtcgctcatcctggacctccacgccatcgaggcagtgaagctgggctcattcgtgcaatcgtgctcaagtctggcatcaactcccccatctaccgggacctccacgcgctcgtctcccacccacgcctgctctccgttgttgcctcgctcctccatatgcccggcctcgtctgcaacgtcccctacacagcgctcccgtcgtcgtcctctgcgtcgaccgctccatccccatgctcatgcgccgcaaggaggccaagccttacgacatgattgaggataggcactggagagtttga

SEQ ID NO: 289808 - DNA, 292 bp, Zea mays
agcagcacattccgtactgctccaccctctttttagtttctattggctcacataccaatcgaactatcttctctgtcgattttgacggtcggtttgggtcacagctggacgagctagagaagaagctcgccggcgaggtcagggtgaggaacagggcggcgaggaggctcaggagggccatcaagaagctggagtccctcaagatcctggacgtcgagctctcggaaggctccattgggtcgctgtcctccaacggccgttcggatcaccaggcgccggagccgaggagagg

SEQ ID NO: 289809 - DNA, 427 bp, Zea mays
catcttgttaatatgagaggaaggtatttccgggatctgtccattgtgagggcgggcgaaggggaaaagacttgtccacaccctgaagaaaatgaagttgtggtataccgaagctttttgaaagccggattgcgattccccttgagcagcttcgtcgtggacgtgttgaaaatcttcgaagtctatcttcatcaacttactccagaggcgattataaggctaaatatcttcgtgtgggccacgagaagccaaggtctgaagcctgacgcaagaagcttctgcaatgttcatgaattattatatgaaacaaagccttggggcaaagaacagtaccacaataactttggctgctacagtttcgtctctcggtcgggcaagctgtcccgtaccaacctttcggaagagatggcccggggattggatgaca

SEQ ID NO: 289810 - DNA, 300 bp, Zea mays
ggatctttctattctaggggtattgttgtagcgggtgaagaggaaggaattccatcagttgatggtgacctgccaaagttctgggactactgggtaagtttacttaatgggaggtctcctcagtggcagtatatatctgagccagtacaaagaagccgtagaaagataaataacatggaacaacaattgaaaaacacagacaaacagttgaaaatgactactgaagaaactgatgaagccagagtaaagcgtagaagaatagggtgaaatcatggattcatctgcgatagactcacctgg

SEQ ID NO: 289811 - DNA, 284 bp, Zea mays
tacattactccctggacctgcattttttagtgatgcatttcagattcctgaaatatcatttttttatccatatgcatgagcatattactcactttttcaaccccatcaatcacgaatcgttcttcctgcggaaatacatttcagaaggatagcatatatgcttggatcttagaatctgtagacaaattatgaatactacaattatagatgcactaaccactgctccgggaactaatatgtaaacatctgtcggtgcttcattttgtagtatcacaagttctctc

SEQ ID NO: 289812 - DNA, 176 bp, Zea mays
tttccattgatgttgacatggtggaacaagaacaaacggaatgaactaaatgctgacaatgaagatataggtacagaagaagctgaacaagcagatcagaggttagatgcttcagaggatatggaggaaggagatatggcacaacatagcgatggtgtggagataatgaaggggag

SEQ ID NO: 289813 - DNA, 389 bp, Zea mays
tgtgcattcagggcatgaaccagggccacttgatggcaatgcacgaattgttcacaggttggttggtcataagggagctcttgagtttgatccagacatttatggtgtcagtgaggaaggtgatcctaccttttcagcaaaggggtatgaatatgctgatattgatgattcgcaccaggcagtcttgcagcaagtacgggatctgagatcagaagttctcttgctagaagggaaggtggctaagatgcacccagaattgttagggtcactgtccaccgagttgtctgaggttctcgcacaggattaggaagtttaatttggagggtaatgtctaccaacatgagacattgatcgtaggcaatgaagaagtcaggggatgggggtcagcg

SEQ ID NO: 289814 - DNA, 287 bp, Zea mays
agcagtggtgctactccgccagatactagtgagtctgatcaaggaccaccttccacaaatgagaagattgagcaaccatgctatgcccaaaacatagcagatgctatgcagttgaaatctgaccacaatgaaggtgctgagtccaatgctgcaaagcccaataagaaagctacccttggttcagtaaaaaatactaagctcaaaccgtccgataaatgtgaaccaactgtgcattctgatgctgacactaaaaagcaagatcttgtagcactgcagagggatccaat

SEQ ID NO: 289815 - DNA, 315 bp, Zea mays
gccgccactgctcagctctccatgtcgtgccctccgaattcccaaatcctatggcggtggcgcctttgcccccaaccccgcgaggtcgtgagtccgtgactcatcttcctcctctttgccgggctgcacgtggagtggagatccaccaggccacacgtgatcgcattgcccccaatccggtatgtaatctgtaaccctagctttgcttaccgggctgcggcacccattaccggacggacgggcgcacgcactgctgggctgcaacacccaatgcacggacgcacgcaccagcaccacgcactgcatccacatcca

SEQ ID NO: 289816 - DNA, 304 bp, Zea mays
ggtgattcaggcatcagtgttgcaaagttctatacaagtaaccctgcagcgttagcttctttggacgaggattatttttcatcagctaccaaatatccatgtctgttttcaatgaagggtaaaggtcagactttaacaagttttaccaacattcataagacccggaacctctatataactggacatctagatggaaccataagcttttgggatgcatcttgtcctcatttgctgcagatttttatgataaagcagcagaataaagacgatacatcaactggtaaccctatcacatcattacagt

SEQ ID NO: 289817 - DNA, 304 bp, Zea mays
gccgcgagctcctttttgatctttgactcgcatcgcgtctcctctcgcctccgttttggataagcccgtctggaagcctctcctgctttcatttcgccggcccgcggagaacagctcggcgggttcccttcgtgcagcgttcggagagctcttcctgctgctctgcgacggacggggacggagaggtcaaaaatgtaccatcacggatgatggatggtctccggtatcatctgcgtgggacatagatggaggactacttttcacgcttcctaaaccttggttggcagctaagacaatacttgac

SEQ ID NO: 289818 - DNA, 254 bp, Zea mays
gcatctgtgtgcaccgagcccttctcaaccttcaggccgaccatggaggacgtcctgagggagctggaggacgctctgatcatcgagaacaacgcgtccgagtacatgaggtccatcgagagcactgggactctgggctccaaccgctatctgcccgtcgacaggaagatgttcgcgtcagggtcagcgcgaatcgagtcgatgaaggggaatctgcaagcaatgccctcgacttcgcggtaactagacgccgc

SEQ ID NO: 289819 - DNA, 272 bp, Zea mays
ggggcttggctggacagagaaggctctggcggtgctcatcagcctcgcggccacccaagctggccgaaaggagatcatgtccacccctggcttggtcagcacgctggcgatgctgctggacacgggcgagtcgacggagcaggagcacccactgtcgtgcctcctggtgatgtgcggcgccgacgacaagtgcatcgcgccggtgctccaggaaggggtggtcccgtccctcgtctccatctcggcggccgggactgggaggggcagggaga

SEQ ID NO: 289820 - DNA, 332 bp, Zea mays
ccaccgccatcactacgcatgccggtccgttaagcttcctccccagcttaccgcgtgctgaaaccctagccgccgaggagccgacgatgtcggacccttacaacccgtactaccgtggagccttcccaggcggcgacggtgcgccgccgccgctcccgccttactcggactttgatgtcgacctcgtcgcgacccgttacaccggcaccccacggtctcatccatcctctgccgatcgtcggcgccttcgaatcgcatctacggcgcgagacgattcgcggaagttctctatcagtaccaccaatcttgtatgggatgtcatagtactgttg

SEQ ID NO: 289821 - DNA, 285 bp, Zea mays
cagggaacctagctttcatgatctgtggtccaatgaagctggcctcttctcccaccgcaagatcatcctcggcatcctcatcctcatcacattcatggatgaaggatcagccaatgcaatttgggattcccatatctgtagtttgtgattcgctctctcagcactggcagggcagcttggacgaggttagcaagccaaagttacctcttgttcggctgatgtccagcaggagtgatcactcaagcacctcgttcactcgtcgtcatgtgttcaagcctgacgatg

SEQ ID NO: 289822 - DNA, 422 bp, Zea mays
caaggtgatgcttgggatggaaccattcatgttgctttttgtggtgagcaggaaaggtggattgggccttctagccagcttgaaggagttagcaagtttgttgttgggcagcgtgttcgaatcagaggctgtatccgccagccaagatttggttggtccaaccatagtcattcaagcatagggacaatctcatctattgacgcagatgggaaactgaggattcatacaccagctggtgccagggcttggttgacagacccagcagaggtggaaaaagtggaggacgaggaggaagtctgtattggggactgggtgaaggttaaggactcagttggaaccccagtgtatcaatggggtgatgtgaaccacagcagtataggggtggtccaccgggctgatgatggagagctctggattgcttt

SEQ ID NO: 289823 - DNA, 297 bp, Zea mays
cttctatagaattctttcgtccaaaaaagtcacaatggcttcacaccagcacaccggcgccatggtaatcatttttgggttaagtagcaatggtggcatgtacgttggtgtaccaatggcatgcagttggcgccagtgtaaaaatcttcacagttggaagtctggtgtctcttctgtccattttctcgtttctgctcctctcggttaaagaaagaatggcgagctgattctttttcttctcccttctgtaattgattgtttcattgttcatcatagaggaaatgttctttttaaaaa

SEQ ID NO: 289824 - DNA, 305 bp, Zea mays
tgacgcaaggagcaagggcttgcatgaatctgaggctgtggatgccataaacaacaatatagttgaattggatgcggtcaatgacgatgcgaggtgcaaaagcttgaatgatgaatcagagctggttgaagaggaatttaagagccccagctttgatgacatgaacaccgtggatgagcacgtcaatggcacagacacggatggattatgtttgggatttgtggaagttgaagcggtgcctgctgtacatgaggcaatgcctgataataatgaagaaacgacagaggaagcaccagcagggggtg

SEQ ID NO: 289825 - DNA, 308 bp, Zea mays
ctcgagcactggcggagagcatcagcagcttcattcactcggcaatggaacagaaactgtgttgctttgtacataaacaggagcagcttctgttccactggcggagcagcatcagcagcttcattcactcggcaatggctcatttgtacctcagccaagcaaagttagtccatgcggtctagcgtcatatacggtacaagggaatgcacagacctatagccctgcttatggaagcccttccagcaatcctgctactattgttgctgtccttaatcaacaagcacatggcagttctcccatggtgcttc

SEQ ID NO: 289826 - DNA, 285 bp, Zea mays
caaccattcagcttacaacgccagttctgcttctgataagtcatgacagataaagctgattcatatctgagccttgatttgtgtcatgttctgacaaactcataattaggatcatgcattttttcttgctccaaaccttacatcccgttggccactgaagtcaacccacatgtttcgaggctacaatcggctccaactacatgcttgtcaggcggtacctacttggagctgctgccctcgcatgacgagtcttgacaatcctgtggccctctacgcagcgtcgaa

SEQ ID NO: 289827 - DNA, 351 bp, Zea mays
gtgcgtcccttcggctcatcgcgcaaagcaaggaggcatggcagctagggttcgtgcgccactcatccccatctccctccgccgtcgactcccttcataccagtagcgccgccaccccatccgccgaatagtagcgctgcccattccatccgctcggaaggaccgccgccctcctcccttcaccatccaccgcacctatccacggtacaagcacaatctgcgtcttcgccggaaagtagcgctgcccactccatccgttcggaagactcgccgccctcctcccctcaccatccaccgcccctatccaaggcttaggtgaaccacttgagttacgagctacactttagtaca

SEQ ID NO: 289828 - DNA, 314 bp, Zea mays
cggctcgagggtgttcaatgtcacggcaatgaacatccacaactacgtcctcggtgatttcatcggcgctgcagggatcgtgctgtgtttctttggtctgctgtacggtggtttctggaggatccagatgaggaagacatttgggctgcccagaagcaggtggtgcttcggatcggcgtcactaacagactacacgcagtggctattctgctggccttgcgtgcttgcacaggaggtgcgcacggggtatctatacgacgcgaagaacggcagcttctatgacaaagttatggacgcgatggtgtggagactga

SEQ ID NO: 289829 - DNA, 283 bp, Zea mays
caggagtctctagggggctaattgaaaaagtacaatagacgtgatctttgcgaaaggctcgtctctatatgattcttcatacatattgtcttttatctgcatttatggtctagagtctctaggttgtattgtatagtttgttaatggtcccttgtatttagaaaactggaccactgtctaaaggttgtacgtgcccttagttgtcctttatggttggagaatcgttctgatgtctctcgactatacatgccttaagaccttaagagccatcaatgtttgcttt

SEQ ID NO: 289830 - DNA, 285 bp, Zea mays
cgctgcatctgcactgcacggtacctcatcctcctctatctctaagaatttaaaagagaaggaggaggaaagtcctcgactgctcgttccataaaccctaacctcgttggattctcggcaaaaatcctcccaattcggaaccctccgatgttccagctacctgcgggagctgagccgtgctcggtttggcgaaattttgcacccctcttgtgctaggaccacccggttcaagctgttcctcgctcctcggaaggatcaggtcttcaccggtgctctccggcgccg

SEQ ID NO: 289831 - DNA, 541 bp, Zea mays
gaagtttgaatcgaagagcactatgctgaacattacaaattggagtaagtctcagccatgttatgtgaaccgtgaaattatctctcttctttcaacattggggataaaggatgaagtatttgaatcgatgcaacaagatgacatgcacgaatcagatggaatgctaacaaataaagaagctgctttgtctgtcctagggaaaattggtggcggtgataccaagacggcagctgatatgcttctgcaaggctttgaaccaagttcagagccttacctattaatgattcttaaagcccatcgggctaataggctgaccgacataagaactcggtgtaagattcatgtccagaaaggccgtgttcttattggttgtatggatgaaacttgcaaattagagtatggccaagtttacatcagaattacaaagaatcacaaggagcagaagtacagtgaacagccgttcttgtgcaacgatgatggcaatacagttgtaattgtaggataagttgctatcacatagcacgcttgtctccatcctggt

SEQ ID NO: 289832 - DNA, 301 bp, Zea mays
cgaccgcgaccggtgggccgcggaggcaagctgggtgggtttctacttctactactactaccacacgcgcgcgcgatctcgcgctcacacacagagaacaggatcaggatcaggacagatgggagccgagaacggtagcaacaacccttcgtcgaccgtcttgcgatggcctctacggggtgcagctcggccgtccatcggatccggcacagaccgacggtggggcgtcgtcgtcaccagcagcttgtgaacaccaccacaagcgtggccgtggtggtacagcacaggcacagcagaggtt

SEQ ID NO: 289833 - DNA, 488 bp, Zea mays
atctgctgaatgtgttcgacctattattggagcacatggatcatcagaagctattagcgcgattttcaccaaagatgagaggtacgtcctatcttgtgggaaagattctcgtgtcaagttatgggaagttggcactggacgacttgtgaagcaatatgcaggagcaattcgcagacaatttcgttgtcaggctgtcttcaatgaaaccgaggaatttgtgctatcagttgatgaacaaaacaatgaggttgtcgtctgggatgcacttactgctgaaaaggttacaagattgccttctggcagcactggtgctcctagatggctcgaccattccccagttgagccagtttttgttagttgtggaaacgatagatcgatcaaattctggaaacaaaccgtataagcttgtagattcaaccacgcaaatcaaaagagtatgttttcagtattactgtttcaggaggaatgtgctagtgtaactttagttg

SEQ ID NO: 289834 - DNA, 291 bp, Zea mays
agcttctacacattccttaatacacataatggattaaactgttcctcaatatcacatgatggatcactggttgttggtgggttttctgattcgtcagtgaaggtctgggatatgtcaaagatgggccagccagcaaaaatatcacgatcacagggtgagaatgggccttcccagggtgagcgcatatcaacattagatgaggggaaacgaacctatacactatttcaaggccattctggaccagtttattctgcggcctttagcccgtttggggatttcctcttgtcatca

SEQ ID NO: 289835 - DNA, 324 bp, Zea mays
ggaacttagagaattacttagcaggcgaagtgtgtccaatcttcttagtaatggttttggtgaaagtttggagcgattaataaggtcatatgttcaacagcgtggtcatggtcccctcaactggaatcttgatgcagccatgcacccttcaaatggaccaaatgcaaatcaggaacaagaacggaaccctgaaactcagcaattccaggctcctgtcaatagacctgcccttgttatccctcctccacctttgccaccacgacaaccattatggcacagagaactgcgtcataacaactggaacagcagacacagggaatggga

SEQ ID NO: 289836 - DNA, 459 bp, Zea mays
aagatcgtatatctccctgggatatttcctgcgcgtcatcatcttcattcggccgccgctcatggagaaaagatctccagtcgccaggggataaaatctcgccgcccacggttcctttttacctgcgcgctgtgcaccttccaacccagccgtgcctactcgccaccattcggcgtttcttccggtgggaacagagggcaacagttgacgcggcagccaaaatcgccacgccctggacttcctcctcggtgccctgctcggtcgtcttcctgacgtctggctagagctccattttttcccccagttcccatcgtcgcacccctggtcccagacatggccaccgcgccgtgaaactccctgtgtcgagctcggtccctgcttccagtctctgctcggcgttctgcgcgcccatctcccccggctcctttcagctcggatccctgcccgtggagttttccc

SEQ ID NO: 289837 - DNA, 333 bp, Zea mays
ctccagatcccctccgcaatctaccttcgcgcggctaccacggcgccggtgctgaagccagcgaccgtggccatgcagtcgccggagctctcctcttcctccccggttctcctcaatatagggggcaagaagtacgcgacaaccgtggagacgctgatgcagcgggagcccgactccatgctcgccgccatgttcagcgggcggcacacgctccatgatcacccaaccacggggaaggggatggtcttcgtggacagggacgggaagcacttccgccacgtgctcaattggctcagggacggcgccatccccgtgctgtccgagtccgactac

SEQ ID NO: 289838 - DNA, 381 bp, Zea mays
ctgttcgaatcggtctgggctccggttggttcttccaatggatggcttatctacttcagtcacacttacggaaccatgcagctggttaaccctgtaagtggcaaacatatccagctccccccgatagggcgcaggaccttctctaaggccaagctgcttgaaatcagcgagaggaacttcatcgtcgctgtcctctatggtgatgagaaaggctacaaaataacacggaaagggtccagcaactggtcgtcggtcgagtcaaaattcattttggatgacatcatcaagcatggaggccggctatacacgtgcgacatgtatggcacagtggagatgtgggcagagccgccccgcgcatggccagacgaggaagtcacgcat

SEQ ID NO: 289839 - DNA, 283 bp, Zea mays
gtgtttgtgtatactctagtaaacactgggagcgatcgtgcaagagtaagcctgttaatgccatggagcgaattctattggaggtttttcgcataattcaggaggccactaccatgagcccttcattgcggaagatggagtatcaggagtgcttctgccgcacaaaacagccaaggataatccacctgtcacttttgctgttgctgcctgcgaaactcagaatgtgaatgtgacagtcttgccagtgtttggtctttccggagataaccatgtttccgcaaag

SEQ ID NO: 289840 - DNA, 285 bp, Zea mays
ggaacaaccaaaggacctgattgtttacgacacatctctgtttcaaacaacagatgaaatgataaggacaatgaatgagcttgaatccacagcacacgatggttgtgctggtcttggtccttcattgccacctgatcctggacatgagctccaaacaaagattgttccttatcggatgcctcctgaccctcaagcctgtccagggattaggtgtttaccataagtttgatttccgggataacatcaatccctctatacctctctatgaaccaagtccagctcctc

SEQ ID NO: 289841 - DNA, 259 bp, Zea mays
cccagagtgttagatgtagaagcccccaagcctgaacccaccacggagatcctcttcctctgcagctacgagaactgcggcaagacctttgttgatgtcagcgcgctccgcaagcatgctagcgtgcacaacgagaagcagtatatatgcaacgagcccaactgtgggcagaaatttgttgatagctccaagttgaagaggccttatcctacccacacaggacaaaaggattttgtctgtccacatccaggctgtggta

SEQ ID NO: 289842 - DNA, 277 bp, Zea mays
tcttcactgagcagtgctccatcaggggaagatcttaaatctaataatcaaaactttcaaaggaatgcgaatgcagaacctgaacaaatgcatattcgtgatacagagaatggggagttccgtttcaaggccaagactcgtactgagccaaagggtgcatttgacagggtagatgagaaggcacatacgtatgcagaggtagatatccagaacagaaaaacctcttttggcaataatgctgaaaagcacaatgatttgaaagcagtcacagacattc

SEQ ID NO: 289843 - DNA, 467 bp, Zea mays
  unsure (1)..(467): unsure at all n locations
atttattagttacagaacaagcagagaactcactgtacacggtctcttcttgtactgaactggtattcagcttcattcaaagagttttggtaaagtataaactgtgctagaacttttgagctccttaattttcatgtagtatttttgttacttgatttttcgcctatcttgcaatagcaactttaacactgaaaaagattgcttatggccactggcaagtatgaattgatcaaattctcaaaacatatcatttgctgatttgatgaagcacgattcttaccttatttgtatctaatttgttacattcactgtttacagcttctcttgtaacattggatatagcgacgctgctacatgactattattttgacatcgataactacatatagagattagagactaatnctgtttatttctgaactaaggtgttaacaatttccanatatcgaacatctatcttttagtat

SEQ ID NO: 289844 - DNA, 292 bp, Zea mays
gaaaaaacaaaactttgacaagtgttggataacttgaagacggaatcagaaacttcaagggtaaaacattatgaggaaatagaagttgtaaagatgacatcacaagaaatgcacgtcctcctttgttacatgctaaaattcaaccagggccagcacaatcttaggccataaagtttctaagcccccaacagtgaattattctagtatgtttcttctttgaaaattggttgttggttgaactatgtcgggttgttctatcaatagttggttgctagtttttcacaagtaggac

SEQ ID NO: 289845 - DNA, 286 bp, Zea mays
tcgattcattccccctctcccctctccaagacccaaaaccctaacccctacgacccccgtgaccgccgccgccgtcgatgcctgcgctctccgacgtcgcgcttcaggctgccatcgccggcaacctccgcctcctgaagctggtggcgtgcaagatgaatctgcgcgaaggcaaggacgccgctgggcggaacgggctccacctggccgcggagatgggccgtcttgaggtttgcaggttcctggtggaggaatcgggcttcgaggtgaacttcgcctgcgccga

SEQ ID NO: 289846 - DNA, 262 bp, Zea mays
ctgtagcgttctccttggctgtgtgggtcatggagttgccgattactgaggaagaaggatagcttgcaggagaacggtggcaccagttccctgtgcgctgctgaggatgcgaagtattcgggggagttttagaaaaatactttggttttgtgaaacaatttgattttagaatgtattgatgtgtttggacgcaaaaaaaaaaaagaaaagaaaggggggcgccggctttagttgttcgtggtgcccgggaattttttcgggc

SEQ ID NO: 289847 - DNA, 321 bp, Zea mays
tgtacgctgcgacgtaccagcttagttcttcagggctggggtgttggtcgattcccacaccggcctgccgcgaatgattcttgggaagccctgtacctgactactggatccactaccaagctcttcaagttccaggatccattcctctttgtcgggcaagagctcttggcctctgtggattatcagcctgattcacaactctctgcaagaattcgagcgcagatgggccaagaaagcgcggctgacgcgattcctggtttgatggtttctgttggtgtttcgggctaacagactctcttttgttttgtttacttcctcaaa

SEQ ID NO: 289848 - DNA, 274 bp, Zea mays
ggaaatagttcaggaaaggcttgagagggaatacaacttgaacttaatagctactgcaccaagcgtggtataccgtgtgaactgtgctgatggtgaaactgttgaatgttcaaatccatccttgcttccggagcctgggaagcggaggtctatagaagaaccatatgtgaagattgaaatgcttacaccaaaagattatattggttcaataatggagctgactcaagacagaagaggtgaattcaaggacatgaacttcatcacagaaagcagg

SEQ ID NO: 289849 - DNA, 282 bp, Zea mays
cgaagtgaactagaagttctggttaacggttgtccttcaatttgttaggaaaaaaacttttacttagatcactataccatgtgacctttgatctttttttgcagctcactctgagtatggttgaattaagagcttttcaagaaacatctgatgcatcacagcgatctgctgcaaccttgccattgtccccatcacctagtgattctcttcctggaggaaaatatgaggttttggttattaaagcagggttgaggaaggtaaaaattctcacagatctggtgt

SEQ ID NO: 289850 - DNA, 316 bp, Zea mays
gaacattcttctagaagttgaacccattaaattacgtgtgagaagcatcttccgtgaagcatgtgacggtgttagacttaatccagaagacgagaagtttatcctggagaaagttcttgagcaccacccggaaaagcaatccaaggtgtctggtgaaatcgactacctaacggtcaacaagcaccagactttccaggacactcggtgctttttcgtggtctccacagatggatcccaggcagatttctcctacctgaagtgcctggagaactttgtgaggaagagctacacggaggacgcggacacattctgcatg

SEQ ID NO: 289851 - DNA, 364 bp, Zea mays
cctactcgttcgccatggctgcctgctcctccaggctcctaaacctcactctgagctcctctttcctccgctcctgccgcctcgcgtccagctccctacttcccaccgcctcccgctgccacccggggtcgctccactccctccgcttctgctctgctgtccccgagtttgtcgatgtcgccgccgaccctgccgaggcggctgtatcctccgggcacccgtggccggagtggggcacttccttgataagctgcgggccaaggggtacttcgagcaaggtttgccctccagcgtgagttctggcgagggagcgccggagatggggatccagccactgcatctgagaagcagcaacggctgcttc

SEQ ID NO: 289852 - DNA, 266 bp, Zea mays
gggagtatgagtatgggaggcagtgaagcagatatccttgtgtttctggcacgggcgcttgtttccatagtgtaaccatcaatccatgcatatgtgcaggcctaggactgaggtggcgttcgttgcctggctatacttaatgtggttttcgctgtaatattcggtctcatggcaattattcttggatcaacactgctggcgctcggaagtacctgttcagttcctcttttctggtgctatgagataacagcctgggtttggtagtc

SEQ ID NO: 289853 - DNA, 269 bp, Zea mays
acctgaatttgcttttgctcttgcttataagataattagagattttgttgattctatggatgagattctacagccccttgtggataaggctaaccttattggggatagttgtagggaggaatggatttcaggaatggtcattgcattgtctacatacttggcgaaagagatatttcctaagcagattgaagttcttcaggaaagtagtagctcaagtgactcaggcagcacggcctatcaggctagagtctcgtggctcagcttgttga

SEQ ID NO: 289854 - DNA, 355 bp, Zea mays
cgaggagaggaccaccgtgctggagctcttcccgcagcaggctggcacgctcaaagacgagcagcaaaggaagaggaaggagcgcgctgacgggagagcgccgctgaccatcttctacggcggcaagatggtggtcttcgacgacttccccgccgagaaggccgaggtgctgatgcagctcgccggctccggcaacgccgcccaggacgcgctggcgggacagcccagcctcacagacatgcccctcgcgaggaaggtgtcgctaaagaggttcctggagaagaggaagaaccggctcaccgcggcagatccgtacccggcagcggcggcggcggcggcggcggcaacgagtcgt

SEQ ID NO: 289855 - DNA, 252 bp, Zea mays
gcctactccgtcatgtcgcatctcccagctcagccgctctctgctctctctcccttcagcgcccccggacgtttctctgttgggccgcgcctagcgtttggcgtccggcttctctgcttcctgctgcgggccgtgtccttggtcgcctgtctctctgctgtcgcggccctgtcaattgccagcgccactctgctcgcacatggagttgtccaacttctctgctcgccggttgaattctttgcgacgcgcgcg

SEQ ID NO: 289856 - DNA, 268 bp, Zea mays
gccccgccgcgcgcctggtctcttggagaggccccgccgacccgtccaccggaggcttctcgttcggcctcgaccccgtcaccaacctccagctgatggtctggcacggggccgagccgtactgccgcatcagcgtgtggaacggcgtgtcagtgtcaggcggcaggtacactggctcacctagctccatcgggtaccagaccagcgtcaacaccggcgacgagttctacctcgcgtacaccgtctccgacggctcgccgtacttccg

SEQ ID NO: 289857 - DNA, 266 bp, Zea mays
ttcagctttgtcaaccccttgttatcagacttcttgttcactgtggtgaaaggatctcataagcatgcagacttttatctcttttatttttgtacatgaggtcttgtagctgttctgatgtatgtttaaagatgtccggcattgtatatttgtggctttgttgcattttgtatttgaatcatgcatgtgtgttactgacatgtccatatttcgtttctagttgcccagctgactctgaaaatcaagcatctgtcactgttctacac

SEQ ID NO: 289858 - DNA, 178 bp, Zea mays
ccatgattgtctccatgtatctgtactgctccctacaataagtccacttctgcctctgccgcgactgctgccacatgggaactgtgaagaggcaccctggcaagcagcagtgattgggggaggggacaggatctaaccatgtcacttgggccagaatggacctgccctttctgctcca

SEQ ID NO: 289859 - DNA, 264 bp, Zea mays
cgtcttcttcctcgcggtgttcagcctcaactcagattctcggcgtcctctccatgggctccctgcgccctcgtcttccccctggtgccgcgcgggcgcgcccctggaacctcctcgctgcacgcagctgcttccccctcactccccagccgatttctctgcgcgcccagcccagctgtttcttcctccttccgctcggatttcctctgctccctggcgaactcgccccagcccccagctcgaatccctgcctctgctcgcgtc

SEQ ID NO: 289860 - DNA, 256 bp, Zea mays
ctctcttctgttcccttcccttctcttggtcttctctatctacattttctcttctgatattctctccagttacgtgactttagttaccacaggaagtatattcccagacttgtttaattcttggaatattaaatatatttggagccatctgttcctattgagaaaagaagcaaggcaacatagaaataaagtgttgttttaaataattggtaattaccatatggaactcaatcctaccaccaaaacttaattctgt

SEQ ID NO: 289861 - DNA, 177 bp, Zea mays
caggaaggcgcggactggagacgagtcaacatggatgctatctcgattttctcccgtgcgtggatgacttgattgagaaacctagtaagggtgagctaccaaaagatgagtaccactgcatgactgatcctagtcctagtttccgtggatttccagggagcacatctgctcgaacga

SEQ ID NO: 289862 - DNA, 285 bp, Zea mays
gtttcagaaggtcacaagtgctttgaaagcatgggaagagaccacggcattgaacctagcatggatcactatgcctgcgtagttgatctgcttggaaggtctgggaggtttgcagaggctgagcaattcatcagggacatgcctgtccgtcctgattcaaccatctggggacctcttttagctgcttgccagcttcatgggaatgttgatcttgcagaaaaagctgccaaagaattgtcggccttggaaccggagagtgacatatggagagtatccttgtcaaat

SEQ ID NO: 289863 - DNA, 252 bp, Zea mays
tgcagcttcctcctcattccggggacgccaggttccctagcaacttccgtcagccatcataatctcttagactcctcctgcacccgcacaggctctagaattctctacgcattccttcaccgcatgtcatcggccatgcggttgtgtgctcctcagccaatactttggtacgatgctcagctagtggatgagcacaatcaagtcgctggtaattttttcagttgtcgagctcgccggtgacaccatggccgg

SEQ ID NO: 289864 - DNA, 283 bp, Zea mays
gctgaaggtgaaggcaatgcaacttctgtttttgggagctgtaccgcccgtgagaatggctccacatccgagatttgctcagaaagtcaaggggaaaccaaagatagtgcaatcagaagagaaaatgaaggtgacttccgtctactgggaaggagagaagcatataatggcagattcaatggtggaagattctttggagtagaagaatcggaacgaagtgccaagtaatgggggcaccaatgtatcattcactttggatgatagcaagctttgtcgtaatgca

SEQ ID NO: 289865 - DNA, 272 bp, Zea mays
gtccgggattctcctgcggctggttcatcgcggacatgggcacaaagcatgtacgctcggagtgctgacctcaacatgccgcttggcttgggtacttgccccctcggacccagccatcgcatgctgctgaaccaccgttggattggcttcttgctccctctcgcgcggctccctggaaccagcgtcccgttgagtccctggctgcgcgcgtgtgcttcactgtttggttgtcgttgcgcaactcctctgttgggctcaccagtcgccgttgt

SEQ ID NO: 289866 - DNA, 308 bp, Zea mays
ggccaaccagttcaagaactgcaaggactgctcctagagcagtccgccgaataaggcctagaagaggaaaccagaaagcaaaaataggtgatgttgaatctgaagaaagtggccccagcgaatgccaagatgatgaaaatttggacacagatgatacctctaagattgaagaaggtattaccaacaaaaacaaaggactccctgcacctgcttcaaaaccagcctggagaacaagggctacaaaaggaaatcagcatacaaaaatgggcgacggtggatctgggccttgtgaaactgggaaagatgat

SEQ ID NO: 289867 - DNA, 276 bp, Zea mays
cagaaaataaggagcaacacggcgacagtcgcggtcttgggccactttttgaccgacccttctgccaaggcacgcttcctgcagaatgttctgcgtacagctggttctgcggtttgaatcgtatgacttagcaaaggaagaaaaaagtgtgtaccattactgtccagcaatggcaatttttttttgcggatcttctggtctaatatgattaccactgaaaatgtccgtagctcatcgcctcttcttcttgactgcaaatctgtcacctggatgact

SEQ ID NO: 289868 - DNA, 260 bp, Zea mays
ccgggatacgggctagattcagtcagcgctcatgatccggaggatcgagggcaacgaccagcgcggaccgcacaagcctcacgtgtccgggagctcttctccgcccagtaggcttccttgccttcgggcggtttccagaatctactttcagtctagctagcagggtgctcgaggagcgacgacgacggttgacgacagacatggtggacgtgctctcctgtatcaaagattgggagttggctgaccagcacaagcagcat

SEQ ID NO: 289869 - DNA, 297 bp, Zea mays
atcggtgtggtcgccaaagagttcccgtttgcaggagttcccatctcggggtgtcttggagatcagcatgctgctatgcttgggcagctgtgccagaagggtgaagcgaaaagcacctatggaactggtgccttcatccttcttaacacaggggaagagcctacccaatcctcccatggccttcttagtaccattgcttacaagcttggtccagctgcacccactaactatgctcttgaagggtccattgcaattgcaggcgcagcagttcagtggctgagggcagccttggaatca

SEQ ID NO: 289870 - DNA, 286 bp, Zea mays
aggagaaattgcacacttgatagattgagtgatattgtggagtgcactgttcctttagagaagcagattgctgaagaggaagaggaagaaattgaaatgttattggaaaattatcttcaacgatgtgaatcatgccatggtcaagcagagagacttctgaattctgcaagagagatggaagactcgatttctgtgaacttaagttctcgacgacttgaagtaagtagagtggagctgctgcttcaagtgggaacattttgcgatgcaataggacattaattgcagg

SEQ ID NO: 289871 - DNA, 253 bp, Zea mays
gcttcggcctgctgcaccatttcctccccacaccagccatcttcctcaccgcagctcctagccctgaggacgatgcccccttccttctttgcaggtggccgatgcttcctctgctcctccatccccatctcgcccttcagccatgggcgccgccaaccatggtgctcgcctcttccagtcgttcctatctccagcgctggctgccatctcctccacgaggtgtcttctccgtcgccgctccctgcgtgattac

SEQ ID NO: 289872 - DNA, 262 bp, Zea mays
cggctcgtggtggagcaagaaaccacagcagatcagcctgcctttcatcatatggtgcagcaggagtgcaggagtgccccatcggccaacagattcgctggaagaaagtcaaccttgagccattttcttattgcaatccaccgggcaaaagaacccaagcagcagaaagcctggttgcagaggtgatggcaggcactaaggaagagtgcaaatgggcaagctgatcctactctccagtatcagggaattgttccctggagaa

SEQ ID NO: 289873 - DNA, 395 bp, Zea mays
gggatcgccgtcttcctgatgccatctgggatgcttgggacgctgctgtccttggccgacgtggcgcctttgttctccaacaccggctggggccaggacgccaacttggcgttccttgggaagcacatgggggcgtcgttcgagaggcgtcgttccgcgaacacaattataaggagggaggacgtgcggtcgggcgacttcttggcgctctccaagatccggggccggtggggcgggttccagacgctggagaagtgggtcaccggcgccttcgccggccacaccgcggttgtcctcaaagatggtgacgccaacctctgggtcgcagaatcaggctacgaaaataacaagggtgacgagatcattagcatgactccgtgggacgagtggtgggg

SEQ ID NO: 289874 - DNA, 326 bp, Zea mays
ctgggcggctctctgcaagacatgctgatatacggcaccggcgacactcgcggcgcctgcgcccgttcgtgaagaacgcgtcaccatgttcggtttctcgcagggctgcctgccgctgcgtagatgggacgagctcaacgcgttcttccagaaaaccgggccaaggatcgtttttgggctgaatgcgctgaacggccgggtcccgatgcctgcccgctccctaggggggccgtggaattacacgaacgcagcttctttcattcgctacaccgtgagcaagggatacgatgtacatggatgggagctcggaaatgagctcagtggca

SEQ ID NO: 289875 - DNA, 261 bp, Zea mays
gttgtttggactctgtgttcacagcccgctcctctagtagttttgtattagctattgtaacccctccaaggttgttgtttgcctaatcgaccgagattacttgtctattaatataatcagcagacatgcatctcgatcggtttgttttaaacaaaaggagttgaagcaatagaaaatacaagacaaccttcagactacatggaatgctaatgggcaatggcaatcattggaacttcttgcattggtacagtagtacttctt

SEQ ID NO: 289876 - DNA, 263 bp, Zea mays
  unsure (1)..(263): unsure at all n locations
atcgtttgaaacttgaaagcatggcattcatctacttgtgagcttttatgataacagtgaaagttggttttattgcaattggaatgaacatgacaaaagagaggtgtaacagaagaaacaaaattgtaagtcactanatacccgtgcgttgcaatagggaaaaaatagtgtaaatgttcctgttcggccaatatttttgggtgcttttatagaattggtgtaggtgctgctccaccttccgttgcataaggcttaaccaatcc

SEQ ID NO: 289877 - DNA, 257 bp, Zea mays
aaaacttccttccttactgttctgttcaagtgccaagcgttgtctgcatgaaattagtgttttaagtgtttctattaacattttatgtttctaggtatcattgaggagttggttaagaggcacaggcaaattgatgcagttcatttcatacaagctttcgggctttcagagacattcccccctgcaccactgctgaagacctatattgaggagtttaaggatacaattgaaaataatggggatgcaactgagtccct

SEQ ID NO: 289878 - DNA, 271 bp, Zea mays
gctctgttgaagtaccgattaccattgaaggagataattgtggacttctacaatgtaggtgaagggcattacgtctggctatgctactgttgactacgaagatttcagaataccaacaagctgatcgagttaagagggatatccttctcaatggtcaacctgttgatgctatggcaactatagtgcctaaccagaaggctcagcgggttggaaaggatttagtggagaagctcaagaaatttatagaaaggcaaatgtttgagatcaccat

SEQ ID NO: 289879 - DNA, 268 bp, Zea mays
tagatacttcagcgcctgatcatagtttttggcagtagtttttagagtttaaattccagaaataaacggacgcgagccagggcttgtcctgagccacgtccgagcgtgaccaccgcgcacgacgttcgaacatgacgcggtggagcgcgcgtttggcacccagacctccactcaaacttgttgcgctcatttcctacgagttatggcgcaagaagtggacatggtgggaggctcggacgtcctaacgatgcataacgactacaataaa

SEQ ID NO: 289880 - DNA, 271 bp, Zea mays
cggaggtgctgaggtcggtggcaagggctggcagcatgaaggatttagctgctatcttggacactgcaagtaaggtcctaccacttgtagttgccatctctgggagagttggttcagacacaccacttatacgcccacaaagcggcatgagaggtgtaattgttgaagaaacggcagagcaacacttcctgaagcacaatgatgccggatcctggattcaagattcggcagtgatgctttctgttagcaaagaggttccatggtatctgga

SEQ ID NO: 289881 - DNA, 250 bp, Zea mays
ctcgagccgccacagtcttatcatccacaatttgctgctagacctgacaatgctagtgccaataatagtggtagttcagcaaacattgagtcagctgtccaggaggctgttcttcacgcgcaggacattgagactcagcaagtcatacagaatcaaagacatgcaaacacaacaagtgaacctacaaaatatggggaagacttactttcgaaccgccgtgaccctaatgcattgaaggagcatttactaa

SEQ ID NO: 289882 - DNA, 272 bp, Zea mays
atggacacttggttacctagctctaggagtacctcgccttgacggctaaaactgttgtgcagtcaagctttcggtggaatcgccatgcaaccaaactaccaagtcataaaaagtttccaaaaaaaatatagaggtactttattatttattctatcaatatactagattttaagttctaattcatcatatgttaagagattaaaaaagagaaaatttatcattttttaatcctttatattggatataattttctcttttttatttcccttgat

SEQ ID NO: 289883 - DNA, 306 bp, Zea mays
gcagcccggcaggtggtagtggtggtggcggcgcggctaaatgagccgcgagtgacgagagcagcgaggattcacggagatctggggaaccaaaagatggaagcgctagtcaagaaaagaaccatgccacatcgcagatacccgctctggcgccagagtatttggcaccatactcgcagctggaactgaaccaatcaattgcttctgcagcatatcagtacccagatccttactatgcaggcatggttgctccctatggaagtcatgctgtggctcattttcagctacctggactaactcaatctc

SEQ ID NO: 289884 - DNA, 316 bp, Zea mays
cgcagattactctggaagtcttgtattgcagatgcccatccgagaggcatgccatgttgctgttcagagaagtgaccctaccaaacagaagcaatggaatgcatacacaggctagacaactagccaatcgaggagcagtaccagtgttacaaattgtatcctttggttctgaattaagtaatcgtgcacctacgtttgacatggacctttctgattttatggatggcgacaaaccaatatcttatgataatgtgaaggaatacttttctcgggatccatcccaaaaatgggctgcctatgttgctggaactatttt

SEQ ID NO: 289885 - DNA, 452 bp, Zea mays
gcatcctcgctcccctacgagctcactgcgcccgcgctcgcgctcctcctcgtcgtccgcaccgaggcttcctacgcgcgcttcgacgagggacgcaaggcgtccatgcgcgtgctcgccagcgcagccgacctcgccgggatgctcatgcgtcatcctcctcctaacaatctgcatacgggtggcgctcccaatccgggaccgggaggacgacaggctgacgacgagccgctcaggcgcgcgctcgtcaactacgtcctcgccttccccgtcgcgctcaagtgtcacataatttgcgactctgacgtaaaaggggaccttgagggcttgcttggcgaagatgacctgagcgttgttctagcatcgaaacatcggccacgctgtattatcgagttcatcgcacagagtctccaaatgctagatctcgacgagcagaagaggagcatcatggt

SEQ ID NO: 289886 - DNA, 265 bp, Zea mays
ccccagctgcacagtgtcgccatgggtgcctcggctcctacctccacccccggtgccgtccccgcggcccccacggagccggtcaagcgcaaaagagggagaccgcgcaaatacggtcccgacggcaccctgaagcagcagcagctcgtcgccgcacagccaaggatagggccgtctggtcccaacatgatcaccagcgccgggatagaggactcttcgcagaagaagcggcgcggccggccgccgggctacgccaagatgcatc

SEQ ID NO: 289887 - DNA, 267 bp, Zea mays
gggtaaagcacgtgaagttgagcgggaggcaatgtcattcgagacctacttccagagtaactacaagaagctcgctaaggatttgcgcacttgtgtggagactttcgtcgatgatcttcccagatccgcaacatcagaagaagacttttgctgcatggcggaggtgctgctcttgctcgatgcgtttggagtgctcgtgcagtctgaaccagtcgaacagcttcaagcgctgttcaaaaggcactacgatgataggttccggctgag

SEQ ID NO: 289888 - DNA, 249 bp, Zea mays
gatcaatattgtcatggagcataagcttgtgtatattagatccatcagaatttttggagaaatatcaaattgcctctttcttggatgcacctttcattcagtcacagtctcattagacttcctgagcaaatgaagcatacgattgcccttcggcatctgtacacagatgggtgcacgaggttggagtgcatgcctccagagcttggacaatcacctcgcatcgaacaattacatgggagaagaatgcaa

SEQ ID NO: 289889 - DNA, 247 bp, Zea mays
cctggttctcacccgaaccagtttttgaagtgaaagcaataataatgttgttggcgcaccgctgaggtgtttaggctttactgctggtttggtgttgggtgatgggtcctgtcatctcactaaacaagattgttgactgtacatctgggagggaggtgatctgggatattgaggtgggtatcatcatgtgacggcgaggcacttggtgccaaatcgtactgaattttgttatctgggtctcagtctg

SEQ ID NO: 289890 - DNA, 307 bp, Zea mays
cattgggctctacccgtgcacagcatgcctaggtctccttgctgatactcaaaagcaccatggacatatctacatatttacaagaagtttctgacttccatgcatggatttgtgcgctcctaaatcttcagcatgccttccaacacacgaagaacatcagcacgggcaactatacctgttgatagtgtttagaaccccattaggcttgcaacatactctgtgttgtcaatgttgattaaggataatacaaatcaagtatgtacatgcagttttttatatctcaagtttgtcagcattctgatactcc

SEQ ID NO: 289891 - DNA, 324 bp, Zea mays
tgaaagattcggctatatgcggatggcaccttcggtacttggatttgttggctatagttcagttatagatctgaggcatgtctcctcggctggctgtattcttgatacttaacattagatgatctggatcttgctgggcacataatttttgccagcgagccccttgtacagtacttggtgtgaggcatgttgcctccgatttgttgtactctcgatgataaggtcactgaatactggtcccttctggcacttagctgttgctagaatgcccttgtaaaccgacccttggttcctttgggcatgtacttgttgacataataccga

SEQ ID NO: 289892 - DNA, 272 bp, Zea mays
gcaattccccctgggcgctggaggcgccaagctcacgctggagcacgtcaaggcttgaccgacactttttccatggctggctttgagcagtgagtcgagcccctcttcttgccatggcacttgacccctgctcttctctgccccacgacgcccaggcctcaacgcccctgcgtacgttcctccatggcggcgggtcagcgcaggcatcttctgcccatggcgctcggcacccaaccagcaggaacatcgccctccgtcctctctgtgtccct

SEQ ID NO: 289893 - DNA, 339 bp, Zea mays
cgattcctgaaaggtatattttaaaccgttggacaaaatatgccagacaaggaacatatccatctccagttgatgaatttgcagaacaagatcgcacagaagttgcatttgtgtaccgtaatagggctatgtggtttgtttatgatctgctgactaagagcaaaagtcatcataatacaagacaactaattctggatgcacttgaaaatggagaaaaatcactggaaagtatgtgtgacctcaaaagattgcatatgaataccttggggaaagagaaagatggaagcagggttgaaaagagaaagaaaaaatcaactaagcaagagaaacattcaagaa

SEQ ID NO: 289894 - DNA, 297 bp, Zea mays
gattcgtaatgagaactattcttatgctgctgatatttggagtcttggactaacaatattggaatgtgctactggaaaattcccatatgacgtaaatgagggccctgcaaatctaatgttgcagatacttgatgatccatcaccaacaccaccagtagatacttgttcattagaattctgctcattcatcaatgattgcttgcagaaagatgctgatgcaaggcccacatgtgagcagcttctgtcacacccattcatcaagaggtatgcaggaactgaagtggacttggcagcata

SEQ ID NO: 289895 - DNA, 268 bp, Zea mays
gctaaagacctcacaatagaatcccatccagcccaccagacagagctctgagttttctagtttggaagagctattaaataacaacgtctagtgtcgattctatacttgttatggtcaagtactgtgctcagcattttacattcattgtcatcttaagttctagcaatgtgaagcaggaactatgattatattgactacataaatgaagaaattgaggctcagatacattaaggaattctcccagggtcacacagctagaactggaaag

SEQ ID NO: 289896 - DNA, 325 bp, Zea mays
acggcatgcaaatcctgcaggctgttgcttctcagcagggccaaaagctgtgcctttggcctagcagtagctaccactagtaccaggagatcttcccgtcccaacatcttcgacagaggaatcagctgtgggagctcgtgaggcagagggcgggcagagacaagatggagaaggaacacatcaagatggccatgctgaggcaagagcaaacattcaggcagcaggttcacgagctgcaccgcgtgtaccaggttcagaagcagctgatgacgcagacgcagattacccagcaccaccagcaacggtgtggtagctcaggcaagac

SEQ ID NO: 289897 - DNA, 157 bp, Zea mays
cattgctggaagtgagtctgagggtcattttcaattgataaacaaggcgtactctatgttttcacacaccaatccgctccatcaagatgtatttaagagcgtacaaacatggaagctgaagtcgttgcaatgacagcggctttacttggcagcaaga

SEQ ID NO: 289898 - DNA, 575 bp, Zea mays
cacaccagctgtcccactcaccatggagaagatcctgatcctcctgcttgtcgccctctctgtggcctatgcagctcctggcccccgggggatcattatcaacctggagaacggtgagctctgcatgaatagtgcccagtgtaagagcaattgctgccagcattcaagtgcgctgggcctggcccgctgcacatccatggccagcgagaacagcgagtgctctgtcaagacgctctatgggatttactacaagtgtccctgtgagcgtggcctgacctgtgagggagacaagaccatcgtgggctccatcaccaacaccaactttggcatctgccatgacgctggacgctccaagcagtgagactgcccagccactcccacacctagcccagaatgctgtaggccactaggcgcaggggcatctctcccctgctccagcgcatctcccgggctggccaactccttgaccagcatatctgttttctgactgcgctcttcacaattaaaggcctcctgcaaaccttcaaaaaagaacgtttatatcctgtgattactctaagcaaggggcgtattaa

SEQ ID NO: 289899 - DNA, 262 bp, Zea mays
gtgaagccaaggagcaacaacttgaggattccgatcaagatgagcagccatgatgccaaagtgctgcaaaacttggtcctcaatcttgcttcctctgtcgaaagtggtgctttcaatattaggacgtttttagaagaggctttccgtcatttgggagacgagcattaccttctcaatgctcttcttgctattcgtaaggaggtagacaagatggagcaggatgcactggagagcaaagcacggtctgacccagagaaggaga

SEQ ID NO: 289900 - DNA, 297 bp, Zea mays
gcaggagccagggctgttcaacaacgtgattgaggagacggcgagccggctcgtcgctgaggcgagaaagagcaaggtgaaggcactcgttggcgcgtttgagaccgtcatctcgctgcaggaaaccagcaaggctgctgctgctgctgctgctccaactatggcagcaggtgtcgtgccatgagcgcttcttgatctgaagtgtgcgtgatcacaatttttggagttttggacttttttgtgtggttgttagtgccgtaaaagtggcgcttgttgaagtttgtcgttcctatgtaa

SEQ ID NO: 289901 - DNA, 277 bp, Zea mays
agggaacgaggccgggtaacatccccctacacagggccactattggtaatactagctaggtttattaccatggtgatgaagatgttactctcttccctaccagcgatggtagcgatcatgctggccatcgccatgctcttttgctccggcgtcgtcgtccactcctcggaggtcaaacaagtcagacgatgcaactagagctcatctggagggatagccatcagggcgtaccgccaccggcgtccgcaggcggccgtgtgcatgcatacggcgatgt

SEQ ID NO: 289902 - DNA, 454 bp, Zea mays
tcttgcccgaggcactgggcggaaccatcgatcgagccactggtcaggttgatctcaagtttagaacgaggttctgcttctacggttgggagcgtctacaaagcgccgccactgttcgtcgagacaacactgacctccgaggagtcgaggggagccataagatccggcaccggagaaagaatggacgaagaaggcagatgcaggctggttggggtggccgtcgtcgacccaattgatgacctcttcatgaacacgtttctcagcctgcccaccgagtgcattgcttacttgagcgccaccatttccatagccgctgcgagatgaacgtctttattgctggcttacattgaaaatataatgcgcgcgccgatttctttctcttgtaaagattagccaaggctcggccatatcgcttcagttcatattggaaacctgaagtacactactatcgatc

SEQ ID NO: 289903 - DNA, 275 bp, Zea mays
atctctctgatgttcgacctggaataacaaagcaaatgtcaggaattccacagagtactgttgttgcagagtgcactgacaatcacgttgaggacaggaccctattggtcgttgatctgagtagcttcctcgagaacacccagattgccttgccttctctgaatgggtggcttttaggttatccggtaacatatttgttccgcaatgcaagttctgaggcagcgatacagaacctctcaaggcagtctctgcatatctaccgagtatatgtgtgc

SEQ ID NO: 289904 - DNA, 284 bp, Zea mays
cgcgctctctcctccatcccccagagatccaccttcccctgctcgcctccgctcacctgcgtgctccggcaacagccgctttcggacttcggtttccctccaccggcgctccaaagaacgttgacgaatatacagatcagctgaccaagaatgaattatcatcaccaccaaaaaagatgaagcacacccaggttagcaaaagcatgccagattctacatattcaaagaatgacaacatttagtccatcatgaaatatatccaggtatcatgctcgatcactttt

SEQ ID NO: 289905 - DNA, 299 bp, Zea mays
ggagcaccatggcagtagtggagctgatcagcaggataatacggacggatgcaaacctggggacggcaatggcaagaaagccggggagctcgaaatggtggtagcgccgtactctatgctgctgatcagtgcaatggtgatgccgtacgaacatagccctgtcctcctgtctcacttcctgctcttctcatgttgcgcgctcgggacgctggcgctgctctactccagactggcggaagcaagtccggccttgagaccagcgttggagtgcatccagatggcctacatggtgacgctgt

SEQ ID NO: 289906 - DNA, 291 bp, Zea mays
gatgaacaactgcacacaacttcgacggtatccgtgtcccgaggtaatccagtggaagataaggcctcaagagaagctccgcagaccagtgaaaacctcacgatcaggattgctcgagacaaagggaaacgaaggaagcggaaagttggtgcaggactggcagggaagtttgaggtttctagcagccacagcgggaactcaacaccgtcttcgccattgtcgcagagctcaaccccgaaacatggctggtctttttctggggcgccatcagagccgaagcatgaaaacaaa

SEQ ID NO: 289907 - DNA, 332 bp, Zea mays
gtagaaaatggtgacaacacgatgaaaaattgacgtccacacatattaacttctgcttgaaaagaggttgccgtccttacaggactctgctagctacacatcaacacatcattggtaatccttctgcatacatgtaataatataatataactagattatctgatgtccaacgtgtattgactctacttagggctgaacataatacttatggctcgttagttcgcttggctcgacttagtttatttcaattttgttacgagctaagttagtattttagctcggtttgttaacgagccatctcgttagctcaaacgagctatcatttatcaaca

SEQ ID NO: 289908 - DNA, 405 bp, Zea mays
ataggaaacagggtcttcctggagatttggtgatggagatgtcaagcagctggcctctggacgtcaccgttgccctgcatggtggctccagagcagcctctatgaacaacctcggttccagaccacagcccacagccggagagtccaggaagacttgcgcactcagagcagaagggtaggagtcctctagacagcctcgcagccgcgccagacgcccatagacactggctgtgaccgggcgtgctggcagcggcagtgcacagtggccagcactaaccctccctgagaagataaccggctcattcacttcctcccagaagacgcgtggtagcgagtaggcacaggcgtgcacctgctcccgaattactcaccgagacacacgggctgagcagacggccccgtgga

SEQ ID NO: 289909 - DNA, 141 bp, Zea mays
tttttgttttttcaatgatgtcgactgaacttctttatgttaataaagtaacacatgttacagattagcatgaggatagcaatatcaataaccagcattcttgctcctcaatagcatctaactacaggaaatcaagagaat

SEQ ID NO: 289910 - DNA, 486 bp, Zea mays
gtggttacaatcaaaatcttcatctggccttatttcagcaaaggaggacaaatataagaaggaagttgtattgcttgctatcaatcacaagcatccagactacatggcctttagaccggaaaagagggtacaggagcttgttgaacacgaaaaggatgttgctgaaagtagtgtcactaagcaattggaggttgcagagatttataagccaagttctcatgttaaacccatatttgtggctgtcgaagctgacatggagaagtattacagtgcaccagaggcttcagatatagtcttcaggtacgttgaaaaggaaaaattggttaaacctacagacagggccaaggtgattcttgatgttacattatgtgatgcattgtacaaaggggctatcaaaaagggctcggcatacccaactgaaatccacaagaaagacttaggttcagcattcttaaaccgcatgcaagttcaccacaaggtatcgag

SEQ ID NO: 289911 - DNA, 289 bp, Zea mays
ctcgagccgctcgagcgattcggctccagcagacaggtacattcagatcatgaccatggaccaaccaccagttctggttcatggggttcctgaactacgacaaggccctcaagaatctctacgaggccctgcagcaccgcgatgtcagcggccaccagcgctgctgatgctgatcacgcttcggttaggtcctacagtcctactgctacttatttcgtccatgatgacctgtgatacctttatctcatcttatgttcttgatgaataagagaaacaccgaaaactcctg

SEQ ID NO: 289912 - DNA, 305 bp, Zea mays
tacatttcagaaagctcgtcttgcttctcccagcattatattttttgatgaggctgatgccattgcccccaagagaactggccctggtgggaattctagtggcaatgccacagtcggagaaagacttttgtcgactttattgaccgaaatggatggtttagaactggctacgggaattatcgtattgggtgctacgaatcgcccaaatgcaattgatgctgctcttttgcgtccagggcgtttcgataaggtgctgtatgtcccgccaccagatgtggaagggcgacacgagatactacgcatcc

SEQ ID NO: 289913 - DNA, 191 bp, Zea mays
tggcattcgcagtgcccagtgatggcattactctgcactatagccatttgccccaacttaagtttagaaattacaagtttcagtaatagctgaacctgttcaaaatgttaataaaggtttcgttgcatggtaaaaaaaaaaaaaaaaaaaaaaaaaaaaaaaaaaaaaaaaaaaaaaaaaaaaaaaagaga

SEQ ID NO: 289914 - DNA, 282 bp, Zea mays
gtcttagcgggtgtatttggcacagcagcaacaggatacatcttgcagcatggttcttgggacaacgtattcgagttatcagtagtgctttatctggtagggactttggtatggaatgtattctcaactggcgagaagattcttgattgaagggtgtatgtacacagtgtgcttacagttcgtagtgacaaactcatttcggatcgacaacttgacccctggacataatacacttcaagataacaaatgtgtcatcgcgcagacgagaagtatcaacctcta

SEQ ID NO: 289915 - DNA, 252 bp, Zea mays
gtctcacatccccacgtatgcaagtaaacggatgaaaaaacacctaggttacacggctatatataggttggactcacgccatgcagataaccattcataagccaaaatatagtcaacgtacgcgctagacctgggcgttgttgaccaggtaaccaatcaggcgaataataatgtattgtgcagtataaattacggctttttatgttaagcctttgaaattcgaagtttataaagcacaccattggcatgcga

SEQ ID NO: 289916 - DNA, 273 bp, Zea mays
gaccacaaaaggtaacacgtactactatttgtgttgcttcgtcctacttttttatgccttggcatatgttggctatttctggaggcatgctggcaccattggggaaggagctagcgaggttgtttggggcggtgacgctagctcttgccgacatggattaatatttaacggcggcggtgtactcaatttctttctgtctgatgtctcacgcggtaattttggtgctgcggtgtagtgtttggagtgccccagccagggtggtacagggtttat

SEQ ID NO: 289917 - DNA, 346 bp, Zea mays
attcgcagccgtctcactcgtctcgcacagcatccgcttctcctgccaaaccctagcacctccgtcctccgaccccctcagctccggcgatggcctccaccccgcaccctccgccgctcatcggcaagtcgggaaacctcacggtgttcttcacgccatcggcggagcacgagagcccggggtccgagttctctacgcccccgacgagccctcgcgccgaggactcccctgaatcaccaccggcgcagacagcccctccgcccgcgcctgtttactcagtatccacgccgcagcttgtcaagatggtctccccgccgcttcccgccgagaagctctcccgaccctc

SEQ ID NO: 289918 - DNA, 283 bp, Zea mays
gccgccacctatctcaacgaagctttttcgtccctccggtgtggatcctcactcttcatgcgcgtgaattgggttttggatctgctcctgtgttgtcattatttgctgggttctctgtttgatcggggatttgagatacgtatttggttgtggaccatggagattgtatctattggtctcgcacgtcgtaactggcatctgactggattgccttgccgatcatcctgatatatcaccacccatattccgagtccgctgcttacaggcctcagtccccatcgag

SEQ ID NO: 289919 - DNA, 283 bp, Zea mays
  unsure (1)..(283): unsure at all n locations
ggcaatgtatagaaattgttctgtgttggcctgcatcagtcgtacgcaagccaccagccgccaccgcagcgtgcccggccgcgctgggcacgctgcatgaccggccagagaagcagcgtcacagaaactagccaactgttcaagcgcgttggatgataccagacggcacaaacctgtggtaaacgaaccaaacataactgagctgaaaccgcgcttcgacttttctcatatgcacgaataaagtggaccaaacacctgacctagagttcagtgtcnatgcaaa

SEQ ID NO: 289920 - DNA, 310 bp, Zea mays
accagcgaaggcacaccgccgccgccgtttcttcatcttctcgcagcgccggcgctccatcttcccctcccttccgtactcgcgctcggcacgcgggcaacggcagcggcgctcaggctctcagcgacggcgtcaacgccttcccctcccgactctcgctagtcgcctctcgccattgcctccgatcctccgcacagcggccggtgcgccagcgttcacgttagctgtctattgaagtgtagctgtattgctatcttcaacttcggggccatggcctacgagattagtcagatcaaaaagcttggcatag

SEQ ID NO: 289921 - DNA, 133 bp, Zea mays
cagttcattaatgccggcactgccggtcccaccgccggctccaccgctcccgcggcggtatcctcgactcccagaaccgtcctgctcgttgtgctctcgaaagcgccggatataaccttcaccacctccgggg

SEQ ID NO: 289922 - DNA, 200 bp, Zea mays
tatttacgatattgaattatgtgaaatctgtttccatgatctactactacttacaagggtgattctagaagtcggtttattttagtacctatagaagaataagaagaaatctgtcccatttgttgactgagaattatggaagcaatgaaatccgtcaccatttggttttatccaaaaaaaaaaaaaaaagggggggccgc

SEQ ID NO: 289923 - DNA, 213 bp, Zea mays
cggcaaactcttcatcctgttttggtggccacatgacagcgaataaattagagaacacgttgagctgagaagtatttcctccttaagctcaaaagtacagtaatggatacaacaatcagattatttagaataggagaaaaaaaagaatacaccaaccaggatgctggtacaatcgtaatgaatccattctaaataatctgattgtagtatcca

SEQ ID NO: 289924 - DNA, 426 bp, Zea mays
ctcatcgccgacctccgcgcctccaaccacacccaccacccccacatgttcgcgcgcaagttcgcgccctactgcctcggcccgctcctcgccatcgccgacaccgtcatcttcaaggactgatggcgggcggctccatccaggtactacttactactcggcagcagagggctgggcctggggctagtcaaggccgccgacgacggacggcgcggcaccggaatcagtggcgttcttctcccgtttggaccccccctgcagcgtcatgcatgttcatcagctccatgtttctgtgtagtagattaggagtgtagagaagaggaggacgacgacgacgacagcacgcggcgacctaatgcgaacggcaggttgtggttgcgtgcgtgtacgcgtcctcgatcgtcgtccatccgtgaaaaaaaaaga

SEQ ID NO: 289925 - DNA, 280 bp, Zea mays
ctcggcatataatttcagttcgacagacctcaggaggatagtgcctgccctggcgtagtagcaccgatgagtgatgaaggaggcgtttgcaccttttgtgcttctcgctagctccatgccttcggctgacgattgtgaagcgtgcacccttcctggcctttcctatccccaaaagctcggccatctaggctcgtgaaatgctgcttcagatcaaggctgtccttggaaatgggaagatgaaaggagaatctgggtaatgccggttgctccctttcccatt

SEQ ID NO: 289926 - DNA, 274 bp, Zea mays
ctcgcacctgctctcccatccacttccctccgcatgctccaccgcctcgccttctccccctctccctcgggagccgctgctgctccgacgatgccaccctcatgcatcgctcggatctctccgataagcttctccacctttctcatgcctcgctctgttcctccctcgcgcgctcataacggaggttgcggcgatggcgaagacgacgcgggagaccggggaggacactgccatggcaggggtgggagctgatgcggcgggaagccctccaatc

SEQ ID NO: 289927 - DNA, 291 bp, Zea mays
cctgaggtcctgtctttgcttccttcatatgaaggaaaatctgtactagagcttggtgctggaataggccgtttcactggagaactcgctaaaacagctgcgaatgttcttgctctggattttattgatagtgcaattaataagaatgaaagcattaatggtcactacaagaatgcatcctttatgtgtgctgatgtgacatcccaggacctagtgcttcaagctaactccatcgatctgatattttcaaattggttattgatgtatctttcagatgaagaggttgaacag

SEQ ID NO: 289928 - DNA, 334 bp, Zea mays
cgtcaccgtcgaccgcctcggccgccgcaagctgttcctgcagggcggcacccagatgctcgcgtgccagatcgtcgtgggcagcctcatcggcgccaagttcggcttctccggcgtcgcggagatccccaaggcgtacgccgccatcgtcgtgctcttcatctgcgcctacgtggccggcttcgcctggtcctggggccccctcggctggctggtgcccagcgagatcttcccgctggagatccgctcggcggggcacagcatcaacgcctccgtcaacatgctctgcaccttcatcatcgcgcaggccttcctccccatgctctgccgcttc

SEQ ID NO: 289929 - DNA, 293 bp, Zea mays
cacgcacggaccactcggtctcatgtagctagcagctagcactcactagcagcgaagagtgaggagtgagaggacacggtaaccccagcggcattcgctgctggtccaccaataatcgagcagcgtgcgagagagagtgacgaaccgagccacagagaagagggaacgcgaagctactggcgaactgacataacacgcctgcgatcggtagatagatctacatcatctacaccgccgaggcgccgacaaccacttggccaccatgagcacgggcacggacgccgtcccggtcg

SEQ ID NO: 289930 - DNA, 468 bp, Zea mays
gtggaggctttggaggtgggcatggtggtggtcgctatcctggtggtggagggcaccgtggtggtggagggcaccatgggtggataggaattaagaagcattgctacataaagtttctctatgtcccataacaataaatggcgacgataaatttgaatgctacatgtagttccgtgatggaaatcttatgtattttgtataaaacatggtacatggactgttacgtatgttgcatgaaatactgtactagaataagatctttgtatgccatgtatggtattagtgtgcatgtgtctggcttttgaaaggtgtacctcgtcatttatggacttatatgtatgtatagataaaaataatatttttatcaaggcttgagtcaaagggcgatgtatggatgaactcatggttcttccatcgttgtgtttttatttcattttcactacatatttctggctccactgcttgtga

SEQ ID NO: 289931 - DNA, 335 bp, Zea mays
gggatcgagccgctcgagccgctcgagccgcctgcgtgaagggggagcctagatgaagattttggtgcttctgtttgtacggatttgttggatatgaactgactactacgggttattcctcctgggcgtaggagcgttctacctgcttttttttttagcggtatcttccctcacctgctcgcttgacgcttgtaatcttttggaaccctgtatgactaatcgaggaggaattcccctttgttataatgaactagatgccggcttatctgtagatgtaacatgataatatggtgccaacaagcaagcagttacgagttctgaatctgctagttaca

SEQ ID NO: 289932 - DNA, 290 bp, Zea mays
ctctcatggttcaccaactggatctgcatcatccttggagtgcttctgatggtgctggcgccgattggagggctccggcagatcattatcagcgccaagacatacaagttctaccagtaaacattgcacgattatcgtccaaaaacataccagttctaccagtaactgacagacaagtcttaggccatatataccatgttaccatcagctgacacaggttctggattctgttccatgagggctcccaactccttgtttaatttggcacgacaaaaagctgcaccgggtgc

SEQ ID NO: 289933 - DNA, 320 bp, Zea mays
ctcgagccgtaccagtccaatcaagaaatgctccactacatctcctcttcgcctctccgtccccgattcctcctcctcccgagcccaccctccaatcttcgcttcctcaccatgagcgcctccccctcgagctcctcgtcccgttcggtgcgcggtgcggcggtgtcggtgccttccctcggcgccgacgaggcctgcgcagtggcagatgaagccttccggacgtacacgtcgccgagcttattgaggagacgcggcgtcgggctaggccgtcgtgtggttcaggaacgacctccgagttatcgataacgacgcgcttc

SEQ ID NO: 289934 - DNA, 407 bp, Zea mays
cagcggcatggcttccctctggctcctctcctgcttctcccttgtgggggccgcctttggctgcggggtccccgccatccaccctgtgctcagcggcctgtccaggatcgtgaatggggaggacgccgtccccggctcctggccctggcaggtgtccctgcaggacaaaaccggcttccacttctgcgggggctccctcatcagcgaggactgggtggtcaccgctgcccactgcggggtcaggacctccgacgtggtcgtggctggggagtttgaccagggctctgacgaggagaacatccaggtcctgaagatcgccaaggtcttcaagaaccccaagttcagcattctgaccgtgaacaatgacatcacccagctgaagctggccacacctgcccgcttctccc

SEQ ID NO: 289935 - DNA, 283 bp, Zea mays
ctctcccttccctcttctctctcacctcagctctcctcattctccgcaggctgcagcagccgccccattctccttacccggcggtgcaagtgcaacgtccggggccggcagcaggccacagccgcttcatcctcgcctcattctccttctccatggtgcgcgcggccccggcgtccgcgtcccccgcggacatacgcacgactcgagtactcgcagtcgcagtgccgccgtaccagtaatcctcctgccgccgccgctgcacagggccgacatcagcagcaga

SEQ ID NO: 289936 - DNA, 154 bp, Zea mays
agcacctgacccccacaacccatcgagcttcccatctggaccggaccccatcaggagcagaggcagagccgagagtctctcagcgaaccaccgtcggacgccatgtgctaccaggtgaggtgcggcacctgcggcaagaccacgtgggccgggt

SEQ ID NO: 289937 - DNA, 278 bp, Zea mays
cacaaaagtgcccagaagcatttgaacgtttagggatccgaccccctagaggattgctaatgataggaccgccaggttgcagcaagactttgatggctcgtgctgcagcttctgaagcaaaattgaatttcctggctgttaagggtccggaacttttcagcaagtgggtcggtgactcagaaaaggcagtgagatcgctatttgcaaaggcgcgggctaatgcaccagcaatattattttttgatgatatagatgggcttgcagtaactcgtgggcaa

SEQ ID NO: 289938 - DNA, 231 bp, Zea mays
gccattcgtcttattattacatcatttaattcattcttggtaagcactgaaataaggggtgatttctcgcttcatgatattttttcactgttagggctagttttggaacactgttttcctaagcgattcggtgaatgcctctgtatattatattcatagattaaaacttaccgtgccttttgaatttattgtcgtctctagcaaaaagaaagaatactagtagctttgcgc

SEQ ID NO: 289939 - DNA, 260 bp, Zea mays
caccaggtgcactcacctgctcctgcctataagtgtgccccatcccatcccgatggtcagccagtcctgagcacctaaccatgctgggcatcactgtcctcgctgcgctcttggcctgtgcctccagctgtggggatgcccagcttcccgcgcaacctatccgcccgagtggtgggaggagaggatgctcggccccacagctggccctggcagatctccctccagtacctcaagaacgacacgtggaggcatacgtgtgg

SEQ ID NO: 289940 - DNA, 434 bp, Zea mays
cgctaactgtttagattctactgtgcggcttctagacaagtcatctggagaactgttacaggagtataagggacatacgtgcaagttcttcaagatggattcctgtctgacgaatgatgatgcatttgttgttggcgggtctgaggatggttatattttcttctgggagttggtggatgcacctgttgttgcaagattcagggcacatagttctgtggtaactagcatcagttaccacccaacaaaggcctgcatgttgacgtcttctgtggatggctctattcgtgtttggacctgaagactcttgaatggttgatgtgctattcgtactgttactccaaatcatccagttatctagcagcaaggattcgacagtatgaaagatgaacgcatgtctaacctaatgggattcatacacgccttgctgcagagag

SEQ ID NO: 289941 - DNA, 329 bp, Zea mays
gtgacctgtccagaggaaggggccttggggtgtgagctacccggtgggtagtctcacgtggccttgggcatctggttgcaggggaggaggcacttgctctcctctccccatgctcgttgcaccctgttctggcgaagggctgcgccatccacagcggcgctcaggccaggaccagggggatcttggtttcttcctctccctccctcaacacatagcctgttcccagggttctagctttgtctccctgttgctactgccagggctctggtctggcccacatcatcttctcccgactctgtccacagcgtcctcgctgtctcaccgtctcc

SEQ ID NO: 289942 - DNA, 207 bp, Zea mays
cttctacgacgtgccagcggggcggcgggacggccgcgtgtccaacgagacggaggccaacgacaacctgctggggccggacagcacggcggagatcctcatcgacggcttcgggaagaagaacctgagcatcgaggacatggtggtcctgtccggctcccacaccatcggccgctcccactgcttctccttcctgtccacaaaccg

SEQ ID NO: 289943 - DNA, 270 bp, Zea mays
gctgtatgcccagatcgaggctcaaacagtttacggagcccttcatgctttggagacatttagtcaactgtgcagctttgacttcaatgcaaacctgatcgaacttcattcagctccatggactatcctggacgctcccagattcccttaccgagggctcctcatcgatacttcaaggcactatcttcctgtcccagtgataaaaggtgtgatcgactcaatgaccttcagcaagctgaacgttcttcattggcatatcgtggacgagca

SEQ ID NO: 289944 - DNA, 256 bp, Zea mays
tcgatggtgttagaagtacatcaagaagcctttaaaaagcagcatactcctacttgattcctaggataagcaatagcttgaacttaccccgttatattttgagtaattgtaagattacaaacaatctggcaccccttgttttgttaatttttgggtgaactttttattcctcccaaaacaaataccctggtgattgttcagttattgcatccgtatcaagtctctcttagaaagatgttgtttctgtcaagcaaaa

SEQ ID NO: 289945 - DNA, 272 bp, Zea mays
atatcttctgtgaggcagccataccccgcactttgtcatgccctccagcttcatacaggcacaagagaacagaactccaatccttttgtgcctgtatgaagctggcaggcatgacacagtccagcttttggactatcttctgtgaggcagccagcccagattggcaaactgaaaatgcaccagatatattacctatttgcttctcgcgtggccttattacgagtaaagtcagggtctgctaaaagatttatatcccaagtaatgaatacaat

SEQ ID NO: 289946 - DNA, 523 bp, Zea mays
ccgctcatatgcatctgctgctgtgttggatggacacatatttgcttttggcggtggcgatggcatgtcatggtataacacagtggaatgctatagctcaagaaataatgagtggacggaatgcccctccatgaaccagaagaaaggaagtcttgctgggatctgtcttaatgagaaaatatacgctattggtggaggagatggaaatgaattttattcagaagttgagatctttgacccctaccttgggaagtggatatgtagcccatctatgctaacctctcggtttgctcttgctgcgtccggactaaatggagtcatctatacatctggtggctatgatggaaacatgtacttgaaatcagcagaaaggtatgatccaagggagggcttctgggtccggcttccaagtatgagtactaggagaggatcccacacctttactgtccttggagacaccctatatgctatgggagggtatgatggggacaaaatggtttctagcgttgagatctatgatcct

SEQ ID NO: 289947 - DNA, 279 bp, Zea mays
ctccgcgctcctgccaaccgcggattccatcctcctgcaatcgccaccgcgccccccgtgctcctgctatccgaggaaagccttccatccatggcgcctttactgcaattccccccgtgatctgcgctccctccattgccccacgacaccgccatcccaggaaacccttccatccatggcgcctccccacgaatctctgctgtcaatttttatggagaaatcgcgcctcgccagggtgcccttccatccatggcgtcgttgctgcaagtgccccgcaat

SEQ ID NO: 289948 - DNA, 497 bp, Zea mays
cggctcgaggtcagacagcatcgacactccttggcaggttctactacaaccaaggtggaaatagcaagtggatgtccacatttgtccaaaccgctggctttccagtgctgttcgtcgccctatatctgttccgttcaaaatcgccttctacacaaacaaccacccgtagccctgagacttctgccaccagaattactcttatatgtgttgtcttgggcctcatcattgctgccgatgacttgatgtattcctatggcctgttgtaccttcctgtatccacatattcgctcatttgcgctagtcagctggccttcaatgctgtcttctcatatgtcctaaatgctcaaaagttcaccccattcattttcactcagtaattctccttaccttttccgctgcgcttcttggagttgacgaagattctcagggtaccatgggtttatcgcgtgggaagtacctattgggtttcgcattgaccctaggagcctcggccacat

SEQ ID NO: 289949 - DNA, 234 bp, Zea mays
cgcgcacatggcggaaccgactcagatcgattggcctgtggaacgcgaattctgtgatgatgtctgggcttgtcgctgcactgtttcggagacatacaactatacaagatccgtaacagcaagtttattggggtcatgtttgttgcgccattattcttttgtttactattgtatcctcgcaacttttgtctttttaatgctggacattgaaaatgcgtccagtgtgtaaggtat

SEQ ID NO: 289950 - DNA, 277 bp, Zea mays
cctcacatctggtcgccggaaggctagctgcttcttggaagtcggccgccgcgagatcggctcttcattcccccgcgtctcttcccgccgaatcagcgcgctccgagcatatagtgtcgtctatgtctcagtatggaaaattgcatggtcatgaaggctgtgttaataccgtaagcttcaaccctgctggagacctccttgtgtctggttcggacgacacaaacatcatactatgggactggctttctaaaactacaaagcttgtttacccttctgg

SEQ ID NO: 289951 - DNA, 440 bp, Zea mays
aggtgaaccatgccaatgaacgcgctggtgggatacgcgggggtggtggattcggatctagtggtggttatggtggtggaggtggatatcctactggtgggtatggcggtggtggatatcgttctggtggtggttatagttctgggggttatgctgccaatggttacggtgttggatctggcagtggctatggtggcacctacagcaatgcatcaggtggtggatattcaggcagtgatggttacggcaatggagctgccagtggtggttatgctaacaacttgagcagcggatacaacagcaatggaaggtacaataccattggcagttctgatggaaacactggtgggtacaattcgtctcccaacccgtatggtgtaggcaactacaataccggaggttcgagttccagtggtggaaccttaggagagtttggtgtg

SEQ ID NO: 289952 - DNA, 262 bp, Zea mays
attacgagagcaggcgccactgcggttacacagtgaaaagccagtgtgtcggatatcagcgatatgctcccccagggactccatgtaccagtctgtgtgtttgatatcacaggcgaggacatgaatgtgtgcattgccccggaggcataaggcaggacgctacttggacatccctgctcacacccgcggctgaacgtcccttctagcattgtgcacattgcatcctggacgggacgtttttcatatgcaacgtgctgctctc

SEQ ID NO: 289953 - DNA, 267 bp, Zea mays
tttgtctttttgggaatcagaaaataactttattccattctggggagcgggccgatgtccagcctcagaactcctggaactgcttcttggtgccggcagccttggtgaccttgagcacgttgaagcgcactgtcttgctcagaggccggcactcgcccactgtgacgatgtcaccgatctggacgtccctgaagcagggggacaggtgtacagacatgttcttgtggcgcttctcgaagcggttgtacttgcggatgtagtgcagat

SEQ ID NO: 289954 - DNA, 277 bp, Zea mays
cagcagcccagttcttttggcttcatttgccccacctgtaaagataggatgtctggtcatcacagtgtgcccaacaatggttcatggcagccttgaggtgcagcgctgtctggttaatcatctgtattgctgcattcgagggatcttgtggttttctgtacactactcatgcctgtcgactgtcaaggtctgaaaatggtcttctcaagcagcagttgtccgtcctccaagttgagtggactgccaaggaatgaacggcatctctgtatcaacagtg

SEQ ID NO: 289955 - DNA, 526 bp, Zea mays
  unsure (1)..(526): unsure at all n locations
tgctgagagaggcatgaggggctccaggtttgggatgttcggcgatgatatatttgggtcncaccctcagtttcctggtgaggcatcaatgcatgttccacaacggtctcagaatgttcctccaattgagaatcggttgccatgcaaccttgctgatttgtacaaaggtaccaccaagaaaatgaagatttcacgagaggttttagatgccagcgggagaactttggttgttgaggagatcttaacgatagatataaaacctggatggaagaaagggacaaaaataacatttcctgaaaagggtaatgaggctcctcatataattcctgcagatattgttttcataattgatgagaaaccccatgatgtattcacaagagatggtaatgatctggttatgactcagaagattactttggctgaagccttgacagaatgtactgttaatataacaacattagatggtcggaatctgacagtgcagataaataatatcatctaccctggctatgaggaggttgttccc

SEQ ID NO: 289956 - DNA, 295 bp, Zea mays
tagcaacctgcccacgctcctacaaaaagagatgttaccacgcctgcggcgcttcggcaagctcggtcttctcgctggagagctgcagcccggggttcccgttcggcgggcaaggggacgtgttccagtccttcgtcccgaacggcctggagaacccgtgcggcggcctgaacccgctggacctggctctgtcccaggctaccggcgggcagttcggtttccaggacggaacggccggcacaaacctgcagagcgtgttccacatcgacgacaacgggcagagccaggagcacgg

SEQ ID NO: 289957 - DNA, 389 bp, Zea mays
cccaggtgtacgacccgagggcggaccggtgggaggcgatgccggcggggatgcgggaagggtggacggggctgagcgtcgtcgtcgcgggacgcctgttcgtcgtctcggagtacgagaggatgaaggtcaaggtgtacgacccggagacggactcgtgggacgcggtcggtggcgcccccatgcccgagcgcatcatgaagcccttctcggtgagctgcgtcgacagtaggatcgtcgtcgtcgggcgatgcctccacgtcgcgattgggcatgtgcgggaggaggccgctggcggcggtcctggtagcaggggggcgccatgctactgcggttgctggcaggacgtggacgctcctaaggagttcagcgacctgacaccttcgagc

SEQ ID NO: 289958 - DNA, 409 bp, Zea mays
gaaatactgacaatcattgcaatgattcaaactgggaacatattctatcgaccaagggagaagcaagcacaagcagatcggaaaagatccaactttttccagccagaaggtgatcatctcaccctactcactgtgtatgaggcatggaaggcaaaggggttttcaggaccatggtgtgttgagaatttcattcaggtaaactcactaaggagggcacaggacgtgcggaaacagcttcttgagattatggacaagttcaagctcaatgtcatctctgccgggaacaattccaccaagatagggaaagccctcactgctggattcttcttccatgctgcaaggaaggaccccagtgacgggtaccggaccctagctgatcatcagcaagtttacatccacccgagcagtg

SEQ ID NO: 289959 - DNA, 307 bp, Zea mays
actgaatcctcctcctcctccccgcctagggttccgcttcctcaccgtccgagaaccaccgaagcggtggcagctgtcccttctcgtcggccaccgccgcacaactcagttgcttgttcagccgctccgctgccgacccgcctatcgcctgaggttcttacggtgccacggagttgcaactgcacaaaggccttttgtggtcacaaagggtgctattgtgttacaacaacagttctagttgaagtaataagacattttttagactgtctgctacattgctccatggcaaccaatgagaacctcccac

SEQ ID NO: 289960 - DNA, 268 bp, Zea mays
cgtcgaattgtacgccagcaaccacaattctatcatttgcctttatgttcatagcacacctgttctgggtgacaattatggcttttttatcaactattgtacatttttggtccagttactttgcacgggtgtcttgtcaaagtaaatttctgctcgctgacatgctaatgtttttcttcgtgtttggggttcttcacctccctcgcagcaaagaatgtattttttatcgagggatattttgttaattagctagatgaatattactacc

SEQ ID NO: 289961 - DNA, 205 bp, Zea mays
tgctgcacctcccgccgtcgtagaggtcttctgggatccggacccctacctgatggtgcagcagctcagggagttcgagaccctgaacgacgggctggtggcgctcagggtgcagctgcaggagtacgcgggggaaatcagcaagagcaaggacaccaacgccgggatggactggctcctcgctctcccggccagcgtcagggac

SEQ ID NO: 289962 - DNA, 276 bp, Zea mays
ctgtcagattgaactcggtgcctaacagtctagaggaatggaggtcgctggagtggtgtcgctcagtggtggatttagttagtgctatcattttgctcttgttttcctgttttccggtgggccgtgttaggccaacgctcattgctgttgtatctcctcttttgtaatctctgttttgcttggtgtaatcttcgagccgtttgggctactgtaagggttttgcctcgtttccctaataacgaggttgttgatgtgtggctttgccatgcgaatatg

SEQ ID NO: 289963 - DNA, 284 bp, Zea mays
cgctccactaatgtgctactggaaagaaggtggagccttggagtggctattgaaaaattcctcggtcgcgaggccaatgaaagttctgcaattgaaagatgtgaaaacaaggctgattccaaccttcctatactggaacgggaatatatgcaaggtgttctcatcagcgaggtcgtggtggatgcaagcttctcgaatccattaaaaagggtatcacgccgccagaagataatagtgaaggacaaaaagaaacctgggcagacaataattaaaggacataggag

SEQ ID NO: 289964 - DNA, 186 bp, Zea mays
cgacgggttacttgatctcaacttcccaccggctgcagcggaggagacctgaaccaagcttgccgcgaagtgatgaatgtggggctctgtacagattcatccaatgcaatttatttttttcccccaagcttaccaagggagtcttgaagcaggagtcgggttttctatcaggttattacttcaatg

SEQ ID NO: 289965 - DNA, 128 bp, Zea mays
cggaatcgtacgacgatgcatcttgtgaacatgcggcacacattattcttcgtctcgatgtatcagtgccgcatgttcacaagatgcatcactaataaatcgagacgaagaataatgtgttttcaaaa

SEQ ID NO: 289966 - DNA, 352 bp, Zea mays
  unsure (1)..(352): unsure at all n locations
agtccggactgacgaatcggggacggagattcacatcaacgcagatgtggaccccacgaccgagtcgtcgcgtcgtctcctccgcttccgacactctcctgctctgcctcctcctgcttgccggcgccgccgacgccgcgccgctgctcgtaggcgtttttcccaaagatgaggcgtacttcgcgacgcaggtgatcgcctgcagagacggctcgggctctttcccgaggagccggctcaacgacgggtactgcgactgcggcgatggaaccgatgagccaggcacttcagcttgtgcagaaggcaagttntactgcagaaatatcggagatacccctcgattgatgatctc

SEQ ID NO: 289967 - DNA, 260 bp, Zea mays
acagatgtgtgtgtgcagtgtgctagagagtggcgataagagtctgtcccgatagccaaggatgacttgcctgtggcttcttggcttgccttggctcgggctgattaaaaccttgtgcacgttttattgctctccccgtggcctcgatcacaggcagtctccttggctagtccgggcaggccccttatctgaaaccgatatatcggtgagcgtgggaccgagggaaagcatatatgcggtgcaggtgcaggcgtgcagct

SEQ ID NO: 289968 - DNA, 268 bp, Zea mays
cagaaccctaaacccgcatcccgaacatagacgccggccatctccgccgccaccgccatgttcgggaccccatccaccactcccgctttcgggtacccctccagcaccccggtttttggcacgccatccgccacacccgcatttcgtcgcgacgtcgcccaccccggccttcggcaccctctcgtcgacgcctgccttcggcaccccttcgtcgactcccgctttcggtaccccgtcgtctacgccagcgttcgggacccttccacga

SEQ ID NO: 289969 - DNA, 279 bp, Zea mays
tgagtgcttgatctagatggcaatgagaatttggaaagctgttaccttgaagatatagggaagttatatcagttgcgatacctacggattaaggcaagtaatattacacttctggaaaggatagaagagcttcagtgtttggtaatactggatcttctgaattgccctaatctaggtgaattgcctagaagtattgttcaacttcggaacttgaaatggttaactgttcatcgagcgaacttgccagatggagttgggaacatgcaagcgctagagttt

SEQ ID NO: 289970 - DNA, 270 bp, Zea mays
gcatcttgcctgcttatatgtgataatatggttgctatgttttcatcattcgtgaatagaatgttcacatgagctgaagtgtacaattaatctagctaaggagttatatctttcttccttttggatttgtacttgctaaatattagttaatctagatggctcgtgtatgatctttccccctcttgtagttgtggagtccaaggacggaacgatctcagttgcttcagcatttgctggtcatcaggaagctgtgcaagacagggaccacaa

SEQ ID NO: 289971 - DNA, 284 bp, Zea mays
ggactcaagctcgagaaaaacattctaatacaggaatttgaacggcgaattgcttttagtaaacagctgattgctagcttcatcaaaacccacatttttagtcggaggacgtcctatcgatggatggaagtacatgattgaagatattggccccaacgcaagataaggaaaggggagtgtgcaaagattaccaagtgtcagtgatcctgcaacccagccttacagggaagaaactcctgcaattgcttctagttcctccttcagaggcaatcggccatgatggt

SEQ ID NO: 289972 - DNA, 168 bp, Zea mays
atcgcgagttattctacaggttgattggttgtgtgctaaatattatgacggtcacagttgtgtagagctatacctgcaaaaatttgtcctccgccactccttgtaacttgtcttatactcagacctagaacgacaaaaaacaaacggggcatcagccgaaaatgacgc

SEQ ID NO: 289973 - DNA, 271 bp, Zea mays
ctcgagccgagactgaagcacgaggagctctgcaggttcaggccgtacagctgcccgtacgcaggttccgagtgcctgatcgcaggcgacgtcccgttcctggtgtcccatctcatcaacgaccataaggtggacttgcacgagggctgcacgttcaaccaccggtacgtgaagcccaacccgtacgaggtggagattgccacgtggatgctcactgttttcaaagtgtttcgggcagcacattctgcctgcacttcgagcagttcgtgct

SEQ ID NO: 289974 - DNA, 254 bp, Zea mays
tttgagacaagtgcaatgataattacatttgtgttgctcgggaagtatctcgaggtgcttgcaaaagggaagacatcggatgcaattaagaagcttgtagaactggtcccttctactgctgttttggttctgaaagacaaagaagggaaacatgttggtgagagggagattgatgcacggttggtccaacctggtgatgtcttaaaagtggctcctgggtcaaagattccagctgatggtgttgtccgttgggg

SEQ ID NO: 289975 - DNA, 144 bp, Zea mays
gcgaaagggaatcaagctattagaaacacacgcaccttgcggatcatgtaactgcaggtctgcaaaaaaagagaaaaggcaattatacagtcatagtcacaggcagagaaatctgtacacgaaataagtaagtaggttatgaaa

SEQ ID NO: 289976 - DNA, 343 bp, Zea mays
actcgagcgaattcggctcgagtggtacttcaggtcactcgatgacgtgatcatccccgcacttaaatccgccttctctatcacggcagcaagagtagaaggtctcactggtgtttgggttggggaccgtaaagttgcggcgatagggatccacggttctcggatgatagtttatcacgggctcgcactaaacataacaactgaccttgctccattcagaatgattgatccttgcggcataaaggaccgcggtgtggggagcattaaggagatactacaaagggtgtctgatgcggaagagatcgatgacgcgtcactgatggatatagtgtatgattccatg

SEQ ID NO: 289977 - DNA, 259 bp, Zea mays
aagttggcaagcagagcacacacttgtctgttaagtgtacttttgggttgttggatttccaacacaaaagtgcgcgcatctcctcagtgttttctgcaggactgcagtaataaactggttgggtctgttctattgataatgacagcaataataagttcgttattgtgcaaaaaaaaaaaaaaaaaagggggggccgcctgcaagtgaactggtagcccggggaattatttccggccggtaacctgaaggggtacaagtt

SEQ ID NO: 289978 - DNA, 261 bp, Zea mays
gcaggcgcggcgagcgcaaaaacaagacaaagccaaagcaaaagcttgcacagctatcaacctcggggaacgtgctgggtagagtcgttgagccattttcgtctccaacagtgcaggagccccctgaacctgcaagcgagataaagacccagcatccaactaggggtgcttccagcagcgctgcccagcggcttaccgtggacgctggactgccagtgttgcctgggttagatgacatattggacgtcccggaagggcttg

SEQ ID NO: 289979 - DNA, 278 bp, Zea mays
gaggaacagagcagacgacgcgaggcgatttctgcgggtttgcttgctccatctgtagaccttaggccgccgccgggcgaccgtgcgcgtgcggtgctcacgccccaccccgctcaggtgaaggctcttcaagatgggcgaggtacacgaagctgacaagaacattgagatctggagggtgaagaagttaatcaaggcacttgatgctgcaaaggggcaatggaactagcatgatttctctcatcatgccacctcgtgatcagatttcacgcgtcact

SEQ ID NO: 289980 - DNA, 436 bp, Zea mays
  unsure (1)..(436): unsure at all n locations
ctcaaatttcggattccctcgcgtcccgcccacatcctccgtagccgccgcagccgccgagccgagctccaagcggaggagaataggagagaccaccgatccgccgtcggagatgagggaggaggcgctggagcggctgcgcggggtggtacgggacagcgccgggaagcacctctacacgtcggccatctgcctcgccgacaaggtggccgcggccacgggggaccctggcgacgtctacatgctcgcgcaggcactcttcctcggccgtcaattccgtcacgcgctccacctcctcaacaattctcgcctgctccgcgacctccggttcagattcctcgccgccaactgcctcgcggagttgaaagagtggcatcagtgtttgttgatgcttagggatgcaaaagtggatgagcatngaaatggtcttgatcat

SEQ ID NO: 289981 - DNA, 272 bp, Zea mays
ggcttctgcagttatcctgcttgtgatgcagtggttgtcggggggacttgtgttgattctctgtattgtgaagcgaggagaattctccaggcaggttgtcacaaagttgggaagcagcttctcaacagtggcttttgtaattgttgtggcaacttgcaccattttagcaatggttgcaaccgtaccacttgcccagcttttatgttttcatgtccttcttgtgaaaaagggaattagcacatatgattacatcatagctttgagggagcagg

SEQ ID NO: 289982 - DNA, 279 bp, Zea mays
cacattcagctcgactgttcgaatgcaggcaagaatccggcctgcccaaagcaagtccaggttcagggaactgaagaactctacataaaaccccaccacaagggcgcagattccacacggtccccctcctccccactcctctcctctcctctcgccggcgcatcgcccgactgtcagtcagcctcccccatggccgcggaggaggagcagggcttccgcccgctggacgagtcgtccctgctcgcctacatcaaggccacgccggcgctcgcctcccgc

SEQ ID NO: 289983 - DNA, 283 bp, Zea mays
gcagaggacgtggggctgtacgccctctgggatcagcttatggaggctgctgcctcacgtaagtccacattgaagccattacactgggttacactgacaagggcccttcaaggtagtctgtgggaagaattgcagcgcaacgatgactcacagagtgtttcagagtttgatatatcagaacttgccagcccttttcctgcagctgttccgaagtccgatgacagctcaaaatctgaacgtagtgaatcacttggatcaaaaccagaaaaagtgcacctaattg

SEQ ID NO: 289984 - DNA, 263 bp, Zea mays
atagtgttgcctcgacaaatcgccgggcttcatcaccatacacggagagaaaaaaaacggggcccccatctactgtaaaccccgccgtggtggccgttcgaagcatgcagcaggggtaggatgtaccacgtgcacgtgaggctcgtgcttggtgaaaccgcgggatgcgctccgccgccgcgtctggccatgggggaaaagttagagcttgcgcagagaatggaggaaggatgtgacgaggtccgccgtggactgattttcgt

SEQ ID NO: 289985 - DNA, 306 bp, Zea mays
gttttatgatattcctaacccattccaggctggaaggcatcacagccttgtaatcgagaaggatagtttcccgcatgataccctggaaattgttgcgtggacagatgatgggttgatcatggctgctcgccacaggatatacaaacatattcagggcgtgcagttccatccggagagcatcataactactgaagggaggctcatggtcaacaattttatcaagattattgaaggctacgaagcctcgaattgctctccgtgatttatctagttggaagcagcagcagccctgcgtggggcgggtga

SEQ ID NO: 289986 - DNA, 422 bp, Zea mays
gtgcgccgagtcgacgggcggcggcgaggaggtgggggagtgggcggagagtcgtcgcggtcggcgctgtcgctgttcaaggagaaggaggaggagatcgagcgcaagaaggtggaggtgcgggacaaggtgttctccatgctgggccgggtggaggaggagaccaaacgcctggccttcatccgccaggtgctggagctcatggccgaccccacgcgccgggaggtcgacgccatcagctagcgcatcgacaaggtcaacaggcagctcaagccgctcggcaagacgtgcctcaaaaaggagaaggagtacaagatgtgcctcgaggcctacaacgagaagaacaacgagaaagccacgctggtcaataggctgttggagctcgtaagcgagagcgagaggctgcggatgaagaagctgga

SEQ ID NO: 289987 - DNA, 282 bp, Zea mays
gttggatcaatatgtatgcagattagatgtatatagtaataattaagatatactcatcgatttgcatacgccttctctacagttatgcacttatgctccaagccttgttccgttcaagtttgcttcacatagtaaaacatgtctcccgttcacttgaaacctaaactgttggatatgcagtttagttccttcgtgttcacatttgtctaaagttatggtttgttgtaaagagtgactttgcaaagatgcatgccccctgccattcttctttttggttaggca

SEQ ID NO: 289988 - DNA, 252 bp, Zea mays
cacaagttcatcatcaacagaagggccttttgtgcgcctgtgcattaccaacaggatgtactcaccgaggggccttgatccctcgattatccattctccatttggtggcatgtcgcctcggtcccctcggactatggagctaacatctcccctaagtgtccgtgttggtgttggagctgctgttactccgcgtgatatgttggatcagttttcttccctgaacaagcaccaggtgccatctgtgggatcgcc

SEQ ID NO: 289989 - DNA, 261 bp, Zea mays
ctagattggtatcgaatacaattcttccaagagatatacgtgtactgggttggtgtcatgttccagcatattttaatgcaagatgcggtcgctggcgctcatgctgacgtggtccgtcgccaccgtgctcactctcctcgccgtgggctcgccccatccaccacctcagcaatgctagaacggaaaaccaggttgtgcacaagagtacttgcgactttgaaggtcttatggtcagtaatagaggatatgacgaagtacata

SEQ ID NO: 289990 - DNA, 452 bp, Zea mays
agcggaggcggcggcgcaagacgaggaaggaaagggaggatgaggagagaaggcggaggaagaaggagaaggagaggagaaagaggaaggagaaggagaaggagagggagaggaggaagaagaggaaggaggggaagaagaatttggggaagaagggcgctgtgaccaactcgtggcggaaatatggcatcatccgtgagctcgatatgtggagcaagcggccagagttcactgcatggctatcagaagtcaagcaggttaatttggaggcattgtcaaattgggaagagaagcaaatgttcaaggaattcatggaggatcacaatacagccacgtttccatcaaaaaaatattataatttagatgcttaccatcacaaagcaatggagaaagagaaaaagaagggtttaaaaatgattgtgacagaacgcactgtatttaatgatgaggaa

SEQ ID NO: 289991 - DNA, 249 bp, Zea mays
ctcgagcgcgaccctgtcattgacctcgacgaggaaacctacgctagtgttagtaccgtctcagagcttgctggccactgctgcgctagggaagcacaccagaggcctgacatgggccatgctgtcaatgtgctctctaccctttcggaagtttggaagccagccgatccggactcggatgacagctacggtatcgacctctccatggccctgcctcaggctctgaagagatggcaggcgttcggggac

SEQ ID NO: 289992 - DNA, 271 bp, Zea mays
acaatcaggttctgaagttcaatctaaccgagtaccgggcttcactgtgtcctgccatggctgaccatggctgtacgtcgcgaatatcggtggatggcttgctgatactcttgttcaaagagggatctcagttacaaacgttcgtaagatcatgcaatcaattggtttccttggaccagccatgttcttaacactgctgagcaaagttcgtactccagccatggctgtattatgtatggcatgcagtccaggtagcgatgctttttcacag

SEQ ID NO: 289993 - DNA, 283 bp, Zea mays
cagaataacaactgcacctcttcatgcctcagcaaattggtatttggagaatgtcaatcctatcctgcaaagctatgggattgttgcgatcgctcccttttctcaccgccttgcatttgatgatttgcctgtggatcttcaacgcttgcgttgtaaagttaacttccaagctctggtcttccgttctcacattatctcacttggagaaacacttgtgaagcgcttgaggtctccggtccgggttcattccagtaaatctatccatcaagttgtaggagacaca

SEQ ID NO: 289994 - DNA, 378 bp, Zea mays
catcgcgtcccagagatctcccacgagctcagcgaggttcctgaagtgtgggctgtgcgagacattcctgcacaagaaatcaccctggacctcgaacaggtttgttcgaaacgccgacatgccagtggcagcagttctgccttgccgacatgtcttccacgcggattgcttggaggaaagcactgccaagacagaagtccatgaaccaccttgccccctgtgcgcgcgagccactgacgatgaacggcacgtgtcgttctcagaacctctgcatgttgccctccgatctgctcgcaggaacctttcgttgggcactggtgctggtgggaacagcggcatttctgaccctcctcgcactgatcgtggcttgaagaggaa

SEQ ID NO: 289995 - DNA, 373 bp, Zea mays
ctcgagccgattcggctcgagggacgagcgggagtgggacacgcccatggagttcgtgccggagcgattcctgtcaggcggcgacggcgagggcgtcgacgtgactggcagcagggagatcaagatgatgccctttggcgccgggcggcggatttgcgccgggctcggcatcgccatgcttcacttggagtacttcgtcgccaacttggtcagggaattcgaatggaaagaggtggccggcgacgaggtggatttgtctgagacgcgcgagttcaccaccgtcatgaagaaaccgctccgcgcgcagctggtgcgcagaacaacttgtgtatgaatggcgattaatggcccatcaccgcgatctgtagagtcc

SEQ ID NO: 289996 - DNA, 306 bp, Zea mays
gaggaggccatggacgaaggagccaagtagaaagctagcaggcaccgcaaccaacggtaaagctggtggtcgagcaagttttaatttgtcaagagcgagctcatggaggatggcagtgctccaagacgggctactccggcccccacccgcaggagcagatctgccgacttccacaatttttcagaatggaggaggagggacaggatcaacgagaaactgagggcgttgcaggagcttcttccaaactgcaccaagaccgacaaagtttccatgctagatgaagcgatcgactacctaaaatccctc

SEQ ID NO: 289997 - DNA, 435 bp, Zea mays
tggatatcaggaacttcgaaacaggagaatacgccctgatcgcttgggtggggatcccgacgccaccggcatggctaccaacctagatgctcatcaagtcggacaagctcgactacgagaggatatgatggccggccggccggcgccgacggctctgcagggcaccgtagcgccgccgccgaattcatgcttcatttcgcatcaggagtcggccaagcaggacacacctcttgttgttgacttgttgtaggtatatacgtacatgccagtatatgccagaacagtcgacagaggcaatctgagacctcagctgctggaataatcaggaagtagatcgagagcgacgtacgatgacgagattcataattgctgctgcacatcacttctttatgttatttaaactcacatgtcataattaatactaataatatattc

SEQ ID NO: 289998 - DNA, 326 bp, Zea mays
agcgcgaggtccaggacgagctcgcgtcgctctccgacctcgccgcctcctaccactcccgcctccagtcccacggcatcgacccggactgcttcaccgacgaggacgatgaggaatcatacgaggaggtgggcgccgaagacgtggagcagatccacatggctgcgctggaggtgaagccgaacgcccgcgagtcgaccaatggcatggtgaaaaccatggtcgttggcaacgatggcgatgaagaagtggaggacgccgatgaggaaccgtcgtccccagtggagaaggaattcgagtacacggtggacgttacctgcgcgagc

SEQ ID NO: 289999 - DNA, 460 bp, Zea mays
attcagatgtgtgtgtattcagtttacagagctcaatatgttacatcgaccttcccaacccgccggcagagcttaagaagctcaagcacaagaagtgcctcgtccagtccccccaactccttcatggatgtcaagtgccaacgatgcttcagcatgtccaattcgcttgtggcataggaatctcatcctagattcaatagaggggctgcaatgccggcatcgccatagctggaaatcgagcactgacggacaccgggcgccgagatgggccgtcttgtccaccgccgcaagaaccgcatgcgttggagccatccttacacctgctcctacttccgcgccagcaacccaacacgccgacgacacgagctcctccttataaaagtgacatctttattgtatagataacgaatggttatagttatgtattcttgtgtccaagtggtattggatttctttagct

SEQ ID NO: 290000 - DNA, 289 bp, Zea mays
aaaaattccagcataccaggaatcatcaagaagcggccccagctgtgcgggatcagcatgtcagacaatctcaagccgatgatggcttatctggagagcatcggcgtcgacaaggctcagtggagcaaggtgatcacccgcttcccggcgctcctcacgtacagccggaacaaggtgcagacgaccgtgagcttcctcgccgagctaggggtctccgagaagagcatcggcaagatcctgacgcggtgcccccacatcatgagctacagcgtggacgacaacctcaggc

SEQ ID NO: 290001 - DNA, 380 bp, Zea mays
acgacaactacgacgtcgatgactctgacgaggaagagtacattggcgcgctgaagcgatcagcggggaaagggtccggctggtcgctcccatggatgcccggcaaggggactccagcaacgggaggcattaggatcaggtaaataccaggaaaggattgtgtatattgcaggaagccaggaataggttcaggatttggaattcgaattggaattcctatagttgtagttttactattcattttcagtgcggtattggatttataggctgtttgtttgccatttcgttcgagcgcgagaatgctgtagaatgacatgtcatcattcagcattgacagtctcattatgccttcgatttggggacaagaaaatcgatggtgc

SEQ ID NO: 290002 - DNA, 314 bp, Zea mays
acggcaactgcacccgtgactgcaatctggaagcccacaatgcctgccaatccgtccacgacaccactatcgattgccagtcttgcacgggcggtatattccagtcctgctttcccgcctgcaacagcaactgcaacagcacctgcgtgaataaagagcatggatgcttgaggacttgatccaagcttcgtctcattctgtgctgatttggtcatcggctccttgtgtgcatgtatgcgtggatgtagtatgtatgaagcccccttgaatccctgggtctgggatatgtctacaataaaggacctttgcactgt

SEQ ID NO: 290003 - DNA, 345 bp, Zea mays
tcacatgcgcacattctctgaaatggtcgcaacatcccaaagagagaggtggtcacttgatagcgaactcttgggatccatttctagtacagtgacaagaactagtgcttcagattctactacacttccccctgagcaagaggtgtgcaagctgtgcttgaagctgttgaaggagagatcaacatggaatgctcaggagctggccgttgttgctgttctgttgtgtggacatgtgtaccatgctgactgtctggacagcataactatagaagctgacaaatacgatccgccatgcactgtatgcacgcatggtgagaaatgtacagtgaagctatttgggaagct

SEQ ID NO: 290004 - DNA, 469 bp, Zea mays
tgcaatctttggtcacttcctcactacactgccagccatgcattcgatgatcatttttgtctgcatcaaatgggtcccagttccagttgtgcctcagaatgaaaggttcctcttccgtcgtgtgtgcccaaagaactaccatatgttccgctgtattgctaggtatgggtataaggatgtacgcaaggagaaccaccaagcattcgaacagcttctgctagaaagccttgaaaagttcatacgccgagaggcccaggaacgctccctggaacgctccctggagagcgaccataatgacgacaaagactctgaagaggagattgcttcttcatcatcaagagttattgacgagtcaggcggtgctgacaactcagccatgggatcaagcatgtcgttggaggagggatcaagcatggacaacgagctatctttcatccacaaggccaaagagtcgggcgtggtgtacttc

SEQ ID NO: 290005 - DNA, 325 bp, Zea mays
acttaagcaacttgacagaactattccttcccctacatcagagccactagggctgagacagacattagccaagagaaatactttttctgttgctaccaacagacagattaaagagcctgatatcattatcggtaatgataataaacagagcagcattaatgagagtggtagtgctagctcggagactacatatggaaaaaaggttcagcaacctcaaagcagtcctatttcaggagcgtcaagtgaaaaagtccagagacgcggagctaactcagatgtttatgaagcaggcacttctcagcgtcctctgaaatcaaatctaaca

SEQ ID NO: 290006 - DNA, 220 bp, Zea mays
cggtgttggctccaaaatgatggtgaatatggggtttgtcccagggtccggactggggataggatggccagggcattgccaccccctatgaccgggagtacaggcgaccgaaatcacggggactgggagccgaggacaaatattagcttacaccattttcgcatttggatgtatcttacgtgtcgtgttcctggtacatgcgagattacatagtttgctg

SEQ ID NO: 290007 - DNA, 359 bp, Zea mays
gtctggtcatgcagctgagatgttttagtatagaagtagcatcatttagcgcaggtcatgaggagatgctaccgaattgacaaagtatattttctataaatcctaataattatgcttgttcataacctggtattcattgtaagcctcatggtggatagtctcaaatagggtcgacaaattatcttatgttcattgtggatgatcctatcatagatgcttgtgcagttgtgcatctcatacatctttctgtactgtacaaaaaggcaaacacagtgattgtatagttttagggctgttgtagcgcaaccattaccaatgaggtatttatctgaagttgatcacggggttatctaattata

SEQ ID NO: 290008 - DNA, 338 bp, Zea mays
ggcgacaacagcgacagtttctgcggtactgtcgttcaggcggcgcacggagtcttccagctggaggaggccgtgcggcggagtggtgatggaagggctcggggtggccaagcaccacgacgcgctgagcgcgtccatgtggcacctgttccggatggcggagtacagcgcgcccaacgccgcggagaaggtggtcaggtacggggcgcatcaggacaacaactggctcagcgtcgtctgccagcacgacgtggccgggctggagatgcagagcagggacggcgagtggatcgtcgtcgaaccgtcgcccacgtcgctggttttcatggtcggcaacg

SEQ ID NO: 290009 - DNA, 308 bp, Zea mays
tgggctttcagatgttcctcacgaacactttcttgataccttacatggcgatccgactgaacggtccggaagcgtgaccggtctccgccacgaggatcacagctgggttcagtcatggtcaacggcgcgccggctgtcggcgccgtcggccgcctcgtctgcgttctctcgatcgcttgggcgttctctggccgcggagattctggtctcggaggcattgcggtacggtggcagtatctgcagagctacctgttctcggatcggcttgcttacgcgtttctctgagatatgtatctgtactcgtattc

SEQ ID NO: 290010 - DNA, 185 bp, Zea mays
ggcgttgtgaagaccatcaacgtgaacaagatggtcagcgccgggtgcaaggtgaaaatttggatcgccgactggttcgcgcagtcaacaacttgatgggaggcgacctgacgaagatccagacggtagggcgctacatgatcgagatttggaaagcggctgggatgaaccttgacggggtggag

SEQ ID NO: 290011 - DNA, 338 bp, Zea mays
cgccatgttagggtctgtgaggatttcaacgatggcgtcaagttttttgactaggcagcgccgttgacttcttccctcggcttccatgctagctcatctctaagtctataacaagtgtgaaatatacgtatgtgtatagatgtccacacgggccacccgacacggacccggcctgaactcgtgtcggaccggtacgaatacggccgggccagacatggcccgttgatgcttcggggcggatcgggctggcccacgtgcctacggacatgcccaaacccggcacgcacagggaaaaatcgtgtcgggccggcccgttggctcggtgggcctcaacggac

SEQ ID NO: 290012 - DNA, 428 bp, Zea mays
gtccgaggccggggagagcctctggagctaccatgacccgtagactgcattgcccgattgcacgcctagctaggccggccatggccagcgtagggggcagccgcatggagtgcggtaatagtacagactatagtgaactccccctagtagtaccccggggccggtagcaaaccatggcaacaacaggaggagtggaggacgtacatgttactgccggtacataccggccggtgcagcgcatgcagcgtcctctatctggtaatatatacgagtgtgtatgccataagcatagtgtgacatgctcgctagtaatggtatatagttaccagggcatccgcttcaactttcaaatgctattattactacctttcaaatttaatatccttttttctgctccagaaaaaaaataaaagggccggccgcgacta

SEQ ID NO: 290013 - DNA, 330 bp, Zea mays
gtggtgcctaagtatatcgcaatggagaggaagtttcttaagtggaaagcaccaggaacgttggtagcgtaggatgacaggaatatcccctgctgataggactgttttgttccgtggcattggcctacgaaccgcccgcagtggaatcgcatcctttgtgctagtcggctcattctttctagctgtgaatcacctctcgtagttgatcaagagcaatcatatggacgtttttgtttgcattcagaagttcaaaactagaattgtatgactgtatatgcatgtactgaatggctggaactgactatgccacagtatccactgattatttga

SEQ ID NO: 290014 - DNA, 507 bp, Zea mays
gtggttgctagcatacatatccaatccaattatattgctacaatacaggcctacaccctcagctcaacgtcgaacgtcggcgatgtgtctgccgttctcctgttgccaccgcggtgaccatgacacccaggagtctgcagtggaaagccaaccttattatcattatccgtctcctgtgaaagaagcacatgatggtcaccgtgcgagtgcgaccaacgacatgcctcccgtcgtcgaggacaacagcaagaacggaggagggcacacgacgggtttcagcagccactcagacgacggcgttgtccgaggtggagagacgacgataactaccgagaagatcgtggcgccgcccaccactactccagcaccgcaagctgcttctagggatctggctgtgcagcaagctcctcagggtacgtatgtctctgctagtcgtcctcgccacaaccatggccgtgggtcgtcggcagcatcgcctcccagcgaggccgtcgtcaccaaagtcgt

SEQ ID NO: 290015 - DNA, 260 bp, Zea mays
cggacaccgccgccgcctttgccacggcggtatcggccaggaataagcggatcaggctggagctgacgggcatcagttgagaaagctagcaccaccggggacacagtttttagccagatgtctaggggggcttggtttgatcttccctttcattttcttcccttctttttgaacttatatgtttgcgaaaaagaagatatttttttaggttctttgagccattgccatgggttggcattggctgttgtcagatttgattg

SEQ ID NO: 290016 - DNA, 336 bp, Zea mays
taagctttgtgcggcaggagacaaggtcaagtgtctcatgtatctagagctggcgacacggcgtggagaagctgctgctgctcacatgagggatgtaatacttgaatcgctctctgttgtgaatgcgcacgtgccatgtcggatgctgataaatggaagcctaggacactccatcctagacctagaaggtgaggaaatgacacacgccaaagtgcagaagaaccatatcatcaagatgtccatacgctaagtcgtctgtggccagaattgaagcacggaaggtcaaagcaaacatgtatgcttcctcggcgcccacatccacaggaatgtcagtag

SEQ ID NO: 290017 - DNA, 331 bp, Zea mays
tttcatgactgctattgtgctgtactatataactcagcaagagatctacctctatactcctttttctggattttatggggttctatcaggattgttggtgggcattaaacagcttttacctgatcaagagcttaatctttttgtgctaaaaattaaggcgaagtggattccatctcttgttgcattgatatccattcttggaagcatcttcatatacgactttatgtcttacctcccagttctgttgtttggcatgtatatgagttggatctacctccgttactttgcaaagagacttgagaccagcctgaaaggggatccaagtgaggag

SEQ ID NO: 290018 - DNA, 336 bp, Zea mays
tggagaagtgcaacataggcatggatgacttggcaatagccttgaatgaacaaaccacagaggcaagagaagcaaatgtgaagctttcattggcgcaagcgaagttgaataatgcaaagacccagtagagaccttgaaggcctcgctagaaagcgcagagggcaagctccagttggcactggaagaggcagaccgagctaaaagtcgagtcggatgaattggcagctgcctcaaaagaagaagagagagggctcgttgattgcatcgagatgtctgaggaggacctaagtataggataggaagagaacgataagctgattgaattacagagggtga

SEQ ID NO: 290019 - DNA, 339 bp, Zea mays
ctgccatgctgacccaggtgctgattggcggtggtgcaaatgacgacctccatggagttagcaccgttaatcagcaagctgttaatgaccaagtgaataacgaattcttcatgggaacaaatgaggcacataatgcggagagtgatgatttggatgatttccttgcgtacttagttaatcaagatttcatcaacaatggtaattctttcatggccagggattgaaactctgcccttacactcgggaagagatactctgctgaccaattcatggttcttgcatgttgtatgaacaaatttgcactgtttgtagtaggctagctaggagaaggccatcttg

SEQ ID NO: 290020 - DNA, 476 bp, Zea mays
gtatatctgagattccagaggaggcaactgttactatcgttgaacagtatctcgagcctctttagcagtgtcctagatgactatgtgctgtcgttctagagcaatatctgactgagctagtcattggatcaatggcctggcattcatctttgacggtctacattatggtgtatcagactttgaatatgacgctcgagctactatcgtggttggtgctacgtcttcactcgtcctgttatgggctccgtctgtattcggcctggctggagtttgggctggtttgactacactcatggggttgcgtatggctgcaggcatcctgaggttgctacagaaagcgggcccttggtcgtttctgcacgaggagccataagctgaggtgtatcaactaccagcctgcgcagtttggagctgctaacttactgctgggagtttacatcactgcaaagattatccgagtgtcatggaggactcgc

SEQ ID NO: 290021 - DNA, 328 bp, Zea mays
gctctggcatgatgattctgagcaaccacgggagtccaactggatctgaagcatagcagatgcataatgtggagcgaggctctattgccgattttgtgccagtcagaggccctagagccagccagccctcctagtcctttccttcgcttgcttggtatcttcatgtaacatattgaacctttccttcttttttcttcttcttcttttggggctatctatttttatgctagtttatccgtgaaagcaaaagggggttaaatcatggagtcgtcgtgatgctctgctctctccatctacagcaacagaaatattatgcattgcttgattt

SEQ ID NO: 290022 - DNA, 341 bp, Zea mays
aaagcatattgtgcctaggctctctcatgacttacccttcatggagggcctctttgacattcttgcactggtctctgatgataaccaagcccggaacgctctctggtgtatcttaccatgtttgctggcacaagcacaacagatggatatgaactcttcatctctcgagcacgttgtatccctattgcttggcaggttcacacacattaaagatgcacttgatagccacagagttgacaaaaaagaggagttgacagctgaggacgcttacttgaagcatggggtatccgcatctctcagggcgatctgctgtgtcatggagaggtggatcgtggagaagt

SEQ ID NO: 290023 - DNA, 338 bp, Zea mays
ctgagattgccagggcatagtacgagctgatcatcgcagaggcacaagcttccacctctcgtgtgtgcaaggtgactatccctgagatgacaaaatctgtggagatagctattgctggtctgcgtacccgatataatatctcaatgccagtttaattaccaagtacaagttctactcactacacttctgaatagccttcacatcaatctgagatgggttgatcgttatttcgacatccgtagtcgatcagtagagtacagggacatatgaatatcgaataaagttcatgagcattggaaagtatgtaatatcgagagcttatcatcatctgtatgact

SEQ ID NO: 290024 - DNA, 201 bp, Zea mays
cgactcgaggttacaagtagagtggtgaagtggagtctgtttggtgctttggctgtgtagcggcctgcggtctactcgtgatgtccggcgctccatcataagtccagtgaacttgcaggccataccatcccacgtgttggttggaggtccgctctccggttgtgcttcagaaaaatgctacgagcaaccagtgccaaagag

SEQ ID NO: 290025 - DNA, 338 bp, Zea mays
ggcatgtggcgacttgagtgatatggtgatgaagaatgtacctgactgcaatgggggagttgctgtagacagcagttatacatccagcgagccgaattcgtcctctcaacgtgctccgaatgatcttgaagctttcaaatttgcctctgatgatttagattgtgagatggacagccttcctgacaattctagtatgcaaagtattggaatgtgaacccctaaccctaacaggggttgggtgatatattaataggctgggtaaactgggccaggcccattacagagaggtgactagggaaaccagcagatatgagccaacaactccacttcaaatagag

SEQ ID NO: 290026 - DNA, 296 bp, Zea mays
gcgtagtagtcggaatctgtcgaactcgagcgtgcgttgagcagctacgctgtctccctcatgtgcacgcattgtgtctgcttatgttttacttgtatgcctctgtgtactgtgtgtgtgtgtgtgtgcccacgcgtgcgcccgtgtgcatgcgttcgtgttgccctgactggctgtctcaagcctcctgagtaatggcggactccagttgtctgtctagctcatgtcctgtcttcttccagtagagccgtgaacacccaacacacacagttaatcgggctccccccagtccatgt

SEQ ID NO: 290027 - DNA, 344 bp, Zea mays
cccgcgtgcgcgccgccgtcgttctcgggggtaccgtaccccgctcctcacgcacacgctcgccccatcacggaggccttcgcggcgtttggcgagggcttttacataaatcagttccaggaggctggaagagctgagagcgcattcgcccgttacgatgtcgcaactgtcctaaaaaagttctactccatcgaaatagatgatgtcaccgctcctcctggggtggagatcatagacttcctggaggcgtctccctcgccacttccttggatcagcgaggaagaactgggccagtatgctgagaagtttcacaagtccgggttcatatggaccctcaactacta

SEQ ID NO: 290028 - DNA, 332 bp, Zea mays
cattgcaccgtggtggtggtcagataattcccacagcacgtcgtgttgtctactctgcattccttatggctactcctcgccttatggaacctgtgtattatgttgagatccctacaccaattgattgtgtctctgcaatttatacggtgctatcccggcggcgtggtcatgtaacagctgatgtacccaagccaggcactccaatatacattgttaaggcatttttacctgttatagagtcttttggatttgagacagatctcagataccatacacagggacaagccttttgtctgtcagtattcgatcactgggctatagttcctggtgat

SEQ ID NO: 290029 - DNA, 580 bp, Zea mays
cccagaagttcttcatgacagaaatattgaggaaattattgatacatacctggcacacttgcaagtctctgtcgttaatccagccatggagaaggcattaaaaatgctgcaggagtttgcctcagatgtccgtgagggtaaagtaccaaagatcagatcgtcctttggtgcaccctggagacatccacctcgtgatgacaatcctgacttgtcctatatatgggcgaagattcagctaatggattttatgcaatcttttgtaaacactgagtttggggtgaactacctagcagatgacagcttggaaatattggatgatcctgctgctgttgccatgatggaggttggtttactgtatcaacaaagagaaccatcccttatgcgaccagtcactcgagggattcagcgttgtcttgccagatggcttgctgaacagagattacaattgaacattcaagaaacactagcattcttttggcaacgtttgatacggggtcgaagctaccgccacttgatgaaagaagttggctacaaataaagaggtgatttccatggactaacattttgacatgatatctgc

SEQ ID NO: 290030 - DNA, 358 bp, Zea mays
caaaaagtcagaagaagcttgcaagcgagaagggtgaagtctacactttgcttgggcggtcgcgccattttccttacctgactcagtatggtcctggccaacgaggtcatattgagcgtgctgctataaatgcaccagtgcagggaagtgcagcagatgttgctatgtgtgccatgcttgagatcgaaaggaatgtccgccttaaggagcttggttggaggctcttattgcaggtgcatgatgaagtgatactggaagggccttcagagtctgctgaggtggccaaggctaagtggtggagtgtatgtccaaacctttctacggaaccacatctgagggtcgactggctgtcgacgcc

SEQ ID NO: 290031 - DNA, 355 bp, Zea mays
cggctcgagttctcttaggactactcttgataaagtttgtgcgagaaagagagtccgctgtgctgaagacctattgagcaataaatcagccgtcaaaccaaagccccgatttcttcgtgttaacacactcaaggtcactacagagtctgtcattgaagaattgaacaaaatgcacatggttgacaaagatgaaatggttccagatatgttggtactcccacctggaactgatttgcataaccatccgttggttacagatgggaaagtgtttttacaggggagagctagttgtatggtagcagttgcattgtgccctaagccaggctggaagctatgatgcagtgcggtcagggac

SEQ ID NO: 290032 - DNA, 260 bp, Zea mays
gcataccataccatagaagctgaagagaccacggacaaggacgacctgccttgcatggcgcaatcggtgaaaatattgtgcaaggatggcgtcaacttgtacgtcaccattcgtggcaatacggccgttcttgcccctgaagaccccgacgacgagatgcaggaatggttcaaggactactccagggtaagcagtgtgacggatgacaacggtcagagggtgttcgcgctggtaaacaaggagacgcaacaagccatggt

SEQ ID NO: 290033 - DNA, 223 bp, Zea mays
gctgcatctcatatgtattctatagatattatttatgtgaaagatgctacagtacgctccccctgcgtttacattcagcgcacctctgaactcttaaacttcaagtcttcaagaaaaaaaaagaaaaaaaaaaaaaaaaaggggggcgcgacaagaaggaagccctgagacggggaaataagccccggccggtccagcgtgggagaacctattccccaaaagg

SEQ ID NO: 290034 - DNA, 260 bp, Zea mays
ctcgagccggtcttccatagccccccaaatatgaagatcaccatcttctttgctctctttctcttttgtgccgtcaccacctcatacctaccttcagccatcgctgatttacgtgctcgataatgaaggtaaccctcttgaaaatggtggcacatattcatatcttgtcagacataacagcatttggtggaatacgtgcagccccaacgggaaatgacagatgccctctcactgtggtgcaatctcgcaatgagctcgac

SEQ ID NO: 290035 - DNA, 351 bp, Zea mays
caaatatctgtcgtcagctgtaggatttcttctaccgcctcctccttatcctgtatacgtcagctccccggacgctcatctctccccgtgattatctcaagccgccgctggcagcttggaactcctctctgcttccttagctgctcgcctaggtccggcgtgctccagctcctgctcggccgcgtttcccctgctcgccgcggtgctccatttctaccctctgccggcgtccttcctgctcgccccagcacagcggtttcctgttcggcgcccagccatccctctgtttttcctccctcgccatgccgcgcagttctccggctcgccgacgttttacccctgcgcgcgcgc

SEQ ID NO: 290036 - DNA, 184 bp, Zea mays
gtgaataggaaaggggtggcatgtgtgccaacaggatgtatccatgtatcgtgatggtgggtgccatgtgggcttgtattataaggagtgcggtcactagttaaaccctgagagttgtggataaagacatcaagaaataaaaggaaaagaaatatctgagcgctctgctcaacttggctcgcac

SEQ ID NO: 290037 - DNA, 159 bp, Zea mays
tggcgtttgtaatctgcttaaatggtccgaaaatgtttgcttacagcattcgcttgagctgtgcgcttccaaccaaaataaatgctgtaagcaaacattttggttggaaacacacaactcaaacaaatagttgtactattatgagtacttggatatatg

SEQ ID NO: 290038 - DNA, 430 bp, Zea mays
tgtcgccgaagttcgcgcaccgcgtcgtcggctacctggaggaggaggccatccactcgtacaccgagtaactcaaggatctggaggccggcaagatcgagaacgtccccgccccggccatcgccatcgactactggcgcctccccgctaccgccacgctcaaggacgtagtcaccgtcgtccgcgccgacgaggctcaccaccgcgacgtcgaccactttgcatcggacatccattgccagggaatgcagctgaagcagtcccctgcgccgatcggataccactgaggatgtttgtgctcttcttaattttgcatcgctaataagcaattgtctttaagggaaggaaaggatgcttattgagttacgagtactgctacggcgattaggatatgttccaaccagttgtctgagagtgagactattatatg

SEQ ID NO: 290039 - DNA, 316 bp, Zea mays
tgaatataccaatttaatgtaaattctcggatcacactcagtttaatacaaagcacaaggtttcgggtgtaacgaactttgggtgacactgacacccaaactggccacgggaggcagaagcccaggcttaacctttgtgactcagtatgatgcccaagaaaacgaaaccttgtgctttgtataaaccgagtgtgatccgagaatataccaatttaatgtaaattcattcttgttcttactgcggcatcattattaaccgttgtatgcactgtaatgtacagtctttcaaactactatttattgtgctatatggcat

SEQ ID NO: 290040 - DNA, 343 bp, Zea mays
caaacagctaagggaggttccgtctctggttccgatgcgctataaaggaacccaaaaaacaactgctgatacggctttactttcaataattgtgcagctaactggagcaacaattggtaaccgcctgatggcagaggcagaaacgaatttggctattaatgttctccctggaccattatcagaatcttatgaagttcaaggaagaggagagcttcagttaggaatattaattgaaaatatgcggcgtgagggatttgagctttcagtttcacctccaaaagtgatgtataaaacagagcgtggtgaaaggttggagcctattgaagaagtgactgttgaggtt

SEQ ID NO: 290041 - DNA, 323 bp, Zea mays
cattcgctagctattagctagctgatcgctcactcagagcttctagctagctagctagagcagcgacttcatcaagcaggtgggcaagttcgcggtgaccgtgtacaagatggctcacatgataccgatgagctacctgaggacgttgcagtgctggtcgtcgccggcgggcggcggcgccaacaactactggatggtgctcacggcgaccaactggaccggcaccgccggcagctacgtctccaccgtgtggggcatcccgggctccgagtccaggacgtggaagctcctgcacttcaatggcacatgtgatgagatcgatc

SEQ ID NO: 290042 - DNA, 297 bp, Zea mays
agcggcattaagaatgcagatcttcgtgacaaccctaacggggaataccataaccctcgaggtccttagcagcgacaccatcgacaatgtcaaggccatgattctagacaaggaaggcatccctccggatcagcagcgtttgattttcgccggaaagcagctcgaagatggaaggaccctggccgattacaacatccagaaggaatcaacccttcacctcgtcctcaggcttcgtggtggcatcatcgagccttccctcatggctttggctcgcaaatacaaccaggacaagatgat

SEQ ID NO: 290043 - DNA, 435 bp, Zea mays
  unsure (1)..(435): unsure at all n locations
gtttcaatgtttcagaacctgtgccacagttggtgtggaagattatctccgtctgaagtggctgacaaagtaaagcacttcttcaagtactacgccataaaccggcacaagatgactgttttgaccccatcttatcatgctgagagctattcaccagaagataataggttcgaccttcgccagtttctttacaactcaaggtggccctaccagtttcggaagatcaatgagcttgtgcaagagatggacaaagatggcaaatgggaaacttctgcagaagggaagctgggagcgcagacaggtgcacagggaactggaatgggagtggtggcagcggggtctgccaatcccagtgccggcttctgaagagaaccatactaacgcgtggaagcgtagttcctcagaantantcaccagcntccaggacacgggcag

SEQ ID NO: 290044 - DNA, 326 bp, Zea mays
tggcgttgccagttgtagtgatgctcaacctgtaccatgtaaaggcagctatacgaaacagccagatccaaattgcgctggaggctttcagttgccaggaagtacttctgtgttgcctcctagcttacccaatgaagtagttttgaatgggtctgctaattttcatgaagaatctgttgagcgtgaacatccagaacactatcaggaaagtaagtttgcaactgtgcagaatgccgtgtgccttgtagccaagcagcctaacagtttgctgccacattcaaacaacggttggcaattgtatggatctgattcctctctaaacaatt

SEQ ID NO: 290045 - DNA, 316 bp, Zea mays
caagtcgccctcggtatcatggttcctcaagaaggcagcaggaatcgaaaccgccagcactacgcccaagccacgtgaatgtatcgtccctcaccctccgccacgtatacgagattgcaaagttgaagcaggctgaccccttctgcaagcacatctctcttgaggcgctgtgcaagtccatcattggcacagccaactctatgggtattgcgattgttaaggatctatgagcagcaatgccagccttttagtcatgaagaaatctgtgacatcttgtatgttcctagtttgtagttggtgctggagaggatacaac

SEQ ID NO: 290046 - DNA, 294 bp, Zea mays
ggctcaaacaacgtgtcctggggtacacagctatagcttcctcgctccgatcccttgcaacaaatcgaacgccatggctcctcgcgctaagaactctctagtggcggagggtgacgtgagcgtgcagaaggtgaagaagatcgagcctgtctacgactacgacctagtcaccagaccctgggtgttcggcaacccgagagtggtgacggtgctggcaaggccgccgccgggtgccggggtttctgtcgcctcaggccagaagaagctgttccagaggacgctgtcagagcaaga

SEQ ID NO: 290047 - DNA, 330 bp, Zea mays
gatcaccgagcagcagtgctgtctatggcaccccacattacgcgcagatgcctaacaacatcacactgttctctcttcgaaccacaggtatgtatagaccatcgtaagagcgaggtagagttgaatgagtgatctaatcactgttcacctagatgtattatatcttacagttcgtatttatacagagagataaacatgcttggttgcaaaattttggtatagggatctgcccgattgaagggacatcacgatcgaagtcggtcagcagattcaacaagcttgaactccgacgatccacaggacgtggccttgagctcaagctatgatcct

SEQ ID NO: 290048 - DNA, 475 bp, Zea mays
aaagaaacaagttgacattgatgaaaaggagaaaacacttaaacttgctggaagaattggtcaagcagttggctctctcctgaggcgattaggaatttcataccagggggaggaatctcatgggaggatgaggatcaatggcctcacgataaggaggtggttcaatccaaaactgaatagcaaatcctctgctgccggcccagctgacttgcttccactaccttcgcggttagccaaagggattgctggtcagcaacgcgatattagaaacgctttcactcgagtagtagactagtactacacggctatcctggaagcgatctcagtaacccgtgtgataagaagcgtagtatagtaagatgtgcaaacgtgtgaagagtttgttcggtagaaggaaatacataatccatcaatctgtaatgacagtagtcgaaggaaagatatgcacgatgcatcaaacttttgtaatcatgtc

SEQ ID NO: 290049 - DNA, 347 bp, Zea mays
gttgcaaggggctcctacaagaagacacagtgcagagttggatgactgccaagatcaatgtagatatggatgcaacgagcctattgctggtgaaccatggcacctgctacggttgatgctgcctcatccgtcttggaagataaatctgtaaattcgggctgaatctcacgcgtgttgttgtatcaacaagtcctggcacaaagccttcgctgtaataatataagcagtgcatggagctgtgtgctgaatgtgtgctacggtactttcaatactgggctcagcatcaatccagaagctgtactctaaacaaagattctggatggcttcttgtgccaactaggaacaat

SEQ ID NO: 290050 - DNA, 461 bp, Zea mays
acgaggtgtcaatgacaatattgaaagtagagctaatgagctggataacaattctaacactttacatagttcaaagattggtgaacaagctagaaatttgctctctgaagaggaatttgtaaagatggaagcatctttatctggttgggaacaaaatgttaggcctgtagatatggagaaggctgtgctctctttactggaatttgggcaaataactgctgctaagcaactccaacaaaagctgtctccatcatatattcctgaagaacttgtccttgttgatgttgctttaagaattgccaaaaacagcagtaatggagagatcaatttgtcatgctttgacacacaggctcttcggatacttcagtcactgagagtagcaaatagctgcgatatgattagcccatcacaggttatggagataccccctgcgaaatgtggtgagggtcgtgggcgagctc

SEQ ID NO: 290051 - DNA, 409 bp, Zea mays
gtgggggacaagatttatgccctgtgcaagactccctgctggttcacagaccccgatttcccaccctggttcgaggtactcgatctttccagagccaaagttgtcactgtcgacgaccgctcccacctggagggatgctcctggattgagctaccgcatccaccttgctttccttggaagattaccccatttggttataccatgctgccagttgtactcatcacgtcttatgtggtggtcgacacctacatactggtatcattcaatcaactatggggcacatattgcatttgacaccaattcagtcgagtggcacaaagttgacaccaaggagctgccattcgttggccgcgccaccccacatggctctttattccttggcttgtcagagggcaaggatccatcaatg

SEQ ID NO: 290052 - DNA, 290 bp, Zea mays
cgagcgagacgcactcgagcgctgcttttccaatttccacggcgtgcggtggcgttgcgttgcgacttgcgacctgctgctgtacggcgcccccggtgaatccggcgggaaaaggttgtgcgtcgtcgaaaggtcgatgacatgacagtgacatcgatgccttgtaggagtattaacttcgcaccactctaaaaaaacacttctctgataaacatacaccgctagatccgcgtgccactgatacatccctgctgcacttggacccggaagattttgagggttgcacgggt

SEQ ID NO: 290053 - DNA, 340 bp, Zea mays
  unsure (1)..(340): unsure at all n locations
cgacncgcgcgcggagaacaaggtgctgtacatcaagccgccggccaacacgctgtcgcacaacgagctgctgtcgctgtgggagaagaagaccggcaagacgttccggcgggagtacgtgccggaggaagccgtgctcaagcagatccaagagtcgccgttccctctgaacatcatcctggcgatcgggcacgcggcgttcgtgcgtggggagcagacgggcttcgaatcgacccggccaagggggtggacgccagcgaactgtacccggatgtcaagtacaccaccgtcgacgagtacctcaaccgcttcctctgagcctgaggtctcaacaaacagg

SEQ ID NO: 290054 - DNA, 201 bp, Zea mays
caaaaaagatctttgttatgtgaacttgtgaagacacattagcatttcccttttaaagcttccttctggggtttagcagtaaaatgtgtcattttttctttctaaaaggatcttgcgcttctaggttttttgtacatgtcatactcaatggttcagaaactgttgtatctatactgtcatgtttttttaggaacaatacta

SEQ ID NO: 290055 - DNA, 498 bp, Zea mays
gttctattgcttttttcatttatggctgaacattgtagctgcactcctctgtttcggtgaccgtgacttctataaggactggtggaatgccaaaactgttgaagagtactggaggatgtggaacatgcctgttcataagtggatcatcagacacatatattttccatgtataaggaaaggctctcccaggggtgtagctattctaatctcgtttctggtttcagctgtattccatgagatatgtattgcggtgccgtgccacattttcaagttctgggcatgttctgggatcatggttcagataccgttggtattcttgacaagatatctccatgctacgttcaagcatgtaatggtgggcaacatgatattttggttcttcagtatagtcggacagccgatgtgttgtccttctatactaccatgacgtcatgaacaggcaggcccaggctagtagatagttcggcagagacatgtacttcaacatcgaccatcagt

SEQ ID NO: 290056 - DNA, 373 bp, Zea mays
gttatcaccttcatccgcaccctgatcgatgaattcagtgatttggctgcgcagcttttggaatcctcttgaagaaattgttaccagtaagaggctaagaactggtctctggactaagttgtggcactacccagatagagcatgtaactgctccctaataatactctagtattcttacattggcaagattaactgggatgacggtgtagcaagtacttctatatgttttctgataaatgtagttaaacagatgttgctgagcttgggtatttgccatgatgataatattcttacatgggtaaaattaactgggctttagtgtaattgtgctttgtaattgttttctgataatgtagttgtctgatattgttgt

SEQ ID NO: 290057 - DNA, 246 bp, Zea mays
gcctgaggttgtcgagaagcttgtggcaatgcgggaaggcattccaaaaaaggaagcgaaggaggtaaggtcacaacagatctcacattgtatgcatctgtggtgctgctctgttttcatgaacctatgaacggtcaactgtggtccaacagaaggccgctttgtgcttattgacagatcaggttttttttcccgtatgcttattactagtattcgggtcatagattcttactcccagttcgtttc

SEQ ID NO: 290058 - DNA, 265 bp, Zea mays
gaaaatgactgttgtgttgagaaagtggggaaatctaagtaagaggttgacttgttgctggtagatccatgccgttgctgttgtgtcaatggatacagtgagaaagctgaagaaacccttcacagttgtccttggtcaatgagaaaaagcagaatatgttggagattaaaagagattacaaattaacaccaactatttctcttggtagtagcttcattgttaatgcatctaaccttttgaatgattttgagtgggttgaacttct

SEQ ID NO: 290059 - DNA, 275 bp, Zea mays
acctttcctctcttctcccgtccggccgtcccctcttccgcggcaaccccggcgcggcatggcgagcccgtcctcctcctctttcccgtcccggaaggccctgagcaagatcgcctgcaggcgcctgcagaaggagctaacggagtggcaggtcaacccgcccgccggcttcgagcacagggtcaccgacaacctccagaggtgggtcgtcgatgtagccggggcaccaggcacgctctacaccggcgagacctacaaactgcaggtgatttctc

SEQ ID NO: 290060 - DNA, 266 bp, Zea mays
gccagatgtgattatattcaaaggtttctccttgagcatccaaccaggcaagtcgacagcccttgttgggcaaagtggttctggtaagtcgactatcataggtcttatagagaggttctacgacccacttaggggggtagtgaagatcgatggcaaagacatcaaaacatacaatctcagagccctgcgtcgacatattggattagtcagccaggaaccaacactatttgcaggttcaataagagacaatattgtgtatggtacag

SEQ ID NO: 290061 - DNA, 478 bp, Zea mays
gtaagacatcgattctatgctgttggatttagcatactaatatgccatgagctgcggaactgcatctggagcaatgttcaggaatcttcgtctattgatactgtaggttcaattgcttcagcagttggcattgttttagacaatttttgtttgattctgcattgatgacaaaggttttccctgatggtttcccacttaggttgagaatgatgatctgattgcctacggcctgatcccagactttattggaaggttgccaataacagttggcctgaccaatcttagtgaagagcaattggttcaagtagtaaatttctttgattttataatttaaagcaatatttcttaagattaccatctcaaatatttccaccacctcaaaatattagaaattctctttgcaggtgctcatggagcccaaaaacgcaataggaaagcaatacaagaagctattcaaaatgaatgatgttagtttgtg

SEQ ID NO: 290062 - DNA, 473 bp, Zea mays
atccctccgactgtttacaatgttgtgaaagacgaagaataccgcggagaaatcaaagttggcctcacgttcactccagaggaccagggcttctgaggaataacttggcgtgtggccgctggaactggaggcagcaggcagtcgtcttatgattcagaagcaaacgacggatcgattcccttgatgtactgcagtccagtgagcgtgcatctacaacttgtagaagaagcctgcaacatgatcacgggatcctgtactgcatcactctaaagcctagctaaaaccaccagctcctgtaacttgatgccgggcgggcttgtcatgtactgaaacctacaataacggtcgccgaaccccactctttgatgttcagttaacttgtcgcggtttacaagaggccgtgtgatttctgcaaaaaaaaaaaaaaaaaaaggggggccgccgattattgacctcttcgccccgggatttat

SEQ ID NO: 290063 - DNA, 391 bp, Zea mays
tcttgatggagggttggcaccatcatccttatttcgcatcttgtatttgtttcgcgtcttgtgaagtcttggttgcctaactcaggaggtcaggtggagatagaatatacggcgtgtttgaccataagctccctgctgcttttaagaagctttccttcgaccgctacctgtcggtgcaaaacgtgaagaaggtggtttcagaagcagatggctatcagccccatctcatggcacctgaacaagggtaccggcggcttattgagaagggcatcaactatttcagaggaccagctgaagccacggttgatgcggtccacgttgttctaaaagacttggtcaggaaatccataggggagacagagcaactcagaagatttccgacgcttcagca

SEQ ID NO: 290064 - DNA, 333 bp, Zea mays
gggaccagaaggtcgagttgcattgttatcctttccaactcgacgacacttggttcaattcacttctcgtcgaagccaccatcttgagatgcacacctcctaccagttgaacttccagaaatttcctccctgattgttagccgaggcatagagaaattagcgtgggacgcttcaggggaacgtctggcactgtcgttcagagatggaaacgaaatgtaccgtggcctgatcgcgatatatgacgtgcggagatctccactcgtctcactatcactagtcgggttcatccggggacctggagaaggagccgggccgtcgcttgcttttcatagc

SEQ ID NO: 290065 - DNA, 253 bp, Zea mays
gctagcttaattcttcgtcttcatatcaccggtccaacaatacaacgcagaaagaaaaggaaaaaaaaaatccatggcgttaattagggcttttggttaccagcaggccagcctgcaccgcacccctataaaaaccaaggtatgcagcctgcatacagaagacacaacacacacaccagttttgatctatacgacgacgctttagaagcagcagtagcaccttgatcacttactctcttcgagccagcagctc

SEQ ID NO: 290066 - DNA, 279 bp, Zea mays
tggagccgccccatgtgttcatcaccgccacggcagctgggaacaggctctacctcttcagtgtaactgcaaacggtctgcagtggaagaggcattacaaggacctcaaacagatagcacaatcatttcgagtcgtgtagggttccaattcctactactactttttttttacagcgcctggctcttgttgatatgattagaggacatgggagacggtaatacggagagaggacaagtgagcatcacttctgatgaccactctaactctcttaaggttac

SEQ ID NO: 290067 - DNA, 472 bp, Zea mays
gtggtgggggatggcgctcaaggacgagtccaaccctcagatagcgcttctgccgctgcaccccgatgtacgggcaaggttcgacgaaagcgccgcgtgggaattcgcccggagcatgtgcgggaaaccctacggctaccacaacatgatatttagctggatcgatacggcgtcagacaattacccgcctcctcttgacgccaacctggtaatggccattatgtccatgtggaccagactgcagccgcgctatgcttccaacatgtggaacgaagcacttaacaagcgacttgggactgagaaactggacctccatgggatcattagggagaccgagagacggggcctgtccttcaaccagctgctcaccgtacctgagcgagacgattgggagtacagcgacggcaagtccacgacgtgcgtcgccttcatcctgtccatgtacaaggcggccggagtcttcgctccctac

SEQ ID NO: 290068 - DNA, 275 bp, Zea mays
ggatggtccagggtgcaggcatcctcatgttttatgccatgtgctcagactcagctaggcttggaccctagccccccgatgagcagcgacggtggacctcccaacgacggggagaatgaaggacgtctgaccctcgcgacccttgtcctcccggtgggacaagcgacgtttgtagcgccacaagctagggtgctacacaaggcatgagcccgaggaatcgccaagcttgatgtatccatcataaacccctcgtagttctcggcatgaatgggttc

SEQ ID NO: 290069 - DNA, 355 bp, Zea mays
gataacctctagcgctctgtctcggtattattaccggagaacaggtgaaagcgacagtaagagcatcacggtgcggtcggctgttctcgtcaacttagctagccataacaaccggtaggcactggcaagcatgatggagtccggcaacgacaacaacggcggcgcgaggtggggaaacaagctggggtacatgctgatccccttccacctggccaagcacgacgaccccacggagtacgtccgtacggcggccaaggtgacgcgcaggaagaagagctccatggagtcggccttcaccttctggagccgggacatggttctcagactcttcggcatcaaggcagttgctgcgctc

SEQ ID NO: 290070 - DNA, 300 bp, Zea mays
agaatacaaaaaactggatagagaattcatcgactgaaaaggatgcagtggcgaattcctccccagaaggttttgccctttgtttggaatgctatcctcataaccatgcttctgatcgggggaggggggagtatcaatcctctttgtaattttgatgtttaccaatgcatgaaattcagtcaaatttctgtcaatgagtagtcatgtaatatggtacggtttaaatcaacctaaaatctttattttccagttgaagtttgtaattttgacctcgtatggtatgaagtggcagattgtttc

SEQ ID NO: 290071 - DNA, 271 bp, Zea mays
ctccccaaaaaatagtaatactacatgtagcagactttgagggatgcttgttgttcaatcattgctttctttgccttctaactgaactttgagtccgtaacttgtgtcatgccttggtgcgtaaactgcttgtctaatgtgacttattcatgaggtggaactactcaagtcaaatgatatcttctatccattgatgtctcaggcagtccaaggagcttcataacaatcttggaactggcacaaaagagcattgtagaccacacttctgctc

SEQ ID NO: 290072 - DNA, 269 bp, Zea mays
ccaacgtcgcctacgacatcgtcaacggcaagtccacgcccgtccggaacgccgacgcgccggtctacgtcaccatcggcgacggcggcaacatcgagggcatcgccgacaacttcacgcgcccgcagccgggctactccgccttccgggaggccagcttcggccacgccacgctggacatcaagaaccggacgcacgcctactactcgtggcaccgcaaccacgacggcgccaaggtcgtcgccgacggcgtctggttcaccaacagg

SEQ ID NO: 290073 - DNA, 407 bp, Zea mays
aacagtttgatgtggcaaagcaattgagggaaaaactaaccgagattgaaacagaaattattaggcagcgtgaagctagaaggggttcaccaaagactgaagcccaagacaaagctctaaatcttatacgtgtgcgtgcagacttgcagaaagctattgacagtgaaaactatgctttggcagctggtctccgtgatgacattgccaaacttgaggttgagtctcttgcagtatctgctaaagctcttgcttatcaaaatgtgaaatatgcatttcgattagggcagaaagtacgtcacaatatacatggatatagaggcgtgatatgtggcatggacccggtgtgctgtgaatccaagtcatggatggagacagcaaacgtggataagctgtctaagggtccaaat

SEQ ID NO: 290074 - DNA, 282 bp, Zea mays
atcgtgatcggcgcaaggacattgacaataccggccgggagtacgtactgtgctcgtttgggttgcgagtgcaacgtaaatggaagaagtgcaaaacatatacatactacttcgattttaattatctttgcgatacatgcaataacgtcatgcatgcaagtgtgcaaactactaaaagctaaaagataatcttaatgtcacctgattgatgactataaaagattaatgatatattattgtattgcgcttggtgcgatgattaattatggtgtatacagcctt

SEQ ID NO: 290075 - DNA, 260 bp, Zea mays
ggaatctgctcgagatcgatatcattcgggcgctactatgaccatgagccgccgttatttctgtgttcgctggagtggtgaaagtgaacggacttgagtttttcagagtccctcgtctccgtcggtacatttactagttctgtaatagaactgactagcttaagctcgtgctactacatatatatatgtatgctgagagactgaactcgaagcataatcatgctaccatattatgtcatcattacatttctatctctagt

SEQ ID NO: 290076 - DNA, 350 bp, Zea mays
tgtggatacatgcaaagagatgggcatgaaggagatgtaagctgtcaaggaagggatgacactgttatgtttggaccagatgatgatggtgtaaagattcctactcaggtagagactcttgtaaagggcactgcagcggttgctgaaccagaatacaagccgagcccagatctagattacctacaggagctgctggctattcagcagcaaggacctcgtgcaataggtttctttggaacccgcaacatgggatttatgcatcaacaacttattgagatcctgagctatgctatggtcataacaagaaatcatatattcacatctggtgcttctggaacaaatgcagctgt

SEQ ID NO: 290077 - DNA, 290 bp, Zea mays
gacacattccagtattcattcggaagtgttggggcgaaggcaaagacgccacccttcgctcgaagcctccgccgcggtcgctggtctgacaaagacaaagcgggcagggacacccttcgcttcattcagcaccagacgaaggcctgcgcgtgacgtctccccgcagcgcggcctcgtcctgctctaaggcccacgcgtgatctggcccattgtaacgggccccgcgtggccgcctttgtgttacgggcctagcttgtaaaggcattcttgtaattacagcttgtaaccct

SEQ ID NO: 290078 - DNA, 360 bp, Zea mays
attaaggacaggggcccagtgttcgtgactgcgtttagcccgctctgcatgattttagtgactgtgctaggctccttcattctttctgaggtcgtcactttaggaaggctcattggtgcgacagtcattgttgttggactctatgcgctcatctggggcaagaacaaggaccatgtgaagtcgcaaaacagttttgacaagcacgacacatttgagctgccgttctctacttctgccgttaacaatacaaccggtcccgtcctggcaacatctatttaaggctcgtgtccatgtgacttcctgtatcccgcacccatcgatttaaggctagctagcggcctagcatgtaatcgccaaatt

SEQ ID NO: 290079 - DNA, 270 bp, Zea mays
cgacgatgaattaccagtcggtggagatccagagggattccctggccgccagcagctcaagcgggccaggaagtggctcgtcttcatcaactgattcggacttggaccctgaatctgatggggataatgcaagcgccccgcactaggtggttgctcttttatctgactgtagtaggattagggacgcgtaggtgacccatttggcgaatcattttgaaggattagggacgtgcaaattggatgcgcgaattcaggtcatgtaagtctttg

SEQ ID NO: 290080 - DNA, 278 bp, Zea mays
gtattttgtctgtgcacatgataattagggactaatattgcaaaatgggacagcttgtttgcatgtttcaactccatttcaaagcattgatatttattcagcaactgatcactcttttagagtagtcaatgttgtattctggattttctacttgatcatttgttagtgagctcactcatagcagatcttacctttagttaatactccattccaaattataagttgttctggctttttagatacatagcttttgctacgtacctaaatacatattatgc

SEQ ID NO: 290081 - DNA, 273 bp, Zea mays
agatgacaacgagagcaaagccgtcctcgacgccttcttcctcgggaaggccttcgcagaggcgctcacggagcgggtcgagtcggtggtgggcgaggtgttcagcgtcgtcgggcagtggcaggccgagcagcagaagctagtgcaggatttccaggaggaagtagttcaaagagcccaaaaggctaaggagaaagctgcaactgaagtccgtgatgataagggggcgaagtctctaagggaacttcagcaacaattgtggcgactacaact

SEQ ID NO: 290082 - DNA, 280 bp, Zea mays
gccgtacatccaatcaggaatctgatagacttgaagagaagattgggcattggtcgccgatgctttgggtacttccatccagcaataccaggggaaccactgattttcattgaagttgctttactcaaagatatggaagcatctatacaggaggtcttgtcggatgaccccccaactcctgaatctgaagctagttgtgcactattttactcaatatcgtcaacccagccgggtttatcaggtattaatctagggaagtttcttctcaagcgtgtgattg

SEQ ID NO: 290083 - DNA, 274 bp, Zea mays
ctgttcaacagatggctctcctaaaaacacttgcagaatctgttgcgtaaggtagttattaaacagtttgttgttgcgtgatggagttggagcctagaagatcctgccattaatttcgtatgcttccgtgccccatgcttgaggttgacgatgtgccatattgttgtcatatctcactatctttactgctccacaaagcaagctgtacgcgatgcaccagtctttttcaggcacgtcagaagtcataattggcttcaagtcagcatctgaacat

SEQ ID NO: 290084 - DNA, 269 bp, Zea mays
cgcttcctgaagtctgcatcgatggccaaaataccattacctttcgatcgctcaacaattagaagcatacttattcagactgtgagtgcatcaaattgcacccaaggatcactcagatactggttgtctgctggacctggagacttccagttatcttcatctggctgtacaaacccagccctctatgctgttgttattgaaagcccatccttacaagtaccgtcctgctgcagagtggtcacatcatctataccgataaagtctcctca

SEQ ID NO: 290085 - DNA, 264 bp, Zea mays
gcatggcaacgctcagacaaatgaacccgatgtgttaagctcaggaagcggtagaggagctgttgcggaagagaaaaactcctccacctcaaatgactgcgcccatgaatgtacactccccttgctttccaagagaatacttgcagctcaaaataaggaaccgaagctggggagagcacggaagttcctgtcatcagtgtgtgaaacagtcgacctgaagaagctcttggctccttcaaccattgcagtgattgtcggcttcat

SEQ ID NO: 290086 - DNA, 381 bp, Zea mays
cgcttgcgagcactgcaagatctttctgctggcatctgaatagtcagctgctggcatctatccgggcacctctcgaccagccagaggcagataacctgttcccaaactagctggccaacatggcgaacgatgaccctgtggacgacgaaaaccccagatccaacaccactaataacagcatcaatgacaagttggctgaagtgttcgacatggtctcagtccacaaacatcagtatacaatgccgacgttcgccttccacaccaacaagacgatcaccgaagctttacatcggcctctactgcgagcacaagctagcatggtcacaacctcctagcctatatatgaactggtgttatcccgactgactttctattttgtga

SEQ ID NO: 290087 - DNA, 159 bp, Zea mays
caaacatgtatatagatcgagacaggtttctgagtttaggatgacatataaatcagtaaaactaacaaaggcagcacaaaaaaaattacatgcattgtgttgccacatttatctccctacccgattcatattgtattgctaactgatgcagttcttaaa

SEQ ID NO: 290088 - DNA, 310 bp, Zea mays
tggtggcgctgcgggactccatctctgctgtgtcgtcctgccctcaggacattggttcaacagaatctgaagttgaccaggcggagattgacagattggcagagcatgcttctgctttaagacaggaaattgacagcgaaaacaagcaagtacagctcctcatggttcagctccgtgacctaagaactgacgtagccatgtggcagagcccttgctctgtgtcaagtgtgaactgtgaagtgtcacagagaccctagctggacgtctggtataggcatattatgcatgttgggtaactgactacttggca

SEQ ID NO: 290089 - DNA, 408 bp, Zea mays
ctgtctgaatgcaaatattctctgcgcgattatcaaaagctgaaagctggattcctctttaactccccattgtccttcagaaaacatgctacctgcagatacaagttctacgatggcgccgatcttcaggaagggacaacattgcgaggatactggcattgccttggaacaactgagagagatcatggtgccaaaggcgatagattacttccgacaatacactgaagcgacagtctaccaaatactttggaaggctatacatggcactgcgtacattcattttggaaagccagccatggaggctccaggtgcacggagaagttttaggggagctaggaaaagaaaactagtccaaccaatggaccaggatgtgcagcatcggacgcgtatgatcctcacttgctcgac

SEQ ID NO: 290090 - DNA, 263 bp, Zea mays
ggctaaccggaacatgagtgtgtccatgcaacatgtttcttggcttgtgaagcgcagatgtggagtccggagacgataattgatggcaaaagtcaagagcatgcgagttcatatcaatagaccaggagcagcgaaggatgagtgttcagtcgccagggactagagaagccggtgactagccatagtggctaatacccggggacactgagaggcgtaaggatacggaggaacggatcgcgttgccagtcagttacagaccgaga

SEQ ID NO: 290091 - DNA, 389 bp, Zea mays
  unsure (1)..(389): unsure at all n locations
agcaatcacaatgttaaccttgggtgcatactttgctcatccattgatgcaagcatccagctaccaacttccctggtagtgctataaacctatatacatatatgctcagtgctggaactgaaaaaacatgaccagatcaaaaagaagagaaatatgtgctcctttggtatacatagttgaatgcataatcttatgtgtacaaatgtacaattatttatattattaacggaactttttgtatatggcattggtcaaaacttttatctatgatataccacaaaaaaattcataaaataaaaaaacataaaaatttaaaaaaaaaaaaaactcggagatcttattttcgncttttatngcgatattatggctgtatcgtctcatccaacgtt

SEQ ID NO: 290092 - DNA, 388 bp, Zea mays
cgctgctgctactcctgaatcagagggcatgggagatgccggttcttggcgtgacaacgagccatggtcaggagaaatggacggagcaacggtgcagcaagatgggaatctgcaggtgcaatggctgccggcagcggaaatgacgctgcaactcctgaatcagagggcatggtagatgcgggttcttggcgtgagcagcgagccatggttaggagaaatggaaggagcaacggtgcagcaagatggggagctgccggtgcaacggctgccagcagcgacaatggcagaggttcgagtggaagacggactggctcgaaggccacggcgggcagccatgtcagacagaggggccgaacaggtgctggttcgttgtctgaatctgaggcga

SEQ ID NO: 290093 - DNA, 330 bp, Zea mays
gtgcgcaccatcacaacgcccttcaggagagcatgcaccatcttcggcccgcagaaggacggcggcggcggcggcaagaggtcgcagcaaccaaacccaggtcagaccattttcacattcagatttgttcgagcacagcgttcctttaattgcttcgaattctttctgcgggcttgtgtttctcttctctttgttagcagaagacccagaatctgattccattgtttatggatgcagcgacgatggtacggcacgtcgacgacgccgccgagagggccaagctgcacggggaggtcatggcgtgcgcctacgaagagtgcaagtcatgtg

SEQ ID NO: 290094 - DNA, 314 bp, Zea mays
gtctaggcatgttctttctcttccctgtggttgctcgttctgggcaatggccgacggaaatccgcggctcgctgctgcttcccgatccggaaacccggcgactgcgagttgagagcccggccgggaacggcggcaacgctcggttgtcggtgggcccgtctgtccacttggcgtcgcatgcatgttttctactggcacttttgcacggtatgccgctttgttcagtggagcaggaaagtatatatatatatacttatatactagcagcaaattgcttcttgtaactgtgcagatcaataaactctataagaagc

SEQ ID NO: 290095 - DNA, 291 bp, Zea mays
ccgaccccgaccgctgctgcacatcatcctcccgccgctcggcgtcttcctccgattcggctgctgcagagagcagactattcaatctgtaaccgtggtgctacaagagaatgggatgtacctgtattcctgaaccctgagagcaattaaccggtctccgttcgcagccccctccacttcctctgcagctccggtgatatgggcagtggattcgggtgccagatcttgcgcctcatcccgtgatctggaggctcttcatgtcgatgatagcccagcgtgcagccagccaaa

SEQ ID NO: 290096 - DNA, 185 bp, Zea mays
tgagtaggaggctagtttggtggctgtaaatacttctcttggcttggcttgtacagagttctggcgctatttctgatggctccgtagatagcaactgtagggcttggttgcacttcctatgctaatggctgttctactaactgtgtggcgctcaatatagctgttatggttggcatggtcaaaaa

SEQ ID NO: 290097 - DNA, 157 bp, Zea mays
ggctcgagcaaacctgcttaacagcagcctcgcaggtacaccaggccacccgaggctcagacacagtggcagggacctttgttgccgcaattagtacggtacgtaaactgcccatctcggtgggtaagctaatcgaccacagcactagtgctgtggt

SEQ ID NO: 290098 - DNA, 319 bp, Zea mays
gcggtcttggaaggttgcagagaatgcatggggtcacggccgcaaccccaatggcattctcggccttctatgtagggagcacttccctagactggttgagtacagtggagtgactagacccagcttacacctgcaaccactacatcgtcgccctcgatgcagtagaccaggacaacaggggattcaacaacaaggccgagcatgtgaagcaaaagttgtgggatttcttcagatatgaggttgtatacgaggccaaggcggatgtggtggacaccacgagctgtaagaagctcgtcgtggacatgcattaccgagtgcg

SEQ ID NO: 290099 - DNA, 280 bp, Zea mays
cggatcgcatggaacttgccgggacatggaggaaggtgatgccttacatggccatggtgtttcttcagttcggcttcgccggaatgttcctcatctccgtcgcgtccctgcggcagggaatgagccactatgtccttgttgtctaccggaacgtagtggcagccattgtcatggctccattcgcgctatggtttgagaggaaaacaaggcctaaaatgagcctaccggtgttcatcaagatccttgctttgggattactcgaacccgtgcttgaccaaaa

SEQ ID NO: 290100 - DNA, 406 bp, Zea mays
aaaaaaatggcagctccctcgtcgtccctcaccccgccgccgccggcagcggctgtggcctccacaacgctgtccgggaacctcacggtctcctcccgcgcttacggcatgcggcgccacctcatggagtcgctcgactccctcgcctacgacgtactggagacaaacccatggagagaagattccaagccagtctatgtgctagccacaagcgataaccacctatggacaatgaaaactcgcaggagccgcaatgaagtcgaaagggaacttggaaagcttttctcaaacggagggggttctggagttggaattaaatcgaagtactctggcaccaagtttaacatggttgtcgaagatatcagagatggagtactggtatttgaggatgaggatgatgctgtaa

SEQ ID NO: 290101 - DNA, 365 bp, Zea mays
ggccggcccaacgcgcgtgggcgtggcaaaccgcacgtcgtgccttgtggcggcgcctggaaaccaccgtcattctctctccctttcccatcttctctccctgatgctcgctaccgccactacccctatcacctggtcgttgccgatcccagcgcccaaatccagagcaccccggcgagcgcccagacgcccagcttggctgtctcggcgcgacctcttcttctccggcgagtccttcgaccagtttgcgatccgtttccgagcttcgagagatcgaaggtcaagctttggtgaccaagtgatcaagctcctcgagctctacgagattgaagatcctgagcatctgtttggtgaagcttggtgga

SEQ ID NO: 290102 - DNA, 308 bp, Zea mays
tgggagcaagcccgccaggttttactgacaaacatacagcaagccggcttctgagaaactgaactatattacacacaagtgaatggtgctactttgctatctgagaaactgaaaaactgaactgtattacacacaagtaaactgaactgagaaactgaactgtattacacagcaagccaacttcaggacaggaggaccaccccagaattcgactctagcaggtgctgctgctttgctatctggaaactgtaaatggcttcttattatcatcggtagtgaactctgacaaagttgacagcagtgttgag

SEQ ID NO: 290103 - DNA, 263 bp, Zea mays
gcttggaagtacccaatcagtagcctgtacttctttcggaacaagtaatgggcaagcatccatgcatctgcattgtggtatccattagaagtagaggctactgcttgggagtacccaatcaaaaatcaatgttgtcagtaattgtgtcatgtacaccgacgaacaactccttttctggcacgtaggtgtatctcgtaccgacttcgtagtgcgttcaaaaacaaaatctggaatccctgttgtgaaatttcatcttggacagc

SEQ ID NO: 290104 - DNA, 282 bp, Zea mays
ctccgagccaaagtagctgatgagttcgtcaagcgaagaggagacaccgaatggttccttgaaggcagctttgagagttatgtgagacagatgagaaagcctcatgcttggggaggggaacctgagctgttcatgtgttcccacgttcgcaggatgcccatcaccgtctacatgtatacgggcagctccgacggcccaaggatcatagcggaatacggccaggaatacggaaaggacgatccagtccgcgttctctacgacggcgtcgggcacgtcgacgca

SEQ ID NO: 290105 - DNA, 264 bp, Zea mays
gcgcgacgtggaggtcctgcagcgggccggcgtgttcgtgcgcggggacgaggagacggcggcgttctacgcgcacctgggcgagctgtgcccgccgcccgagttcgtcaacaactgctacgccgacctgttccgcgacgtcctggagtcccctgggcgcactgcgaacaggcaccgcgccgtgctggtgcacgactacttcagcaacccgtggaccagcatgtccgccgccgccgccgtcttcctgcttgtcctcaccgtcgt

SEQ ID NO: 290106 - DNA, 461 bp, Zea mays
gagcgcgccactgctcgcttctgggctgcctacgccgacgacaagttgtttccagcgtggtacggcatggtgaaggcccaggcggaggaggagagggcggagaaggcgaaggagacgctcgccgccatcgagcacatggaagtggccttcgccaagtgctccggcggcaacgccttcttcggtggcgactccatcggctacgtcgacatcgtgctcggctccttcttgttctggttcgaggcggtgcgcagggttttcgacctggagatcattaacgctagcaagactccgctgttggctgcgtgggcggagcggtttgtagggactgtagaagcgaaggaggtgctgccgttgcccacggcggacatggcggtgcagtacatcaataagcttcatgcccccctgccgccgccatgagttcacaatgagtcgtgtaagtgtaaccaagcagggaaaaaggt

SEQ ID NO: 290107 - DNA, 347 bp, Zea mays
cgtcacgaaccggtggagaaacttcatgaagaggcagatcaagagggccaggatgttttttgaggaggcagagagaggggtaactgagctctcacaggctagcagatggccagtatgggcttccctgttgttgtacaggcagatcctggatgagatcgaagccaacgactacaacaacttcacgaagagggcgtatgttggtaaagggaagaagttgctagcacttcctgtggcatatggaaaatcgctactgctcccatgttcattgagaaatggccagacctagccaccagagaagctgcaatgcaaggttcaggttaggctagatagaaagttaaatggggcaa

SEQ ID NO: 290108 - DNA, 266 bp, Zea mays
tgttcagagacgaaggcgacccttgttttctctattagttcggtcagaatgggatgttctttcagatcaaggaaataaatcgggagtcatctcttgtaacaaagagaatcagagcatgatgtacataaggaaaaatcataggcacggtttatgctggatatggtagggattgcttctgtgtaaatatatgtatacaatgtaaacttgcaatggctatatttgcagcaacataagcaccaagctaactgaaaaatatcagttaaccg

SEQ ID NO: 290109 - DNA, 331 bp, Zea mays
agcctttccgaggattttgttgccaagccaccggccgaagacagggacattatgggagaggtgtcgaagactcatgaggccatacaatacttggagaagtcaattgacacactgcagatggagctggcagcgaacgcagcatcaacgagcttcacggggaaagtacaggtggtggcgtaagtaagcagaggagaagggcgttcgtggtgatcggggtcaacaccgccttcagcagcaggaagcgtccggattccgtgagggagacctggatgcctcaaggtgagaagctcaagaaactggaggagaagggatcgtcgtccggttacgatag

SEQ ID NO: 290110 - DNA, 335 bp, Zea mays
  unsure (1)..(335): unsure at all n locations
tcggaatcggctcgaggtgctcagagaagatccaagggaaaaggccattctgatgnttttatacttagatccactccataataagtgtgttgaggaagtttcttcttgtaatatattcatggtgaagggacaatattatttctactccactgttaacggggacaattcttcctggaatcacaaggagaagtgtgattgaaatttctacagaatcttgactttcaggttgaggagcgtcttatcacaatagatgaactgcttggggctgatgaagtcttttgtacatgaacagctgttgtattgtcacctgttgggagcatcacttaccgtggaag

SEQ ID NO: 290111 - DNA, 192 bp, Zea mays
agatgaacagtaacatccagtagagactactgtttgtaaaagtgatagttgttcggttgctccgaaacagtggcctggaattattcctggctggattgtttatctattttatataagattttatcaggttgaataaaaaaaaaaaaaaaaaacaggcggacccccaataatgagcccccccccccgggaatt

SEQ ID NO: 290112 - DNA, 267 bp, Zea mays
gaaacaggagggagagaggaaggacagaattgccgctagacaagcaatgcgtgatgaggcttggggttcagattgatggagaacatactatgattgctggtcgcccacatcatgtctgcgagtttgttacattggtgttttagatgcttgtactctttgcatggtcaaatgttgattttgatacagagatctctgacgcgatgtgtatcgtagtggcgacgtgtacgccaagcatgttgtacgggcagcaagggattaggatgagat

SEQ ID NO: 290113 - DNA, 270 bp, Zea mays
cacagatatgtgtagctagtatacactgccgcgtactactggtgcacgatgtaaataattattgggggctcttattattattattagaccttggtttaatgctacacagatacggacggacggatggatgggttataggtttattcaagttgatagtaactaaggggcatagggaagtcttaattagttgacaatttattagtaactaaaaacgtcgaaccatgcgtgcatgctcctcttgggtttacatatatttgtattcattatata

SEQ ID NO: 290114 - DNA, 296 bp, Zea mays
ctgtgtcaaaaagtcccttacaaagtaaatagtatgtagaatcctctttcgtgtgttttcaggcatcatagtatacaaaagtacaaattctggatgatatcctctcttttttcctgtgtatctttgttaaagcaaaatccgggtcatatatcacacagaagtcagtgcagatacaattatgcaacagaatcaaatatctaacattgaagatatgagaatattcaggctgtgaagcattgcctcgtcgcttgctgtgctgtggatatgatttataaaacgttgcattcttgttgcat

SEQ ID NO: 290115 - DNA, 282 bp, Zea mays
tttgcaggatttccaactttgtccttctggcatgcagccatccgacccatgcatcaataacacatatggtgataaatcctgaagtgcccaattctaacttctaagaatctgcagtcgcagcagaatatgtgtcaattcaatcatccgagtcattttcacatgataatgtctgaacaagcccttaggggtcaggtatttctctgtaaccatgtgccagcagtgagctcagggctcaaatgcccacacctcgtgccttgaacacatttagcttaggcaagcatt

SEQ ID NO: 290116 - DNA, 292 bp, Zea mays
cggaattgcactggttgtcagtcctttactttcccttattcaggaccaggtcatgggactgtcagctttaggtataccagcatacatgctaacttcaactaccaacaaggaagttgagaagttcatctataagacacttgataaaggagaaggagaactaaagatattatatgtgacacctgagaagatctcaaaaagtaaaaggttcatgtctaagctcgagaaatgccatcatgccggtcgtcgtactctgattgcgatagatgaggctcactgctgtagccaatggggg

SEQ ID NO: 290117 - DNA, 375 bp, Zea mays
gtgaacagcaagatgctgagctgcagaaagcagatgctaaagcccgtgaagcgatgaaccttgccaccgaggaagcatccaaactgaagacggcgaaggatgtcataaattcactaacagcccagctaaaagaaatgtctgaaaggcttcctcctggagcatgtgacgtgaagaacaatggacgcgttatgggcgatttagcgcccgaaatggggagagagaagcagatgcgatatggtgatcggttcagtggattgcctgctcaagtttaccaaacaggcagttccagtgaaacacccatgtgttcgtccacaagggagcagcaggagcgagcacgtcgacggtgtccgagagttcttctccccggtgcagcag

SEQ ID NO: 290118 - DNA, 289 bp, Zea mays
atcgattgccgcctcagcaatccacagtccatggtgacagcggccaaacaagttcttccgagaggttcttgccgttgtgcaaccatccccatcttctagaacagagcggaactaattccttgttcagctctggtgcgatagcaagggcacgggagattctagacctctttcccgggagagcaacaggaggatatagccactctcagggcactgaaggattgcgcgacataatcgccgctggaatagccgctcgagataatttcccctgctacgcggatgacattttcct

SEQ ID NO: 290119 - DNA, 290 bp, Zea mays
ccgatattgccaactcatggtccggacactcatttcagcaggctgttggtcttgggcctcctattggatttgctccttcaccagttgctcaccagggttcggcagtgcagcagccactgccactgccacttccacttcctatggatcaccaagcgcctatcacgggatcaggagctctcgccacgaacggctcttacagtctcccgacagcacgcggtgtgagttctgggacaatcgtcagcgagacccgccagcagctcatggacaaccctttcttcggcgacgcggag

SEQ ID NO: 290120 - DNA, 286 bp, Zea mays
cgcagatctgatgattgcactgtagcatgtgcatacatggatgccaagacgttggtcaagctcgtatgcaccatcactgacctcaaatcagagcttcatgctgcatttcgctgtgctccagatgctgcagcagtcgctctccacgtagttgagttattcctacacaacaagacatttgttaggaccaacaaggtctgggcaaactgtgttgagctagttccaatggtacctgtctttgttaccaagccttctgcagacacgactgagcaggccaagcggatggcta

SEQ ID NO: 290121 - DNA, 308 bp, Zea mays
  unsure (1)..(308): unsure at all n locations
agactacctccaggattcagatgttgtacctactggctttcagagtagagaggtctactgagcttgngagcaatatcttgggatagagcacgctgatactgcaccaaaaagggtctatacagtgaatcagaaccgtcacgcatacgagaagccggtcaaaatttacaattgagatttctaactggcctggccgcacggtgaaggcctccatacgagaggagcggccagaagcgggaggacagggaatttatactgtcagggggaaaacctcatagttagcgagcccttcggtgtggcacggccatcta

SEQ ID NO: 290122 - DNA, 213 bp, Zea mays
ccgcgaacgatggagagacagacatgatcctgtagctcgaagaagttaatcgtgccgtgtgaatgtttcaaggcgaatgtgtgtcgtaattttctttctacctcccttcattattgtacatatgtttagggctgcctaatggaaggccttgtaactagagtagagatgctcaaaagactcggtcatgagttcagtataatgaatgatcttctc

SEQ ID NO: 290123 - DNA, 284 bp, Zea mays
ccgatttttcatggtagtcgtagctataacacaagtctcacgatgagtggtggcaacaatggcatggacaagccattttccctgccatcatatggcgcacatgtgcacaactgggttgagtggctcaaccactaatgatgccagacaactggtggggcctcagcaggataacaaggccatcatgaagagcagtcctaaccacaatggtgtatcattgttgaacctctactggaacaagcacgactacaacaacaactacaacaactacgacatcaacaacaact

SEQ ID NO: 290124 - DNA, 292 bp, Zea mays
cgtacgagctcggattcggccgagcacgacgtagctgcgcgcggcgtcgtggccttggttggggctgcggccaccggatctggctcctcagtcgtggcgtgtggcgactgcaggtgggcagcaacctgcagtgccctaatggcgtctgcgctggtgcgcgtgccaacggatctggcgcgtcgcagtggctgctgccagggatggccgacaggaggtgcagcgcgaggcgctgccgtcgcttgaccaggtccatgggcccagccagaggtgctggtggtcgacgcaactttgc

SEQ ID NO: 290125 - DNA, 300 bp, Zea mays
cccaacttgaaagttgctgcccctggagaattcatcggttcaattgcgatccctctccctgtcggatctgtgctagtcctgaatggcaatggtgctgatgtagcaaaacattgtgtcccagcagtccctaccaaaaggatatccattacattcagaaaaatggacccagcaaagcgtccatttggctttgaagatgacccggaactacttaatcttgctcctctagggacagttgtacaagaaactggcatatcatcagatgaaggcaagggcaagctacctgacgtccaaataacaaat

SEQ ID NO: 290126 - DNA, 188 bp, Zea mays
atcctggatgagttgtcgcggcgtttctctgaacatgactccaagtgggatcgcagagtggccgagcaggagtcgcgttggaacgcgaccttctcggagttcaccactggacaagaccgctgcgtgggggctctagaacaagccactggtgtgctggaagattggcggatgaacatggaagggatgat

SEQ ID NO: 290127 - DNA, 380 bp, Zea mays
ttcaagcttggcattataatgtattcttcgtttatgctcaagaaaacccagttcctacttacagagactggccgattgtttattgtttggacacataagtgggttcatctttgcctggtggtctgtccaccttgtttgctttgtgatttcaacaaatagttagtactttcattctccagtttattgtaagctccagctcatacgttatgcatccttccatttcatcaggggaaagaaacttctgatccagaaaatggtaggcagtgtcccttctgtgatgagctgcatgccgtcttcacagaccgtgcaagagatatgcaacgacaactccttgagtctgaatctggggttctgtcaaataggaactgaagcaactggtg

SEQ ID NO: 290128 - DNA, 275 bp, Zea mays
agtggaggtagtggaggtagccatcatcagaatccagaaaggagcaccgtgtgtgcgtgatgtggccggagaagatgtacgcgtgggcgtccatggcagaagacccgctcaagcgcgcggggtcggcatcggcgcatccgtcgagccctctacggcgctacagcccaacgacgctggcggtcggcggcctcatcgtcgttggcggcctcagctacgtcatgttcgggagcaagaagaacgggcgcgaccagcaggccagccgagcttagaaaaag

SEQ ID NO: 290129 - DNA, 362 bp, Zea mays
cagcgtcagacctgctgtctcgacacatgatggcgcagctgtactgcacgctgcacaggatgtagcagggcagccgcgccaccacgcagggcccaccagcctgcaggcacggacctttccatgcaccgtgggagcctcctccacacaggccctgtcctcagcagaactcggattctgcagcatgccgtctgaccaccatgaactagcacggaagaatcttcacacttgggaacacaacacgcacactttcacacgacacctgggccagagaggaggtctcaagggagacgatgcgtggagctgagtgaagatgcagtgcagcctaggaaagcccagggcccatcaggcagtgtggagacacc

SEQ ID NO: 290130 - DNA, 328 bp, Zea mays
agataatgcttgacacaaaacgttctgagcttcgataagctgaatctgaggttgacactatggggagacaaggttgatgcactcttgagtcttgttcagaagatatatgtaactcttgagcactactctcctgtttttcagcatcatcctgtgctattggatgctttcttgaagacatgcaagcttgttgcaggtatcagaagcagacaaaagaaggacttgcaagatacaatctaagttggagcagcaaggatgttccattattgaacagttctaatgtcgccatctaattcgcttgctatagcattccatgctaataaagctgcac

SEQ ID NO: 290131 - DNA, 342 bp, Zea mays
acaaacccctgcctcccaccagaaaagcaagcagaccacacccacccgcctctaaaccaaccagcctgtccccattccccgtccccggcgatgcacgccagcatccactccctcccgtcagcctcttcttctccccctgatgagcgctgagttctgtgctgccgctgctggtgctgtggccatggagctcggagtcggggatgtgatggggctgcagcaaggcatcgccgccgccaccgggccatcgtccggagacagcgacctgggtcttctcaagcgagcaggcctcgcccaggcagtcacctgctacccctgcgctttcctcgaccaacagaagatgct

SEQ ID NO: 290132 - DNA, 332 bp, Zea mays
agaactgcttctcgttgccttcgttctcctctctctgctgccttcgtcttcctctcattcttccctagatctctcctcttctccattccctagctgtagctaacacttgctggccatggtcgcgacggtcgccctctccgtcgcgcgtcgcatctacgctggccaccccgtggggtagaaggatcaggccagccacaaccctgacgcctttctccaaccttgcaccctcttctggcgccagtagaaggaggagcggaccacgttccccgcgttgccgctcctgtcttggatgccgtcaccggcgacacgtccgccggttcggactgtgcaga

SEQ ID NO: 290133 - DNA, 284 bp, Zea mays
tctgataccctataaaagttgagaacggcgtgtcactgcattctgcaaatgatgatgatgttccttctagacttgaagagatcgagttcatagattctgagagccgtgcgaaagctgaaaatggcaagatgctactatttggtgtagctgtgcctagtactgcaatttgtgcagataaggttgaggaacaccacgatgaaagccctctaagttgtgtctcaaccacaggctcttccactaccctttctgcaacaacacatcagttctgagcttcggagacagtg

SEQ ID NO: 290134 - DNA, 275 bp, Zea mays
cgtatatctccggcttcattgcacaatgagtttctcggtatctttgcccgtgtactgtatgggatcctgctgttcacagaatcaagtatcacggtgtgcagaatcaagtaccacattgagcagaatcaagtacgtgctgctgtgtgaaaggcaagattgcaacgaatgctctctgcaagtttgtacgaactaattagtacttacgaagaaccgtcaatctagtggacatatttattccgtatcagatggttaactacaatttttaaagaactggc

SEQ ID NO: 290135 - DNA, 326 bp, Zea mays
cgaactcagacttgtgcggtccgccgtcggagagcgagtgcggcgtgtaccggcgacggcggaggcggcagagggtgcagcgcctggctctgcttatcggtgtggtggctgctgcggcgctgctcgttgcgctgttgctgctgttgctgcgtggtcagcttgatgggatggaggcgtcggttcgttgagagccgtgacggtgtcaagaagagaagacgcagcccaggacgcggcagtgggtccagcggcacgagcacggagaacggcgtcagccagccgaagctgatcatgttcaattcgaggatcacttacgctgacacggttga

SEQ ID NO: 290136 - DNA, 321 bp, Zea mays
ctttctcactcatcgctcgtggagttgcagccatggctgctccgtgtcgccgcatactccccggcgctgcgggtccaagtgaaagcagccatggatgcagcgtcgtcgttccgagtattggcatctctcagtttccccgggcaaagagcaagctttccatcgattcggatgcagaactgctctcaagtgtcctgttcgctggcaaaacaagaaacagttgagaaggtcagcgagatcgtgaagaatcagttagctctacccgaagacaccggagtaacaggagagacaaagtttgtagacattggagccgactcactggac

SEQ ID NO: 290137 - DNA, 376 bp, Zea mays
cgcatcgtcgctgagaaggttacttactactttaggaagccatgtgttaatgatataataattgtcaaaagccctccagtgctgcaggacgttgggtatactgataatgatgttttcattaaaagagtagttgccagggagggagatgttgttgaggttcatgaaggaaaactcgttgtgaatggtgaggctagaaatgaagaatgcattcttgagccaccttcttatgacatgaatcctgtgcaagtaccagaaaactctgtttttgtgatgggagataaccgaaacaacagctacgattcacatgtgtggggccctcttccagcaaaaaacatattggggagatcaatttttcggtattggcctcctggtcgaa

SEQ ID NO: 290138 - DNA, 356 bp, Zea mays
gtttgaagatgacgctggcctttctctagagtctggctcttgtcaagattcttcaaaggttgagcaacgtaaaacagcttaccgctgcaggaaatgcaggagagttattgctgtagagggcaatgttataagtcatgttcctggtgagggtgaatcttgctttgattggaaccgaagaaagagtggtcatccatacaacaacaaagaacatggttgctcatctttgtttgtcgaacctctgaaatggatgactccagtagaagacggcgctttggagggaaagctatcatgcatccactgtggagctcggttgggatacttcaactggtcagggatacagtgcaatgtggtagctg

SEQ ID NO: 290139 - DNA, 170 bp, Zea mays
aagctttgctacagtagcaacctgcctcatccatggcatatgtggaagcttgatagtgtccatgagttgttgaaacgtgattaccagctccgccctgttgcaatggagattttcagcatggatggttgcaatgagcttctagttttccacaaaaaggagagagaggaagt

SEQ ID NO: 290140 - DNA, 148 bp, Zea mays
aagatatccatccagttcgagctagatgataggatattggaggcattgaaggttccggtgtcagtgtgatccatttatatccaaaacaattatcagacaagacttcaagattttttggtcgctcaattcaaatgatgtgcattgaaga

SEQ ID NO: 290141 - DNA, 328 bp, Zea mays
cgcttctgcttttctttatgtcgtcgaccgcgatgtcttgggacgggtatggcgggtagatctaccctggagctggacgcggtgttccagcagcctgagacgaccccctgtaggtgccggcgggggagatggagctgccgagcaacgctggcgacagcgaactcctgcccctggaggagcacaaggagcgcgtgttgcggcacctacaccgccgatccaagcgcccgctggaggagttcgtggccgttgtggcgaacgtcgcggagcagctggtgagcgtgtatctagacctgggaacagaatgcgcggcgcagactggcgggaacgg

SEQ ID NO: 290142 - DNA, 362 bp, Zea mays
caaacactcttctgcatattcttctactacttgttctggttctatctgtgacgagcatcatggcctcgagagcagtgctattgttcgctatgtgtgtgcttccggccatggctgtggccattcgcccagcaaagatccctttttgcgtgaaggggcgcgtctgctgtgacccttgccgtgctggctgtgagacctcagcaaccacctacattgccggtgctgagattatgttgctatgcaagagcagggttagcaacgaggttgtgtacaccaagaaggggtacactgactcaactggagcatacacaatgtacgtggacgaggatcacgcagatcaaatatgcagtgccaagcttgtaagc

SEQ ID NO: 290143 - DNA, 336 bp, Zea mays
  unsure (1)..(336): unsure at all n locations
aggatgagagggggtccgggcgggttgagagcgagggacctggtgggagaagggggaaagatatgaagctacttgcttttgagtgaaatgttgtctggttcaaggtcttgctttgcgatttgaggatgatccatgcttgcatgtgttgttttttattcctcggatatgcaagatctcggaccaggcttcattcccctcaggaatagcttcataataataccgtcggagagttattaggaggagctgctagtactacataaacttgtgttcttggtctttggttctgaaatatntgcttggagtgttcgtgagtttcctggttgttcttgtagtacg

SEQ ID NO: 290144 - DNA, 355 bp, Zea mays
  unsure (1)..(355): unsure at all n locations
caccccctaaccactccacctccctcagcagccctcacggccactacccactgcggctgtaccacctgtacggctgcactgtccgtcgatcggctttgcaccacacgtccgcgcgctcgctccgtcggtgtcggtagccatggcgctggcggggacgggggtgttcgcggagatcctggacggcgaggtgtacaggtactacgccgacggggagtggcgcagctccgcctccggcaagtccgtcgccatcgtcaaccccaccacccgcaagacgcagtacagggtgcaagcatgcacgcaggaggaggtgaacaaggcgatggacgcggnttttgtcgcgcaaggcatgggcccg

SEQ ID NO: 290145 - DNA, 437 bp, Zea mays
gcaaagaagcttctgaacaatgtatcatcacttctcaaactggaggctacttctttggcataactccagattcatctacaatatggacaaaatatcaaaagaatgtagaggcttcacataataagggtttgaagactgttccaaatagcattcgctcagagaactataccattacctttgaagtcgaggaagagaagtttcccttttttggaaagaagtatcaactcaaattcgcgagtgacgcggagtttgagaatcagtgcctggtccactttcccacccttatgagattatcaagggaagctggacttgaatatgtggagatccagaatttaaccgagttttatgatgataacagaacacaattcgctccaatgcttggtggctacggtgcaagttttttggatgctcggggaagcttgtgctcgttcctacga

SEQ ID NO: 290146 - DNA, 342 bp, Zea mays
aattcctgcaaagctttggcaacacctgctctcctctctactactaacacccagaaaagcaagaacagaaacatgtacctcagagaaacactacccagaagcagtgatgttctccaaagtcttcatgaagaagatgactcacagtcaaaaggttattctgcctcaaggttaatccagatggttttccagggtgctccagcatatacctggcactagtgtccgagcctatgactaaatctttcatgtgttagtctatcttttaaaactttgcacatttagtcgtgttgaactgatgttcatgttgtatttcttatacttcacacatgttgtgcttatattgat

SEQ ID NO: 290147 - DNA, 232 bp, Zea mays
tgacagtctgcttgtccttctacgcacaatacagaacagtagcaactgcagagcagatgcgaagcggtctggttttgagcaggagtttgctgtgttcctccggttccatcgagcggagcaggattgttctggtaacagtctactcccttttcgacttatgagatctgtggaaagatgggaactagctgtccagtggagatgcaactacaagaagacgctaaagaaatgtatt

SEQ ID NO: 290148 - DNA, 273 bp, Zea mays
attagaaaaggacagaacaggacaggtattttcacaatgcttttctatacagtgtctgtaatctatagatagcataaccgattaagtcaggggttgatctttaactaccagacacagggtgtggtgccgcgctgtctgcttgtggatttcatttctgccttttagtttttacttctttctttggaggcagaaattaggcataagacaatatgaggggtggtctcccttacttccaatgccagttgcaaacccaggtttttgtttgtttgtttg

SEQ ID NO: 290149 - DNA, 281 bp, Zea mays
ctctctctcgctcatcacatccaccgtcgtatacgatggagatggatccttcgtcgacctctcagttcgtgtagaagttcgtttcgttatgcttgtttcgatttgtttttgtttttgtcccttctgtcgcctcttctttcggcttcaagagaacaatccactcttggcggccttgttctgggggcgtagaacgaacttcgcgccgcgggtgctcagctcaaggatctggctgccgtgtcatcggcgataggttcctcagccctgcggcgcacacagatttg

SEQ ID NO: 290150 - DNA, 274 bp, Zea mays
cggctcgaggcgctccttcgccgactgggcgaccgccgccgccggcctcgcccaggtctccgtccggccctacgacaggttccatcgggcccttagccggcgacaagcaccaccaggtgcactttctctatgcagacactgattaggagttcgaggagcaaatcaattcgtaccaaatataaccaagcttacatggctaagccatgtgattcatcacatcatggagttgtggacaatagctccaatggatcccaggctaggcgtgaggaagctg

SEQ ID NO: 290151 - DNA, 330 bp, Zea mays
cgcgtcagccctacgacgagatggccgactaccgggatggagttgatgaagattcaaggggaggtgttgaggatgaagacgacgacgacgaccatgacgctgagtacaacggagtttctgccgtacagttggagagaaggctccacgagcttctccacgaaagaaaccgggaccggattgaggagctggaagccgcgttgaggcgtgcggagaagaagcttgttgagagagacatggaggtgtccctgtggaaggacacggctaagtttgcgttgagaccagacaatgagttgcaatgagcatcgaatttctgctgttctctttcaatcg

SEQ ID NO: 290152 - DNA, 361 bp, Zea mays
tgctttcgccatgactcagattcagatggttattcccgtggtaaggaaagacaattgaatgttgcagtgttgaaaaaggatgtgcaagagaaaagaaaagtagctacctcaagtgatagttcagattacagcagcagcctcagcagtagtgattctgacacgagtgcagatagctatgaggaacagaaaaggagtcaagctggagggagaagaaatgagctgaatacacaaaggcagaaagaggaggaaagaaaagagcttgaaaagcaacagaagagagaggtagagaagaaagagctggataagcaaaagcacagggaggaagagaggatggagtgggagggcagaagaaaggcacgag

SEQ ID NO: 290153 - DNA, 442 bp, Zea mays
cggctcgagtgacaagatgtctgtccaagagctcccagccaactcgactgtagttgatctaatggagcgagtcggggccaacagtccgagatggagcccttacagcttcccactgaaagaggagctgcgaccgagggttaaccacaagcccataagcgacccaaataggaagctcagcatgggcgacgtggtggagctgacgcctgcgctccctgacaagtcgctgtccgaggaccggcaggagatccagcgcatgtatgagcggcgagggtttgcgctcgccaccacccctagaagctgacaccatcatcgccatgttaacctgctgctgtacaatacacctgtaaatacgaactaatccttgcagcagagaaatcccagatgaacaaaccccccaactgaattggctaatggtgcgggggttgatccaggacgctgctgt

SEQ ID NO: 290154 - DNA, 325 bp, Zea mays
gtgaaccaggataagtgaggaggagatcggcaaggagcggacggccgtggcggtaccatggacgactcggcggaggtgaagctggtggacgagatcacgggagagggaggggcggcgggggactggggctacctgggctccgacgggatgggctccggctcctacccggcgttccacttctccagagacgtcctatccacgccgacctccgcgtcgttgctcctctccatggaccccgcggcgctcttcgacttcaacggcaccttccctccctcctccgcggtggcagcgggagaggcaagaagaaagggatgccggccaagaa

SEQ ID NO: 290155 - DNA, 292 bp, Zea mays
ataagatgggagagtggtaggcttgtaatcaagtttttgatatcttgtgcatgttttatttagaatttagaatttctttttttgtagatgagtgcatggctcaaacactctgttgactcaattaggggaaacagcaaaaaatctgaacaatattggtcggatgtggcacaagagtacaacctgactactccaaagaacagacagaggactaaaaatcaggttaaggagaggtggcagtggcacaagataaataagtgggctagcatgtccatgcctgttatttgagggttag

SEQ ID NO: 290156 - DNA, 168 bp, Zea mays
gcttgagatacatggtcttgtttcgccggattcaatcaatcactacagtagaattggtggactttcagcaagtggtattgaggaagctttgaaggatggtgaggttattgctgagacgatactggaggcgagcctattgctgtcatctactagcataatcgaggcaca

SEQ ID NO: 290157 - DNA, 341 bp, Zea mays
atctttgtgatattcttgcttgtccatttctataagtttgcacgccctggcagtgagatagatttaagagaaaaaaagatgagaataaggcgggcagttaactaggttggaaggcatgtatccattactagactgaatagctttgttggcataattgcagctgttagggctagtttgcaaccccgtgtttccaaagaattttcattttcccaaagaaaattagtttattttccctttggaaaatgagaatctcttgggaaaattgagttgccaaacgcccttaaaaatatgtttctaggactcagtttatttttcacaggaacaataaaggaaacggaaaa

SEQ ID NO: 290158 - DNA, 165 bp, Zea mays
ctgatctcgacattcagatcgcaactgccttcggtacgctagttgaaattggtttcttctagttcagctgtcgtctttcggctgtgatgcctggaacacgaacacgtgcggttcattctaactaatctgcattcacacgtacatacagatcccttcgctgaggca

SEQ ID NO: 290159 - DNA, 345 bp, Zea mays
aaggagggccttcggctccacccacccttgccgctcctgctcccacgggagtgccggagctcgtgccaggtccaggggttcgacgtgccggcgggcacgatcgtgttcgtgaacgcgtgggcgatcgctagggaccccagccactgggacaggcctgaggagttcgtgcctgagagatttgaagcagcagcgtcgacttcaaggggacggacttcgactacctaccgttcggggcaggacgaaggatgtgcccgggcatggcgtttgggctcgtgagcatggagcttgcgctcgctagcctcctctaccattttgactgggagctgccgcctgggatgacggccg

SEQ ID NO: 290160 - DNA, 353 bp, Zea mays
gatcactctactccaaccactccgcgggatcgtaccttacccagccttcttcctcgtcgccggctcgccatgtcggcggcgttcaaggcgttcctgaatagcccagtgggccccaagacgacccacttctggggacccgtctcgaactggggcatcatcctcgcgagcgtggctgacacgaaaaatgcctctgagatgatatccggccctaaaccatagtctgaccgaacaagcatgctcctgcttcggccgtacaatactacaatgtactcggttgtaccacaaaggcaatatctgatgcatgtacgtaacgtgataaaagcctcggttatacatgttgtaggttcatctgc

SEQ ID NO: 290161 - DNA, 341 bp, Zea mays
gagtagggagcatcagtggtccggaaggctttaccaagtctactatgaaaccactcaaaagaccccgtgacccccaatttcagattgatgcagaactagaaggtaccatgaggagtcctctaagaggtctaaaatctggtgctttggctcagtttgaaagttcatctttgccagaatctgctacaccaccaaagattcaacctgcactggaggagcacttaatttattcatgttacccccagaagagttattagtgggccctcctcagtatgtcgaccctgatcaagacttgctgctggagatacctctcaatgcacgacacccagaggcagaacttctgt

SEQ ID NO: 290162 - DNA, 277 bp, Zea mays
tggcaccgacctttgcaggtcttcagctccccttacatgcgtgctcctccggctgccggcgccgcgcctgagctgctgaaactgaaactgcacattcaggcaaggcagagcctaatgactgccgatgcgctcgtctccgaagttatgaacttatgaccgtgcaaatctttcatgctgccacacgtcttgagtgtaaagctggccggtggttgagattgtggcaagatagaaaaactcctcaacatgtacagaagcaacattgggcacagaataaata

SEQ ID NO: 290163 - DNA, 441 bp, Zea mays
gaaattcgcgagcgaaggtggagtgcgtggagagtgggaaagatgctctcgccagcctacaagtcccacataagttccatctttgtctcatggacattcagatgcccgaaatggatgggtccgaggccaccaagcaaataagggcaatggaggcgaaggcaaatgagcaggcagtcgcctgtgacgattcagaaacagatggcgcgacaagggcggcgagatggcacctgcctgtccttgcaatgaccgccgatgtcatccaggccacccatgaggagtgcacgaagtacgggatggacgggtacgtcacgaagcccttcgaggagaagcagctcttccaggcgctgcagaagttcttggaccctggcatgtccagctaacacccaagtgctgcgtttgttgcgagtgaggcaccattctcctccgttctgtagttcgcta

SEQ ID NO: 290164 - DNA, 299 bp, Zea mays
cgtttggcaacggctggtgtcggctggaaggaggtttcagtcaatggggcagtacgactagggggaactcaagaaggctttgctaaaggcttcccaacaatgttggcagggtgaaattgctatgatatctgaagatcttcctgtgaacattgcactagcattgtgctggcatcaacgaggcattgcctgcgcgggggattgctctgtactgatcatacagagaatttgcatcgctgatttggttacagacaagtgttgtttcagcttggaacccaattagttgagtggaatggatgtgt

SEQ ID NO: 290165 - DNA, 336 bp, Zea mays
cgcgaccgctcgagtagcctctagagctctcccctagcgacgccaatcctagcctcaggagctcttccctaagacccggctccatcgtcttctgtgacatcgtccccttctcctcgataagagtgcaaagtggaagcaatgcatgaagtcgacatgaagaagaaaaatgcaacgaactgtatctagtgcagtttaattggtgttacttgatgttggtgtttcgttgcattacagttttatgttatattgactatctgtttgcgtgaatggagatgacattgatggatggattagcttcgttacatattagatggtattcacattaaactttgtgtg

SEQ ID NO: 290166 - DNA, 314 bp, Zea mays
cgccgctacaaccctagactcccagccgaatggtcgccgtcctcctccgcgcgccgccatgctgctccgccgccttctgcactccacacgccacttccggcacggcctccggaccgtaactccggccaacaccaccaccaccacttcctcctcctccaccccccttccatttcgctgcttcccggacctccccctctctcgcgtcctctccccgcggctcctctccacctccggccgcgacgacgaccgcaacaagccgtggagcttcgaggcggactcgggcgatccggaccccttcgccaatgaggacgccg

SEQ ID NO: 290167 - DNA, 372 bp, Zea mays
  unsure (1)..(372): unsure at all n locations
tgatcatgctcatgctcatgagcatgcacatgacactcactgcaagatctatctgtgggtttgtctgtactatttggcattgtactgttagttattgtcgagaagactgtgacgcatgctgaagacaactctcataaggggcctcatagcatgggtcatgggcaccgtcgtcataatcataaacggcacgattctagcgataaagccaatttgaattaccagaagagtgatactgatggtaaagacattgatcatgctgaagaggaaccttcggttgatgataccactggaaaaataagtgatggccatgaatcagaagctactatacgcaagangagctcatccaaagccactgatggaggagccaccaat

SEQ ID NO: 290168 - DNA, 322 bp, Zea mays
atgaaataatagaactctccttctccgcccctgtacatgttcttctctactcttctatgttattccattgtactggttgttaacatttggtatgagatgtccacagatgtccaccgatcttcgactccattcatggcatccaccgcatctatcgactcccaactcacgcaagcgctcgaatcccagacacgggcgctgttgtccgaactggacaagcgtcttcgcgccatcgattccaagtgggaatctcgtgtagtcgtgttgcagtcctcgaagtccaggttgcagactccatgcgttgcctggactcgctccccaagga

SEQ ID NO: 290169 - DNA, 348 bp, Zea mays
ggggctaaagttgctggcatatatcatcctttgatccatgagaaggttatgaaggtcatgcgcaggcatgacagcgagagtttttgcatggactgttgatgatagcagctccatgaagaagatgctgtatgagcatgttgatgccattgtgaccagtaacccttctcttctgcagcagcttatgcaggagaccagagctgagtgtatggaagatggttttgccttaccataggaatttctagctgtcagaacataagggtttaacttctcagcagagaggaccaactagcgagttgagtttgagggattattcataaattagatgataattactttagttattggcac

SEQ ID NO: 290170 - DNA, 384 bp, Zea mays
acaaagaataaaaggttcgccatggcggtatccaagaacaagaaagcctgccgcggcgaggcagatagatcatcgtgctcacacccacatacatactcctataagaaagcaagagctccaggaccaaggcgcaggccagggagaggcggagaacaagaccaccaagatccaagccggcagattatagcttacctgatgccactgcgccgcatccatgcatgcaaggatcccaattccgctcctcgccagcggttctcccgtgtggtggttgttgcctccgaggggcgaggaagaagacgtacgagctgaggacgactacgacgacgagaacgaggacgaggcgcaggaggatggaggagaaggagcgtactggacctggatggg

SEQ ID NO: 290171 - DNA, 339 bp, Zea mays
gttggaacaggagccaaatgtgactataaagaggaaaagttgtattgatgggtatatcagctgcatagagaaggacgggtccaagggtttttgctgattggattggaaaatatcagataaaaactgtcttggtgctcgggatatgcacggacatctgtgttttggattttgcaagctcaactctggctgctcgaaatattgaccgagtgcctccattacaggatgtcgtgatttattcaggggggtgtgctacatatgaccttcctgttgagattgctactaatatcaaaggagctcttgcccatccacaggatctgatgcatcatattggatctatat

SEQ ID NO: 290172 - DNA, 214 bp, Zea mays
aagaaacagacgcatcgcttccttgtccatcctacctcccctgccccccgcccaaatcccgtgacggtcgccgcccccgccgtgctctcgcccgcgcgggagacgacgcagcacccccccgcgtaggatccgcggcggtcggcaggatggtggtggccacggaggaaatggtggtctactgctttcacaccctcgtcgcctatttcaccggcga

SEQ ID NO: 290173 - DNA, 347 bp, Zea mays
caagaagaactctgagcatgagccgcagaaagaacactgccctcgcccttgtggcatggatcatgttgcttgcactcttcatcacaacggcgacggcctcactcccatgccaatgctgctggctggtgcagcatccgaaggtgacatgcggccacgcctgctgcggcgacaactgttgcccgcccacgccaccaccgtccacccgctgaattcgagatagatcataaatacagtaccatgatgatacataataaactccgccggaaagttgttatagtatcccgccacttttctgtgagcatatgatatatatgctgcagcatgcatgacaatagaacatctctttg

SEQ ID NO: 290174 - DNA, 344 bp, Zea mays
  unsure (1)..(344): unsure at all n locations
ctngattttttcattgctgaagcaggttactcttggaagagagacagaagacattaaagttgacattgatttaggaaaagaagggagggcaaataagatatctcgccgacaggcgggttatcaagatggatgaatctgggtattttcatattaagaacactggaaaatgtccaatcttggttaatagccaggagataccaagcgtgcaagacgcatcaacctaagctcagactcattaatcgagataaaggacatgaaggtttattttccacgtaaaccaagaggctgtgaggcagtacattgatcgtgacctgaagccagaacgctaatttcccctggctttc

SEQ ID NO: 290175 - DNA, 253 bp, Zea mays
gtgagccaatggaaaaggcggaagaggatgttcaaggagctctgggataatattactgagcacagcccaaaagatcagaaggaatttaaggaagaacttggtatcgagtacgacgaagatgttgatgtgaacgtgcagtcttactctgacatgctagcaagtctcaacaaaaggcgaaaaatttcccgctgatgatgtagcataagagcgtcttaagttgaaagtaggctacaaccgttacatgccagcagct

SEQ ID NO: 290176 - DNA, 335 bp, Zea mays
gttgtgggtccacaattccgcattgccatctagtccagttccagtccgagcagcagcaagcggcggcggcgatgggctctggatccaactccaaggagggagaggagcgggtgctgagccacggtgacgtggtgctcatccgctccgacctcgcaatccttcgcggtccctgcttcatcaacgaccgcatcattgccttctacttcgcacacctctccgccagcctccaggacgacgacctccttctgcttccgccctccatcccctacctcctctccaacctcgctgactcggccgccgacgccgccgttgccgagccggtctgctcgcctccc

SEQ ID NO: 290177 - DNA, 342 bp, Zea mays
  unsure (1)..(342): unsure at all n locations
canatctccaagctctcccaatttagatacgagagatggccatgacgatgaccctcggttccatgctcatcgccgccgccgcagttgtcggcctgtgctccgtcgctcccgctgcatcactccgcgaggagccactacagccgcagatcgtcggcgggtggaaaccgatcacgaacgtgaacgacccccacgtccaagagatcggccggtgggcggtttcggagcacatcaagacggccaacgacgggctgggcttcggcacggtggtgagcggcgaggagcagatccgtcgccggtgagtactacaggctgcgtattcaagcgacgtaggtcggcgggcag

SEQ ID NO: 290178 - DNA, 327 bp, Zea mays
cagattagagccttctcctactcctacatacgttgatcaatggctctcctgcgtgtcgtcagcacggctgtactgcctgccgcctgctgcgtcgtcctcctcctcctgtccaccaccacggctccggtggccatggccggttcgtcgcgggatgactgccgcgcgttctgccgcccaaggtgcgatggctacggtgcggatttgtgccatgctctcgtcaacggtttcccgctactgcagaacgtcctcgaggcgacgtgcgcagagcgcttctacgaactgtgtcgatccatctgcatgaacatctgcacggccaacaccctcact

SEQ ID NO: 290179 - DNA, 334 bp, Zea mays
tggtgcacagacgagttgccagtcatgaacttttcagtcttgtagaattgggaaatttattgggaatggttgaacaagtggaacgccataaaaatgtgacagtgaagtatgcactacactatgatgtttggtttacgaaatgtaaggtaaatagcaatagtaataattcacatccgagtatcagtggtaataagtttgtatagtccggtatcaatttctagtgtggtatctgattatggttggatttaaataaatatgatttaacgttaaaaaaaaaaatgtctagagtaatgtgtcggatgtattgtgttgagttgggtaaaaatgaaggggg

SEQ ID NO: 290180 - DNA, 419 bp, Zea mays
aaggcaccttggttaggctgtttgcccatccatccatccatccatcgtcttgcacggccaagaatcgagaactcacgcagcgtcgcccacttgccttcttcctcctcctcccgtcgtgaattccacgctggttcagggatgtcgatcgagctcctgacgaaattgctcacattgctgttcgggtatgccatgccagcgctggagtgcttcaaggcgatcgagcagcggcccggccgggcagatcagctccgcttctggtgcgagtattggatcatcctagtcctcctcgtcatgttcgacgaaattgctggggttctcatttctaagatcccaatgtactacgagctgaagctagccttcctcgtctacttgtggtaccagagacaaggggacggacacgtgtacgagacttctccagc

SEQ ID NO: 290181 - DNA, 326 bp, Zea mays
cgaggatggcgacgtggaggtggagccagatgccagagctcagtatgaatcatccggtggcgtgtatagtgtgactaatggacgccatggcgttttgcgcatcacgcagcgtactgggactctgggaggatgtgcatatcatatgtgttctctatttctctctctcttggagtcaaagtaggacgaacatggtgacgtgagtgtccgcttcttctactctgggcggctggccctctcgaagctgcgggctgccaaaaaaaaagccttcagcacgccagtcgtacgtccggcactgcatccagcaatagtgcaataccagcatccat

SEQ ID NO: 290182 - DNA, 311 bp, Zea mays
gcggacaccaaccaaacgaatgtcccctccacaagcgagctctagagccacgcgcacgaattcgccctcgcgcgctgtctcgcagcgcgcctcgtccctccctcctggctgtccggcggcgggacggaccggatcccgctccatggcggagggcttcgggcggtgggagtcggatctgctgttccccgccgccgaatgcgtgcaggattccgccgatagaatggagggtgtctaccgcttacttttgcatgaaaggaaagttatgcaggatggtacttctgatgcaaagttccatgctccaatacaatatg

SEQ ID NO: 290183 - DNA, 350 bp, Zea mays
ctcctggaacgccgccccgagcacctggcagttcggccagaccttcgagggcaagaacttcagggtctgatgcatgggatgggatgggatgggatgcgacttgggagaagaagccaaaactcttttctttctttctttctttctttcttcttatacgtaattattactactcactcctgctagcgtactactgctactggagtactaagcgcgtgttagggtggtgggtgctgtcaatgcctgttttaaggtcacgccttcccgccttaatcccaggtccaggtccaggtcctctctgaaaaaaatggagccttttcttctgaacaagaggtgtggatgggattctctaa

SEQ ID NO: 290184 - DNA, 344 bp, Zea mays
gtgaaccactgcagggcatcgtggacgccggcggcgcgcggcacctcgtccagctagtgtacctcggagaccagctgcagatcgaggcgctcatattgctctgctacatcgcgctgcatgtcccggagaacgaggaactcgcgcaggccggcgtgctcgccgttctcctgtgggcgtcgaagcaggcacacatggtgcaggacctgcgcgttgaggcattgctcccggaagccaaggctcggttggatctgttccaatccagggcatctaggtgatgattgcagcaaccacgggtgaggatgaattttgctttgcacaatcagattaggatcgtgtccattgtt

SEQ ID NO: 290185 - DNA, 312 bp, Zea mays
cttttttattatttgcactttattctttaccttttgctgctacccattggttacttggcagtacatactgatcatgttttgtcatagttgcattctaatctgtagcctaggggatttttttggagtgtaggccctaaatgataggaggatacacagggtcggcactttgcatactgatcagcaggattattaaaactttcagttacaatatgaaatcttatatttagatggcaatgatatcggatgatgtacaatgcaaaataccgaagctatgtataatttcatcatttcaaaaaaaaaaaaagaaaaaga

SEQ ID NO: 290186 - DNA, 276 bp, Zea mays
ctcgagccgatccgacggtagcaaatgaacctcactcagatcggaggggagaaactaggctagttggtctggtgcccctggcactctgcacctgcagtttccttctccgggatctcaattctcatctggcagagggcgggcgagatccattccagtcgcccccattcactccccttcctcgtccgtcctcttcctccctccgatccaccgctctccctacccgccgggccgccgctaccgcgagcgagcggagatctctctcctcgaacggggggg

SEQ ID NO: 290187 - DNA, 266 bp, Zea mays
tctcgagccgattcggctcgagggcatcggtcattgcctctcgcctgtagtttctatgccgctttgaggggtggtggcatttcctcaaatacgttgcatgtatcactgtaactgttcttccccttccgttaccattaacccatgcatctaattacttgtatattttacgttaccgttttcctgttctcaacatttcagattctagatgatggtacgacaaattattttaggagcgctttgacataatttaaagcttggaagggagc

SEQ ID NO: 290188 - DNA, 350 bp, Zea mays
gtgcttttggaggttgtggatcatgtggattgaagaattagaggttggattagatgtggggttaggttttgatctcgaatttaatttctgcagaatggcagattcgacagtttctgttcataccagttttccatgatcttagtggcctcaaaaaaaataaaaagtctatatatgagtcgtagataatttgtagatctttccgtggccgcgaagaacacctcaatcggacatcagaacagaaagttatgacagtttgattatagcagtttttcagtctcataattctgtgcagaatctgttctcttaagagttaggcaattttatcaatagaattaaactgtgggttggta

SEQ ID NO: 290189 - DNA, 280 bp, Zea mays
ccctgggtagggattctgttggtcgattgtactgggtgacaggaagaccttgtaagcgtcctcgtcttgttgcagatggaagcgtgatgatacccaaggacagagacattagcatggttacaagccattctcagtcaacattcgatagaggttggaatgcggcatcacttgttgatttatgaatctgatgaagatatgaagtgtcttgttgactggctacgggacattgatccaagggagaaggatctgaaagactctatcttgcactggcaatagtcta

SEQ ID NO: 290190 - DNA, 286 bp, Zea mays
tcggcgcgagctccaacctacgatggatccccaggcaagtcaacctctcagatctggtgacaccttagcccattaactcttcatagggtcatggcgtgcgctctcttggatccaaactcttcttctcagattcagtgacaaagagggtaagtagtacggactctggttgcagtgacggcgccagatccctagatccggcgacggcgagggaaagtgacatagacttcagtggtagtggctctagattacaacacaccccgagcctcgtaaccacatagattcattg

SEQ ID NO: 290191 - DNA, 253 bp, Zea mays
gttctacaaaaatgattcatacctactgaaaaccgttctcactctatctaattccttctatttttttcttctctctaaatgaaccctcacccagcattcaccatacgcagtttattttagcagttgatatactatatcaaactaagaaccatgttaagatagttctctatcatagcaacctctagcatcgtagggatctattttccatttttaacaatcaggttaatagcttgagcttgggtgccttaaatgc

SEQ ID NO: 290192 - DNA, 253 bp, Zea mays
atcctcttctccaacgacggtggcatggatgcccacgtcccaacattgtaggtgcaattcccaggtcatactcatcctctccgatggtgcagggtgcggcacatgtgtcgcccccatccacttcatctattgactattccatcatgttcacatcctccctaactcccctctcccgtggctccacctcatcgtcttctcacctaccagggcttatcctctccctgctatgaattcggaagcctaccacatttat

SEQ ID NO: 290193 - DNA, 261 bp, Zea mays
ggactgaggctctgaggatgcaacaccttaaagaagacattataagacccatagaagacattaaaaaagtcatatttaagacactttatacgtgctaagagtccaacacatcaagaagtagaagtgagatacaaagctacaaaacaaaagtgaagttgacaaagttgagaggaagggctgactgaattggaagtgtttcacaaaacaaaagtgaagttggcaaagttgagaggaagagcaaaggcaaggtgctcacaagtg

SEQ ID NO: 290194 - DNA, 262 bp, Zea mays
gcaagatcgagatggcatgcttcctttcagttcccttctcgagtcgagccttttattgctgtggttgatctgacagttcctgtttcgtgatcatatgattgatatcatcagatctctgatgacatgaggcctcacccgatcgtggtcagcgctctgacgatggtttgtgctgttgcgcctagttggaaggtcatacccacacctgatatcattgacaaagtctgcaaagctccagtgatgaggaaagaggtcgttccaatcc

SEQ ID NO: 290195 - DNA, 263 bp, Zea mays
gggcgccgccgccagcgggctgcactgcggctgcctcaggtactccgcgtaggggtacagccctactacgccgggtgtgggcagccgagcgccatgttccagccgctccggcaacagtgctgccagcagcagatgaggatgatggacgtgcagtccgtcgcgcacagctgcagatgatgatgcagcttgagcgtgccgctgccgccagcagcagcctgtacgagccagctctgatgcagcagcagcagcagctgctggcagcc

SEQ ID NO: 290196 - DNA, 279 bp, Zea mays
ggcagagcaaaccgggcctccatcgatttggagcagatggatttattgggaaatcacaacgaatggaggctcgtgatggtgttgaaccccgattcattgacgtttacatggagggacaccgaggtccagatccagatcatcctgaagttttatgtgatgacagcgcgacagaaaagctgactcgttatgccgaggaggttaggaggaaagcaggctccgatgatctagattggagggaggcacctttcgatccggatgcagcatatgtgctggtggtgg

SEQ ID NO: 290197 - DNA, 275 bp, Zea mays
atttgctagcagatcatcttcctactctttactttatttattgtttgaaaaatatgtcctgcacctagggagctcgtatacagtaccaatgcatcttcattaaatgtgaatttcagaaaggaagtaggaacctatgagagtattttccaaaattaattagcggcttctattatgtttatagcaaaggccaagggcaaaattggaacactaatgatggttggttgcatgagtctgtcgattacttgcaagaaatgtgaacctttgtttctgtgcgg

SEQ ID NO: 290198 - DNA, 252 bp, Zea mays
tgttgctatcaacttgtatcctaccaaaggactaaaaggagcttttgataaagctgaggaaatagtcctgagaacaccaaatgcgtatatgtttcagcagttcaacaatgaggcaaatagtgagatccactttcaaaccacaggcccagaaatatgggaagacacggggggttctgttgatatacttgttgcaagcataggaacaggcggtaccattagtggcactgggcgttacttgaaaaggatgaacaa

SEQ ID NO: 290199 - DNA, 176 bp, Zea mays
tttaactatacgaatacgacaaacagaaacatggagcgtgatgctctgaaaagacaagataccccgatgcccattagaaaggatatcttaggaaaagatgagccaagagatggtcaaagtaatgttccaatgcttccaaatccccatatggtgtttcaagttggagggaatgctac

SEQ ID NO: 290200 - DNA, 279 bp, Zea mays
gtcaaagttacacgttcggtacgtgttcccttttccttgggctcttattctgattatgctgattgcgatgttattcctatggaagcatgctctttgttacttggtagaccgtggaaatatgatactgatagtttacatcatggtcgttcgaatcattattctttcatgtttaagggtcagaaaataattatccatcccatgacccctgaccaaattataaaagatgatcttgctcgggctacaaaaactgcaaagcacatgcacctaagccatccaccc

SEQ ID NO: 290201 - DNA, 272 bp, Zea mays
gggggggggcgctccatcagcatgtgttgtggagctcagaagattgttgtaaatttagccagtcagtgcgcacagtgaattttctgaactagttgtggtcttggtcctggagtagaagtgtagaacctgtagatttcgactgctagagagaattagggattctgagagccgagaacaaatgcctgcgaccgattaataataagttgtggtcttgttggagtaaaaactgtagattcccacagcttagagagagagcatggaactcggtagca

SEQ ID NO: 290202 - DNA, 241 bp, Zea mays
ctcctctctcaattcttgcagccaccaaaccctatcagcccccctcaatcccctcctcccaaggtgccaatccttgccgctcggatcatcgtctcatggtgcgaatctccaatcgttttggtggagggaaggagggaggaaggaaagggggagaacccaaggtggtggacttccggatagttcttagggattttgcccaaacttcggtgaagtggggtgttacagtcatcacggggaacaa

SEQ ID NO: 290203 - DNA, 274 bp, Zea mays
catcagcataaccacttgcatatgttgatgaatcgattggtattttgagacttgtattatgtctcctttgaggaggttttattttcaccaggtacactacattatttgatgatcgtattatggttatttgatcactgtattttattatttgatcgctgtattatctggacaaattacgaatatgcctactactgtatcataattacttgttgcctactctatcgacctttgcaaagattgctactgttttgttgtctaaaccacttgctgtcaa

SEQ ID NO: 290204 - DNA, 280 bp, Zea mays
cttacaatgtatcaaaaagcctcgtgttccttatgacatcccaaggatgggtgagtgttcaaatcaaaacagaatgacatatggtttaagtaatggattgggcaatgaagctagtaggaacctgaatggatgctctttcttaccacaagctggcatgccaattttcattcaacctacttttgatggtccttcaaggatgataggaagaaatgatggcgtgattgttcctactttgactaatgcaacacccatggctggtgttgatgctgcgaaaaagatg

SEQ ID NO: 290205 - DNA, 351 bp, Zea mays
gccaaatccctgatggttatggttctggaagaggctatggtagagggatgggtggaagaatgatggctggacgtggctttggacgtgggctagaacgcaggacacctcctcgaggctatgtttgtcacagatgcaaagtacctggtcattttattcaacattgccccacaaatggggatgctagatatgatgtgaaaaggatgaaacccccaactggcattccaaaatcaatgctaatgcaaactccggatggttcatacgcactaccaagtggagctggtgctgttttgaagccaaatgaagctgcttttgagaaggagatagagggcctacctaccacacgtcctgttg

SEQ ID NO: 290206 - DNA, 240 bp, Zea mays
aacacaaaagaaacatcctggataagggcaagtgtgctaaagttttttagggaacttccttcccaagatgacgatggtcaagttctccctgtcagcggtctctggaacacagcgatggctcacccaaatgatcccgagttcatcaacttgggcatatttgaatgcttggcagctcttatatggaaagggttgaaaaataggcgtgggcttgcacatgatcagaatattgacgtcccatat

SEQ ID NO: 290207 - DNA, 260 bp, Zea mays
ctgtgtctagcttcgtagttccaatttccacaatcgaaccaaggcgcaggtcaatgcattagacaaatcctttgtacaatgtactactaaccctaaacgaaaccaccaaataaagaaatcctcgttagaactaccaaaatcggagcaaatgagaggatccgggccaccaacgcatctaagaaagagatgaatcgatcgaaccctaactggatcccccagccagccagcagcaggagcaaccccgatccgaccagatctgg

SEQ ID NO: 290208 - DNA, 242 bp, Zea mays
ctcgagccgctagcacatcactgtttggcatacttgatcctgtatttttatgtgtttgttcattcctctaagctatagatcaatgttttatgatgctagtgtatctctgagctatagaccaatgttcggcctgtcacgacacatttaagccaatttagacctctaatctccttttttttctaatttattagtttagcaatggatcctgctattgcacatcgtcgactaatttcaaaacgtaa

SEQ ID NO: 290209 - DNA, 278 bp, Zea mays
caatgctcgtcactgctaatccaagtaagaatcttttcctcttcttccattggttccagctgaatcatcctggtgtgtttctgagcgatcttatggcaattgatcgcttcattacaggctctgggagctgtgtctttgcatcatcattgccatcgtcgtcaaggtgggaatctgatacctgcattgtgataactaacacggaacctttgtgtctcttgcaattgtgaatgtattcatatgtgaaactcatgttctgtatttgcagctctactgttgga

SEQ ID NO: 290210 - DNA, 255 bp, Zea mays
ctgctctgcgtccccaacggctcgcgaacacggcggagctcctgtgcaagttctcaggtgaaatttccgcgcccgcgaagtcaggcgctgtcgcgtgggccacccaggaccgcgtctcccccagccgccgcgagataccagggcatgatccgcttctaccggccgactccttcttccccataaaatccagcacggcgacgctggcgcaggtcatgccatggcgctcctacgtcgcgcccttgcgccccctcctct

SEQ ID NO: 290211 - DNA, 276 bp, Zea mays
agttcgagcaagacggagaataggcatggtcaccctagcaagaaactagatatcgaataatgattattatcaaacttcataccagcagtatatatgcatggcacatgcattgcattgttaggatattgactgtttcaactttcaataaatagtatatgcaaagaacactgccaataaaataggtttcataattgttctttcctagtcggaagggtcataaggtttccttctcattgatctaaacggacattcgagtgttggagccgccggcggaaa

SEQ ID NO: 290212 - DNA, 273 bp, Zea mays
tggatttgagccatcatggttaatgtggagctgttcaacgacgcagacattggcatttcttccccccaaggtcccgcaatgtcttcaccgcctagttcaagttccttaccactagttcccttaggtggtcagactgctaataaggacaatgattggacatcttttgtactaagtgatttttggatatgaggaagggagacgtgatgttccaagtgagatgcagatgtattctcaactaggactgaatgaagaggacaaggcacaggaaaatat

SEQ ID NO: 290213 - DNA, 303 bp, Zea mays
gcaacttccactggacctcaagccgccatctcgccacatgacctgattgcagtcttgcaggcacagcacagaagcagggttgcgccacctctctgagtgtcataggttggtgcataggcacacacacacaggtagccatggcatcgcgtaagcttctcgtgggcctcacagccaggaggcagctacaatcccgcacccagcaactattctgggccacctctctccctgaagctaccacttctcggtccctaatggtggctgctgcaatggcgcggttatcggacaggtcttcagctcctttta

SEQ ID NO: 290214 - DNA, 436 bp, Zea mays
cccggccgtcgacgtcaagcccaagccggaggaaggaggtgaagctgctgatgcgaagagcgcgcaggcgcgagagcaggtggttgtgctcaaggtatccctgcactgcaaagcatgcgccgggaaagtgaagaagcacctctccaagatggaaggcgtgacgtcgttcaacatcgacttcgcggcgaagaaggtgacggtggtcggcgacgtcacgccgctgggcgtgctcagcagcgtgtccaaggtgaagaacgcccagctctgggcggcgccgccggcgatagccgcctgaaggaaggacgagaaggaaacgggggaccggaaaccgaatcagcagccttttagcaccccctatccgttgcggttggccgtacgtggctggtgggaaggggaggaagaggagtgcgtgcgtaggcgtactaggagaaggtgt

SEQ ID NO: 290215 - DNA, 286 bp, Zea mays
cctgacctctacggggaatgggattttgaggagtggaggaaggtgcatttgaagtactaccttgagatgactcgggaattcatgctggaactcgggctattttaaacacttctctggtttgtaactacacaggagtcagaggatccttgcaaaactaccatagaataatttgtgtcttgtgcccgacgagttcttgctactatgctgctttgggaacatacacatgttatttgagccatttagtcatttggatgtgaacaaatcgattcttctcttctgcgcaaaa

SEQ ID NO: 290216 - DNA, 263 bp, Zea mays
agctcacggcctcacctcacccacccgcccgcctcgcctccatccacagcgccacagcggccacgccatctccgtctctctgctcacctccacttcttccgttcttcgccaccgtctccgtccttgacacgggcgcacccgtccccctccgacttccccgtggcctcgtcccgatccgtagtcaactcgaccttgttcaagagggtgagcccgaaccacggcgcgcgggagggctctttttattttgacccaccggaggacag

SEQ ID NO: 290217 - DNA, 266 bp, Zea mays
ggcaattgctagcactcgtacaagaagcaaaccccgcagagatcttaattactagctagtcgcttaattcgatccttcacatggagcatgtggcaaggctggcatcgcagcgtgcagtggtgatcttcagcacgagctcctgctgcatgtgtcacactgtgacgcagctgttccgcgagctaggggtgaacacgatggtggtggagttggacaaggacccgcgggggaacgagatggagaaagggctggccaggctactgggccgc

SEQ ID NO: 290218 - DNA, 334 bp, Zea mays
gttagagttcctgagctgttcaggatccaggctattgattcagagtggagagaaatacgtgggccatggttaatctcttgttcagctagtaatcgccccagcagctcctgggactgggagggagctatttttcatgtcaagggcgtatctgtaactctgtaagctttttttttcggcctttgtgcactcagcaggcctgtttgtttgagagagagaaaaaaaaccacaggtagcagcaagaagctgaagcatatcacggctctgactaccccacactgtcactgactgactctgcatctaacctgtacgcgcacgcacgtgtttcgtggttctg

SEQ ID NO: 290219 - DNA, 404 bp, Zea mays
cttgcctctgataagcgcagattacggcgcatctgaaggatgggctggtgctaatataaaccccacacttccacctgaacaggtgacatacgctgttctccctcagaccggttattttgagttcattcctttggaggtggagaatagtgcctcctccattcactacttagaatcagaaccagttggcctgactgaagttgaggttggtcaaaacctacgaagtcgtgataactaccttcggaggtctataccgctaccggctaggagatatcgttaaggtaacgggcttccacaacgcaacaccggagctccggttcatctgccgcagatccctagtcctgagcatcaacatcgacaagaacaccgagcaagacctccagctggccgtcgaggaggcagcgaac

SEQ ID NO: 290220 - DNA, 197 bp, Zea mays
ggaaagagctatactatctatcctcattgcctcttaagtgcaaacaaagttttttttggcatttctattacatctggtaatgttcctatagtctaatgctagctgttttgaattgtgaccttgatttgccctaagaaagataagggtgcacatagctctttattgagtaaaagaaacagttaagagaagcatacaaa

SEQ ID NO: 290221 - DNA, 194 bp, Zea mays
gccgggaagctggggaccagtatcgccggcggcgggctctcttaccccgacctggtcatcaggaccagcggcgagctgcggctgagcaacttcctgctgtggcagtccgcattcgcggagctcttcttctctgacgtcatgtggccggattttggggaggacgagtacctcggggccttgcgttcctaccagac

SEQ ID NO: 290222 - DNA, 265 bp, Zea mays
ttctaggtctgcatttcactgttttgccagggcactaaaagatgcgactgctctgtgcaagcaacctacagcaccgatcattggtcattattggaagctttgcttgaaactcccaagcgaaccaaggaaaaataagataaaatcaagagtatgttgtgtttggaaatctctggcattttggcagggtagcttatccatcatcgtaaggagggccccaggtctgtacagaattagggggccatggggctgatgaaatagaacatgt

SEQ ID NO: 290223 - DNA, 414 bp, Zea mays
  unsure (1)..(414): unsure at all n locations
tccagttccaagtcctccggggcgcggaggaggctcanatcggcaatcgccccaccccatcccatccccccccgccccatgaatatcctagcggctggtccacgaatctaggagcccccgacctgcgcgtccgtccgtccgtcctccctaaatccggccacgcccgccggtgaggagaggcgaagattgatcagccactcccgaatggaagattcatcggcctctgtcccggacccggacgaataataacttagttctactaagtttctcgggggtcgcccttcgcttgcttccgcccccttgttgttgttcctttgtccggctctatctgggtcgctcggcggctgttcgtccgtcgcccgtaccgccgccgccgccggttggttggattagtactccactcccgcatcgttc

SEQ ID NO: 290224 - DNA, 259 bp, Zea mays
gcaacttgtagtgtttgttaggtactagagtaactggattccactactcaacacagaaatgcatatcatcccattcatcaaatcttagccatgctaagcaacctgactccctgctatctaactaccatatcatggttgctatcactattttttaaagcaagaaccagtgcattaggtggagtattccttagtaatccaattttaggcggtcacatagtatgaaatatcatgaagcaaggattatcatagataatctttc

SEQ ID NO: 290225 - DNA, 256 bp, Zea mays
gtgtgttcttagatggggttattctgagatgagggtcttagcctacagttctttttgaaatgactcgtgctttgtgttttaattatattcatcttttcagggtaaatttgtttttctgagtttctcgtaatgctcatttttacatgctgctactagcttttttttttaaaaaaagtaaaagttgctgctttctaaaatattaattgccttatatttgaaagtgccattgcaatcgtaagtagactatggatttcct

SEQ ID NO: 290226 - DNA, 202 bp, Zea mays
attaggaattctgctcgaagggagatgagtctagttctgtgtatctgattttgaaggtggaaccaaaacatcagggtgtaaggctatgtcccggaaaatgagtcacatgcgagctcgcaaacaccaacagagtccacatgcggatatacatatagaactgtgaagaagaataatgtgctttggaagaaactttacatcaaca

SEQ ID NO: 290227 - DNA, 280 bp, Zea mays
accggtagcagctgccgtgttgcacaacattattcggtctctcaaaggagatgaacaatggttagaagatcaggcagaaaatgttcaaggcaatgttgttgatattccagatggagatcaaagcaatgatcaaggcagtgaacaaggcaacaatctcagagacacaattgcacaacaaatgtggatggtttatcaacattgcaattagtgatgcattataataggtttaattgtaattgggattgccattagttcctaaggaattgaagttggaacaagt

SEQ ID NO: 290228 - DNA, 298 bp, Zea mays
gaagctgaggtgctcgaggcacggcgagggaggggagggagacacaaggcgagtgtccctactccgagggcagtccggtgtgcaagcgcatagcatagcaggaaccacaagaaaaaaggcccatggcttccttctcaccgagtggccggatgacacggacggcggcatcttctctggcagcgcgcgtggtcctcgcgctcctcctcctcatcggggtatccggttccggagccacccaggcagcgtctccccacacccaccacagtcggcagctggatgtgaaccacaagaagccagt

SEQ ID NO: 290229 - DNA, 351 bp, Zea mays
gcggctcgaggagcaggcggtcgcagcagaagctccggtgatcagcgccctcacaatgccgagcgtgattcctcccctccatcccggctcgagctccccgcggcagcaatggagaccctcctctccccctccacattgttcacgctaccactccgtggctccagcaggagaccgtctctggctgctagcgtctcgtccaggcccaccgtgtcctgctccagcgcgctcaagaggccacaggccgtcgccgtcgctgcctcctcccatggagacggcgtgggcaggaactggatgtcgttcctgcaccacggcctggcggcggacgacgaatagtgcgctcgtcgacccggg

SEQ ID NO: 290230 - DNA, 152 bp, Zea mays
atgctcattttcctgccatgggcgcagtttccaagaggtggatgtcgttcctcgaaagcaaggagctggtagctgtgaggaaggaggttgggaaacttgaggagtgggtgtatgtcctggttccagatgctggggcgaggggtcgcactggg

SEQ ID NO: 290231 - DNA, 207 bp, Zea mays
  unsure (1)..(207): unsure at all n locations
cgtgccgccacccgccacagcacaaggtcggtccacggcccccctcctccagctcgaaggtttggatcgaagccccacggcaacagcatttcgaatccgtcctagtactcccgcaaagcccgcacagcaccagccagcacannttttanctttctttccccccgcctgcgtccgacgcccgagtcccgaccggccggccccgtcgag

SEQ ID NO: 290232 - DNA, 261 bp, Zea mays
ggcgaccaggccaggccgccgtgacctcagtgtaatagtgagctagccgccgcgcgtcggtgcaacttggcagcgctatagcctcggctgtcgcgcttttcggatggcacccatcattccaactcccacatggacgggaggggagggtggttgagaatgagaaggagagctgcccgcactggtggtgcacgcggctcgctttcgcgttctgttacgactcgttgcgttggtggacaaccgcaatgaactgcatcgagggac

SEQ ID NO: 290233 - DNA, 451 bp, Zea mays
tgccattacaaatgttcttctttcaagtgaaactgtgtttttcgtttttacatgcagtacaggccctaacgctgtagacttatataatgaatcttgcgctccacttctttgggacatgatttaacatttcttaacatttctcactctataacgctttcagatcacttttcatatgttttttagatgcactttttttttggagactaagccctaagggcaacaatggagatgaccagcgtcttggtttatcaagaggaagttaatccctctcaactgaaactcccatcaaatttggggcgtagtgtgtcgattcagttgtaactattatatgtcattttgggttagcaaactgtatctactaatttctcagccttatgccttttgagctagaaacttgtgtaaggatttgttgcactaagtgacatgctgatatttgaactatttaggctgc

SEQ ID NO: 290234 - DNA, 284 bp, Zea mays
gtccgtggcaaagggggagggccgacgccggcgggggggcccgggcagggatggagagagcggtcgagtggacctcgggagcgatgacagaagagagagagcacaacccagcaccagcgaggaaaagcctcgcttctgcgcgggccgtgtgctctctgctctcactgtcatcgcccacaggccaccgaaccgtgatctctcggggggccatgcaacgcatgcagtgcagctagcttcttctcgtgggttatgcggatgtttcatgtgcaatatacttacggctg

SEQ ID NO: 290235 - DNA, 307 bp, Zea mays
tcggaagcggtgacggtggtagggagcccagcacgaaggaccccttcttcgtttggttctatgttgacgaagagatcgctgttgcgcaaggcagaggcgggggcgtacttactggtgccgatgtcagcgtgtcccctgaagatccagacatcctcatctcgcttcaatgatcactgtacaatatcaggataaatggataatgttgagtctctagtttgtagggttcatgttcatctttgtactatctgctttgtctccgaaaacgagaaaaaaaggcaattggaggtgtaaataatgaaatgctatt

SEQ ID NO: 290236 - DNA, 284 bp, Zea mays
ccaagcaagatgaagcccaacatcatctttgtactttccctgctcctcatcttggagaagcaagcagctgtgatgggacaaaaaggtggatcaaaaggccgattaccaagtgaattttcccaatttccacacagacaaaaggcacagcactattctggacaaaaaggcaagcaacaaactgaatccaaaggcagtttttctattcaatacacatatcatgtagatgccaatgatcatgaccagtcccgaaaaagtcagcaatatgatttgaatgccctacataa

SEQ ID NO: 290237 - DNA, 236 bp, Zea mays
ctgggaggctatttgtgaggcatattgtaatgacacaaaccccacacgagaccctggtgtgcttgatgctgtgaaggacgcgatattgcggatgacatattactggtacaattttatgcctctttcgagaggctacggctgttgttggctacatagtcttgctacggtttcttcctggcagcaaacatggatattactgccagcattccacccggtgtccaagttgattgggaggc

SEQ ID NO: 290238 - DNA, 277 bp, Zea mays
aggacacgtgtggccggtcgagggcaccaaccagtccgggacgacgacgacgacgctgttgtacctgcagccgctgatgctgagcatcatggacgatctgcagatgatgaagcagatcgagatcgactagtacctgctgctgcgctccaactggcggctgccctgcctcgagctcatcatgctcatcagtcatcagcaaggcggccggctcggtggtgtaccgcgagaacgcgaggaccctcggccccgggcacgacgacggcaggcgctacaaaag

SEQ ID NO: 290239 - DNA, 269 bp, Zea mays
ggcatcataaaaacatagtacaagattaattcaaaaaccattcgaattcaacagtgcttgacaggacccataacaacatgatataattaaacccaaactacgcgtcgccaaaagagatacaggtgttctgttccaagaaactactaccattgcaacaaaacaaaacaaagcaaaaaggattatcacctagcaagacttcgcattttccttcccgacagaagggagggcatcttacgcctgctggtttgtagacgtaagtgagggcacac

SEQ ID NO: 290240 - DNA, 277 bp, Zea mays
cttatgtctttgtctctctaagattcacctcgcctccccatttctttgcttactccggccgactatctctgctattggtccccttgggcgggcgtgctgccgtcggtcggtgctccagccactgtccctatcggcggcatgatcggatggtaagatgatggctagatgtggctagagttgctgaaagagctaaggtctggactagttggacaaccatattgttgatgtatagatgatgaaatgttaggacctactccatctgatgtactattagttg

SEQ ID NO: 290241 - DNA, 272 bp, Zea mays
gcacgatgggtcgttctcggtgaaggtgcggaccgtggacgggttccagggcgccgaggaggacgtgaccatcttctccaccgtgcggagtaacaccgccggcaagattggcttcctcgccgacaccaaccgcaccaatgtcgcgctgacgcgggccaaacattgcctgtggatcctgggcaacgtgaagacgctggcgagcggcaaaacgatatggcggcagatcgtggacgacgcaaggagaggggctgtttcttggacgccaaggacga

SEQ ID NO: 290242 - DNA, 275 bp, Zea mays
tgaagacttattttcaaagacctgtgtgtcggataagatctgcaaagcttgggtacagtggtaaatgtgtaaagagaaccaatcacctccatggactttaaaactgtaccaagctttgcagatcttttccgacacacatgtctgaagacttattttcaaagacagcacatttttggaaactaatctcttttccgtaatatttcctttattacaatgattctcagaataccaattcaaacaaacccacatttaaggttctttaggattatagaata

SEQ ID NO: 290243 - DNA, 377 bp, Zea mays
ataccattaccatctcttcgtcgaatgcaaacaacaaccgcccggcttgcccgctgtgtagaggcgatgtgatggggtggttcgtcatcggcgaggctcgctcgcaccttaaccagaagagaagatgctgcgaagagagccgctgctcgtacgtcggcagcttccacgagctccagaggcacacccagcaaaagcatccggactcgcgcccttccgcgatcgaccctgctcgccgggccgattgggagaacctgcagcggtcttccgacgtggtagatgtcctgagcacaatacacgcgcagggtcccaacggtgtggttcttggagcccatgtcatcgagtacggggacggtgacgatgcgtggggacgacgacta

SEQ ID NO: 290244 - DNA, 270 bp, Zea mays
cgcgcacagcaggcgcctgtcttcttctcctacggcagcaacacaccagcgcgcaggggccttcttccccatgcacccacggctcccttcctcccatggcacccaggcccgctcctcccctcggccagccagggcgcggtggcccctgtccctgctccttcttcctcctcacgccgggctcctcctcctcgccatggaaaccagcagccatggcgcccccccttctcgagcttccttccccagcgcacaggatgccagtggctcagctcg

SEQ ID NO: 290245 - DNA, 281 bp, Zea mays
cgaggcctcgtggaaatcggagtcggagggggagatggtggtggtgctcgtctttgtcggcgtcgctcttgccatcttcatgttctggaggttccagatgcggcagctggccggcaacatgaacaagaagatcagatagtagtaacaacgcaatgtctccttccttatgctgccgtagttggtgtagctagatacttgtggattaggcacgttacttgtatctatatatttatgagatcttagttggatagttcttgataagtgaaggcaaaaatcaggag

SEQ ID NO: 290246 - DNA, 414 bp, Zea mays
ctgcaactggaacaacgccgggatgcgcgagttcgcgagcgacgtcgcgcatgcccggtggtggaaggtgcacgacaggatgccccggaagctccagtcctactgcctgctgaggtcgcggcagaaggccaggctggagtgggaccggaggcaggccgagaaggccaactctcaagatggccactggcgcctcaacgtcacggacaccaggctcaagacgtgctttgagaagttctgcttctgggagagcatgctctggcattggggcgaaaacagtaacaggaccaagagcgtccccatggcagccacgacggcaaggtcgtgatctgtagatatacgaacaccccatccccatatggcaaccatacatgcatagcaatagcttgtataggtagctatgctttagttcttcgt

SEQ ID NO: 290247 - DNA, 282 bp, Zea mays
ggtctcgcgagcaagcctcgccatggatatctgcaccagttgcttccaagccagatattagagctgcctactacttgcgtcgcgcggagagcgggttgggaccagaaacaagagtagagcaagactcctatcttttttccacgcgccagtcttctctgaaccggtgaacccattcctcctcctcttcctactcaacgccacgatcgaagaggagactcagtcaatctcgccttgctctcctcttcgacccatcgtcggttcctgggatcagcatcgacgagc

SEQ ID NO: 290248 - DNA, 263 bp, Zea mays
aggaactcaggatacggatactgttatgcagctgtgcaggcagggccacagaacaagtttgtgtgtacacagactcaagaaatggaaaacaaatgcttgttatttgggcaaacaacttcttgttatttgcgtttgcacaccattttgagttgatttcatccactgaagactaaagagtgaagtaataaggtcgtgtacacttgattttcccctcctctggttggttgcacaggaccatgatctggtcgttgagccgaggtcat

SEQ ID NO: 290249 - DNA, 259 bp, Zea mays
gcgagcccaaggccgcgcatctctagaagagcaagagaagaagagctcagctgctgctgcggtgctgccggtgccgggcggagtttaacatcgcgccgcagctaactcaacgcagttaagcttctcctactcctagcttagccaatagccatggcgctggctagccaggtcgccgctaaccagccgccgccgcgacgctctcctcccccgcccgccgcctcccaagagccagcagcaacgctctgctgctgctccagcc

SEQ ID NO: 290250 - DNA, 301 bp, Zea mays
tgtatgtatgcgttctgtgatgcagtgctagcatcacctaatcagacacacatggcctgcacacaacattcaatatgtataccgatcgaccacactgagtgtactacaagctagctacgtacgtgcctctgtcgaccgaccttatctaacgaccaattgatcgggtacagtacacgcacgtacgtacgtacgtcgaggtacggctactccaaggacacgtagtacagagcacgacacatgattggttccatgtagagtaatcatgctgcagcgcggcgcgctcccaggatagagacgtcgc

SEQ ID NO: 290251 - DNA, 285 bp, Zea mays
cggctcgaggggggtttcaggggagcagagatagaggctcttttggtggcaacagaatttcagagaggtcgtccgcaggacagaggtggtgagactataggggtcagatttttttgttgccatcgtttcttcgaaactgcagaagaataagttatgttcctcttgctacttgactcccattttgtttggcttggaagaatggagagcatcgtgggcaatacagattacattgcacgaacctgttaattaccacctttatatggtgtttttcttccatttcctctt

SEQ ID NO: 290252 - DNA, 282 bp, Zea mays
gaaaacttcagttttttccaggtttctgtagcataacagcaagatgtacaactgtcagttttgtgtgtcaccaaacagcaacccagaagggaaagatgtagttatatggcatgttacattttcagtgtacaggctaaacagcttacagtgtcttgtagtgagatgtaactgtaaggtcggggagcttagtgaggtcagggtgggccatgcgttcccctgcccaacataaccaccattgagcaaacagtattttcattaaaaaaaaagaaaaataaaaaagaa

SEQ ID NO: 290253 - DNA, 193 bp, Zea mays
atgtaaggttctccatttctttggggggtgagtgagggcactagtaccatggtgtgcagtggttgtgaggttctattgttgttgtaactacaagcaggtaaactgttctggacgacaccacgatgtatatgtacatatgaaatgcactgctgctgtgggatgtatgcaatgagccaatgagtaggtttatctc

SEQ ID NO: 290254 - DNA, 276 bp, Zea mays
tgaaacagttgatgttgatccacctaaggaaagtgcagcagatgataatgagagatgtgtgggtgaatcatcacctggtcatttggaagatcagaagggagagaatgctggtagatcaagtagttctggaagctctagcagtgactcgggttcatcctctagtgatacggacacagatagttcatcagcagatggttctgatgctgggcaatcacccagaacgtagcatctataagccagatgttgatgggggcactggaaaccataacaccttag

SEQ ID NO: 290255 - DNA, 269 bp, Zea mays
accagttgatacatgtcttgtgacttgtgaagtgtgttcctatctgcatcaccttccttcgccttgcaacccatttcgcgagttcattcatacgaatggattattctaatttgcgtcgccaagctgcatccatgaaaaagactctctttgatcaggggtacctagatgagcaattttgccaggtggaagacttgcaggatgaagctagtcctaatttcgcggaagaggttgtcactttgtttttcaaggactcggccaggctaatatca

SEQ ID NO: 290256 - DNA, 186 bp, Zea mays
ctgctggtaataaataagagagagagacagagacaacacgaccgaaactgaattattcagagcggtgcaatgtgttgatagacgggttgttgttgtacatgctgatacatgattgtatactgtggtctttgaacatacattattatcgaataagaatctggaggctctgtttgaagtaaaagagaa

SEQ ID NO: 290257 - DNA, 297 bp, Zea mays
ggcgctcttcgcgcgcttcgaccgcgacggggacggcgccgtggaccgcgacgagttccgtgccgggatgagggaggtcatgctcgccgtcgccagcggcctcggcgtgctccccgtgcagatggtggtcgaggaaggcagcctcctcaagtgggccgtcgacagggagctggccactaccatgccagcttgaccagctcggctccatcagctagctgcctgacagtgtgcactagcgctagtgtcacctctagctgaatgggagtgttatcacctatgtatgtatgtaaccgtacg

SEQ ID NO: 290258 - DNA, 177 bp, Zea mays
gatcctctttctcaccgcactgcacacatggacgcgagccagggcgtcctcctgtccagctccctggtcggcggcgccaagggctccgcgtcatggccggagctgctcggctccgcgcactgggagggcctcctcgatcctctcgacctcacgctccgccgcctcatcctgactctg

SEQ ID NO: 290259 - DNA, 291 bp, Zea mays
ctgacaggttcgagcatggcgtgtccaatgccgctgccaaacaccccaatgccctgctgtccttctcccaggggcctagggcttgcatcggccagaacttcgcgatgcttgaggcccgtatcgggatcgccatgatccttcagaggttctcgtttgagctctcgccaaactatgtccatgcacccaaggaagcggtcacccttatgcccaggttcgggcttcccatcatcctgaggaaccttcacgattgagatgtgctaccataaatatatatacgcactgccacttcct

SEQ ID NO: 290260 - DNA, 298 bp, Zea mays
gacttacgagcacaagccctcctcccccggcgctctccactccgccatgcttccgaggccgagccaaagaagcatcttctacctcggggaggagggtggcgacgaccacagcgtcgccgaggagcatgtgaagaacatcgatactaggcgcaccacggagcgcgccaagacgacggctgtcaatggcgaaagcgagacgccgccgtggacgcggtcggcgtcgggctacagatcctggtccagaaccgccaccccgccgtgggccctgcagcagcttcttgagcgcctgctcccgctg

SEQ ID NO: 290261 - DNA, 177 bp, Zea mays
cgttgcggtgctctccgcgtacgtacgcaagctcgaagaggaggctggagccgcctagtggggttgtgaaatggttgtcatctccctttcactccctactttctgtttgtagaattctgtgtacctttactggctcccagtcacatttgaattgaatcacactttccagcttacaaa

SEQ ID NO: 290262 - DNA, 281 bp, Zea mays
tagcgccggccgtttcagggcaagcggctggtgttcgtgaccaacaactccaccaagtcgaggacgcagtacggcaggtcgttcgagacgctgcggctgagcgtcgacgagggagagatcttcgcgtcgtctttcgcagccgccgcgtacctgcagtccatcgatttccccaaggacaaggaggtgtatgtcatcggagaggacgggattctgaaggagctagcgtcggctggatttcagtacctcggtgggcccacagacggagacgagaagatagagct

SEQ ID NO: 290263 - DNA, 382 bp, Zea mays
agcttctgcagcccttggtctgcagttaaggccactagttgatcttacttgtggagcacttgctcgaatcattggaggaaaaacacctgatgaagttagagatattttccatttaccagatgacttaacagaggaagagaaactggagccactaaaaaatttaaatgatgatcctacaattcgtttattgaaccgattgtatgcaaagaagcggatagaactgcaggaacgccagaaactaaaggatgttcaaacacaagaagaacaaaaagacgagagatctttggatgagttactttgatttataaatggagatggagattccagaggtgggaaagcttctaagagtaagaaaaagaataaaagaaggaaagatcaagct

SEQ ID NO: 290264 - DNA, 283 bp, Zea mays
gtgccttgtgcgacagtcgccagcctgccccgcctgccggcccggccgcccgcctgcccgcggcactgagaagacgaagctccgggctccgggacgccgagcagaggggaaaggatggaggacaaggcgtccaacctagacgccgtgctcaaggaggccgtcgatctcgagaacataccgatcgaggcggtgttcgagaacctccgatgcagcccgcaggggctcaccacggagcaggcggacagcgcctcgccatcttcgggcccaacaagctggaggagaa

SEQ ID NO: 290265 - DNA, 274 bp, Zea mays
tcgctgtccttctccttcggccgcgcgctgcagcagagcaccctcaagacgtgggtcggcaagacggagaacgtcgccgccgcgcatgccacctgcgtcgtccgctgcaaggccaactccgaggccgcgctgggcaagtacgccggctccggcgccggggacgccgccgcctccgagagcctgtacgtcaaggggtacaagtactaaagccgccactgctgactgtgccgacccaatccttgtgtcccacgtcgcagcgctcggactgtgccga

SEQ ID NO: 290266 - DNA, 334 bp, Zea mays
gctagcttatgcgcaccatggggtcgatcgcgtctgaggtatgtcgatgacggaaggcccttttggcaacatatagtgagctcatctaccggctgctcagatctacagtatttcgaggaactgtaccagtactacacaactgagaaggcctggcgtctctgcgacccagacgctggacgtgttttcgaggcgctgaggagggctggcgtcaaaacagccatcgtgtccaacttcgacactcgtcttcggccgcttttacaggcgctgaaatgcgacggctggttcgacgcattgctgtgtctgctgaggttgcagcagaaaagccgaaccccac

SEQ ID NO: 290267 - DNA, 242 bp, Zea mays
cccgaagacgggctcgtcatcagccacggcgcgttccgatgtctacggcgtctcgagttctgtaacgtagatggacctggtttgatgtttgcaggaggcgttccaatgttggaatggctgaggctcgggttcgacgcggatagagcgcaatcgacatacggcggtctggaggttggcatccagcgcctctcgtctctcaaacatgtcgtgctcattgtatggctggtttctgaaggcggtga

SEQ ID NO: 290268 - DNA, 260 bp, Zea mays
tccaggcgtgatgttaacgtatcctatcgaaccatctaattttgaggatcattggtggaattcattcttttggagagctttcacgctaccatgtggcggtagccgtggactccagcttgaatcaagttttgcatgcagcaagctgtactttagattcttcatacataggtcacgagagtcgtttggagcttgggtcatcgcttactttcccatactactggggggcttatttggaacagttttttacacaaaactcctga

SEQ ID NO: 290269 - DNA, 272 bp, Zea mays
cgtctccttcctcggcccactggctgagcttggtagggagcgtctggctccagaccatcaacggccccaacgccgacttcgccgtctactcgtcgcagctcaaggagaccaagggcatctcgcaggtgcagctcaacttcctcgccttcgcctccgccgccggcaagctcttcggctggctcgcgggtgtggccgcgctgcgcctcccgctctgggtggtggcgctgaccggggccacgttcggcctcgtcgggtacggcgtccagttcctg

SEQ ID NO: 290270 - DNA, 231 bp, Zea mays
acttctatagtgcctgacgcgattcaagtttgttagctctagagctgataggatatcctcgtttactttgcttagttctcagatgctctccgtctccgatgaagtgcagcaactgaaccggatccgaagacgttggacatgaacaggttaaaatttggcatatgtggtctaagaagacgctgagatgtttgtagcgaatctcaagttcaatgcgaaccctgttgcctatgt

SEQ ID NO: 290271 - DNA, 269 bp, Zea mays
ctcgcagacatcttatcccctcccgatcgaggcccccgtttcctcctcctccggccaccgcacctagctgtcttaacttgccgtatcgcagcctcacgcccatggctaggaagtgctctagctgtgggaacaacggccacaacgcgaggacctgcagcgggcacggcgccgggggcgggggcgtgcggctgttcggggtgcagctgcacgtggggtcctcgcccgtggccatgaagaagtgcttcagcatggagtgcctgtcgtcgtcg

SEQ ID NO: 290272 - DNA, 275 bp, Zea mays
agggaagtcgaagacgctgaggatactggaggcgaacggaggaggagcgggaagggcacgctgctgtcgctgcggcaggtcggcggcggctggctggcccaggagcccgacgacgtgaccccggaggacgtggccttcacgaacgtgtccgagagggctcccgacgcccgtgagctctcggacgccaagttcgcgtgcctctgcgtcaagcacgtgaagagcaacgccattgtgatcgccaagaacagttgcatgctgggcatgggcagtggcca

SEQ ID NO: 290273 - DNA, 182 bp, Zea mays
gtacggtggttcgccggtgctgggtcgctgtcacatgcagtcccgtttcgacaacccgtccaggcccgtaagaggtaaacagaatgagtcaaacgggcgcctcccgacgcacgcaacacaccgaaaccattaacggcagtagcatttgctctcgcaccaaacatccaacgagcacaggccta

SEQ ID NO: 290274 - DNA, 221 bp, Zea mays
gcggctggttctctctgccaccgcacgagtcgcagcagagagggaaaaaccctagcagcctccctccgtcccaactcccaaccccgcgaccccatggccgcatctcacggcggcggcggccccggcccgatctccgcgcaggcggaggcggcgcttggagaggctatcaggctggtgttcgggcggtggacggcgctgcagatggcggtggagaaccagtg

SEQ ID NO: 290275 - DNA, 260 bp, Zea mays
ggaaaatcattttcgtcaataaacttttggatgaataagggtcacttgagatcaagtactcattacgatccccaccataaccttctctgtgtggtatctggtcgcaaaaaagttactttgtggcctccatctgcatccccattcttatacccgttgcctgtgtatggcgaggcctccaaccacagctctgttagtgtggaggagccagattattcaatatatacaagggcaagatacatgaaggaatattctgaaacagt

SEQ ID NO: 290276 - DNA, 280 bp, Zea mays
cgagattgagaacctcatcgccttcgcccagaaggatctcggcatgaagatatccacctggtagaagtagaagtgtcttctcttttttctcttaataaagcttggacgtgacaattctcttgccgcgtctttaaaaaaaatatacgagtgggtttgggactttgggtgtatgcgtgtggtgtgtgaccgtgtgagctagttacccgtgcacagctacttgtactcgagcattgagacgataaaaaaaagctatatgatgtacgaactacgaagtgaacga

SEQ ID NO: 290277 - DNA, 278 bp, Zea mays
gtagaagcgaaggaggtgctgccgttgcccacggcggacatggcggtgcagtacatcaataagcttcatgcccccctgccgccgccatgagttcacaatgagtcgtgtaagtgtaaccaagcagggaaaaaggtaaatggtgcggtgctatggtccaaatttcaaccgaataatgttcaaagcttacatcgataggcttgggttgttgtcatcaaataatgtggttcagtcgtctcctctgcaataaatataaatatgattattactttctttgccgt

SEQ ID NO: 290278 - DNA, 269 bp, Zea mays
gttcaggttcggccactactcgtactggatgtacacggtctgtcagctggaactcactgcccctccttctggagttcttgttgcccggagatgcacaacaaaatgactggctctagaaaaattcccctcgttttcttttgttattatatataaaatcttagctattttttatactgatgatggaaatggcccgagaacagcggaacatacctattgttgattcatgtgaattcgaagttggttcttcagctttgtcgatctcttggctg

SEQ ID NO: 290279 - DNA, 191 bp, Zea mays
tgaaacaataataccggagctggaaagagctgcaaagagcgtaggtcgggacttctcgacgttcatcatgaccgacaacacctgtggtcctgagcctcctcttgtggagagaatcgagaaatctggggtgaagggagagaagccttcgtcagggaggtaagggaattcgagaagaaggttgaagagctgga

SEQ ID NO: 290280 - DNA, 379 bp, Zea mays
caaaatacaaccgaagtaaggacatataatcaggctgctcttactgtgcggaccatatgaagcatgatcatgtagtcttatcctcgcatgcatcaggcactctgaatatccatgcggcaaatgagctacataaccagagctccacatcttcacaatcatggtctcaatgcggctctatcagcctttttggactctgtacctagtagtccagcattagctgctgaaatcgcaaacactgttatcaacagaacactccagcgcatctctagcttccgaccacagcaaactgcaggtgaagaaaacacttttatcaacagaacacttcagcacatctgcagcttcaggtcacagcaagcaacaggggaagaaccaggcaccc

SEQ ID NO: 290281 - DNA, 268 bp, Zea mays
cagcaatcatggcttgtttctttacattcgcagatgccgcctaagagctttcgccctgccaggcttcagagctaatgctgctgaatccttccttggatgtctgagggccgccccaaaaattactgaactgctgtcttttgctatgcttgtaagatcatcatcaagaatttcccaactgtttctagcgcacctccagtttattgcctgtgtgaagcaaaaggagcatccaattcgtcttggccatgggtctgtagttagagttatggct

SEQ ID NO: 290282 - DNA, 267 bp, Zea mays
tggacatggacatgtctgattcggctctgcaacgcgaacgagcgactagtattttccctgaggctcaagcttgacagattcttcccgtttgtgtgcatcagtcaggctgatggtctgtcccatggagcagtcagtacaaactcctcttgcatcagatagttcatgtctcgtgtatgcatacgcagtagcttgccacagcccacaggcacctttttttggacgtggaaggcgttcaaggggtccggggattggacgtggacgcggacg

SEQ ID NO: 290283 - DNA, 240 bp, Zea mays
atttcctgatcggtctgcttggcttctttctttttcatctcgtgcatctgtgttactatatatactacaccataccatacacgtctttcccacctccgacccctctctgtccttcccatcagcatatatactagaatgtcgtgcgtcacgcgtgtatgatgctgtcgaccatggcaatcgaacttaattaatttctcagcatccatctggaatagaaagaaggaaaagaatgttgtctgt

SEQ ID NO: 290284 - DNA, 280 bp, Zea mays
gggaatgcttctcagcttctatgataaactgtcgttttctggaaatgtcatttaactgtgtaggttgtggtaccagcatgaatgaacagttacaagttgtgcttaactggatgttatctgatcctctcagtctgagtacccttttcatccctttattcttctgttgatagtgaaagggcctttatatgagttggtttctgttgataatactaagctactcattttctaattttcatgctgtgcttctaattgagaaataattacttgcatctctgctatg

SEQ ID NO: 290285 - DNA, 283 bp, Zea mays
gtttgccagaagatcattttgctcttgttttaatccatgtatggtaacttgcactgacattctaagtttgattattggatattattgcctttctttccattttccccaatactcatgagtccatggacagccatcatccagtaagttatctggctatcatttagttgcttcatgtagcagactgcttcaatagctttggcaatatctataagcttttggatttcaggttcctaagcttgtgattttcagctcttgtattaggctataaatgatatgttgttat

SEQ ID NO: 290286 - DNA, 387 bp, Zea mays
gaagaatctgtttgacgtagtgcagttcctgccagagtggggcattggatacaaggttgccaagaccacctggcgtgatgtctcctatcagatcaccaagatcaacctgtacaaggatggtcggcatggaaaggcgtgggggcttcggcacaaggcaggcgtgctagctgcagacaccccaactaggatcagcggtgttaacaaacgtgggtggaagtacataaaagaatcacagaagaaactacaagaagcccccaaagtagacgtagctgttgctgctgcctagttcgtagttacatgcatgtttgttgtaagatgattcggtaaatctttagatggctgttgccagggtgagaacagggaaccacttttttttggatcgactca

SEQ ID NO: 290287 - DNA, 279 bp, Zea mays
tggctcgagattcaaacagattgcacgtagttctgataaagttctaaccacagatatgttctagcaaggttgaaaaaccttaagcaaaggcatcatccttagacttggtatgcatccttacctcaatcttgactgaagtttcatgcttggtatgcatccctacaaagcacgccgcaccaaacagcgaggtgtggtcgcagtcggcaacaaccctcatgccttgagggcgccatcagagattttgaggtgactggctgtcttcttctatggcctcaggtt

SEQ ID NO: 290288 - DNA, 270 bp, Zea mays
ggtccgaggcgcggggcacgaggtccccctccaccgtccgccgcagggcctcaagctgttcgagcacttcctgcggggcgagcccatgcccaagcctgtcgagagcgtccagtcgttctagatgagcttgctgccgcgcttggctagttggctttgatgaatagtaaggccggacatgtggcaagccatctccactccacatttcttcaccacgttttcaataactggcgctggccgaaataataagagcagaacgaataaaatgccgct

SEQ ID NO: 290289 - DNA, 284 bp, Zea mays
ggtatgcatacgcatgaggaccatgtatagttagttattattacatggcggcgtcgttattattattattacatgcatgcaatgcaaggagagcgtgcgtacgtggtgcattaattgctgactatactagtacgactcgacgagtgcatcctccttgtgcgtctggatgacgaggtccgaggtggggtaggcgatgcaggtgagcacaaagccctcggcgacctggtcgtcgtcgaggaagctctggtcgaactggttgacggagccggagacgatcttgccga

SEQ ID NO: 290290 - DNA, 288 bp, Zea mays
attttctctgtacttttaaatttcgaaaatacaaagaatgtttgtgaaccttcagggataacatatgccatgttgttgaaactcctgctgaggtatctagcaaaataaagaagttagctactatcgttcatggtctggttcttgtttcactattgttgcttgtgttgatggtcatgacggacatgctaatttatttacaatttacacatgtcgctatgtaactattcacgcttttgacctgatttcacatctttatttgaagcagcactttatttttcatttcagctg

SEQ ID NO: 290291 - DNA, 162 bp, Zea mays
taagaactgagtttggcatgtactatatatgcttctgtatgaaacctctgggttctgaaataagatgatgtgtatctgaagctgtgaattgacagaggggctctatacaaataatggagcagaggcttttgtaaggtcaaaaaaaaaatagagggaaagagt

SEQ ID NO: 290292 - DNA, 274 bp, Zea mays
ggtccgtcgtgctcttcgccagcctgtgcctagccctctcccactacctcctcgagaaagaagccccagagacagagaccatcgcaagcaccatcatctccttcatcatgagcgtcttctggatctcgaccacggccggagagctcctgagctgcctcgccgcggtcggagccatctcgcacttccctcccgccattctcggcatgacggtcctggcgtgggggaactccgtgggcgacctcgtcgcggacgtggcgctggccagggctgggca

SEQ ID NO: 290293 - DNA, 298 bp, Zea mays
agtccctcgttctcattcaggtcagcgattacctagtttgtgtactaggcagcgtaacccagctgctggtgggtggtggtggccatcatgaggattcaggatgcatgatgatcttccatgggtggtgcccggggcgcactaagggaaaaaaaaaaggatattacatggacagcaaccaccctggctagctaataccaagaaaacattcatatactcctagtctcctaccaagaaaaaagatatattcattatgcatcttcttgccatccgtgcatcctactacatgcatcggatctgt

SEQ ID NO: 290294 - DNA, 281 bp, Zea mays
cctgaatcacgtggctacatatacattgaggctaatggtggtttgaatcaacaacggacatcgatttgcaatgcagttgctgttgctggctttctgaatgcgactcttgtaatcccaaacttccactatcacagcatttggagggatcctagcaaatttagtgatatctatgacgaggattactttatcgaacgcttaaaaaatgatgtccgggtgattgacaaggtgcctgagttcataatggagcgatttggtcacaatctgagcaatgcatttaattt

SEQ ID NO: 290295 - DNA, 273 bp, Zea mays
ctctctccctcagcgctcccaacgcctctctgctggccgcgcccccttctcggcctcttctccccatggtgctcggcgcccaagttccctgctccctctatcttctccttgcctgcgcgcaaagttcctctgtggccgcgctcccatctgctcggggttccatggcgctcacccatggtgccgtcgtcctcaagctcgtcccctgcgtcgcggccactggatggcgcggtcacctctctctggtgccttgcccagtgaaagggaaatatctca

SEQ ID NO: 290296 - DNA, 328 bp, Zea mays
gaaagatgaagaggaagcatcgatcgccgagtgattcagatagcagcaatagtgctgcttcggtgttcgactctgactctgagtcatcgggctctgaatactcttccggaaccagttcaagttatagttcctcagactctgaagacaagaagcggcaacacagaaggaagcagaagaagagaaggcacaggagggacagcacatcatcttcatcttctgaatctgagtctgcgtcagacagtgattcggatgacaagaacagccggaggaagagtaaaagaaggggtggtaggcgctgaatctagtgagctgcacaaagcagtgtgga

SEQ ID NO: 290297 - DNA, 365 bp, Zea mays
gctgttgcacagctagtgttggacaatggagggaaagggtttatattcacgggatataacagggacaatatcgttcggtgggaacctgttacaagcaaaatgataccattcattttaatcgatcttgaggtcgcctaccacatcttgcagtactgcatctcaactgacggtaccccaagagcaaagatctccttggctcaaacaacttttggaactggggttcctgcccccaaggtagcagtgttctcgtctagaggacctagtgccgtctatccaggcgttcttaagcctgatatagctgcacctggggtgaacatcttagctgccgccccacaaattccttattacaaagagcagctgggtgg

SEQ ID NO: 290298 - DNA, 289 bp, Zea mays
ctagattttcatctgggagggctgctactgctacaaatggtccagtgttcaatgagttcttcaaccgcaacatgagaggaggaaacgcggcgccttctgagacgatcgtggatgtggaggctgaagtcaaggacgtggagtgatgtttcttctcagcagaagaagagcacgatttgcttctgaatctgtgagaaatggggagaaaactgaaactgtgagagactaggcaaacgtgcatatagatagatgggtatcggggatgggtagttgtgtagtgcccgcgcgcatg

SEQ ID NO: 290299 - DNA, 252 bp, Zea mays
tgagaggaatgatgtttcatgggacgcgctcttatccgggttcgtcgaaaacgggcttgttgatgcagcacttgacacttttagacaaatggagtccgcaaaaataaagtctaaccagcatacctttgtgaaccttctgaggctctgtggtgatagaaggtacagagagtacggaaggcaattcctgggccatgcaataagggtccaaaaccagtggatgtagtgctggaaccgagctcatcgatatgtacg

SEQ ID NO: 290300 - DNA, 300 bp, Zea mays
caggactttctcgtgtagcatcatttccgctacccaaatctctccatccacggcgacgcccgacgccatccgtcagccagccccatctccaccacccctccccgtccccgacgtagcagcactgcagcagagcggagaggcggccaagccaactcctcaccggtagctcctccgcgctcccgggctccgtctcgccgcactcggatgccccctgcgctggcgcctagagcggcggcggtctagcgggcgccgggagcggtgaaatccacccatggccgacgctctcctccttccgtgccg

SEQ ID NO: 290301 - DNA, 295 bp, Zea mays
catggtattacccaattagcctcagtgctacatgatcaacttgcatctaggcagccaccagtaattctaggaatccactttttctctctcaagtgcgctctctctcactcctctctccagcctatttgtcttagctagattgtctctcaagtgtgctctctctcactcctctctccagcatatttgtcttagctagattgtctctcaagtgtgctctctctcactcctctcttcagcatatttgtcttagctagattgtctctcaagtgctctctatctccaacatatttctctt

SEQ ID NO: 290302 - DNA, 285 bp, Zea mays
gcatttcaggcttggccgaacctcgggataatttcctgcgtctgtgtgcttcgctctgtattgtgtgctgactctctgtcttactcactttttatatctgcacttcaacacttatctgtggtacaagttatatttgaagtgcagggcattttgagacaggatcttctattccgctgcaacctactcgaaggatctttcattccactgcgatctggtccttgagtagagtaagaactaaagttttaaagtgataatttcttattcgcctattcaccccccctctag

SEQ ID NO: 290303 - DNA, 287 bp, Zea mays
ccacgaccgggcggacactacttcgagagagcagtgcgcgctgagccggcggactcggaggcgctgagccggtacgctactttcctatggaaggcgcggaacgacctcgccggcgcggaggacacctaccaggaggccatcgcggccgatcccgggaacgcccaccacgccgcggcctacgcgcacttcctctggaacaccggagtggagtgagttgtgatccaggaggacacggtggtggtggtggtggtggtgtttcttcccgcgctccgggacacgcggcggag

SEQ ID NO: 290304 - DNA, 343 bp, Zea mays
cacatatgctaatttaaaattatggaagaagcaaagctaccaaatgttgctaaggtgcctaagataaaactttgaagtgtgtataccatttgtaataccacttgtaatattgattcattatttggtttcgacccttaacacttgagatagctagacctcaaagagactagaaacatttgtgagaccaaaattactagaaagatttctagataccaattaaaaaagcaaataatattaagtctagctatcgcttaacatatgcatgctagttcatcaaattatcaatcaaaaaatattaaaatacatatcataaacaagaatgttggggcccttcgtcttccga

SEQ ID NO: 290305 - DNA, 287 bp, Zea mays
aattttcttttcaactttgacctttaagatgtcttgcttccagtggatcaatgttcactacttctggtttttgtcaagattgcaacctaattctggattgcagcactataaggctatgactactgcaattttagaataggaggtggggatgaggaagctaatggagatagacttagacatgttcggttttctaggattggagctcagaaatgattcctactcggattatttctctaatttacataaacttttatgagcgggaacgaatcctggcctggacaagcgaa

SEQ ID NO: 290306 - DNA, 275 bp, Zea mays
gctccaggaccttggtatcatccccgatgacagattctgtggctgccttctcagcgtggcagccaacacaccagcggaagaactgggcaaggtgatcagctgcattgagagaagcaacgtccagcttggtgccgtagtgaagctccttgtggacaggagctcctctgaatcttttagagaagcagcccgtgaactgctgaggagctcccgcggcgtggtgaagatgccttactgcaactgcctgatggacctatgcgtgaacctgaaccagatgg

SEQ ID NO: 290307 - DNA, 281 bp, Zea mays
ccacttataggggctacaagtaaaatgttccattggcataaaagataatgtgattatcacaatcaacttgatcataaaaatgtacatccttgttcaagtctatgttatggattttgcttctttctaaagtttagcttacaaatggctataaattatttgcataggaggtgcacttaattgtttcagttcagttgtaaaaagtagttgtagtttactcctctaatgacattagagatgttaatacctttgggatactgacttatggcctcttatgcatacga

SEQ ID NO: 290308 - DNA, 278 bp, Zea mays
tggcgatgcggccttaattttacgatgatggccgggaaccatgtccggtgggccgggccgggccgggggaggagaacgatgggtacggttgcgcataacttttgttctaatgatctgcaagcatggccgcattgatccggttggatgcgtgggatttgtcttcagggaatagggcgaaaggcactcctggggcgatgttcgtggcgacaggtgttctgaattctgatacggtttagtcttttcgctctgattgaacgcgcactactacaccagtacac

SEQ ID NO: 290309 - DNA, 283 bp, Zea mays
tggacatgcaattcccaaacgggcaactgaggtacgtcgccggcgacggcttcacggcgcgtgctttcctgcccctaccgtggcggggtcttgcaagcccacggaaagttcccgggggagaagaggctcagcctctctttcaagaacaggaatggcggcagcgtcgtcccgatggttcagtggccggataagtcactctcggtgggggtcgtccaggcgttgtcctggcggagatccggcctgatgctgcagccagcaacacagatcagcatatgtcctacga

SEQ ID NO: 290310 - DNA, 407 bp, Zea mays
gtcgggatctacccggagatcaagaaccccgtgttcatcaaccagcacgtgaagtggtcggacggaaagctcttcgaggacaagttcgtggagacgctgctcaggtacggctacggatgcgagtacatgtccgatggctggctccggcagccgctgttcatccagtccttcgcgccgacctcgctcatctacgtctccaacatgacggactcccccaagctgctcctgatcgacgacacgacggtcccgacgcaggacaccaaccagtcgtaccacgagataacctcggacgcctacctcgcgttcatcgggagctacgtggtggggatcgggccgtggaaggacacgctggtgcctccggacccgacagacaaccgcctgggacgccccgccgacctcgtcgcgcg

SEQ ID NO: 290311 - DNA, 283 bp, Zea mays
tgtggatgatgttgatccagattcacggccagggagtagtggtggaaaggacacaggggatccagttggttcgtcattccataaatcccaagatgctgccgttggatatcttgtccacctgctgaaatctgcacgtccactgcgagattttagctactcatctcatacatcaatgggcgaatctatccaagcaggaagcaccagctactttcatgtcccgccggacatccgacgcactggaggagtttgaatctttcaaagaaataagagagaactgcttgca

SEQ ID NO: 290312 - DNA, 279 bp, Zea mays
cttcaaaaacagagaacgacaggatgacaaatgggcaagagtcaacagatgccaagaaaaagtctaccagaagtgaacggcggaagcgtcgcaagtctgagctaaggccatccagtgatcgattagaggcatatggaaagataaattcaaagcgtcacaagagccattgaccttctgagattcatcaaagtacccctggggaattttgctgttctttttatgcattggacaggtgaaagtcttagatttagctgtccttgcttctattttgggagatgc

SEQ ID NO: 290313 - DNA, 293 bp, Zea mays
gaaagttcaattttttttaaaataccaagtgtataaaagactgatttgtttcagtgacaaatacggtatatatttctgtctattttgagttgagcccttatctcaagccatcaaactccggaggtgagctgtttatctcaagcaagatcgatctcctgtcacaatggcgcgctgattttacatcggtcagcgcagcaaccaaaataccctgaacccgttgaaatatccaacccatcccgtgacgtgcttaaactggatctcctgttcccttcaagcttttgtacttgcacctc

SEQ ID NO: 290314 - DNA, 282 bp, Zea mays
gtcttagattggttggcgcttggttgaataattcaaacgatccagtaggatctgattacaagaagaatgaacagtattggaaagcggttgctgctttctacgacagcaccaccccaaaaaatcgggcaaggttaccgaagcaaatcaagagtcactttgggagaataaagacgtgtctctagtgataatcttgaagctcaaaggcttgctcaccaggctgcaaaagagaacaaagagtcagccatgttggaaacttatcgatccttattaatgcaagacaca

SEQ ID NO: 290315 - DNA, 177 bp, Zea mays
acaacggaagccgcctcttcttcaggcatgatgggaagatgcatgaacgaccgcagcgtgcacatgaacgaggctatcaggatgcatatgcgtagtccagagaaggctacttgaactgtctagaggtgctaaggcatctccagatgaggatcgaagcccagggcaagtacatgcagt

SEQ ID NO: 290316 - DNA, 176 bp, Zea mays
gtcggcggtggacagaggctgccacggagtctgggcgctccgcgggcgtggcggctcttgagagctagggggaaggaggctgccgtgctcgtgttcgtcgtcaacatcctgcctgctttcatctacccagcccccgtgtacgcgttctcgtacatgcacccggcggacgagtactc

SEQ ID NO: 290317 - DNA, 291 bp, Zea mays
gctatccgtatcaggaagggaaatcaggtttatagtgctgaggataagagagcattggccatgtttaactacgaggagaagtcaaagcgggagcacaaggttcatggctgacttgcagcgcttggtggcagagaaccattggccatgatgtgggaccttcacatgatccatttgctactacagatggttgagtaatgatttcttgttcaactagtcacctgtatcaggtgtgctttacctgtttgtgtttccttccctacattgtaattagtgtttttgaacttgcctagt

SEQ ID NO: 290318 - DNA, 280 bp, Zea mays
cgaggagcggcaggcacaatctccttctggtagcccgtacgcttcttctacaggcccttgcctgcccccctgtcccactgcctccacacaccattgtcatggactcatggtcaccaccaccacaccaccacacttcactcgactccacagcctccagtttatccgtttgctcgacaccattgctattatctcctcgctcgcgtaatccatcgttttccgccgcgatcagttgttcctgatcaatcctgtcgaactactactgtatgttcctgatcatttg

SEQ ID NO: 290319 - DNA, 179 bp, Zea mays
gtgtccactgcttatgtttatcaccaacaatgagctaggacaacatggcttggaggaaaatgtaatgaagatagacaacctgacatcaaaacttgcattgatgtgggatgtggattcaggttcatgtattaggagagcgctatcaggggactgtacatctctgacacagtattttgtca

SEQ ID NO: 290320 - DNA, 278 bp, Zea mays
caaccaatcccaatatccgctagcctccctctgcactggaccacaccacacccccgcctttcccgcaacccagagcccctctgccaatctctgcacaacatcatcgattccccaggcgaaaaaaaatactctggaccctttttttcaatcagattttcaatcagaggagggtagattggatttgtcagattatccgatctccactgcagcctctctgaagagaagaggcccatccagtccagcctttccgcagttcctggagcaatcctggctcagtg

SEQ ID NO: 290321 - DNA, 264 bp, Zea mays
gcatcgtttgccccctcatcgctgtcggcatgctgcggacctgccaccaggtgcaagccgtcctggtctttgagcttgtcctaggcctcgcgggagtagcctgcatcctcttccctgtggagaccaagggccgcgagatgaaatgacagacccttcacagcacccaaagtgaccactcctttcagcggcgtacgttcgaacataaagtatttttgttgaagacgcgtactcagaaaattgctcaagctatatctttgatggaaa

SEQ ID NO: 290322 - DNA, 365 bp, Zea mays
gttctagatcgcgagcggccgcccttttttcatatttttagacctgagtatgaccctttctcgcgtggtcattaaagtattcggggttgcataaatataattttggcgattcggcttaactaaagactgtgtactgcaaaacgaactcttttcttgtacagtgtaaaggaacttgtgattggcatcctcagcatcacagctttgtgaacatggatcgacttcgacaggtcaagaaaacaacgccctccacacgggagattgaacctaacactaccaagcaatacatgggtcatgggatgggacgaaagagaatagaagggtgaagggacatgcaggatgcgcacagcagagcagacacgcacgca

SEQ ID NO: 290323 - DNA, 287 bp, Zea mays
acggcgccgtgtaccgggcgttcctgaaggaactcggctttgaggttgccatcaggggggtgtccaagggctcaacgcaggggcgcaaggagtacgccgccgaggtgcgcatcatcagccagctgcgccaccggcacctcgtccgcctcgtcggttcgtgccacgagcaccggggcgacttcctgcccgtgtacgagctgatgcccaacggcagcgtcgaccaccacctctacggcaagggcatgctcctcacctggtcgatgcggtacgacatatcgctgggcctc

SEQ ID NO: 290324 - DNA, 284 bp, Zea mays
agcaaaccgcacggcaagagcggaaaccgaaagaagcatctgaagagcagcaagaagaggaagaggcattagcctggacccacagtcccacactgctgtaagcctgtaacgcttcaacatactgataaagcctagaagacggttcaagcaagccacacagacgctgaagaaaataccacgaaaccacagtagagaagaggctttggttcctcaaaagtgtaggaaaatatgatctgagcgactgatcctgagccattggaacagtataaattagggcttgttcg

SEQ ID NO: 290325 - DNA, 209 bp, Zea mays
gctagttttttccatgtactgtgcactaatcggccatgtggaccttaccattagcttccagagttgtagcttgactcaactcagttcttccgcacgaggggaatttactttcgcatcttgtaatgccttgtagccttgttcgcattggaatcagtagatgcatcctgatggatgctccatatttgatgggcgcttctaactaatacccc

SEQ ID NO: 290326 - DNA, 293 bp, Zea mays
ctgggcacatggtgccatactaccagcctcgcagtgcattggcactgttctcatcattcctcgaagggaagctccctccacactgatccattaagctagcatgggttgtgaatgtcatgtactacacttgtagctcgcctttaggaaggggttttcaatgaaccaagcaggagtgctgctgattatattaataaaaaaaaccttcagttcaacttccttgcgcaacacagacaaaaaaaaaaaaaaaaagggggggccgccgattagtaacctcttcacccggggaattattt

SEQ ID NO: 290327 - DNA, 191 bp, Zea mays
ggtgtgactgcgagtgaggactgatccctcgatctcgatgtgtactaacgagagcttgctggcgtcactgatgcttaacgagccaacacctgatcgatccgtgtacagcaagcaacacgttttggaacagttcgccaattgactgtgcaataattcaagacaaggtttataactttatatgatactagtac

SEQ ID NO: 290328 - DNA, 296 bp, Zea mays
gaggcccccagcatggagtccccggagcctgtcaagccggaacagggcttcgtgtggcaggaggccagtgagttcgaggctgacacggcgggttcgaccgtggaacgccacaagaaggcccagctggatcggctggacatcaacgtgcagattgacgactcctatctggtggaggcgggcgaccgccagaagcgctggcagtgccgcatgtgcgagaagtcctacacgtccaagtacaacctggtgacgcacatcctgggccacaacggcatcaagccacactcgtgcccacactg

SEQ ID NO: 290329 - DNA, 249 bp, Zea mays
gaagcaccgtgctaaccttctgagcaggcttgtcttcagaaagaaaggataaaactgggactcagcgtcggcctaaaaactgagtcatcagtacagttgttcagcacttgggagctcgttcttgcgttttaagttatacctcgactgatcttaagttatttccaattccaataaaaatgaacgtactgcacctacggtgtgtaatttatgtggtatttatgtggatgtaagttatgttgtacttgagaa

SEQ ID NO: 290330 - DNA, 298 bp, Zea mays
cgcgcgtgggctcggtgttcgagacggctctcgtcgtgctgccccaactcggcaactccccatcagctcaccccgatctagggtttcggcaccatccgcttacgcgcctccccaccaagcaaagttgagggcccgcggcatctcccttcgggcgccatggcggctacagggcaggagggggatgacgtcgaccactacgaggtactctgcctcccgtcgggggaggaaggcgcggcgctgaccatcgagcatatcgagaaggcctaccgaacgcagtcgcggctgcgccaccacgata

SEQ ID NO: 290331 - DNA, 372 bp, Zea mays
gtcagctctcatcacgttcgtgttcgccgaggtgctcgaaggggtgaacttgtccctcctctcccgcgtgatgtcgtcgaggctctcccgcgggacctacaacggcgggctgctctcgacggaggccggcacgctggcccgcgttgccgccgacatgaccatcacggccgctggctatctggggcacggccgcctcctgaacgccaccctcactgccgtccttggtgatctgtctagcatctatcgtcgcgacgttctgcacttacaactcactctactgatgaccggtcgatgaactcctctccctcttatacacgtttggtgtggagttgccgcattgcgtcttgcagtgacgctgaaaattttcgggct

SEQ ID NO: 290332 - DNA, 267 bp, Zea mays
gtttacttcaattcgcaaaagcttgttgaaacaaaagagactgagctgttagaggctaggcatgaagtcgaagatatgaaattgaaggtggattccatacaatttgctgttcgagagaaggatttggagcttctggaggcacaaagaaaacttgatgaagttaacagcgaagttgttgaacttcagcagctgataaatagcaagggcgatcaactggtccaagttagaactgaattacaggatgaagagcaatgcacacaattaatg

SEQ ID NO: 290333 - DNA, 173 bp, Zea mays
ctcgacgagcagaagaggagcatcatggtgtctaaactgtcttgttttcttgaaggaatcggcgtttgcgagcagctcatggggatccctatccctctcgcatacactagacttacttcaaggttccttgttctgtggcatcttacactcccaatcatactctgggaagactg

SEQ ID NO: 290334 - DNA, 279 bp, Zea mays
cggttggtcgcccctcctggagctcgccgccgccctctcgctttcttttcccgaccacaacgccaccgcccgacgcaaagttgccgctccctgagtctcgacaaccgagcaagccttctagaagttaaggaagccgcagaaccatggcatcccgtttctggggacagggggacagtgagtctgaggaggaggacgtggaagaagttgagtcagaacagggcagtgcatagtgctgatgatggaggtccacgtggtgcgggaccgggtgcccaaaaccga

SEQ ID NO: 290335 - DNA, 264 bp, Zea mays
gcggagacttattttgctccacaagtcctgatgtgcagtccttggtgtggtctttcaacgaaaaggagacagcatagcagggacggactttgttgtggaaggaaatggaggatgtctgactgcgccaaaacctccttgcctcctctgagtgtcacagggcggggttaatcggcgaggagataagtagtctccctccatgtcccttggcgcaaagaagatttggggggggggggggggcatttttattacatatacacccccccc

SEQ ID NO: 290336 - DNA, 460 bp, Zea mays
ctgagaatcccaataagtttgcttaacaagacatatgggtcacgctcatttaagcttgtctataacaaagtagtcagagagaatgacatcttcaggccttcaagtgtgtcctttgctgaagttgtttcatctggcaactaggttatgcaaattctaaagcatctaattatgacattagtacccaaaagaaaattgtcatggatctccaattcaaatgtactgaaatgaagttattatttggaaggcagcattattctcataccatattccagatatgaaatcccaccactcgaaactattcaaaaaggataaatatttttttcatttcaaatacggtaccgacaatcctgtgtagagtccagaaaagatgcaaggaattttgtgagatccagaactaataggagatggaagtattacgaataataatactagactgtctatacaggctgaattttcttca

SEQ ID NO: 290337 - DNA, 267 bp, Zea mays
acaggttgttcgccttattgagatagaaactgaacatatcagggatttgtcaccgacaattcatcccccatttcatgaagtgatgaaataaccgaaggcgtttttgtggtgtgagctgactactaaagtatctacgctgcatttccaccgggacaaagtaaactgaaatccatactctccattcttgttggtgatattgtaacacttggcagttcgctctcttttgcctttcttcattttcttcttccaaccatgtaaggctttgtt

SEQ ID NO: 290338 - DNA, 290 bp, Zea mays
ggacgcgcggcggatcccttcgcaacgtccccgtaggtggaggctgccgtcgcaacaagcgttcgtccaagtcctcatcctcctctgctgggtcttcctcctcaaagatgtctccctcaggaaggctactgggtggtccatcagctacaccgtccaccaccccaggcactaccggtgcgatcattactccgggtctcagctctttctctcaccacttgccgttcttgggctccatgcacccgtcagggcccaacctaggtctagctttctccgccggactgccgctagtc

SEQ ID NO: 290339 - DNA, 385 bp, Zea mays
tgtttgtgagaccaaactccccgcccgcgccgccccgcttcctagttcctttcctgaaacggtcgcctggacatcaactatgctgatggatcaacgaacgtgatacgggtctcctgtcctctcctctcatctctctccagtctccaccggctatatcatcgtactgccttcgtctcttccgtcagtagctgcagatctctgtctggtacaggtaggttgtcgtatacgttgcgtgttgctgctttctggggagaggggagcgttgttgcagatggcaagcttcaaccaagagagcagagcaggcacacagagggaggaggcacctctacagggcaagtacggaggcatttctccgaagaaggcgctcatcaacaaggaccacgag

SEQ ID NO: 290340 - DNA, 252 bp, Zea mays
gggaatcaaaacgcatgcttcccccttccatcctcggcgttgcgcggattgcatggccatcgtttcgcgcccccaatccgtcgatgcaaggtacgcgtgcttcccccttccatcctcggcgctgcgtgaattgcagattgcggattgcatggtcatcatttcgccccagttctttgcccgcatcagatggacgggcgccccgatctgcctcacctccatcaatgaggtgtctgcctttcttgcatggagacg

SEQ ID NO: 290341 - DNA, 286 bp, Zea mays
gctcaggattcggctcgagcttcatgatgaatgggtcgtgtgcaaggtgcaccacaaaggggccgaagaggccagcgccgccaagaagtccgccggcgggggcggcgaggagcactactactccaccgcaacgcccaacgtcagctccgtcgaaggcggcgacgagttcctcgtcgactccctgctggattactccagctacttcaactgcttcgcaaccggtggcttgcctctgcccagcacgacggccaactcagccgcagcacctgcaacgaacgacgacgac

SEQ ID NO: 290342 - DNA, 274 bp, Zea mays
gaaaacttggtcgcaagtcgctaaggagcacctcgctctcgttcagcctcaccaggaatcacatcaccacctccaagccctgcagtgaccgcccccgtcgcatggcgctctccgtcattggcccccacgtcttcaccgacagctccacagtctcgtgctcctggctccaatctggtgaaagacaaggctgtgaagatagacgctggtgctgctgcggctgcggctgcgccttccccgaagaaagagttcacctacgacatatggggagacattt

SEQ ID NO: 290343 - DNA, 362 bp, Zea mays
tgttaagccatagatgacttaccgcgtttaaagaaaaaccttctaaaaatgttcagtcaagagtttcttggcagaaataagaggttgtcaaagagccatctgttggttccttcagaaacttgttactttaccacccagcatgtgtatcagttgatgaagatggggatcgcatttttatctctgacagtaacctgcataggatcatcattagcaacagcaatgggatgattttagattatattggatcttccctaggctatgaggatggaaagtttgagtcagccaaatttttgcgctcagcttcatcattttatcacgctgctgaagactgtcaatttattgtaagattcagagaatcatgc

SEQ ID NO: 290344 - DNA, 280 bp, Zea mays
caaacagccggatagccatcattttcagccccattgccaaattttggcgtgttgagcttaacaacgatcaatcaggcatcttcttcacaggtggctggtcacagtttctagacttccatggaataaaaaatggtgaacttttgctcttgaaatacgaagggaacatggttttcaaattcaaagcatttggacttagtggatgccagaaagatttcaagaaccagaatgctgggattcaactaaatactagaaaacaacaggaaacacctcccatcaggaa

SEQ ID NO: 290345 - DNA, 342 bp, Zea mays
gtcgcggacgcctgctctgcggcaagcgctacgcctggtggctgcgctggatcctcgtcgtgctcgtcgggctcctggcgatgctcgtgcccaacttcgcagacttcctctcgctcgtcggcagcagcgtctgcgtcgtgctcgagcttcgtgctgcccgccgtgttccacctcaaggtcttcggcaccgagctcgggtgggccggcctcgtcgccgaacgtggccatcatcgtcaccgggattgcgctcgcggtgtccgggacatggacgtcactcgtacagatcttcagttcttccgacctgtaagcatcgacagtctgatatgtgcaatgggagggctc

SEQ ID NO: 290346 - DNA, 252 bp, Zea mays
cgtctctagaaccatcaggctgctgtgggaggattttcatcacagttgacggttttgtcgtgctacctcaggtcatttggttaacgtttgttcccttcatccacaatagcttactgcatggcataatttctggttctttggctgttgctgatgttgcgatggtgcaagagggggtgaacagataatgaagatttcaggtaaatggcgagttgaatccattgaacagataatacggatagttttaagtgtcat

SEQ ID NO: 290347 - DNA, 287 bp, Zea mays
cgtatctgtgaaagtacatatttgcgggggtgtgggcagctccatcagccatgggtcagcctccaggatgtcttcgtcgaactttggcggactagacggcgtgctgctcgagggcgtgtgcgtgtctgacaggatcgcatccgagttgttgtcagaccattcggcggcggtcgcggcggcatcagcatccccagcttctgcatctcgggggatttctgaattgggttcgactttggtgtcatccacttcgtgttcgtcctgtgcagatgtatcattggagagttgac

SEQ ID NO: 290348 - DNA, 303 bp, Zea mays
ataaccgcgtgacggccgtccgctcacaagttcgctaccccgctcgccatgccgccgccctccctcgtctccatcctccccgccgcgtccatctcgccacgaagacgccaagcaaagcaccccaagacccccaccgcgagccatcccttcttctcccgaagacttgtgtcccaaccgccgcgccacgcctcgatctccccctccgctgccggcgggaccgggagcgacgagctccaccttctcgagaagccgttacctgccgtcgcagaggataacgaggccgaggaggagctcgagtctgct

SEQ ID NO: 290349 - DNA, 478 bp, Zea mays
tcgactcgcactgtacgctcgccagggagcacagaggacgttagacagaggatcgaacacggtgagctagagtatctagttatccacagagattccaatcaagcttacggcccgggaagcgtcgcagacatggggaatgcactcgcaatcataaccacaatcatcgtgagcaagaggatgaagaagaaaatcataaaaaaggtcttggaggagatcgaaaaaaagaaccgcgagacgcaagccagcaacaacgccgtggaagatgcggtgatcgaggtcgggccagtcgagacgttcctgaatcagatcctgaacgagaagccgatgcgtttcagctccgagcaactggcggcctgcacccggaactactcgtcggagctgggatccggcggctacggcacggtctacaagggtgagctcccgaacggcctgctggtggccgtgaaggtgctcaaggtgtccatgaacaagaaggtgc

SEQ ID NO: 290350 - DNA, 321 bp, Zea mays
cgcgtacgtcagctagtcgttcgcctcgaggtcgccgcgtatttgctcgccgtcctcggtggcaacaacagcccctccgccgatgtcatcaaggaaatccttggctccgttggagtagaagcagatgaagataggattgaatcgtgttcgtctgaagttaagggtaaggatatagttgagcttattgctgccggtagggaaaagttggccacggttccttctggtggtggtggtgccgttgccgtcgccgcagctcctggaggaggtgctgctgctgctgctcctgctgctgaggcaaagaaggaggaaaaggtggaggag

SEQ ID NO: 290351 - DNA, 302 bp, Zea mays
gtaatatgcgtctcgagctccttccagggtttctccaccatgagggtaatggctcccaaaccgcctagtacggacctgtttgatggactgaacaagggacatgtcgtcaccaagaaggaattgcccccacgcccctcggatcgtaaggggaaaacaagcaagagggtgcactttgtgaggaacctcataagagaggttgctggttttgcaccctatgaaaagcgtataactgagttgctgaaggttgggaaggataagagggcacttaaggttgcaaagagaaagcttggaacccacaaacg

SEQ ID NO: 290352 - DNA, 230 bp, Zea mays
cccaaatgtgctctttactgctgctgacatgattgcgctgggattgcgacagattcgcgattctacccgctggggtcaactttgtgctcttacgaaggtgaattttcgtggctcatagatgcataaatgatatttgtaaggactaaattggctcagcttgctattgataatcaatatatgaattccattgtttgtacaaaaaaaaaaaaaaggggggccccccttttggg

SEQ ID NO: 290353 - DNA, 244 bp, Zea mays
gaaaggcattggcgatgtcggctctccttgggtgtcgctttctgttggtatctctcgcttcggcgtacgagatcggcttgctggggagcacacttgtactacgctgccggtctctacgcgaacgatcaacaatactacttctccaacctacgctccgcaggcgtgaaagtacttcgcgtgtggcttgatggtgagagctccggttcctccaaggcaccaagattcgcacctatcccgacctcga

SEQ ID NO: 290354 - DNA, 242 bp, Zea mays
cgagctctcacgatcttcagactcctgattccttccagagctcattcttctgtatatctccgcgtggctctgtttctcctagccaacaaacaagccgtgacagaagaacgacgatgagaatatgagatcatgctcggtcgtcctcgatcgctcaaacaaacaagcaggaaaaaaaaaaaaagaaaaaataaaggggaaaaaaaaaaaaaggggggggcccacaattgggttcttttaagccc

SEQ ID NO: 290355 - DNA, 203 bp, Zea mays
ctagatctgggcgccgcgcgcctgtgtagaaatgtacagtgtatgcggctagcttttcgattctgtgcatatgtatgtagctgactggctgatactataaaacagagtggcctctgtggacaaaaaaacgaatgacgacctttaaataaaaaaaaaaaaaaaaaaaaagaaagaggaaaaaaaaaaaagaggggggcccccat

SEQ ID NO: 290356 - DNA, 558 bp, Zea mays
accacatcaacccaaaccctatctcgacggttccacttccaccgccgaccccaaccccatcaatcgtcatccaccgccggcgtgacaaacggcaatcctgccgtcacaaacgcgtctgacatagatccactcttccccacaggcccctccttcctccgtccgctggcgcgctactgcttgagcgtggagggtgtgctgcgggttagccttggtcgcttcatcatcttcgtgttgtgtcctatgcccccgcttcatctgtcgtatcccccagcgcagccctccctctctccagtctcctttctcgcatcggcaatcagtcttggcatggccgaattaatggcggtctacccatggcaggtgatggcgggcttcctcaccctctccatgttcgccatgctcgataaaatgatcaagcacgaccacttgtctgccatcaccgagaactgcgaggagttcttgatacaaaagaataccctgaagggcccgagatctccagatggtgacaacatgcttgctcttggaaagtagaggaatgtaaggattgttttcaagactttg

SEQ ID NO: 290357 - DNA, 287 bp, Zea mays
gtgcgatgccatatgaggatgcggtggagagataatgacgacgaggttcaagacgaacaggtagaagagaggcctcgtctgcgccggtcacggtcgtatcgggaagctccgcatgcatcccggtggtcggcgtaacgccggtgtgcatgcaccaccaccgcatcctcttcgacaagtaccatcccgggttcttcggaaaggtgggtatgcgctacttccacaaactccgctacatattctactgccccatcgtcaacattgataagctatggtccctcctaccccag

SEQ ID NO: 290358 - DNA, 264 bp, Zea mays
ccgggaggtcagcatccggtccactgcgccagagcctctcagcttcgtcatcccgccctagtgcaccgtgaggcacgacgtgccagcggtggtcttctctaccggcggctgcggcaccaacttcttccacgccatgactgacctcattgtcccactctacatcacagcccgtgagcacaacggccacgtccagctgcttgtcgccgactaccagcctgaatgggtggccaaattcagaccgatcctcactgcactgtccatcta

SEQ ID NO: 290359 - DNA, 267 bp, Zea mays
taaatccctagtaagccgccatggtgaagtactcaagggagcctgacaatccaaccaagtcttgcaaggctagaggcgccgaccttagggttcattttaagatcactagggaaactgcctttgcaatcaggaagttgcccttggttaaagctaaaaggtacttggaagatgttcttgcgcacaagctggccattccgttcagacgtttctgtcgtggtgttggaaggacagctcaagcaaagaatagacactctaatggccaaggaa

SEQ ID NO: 290360 - DNA, 291 bp, Zea mays
tgccgctacgtaatctcgatgctcggtcgaggtgtctaccactgtccacctacaccttcacctcctccaccttacatgaagccatactactatcactcaccatcgactccttaccactattagctagcatacgctctatggatatgaagaatatgtgcaacgaatacaagaaagcgattgaaaaggaagaagaagcgcttcgcgatgcacgaaagagaagaattggaagcaaagtttcggcgttttgtcttttataaaaaaaatgttaaatcattataattctctatgata

SEQ ID NO: 290361 - DNA, 242 bp, Zea mays
gaccagctgaaattgtaagaatgcgctatgacaggctgaggagcgttggaggtcgcgtgcaggctgtggctggggacctggcgacacaaggcgagagagcccatgctttgctgagctggagggaccctcgggccaccgccatcttcattttcttatctctggtggtcgccgttgtgctgtacgtgacgccgttccaggttttgatggtcatagccatgctttacctgctgcgacatcccggt

SEQ ID NO: 290362 - DNA, 328 bp, Zea mays
atacagtctgatcctgggctcaagagttcttcagaccccactccatcatgtgaccgacagataatatcgagtgggcgaaaggccttcacaggatctatcgtcgagcacgacgatgacgatctttcaaccattcaaccttctgcgggcaattcgctggcaaaacctggtacttctgcgtcttcaaggcccatgtcaaaattcaagatgcagaaaggagggcggtaagtctcgataccacggggcgatgtatcttcggtggttgattagatgcatctggaacaatcatgttaagtggtagttctgtgcgagctgagcacctggaagctag

SEQ ID NO: 290363 - DNA, 274 bp, Zea mays
gcggactacacacacaaacactgtaaaggtgcttggacaaccggctcgaaacacagttgaggttgaatgacgatgacagcgaatcttgctcgagttctgatgaagatgattcgtggcactcggatgatcctaaggtgggacctgaggaaaggaaggctgctcggaaggtaaaccagaagaaagtgaaggaagagaagagggaggcccgcaagaccaagatcccaaaagctgagaagaagaagaggaagaaaatggcgaaggcaaaatgcaagcg

SEQ ID NO: 290364 - DNA, 292 bp, Zea mays
gctcgagccgcttccgtctgaagacttcgacttctcttggcttgctcatcggctgcgtctctctgcgatggcgcgtccacgcatgctgatacactacgtcccgccgtacgctacagggctacacactgctgtccttgcctcctccagctgagattgctagtgatttggcccacgcgcggcggcgcggaagctgttccatgttaagctgcagtcgatgctgctcctcccccttctccacctctcagagcggcgaacgcctgcgaaagagagcaatcaaactatgatttcccca

SEQ ID NO: 290365 - DNA, 248 bp, Zea mays
gaaatgtcctagtgaacgtgcaatagccactgcgcgagtcggggtcggggctgggtgtcggacgaattacggggaggaggcacctgctcctacgtcctctactgagaatggggtggcgcggaggtgaaggcatgaagggagagagaaaagaagtagaattacgaatgaggtggtgacaactgaggcgaggaccatcattatcgtgtggatgtatagatgaccaaatgcccgtgcgctgctacgacaaa

SEQ ID NO: 290366 - DNA, 320 bp, Zea mays
agctcgaattcgctcagagtggagcttcatgatgcctgttcaacaaatgaactgcctcttccttcaagtatcaagcttgagcgagtttgcaatccctgtcacaagcatctgatgaagcaatattctaccagcccatcataagactggaggccaagacctggaccaaaacgtttatgcaggctcctctgtacctgtgatttagctgtcaggatctcatagagcccagttcttagagtcaactaaagagttgataggaatttactaggtccagggagaaaaggcagtggttgagagtactggaagatttgctcattttctct

SEQ ID NO: 290367 - DNA, 295 bp, Zea mays
gggagctctgcatcctgatccacccctccatttttttctgcttgttgtgtccttcctgggacctgagatctgaggctcgtggtggctcactgtagcctcgctacacagttttcttctcctctcctctcctctcctgtgctatttgctgtttctcctaagattctttaggccgtgcttatccgtgctggagctgaacgaagcagcaggttgctgctgctgctgctgccctcgtgccctggtggtggactggtatcgggactcgtacttgccgtcgttttattacactctctatctt

SEQ ID NO: 290368 - DNA, 282 bp, Zea mays
agtctgtatctttttttcttaaaccatttcaatttggggtcccctatacatatccaaaacttgcatcgatcggggtcgctttgaactaacgggtcttgtcctcaagcagcactattgtgctcaatatgaaatagttgagagcatgccccttagaagagatacatctcaaggactcaagtgcagtgtgacgcctacttttggaaatgagcctctcctgggatcaggcctagatggtacttctacagccttccggttcttgttctataaaacacgggagatcac

SEQ ID NO: 290369 - DNA, 298 bp, Zea mays
cgcgtccggactggactcctttaggaaaaccatatgcacgggaccccaatggggaggctgctacgccggtcgactttggctcgggcttcatggctcccatcaaagctctcagcccagggatcatcttcgatactcatcctgaagactacaagccattcttatgtgccatatgccgcgatgaccactccgtgcatctaattaccggagacaatagtagctgcacccacagagcgtcctcttctgccactgctctgaactacccatcgatcaccattccgtatctgaagcagactattcg

SEQ ID NO: 290370 - DNA, 277 bp, Zea mays
cctggtctaactcttctgctctacacatgcagatgctgaaggcgagaagttgaagaacttgtgcaaaatcgcacagctagttagctacaaagcttgggtggaatcctgcttctctgactcccagattaggatttctttgacttcacctcccctttggaaaaacgatgcgtgtcaggggacgttcctgggcatgtatggccaaactgccctcgctctgaagattcaatgttttaattggccacgcagagctggatgccacagtgtgtaagcatggaca

SEQ ID NO: 290371 - DNA, 364 bp, Zea mays
tcccttcccgtcccctacccgcgccgcgcgttctaatttggaccagacggctccagaagcttccgccattgacctaacctaacaaccgtgtcgctttatttatcgaaccaagcccagcggcccagcccctcgtctccgcccagatccacgcgtttcggagttctagctgcgtttattgaccgctcattctctccaaggcatttttcccctcgtcctccctgcgatttcgcgacctccatccaatccctctgcacggagaatcgtctaatggcggaggagggctacaaggtgacgctgaacgtgtacgacctcagcaacggcctcgcgcggcagctgtccacctccttcctcggcaagcccattg

SEQ ID NO: 290372 - DNA, 280 bp, Zea mays
tatggtggtatgcttccactgatggaacagttccttagtaccaatttgttcatgtatgtcattccacttaaatcagggatagatgaaccactacctctcaggtcactaatcctcagatcagaaaggtttttcaattcagataggctcgagggaattggcccttctaagaaagatccttctatttgcaatttgtcaagccttttcaagtttccccacaaatcaggtatccttccggaaaaattggggctagaaatcctcagatcagtttaaatactgaata

SEQ ID NO: 290373 - DNA, 308 bp, Zea mays
tctcatctcccccgcctcatgctgcaacacctcctacccacccgacagaaatatcctaagcgccgacccgaatacccgattcgctcctcgtccggtcgattcctgctcctaatcgctcgaatcgagtccttgccccgtgttccgtgccacaatctgggcgcttggctcccgcgagcccggggtcttgggcctgggcggaggccatggacaagccggtggcgccgggcattatcaaggaggagctcctggagcagccggcgaccatactccatccagtacaatactgttggtgtagccggctgcggccg

SEQ ID NO: 290374 - DNA, 247 bp, Zea mays
cggtgagggtctgctaccctgtgtcagagcctaccttcaccacctatatccagaacgggagcttcttcagatacaggccagcagtgaccggaaagttacttaacccgctaggactgccttcagttggaacacgctggcttctgtgattaggtgaagcgatgctggaagactttatgcacagcctagttatcaaggggatgatctgccgacatgtttgagaactcactaacctctaactctcattgct

SEQ ID NO: 290375 - DNA, 174 bp, Zea mays
agagggggagaggaggctagggatagagcagcgtcatcgcaccgctcgccggcgagccacatcatcagtgaggaaggcagcgatggcggtggtggagctgtgggagacgctgaagcaggcgatcgttgcgtacacgggcctgtctccggcggccttcttcacggctgtggcggt

SEQ ID NO: 290376 - DNA, 295 bp, Zea mays
cttcctcgttcccgcatctacacgccgcttcccgtccctcccccctcttctctctcccctcccggccgaccaaaccctaaccctaaacccctcccccaccaacctcggcccagtctccccacccccactgacccggctccccacctccgactcgccacgctggcccgattcgatcgatgtacgtggccgtcctcccgacctcatgatggttttggctgcggggtgaaaagaggcacagcaagcgtcgatggcattgggagatctcatggcgtccaggctcgtccactcctcgcct

SEQ ID NO: 290377 - DNA, 346 bp, Zea mays
caccgtcgtgggagccaaggacgcgatgatgaactcgctcggcatggccggcgaggacaaggacggcaccaccaccaccgacgccggcaaggacaccagcacccgcaagcctggcagggactattagaggacacggcagccaaacttctcagtgtttctgttccagaagtttctgatcccatcatttaggttcaaaagtttctcatttcatttcaaactttcagtgtttggtgcatgctgtaaactctcttcaggacgggtcgtttgacatttgtgtcgactgaagcctccgcgctttcgactcaacgatgtatatgtaataataaagtcgcaaagctgttgtttt

SEQ ID NO: 290378 - DNA, 266 bp, Zea mays
agacgatgccatactgataccagtttcagctggtgtggcacttctttgcctcttgtgcatatttattggattcgtgatgctcaaatccaaaaagaagaaggcctaatggctaatactgtcaatttgttgcacaatttgttctaatttttgaaacagtgaatttattaaatgcattttcgatcatttcgttcgaattattagtagccactttttggttgtcttcgcatggaaatacatggatgagttaagtgaggcatgcttcaaaa

SEQ ID NO: 290379 - DNA, 275 bp, Zea mays
taacacactactttctaatacaggactgcgagagcctcaccgccgcacgcgtctactattgtcttgctatgtcctcaagccttttcagtattttcttcgtatccggtctcaacgacggtgacggattacagcaggccgtcgcctgttcgaagtaggcgtccaggcggccctccatcccggagtccttgctccgcttcagaagaagctcggagccgacagcttctgagatcttcctctccaggaccaggtctctgaaggaggcggcaggtggatgc

SEQ ID NO: 290380 - DNA, 282 bp, Zea mays
tgcgaggatcgtatcgatcaacttcaagacgactgctcatttaagatgtcggacgtagaagattaccagcccgtggtccaggaggaggttgaggtttcggccgatgccgcctccaagggccagatgtcggttctggacgctctcaagggtgtcctgcgcctgtccctgatccacgatggtcttgcccgcggtctgcgcgaggcttccaaggccctcgaccgccgccaggcgcacatgtgcgtcctgaacgaggcctgcgaggaggatgcctacaagaagctc

SEQ ID NO: 290381 - DNA, 353 bp, Zea mays
gccgattctcggctccctagctcacctctagtcttctccgtcctcctctctatgcgcgcacagggttggcgtgcgtcactgccctgtctcagctccactgtgcttcgacggctgccatggatgtccggccgctgctttgaccggcgtcctcctcgtcgaccgtcattcttctccaaaccaggatccacaccagagccaccccagccgtttgccactgccgtgatgcttcctctgctcagagctcccagccatggcgcctggccggatcttcctgcagctcgccgtcgaactccctagcgcgccgcggtcgccctctcccactgtcgtcttcttcctctgctcgcgtcgcacgc

SEQ ID NO: 290382 - DNA, 350 bp, Zea mays
gacacatcgtcatcgatcatcacacgcaatcgacacaagaagttaataaacagcccaaggacgcagagatcagctgatcgagaaggacttgtactactactcagtattgtcgtcacatgcacatatatgtacataaagagctagctacctgagctctacccaaggtcgcgttgatcgatcgatcatggcgcggttcgtggacccgctggtggtggggcgggtgatcggcgaggtggtggacctgttcgtgccctccgtctccatgaccgtcgcctatggccccaaagacatcagcaacggctgcctcctcaagccgtccgccaccgccgcgccgccgctcgtccgcatct

SEQ ID NO: 290383 - DNA, 289 bp, Zea mays
gcctgccttgttgtagtgagcactgcgaaagttttctccctctctgcagcgtttctccttcatccaaagctttaccgatttagccaggaggcggatgtgcaaaatgagagctgggtttcgaattgccactgaaataattcgcgaaagaagcgtgaaactaaacttttgtgcctaaattatatgtctataccatagtatggaacatattgtaacctagcccctggctaatgctgaagttgtggtagtactcaattttcggggatcaacgaccccccctcccgccctgaga

SEQ ID NO: 290384 - DNA, 267 bp, Zea mays
ctctgcagtacaagctactgacagctgccagaacatttctggaatgaaacttcctagctctgttggcgtggctgtagaacaaagtaccagcactgcattcttggaggccacaaaagtgtataaggagtttgagaagcaggttaagaggactgtatacctagacaacttgtcttgcctagctacagatggagtcattacgacggctttgaaccagttcggtagtgtcaaaaccgtcagttttctgaccactatacattccatttgaca

SEQ ID NO: 290385 - DNA, 330 bp, Zea mays
ctcaaccctatcctctgctcaaatacggcagctgcatctgggcgctcatctgcccagccgagattttccctgcgcccatctccctgctgtgcagctctagctccggcgtccctagtcccagccatggaactcccctagaagctgctcggccgaccactcctactccagccatggtcgcgcctcccgtgctccggctcgccggtgagccagttttccccatctccccaagctcgtcgccatggctgaagctccctggcgtccgacctggaagctggagctcctcctagagtttgacgatgccttccctatctccagccctcactagtgcgc

SEQ ID NO: 290386 - DNA, 320 bp, Zea mays
cggctcgagggacgaggtgtgagtgtcttccttcgatccaggccgcagcgctcctctctcaaacggcccaagcccaacaaggctgagatctcagagtagagcccactcgtcgggcgcgcacgcacgcacgccgtgaagacgacgacagagcccaagtcgaagcgagcggttttgccggcggcggcggcgaccggaggatggggatgggaggccggggcgtggtgggagacaggtggtcgcaacgcattctctggatctgcgccctgagcagcgccgtgagcatctactttgtggcggtggagaggcaggcgcagaaccgc

SEQ ID NO: 290387 - DNA, 256 bp, Zea mays
ggggagggcccattggctacctcgcctggcagatgatgtccagtaggaaatgtttgagtgcgagattggctgcctcagatcactatatcagcagcaacagcaacaacatcactgactcctgttcttgcgcatagtaacaacagagtccttgattcccagtttgtcaaattgtctctaaaaggtaaagatcccaactcatggcaggatactcactccaaatatgacggtggatcttggattttttgtctcgaccgag

SEQ ID NO: 290388 - DNA, 258 bp, Zea mays
gtgaaccccggtttcatgtgatccttactccttagcccgctcgaccggtggctcattcaccatggtcacacgtccatagtaaacctggtcgagtcgttcatccttcctgaaccatgccttgttgctactgtcttcgggtctttgctcatagtgtccgggcgacattgctgatgtctgtcttcttacctcgtccgccttaaagctgaggtcagcagagttttccctgtcctcgagttccactcaaagttcatgagggtc

SEQ ID NO: 290389 - DNA, 299 bp, Zea mays
cgctttcgcatcgaggcagaccacagctgactgttgtcccctgctccgcagcagccgatggccgaggtgtccaggacgccggcgtctggggacctgaagatgaccaccgtccggatcatgagcactctgaaacccagccggagctagccacccacgcactgactgggagccaaggtccccgctggaagatggaaggatggggtcatggattgggtcatttgttcctgactcttgctgcaaatctcgcactatgggcggctagtctagttgttgctgtatgatgagcgcgccaggcagga

SEQ ID NO: 290390 - DNA, 246 bp, Zea mays
ctcgagccgcggccatccgacgtgatgatcaaacggccaccatgattgacacggctagctagcctagctgaatctgatgtgcttcgatccctttggacatgccatgcatctttccatccactgcttcaatatttgctctactagagggattatcgatcgtcacaaaattgttactagtagcttttatttgtctccgtcctccatccctgttctcgacgatcgatgcataaactgatgagcaccatt

SEQ ID NO: 290391 - DNA, 270 bp, Zea mays
acggcatagctcgtcctcgccgttgccaacttgggagaatcctgatcgtgactgactgcaagatgaagctgctcgtcggaggccagaggaggcagaggggattcggcaaggccctcaaggagcagagggccaggctctacatcatccagcgctgcgtcgtcatgctcctgcgatggcacgactgatccaatccacatactgccatgggggagcttcgtccgagatacaaaccagtggattcacagggcgagctccatcgtccttgctggt

SEQ ID NO: 290392 - DNA, 311 bp, Zea mays
  unsure (1)..(311): unsure at all n locations
taaatgtgcatagttcagatgatcaaccctagtggctctgattaccttgaataaatagtctttcgctcctaactgacgaccttatcaacgcccaatctttcttggattagataagtttcgctttgctgtaagattttggtcgccagaaaatgataaaaatttgcttgttttgaagtgttcgcgagatttattttatttttccgcacatgcggagaaagtattgaaatgcacatgtaaagaggccccgagtttgatcctgaatactncggctcctaaccttggtgtgcgagagtttaatctggcgattcacg

SEQ ID NO: 290393 - DNA, 272 bp, Zea mays
acatgttggaggcagtgggtcgtatgtgcagccagcagggtttgaagaatcccctagccaccattacaacccactgcctccaacttgtcggttgtgatacgtgtcatttatgacctcactgctaccgtgataatagtgaggactctcatggctcgaacgagcaagagatgctgaacgaacttcatatactttgtcggcatccataatgtatggctcgatcactctaccattagcaggatgatgcagccttggatcctcgtatcgctgatgac

SEQ ID NO: 290394 - DNA, 260 bp, Zea mays
tcgcgccgcacgccccgacgcctgctgcaccgcgtctgcacttccgctggccaccgcgcacagaagttccgatcccgactcgaactcgacgactctcagtcccagctcctctcgtccaagaccgtcatcctgccaacctccaagaccccggccgccgcgggctttgccccgccgtcacgcctgggatcttggcacatcttcctgctccgaccaatttcgcacctcgctgtccatggagccgtttgtcacaagttcgcacg

SEQ ID NO: 290395 - DNA, 322 bp, Zea mays
tcgaagctcgaattcgctcgagcaggacatacgttgctggcctcctagtttccatacgtcgtatgctcgtgctagctcgcccaaatctcggccatggcgcacggccatcccgtcccggcctccctactcccagcaccgttcgttgaagctggccatgtctcccaactccgttcttggatctgctcagctcctaggcaccaccgcgccgccgctctagatgttgtgctcggccccctgacgtccacccaacgagtagcaacagcgccaccagctggtcctccccacgccgttggggactgctgcgtctttcctgtcgtagtgc

SEQ ID NO: 290396 - DNA, 283 bp, Zea mays
gttcggctcgagtaaaaacccaccttttgatatcgggtcatacggtgcgcaaagccttgacgcgctttcatctagaactgactgcacaggatctgcatctcttagcgagattgtttgtggcagaccgaagcatgaggttgccagaacattctctgcccttctccagctggtaaacagcagaagtgtttatctggacaaaggacaagccacgaatgagttggtgtgttacacagctgagaatccattccatgtaaggctcatcggtcccaaccggagccagaga

SEQ ID NO: 290397 - DNA, 299 bp, Zea mays
  unsure (1)..(299): unsure at all n locations
ctcgcgtacggcagctcagtgttcgcgtcgagatctatgaccctgaagctggcatatgggagcctctccctgaccttcgtctggctcatagctctgcatgtactggactcgtcatcaagcgtaagatgcatgtattgcataaaggtctatcgacagttcagattctggaagatggtggcagtcattgggctgttgaggatttctcttggntgcaaggcccgatggcgatggtcggtggagagctgtatgtgctgagtaacagctgtattatgaagcaacgtggtgagaacttccctgat

SEQ ID NO: 290398 - DNA, 446 bp, Zea mays
gcgcgaaaagggctgaggctggaagagtactgccaggaacataacatcgcttacattccctttgatacctttgcggacatcaagcgcgagattgaaaagatacttgcagaggatcaggccaagacgtgtggccatggaaagccattgcttttcaatccgagagcgaacatgtggcagcgtgtgtcgagcaagcaagctgtccctcgcttcgttgctatgactccctcaaaagaagagcgcatgttcctctggccagagactttctccgagttgaagcctggtcagccagatgcggcagccttgaagtcgccgggcgtgactaccagagccatggcatagatatgtttttattcatcttgttttgatgtatcacgatcccacaaatattgcaaagactggcgttatggatacccacattgggtgatatagggtgatctctttttgtt

SEQ ID NO: 290399 - DNA, 248 bp, Zea mays
ctcgcgcctgcgttgctctgctatttccattgcacccatttttccggggtcgcttgcgctgcttcgcgtgggaagcgtgattcgttgaggcctcgcgccaatttcggagggcgacggcgagtcgtcggcgacgtgctttcggcgggcgggcagagaaaatctagagagccttgggtttgccagacgcgcctttgtgggagacagacacttgctctcgcctccaatggccgagatctgctgcgaggaag

SEQ ID NO: 290400 - DNA, 302 bp, Zea mays
ccgcgtcgtcctctcgatgctcgcatgtgctgtggtccggcggacgcaggctctcttggagctcgagctctctatggtgccgcccaggccatgctcgtgctccatactgtctgaggctgcccggctcacgtgcctcaccaagctcaccatttgccacttctcgattaggcaccttcctcctgagattggctccctcaagaagctccaagaacttgacctctctttcaacaaattgaaaaactttcctaactgtataagtgagttgagtgcattgaagtttctcaaagtgaccaataataagt

SEQ ID NO: 290401 - DNA, 293 bp, Zea mays
attagtttggcgaataattgttcaatcatgcatgcaggcattcggcgcaagggaagccttgctgaaatggcggctcagatgatgcaggcttgaagcgtagtcaatggagcagaaactcggttgtctgaaacatccagcggttctttctctcgtgcccccgccccttcaagagctgaaaccgcgtctacgatcctcagcctctcaccccggttggcttctggaatccatcacgtcgctatcggattattacagctccatctgcttggagagcaagagctccatgcatccagcgc

SEQ ID NO: 290402 - DNA, 299 bp, Zea mays
ccttcctctctctctctcgcctcttcttcttcttcctcccctccccttctccccccatctgcggcggggctgattcgatttcgattcccttccccatccatcgcccacctcccctacagacagccaacgcaatccgctccccgaggcgcctccctgaccctgactccctccaccccacaacgtgcgcgctcactcgcgggcggggccgggcccgggccggcaggcacgctcaccggcaccacccttattaattcctcttccgcgtccgcgcttcaaaacctcctcccgtcctccgcctc

SEQ ID NO: 290403 - DNA, 191 bp, Zea mays
cgacgatattgtagagtgcagccaaataggtagttgatggcgttgagctagactaataattgcttggatttttacctttagctgccatggctcctgccgtctagtgtgtatagatgcatgcattatagttaacagattgtataagcttttttaacgcttcatcgtgattaagaaaatttgttttttacacc

SEQ ID NO: 290404 - DNA, 314 bp, Zea mays
cgtcagcttatcagtacgctcgagccagcccccaatcgggaaagttttagatcagaaccgtcagagtaactcctagcatggttctgtacagagcaggagaggaggggcctcgcatggcgatgagagcactgctctggtagccaaggatgacttgcctgtggcctccatcagtcgcagaggacgctgttcttctgcttgtggttgtcgatcgcaggcagtctccttggctagcccgagcggctctcatccaccatgccaggctcgtctcttctatttcttcaacccgactcgttcacgccgccaggcaacgaagg

SEQ ID NO: 290405 - DNA, 376 bp, Zea mays
gctcgtatgctgagcgtaaaattcggctcgtgctctagcctctggtttaacttggcactcgcgcgcgtgcagcatgaaatactgctcgatgtctgagcttctggcctatgcgctcatcttcacgctcttgttcaccgcggcggccaccccgaccgctggcctcaccatgcgtgccgatctaacccacgtcgacaaaggtaggggcttcaccagatgggagcgtctcagccggatggccgttcgatccagagcccgcgcggccagtctttatcagcggggcggccactacggtcagccggtgacggcgactgcggtacccagctccggagagtacctcatccacttcaacatcggcactgccgcgcgcgccgactag

SEQ ID NO: 290406 - DNA, 196 bp, Zea mays
cttttggtaagagcaacaaaaaactggactactaaaatttactggtgtgatttgcaactgtcctgttaccaatatttcttggggtctattatgcataacaatatgcatttgttctttggacagagattttcctcgcaatattatgtttgtttgggcatttgtaattattagcagtaaataaacaccatttgcttca

SEQ ID NO: 290407 - DNA, 282 bp, Zea mays
gctttcgatctccccaaggcggcaggcggcagcgccgtacgcgttgcgggaagatttcggttggtggattgctggcggcggctccactccgtcccagtgcactggtccaatccaaatggcggccaataatagcgacccgatccaggatcagctgggggaaggaggcgcgggcgtgaggcacgaggctgaggaggaggaggtgggggaggagacgtcttctgccgcggcgcaggcgaccgcgacgacgatgctgccccggtcgagctcgctgccgtcgactag

SEQ ID NO: 290408 - DNA, 290 bp, Zea mays
cggctcgaggggaccggaaggattagagggggcagaaggagcgagatgggttccaggaaagcacacggggttttggtacttgttcttctgcttattgttttgcctgcgctctcgatcggtatgcaccgcaggcagattgatttccctgttcaatctgttgttatctttattttctacacatttcttgttttttttcgtcaaattgtacgagcaggtatatatgtaaagagagaaaaaaactcaggaacttgtcaaaatatactcaacatgtgctattggaagtatgtagt

SEQ ID NO: 290409 - DNA, 260 bp, Zea mays
gggctctgcctccccaggatacttcgccctccgttccaccgcgagcccttccggcttccgcctctgatccgccgctccagcctccaggatccgtgagaggaaaagtagtagccccatccgcaaccggtcctaacccacgggacccaatacttgactcggctctctccatgagctactgttccatctccatttcttcaatcatttctcgcctttcatgttcaagggcgttgcttgccaaccacggtatcgttctagccgcc

SEQ ID NO: 290410 - DNA, 370 bp, Zea mays
  unsure (1)..(370): unsure at all n locations
cgccgtcccccgcaccaacccacccccaccacacggaaggcggaaatcccccacgcgaggnctnttgccttgttgcttggcgtccgtctgccgaaacaaaagtcgccgtcctcccccctcgtcgcttcatcacctcacctccgccgtcgcctcccctcatccctccaccggcccgtttgaccctctccctggctcgctcgttctcctcctcctccgtacccgtcctagtaggtttagcgctcaacagaaccccaatcaccaccccggcgccccccgagagcagttgcctcgccgcttgctgcggttccatatggtgccccccgctcggcgtgagggctgcgcgcgctcgtgctgtttatcgggaggagat

SEQ ID NO: 290411 - DNA, 356 bp, Zea mays
gagggatgagatggggatggaagagtagatggagccgtagaacgggctgggatcaacgcggaggaccggcttcccaaacggcggcgcagccggcggcgaggactgattccgggaggcccgtgccgcagagcaccacgtcggacgaggtgaggtcaatggtgggatagtcgttttccacgttactgccgccgccatcgacggccgagttggaggaatcggcagccgcctccgccatgttcgttgtgaaatctagggatcaatagagtaccgcaacaacgagcggcagttcaccgagctggcggcacactacctcccgtcgtcgcagcacgctgccgcccaatcgcgctcgagccgaa

SEQ ID NO: 290412 - DNA, 270 bp, Zea mays
cggctcgaggcggcgctcacttgcttgatatattctccagtttgatcatatttgctccaagacaaaagaaagagtgctggggatcgacgagagtattactagaattgacatgtattagtaacattattgttacctttgataccgttccattagttgcaagatttttattaagaaacaaattagcagagaaacaaaaaaaaaaaaaaaggggggccccccattagggggccttggcccccgggaattatttccgggcccgtacctcggggg

SEQ ID NO: 290413 - DNA, 286 bp, Zea mays
cctgtccatctccctgcgcttgctcgctcggatctcattcatggccactgaatcgagcttctctgctgcacgcggctcccgatctctgcttactgctcggatccgccgtcgctttccgcttcctggtggtcgagctcgccctggtcgtgtcgccgtggccgactccaaattttactgaccagtttcttccccagcgccccacggccaagtatttgcgcaccctctcggctccctcggccttaatccctacctcgtcgtcgacccatgttgtgcccacgacgtactc

SEQ ID NO: 290414 - DNA, 285 bp, Zea mays
ttttggctaggaattagcaaagacagtaaacaaagcttgatcaagcaaaactgtgacattgactactacagaaaggtctagcactactactctggcagcaatgcgcctggatttcctggttcgaactggcgtaattgacagactgtaaaaagactttcgaaagctttacatgctcaaaaatatccaagtttatcagcctacaatctattccacctttaaatatgtagtagatctaattagagtaccagatgacagatgtgtagagccttgacctgacctagaaca

SEQ ID NO: 290415 - DNA, 283 bp, Zea mays
gccgataccatttgagagaagactgttctcgtacggaaataaggaatgagtccagaaatgagtctcgaagtgaaattagaaatgaccgaatgggccgaagtagggggagggttcctgagttacctgaaaagggaagtcgaggctcaagaggttctcaaattgatagtcacagtagtaatagcaactatcatgacagctgggaaactcgaagtagctatcctgaaagagatagatatcctgaaagagacaacagagatcaagcaagcgattcttcctttgagag

SEQ ID NO: 290416 - DNA, 302 bp, Zea mays
cagaaattgacatatatattgattacattcagattcagccttgttcttcttagcattttgggctggtagaagatagtgccatgccttccaatttttggcgcttatcaaagcaaattttgtttagatcagatttctttttttctgtaacatataggttccttctccacttctgtcgagtgttctccagctagagaaattagatggccccctgtaacgccctgaatttggggtaagattttttcttcttttctctcaccaaattcgggtgttactctcttttctctttccccgtttgctccttc

SEQ ID NO: 290417 - DNA, 445 bp, Zea mays
cggagatatgataatggaccaactcaccgagctcaccagtaaaggttgtggttgtctgcttgtggttgatgaagagcatcatttgattgggaccttcactgatggtgatctccggcgcacactgaaggcaagcgggccagctatcttcagtctcacagttggagagatgtgcaacaggaacctccggacaatcactgcggaggcaatggcagttgaagccatggagaagatggaggcaccaccttcacccgtgcagttcttgcctgttgtcaacgagaacaacgtcgagtgtggaatcatcacattgcatggattggtctctgccggattgtagacttgtgtggcaccattacctgttagctagctgttaccgctggagtatttatgtggagcctgaactcttcagtgtacccttatgtacagtatagggtcgctaagaggacat

SEQ ID NO: 290418 - DNA, 303 bp, Zea mays
cggctcgagctcctcgccgcggacttcagcaacccgaggctgcagacgaacgccatgctccagctcggcggcgtacgtcgccctgttcctcggcgcgcggctcatgtcgttgctcgccaaatgggcgtagaacagaacagattcgctacccgtcagttttttctttctgccgaatcaccgtcagcgagaatttcggtgcgcagaggaagcgaggaaagaaggcccggatgtgatgtatgtaagagcactcccaactctgctccgtggtttccatagctgccacctagtcaaggaaccatttat

SEQ ID NO: 290419 - DNA, 312 bp, Zea mays
ggacggtatgtggattcgttattccagtcgactaaatgtgatatttattagactatctgaatcgtttacggtagtttgatcgggagtcgtacatgtagctgctcccttgcgttataatagctattacggtctagatagtttgcttgggttattagtttcgagtaatttaatattagtacggtattcaacatgtaatcgacgaaaaactcggattcatattcgttaatcaaagtagtgaatctaagctaaatgtattactggcgcgcaagttgttagccgaatggttagataggataaatgaatatgtgaaaa

SEQ ID NO: 290420 - DNA, 414 bp, Zea mays
ctcgctccggtggtgctcctgctgttggcaccaagaggaagaggcgcagcgggagcggtggattcggggagctagcgagggcaatcgagaccttcgcggatatgtacgagcgcatggaagcagtcaagcagcgacacgcagaggagatggagaggcagcgaatcaagttcctcaaggatctggagctgaagcggatgcggtcttttgtggacatgcagctgcagctttcgagggcaaagcacgccaggaagggtgatgcttcctcggagatgctcatgtctctcgctgcactgcccttcctcagcagctctgcttatctttaagggcctgttcagttagggatggattctccaatcccctcaatccacccctagccttaaattggaagagtttggtaaaggaatattttgacct

SEQ ID NO: 290421 - DNA, 217 bp, Zea mays
gcagccagaagggcttcaacacgctcagcagcagcgagattgtcgggaggagttcgaagctcgcacagtcaatagcactgtacccgagtccaagcacatttactaaagaatatcctacactggctcatctttgtcttttccaccattttactttcttgtaagaaaaacaattcacgaaggattaaattccaatttgatgtaataatattgtcggctt

SEQ ID NO: 290422 - DNA, 309 bp, Zea mays
gccccctcctccgacgcctgcagtggaaggtaaggagaaggacggcggtagccgtatctgttgagcacgcgactgcaccccgcctgtggccaggcggcgcccggattcgcgtcgctttgcaaccccccgcgagtaggtctattccagggacaatcggatggctgcgcatcgcctggaggctggtatgtctgttgcgctagaactcttcaaggcagtttctggaagaacatagcctcagtttccaatagggcaatgattaatgagtatgacgaactaatggacacatgtcattgattatggcattgttgg

SEQ ID NO: 290423 - DNA, 274 bp, Zea mays
ggagcttcgaatatgaacgtgccaacaaatggtcccacgcctgaagaggtagcgtgccacaacggcacgaacactcagccgccacctgatcccagatgttctgtccgtgacctccgcacacaccggtagtgctctccctgggaaccgaggcgtgtagagcctgtcgagagcggcaactggagttgtggtggttgccgcgaatggtgatgatgagcctctaaacttcactgccagttgcaatggcaggtaaatccaacggcatcccatatactta

SEQ ID NO: 290424 - DNA, 270 bp, Zea mays
atctgaatcaattgaaaatccctccaaatcaaatccaacccgaaaacaacaaagaagccctcaaaatgcacttgacgaagagcttctatctcctctttgccttatgcactgtttcctttactcttcctactcctcagcccgctccggtggacgatacattgagcaagcgttatgatggtgatgatgaatgcgatgttgtacttggaagtgacggtgttgccagcaccgatcgctcatgttaagcttgatttttcatcggcttcaatgggg

SEQ ID NO: 290425 - DNA, 289 bp, Zea mays
  unsure (1)..(289): unsure at all n locations
gcacttcgcgagcagttcccagccacgccagcttggggacaagctggttctgaaggacggtggaatgtcaacatccctcatccgagtgagcacaaggacgacgagagaagaaaggagccgatgtgagcagctaaggcgagaagccgaggagcgtcaaaggagcccaaatacgaaatagactggactgctaattgggccgtgtatcccatactgtaagaatggcataccagaaaccatatatagggattggtggccgagggaaggggctatcgagaaaataacnacatga

SEQ ID NO: 290426 - DNA, 414 bp, Zea mays
cggagacggagcggatgcagagctgtcagctcttctggcctggcctcaggagaagggcacttgcggcaagtgtcattcttgaccagccggcccgccgccctccctgtcctgcggcctcgcatttacaccgcgcctccctaggccagctgcgagcggcgagttctttaaggaggcgggcgacaggccggtaccggcgcggtgcctttgccttgcctgtcttggcgtggagtggcctgcattctcttctcggagaagacaagcaaagctaagcccggaggcaaccattcccgttcttgtcccgttgtctctgtctctcttgttgtcccttgctgctcgctcgccgccggttctcggagcgctagctgctgtgctgctgctgctgggagtgtgagagtgaggcgaagggccgacctg

SEQ ID NO: 290427 - DNA, 285 bp, Zea mays
ctgtgtctgtgtggcttggtgcaaaggaacgcctcggacttgttaaagaacgcttggacatgggtacgggcgggcacagatgttttataggagtgttttgcgtatacatataatatatgcggtgtaagagatctcggcgagcttgagctttgaccaccaatcgatcgatctcgacctgaccgcctgacttttttatataataacaaaagggcatcgtcgatcgctcccttctatactataaagaccgtgctacatcgccctctcacctcattttccttaagcttc

SEQ ID NO: 290428 - DNA, 291 bp, Zea mays
gagatttaggatttgttcggtttgaattggattgacgcggatcttaggggagttaatccccttctatacaaatttggctaggaggggatttacatcctccccaatcccaaatcccctcctaaccgaataagacctgagagggaaatgaactcaatctccctcaatccacccctaaccgaataggcctgagaggaaaatgaactaagttctccttcaattctctccaatccccggagaggggatttgagtttccaaactagccattgaagtttcgaattgccaagcaggagt

SEQ ID NO: 290429 - DNA, 236 bp, Zea mays
ctctagccgctcgaaccggttcctgctggacctgacattgcgattcattatattacaagtctcaggaagagcttagggttgcattaccttacaagcgaccgttctatcatgctacttttagtaagagccaaaacttgaatgatgcgtcgtaaattggatctgccgtttgtgtttaataaatatttgttaacagtaatttttttctttttgaaaaaaaaaaaaaaggggggcccccc

SEQ ID NO: 290430 - DNA, 245 bp, Zea mays
acgttgtttaggatcacttcaacctctgagctcacgccatcaataagcttagccttctcagccagtgcgacagctgaatcgaaccttccaaatgtcacgttgaccttggcttggacgatatggacataagagtcagctgacatgcctgagactctggctggcgtcgaaggcaacgacgcgtcatccagtttcaacaagcttgtaatagtcaaatcagcttcctctaatttgtgcaaccaaagcaa

SEQ ID NO: 290431 - DNA, 252 bp, Zea mays
atatacactaatctgaggagcatttgcattggatgtgttgtagtgcagctgaggcccctgtttacttgtgctttcctttatgcactatgatgacataattgccatggaaccatgttgtcattattgcccgtgttaatgtggatgatctttaaattgtgaggtactgggcatatgctgaaaattatgttgtttccaccatgttgtgattattgccatggaaccatggggcacatccatgcccaatgcaactgt

SEQ ID NO: 290432 - DNA, 268 bp, Zea mays
ggaattccagcgatacctcgttaaatcaaccgagcagccgctcctccccctgtcttcttccccagccggcgttcttccttcctggcgttttcctcctctctgattcgcgcaggagcaagggagctcccatggctacctccctggcgccctctccacccagcacgcagaagcttccagggagccgccgcccgcctctacagctccctccggcgtcggctctccaacaggcttccctgccttcctctctttcgagcccccctggttttcg

SEQ ID NO: 290433 - DNA, 259 bp, Zea mays
ctccgctcgattccagtggccctgctgccctcgtcgtccctctcccgagcgagagcagcaccggcagttcggacaggttgagaatctgcttctcaattgcctcttctgctctgagatctcgccttttcttccggggatttgagcccttttgcttttatcgggatggaaacctacgcatcgtgaactcctttcttgtggaggtgcagtgaagtgggttctcgagggccgtcgccttggaggagtaaaggtgtggtcttgc

SEQ ID NO: 290434 - DNA, 268 bp, Zea mays
gtgctcaagacagttctatcctctacaaagaccgactcgccaaaacaggccgcttcacagttggcattgacccggacaaattcaacgagacactcaagcaagatgaagtccaagcacgcatcaaagaattgaacgaacgatacaaagatatgaaagtgattgttggcgttgatcgattggactacatcaaacgcctgacacagaaattgcatgggttcgagcagtttttgacggatcatccgaaatggcagggaaaggttgttttgat

SEQ ID NO: 290435 - DNA, 372 bp, Zea mays
gtgccatgttgtcttttcgtgtcccttttaggataacagagtgagtgttacctctgtactaggaggaacatctgataacaccggttcaataacagaaaggttgcaccctacatgtcccagtgctgaagactggcctgaacatagtcctggcatgcaacatcccaaaggacagccccatacttgaggctgctgcggagaggaagctggttgagaagctgaaaggtttgggctacattaaaaccccagctgtgggggctaacacttcctcggcacaatgatccgtggtgtgatctagtgagctttcggtcgacgtgtagcttcatcactacatccagcagagagcggttgtgatttttggcgggctttgactgt

SEQ ID NO: 290436 - DNA, 279 bp, Zea mays
aaacaaaaatcagctgagcgaacgaacgaagagagcacaagtggttctcagggcacaactgacaattcactacatggaggacagatgataccctgtatgtgaagaatctacaatggagggatagggcatcaaatacattatggggtaaaagattaaagaaatgactaaacaaattcctgcaggtgttagttcagccttcttccaaatgtagctccttgataaggcaaattgtccgactgttacgtcctagatatggtacaaaatacaacaggacctctc

SEQ ID NO: 290437 - DNA, 280 bp, Zea mays
ctaaaaactccaaaaatggctacagaaagagatcattgtgaacaacttcgaagatcagacaacagatgaaactgatgcaagtagcgaaaaggcgctgttgaaaacgctcaaatcctatttcaaactgtgctctcaagcggaggataagcgaatcttcttgaaagacccgatgtttggcacgatgctcttgaccttcatctcggattcccgtcctttggtggtccactatgttgcaaagatcctaatcatattgacggagaaaagcgaaaacgcaaagctt

SEQ ID NO: 290438 - DNA, 335 bp, Zea mays
gccagaatggcttcggcagtctgcacaaatggttccctgcaagctctgcaaacgggtccctcttctctctcgggctcccacgaggccacaagtccataacgcctgcacggagcggagccggagccggcgacgacgacgaacggcggcgcctcggtttctccgcggagcattcggccgcagccgctgcaacggcttgcagctactctgttgtggccgatttgggtccccaagcagcaatgcagcagcacgatagacttgtctacttgtcgttccatcttcatcagctgttctgttgaccaagacgtggcgctcacgtctgcacgaaccggatccaa

SEQ ID NO: 290439 - DNA, 232 bp, Zea mays
gcttagtttgttctaaacaaattatcgcgccctgatattattgcttgtcgcgttcgcgtgcgcaatgctttgctcggcgcaggcaacggaggacgtcctcgccgcacagcgacgggtaccagtggaggaagtacggccagaagaggatcactaagtcgccgtttccgaggtccatatataatatccctcttcctacttattagcatatatagtacttctttgctaccttagc

SEQ ID NO: 290440 - DNA, 187 bp, Zea mays
ggattcgcctgcctaccagtaaaatcactatcacataattcggctgttacttgttagtttgcgcggaacttgaaaagtgaaatggccagagatttgacccagtttccgcgtgtaaatattttcgcaagagagctaacatgttacaaaggtgtccttttttcaaaaaaaaaaaaaaaaaaagggcggc

SEQ ID NO: 290441 - DNA, 356 bp, Zea mays
cttccagcaggccatcaccatcatcgtggtggccatccccgagggcctcccgctcgcggtgacgctcacgctggccttctcaatgaagcggatggtcaaggaccacgcgctggtgcgcacgctctcggcgtgcgagaccatgggctcggtaaccgccatctgcaccgataagacgggcactctcacgcttaatcagatgaaggtgacggagttctgggtcggcaccgaccgacccaaggcggcggccacggtcgccgccgccgtcgtcagttttctgctccagggagcagggctcaacaccaccggaagcgtgtacaagccggacaacgtctcgccaccggagatatcgggcagcc

SEQ ID NO: 290442 - DNA, 285 bp, Zea mays
cgcggacttcgtgaaggaggcgctgaagccgacgtggaaagacgggcagatgagcagggaggtccacaagaccatcgtgaagaaggtcgtggacaaggtgacgagcaccgtggagaacacccctccgaccaaggagaagatcgacgtctacatgacctactccaaggagaaactgaacaagctcgtgcaggcgtatgttggcaagtacgccaaggcgtagtagcgtttggccaagaacacactgacgcccattttgtgccccgaggtcggaaggatggaaagcac

SEQ ID NO: 290443 - DNA, 348 bp, Zea mays
ggcgcagtatgcgctgatcggcgtgtcggaggtgatgatgtacgtcgggcagctcgagttcttcaacggccagatgcccgacgggctcaaaagcttcgggagcgcgctgtgcatgatgtccatgtcgctcggcaactacttcagtgacatcatcgtgagcgcggtgaccaggctcaccacgacgcgagggcggtccgggtggatcccggctgacctcaacgaggggcacctcgacaagttctacttcctgctcgccgtgctggccgtcgcggacttcgccgtgtacctcgtatgcgcgacccgctacgggagcggcaaagtggacgggaggagcagcgacgacgagga

SEQ ID NO: 290444 - DNA, 258 bp, Zea mays
cgccttctggcgttataaggggtcgggctatgctgtaaaaaaagtgctcttagtgctatggcatggacttgaagatctgatctagctagccaggtatctaactaaacttgtttaacataagtttcatcttcaaccttttttctcatttagttatgcatgagcatatatagctagtactatgttcttgtcaccttcacctgtgaatctttcagcttttttttgaagcatgtgtagttgtgttgatctcatagatcccat

SEQ ID NO: 290445 - DNA, 129 bp, Zea mays
cgaccctagaatttaggttccggcctgagaatatatactctttgcaacggatgagatgctcttatttcatttagcatcgtttttttttgtcggaaacttctttatgtatgcagtgccaagattaccact

SEQ ID NO: 290446 - DNA, 261 bp, Zea mays
atccctgcagtgctagacaaccacagctgcaccacaagctaagctaagcgccacagcttttctcccgacgaccatggctagaggaggaacatgcgtatcccgccggcttcgcaagatgctcaccacttcgctgctattccggaatggaaagaccgcggctggagcttcgcccaggcagatccacatcgcccatctgtgaggaggcatgtgcacgccgctggcaccacatgcgccagtaggggtcttcctgcacaggctcga

SEQ ID NO: 290447 - DNA, 258 bp, Zea mays
aggtgcgattttttttgttcatgttacttggcttaatttggcggaagcattcagatttttgttgatgaaccttcggagcctgttctttgcccttttattttggcgttttaaatgtgattttgatggctcgttcctaatcccgctaaccagtgcacatatgattctgatccagttaggatttgaatctcacaactgtactaattctcttgattatatgaagctatgcgacggttcaggaaaagtggatggatgggacaa

SEQ ID NO: 290448 - DNA, 259 bp, Zea mays
cttcaagtcctcaaccgttcagaacaatgaaaactttattggttctggctgctgttgttgggttcattgctttctctgacgcccctcattggtctcggaggtggcggcggaggttgcggttgtggtgctcctccccctccagcttgcggacccccgccatgtgctcctccaccagccccggcctctgcaccacctgctcctgcctgtgctcctcctccaccagctgccccagttggagggtgcggcggagcttccggat

SEQ ID NO: 290449 - DNA, 271 bp, Zea mays
ggcggcgactggaggcgtgaggggttgaccagccactgccaaactttagcatcaccatatctcaacgccatcaagctgtctgtcatcagtcatcacggcacagcagcttctactggccttagctcgatcgttccaatggagcttccaccatgggacgtcttcctcggcatcgtgctagccaccgtactggttctgaaagccctcaccggccgccgcatccgccgcatgtacaacctcccgcctggccccaagccgtggccgatcatcggca

SEQ ID NO: 290450 - DNA, 269 bp, Zea mays
cttcggcacaccgcagcattcaaaatgggtcgtcttcactccaagggaaagggtatcgcctcctcggccattccttactccagaactcctccagcatggctcaagaccactcccgaccaggtcactgaccagatctgcaagctcgccaagaagggtgccacccccagtcagattggtgttgtcctccgtgacagccacggtatcgcccaggtccggaacgtcactgagtacaagatcctccgtatcttgaagtctaagggctcgccctg

SEQ ID NO: 290451 - DNA, 262 bp, Zea mays
gttcccgttataggcgccgaatcccttgccgtgtcggcgacgagaccatcaatgacgctatgcacagtcgagaaacttggaagttggtcccttcttgccgtctgcttcgcatagcacggcagcgaggagctggcctaacaactagtttagtgtctgcccactgcggacctggagtacatgaaggatatgcatcgcaccagcacgatgacgcagtgatggtacttctaacccttgtactatggagtactccagtaatctccac

SEQ ID NO: 290452 - DNA, 261 bp, Zea mays
gagtgaacaaagaaagggccgttctgccaagaagtacaccttcagaggtctctcccgcgaagatctcggtgccctcaacactgaccaactcaagggccacctcagagccagaatcagaagaagattcaacagaggtcttaagcataaatacaccagactcgtccaaaagctcagaaaggccaagatcggtgtccaacccggtgaaaagcccgttgccgtcaagactcacctcagaaacgccatcgtccttcccgaaatggt

SEQ ID NO: 290453 - DNA, 282 bp, Zea mays
gtacttctctatttcatcccaaatacgcacagcgcgatctcccgtccggcgcgcacacacgtacatacacccacagagagaagaaaaagaagaagaagaacatcttattagcatctatccgtcgcgtcgctgcaagcagctagctagcggattgcatcgtcatgggttcttgggtgcgcaccatcacgtcgcccttcagcaagatgctcaacccacagcgcgacggcaagacgaagacgccgcgccaccaccaccaccaccaatctccttctccttcttcgt

SEQ ID NO: 290454 - DNA, 335 bp, Zea mays
cggctcgagagcaagtgcatgccgtaagacacatgcatgatgaataaacgatggctgtcgtccgcacccgcgcacagcacacggttcgtacgctttcctcgtcaggtggttccagaggttcccccagcacaaggccaaggagttctacatagctggagagagctacgcaggacactacgttccccagctcgcagacgtcattgtggaggggaacaagaaggcctccgaagaaaaccacatcaacttcaaaggcatcttgatcggaaacgcgtacatggacggcgacaccgatctggtgggcatcttcgactcggcgtggcaccacgccatcatct

SEQ ID NO: 290455 - DNA, 285 bp, Zea mays
ccccaccttcttcgttgcctctcttcctccctctcctctcttccttcctctcgatcgatcgtcatagcaatccaagctagcaagcccgtccgtcgtctctcgtccaagaagcatacaactactaatggggaggtcaccgtgctgcgaccaggacgcgggcgccaagaaaggcccgtggacgccggaggaggacaagctgctggtggactacatcaacggcaacggccacgggagctggcgccgcctgcccaagcacgccggcctcaaccgctgcggcaagagctg

SEQ ID NO: 290456 - DNA, 389 bp, Zea mays
gcagcagcccctggggtcgctgccgctggtgcacgtggacgacgtctgcgacgcgctcgtcttctgcatggagcggcgcccctccgtcgccggccgcttcctctgcgccgccgcgtacccgatgatccacgacgtggtcgcccactacgccagcaagttccctcacctcgacatcttgatagagacgacggaggcggtggcgacggtgcggcctgcccgggacacgttgggcgaagctgggcttcaagtacaatacggcatggaagagattctggatagcagcgttgcctgtgcggcgagatccggttcccttgacgcatccaagctcggcctacagaaaggataaaagctcgaagcttactcataagcaccatggggaacttggattg

SEQ ID NO: 290457 - DNA, 256 bp, Zea mays
attttgtttaccggcatttcaattcttgttttttgcactaaggagggcttggatcaggaattagaatctatttaatagagtagactatctggtttggaattcgacattccaccactttctaaagtctacctcaaatttatatttatagggtggagaatagaaattgattccatgtatcttcgaactgtacttctattctgcaatctgtaacatgttgttccgcttgctctcctacaataaaaatgtatggagtagc

SEQ ID NO: 290458 - DNA, 279 bp, Zea mays
gtaacagtagctatgcctatgaagctgcacaatttagtgacagcagtgcgtatgaatcggattgctatgatgtgaccatggtctcagtcatgttcaagatgctattgtactattctctgctaataactaaacagcttagctcaaggaccggtggcttggattctgattccattcactacccacagatttcctcgtccacggccaggtaggtttgaccagctcagacctgtgttcggtttactgcagtagctgtggtatgattttactacccacagattc

SEQ ID NO: 290459 - DNA, 275 bp, Zea mays
ctgctgtacgcgcgcgcatatgtgatgatgtacaaactgaaggtacgcggtggcggtggcggtgatcgcgatggccgccggcgtgctgcagatccccgtctccgtctacctcctctgcatgagcaagcgggtgacgcccagcgccctcatcctcgacatcagcctgtgcgccgacgtggtggtcaccgttctgctggccagcggcgtcggcgcggggttcggcgccaccaacgacgccttgcggtacgtccaccacgtgaggtgggacgacgccg

SEQ ID NO: 290460 - DNA, 261 bp, Zea mays
cgaagaccaccattaatcgggttagggtgagggagaagcgctgtcaccaagagcaatgagagagggagcaagccagccgccgccgcggattctcgttgccaacccggctcgagctcccgcgtggctgcctgggggtggcctggccgcatagaagctgtgggaggggtcaatcgaagaggaaactggctgaagcatcactgattcatcgctggagtatcctcaccgccatggagacgcgcacaagcgtgggcaggaccgtcc

SEQ ID NO: 290461 - DNA, 260 bp, Zea mays
gctcatattagtgataatacagctaaagctttgcagtgtttgaaacaaaatcctaatttaaaggttgaaactgcattgcttcaagctacaatgtttgatgatagatcagacgatagtgatggggatattgattttcctccgtatgttcctggtaggaacctcattgctacaacaggtaaactagaagacttggcaaaatctgatatgaaagattttgtccgtcaattatatgacgaaccaaagattttaggtcaagagtt

SEQ ID NO: 290462 - DNA, 273 bp, Zea mays
ctaggggcgaaaaatggcttagttcaatcgcaaaaaggttacatcctgcctatgctacccagtaaccaatgcacatagacctgataaactgatacaaacctacggctaggctacgaagcatatacagtggcatgtactgatgagactggtttacacacaacacaacagctaattgggcatcttcgacggagctcatggaggttagcaacaagacaccctggccatcgaccggaaagaacgcatcatggccgatgcgaaccacccttctttccc

SEQ ID NO: 290463 - DNA, 266 bp, Zea mays
tctccatcttgtttccatttcgcgtaacttttcgcggaattttacatcaactttaaaccaacccactttctatcatcatgactggacgcggcaagggcggcaagggcctcggcaagggcggtgccaagcgtcaccgtaagattcttcgtgacaacatccagggtattaccaagcccgctatccgtcgtctcgctcgtcgcggtggtgtcaagcgtatttctgccatgatctacgaggagacccgtggtgttctcaagtccttcctc

SEQ ID NO: 290464 - DNA, 284 bp, Zea mays
ccgaccctttgatgaagccggcagcgaacctgggaatggcgacggcggcgggatcccgtctgtgagctcgcgctggcggtaccggccattacggtgtacgggtatcgtctaaaattaaatcaagcaatagcatcttgttttgatatgttgctgaactatattctaacttcatttaattccatatgaaaagagtgattatgtgaagttatatgtaaatgaatcatatataattatttttaggtagccatatttatatagtttgtgatagttcaaaatagtacatc

SEQ ID NO: 290465 - DNA, 167 bp, Zea mays
tttcggcggcgcaccccaccaccggggacaacatcctttccaccgccactatcgatttcagcgattgacgttgggagacatacatacgcttgcgtctatccggctgggtgttcttgtattgtatcagcattccccgttctcgtctctctcgtctctctctctctctc

SEQ ID NO: 290466 - DNA, 272 bp, Zea mays
ctcagcgcctcagcggcgttcccgtctcctcgttctctcgctcacccggccccgtcggccatgaacacacgagccagcgcgccaagcaccggccaccgtctccggccttacctgatctgacctgacctgaccggctgcatcgatggttccgcaaatacccgacccctgcgaggacgatggccaagatcaccggtgcccgcctgctgcggctctacctcccccgtggccttaccctcctcttcctccccccgcctcccacggccgcagcacct

SEQ ID NO: 290467 - DNA, 263 bp, Zea mays
cagcgcgcgaaccaagtctgggcaccagccggcagccgccaggatacttgatggacgactgtggcaaacctttcgtgccgagagagctcagactctccctaaatcctgctccttgcggcgacgacaaccccactactcccaccggagccgcctccgatggcggctcgtcagcctgcacctcggccgtcgcgctgttcgttctcgggctcaacagcgcaatagccatctacggctcgagacacgacccccagtccatactgttt

SEQ ID NO: 290468 - DNA, 272 bp, Zea mays
cttgtcttcttcctaacaaaaccaattcacaaccacagcatgccacattcaaccaaccacaacctatttcagcagctgtttgcgacaggggcgaccatgattagcataacatcccatcattacttcgctggtcattacaatgatgcgcagttgaaattttacagaacctcaaaatgggctgacgacgaatccccctctcgctatacgccccgtcaaataatatactactaaacacaggcggcaccagggtgcactccacataatactcgctg

SEQ ID NO: 290469 - DNA, 261 bp, Zea mays
ccccactccaccaaaccctcgcgtcgctgggactgggagcagagtagagcacagcggagcagattagcagaaggtgtcgagtggaagcaaatggccaatgagtggccgcggtggtggtagcatcctcctcgccttttctccccgtctcccgcgttctggttgttgcagcgagcgggagcgggaggccacgtcctacccccgtcgcttctcgggcacgcctccctcactcggatctgggccgcgcgcgcgagatcctgagct

SEQ ID NO: 290470 - DNA, 303 bp, Zea mays
cgcggacgtaggcacgcggctcgaatcgagcacaaggtgggcgtgggctccaagatacactcaaagtgcactccaagaaatttgttggaatacttaacggcattgacacagatacttggaatccgtctacggataggtttcgcaaggctcaatacagtgctaatgatctatatggaaagtcagcaaacaaagcagctcttaggaagcagttgaagcttgcttccacaccagcttctcaaccattagtatgctttctatcctcacaaccttgtacttgtttgaacatcttcctctctccaagat

SEQ ID NO: 290471 - DNA, 260 bp, Zea mays
ccccggcttcgggcgcggcgcgctgtccctgccgtcgcagctcaaagtggaccacttctcctactgtttcaccgacataacgcggccggagcccagctccatcctgctcggccttccggccaacctttacggcgacgccggcggcgtagtgcagtccactcctctggttcagaacttctcgtctctggcactatactacctgtcactaaagggcataaccgtcggctcgacgaggctgccgattccggagtcaacgttcg

SEQ ID NO: 290472 - DNA, 286 bp, Zea mays
caaacttatgcaggtaagactgaagggaggccagacgcccaaggcactgaagcaatgcatgatatgacacccatctgctcctagcctcgccgtccccgctgggtggaggtggaattggaaggaaggaacctgaagatgcacggcgcggcggtcttcgtggtgcagaccggcagtgcagtgcactgcagggggctcatccgcgcccaagttttggctcgagaagctgtgcataccgatcgccgcgtctgtccgtccactccctctgcgtctgtgaatgtgtgccaga

SEQ ID NO: 290473 - DNA, 359 bp, Zea mays
cggctcgagagacgctgtaaatttttttccgagtgtgatcgaattttaccgaattcggcggggagggaaggataaggagatgtcggaggagcggcaaggcaggaagtgacgtgccgtgtgcattctgttctgcagtgtgtggcttgaacgatttgttttctctctctctctttctctttatcgctttgtgtagtgccatttttttaaattttttcacgcatcttcttgttggtagcgcaagtacgatttggtggtctcttacttttaaccatgtaatcctatagtgtctggaatgtataattggtagtgacatgaagtgtaaataaaaaagattctgttgaaaaaaaaaaaaggggggg

SEQ ID NO: 290474 - DNA, 250 bp, Zea mays
catacaccccctcttgcccacaccacctcgctgaaccggaagacccgcacacacacgccacttgtagaccatggcgccccgggtggcggacaagtcgcctctaccgccggccaccggcctggggctgggcgttggcggaggagtcggaggcgtgggcatgggcccgcactacagaggcgtcaggaagagtccatggggacgctacgccgccgagatccgcgaccctgccaagaaaagccgcgtgtggctc

SEQ ID NO: 290475 - DNA, 289 bp, Zea mays
gccgggctgccgttcttcaacctgccgctcaacaacatgtccggtggcgggtcgccgctcccgcccggtgctgacggccatggttgggccggtgcacggccgccgttctgacaagtccatgatgagccggtggtgtaattcaggtttgagagaacacgaagatatcaagaagaaagcaatggtcggctcgatggttaagggcggcttgcaaaaggttagcgcacgtatgctagcttgcaaggatatcatatctatctatttctatctcgatctctgtacaactccgtag

SEQ ID NO: 290476 - DNA, 280 bp, Zea mays
gcatcagcacgcccaacagcacaggccgcaacagcaatataccggaaactaccacggcggcggacaatactacgaggactacagcgagaattatgcccagggtggtcaagatggcgcctacttcgatcccgtgtcaaactcgttcgtcatgccctacgctcagcccgtctcgcgccgcgccatgacacctccgctcttgggacagcgcttccccggcccacgcggacccaatcgccagttccacggctcgatgggtggtcagcgcatgcccggcccacca

SEQ ID NO: 290477 - DNA, 275 bp, Zea mays
caaacatcgctcaacgctttttgatattttcgtttactttgaaattgcataaacactttgaaaatgtctgctaaagctatttgtgtattaaaaggagacgctactggagttctgaattttgttcagcagggcgacgctgtgcatataactggcgaagtgtcaaatctttcgcctggtcaacacggccttcatgttcatgaattcggagatactagcaatggatgcatttcgactggtgcccattttaatcctgctggaaaaacccatggagctcc

SEQ ID NO: 290478 - DNA, 267 bp, Zea mays
cacgaaccaacaacacccagttattgctctattactactgttctgaaggggacactgttgggtggccgtgaagtcgccgtcaagaggctgagcagggactccgagcaagggacggaggagttcaagaacgaggctaccttgatctccaagctgcagcaccggaacctggtccggcttctcggctgctgcacggagggagccgagaggctgctggtgtacgagtacctggccaacaaaggcctagacgctatcctcttcgacagcgag

SEQ ID NO: 290479 - DNA, 148 bp, Zea mays
attcttttattcaaaaaaatgcatggtaacacaaacacaatttatgatcttctccgtcctgcaagcgtacagcagcctggcgtccgcttgcatcacggacaagttcataaattgtgtttttgttaccatgcattctatttattcaaaa

SEQ ID NO: 290480 - DNA, 284 bp, Zea mays
tggggtgtaagcctatcttcttgtcaatccagtcctgctaattagtaaaaatccataggatcttacgaggcgagtgaacggttgcttaccatcatatttaggctacttacccttggtatgataattgatggaaatttttttagatccaagccgaattgtgttggatgatatggaaggtgaagcactcaacctccgccgggagcggtatgctatgatctgacttccaggcatttgaaattgtgcgtgctcaattcgcggtccagtatattgaccgagcatttgat

SEQ ID NO: 290481 - DNA, 252 bp, Zea mays
gtttttgccaggcaactcctcatggtgtctcaaattacgttgctagtaggcattatcttcagcttcaaagtcacgagcacatactatgtcgtccagtatgttgtctcagcactggtcacatttgtttctgccgaagttcttgaaggcgtcaacctttccctcctatcgagcgtgccctcgtcccgcctctcccgtggcacgtacaacggtggtctcctctcgacggaggttgggacctgggccagggtggtc

SEQ ID NO: 290482 - DNA, 260 bp, Zea mays
ctcaactccattatcaactacacccgcacgctccgccgcggcgttggcgcaccacagcccactgcgcagtagctctccgctcatcggtggtccatcgttttttattgtttgcttaatgtatacaagtacttgaatttatttgctcagcacaagggtgccaaaaccagatagtttaatttaaatgtgattgtgtaccactgtggcttccttatatatggacactagtccacatgattaatatatatccataattatcaaaa

SEQ ID NO: 290483 - DNA, 252 bp, Zea mays
aaccatgtggattgaggggtattggggtgtattaaggccttgttcggttatttccaatacatatggattggatgagattgaaaaaaattgagaagaagtttgacttgtttaggattcaaactcatctaatctcactcaatccacatggattgagagctaaccgatcaaggcgtaaggtaaattttgactagttgtggatttatttcctctcaatccacatggatttggaaaaaaatgaacatcataatattt

SEQ ID NO: 290484 - DNA, 277 bp, Zea mays
cttcgagctttatacactactaaccttaagcacttttttgctttcaagcttaattttattacaaacttttaatttactctaatcaattaaaatgttcaaatttgttgttctcgctgctttgctcgccatggccaatgccaatggtttgttgcacgctggttatgctgccccagctttagctgccgttccagctgtagctcactctcaagctgttgttggatcagctgttgttggacatcaagttcattcccaagtgtcttatgtaccaaaagttgtt

SEQ ID NO: 290485 - DNA, 428 bp, Zea mays
gggatgtctgtcctgcatgaattcagccccaaaaagtatgtccatggtgacttgaggccaaacaatgtcctccttgggacaaatatggagccgttcatttcagatttcggccttgggcgacttgcaaacattgctggcgcatcaccatttttgcaatcagaccaagttgaattagaaaagcagcagattcagcaaatagatgcctcagtgagccctctcatgagcaaagggtcatgctaccaagctccggaagcgctgaagacactgaagccctcccagaaatgggacgtttactcctatggcgtggtgttgcttgaaatgatcactggccggtcgccctaagttctcttggaaaccatgcagatggatcttgttcaatgggtccaattctgcatcgaagacaagaaaccttctgccgatgtgctgga

SEQ ID NO: 290486 - DNA, 258 bp, Zea mays
gtgagtgctagtccatgcagttatgtggagcgagcccaacaacgataccagcctagcagtaaggtctccagaccagtccaaccacgatgccagcccatatgatggtcgtcagcatctcctccaccaccagcccaccaggttgatggagtatagtatatggtttggtttggaacagagttggtctcgttgtccccccggaacaacgacaacgtgatggtggtggcgatgcgcaacgccgcggagccggcgtggcgacag

SEQ ID NO: 290487 - DNA, 251 bp, Zea mays
cgaaaaattgatgattcagtggacaatgtcaatattgatgaatctgaggacaacagtagtagacaaggggtcaagagaaggcgcaaaagggtgaagatgaaggctacagctgaaactgaaaggagcaaaaaggcagaatctaaagtttgggatgcctttactaaggtgactgtgccggataccacagagcaggggaagatgatatcaaaggcaaaatgtaactattgtaagaagctatattcttacataca

SEQ ID NO: 290488 - DNA, 259 bp, Zea mays
gtgatggagaacatcttgtttggacacaatgtgtcgcggacatatgatctgaaaggcgccatcttttcacgttatgtctccgacccaaatgaccatgctggcactgtctacttggaccagaactttgtggatgacatgcgtgtttctccaatctatattggtggaagagcaaagcatctcttggagcggcccatctggaacgacacgtcttttctcacgtccatcaatgtcatggactactctttgctggttggagtgg

SEQ ID NO: 290489 - DNA, 292 bp, Zea mays
gggactactccggccccaagctcatcagagctccgacgcggaccgcgccatggccctcgcggcgtagcggcctacagatccgcaagttttgatcgccgcccgatgtgtgtgtgtgtgcccctggtcaggtcacacatcctaaaacgtggacaggtagtatcagtctcggaaatgaaaacccgcgcagatagtcagtaattaagctagtgatgtatagtagagtatatacagaacactagaacagaaaaagaaaagcaaatggtagtgtatgccttacaatataatccagtgt

SEQ ID NO: 290490 - DNA, 286 bp, Zea mays
ttggcagcaggctgcaaacatctccattaccaaatgtgcctgtggggaccaaaaagggttcaaaaccatcccaaagtatagttcaggcgcttgctacaagcgatgtcactagcctgctgacatatcagctcaactcccccacaggaaacaatgatgccgtaaatctagaagctcatgatgatcaagatgatggacgcagcaaagagcaaggagcaggtgctgtaaatcaagaacttgatggtgaacaagatgatggacaccgtgaagaacaagcagcaggcatggt

SEQ ID NO: 290491 - DNA, 277 bp, Zea mays
catattcccatccggaaaacaaagcagcaccagcacaacagatcgatagcaagagctgccgctgcaactcctactgtttcttccggccgggcactaccggtcagaacaatggataacaaatcagcctcctcctcgtgcgtcatcaccccggcggccacgtccaccatgtcatcagccggcggcgtgagcagctgggccgtgcacatcgcgaacttcccggcctccatgccgcaagacgacatcgcaacgacggatgatccgcaagcggcggtctctg

SEQ ID NO: 290492 - DNA, 218 bp, Zea mays
atagactaggctccaaccggttcatagaaacagtgcccggtagagatggacggtgatcacctgattagtaccttctaagtatagtcatgcactagagatggaaggtgatcaccttgccatgcacgtatacaaccttgccatgcacgtatacaataatggtggcatgcaatagtaaaacaagaaagatgatcaatctaaaaaaaaaaaaaaaaggggcc

SEQ ID NO: 290493 - DNA, 273 bp, Zea mays
gaaactccgaaagacgtgggtgttgactatggcatgcactgattttttatttttgcagcggtaggtctgattttggaagcaggagtcgttacatcacattggatgcacctggctcatcgtcgttactcttcacctggcacagtggcacctaacacgtgtgcattatgttgagtcttcaagaagaacgtcaatcagcacccaggtggatgtcctgcaagtgcagtgcaacatggcgctctggactattcaagattcaagtcaaattaggctaag

SEQ ID NO: 290494 - DNA, 359 bp, Zea mays
gcgaggcgtggctgcgcgactcacccacggagcattgccgagagggtcagttcatctactcgatccttcggtccttcccaaacgattcgctaaaaaaaagcacggcgcaatatatggtgccacactctgccagctttgatgctagctggatgtcagcacagaaaccaatttcgttttccttgttcgctggcgtacgttcaggaaagaaggacgaggatcagcaagaggctgaagaagctgcaagaccttgtgcccaacatggacaaggtaagctgagcttaagatctgcaatgagccatagccattaagatctcgttgttgttcgttgccatagccattttcatcagcgtgtttattgg

SEQ ID NO: 290495 - DNA, 257 bp, Zea mays
ggaatgactcgtgatgatttattcaacacaaatgctagcatcgtagctgctttagctgatgcttgtgctcaatattgtccaaaagcttttttggctataatttcaaatccagttaactcaacagttccaattgcaagtgaagtgtttaagaagcgcggtgtgtacgatccaaaacgtattcttgctgtaactacacttgatgtggttcgtgctaatacttttgttgcagaacttaaaaagttggatgttgcatccac

SEQ ID NO: 290496 - DNA, 273 bp, Zea mays
caccgccaaaatggtcaagaagagaaagaacaacggccgcaacaagaagggccgcggccacaccaagcccatccgctgcagcaactgctcacgatgcactcccaaggataaggcgatcaagagattcaccatccgcaacatggttgagtctgctgccatccgtgatatctccgatgcctctgtcttcgccgagtacaccgtccccaagatgtacctgaagctgcagtactgcgtctcttgtgccattcacggcaagattgtccgtgttcgttc

SEQ ID NO: 290497 - DNA, 283 bp, Zea mays
gcaagaagtggtggctgccacctcctgtcgtgcacatcgtctgttggaatgggagatgtggcggatcaagaagctttcgaatgggtacgtggtgtgcctaaaatagtgaaggccctctgcattatcctcaggctttctgacgatctcaagtcatatgagcgagagacaatgaactcgcatgtcgcttcgacgatgcaaagctgcatgaaagagcaccaagtcccactcgaagtggcacgcgtgaagatccaagaaacgatagatgaaacctggaaggatttca

SEQ ID NO: 290498 - DNA, 280 bp, Zea mays
tatgaattctggtttctgaattgtctgtgcctcctagtgcatgacacttgcaaagagatggacatcccccatctagagtctcattaatctgtccaaagtagaatgttaggactatcaaggtgtagcagcatgtagtaagattatttactaaccaagatatgcatattattacagggtctgattgattcctgaagggagctttatacagactctacagtggttatatcatgctattccaattgaatttaccatgtagcatgtaactactgaacagtacaca

SEQ ID NO: 290499 - DNA, 338 bp, Zea mays
ctgctcgagcggctcgagcacacactcttgctaccagtccatccatctaataattgccaatctttctgcatatcatatacacacatctatatatctctcgtttaaagacaccatgttcgaaaacggtttcttcggtctcttcagatcctcccagcaagaggaagaacctcgtacccagcagcctacttggaacgctaccacgatggccatggagcagcccgccaattatgccggcaaccaacaggccgcatgctccctctcaagaagagcaacaagtgaaactccgcggtggagccggctgctgtgatgtgtgctgcggatgtttcgccggtctctgt

SEQ ID NO: 290500 - DNA, 275 bp, Zea mays
ccagttcaagaattcttcacatatggatgccatagtaatataacgaatcgtacttgtgtgccgtagctaacagcatcctcaagtttccctttatccaggaaagtcttggatgactccagcagggtgcggcctccagctcatgtgcatgcaacatgctgcaagtaggcaaaataaaggttgatctccagcacgcctctaagaatttcttattcagctatctcttttagaaatgcttagattaccttgtagataggaacaacactgataatatccga

SEQ ID NO: 290501 - DNA, 273 bp, Zea mays
cgctactacttcgcgtataaccctattctagcgacgaaagccacttacctggaactttactacccgttctctacgagtcgctagacaccatcacagtatccatggataccaagtcatcaaaccctcgcctgaccactgagtcactcagtctttccagcggcagcaatttttcaactcgccccgcttccgtcgtctcaactccgactttggaggctcgcgagtttattggcggcgtcccgcccaaagtctcgacaaaccctctgctgcgagagt

SEQ ID NO: 290502 - DNA, 303 bp, Zea mays
caaactaaaccaattttccgtaaaaaggccaagaccacaaagaagattgtactcaaattggaatgtagtgaatgcaaataccgcaaacaagtctctttgaaacgtaccaagcatttcgaaattggtggtgataagaaacgcaagggctcaaatgattcagttttaaactgtttcacatttttgaccaatcattcttttttttgtcattcatatttgctccatctctacccactgtttatagggaaaaatgggataattgggcccggattaccatccacttattacatcaaagatttttttaat

SEQ ID NO: 290503 - DNA, 269 bp, Zea mays
cctaaccgtcctggttacttagcaccatacaaaggtgaaagatatcacatgcctgaatggcatagaggtatggaaccaagaactcctaaagaaaaattcaatcgtgttcattcgtccatacgtaatgtcatcgagagatcattcggagtactaaaaatgaagtggcaaattttatacaacatgcctccgttctccatgtacaagcaaaaaatgattgttgttgctacgatggtccttcataatttcatacgagagcataggatagaaga

SEQ ID NO: 290504 - DNA, 265 bp, Zea mays
gcgtggcctactccgtccagctcctcggcatccgcgtcggcggcaagcccctgccgatcccgccgtcggttctcgcgccggaccacaccggcgcagggcagacgatggtggactccggcacgcagttcaccttcctcctcggggacgcctactccgccgtcaaagccgagttcttgacacaaacgatgccccttctccccgcgctcgaggaccccagcttcgcattccaagaagcgttcgacacctgcttccgcgtgcccagggg

SEQ ID NO: 290505 - DNA, 276 bp, Zea mays
gagaagtccagtcagccctggtgacattagcatggcacaaacactgtggctgcgatctgccaaaatttcttcatacgtgatttaagcaaggttttggggactacagtttggccatttgatgagcacaccgtgtaggcacaacctcacaatgtatcaacaaaagtgtaccatacagtagagaagctgtttctgcgcatacttcctccccctcatgcctatgctgtcatgggaatgaattttggaattgtgatccgttgatgtgtgcatggatgaggc

SEQ ID NO: 290506 - DNA, 289 bp, Zea mays
tcttcctttcagaagatatcgttgttatttaaacattaaaacttgtttaaaattttatttcatgtctaaacatttagaagtaaattaaatctaatcatgttgcgaaccgctgtcaactcaataaacacaattgtttttcgttctaataaattaggacttttgagttgtcgatcgaaacatactttaccagacttgccatatgattacaatgctttagaacccttcatttcggctgaaataatgcaattgcaccattcaaaacatcatgcagcctatgtaaacaatttaa

SEQ ID NO: 290507 - DNA, 268 bp, Zea mays
cgatattaaatcaaattattgagcttaaaatgtcagaaaaaaaagaaataattcacgaacaaaaatttatcacaagaattcctaatgaaagtactgaacaaaatgttacaattcaaagtgaattcagtggtgatgaatcatcttccatttcacaagaagaaaagtcgaatcaaagtgacatgcgaatagaaccaatcattatgtctccagaacaaggaatgatacaacaacaaggaatgatacctcaacaagaaggaatgttgaatca

SEQ ID NO: 290508 - DNA, 282 bp, Zea mays
gtagctaggcagcatgacgcatgagatgaacgggtccctgaatctctgtcagcatatatacacatacacggaggtagccgccgccgaattcgtcgtgctcccatgtccatccgattggtcgtcatcaaggctgtctagagctcaagcagcagcaggaggaggttcagtgctccgcatccatatcgtcgccgtcgtcgacgacaatgcgtcggccatgtcgggcgggcagccggagggagatgctgtggcgtcgccgccggcgccacgcgtggcgttgtcttt

SEQ ID NO: 290509 - DNA, 281 bp, Zea mays
cggctcgaggggcgatcatgaaggcccatgacctggatcagtggtccacattgcacttggtggacacgctggtctaccatctccccaagtgggagagtggacgtcataatttgtgctagagggggtacgcgttcgcgcggcccctaccagttttaaacatttacttttgggaccttggcgggtttattatgttatgtgggacttactcatctagtgcaaaaaaataaaattaaggtctcgttaaataaaatctagtctgggcgactattaaaccataaatt

SEQ ID NO: 290510 - DNA, 295 bp, Zea mays
  unsure (1)..(295): unsure at all n locations
caaagacttcacactcgcagccgcaggtgtncacggcagactcctacaccgggaagacttctcctctcctctctcctctctcccttccactcgacgctctcctggataccgcgcgcggcgacgagatggcgatagatcacgggacccctctcgggctgaagcggagaggcgccatgggcggaggtggcgagtgctgcgacgacggcagcgagacccggcggtggccgccgtggctgaggccgctgctgtccgcgagcttcttcgtccaatgcagggtccacgccgacgcgcacaa

SEQ ID NO: 290511 - DNA, 264 bp, Zea mays
tatcaagaaggcccgtggcctagatcaatggcccacattgcacttggtggatgcgttggcttaccatctccccaagtgggagagtggacgtcataatttgtggtagatggggtacgcgacgcagttcaggtctcggtttgctgcttcttgatcagttcagatctcggtttgctgcttcttgatccagatcagggtttctgatccatatagtctgtactttgttacaaaaatcataagaaaaaaaaaatatcttgaattcaataa

SEQ ID NO: 290512 - DNA, 274 bp, Zea mays
gcacaagtgccctctctctaccctggtaatgttgttaaccgaactgtggttccacaacttggtctggcaaggaagtttggtggtggaggtacaaatggccagcagtctggcccatttgataggccgagggaactttggaccaggccaccgcatgaaacacctgaccaaatgaacttggatcagtttgcgactagaagaccttcagcgcctgtagatgctgctaagcttgggtctggtggaggggaggttcgcaaaactagctgcagactttttg

SEQ ID NO: 290513 - DNA, 289 bp, Zea mays
tgcggtcggtgcacctcgtaccgctcatcgtcctcctctgcttcctgctcctcttcctctgctcccacgccccctctccctctgacatgtcgagttttgggaagaaggatgggagcatgaaggccaggttgctctgatcgtgggaccaaggactggacaaattaatgatgcagcaagaacattcgagatatttggctattgttttcagttcctctcttcatacaaatcgtgtatttggtgatttcttctgagatacgaagcataaacacgggcctctgtggagcttgtc

SEQ ID NO: 290514 - DNA, 273 bp, Zea mays
tcaggatttaagcctttgcttggccaatcatagattcataggtgtgtaaggatcctccagtttgtgcggtttatggaggttctaaaagattctaggaactgtttgagattcttctggtgtgtgaaggctaattgtacataattttcatagctatatgatcactgaaatgcaaaatgcgtcctctcggcatgggaatgggaataggctgtacctggtcttttctagaaccatacacatcatttggtgaatgctcgatctaaaaccttggttgtc

SEQ ID NO: 290515 - DNA, 278 bp, Zea mays
accgaccaaaccaaccttggacgctgtcctgtccgtctgtggtgtggtgtggtgtggtgtgttgtcctttttcttgttcttctgttttcttttgtttttaatccgacttcacactgctctgcgctgtatggttgactcttctcgtctgtgtactgaggagacgagcacggtgaatcgccgagatatggggaaaagacgcttgccgttcacactccacagcatgagctttgagctttggacagggaacacgcggcttacgctcttcatgtcgttgccgt

SEQ ID NO: 290516 - DNA, 271 bp, Zea mays
cactctcttaggtattaaatttctctcgacattctcaaatcgttgttctcttgcaacgcactaaccttcccaggggtcgttgcggtttacgttccacttccccccgtttgctccacaagtctttatcttcctacaccacttctgtccgcacctcaacaataacaaccaaacaaccttaaacacaccaaaccatggctaacgacgaatacgattttcttttcaaagtcgtccttatcggagactccggtgtcggtaaatctaaccttttgag

SEQ ID NO: 290517 - DNA, 288 bp, Zea mays
cgagacttgggcaagcgagtcatgacaggtgatatctcgcccgacaggtttgtcaacatgtcggatgaggagctcaagagcgaggatcaacgcaagatggaaatcgagctggagaaggagaacatgaagaaggcccaggtaccaatggccgagaagagcatcagtgacagtctggaatgcggcaagtgtcggaagaagcgtgtcagctacacccaggcgcagacacgaagtgccgatgaaccgatgacgacattttgcgagtgtatgaactgcggtaatcgttggaag

SEQ ID NO: 290518 - DNA, 288 bp, Zea mays
cggctcgagagctctcgaatcaacccaacaaagaaactgcaatcacaacaagaacccttaactttctgaaacaaatcaccaaaacaactctcagaatgactggcaccgagcaacagaaggagggcgagaagcaattctccatccaacccatcaaagatgaggccaaggacaaggtctctgctttcaacgctcaccccggacccgccgtgcccaaagatatgccccaagaagagggcaccaaggaggagcgcaaggccaagatggaggctctgaacaagaaataagcgg

SEQ ID NO: 290519 - DNA, 283 bp, Zea mays
gaaaaagccattccatttcatgcactgctggactcgcctgaatgacgaacccaaatgggatgccatggttcatggcagcccctggagaggcaatgcggggaccgagccagtacgtagtcttacacctactggttctgttaatgaagtacacactgatgaaggtggttcaaaaggcaagagaccagtaggacgtgactcgacgaaagcatcaaggaagaagtcaatgtccagtgcatccgaatctacggactacctgtcaagaatccatgacattcagatagca

SEQ ID NO: 290520 - DNA, 273 bp, Zea mays
cgaacttctaatctgaagactccttctgacagacgatagacgacagacgacagactggtttcttttacgtcttccagtctcttcattccgttccgacttcactccgacttttcttctttccttcttctcttctttcttctccacatccacacctcacatccttcacgatgggtgacaccgcctacgagatcaagctgctgtcgggcaacagccaccccatgcttactaggctggtggctgatcgcctcggcattgagcctgcaaagactttga

SEQ ID NO: 290521 - DNA, 254 bp, Zea mays
attttatcagtgctcaagtattactttctttaaattgtacgagttgtttagtgcctgtgttttgatttaatttgtacaatttgtgacactctccttattctgtactttttcattttaaaccagtctgcatcattctcttttctgtcgtttcattgtgcttttgtattgttttgaatctgtatttgcacgactgtttgctgtttggccaggtgaattagtagaattagtctgaaaatcgcattattcagtcaaaa

SEQ ID NO: 290522 - DNA, 247 bp, Zea mays
ctcccttcctcagacttacacagccctcattgctaacggcaaaggcaaagaacccactcttgaacaattccctcttcccacaccaggcaaaaatcaacttcttgtcgaaattgcctttgctcctattaacccagctgatatcctcaatatcactgaagattatcctctccctgtgaggcctcctaacccagttggtttagaaggatctggtactgtagttgctattggagaagacctgaaagtgcct

SEQ ID NO: 290523 - DNA, 276 bp, Zea mays
attcaatgcggtttgtctcgtactggcacgttctgggctcacggaaaccctgcatttacacccaaggacggcagcaagaaagctcctcacccagatatcctcacaacagccaaggctctcggtaatggtatccccatcggcgctactatcgtaacagagaacgtgtcatcggccatcaagtctggagatcacggtactacctttggtggggacccgctcgtctgccgtgttgcgcaccacattgtgctgcttgtgtgctgcatccgagctccaaaa

SEQ ID NO: 290524 - DNA, 149 bp, Zea mays
cggctcgagctggccctttgccgcctgtgtcgctcgccctcgcccccacccccaccccatcgctgatcagccgccgggaagaagatgcagcagttggcggagcggcagatgggagctgcccatggatcgcatcgatcggcggcaaccga

SEQ ID NO: 290525 - DNA, 164 bp, Zea mays
cttcgttctgcattcgttcatagatcatttttgatctgacattcgtttgactgtgtcatacgtcccacaatcgtttaagctgctctagctatccagtcttttaatcgaaccaaccgacctaatatctcattcttcactcaaaatgcgtttcgctgcttttgccg

SEQ ID NO: 290526 - DNA, 280 bp, Zea mays
tttcccttcttacccttcttgccaccttgccatctttatttcatttgcaggaggaggcaatgcccatgcattggctctctttcctagccacgtcctacccgtttactcgggttgcctctcgctctttttatttatttcctttgtgttttatctcatcttaccatctcccagaaaataaggcaagagccacgaggaaatggcgtctagacgaatcctcgtttgttcttatcccgctcttgtccccttttggtcactttgtcacgtgcaagtctctgcttgt

SEQ ID NO: 290527 - DNA, 261 bp, Zea mays
actaacatcaccgctgcatgacagcatgaatggtgagctgtaattttccatgaaaatgctgcaggtgaaggaagcaatactccaacatgtcaagttacaaaaccttcaagttcagtgagatggggtgacaggagtagctaaccacagttgaggcgacaaaaatacatatccaagtttaggtccttgtgcagatagacagataaacaagtatgacagtcacttcagaagtagcttccactccctatgttttgcaaggtagag

SEQ ID NO: 290528 - DNA, 260 bp, Zea mays
tcggcaaaggcgccggagcgccatagacccgcttcaacagccagctgcccggcgtcgtgctcgccgcgcagaccctgttcggcgccgacccggagatccccgacgacgtcctggccacagagcttccaggtggacgccgacaccatcaagctcctcaagtccaagttccagcaaggatagcgcgcgcggccgacctgctcgctagatttgcagtctccttacagttttgtttcatcagtacataactaatgttgtttcgc

SEQ ID NO: 290529 - DNA, 269 bp, Zea mays
gaagacctcacattcagagaagccatcgcatatctccaatcccaagaccctcaatttgccgaatgcacaatagacaacaacatcgaagaagctgtccttgcagccaagaaactcgttgcagatcccgatccctctcttacgctcaattaaccgaagaagagatagcagtgttactcttgtacactcaacaaaccgagttttacgtcttccctaacaggagggccggagacggaattagagcgaattttgccccctacctgcccgttatg

SEQ ID NO: 290530 - DNA, 208 bp, Zea mays
tctgagccagcctcggcgactcgaaggtgaggctctgcggcgccatccagctctccaacctgcttcggcatcggcatcggcgtctccattgccgcctccgtcagcatgcaggcgatccggagggccggctgcttccactaccgagggcacgaggacccgtgccacgcctccaccagcccatacatcgccgtcttcggcgtcatgcaga

SEQ ID NO: 290531 - DNA, 273 bp, Zea mays
gcccggccaacaccagccagttcttcccgaacacgacggtgttcatggacctcatcacgccggaaaggtttgacaacaagtactacgtcggcctgaccaacaacctgggcctcttcaagtcagacgtggcgctgctgaccaacgcgacgatgaaggccctggtcgactccttcgtgcgcacgaggcgactttcaggaccaagtttgccaggtccatgatcaagatggggcagatcgaggtgctgacggggacgcagggcgagatcaggcgcaa

SEQ ID NO: 290532 - DNA, 298 bp, Zea mays
tttatctctctcaccgtgatatcttgctcctaaaatatactactagaagccaattatttggtatcagaaatcctgaaaatatttatagatcgctagctccaaccgtacgtttttatactttgtttcttcctttcgtctgcaatctcaatcggttgctttaacctacttcttttcaccttcccacgtccctttcagccctgtcgtctctgaattaattcccggatcgtctatgtgcgccagatttgcacgcgattattagattgtttttttctctctcaagtgcggaatgactgatagt

SEQ ID NO: 290533 - DNA, 261 bp, Zea mays
cagaaacaacggcctgcagctcgtggctcgagcccatcagttggtgatggagggatacaattggtgccacgaccagaacgtcgtcacaatcttcagcgcccccaactactgctaccgctgcggaaaccaggcagccgtcatggagctggacgaaaagatgcaacacacctttttgcagtgtcctccggctcctcgtcgtggagagccccacgttacccgtcgcactcctgacttcttcctttgagccttctttttcttctt

SEQ ID NO: 290534 - DNA, 265 bp, Zea mays
ttccggctgagacgtcggtacagggagtagacagatatgatataaacatcccaggagggcatactgcgagattgctgctcaactgaagaagccgaaccgctgcaacctgctgttcttctagcgattttggagggaaaataaccagaacatttgatgatccctgtttcacggacttgtctcgtatgtcatacccccctcacaactttccaagaatctgaaccatcaaatgggacatccaaggtaggaatcttataagacgcgtcaa

SEQ ID NO: 290535 - DNA, 264 bp, Zea mays
ggcaacaagagctgctgctgatgctggagaagcagacggaggagggtttttacgccgtaacaatgtaacatgtggagcggcttccatgactcagcttcctcttttcttggttgttccacggactagcgacccggccggtgccaacggcttgaagactaggagataacaagtaggacgatgttgtaatttagctaccacgacgcggtggctctggcttgcgtgtaaagaagtcctccctttcaacgcgactgggattgttgttgc

SEQ ID NO: 290536 - DNA, 268 bp, Zea mays
cgcagggttctgtcacagctgaacctcagttcaaccccaatcaacaccaagggctacgagaccctgctgcaacttgtaagtggtcttgtccattcttgattgctgagacgaatgctggctcttatcgcctacgaaccttgcagacccagaacaccgtaagcgacagtttcgacctgtactacgggctcttcatgtacaatatcaatgccacagagcagctcgacaggctggaaatggcatttgagaaggtgagacagatgttgtctgg

SEQ ID NO: 290537 - DNA, 300 bp, Zea mays
cggctcgagctctgctcaccaaacaacattatcagtagaagttagtttttctgattggatgagagcaaggcctgaactgtacagcattcttcgaaggtgagatatggcaacttgactgtacaaatgtcagcagtatatacagcttgtaagagtgtatgcagcccaaataatgtttccttcctgagattaattcttgaaaaatcaaaaaaaaaaaaaaaaaaaacaaagaaaaaaaaacgataaaaaaaacaacctgctaaaaaatagcagggggctccgtatcaattgtactcccccccc

SEQ ID NO: 290538 - DNA, 304 bp, Zea mays
cctcaagctgtgctcgaattggctacacacgtgcacgaatctgaagaagccaaattgcttggcattcaatgatgagcgcacctttcattatggagttgttctcaacacaacttgaagaagtatatccatatggcgatattgtattctgcaatgattcagaagctcgtatgtatgctatgatgaaagaatgctccatgcatttaacagtcgaacaaatagctggtcgtttggccaataatgatcgacgaaatctagatcgtcctcgcattgtaattgtaactcaagatttcaaccctgttttaat

SEQ ID NO: 290539 - DNA, 292 bp, Zea mays
atcagatatgttcaggggtttgaatgactacatgaaacttgaacccttgccggagggaatgcgtggcaagttgatgttgtgggctattctaatgttttgtggttgctacggatgggagcggctcctgcgatgggtgttcccggggaagatgccggcgtgggagaagcgccagaaacaggcagttgcaagcttggagaaaaagcgccactagaatcctttttgttgtctggcactttattctttaccttttgctgctgcccattggttacttggcagtagcaaaaggtaaaga

SEQ ID NO: 290540 - DNA, 247 bp, Zea mays
gaaaaggtgggaacaatattttagaccgacaacgtcttctcgggaacacggttaggccctgtttacctgtttcgacgccaaattctctcccctgtaaaaactacacttatttctgtaaatttcctgtaatattttttttttgtgaaatttctgtctcaaacaagcctatggatagttttttagctatacattggcgaagtatttgttttagaaaaaaaaaaaaaaaagggtggccgccgattagtga

SEQ ID NO: 290541 - DNA, 272 bp, Zea mays
gttgatctctcgggtgtctttgtggttgtgcctacaagcttgagtttccctcctcaatcacttagttggtcagctcatgtatcctgtggtgttttccctttgtctggtgaccacgcagccgattcacccacctcgccgtggccagagatttccagggagtcgcatgcccgtgtaatccttgttccacgttctccaaaggtcagtgaagcttacagagttgcctgttctagctctactattgtgtgctgcctggaacagtgcagcgacgccgt

SEQ ID NO: 290542 - DNA, 306 bp, Zea mays
ccaaaagcagtcgcagcatccgatattccgatcccggcaaaaacaattctcccagaaagagattatttcgcccccctcaccaatcctgctcccgaaattcctaatcttttaatccgcgttttccctccgtccgtcccccggcttgcagcagtaatgaagcggaggaggaaaaggagaaaacgaaaaagcgcagggaaaacaacacaccagcacccgcagagagcaggcacacatcaactcatcaagctgagcgatgcgtgtggttgcgagcatgtgagcaggcaggcgggcagggcgaaaatccga

SEQ ID NO: 290543 - DNA, 266 bp, Zea mays
ctctgatcttgaagagatctattctcaaggtcagacggactctggcacgggtttctgcttctctgaatgatgccaacatgctgaatcccactctcaatgctcagcttgactctaaaaaggtggccaatgaattaggctttacttgactctctcggttgtgttcttaatgctttcttaacgttggagaactgattcttgtctggaggagggaaatcgtgcccttgcaacttctcgtgacaaccttgacaagttgtatcacgatgcca

SEQ ID NO: 290544 - DNA, 253 bp, Zea mays
gcgcacacgaagaagagcacaacgtatgttctcgtataccaggagtagcaacacgttcactgcttcttacgttcgttgtcgatcaacatcgcaacaaaaacaacaatattaccattcgtgcggggacgagaagtcgcgacgccggtgtgctaggctgctagcacaatacacacaacgaaaagaagggcaggtgtggtgaactctagggacagaggcgatggtggctatgatgtgtctcctagcacttcagccc

SEQ ID NO: 290545 - DNA, 254 bp, Zea mays
gtgctcgttcccggccggccggtcaggatttgacatgccggatgctgatcgaaacggaataaagtccatgtctccaactctccatgtccatgtccttgactccttggacggttgctggcctagtggtgagaattcgtgctccggaaggagatgttcttggttgtactagaagataaggatgctgaagcagcgccagcacgagttgctgtcgcggtagagtatcgaatgcgggacggaagaatggtgtgtgtcgg

SEQ ID NO: 290546 - DNA, 285 bp, Zea mays
ctgatgaggcgaggccaagcaagacaacctcttctcgcgcagaccggagagatgtgcggaagagagccggagagggacagcggcccactactccccaatccacgcaccattacgaccgccctcctgtctaccactactgctgataggatgctgggtacagggaggggtagttgaaactccatcagtccagtcgttgggtcggtggcgtttcttgacgagcatgcgtgcttcctcaaactagccccagcggcatgttgtcaacaatccatgggccttttggagttt

SEQ ID NO: 290547 - DNA, 292 bp, Zea mays
ggagcttttgctcatgggtctgttttccactaggaagcatattggcttattgggtcaaccggtcaagtaaaaatgccattactgtacccggaagctgctctacctttgcatgagaaattattcatgttaacatgtccctaaataaaataacctattgctgcaactagtccacagccaagcgaaacaaatatcttcaggtttaggcaaccataatcaagtattgaagaagaaattaggtaacgtaacatgtataactcaaaaggaagcacaacagcactgcaataataggata

SEQ ID NO: 290548 - DNA, 166 bp, Zea mays
tgaatagatgcttagaaacctgaacgtggaacgtgttcaccttcctcgctccaaaaaagtgggaacggtccaatcttgtccatatagtgttaaagtatattttttttaagtacggtaccacgttcctgtttctggttcccatcaatccgagaactgattagatgat

SEQ ID NO: 290549 - DNA, 286 bp, Zea mays
gcagagagcaggcacacatcaactcatcaagctgagcgatgcgtgtgattgcgagcatgtgagcaggcaggcgggcagggcgaaaatccgaggaggaaaagtccgcgagaatctccggactggcctccccacacatcgtcaaaaatccaatcttgacgcctccctggtcgagccgagactgttccaacgtttctgcctctgtgatgcgtgcgggattgttgccagttggttggttgccgctgctaatgaggcccgcccgcccgatgcccgtggtcgccgtctccgg

SEQ ID NO: 290550 - DNA, 121 bp, Zea mays
tgaggctgcaaaacactagtcggcaaatatttaaaggaagatgcggttccgcgtcgggtttgggctgttgctccaaatctctatctagaagctctaataaaggtttaagcttttggataaa

SEQ ID NO: 290551 - DNA, 247 bp, Zea mays
gtcgcaggccgtgcctgaggacaggcgcggtcgcggtcatagattcaagggcaaaggcaaggaagaagatgctcaggtttttaccctcgatgaatgggagaagaggaaagccatcggttcgaagcccgctgcggaaagctacgtgcatgacactagccgagatgaggagctggcgaggcaactgcaggaacaactagacctagaagacttgcatggtggggcaggtgcaggcgttctccatggcggg

SEQ ID NO: 290552 - DNA, 268 bp, Zea mays
acaattcgtagatgtagtcaaaaacgaaattgacaaaggccatgtttatcccacacacgaaccgaccacatcactacgagttcagctctgaaaactcggatttacacgcctcattccaattcgacaacaatgaattcaaattattgaatgtaactgttcaaaaattgcatcttaataagggtgtattccctctgaataagttagaatgggttgacagcgtcccgaaacagcatttcgatactccaaaagaatgcgtttatccacaaga

SEQ ID NO: 290553 - DNA, 261 bp, Zea mays
tactttccatcctctttggcaacgctgcacagctaccaacacgcgtgggtagagttctaggtgccttgctgaagttggagctctatctgcattgcatttctccaattcgcactgacaccttcacctcttgcgtccatcctagagatgctgtgatcgtggacttcgtttggttctcggatcgtcctccccacacctcctcatccattcttctgcaatacttccgtccacgtccccactcttgcctcacgctgcactaatatg

SEQ ID NO: 290554 - DNA, 272 bp, Zea mays
cgatcctggccctatttcttttattttgattttgaataaatttacatagggttccaatcatggttagtccaaatgttcgtccaagaatcatcaaaaagcgcacaaagaagttcacgcgccatcaatctgatcgctatgatcgtgttaagttgaactggcgtaaaccgaaaggtattgataatcgcgttcgtcgtcgctttaagggcgaacgtttcatgccaaacattggttatggatcagctgccagcaccaaatttatgctgccaaatggt

SEQ ID NO: 290555 - DNA, 142 bp, Zea mays
cgaacgcacattagtttgttgtgctccctcgtatgggtaacctggtgcgatctcagtgttgacaatgaggttgagccttttatcactctgcaacgtttcaatgtagaaactagaaagggacttccctagttctagatcgcga

SEQ ID NO: 290556 - DNA, 342 bp, Zea mays
tgtacgccagatccgtttcttgtggagctcgccatagtgctattataacagatgaaggtgaggtattctgctggggatggaacaagtatggccagcttggccttggcgactcaatggacaggaacgtgccttgcagtgtacgtgtggacgcttaccacccgctaaacgtatcatgtggctggtggcacaccttggtgctcgcggagtcgcctgcttgaaacctgacaaagaaattaccttagattgacaattttgttaggaacctgtaggctcgtgcaggtacggtgatgctgcatttcatcgtgtacatacatggcagtgcatacagatatgtgtattcat

SEQ ID NO: 290557 - DNA, 256 bp, Zea mays
caaaagttgatgtccatccaccagcaacgacaacaacagcgactgtgctcgcaccacctccttcacactttctgctgtagaacatctatgtaggataaagcactgctgttgctacctgccagcctcaacgtgtcgccgcccctctcctcccacatgtggtgctcaaggtttgattctagtcgcgatgcgccacttttcgccgcctacttctcacaatttgcaacgcggtggagttagttgcagcgtgtgctaattt

SEQ ID NO: 290558 - DNA, 255 bp, Zea mays
cgtgaagcaagatgttgagaacagatctgctgatcaaagtgtggagacagggaagaatgattgtcgccatgccgagtgcaaggcagctgagattgatgattggttgcttcagtttgcagatttgttccggaaccaggttgggattgatgcagatgcacatttagacctgcatgagttgggcatggagctgtgctccgaggctctcgaggacactgtgacaagcatggaggctcaggtcctttttgagttggctgc

SEQ ID NO: 290559 - DNA, 283 bp, Zea mays
actagtgctcatgtctcctcagccaccaactcggtcagcccttgtgcatagcgcgctatctccctgcttttagtgaccacagccaccagctccttcacctcacagtggccagaatgtagtcacgccaccgcaaatcgtcgtcgtgtttagtttcgtcgtcgaccagccaacttacgtcttcctcgagcagtttcatgcacccactgcaaacttggactgtcagaggtcccagaagaagaagtggtagctgaagggaagtctactccagtgcctgctcatcaag

SEQ ID NO: 290560 - DNA, 276 bp, Zea mays
gtaacaatatggatgatgatagaaaatcgtcaactggggttcaggccgcaagtcagacaactgctttatcaaacatccggagaagcgcagaatctattacaagagtgagatggctcttggactagcttgtggaaatccaagagggatgaacaacgcccattaagatatgatatgtcatatgctctctgagctcagggttctatccttattaacacagagatttaatgggctagcggagagaagcagaaattatttgacaagttggaaggaaaattc

SEQ ID NO: 290561 - DNA, 365 bp, Zea mays
ctttactagcgctcgctgttgctgtgcgctgtgcagggcgcatctatccgcatctccgcccccccccacggtggcatcgcctcgcctcgcgtcggatcaatccatcccctcgccctcgccttctgctcttcctcatcgggggcaggcggaccgcagagggaggagccgccggcgctaggaatccccaatccgtatcgctcccccaacgattttgagtatattgctgctgcttctcaagcctattcttattgtagatcgaatcgatcaattcgctgcatcgactgatagtagatagggttcatacgcccattccattgattcgacgatgttccgccgcgactgtgtgggatcgccgccgccatgac

SEQ ID NO: 290562 - DNA, 278 bp, Zea mays
gcgaccattaaaagagcagtactatggtttctgctgcagtattttatgagtataaatatgtagctttaagcctcagcatgtaataagtaaaaatagaaaattacgataaaatgcttattcccaattattttctgatcctttgtttatcagtagtatatggatttgctcaactgacacggcaacaacacaatgtagccatggtgacaggaccaaccatacaaggtgttaataatatgggattgtgcttgtatagaacctcttttacctatctgttgggt

SEQ ID NO: 290563 - DNA, 294 bp, Zea mays
cctccctccggccacctgctagcgagcgccccttccctttccagtttggtcacggacacacaggtccgaccctcctctgctctctgctcccttggaccctcgatgcccctgctccactccggtcgtcggcgcccagaagccatggacgagcctccggcgtgcatcgagctccccgcggtctggctccccttccttactgcgagccagcgactcctctaggccggtcttcatcctattgcgttggacgcggctcctcttccccggccaccatcgaacgtccgcacgtgccttggt

SEQ ID NO: 290564 - DNA, 270 bp, Zea mays
tgggggattgtaacttgtctactatggagtggagagtgtgtgatatggcaagaatctgttgatgaacagccatgggagaaagttcggtcaagttctcccttgaaagtaaaagaagatgacgaagttgacaagttagagataaatatcaacaaccccaaaagatcaaagcgtacttatgcatctacttcaccggaagttgccaagaagattagccggtctttaagaagtctaaatgctcaaacaggattgtttactaagcacatgaagatt

SEQ ID NO: 290565 - DNA, 420 bp, Zea mays
ctcgtctagtcatctctcctccccctctcatcagacatcagagcccttcttcctccgcctccccttcacccccatctcgccatacgcttatcgcccatcccctgatcaccagccgccgccgccaccgcctcgatcccgtccgatccaatccggttttttccttgataatgcgcgtggcaaccttgtcagttcaatccgtccgtgaagaacttatccttattttcgttgtgcatcgcatcgcttctgcgtttgggggaaaaagggccgcgtccttgatgtctactatcgcgaccccgccgccgccatcggcggcaagagaaggccgccagccgtaataagcgaaagtaccgtgccgagacaccatccacggagttgggcccattcgggctggagtacccactgacgacggactgcgtggga

SEQ ID NO: 290566 - DNA, 250 bp, Zea mays
ggagatgaagtgtatatgcgagttttggctaaaatgtttaatgatagatctcgcattttatggttacgtacaggattcagccatggacattgaaggacaacgtgtttactacacctctttgttcgctgttcaaagcatgagcaccatcttagaaacattggaatttagggatctacatgagaattgagctgcttcggtcgaatttctgcggaggcagctgggatgtgtcccaaactagacacggtcggta

SEQ ID NO: 290567 - DNA, 279 bp, Zea mays
cggctcgagagaatataaaacacaggagaagaagattctcaagacactcggaataactcaaggatccccataattcaatacaaacatcagttgctgcatcctgtagatttattaacgtatggacttacatgctattctgcatattgaatcagtgatacatgaagtctcttggtggaacaaggccgcctttgcagttcatggtgtatatatttcttttgggcatgtaatttgtccaaatttgcaatatgtatcagattggtcttttttgtgagctctttg

SEQ ID NO: 290568 - DNA, 247 bp, Zea mays
atctgacgattgctgggacgacggcgaaactcatcggctgcagaccccaacgctccgctgtactacaaaggatggtatcacctgttctaccagtacaaccccaagggccccgtattgggccacatccttttggcccaatccgtttccccccaacttattaaattggttgcccctgaacccggcatctaacccaacatcccgttcgacaagttccgcggccggtccggctctcggaacatttcttaag

SEQ ID NO: 290569 - DNA, 412 bp, Zea mays
acggcgtgcccgggcccgcggtggcggtatccccggcgcagaggctggccccgacccagctgacgccgtccagcgcgccgccccacgccgggggcgcgatgcccatgcccaggaagcggttccgcaccaagttcaccgccgagcagaagcagcggatgcaggagctgtcggagcggctcgggtggcggctgcagaagcgcgacgaggccatcgtcgacgagtggtgccgcgacatcggcgtcggcaagggcgtcttcaaggtctggatgcacaacaacaagcacaacttcctgggcgggcacagcgcccgccgcagcgcctcctcgcgcgcccccgcccccgccgccgcgtcgctccaaaccccaaccgccggcgccggggctgctgcagcaccgtcattcaacccgtcgag

SEQ ID NO: 290570 - DNA, 310 bp, Zea mays
gtcacccctcctcgtccgtcgcctcacaaggcgaccagcgggcggaccctccgcggcgcaaccatggggctcttcactgtgacgaagaaggccaccacgcccttcgacggccagaagcccggcacctccggcctccgcaagaaggttactgtattccagcagccccattatctgcagaactttgtccaatcaacattcaatgcccttcctgtggatcaagtaagaggtgcaacaattgttgtctctggtgatggccgctatttctcaaaagatgctgttcagatcatcacaaaaatggctgctgccaatg

SEQ ID NO: 290571 - DNA, 310 bp, Zea mays
accacacgtccgcccacgcgtccgtaagaaagttctatcaacaaaatcaacacacgcgaccaccaattcatagtcagagacacaaacccaaggcatcaagggccaaagcctcgcagcggatgctgtcggccggaatctcggctggccactagcgggagggagctccaggccatcgacgacgagtggctggacgcggcgcggctcaagaccttctcggagtgcgtcagggacgccattgcgggcctcggagtcgcgggccacgtgaaccaccgcacgctccaggagtgggaccgcgccaccgggggggtac

SEQ ID NO: 290572 - DNA, 396 bp, Zea mays
gtttgaagcagaagaaggctcacctcatggagatccaggtcaacggtggcactatagcagacaaggtggactatggttacaagttctttgagaaggaggtccctgttgatgctgtgttccagaaggacgagatgatcgacatcatcggagttaccaagggcaagggttatgaaggcgtggtcactcgctggggtgttacccggcttccccgcaagacccacaggggcctccgcaaggttgcctgtatcggtgcatggcatcctgctaaggtgtcgtacactgttgctcgtgctggtcagaacggataccatcaccgcactgagatgaacaacaacgtttacaagattggcaaagccggacaggaaagccatgacgcctcaactgagtttgacagac

SEQ ID NO: 290573 - DNA, 197 bp, Zea mays
accgtgaaaactcaattttatttgttattattcaaagggatacatgaataatacccggaaaattgtacatacgaaaccaaacaaacatgaagtacattatatatcctaaaaaacacaggaaacatctcacaacacagcgacagccacggaccattcagcatcagttaacctttcttccacgtccaaattggattggg

SEQ ID NO: 290574 - DNA, 378 bp, Zea mays
cggcgccgcttccgatcgggttcgctgtgttcatggtgcacctggcgacgatcccgatcactggcaccggtatcaacccggcgaggagcctcggcgccgccgtcgtgtacaacaacagcaaagcctggagcgaccaggtatttacacacattgtccacgattgcagcactcactcatttgttggttgctaatttgctgttgctgcatgcagtggatcttctgggtgggcccgttcatcggagcggcgatcgcagcgctataccaccagatcgtcctccgcgccagcgccagggggtacggctccttccggagcaacgcctaggaccatctcgtcggcgggctattcagctcttcctcctccgcagtttaaggtgaacg

SEQ ID NO: 290575 - DNA, 392 bp, Zea mays
acgcttttgctccctcgctcgcggctctcggcttcatctacacgctatggtctcacagccgtatacgctgctcgcggatcccgctatttctccaacgctgctcgaccgccagccgttcgcctcatcatggcagcgtcgtcgacggcctgctcggtcgacgacgtcagcgtcaaggatgcgagctgcacaaacgttgacctcaccacctattccgggaacgttcttctcattgctaatgtcgcatcgcactgtggcgtacctaactcgatgctacactgagctggcccagctctactagaagtacacggaccacggcttttagatcctgtctttcccatgcaactagtttggtgcgcaggagcctgctacgaatgaagagattgtccattttg

SEQ ID NO: 290576 - DNA, 355 bp, Zea mays
cgccggccgccccctaatcccgccggccctgtgtgtgttccgcgctaccagccatggcgtcgccgttctccgtgccttcgctgatcatggaggaggaagggcggttcgaggcggaggtggcggaggtggagtcctggtggggcacggagcggttccggctcaccaagcgcccctacaccgcccgcgacgtggtcctcctccggggcacgctccggcagagctacgcgtcgggggagatggccaagaagctgtggcgcacgctcaacgcgcgcatgtcgctgccccgcgccgagcgcacgcgggcgccgtacgtcgagctcctcaagcccagcatcgccgatcgcgatcacggctt

SEQ ID NO: 290577 - DNA, 312 bp, Zea mays
aatacacatgcagccaagaacaccttttggtgcatttcttgatcctgtggctgacaaggtttctttctctctccactgcccaccatttcctggcatgtttacaactaagaatatcagttctcaagatgagctactcacaggatctaatttaattgctctaattctttactgcagcttatggtagccgcgacattagttttactatgcaccaaacctttggaaacatcactgctcaatgatgggccatggcttctaacagtcccttccattgctatcattgggagagaagtagttactctgccaatctgcatt

SEQ ID NO: 290578 - DNA, 370 bp, Zea mays
agcgtgcttcctgctccgcttctctacgggtgggcatgccatgggcagcttcgggctgacaggcgtgtccgtgtgggaggcgctggtgctggagatcgtgatgaccttctggctggtgtacatcgtgtacgccactgcggtgtaagcgaagaggggcagcctgggcaacatcgcccccattgccatcggcttcatcgttcgggcaaacgtccaggatgggccgcaccctcgacggcgcgtccagtgaataccgccgtgtcgttcggcctcgccctcgtcagctggcagtgcggctaccaatgggtgtaatgagtcgggcgtctcatcggatgcggacactccggcgttatctacgagctgctcttcatct

SEQ ID NO: 290579 - DNA, 346 bp, Zea mays
aagaaacctaaagtcaccaggattttcacaaacccgattcgctcagtggacacgattcaataccccccacctcacacatgattcgaacaacgatgtctctgactcgccgtggagatgctgtctatgtattctctgatgacagatgggaccttgacgatggcatcccattaggctctggaagctccagcaacaacggactgtaccctgcggtcgaaggcactaacagatttcacacggccgcgttcgctggtgctcgaatgtaccgacaggaaactccagatgcacaggtcttcacaaccaacttcacagggctgagaaatgatgatgtgaaggtgcatctggaaga

SEQ ID NO: 290580 - DNA, 348 bp, Zea mays
acgcgtcggaccacgcgtccgcccaagcgtccgcccacgcgtccggttatgaagagtggcaagtacactctcggctacaagaccgtcctcaggactctcaggaactctaagtcgaagctagtgatcatcgctaacaactgcccgccccttcgtaagtctgaaattgagtactatgctatgctggccaaggtcactgtccaccacttccatggaaacaatgtcgaccttggaactgcctgtggtaaatactttcgggtctgctgcctcagcattattgatcctggtgattctgatatcatcaagactacaccgggtgagcagtaaagaagcccctgcagtagggggatc

SEQ ID NO: 290581 - DNA, 328 bp, Zea mays
atacaatttagaagcgcccctcctcctctcccccatccgtacccaatctaatcgacacccggccgagatgggccgcaagttcttcgttggtggcaactggaaatgcctggaagagcccgcgttcttcttccaatgcgcctgtgcttccaggctccagcccagagcaaatcgtaaaagcccttcataagtttcgtgatgcatgttgtctgtaggagcagaggagttcgatatccaacttttggagacccattctcgtttgctgcacgaattaaccttacgtttcttgtcatggagctcggggcttgctcaatctgagcataggttggag

SEQ ID NO: 290582 - DNA, 334 bp, Zea mays
tctccacctcaaatctctatcatgtctgcagcacatgtgtcacgctctttacgagtacaaatagcataaaatgattcttcaagtcttttaactggtctcaacagtgaaaagttttagagatgggttgttgttgggtctaactcaagatggagatagttttagcaaattctaatttttggtatcatggcaacaccaagtaatgatactagtaggatccaacaggtgattgggacggtgacactggaacttaaaaataagggtattgacatcaaaaatagtaaaatactagtgattttttttgcagccagagaagcacaagtcaaggatagttatg

SEQ ID NO: 290583 - DNA, 407 bp, Zea mays
acggacgcgtgggtgctgctaagtatttgatggaggactgtctttgtgtatgcttcctgcaggtgaaatgtgatctgtagtgatgctgtccccgaagttcagcaagcatacacaaagacagtcctgctgctaagtatttgatggagcgtggtgtggaccggaaggacttcaactcatatggtagccgtcgtggtaatgatgaagtaatggcaaggggaacgtttgcaaacattacgatcgtgaacaagtttttgaacggagaagttggacccaagaccattcatgttcctactggggagaagctttctgtttttgatgcggccatgagatacaaatctgatggccatgctactataatcctcgctggtgctgagtatggaagcggcagttctcgtgattgggctgct

SEQ ID NO: 290584 - DNA, 332 bp, Zea mays
aatcgctaacgactcacacaaatcgaatctggaaattcttcccccaatccgtcccaaactcgcctcctcacggccgccgccgccgccgccgccgccgctgctcggtaatccctcatcctccccacctgtccgctcgtcagcgtcatgtccggcaccaccccgacccctacacctacaccgacgccgctaccgccgccgccgccgccgccgccagccgctcgccccgcacggtacgacttcctcaactccaagccaccgcccaactacgtcgcggggctcggccgtggcgccaccggcttcaccacccgctcggatatcggaccggcccgcgc

SEQ ID NO: 290585 - DNA, 401 bp, Zea mays
  unsure (1)..(401): unsure at all n locations
attcagttccctagcggcaacaaaccacccggcggcaagtttgtccccgggccgacggcgctcggcggctcaaaacttcttctctcccaatcggttctgcctcggccaaaacagctcttggaaaccggcttggcaagcagctatctgttggcttcttgccttagccaaatgaagatcatatgcctcacgatctctcttttttttgttcggctgaatctcagagaaaacgtcctgctccctccaccaggccgccaggacgcaacgtttctctctttttgatctgctgtttttttttcttgaatctggcgctagttccctggcctagcgcaggcatgtcttttcatttaccagagatggtcggccgattatggggcgctgtctctaaccttttanaacttgga

SEQ ID NO: 290586 - DNA, 326 bp, Zea mays
acgccgccgccggcgttggccggttcggcggcgcagttccgtgggcaggcgcagctcccgcgcttcgccgcgccgcgccgctacgacctgcgcctgcgccccgacctcgtcacctgcacattctcgggcactgctgccgtcaccgtcgctgtctccgcgccaacccgcttcctcgtcctcaactctgctgacctctcaatcgacagcgcctccatccgtttccgggatttggcgcctaaggaggtggtgtttttcgcggacgacgagatcctggtgctcggattctccaaggacctggtgctcggtgagggcgtgctcagtatgaa

SEQ ID NO: 290587 - DNA, 301 bp, Zea mays
cacgcgtccgtatagctgtctgcctgcggtgtttgactatgcttaggacgctctggtgtactaaattcaatctatatgcgcatgatgtcagatgaacgcttaagatctgatgcaactgctgttctcattgatcgcccttctggacaaatcttgtcagcactgactggtcactcgaagaaggttacaagcgtagaatttgtaggcgactctgatcttgttttgaatgggtctgctcacaagagagtccgtatctggcggcatcctgtggatgggaattatccctgtgggtataccttgaatg

SEQ ID NO: 290588 - DNA, 270 bp, Zea mays
ccacgcgtacggagctacaccatctatgcagttcttcatcctctggaagatgcgcctggttttaagctcagtgctttgatctggcattacgatttctctcccttcatggttcttatcattgcgattctcaatgacggtactatcacgaccatctctaatgacagagttaagccatctccattgcccgacagttggcaactgaaggagatctttgctacgggcatcgtgcttggaagctaccttgctcttatgactgtcattttcttctgg

SEQ ID NO: 290589 - DNA, 274 bp, Zea mays
cctacagtgagcaggagatcattataactctcaacagacggagcacagcgcagctacttgccacattcagtagctacaaggatcagttcactcatgcaatcaacaacgatctgcaagctgaccccacagaggagtttcgctcatcactgcgggcaatcatcccgtgcttcacctgcccagacagatacttcgataaagtcagtcaacaggctcttggaggcatgggcactgaatacgatgacgtcaccatggtcgtaactacgcacaccgacgt

SEQ ID NO: 290590 - DNA, 371 bp, Zea mays
caacctcacaccacaaacgctcatccagtgctcttttcttctagccgccgccgcaaacgcgtgccaacgctctgcgctcccatcctcccgttcgttgaaggtccttctcaacatggcctccaagacggataagttccgcctccaggcggagatcaacaagctgctatcgcgcatcatcaacagcttctactcaacaatgagatcttccttaaggagctcatttcacactcctctgatggcatggataatatcaggttcgacagtttgacggacatgagcaagctggatgccgacccggagctgttcatctacatcgtctctgacaagagcaacaatattctgacaatcattgacattggcattggtatgac

SEQ ID NO: 290591 - DNA, 428 bp, Zea mays
  unsure (1)..(428): unsure at all n locations
gacgaggaggaggacggcgtcgatgacctggacaacgagttcaactgggacggccatgactcgcagtctgtggccgagtccatgctctacggccacatgagctacggccgtggaggtgaccctaatggcgcgccacaagctttccagctcaaccccaatgttccactcctcaccaacgggcagatggtggatgacatcccaccggagcagcacgcgctggtgccttctttcatgggtggtgggggaaagaggatacatccccttccttatgcggatcccagcttacctgtgcaacccaggtctatggacccatccaaggatcttgctgcatatgggtatggtagtgttgcttgganggaacggatggagaattggaagcagagacaagagaggatgcaccagacggggaatgattgtggtggtgatga

SEQ ID NO: 290592 - DNA, 248 bp, Zea mays
ccactcacgcaaccggaaatctctatggtttcttccatttgatcatactcttgatagcgatgatgcaactgacctggctactatagttttctatggatggttcattcggcctcttacataaggtatcgattcagacatcatgctggaagatgttggtgatcggcttctacagttcactgaaacataggccgcacttgtcactggtcacatattatttttcttggtggcatgtattacgtcagtcaggt

SEQ ID NO: 290593 - DNA, 445 bp, Zea mays
cccacgcatccggaaatctatatggtttcttccatttgatcagagtctcgagagcaatgatgcaactgaccgggctaaaatatttttccatggatggatcatgcggcctctaacagaaggtgtatattcagacatcatgagggaagatgttggtgataggcttccagatttcactgaaacatatgccgcacttgtccatggttcatattatcttcttggtctcagactattacgtcactcattacgcccattagaatcatacgattgtgccttcggacgtatacactgccttgatggactcacgcataactctcacatcaaattatgtatctggtcattctcctggtccaccgttcattgcacctagttactagttcccaaaaagcatttactacgtaatggattacttcagaatcacttacggtgaccctttaatatatgtcac

SEQ ID NO: 290594 - DNA, 446 bp, Zea mays
gggccacccacgcgaccggatgaatcaattaccatctgtattgtgcttggttttatgcttcttgcgctgatatggaagtttgacttcccaacatttaccgtccagatcattgccatcctcaatgacgtacaagcagcatattaggtaaactaacaacatcaacctggcgacatgaataagtaccattgtggctatctcgaaggacatagtaaaaccacctgcacaacctgacagttggaagttatttggtcgtgatgactgtcattttttcttctgggctacgtacaagactgacttcttctcggtatgggccagtggctggtttagcattatttaaagttttgagaaatcatcgtagtgtgcccatccttttcatggttgctaatatacagaaattgttccatgtcgaaagccttgagaaaatttcccagggtgattttcatacg

SEQ ID NO: 290595 - DNA, 435 bp, Zea mays
caggctcgcgtcgacggagacgaagtcctcttcggtaaactcccccgcctctgtttttactgataataattcttcgacgcggttgattattgttatgaaattaaataacgtacgagatctagatccagatctaggagcagtaatctctggatttttttttcaatttttttttttaaaaaaatgaaccttatccctgttgtgttgaacactcggatttctgtgctgaactgtcctaagaactcaatagctgtcgtgtcgtgtaagaaccgcaatctcgcgttgcagagtctcgtgcgatcaaccggtacatcgccagcaagtacgcgtcagagggcacggacctgctccccgcgacggcgtctgcggcaaagctggaagtgtggctagaggtggagtcgcatcacttctacgcgaacgcgtccccggcgggtgttc

SEQ ID NO: 290596 - DNA, 287 bp, Zea mays
tcacgcatccgcatcattgcgatctctcgaatcttggagcttttaacctcagccgtcaaagctatctccggtcatgacgaccagggtcaccgcgtattggtgcactctatcaatctgtctatcataccatcgcagttaaggcggcgctcgctgattttagcgcgacttatgtcttcggcgtcgactgctcaggctcctgagatactttcaatgatatcattgacaaccaggtagccactccttccggcctcgtcgacgacacggtagcacatgttttcggtctcttt

SEQ ID NO: 290597 - DNA, 419 bp, Zea mays
aaccgaatcacttcactctctctaatcaaaaagcttttaacctcagccgttaaatctttctccgatcatgccgaccagaaacatcgccattggtggagtccaagaagaggtctatcaccccaacgcacttatggcggcgctcgctgagtttatctcgactttgatcttcgtcttcgccggctcaggctccggaattgctttcaataagatcactgacaatggagcaaccactccttccggcctcgtcgacgctgccttagctcatgccttcggtctctttgtcgctgtctctgtaggcgctaacatttccggtggacacgttaaccctgccgttaccttctgtgtcttactcggtggtaacatcactctcctccgtggtattctctactggattgctcagcttcttggctccgtcgccg

SEQ ID NO: 290598 - DNA, 417 bp, Zea mays
  unsure (1)..(417): unsure at all n locations
gaaggacagggtgatgataactattattagttgtttaaactttaaactgtaacatctgataattaggttcaaccgttggtgaacttagatagaaaatagatgtacatgtttgcaatggccctgaaattttgtgaatgcatcattagaatatcaaaagtctatactacttaacatttgcttgtgttttctacagttagagtatcttgaggagcgccggctgaaggatctgatcaagaagcactcagagttcatcagctacccaatctctctctggatcgagaagaccactgagaaaaatatctgatgatgatgacgaggaagataagaaggacgaagangggcaagttgaggatgttgatgagaaggaagaaaaggaaaagaagaagaagaagatcaaggaggtttctcatgattggc

SEQ ID NO: 290599 - DNA, 439 bp, Zea mays
aaccggaacgaataatgcaaattgagactacgcaccaactagtcctttggtttgtatcttaatataaaggtttcttttattgacggttcttcatttctcgacatctctcacgatctcaacaccaatcctttctccgcaaaacttctgaagaaggaggtctcagttttggattctactcacttatagatgaaatggttggagcaagacgagagcgcatgtgagttacgagaggaactagacagagttaattcagagaacaagaagctaacagatatgtcagctacagtctgtgagagctacagcgatttacataatcatttggacaagtttcagagtcgccacagccatgatatcgatcagaccgatataccgagtgagacaatatcacatgacccggatgaattcctaaggctttcctattggactcagtagtggaaaa

SEQ ID NO: 290600 - DNA, 394 bp, Zea mays
agttctagatcgcgagcggccgcccttttttttttttttttttttttttttttttttaacagcagaaattatcaatacattggactagagctcaatcgcttttagaaaacagtgtactaatcaggactgaaaacatggcataacgctctgaacttgagacgactaaccaaaaaaagtgtactcatcaggacacacatttcggtgcaagacaatccatgagaatgctctaagctacagggctcttcgccttgatactggtagctactcatggggaagtcaagctgttactcgcatgacccgtatcctcgacgtggtcgacaatgcatcaaacactgaacctgtgaggtgacagagccttgtgaagagtgccattgtgcaagttgagtcggcccca

SEQ ID NO: 290601 - DNA, 425 bp, Zea mays
  unsure (1)..(425): unsure at all n locations
cccgtccgcacacgcaaccgtccgtatttccgtcacaactcacaacccgagcccccaaaacccgaagcagcaggacctcccctgaccttgctccgcctccgatcaaagaaaaggaagatgagctactacggccagcagccccccgtcggcgtcccgccgcagcaaggctacccggggaaggacngctacccgccagcggggtacccgccggccggctaccccccgccggcgcaaggctacccgccgcaaggctacccgcagcaaggttacccacagcagggctacccgccgcagtacgcgcagccgcctccacagcagcagcagagcagcgggccttccttcatggaaggatgcttggctgccctctgctgctgctgcctcctggacgcctgcttctgacggaaccatccgtgccgggtccaaca

SEQ ID NO: 290602 - DNA, 370 bp, Zea mays
aaagtggatgcagttctccgttgccgattctcggaatcggtttctcgattgatgcctgaaatttcatcatgattagcgtttatgggtgatttcaacgatgagggggttcccaagggctatgctttccctctcacgatgcctactgttactctgattgagtgaagatttgcaaccttcactcacaggtcagctgctgcacatccgtggcatttcgtgtagattgttccataagcgcctactgttttcaactgtgtagttgtcattatcaagagtagtacggttaagtatgagctacacacagacagtagacttaattgggctgatcacgttctctattcaaccattatttacccccaaagctacggtttca

SEQ ID NO: 290603 - DNA, 452 bp, Zea mays
  unsure (1)..(452): unsure at all n locations
caacaacatgtcaggactcaagaggctcncctcctccctcgccgccggaaaagccccccgtcctccccaacccgggttcaattccccgttccctggtgccgtggtaaccgaacgccccgggcaaggggttccaaccggggctcaacggaatccccaaaacggcattaacccatgggcaaggaggcaacaaccctggggggtttaaggtggctgcagatgcagagcgcgtccgatctcgatcttaagccccagttgcangaattgattcgggaacaacaggatcgcttanagaagctcaagtcagagcatggaaagaaccagcttggaaacataactgtggatatggtccttggtggaatgagaaggatgactggaatgctttgggaaacatccctacttgattcagangaaggtattcgttttaagggcctctcaattccagaatggcaaaa

SEQ ID NO: 290604 - DNA, 321 bp, Zea mays
ctcttctcctgctgcggtttgtgcctgtggtgtcttcgatctttcgtcgtgccgtgctgcctttgcgcctgtcatttctggcagcgtttggcgggacgtcggtgcttttttccgcggcgggtgctggcctccggcgcgatcggttggttattcaaacggtttcgttgatggatcggctactcaaattacaaaatctagatttgcaccttactccataccgagttcttgcaattggacatgattaccggatgcttgaatttaatagttccagttctcttgcacagattctattagaacatcacagtattacaagttacctag

SEQ ID NO: 290605 - DNA, 356 bp, Zea mays
cgtccgaaaagcgagatcttgcatcagcgagctaactaagcaagtatgctaatcgagcccgaggcaacgagccgatcgtcaagcgcatgatagaccactacccacgggctccatcaaaagctggacagtggagatcgcatcgcctgtcgccgcgctgcgcctcttccgcgccgccgtgatggacaggcacaggctggcatccaatgtcgccgcccacgtcatcaccagcgcccatgccgtggaaggcgatggcggcgtcagcagcgtcaggcagttcaacgtcaactaatccatgacgtgcggcatccttaaggataagcgcgacttcctggacgtagacaagtgcgaatgtacat

SEQ ID NO: 290606 - DNA, 462 bp, Zea mays
ccacgcatccgtacgagtccagggggcaggggcaccattaccgagtagtttaattagtgctagttgtattaccattgttagtgacttaattaccctcacgcgaagcaccttacctctgctagtcctcctacgtctcttctcttcgcttaatcttgtactactgctctgttataatcagcgggaaggaggaagatgacggtgacgccacggatcacggtgagcgacgggcggctgacggtgcgcggccgtacggtgctcaccggcgtgccggacaacgtgtcggcggcgcacgcggtcggggcggggctcgtcgacggtgccttcgtcggcgctcacgccggcgaggccaagagccaccacgtcttcaccttcggcacgctccgggactgccggttcctgtgcctgttccggttcaagctgtggtggatgacgcaccggatgggcgtctccggccgcgacgtc

SEQ ID NO: 290607 - DNA, 360 bp, Zea mays
gtcgtattatcaagtgcagctgataaagtgccatcggcgcccccttggccgaacccttgggcgaacccttggcccaagggaaaatttccggggccgttccacggtgttcacggaggtcctggccaacagggtgaaaaaggttgtggcctcggaccccttgttgaaccccccttgcagcctgttgacggccgattacggctggacggccaacatggagaggatcatgaaggcacaggcgctcagggactcgagcatgtctgggtacatgtcctccaagaagaccatggcgatcaacccggagaacgccttcatggacgatctgcgcaagcgcgcttcggcctacaagaacgacaagtctgt

SEQ ID NO: 290608 - DNA, 385 bp, Zea mays
  unsure (1)..(385): unsure at all n locations
cacgcaaccgcacaactccaccaccccgccgagctcggctgggctttgccgtggntttcgcntntcttgtgttggccttgttgtttctcgtggggtgtgtttcgggctttccggttctgtcgggcgggttgtcctcgctggcggcctcctgggcgggttctttgcctgttttgctctgggttggctggtcgccgtcggtgctggtcttgcctcttgccccgttggttctgtccgctggcggttggtgttgccttctggtgcggctgtcgngtgggtgggctccttggccgtgttcctgcggctcctttgccgggccggccccgggtccctgttcgcgggtgctggtgctcngtttcttcgtgccgttgctggggctggtgtgctt

SEQ ID NO: 290609 - DNA, 369 bp, Zea mays
agtcttgtttgttgccggtggcgagacgtcggcgacggccatgcactgggcaatgacggagctgatacggaatcctcgggcgatgctgaaggcgcaggccgaggtccggtctgcgctcgcggggcatagcacggtgacggaggccggcctcaccgacctacactacctgcggctagtcatcaaggagacgctccggctgcacccgccggtgccggtgctgctccgggagtgccttatcgcacgcgaggtgctcggctaccacgtcccgcggggcgccatggtgctggtgaacgcgtgggcgatcggcagggacccggcgcactgggacgcgccggaggatttcgcgccggagaggttccaggagcttga

SEQ ID NO: 290610 - DNA, 382 bp, Zea mays
aaggtgtccaacctctgctccgaattcctcaccgcaggcaccgacacgacgtccaccgcgctgcagtggatcatggccgagctggtgaagaacccggacgcgcaggagaagctctacagcgagatcagggcaacgtgcggcgacgaccaagcggaggtcggcgaggaggacacgcacaggatgccgtacctcaaggccgtcgtgctcgagggactgcgccggcacccccctgcgcacttcgtgctgtcgcacaaggcggcggaggacacggaggtgggcgggtacctgatccccaagggcgcgacggtgaacttcacggtggcggagatgggctgggacgagcgggagtgggacaggcccatggagttcgtgccggagcgat

SEQ ID NO: 290611 - DNA, 352 bp, Zea mays
aaatcgcggcaacttcacagaggaggaggacgagctcatcgtcaagctgcatagcgtcatcggtaccacgttcggacgtcgcacgcctctcgctctctctcctaccactcgacattcgtttcgttacctaaactggccgggtacgttatctgcatgtggtcactgattgccggaaggctgcccggcatgacggataatgagattaataactactggaacatgcacatccggaggaaactgctgagcagggggatcgacccggtgacgcaacgtcaggtcatggatcaccactcgtccaagatcataatatcgttcgatactgaggtggtcgcagctgcccgtgagtataaga

SEQ ID NO: 290612 - DNA, 375 bp, Zea mays
atacagaacaatctggcacaatcttagctgacgaatgttgggattgcaacgagaaacatcctcgatgtacaagagaacgtcatcgagagattatgctccgatgatcgacgtcgaacagagctcaggtcttttagacaatgatgtggacaatgaaatggaaactacaaatccttcatggaagtgttctcttccgcatgttctagtggctacaatttcgtcgtttctatttggttaccatttaggagttgttaatgaacctcttgaaagcatttcgtctgatcttggttttagtggtgatacattagctgaaggtttggtggttagtgtatgtcctggtggtgcatttctcggatctttaatcagtgggggagttgc

SEQ ID NO: 290613 - DNA, 209 bp, Zea mays
  unsure (1)..(209): unsure at all n locations
aaacnntgggagttacccgcttgacgggcgtaattgtacagagtttacagagcgacaaggaagtatttttacatgagcgtgtaagtaacgcgagtggtgcaggggagatgctgggattcggcagcgtgagtggtgcttcagtgttggatgatgggggtgagttggtgatagtgagtgaaccggacctagaggcggggacaatcactatt

SEQ ID NO: 290614 - DNA, 364 bp, Zea mays
acttcttcatcgacctcctcctcctagcacagctagcgccagctcaccttcggctgggatcacgtcgtgcagcagaggtaagtgcgactgtcgcaccagctgctcctgcggtagctcatgcatctgcatgtcccctaacgtggagaccgccgccgccagcagcatcaacatcaccgtcgtcgccgcgccgaccagcaagggtagcgccggcggcttcgaagccgccaccgacggcggcggctgcgactgcaacacctgcaactgcggcaccagctgcggctgctcctgctgcagctgcaactggaccggtcatgccatggcgcacgagagtctagaggacgaagatgagtcttacaaatataat

SEQ ID NO: 290615 - DNA, 324 bp, Zea mays
cggacgcgtgggcaaatttcaatctccatcgatcgattcctcccgaacccgacccgatggcctccgacgccgccgccgagccctcctccggcgtcacccaccccccgcgctacgtcatcggttacgcgctcgcgccgaagaagcagcaaagcttcatccagccgtcgctggtggcccaggcggcgtcgcggggcatggacctcgtccccgtggatgcgtcgcagcccctggcagagcaagggcccttccacctcctcatccacaagctctacggagacgactggcgcgcccagctcgtggccttcgccgcgcgccacccggccg

SEQ ID NO: 290616 - DNA, 323 bp, Zea mays
cgagaagtacgagtaccaggctgaggttacccgcttgatggacttaattgtacacagtttatacagccacaaggaagtatttttacgtgagcttgtaagtaacgcgagtgatgcactggataagctgagattcctcagcgtaactgatccttctgtgttggctgatggcggtgagttggagataaggattaaacccgacctagaggcggggacaatcactatcacagatactggcattggaatgactaaagatgagctcaaagactgtcttggaaccattgcacaaagtggcacctcaaagtttttgaaggctctaaaggaga

SEQ ID NO: 290617 - DNA, 270 bp, Zea mays
ctgccacatcgcatctgacgccattctcagtcggtgttaacgcgtgtgagaatgatagagacttggcttactttaactccggagggcatccttttcaggccgagtgtccgatgtatctattctatctaatctcagcgctcagttgttagatgcatatcgacagtgcctgttcatcgtgtcttcctatcatctatcacggaatgtgtgggtggtcctatgattaaggggaccatgaagaatgaactctaaggcatacaggctcatgacatt

SEQ ID NO: 290618 - DNA, 325 bp, Zea mays
cccacgcgtccgcccacgcgtccgcgacggagacatggacacattgccaggccgccctaaaaccctcccacgatcatgtcgctcgccagactcagccacccggccgtcgccgccgccgggagcggaaaatcgcttttcccggcgggcccgactgtgcaatccgtagatttccccaatgcacggctccctgtcaccgccgtcgtctccgccgctactgcggctgttcacgctgaggatagggtttcgtcgctgacgcatgtctccggcgtgctacgcgtcgcatttggcgacgagggaaagggcatgctcgtcgacgtgctcgccc

SEQ ID NO: 290619 - DNA, 378 bp, Zea mays
attcacggtcgaccacgcgtccgattttgtgttccatctcaggttgaggttgcgctcaagctctccaagatgcaagagtacactggccgctctgcccccaccgttatcacataaatttttgaaaagtgatttacaatgagttgacgcgcttacacaaattttcattcaagcctcttgttctaaagttctacttcctgttgcatctcaccaatgaataaaatgtatgtatcaagaccgaaaccgtagcactgcgcaagatccgcaagtaccagaagaacaaagaagctgctgatccgcaagctgcccttccaacacactgatgcgcaagatcgcacaagaattcaagacaaaacacaaggggcgggccccccaaagtgt

SEQ ID NO: 290620 - DNA, 324 bp, Zea mays
ccacgcgtccgctcgccggctcggggacgccgccgctggagaccacgggcttcgcgctggcgccggggcagtcgcgcgcgctgtacgcgccgcaggggtggtcgggccgcttctggggccgctccggctgcgacttcgacgccgcctccgccaagggctcctgcgccacgggcgactgcggctccggcgaggtcgagtgccgcggcgcgggggcgtccccgcccgccacgctcgccgagttcacgctcgacggcgccggcggcaaggacttctacgacgtcagcctcgtcgacggctacaacctgcccatgctcgtgcgggcca

SEQ ID NO: 290621 - DNA, 325 bp, Zea mays
acagcccacgcgtccgcgcacgcgtccgctgctacccccaatttttgcatcagatgagagcacttcttgttcacaatggaacacagccatggaaaaacgtacacgatggacaagacaggaagttgtcggtaactttcgtattggagatgtgtttggaaattgttgtcgactcaacggcctacatgcattgacatagttcacagttgtcactcacaatgctatagaccgacatgattctgagaagttccctttctcaattttcgacaagaatggcaagtagtgtgcatgccttatcgactgccaccacactgagcaacacggatgg

SEQ ID NO: 290622 - DNA, 353 bp, Zea mays
gcattcgcgcggtcgacacacgcgaccgcccacgcgtccgcccacgcgtccgcggacgcgtgggtgaactcaagaagctagtggaagaaggaaaggttaagtacattgggttatccgaagcatctgcatcaacaatccgaagagctcacgcagtccatcctatcactgcagtacagcttgaatggtcattatggtctagagatgcggaagaagatataattcccacttgcagagaacttggaattggaattgtagcttacagtccactaggcagagggtttttttgtagtggagcaaaactagttgactcactgtcagagcaggacttccgcaagcatatgcctagacttcaa

SEQ ID NO: 290623 - DNA, 374 bp, Zea mays
aagtcaccgaaccgccttgtcgtcgacgaggccaccaacgacgataactccgtcgtcgcactgcaccctgacaccatggagaggctgcagctcttccgcggcgatactgtgctcctcaaggtctgatatggctaatctgagcttgttgcagcagcttggggatgttgagctaatctagcagattgtattatcacgtgaccgatctgtgtgtgttcgacctgaattccgtgtattcagagtgcagacctgttagaaataaccttagcttttgtcacaagtacttgctgaagtgtttaatgttgtaatttgttgtattgtttgagaacttgagtatgctgaggcattgagggtatttgggctcctcctgctttgct

SEQ ID NO: 290624 - DNA, 440 bp, Zea mays
gacgaaacacagctagctcgctgtggcagcatgttccgatctgccgtgcagcgtctcgtcagggccagcgggaagagtacggccgacccagccgccgccgcgtccgctttcttcctcagtcgcttctccgcggcggccgggccgccaccgccaccgccacagaggctggctggaaaggtggcgctgatcaccggcggcgcgagcggcatcggcagggcaacggcggcggagttcgtccggcacggcgccaaggtcatcctcgcggacgtccaggatgacctgggacgccacgtcgccgcggagctgagcctgccgggggggcccggcccggcggccgtccactacacccgctgcgacgtgaccgacgaggcgcaggtcgcggcggcggtggacctggccgtggagctgcacggccgcctcgacgtgatgctcagcaacgc

SEQ ID NO: 290625 - DNA, 326 bp, Zea mays
acggaaccatataatatatcacaagagtgagggaggattttttggatgtccttcacacaaatgcaagcaatgatagaagcagaagatgaagaatgttagctcggcgtgagacagatcggaattgggatagaaacatccatggtctcacatgagatgtacattcttgactacagtaatatatcatacatgtaccactagactgacggttgcttcaatctactccatgtgattgcactatgtactgtaagtgagactctgtgttgcacttcatctacatcgccatcgtcaccgtcatgggcgtctcaaagtcaacctccaagtgcgcc

SEQ ID NO: 290626 - DNA, 317 bp, Zea mays
acaattgttgagggtgtcggcgatgatgtggtcgctgaacatgcatagatcacatgtggcaagcaacgtcagcacatgcatgtagctgcagtgatttatgatgctgttctgacgctggcgggaccagtgtactacgacatagatgttgtcgctggtatcatacatcgcactgccacaaccgcaacatatattaagtctgcagatcctatgccatcatcggaaggttcgctggccgattcaggagacatggtcatcaccatggcatggggtaacgtcctcgcatctcatctcacgatcactgaatatgatgtagactt

SEQ ID NO: 290627 - DNA, 407 bp, Zea mays
gggtccagccacgcgtccgcaaaaacgtccgcccacgcgtctggcaccccgagctgtatagacgagctagtcggtagaacttgcacgagcggcgcagaacgaagtgcagataacaggacatatggctacgcctgcggtgaacgtttactgctgggctatctcaccgttcgtatcgcgggctctgctggccctggctgacgccggcgtcgactacgatctcgtccacatgaaccgccatgacggcgaccaccgccgcccggagcacctcgccagaaaccctttccggaacgtgccggtgctcgaagatggagacttcacgctcttcgaatcacgtgctatcgcgaagcatgttctccggaaacacaagccggcactgctgggcggcagcaagctggagcagacagtga

SEQ ID NO: 290628 - DNA, 328 bp, Zea mays
cgggcggtcatccacgcgtaaggatttactcttatcaagtgagtatgtgcggcatacttgctgtgctcgggtgcgcctacgaggccaaaggcagcagcaacaggtcccgggtgctggatctgtcgcgttggatggagcaccgtggctgcgactgcatcggtatccggcatgtgagcaactgctacatctctcaccaccgcctccccatcatcgacgctacctctggcgacatcctcgtctacaacgaggactagtccgtcgacttcaatatctgcgactacatctacaaccacctgtgcttcaggagcagcttctcctgtgcatgcca

SEQ ID NO: 290629 - DNA, 444 bp, Zea mays
aacgatttcaaagatatattcgacgtcgaccacttcaaggagtcgttgaaggaagacattgtgatcgtggattccctcccaccacattacagaagggtgaaaccgtacgtgagagcacccacctcctggtccagggcttccttctacagagacttcgcgaaaatcctgatgaagttcaaagtggtgaggttgacgcacacggattcacggatcgtgaacaacggcctcgctccttcgctgcaaaagcttcggtgccgcgcgaactacgaggcgctccagtacaggaaggagatcgaagagctcggcaacacgctggttgatcggctgagaaacgagtcgcagcattacatcgcgcttcacctgagatacgagaaggacatgctggcattcaccgggtgcaaccacaacctgacgctggatgatgcggcggagctgactgacatg

SEQ ID NO: 290630 - DNA, 280 bp, Zea mays
gcgcgccaggcaagtcttccggccggccgcgaatagcggagtcatcgcagcacacgatggggaagctcgccttcggaagcgtccgcgactccttcagcgccacctccatcaatgcctagctagccgagttcatcgccaggctcctcgtgatcgtcgcctgggtcggttccgcgatcggctaacggcagactggcaatgggggtacactggactacgagggcctggcggggatcgggatagcgcatgcgctggggctgttcgtgggcgtgtgcgtcccggg

SEQ ID NO: 290631 - DNA, 192 bp, Zea mays
aatggacgggacattctggagctcagcgccatcacgttccttatccaactcactggccttgtagctgagctcgagaatgccctgaaggagtggactggagggacgactgtcgcaaatctcttcagcaatgggaagcatagtggctgctgtgatgagactagggcgctgaagagtgatgggaagctggtgcct

SEQ ID NO: 290632 - DNA, 444 bp, Zea mays
ttcgccggtccacccacgcgaccgcagttacttctccctccgccgccactcccgtcacattcaccgccaccgccaattccatacggtcctccgccacctctgctgatagccacaacagatggcaagcaatggtgatgggcctgcaatcggcatcaatctctgcacgacgtattcttgcgtcagcgtctggcaacattaacgtgtcgacatcatcgctaacgacgatcgtaacggcaccacaccctcgattggtcgccttcacatactccgctcgcctcatccgtcatgcggccaaggatcatgtcgccatgaacaccatcaacaccgtctttgatgcgaaacgtcgcaatggcatgatgtttatttctgactctgtccagagtgatattacactgtggcccttcagtgtcaatccaccgcccggtgagaatccaatgacacttg

SEQ ID NO: 290633 - DNA, 365 bp, Zea mays
aagggaagtgcgcgttgtggtagttatgctgatgctgatggtcggtggccgattacatacactgcaacttctggtgtatgctcttctcttctggggacacgtaatgtaaccacaaagactgtgtcactgtagcctgtggtacaaaccctgctgtgtatcagcctgtctacaaaatacagcgatgagttgtgacgttacgtttctgacaattcagctactaatgagcacatctttgcattactagagctaagagaagttgatgaactgtcagccatctgcagcacagatcctcactatgcatcagaatcactcttgtttggattatctggatttatgatcgacttaagaatggtggagtttctgca

SEQ ID NO: 290634 - DNA, 261 bp, Zea mays
gtcacactgcacgttttggacactgaactgtgagatggcatcagcaaagcgttcccgtgaggaaaatgtgtacatggcgaagctcgcccagcaagcagagaggtacaaagaaatggttgagttcatggacaaggtagcgaaaactgttgactcggatgagctcactgtggaggagcgcagcctcctgtctgttacatacaagaacgtcattggagcccgccgtgcctcatggcgcatcatctcctccatcgagcagaagga

SEQ ID NO: 290635 - DNA, 353 bp, Zea mays
gggcccacggacgatcgcgactgcgcagtctaatacgctcgaggcatctcgaatcgatagtctgccatatcgtcggataccctcgaaatggccgctcaagggaccgcaactgtggacgtggctctatctccgattcgaagagaaccgctgaagatcaggacagcgttgcaactcatctcaaggccattatctgcacacaaatggcttatgctgggatcacgtacagctgcaacaacactttctcatcatacgaccaagtccttcatactagtgccagactcggaccagtctcagaacgtcaatcaggtactggcgcacagatcggatcagaaagtcaactcgccaacggtacc

SEQ ID NO: 290636 - DNA, 414 bp, Zea mays
agtctgctcaagaagtacttgacaaagttgctcaagagactccgaattttggaacagaacaggataaggcccattgtccgtttcatctcaagacaggggcttgtcgctttggattgcgctgcagcagagttcacttttaccctgataaatcaatcacattgctaatgaaaaacatgtataacggtccaggccttgctttggagcaagatgaagggcttgaggtttgttagaggaaattctctaatgcataactttgtatccttaaactactgtttatttacgtttaaggatgctcaattttggtttcatgggcagtgccattttaagttgtgatagtttaatactaaagcaagctcatgtcaaaataacaagtattccactttaagcttgtaagcctttataagaagacatgag

SEQ ID NO: 290637 - DNA, 295 bp, Zea mays
agaggaatcagctgctgacgctcctccgatggcgggtcgcatggtctatccagatcatctgcgtcatctcgacacggcacgccgccaactacgagctgtcatttcaataatcggatgagcacctatcatgctacgcatcgcatggcaagagactggtacttagaacctgagcacacgtattggtggtacacatggttcgattagatatgatgaagagtatactcacggttcacatcatcgttgacagattgctaacgatatccgagaacctatcactgtacagaatccacacatt

SEQ ID NO: 290638 - DNA, 423 bp, Zea mays
agagaatactgcgacctctgctccccctgcacaatcctcaagtgggagttctacatctgcacaacccagcagtgctgcttctgctcgttctactaatggtccctctctgatatctcgtcctgctggccttggatcatcctcttccctatcgcagcctcctgcccgttctgttcaacaggtccgtgccagcaggccagccgctgtggataagggaacccatgaggctactgagtctgccgaggatgatagagatgagaatgatgatatccatgataaacttcaaatgatccgggttaagtttcttcgcctcgctggcatgttggggcaaacatctcataacatggtcgtttcacaggttctgtaccggcttgggctggcagaacaacttagaagaactgctaatgggacgtttagcattgaccg

SEQ ID NO: 290639 - DNA, 176 bp, Zea mays
agccagtgcttagattggcaattttggcatcggtggtctgaagccacgcactcatcagtggaacattcgcagtcaataagtagaacctgtctctgagctgcttcccacgagtgaaagttgtactcacatctgaggggattcatggccaagtatacatccccgagatccattggatg

SEQ ID NO: 290640 - DNA, 419 bp, Zea mays
  unsure (1)..(419): unsure at all n locations
aatacatggaagcaatttcgatcttattggaagaatccaccctacaatgccatgcgctatcttatgacaatcctctacggtctcgtgttcggttcagtcttttggcgcatgggaaagaacgtgaaatcagagcaggaactgcaaaacctacttggagccacctatgctgctgttttcttccttggatctgcaaacttgctctcatctgtacctgttttttctatcgaaaggacagtcttctaccgtgaaaaggctgctgggatgttctctccgctgtcctattcgtttgcggtgacagttgtggagcttgtctacagcatagctcagggcatcctttataccatccctctgtattcaatgattggttatgagtggaaggcagacaagttcntctacttcatgttcttcctaacctgctc

SEQ ID NO: 290641 - DNA, 439 bp, Zea mays
  unsure (1)..(439): unsure at all n locations
ggcattccaccnagaccagacagcggctcatcctttgctggcaagcnagcgtggaggatggccgtaccctgtgcggattacaacatcccagaaggagagcaccctccacttggtgctgcgtctcaggggcggcatgcagatcttcgtgaagacacttactggcaagacaatcacccttgaggtggagtcctcggacaccattgacaacgtcaaggccaagatccaggacaaggagggcatcccaccggaccaacagcgcctgatcttcgccggcaagcagctggaggatggtcgcactcttgcggattacaacatccagaaggagagcaccctccacctggtgctccgcctcaagggtggcatgcagatctttgtgaagacattgactggcaagaccatcaccttggaggtggagtcgtctgacacaatcgataatgtc

SEQ ID NO: 290642 - DNA, 447 bp, Zea mays
ccggtcaggattacgggtcgacgcccgcgtccggctggaggcccacatagcccacgatgagggcgaccaccaccagccgggcgtacctgccccggcgcccgcaccgcccgtggcggtggacacgcatgctcaccaccaggagggagagcacaagccgcacttcccggcgccggcgcctcccccgcacgtggagacgcaccaccccgtccgtcgtccacaagatcgaggacgacgacacgaagactcagacgccagcacacgcaccggaggacgagaagaaaggcctgctggacaagatcaaggagaagctacccggtggccacatgaagccggaagacgctgctgccgccgccgccgcgccggccgtccacgcgccaccgccgccggcgtcccacgccgaggtcgacgtcagcagcccggatggcaagaagggcttgctgggcaaga

SEQ ID NO: 290643 - DNA, 333 bp, Zea mays
ggggccgccgccaagcccttcgcgtgcgccgcaaccgctgagtgagaagaagagatggccggcaagggcgatgggccggctatcggcatcgatctcgggacgacgtacgcgtgcgtcagcgtgtggcagcacgaccgcgtcaacatcagtgccaacgaccagggtagccgcaccacgccctcgtgcgtcgccttcaccgactcggagcgcctcaacggagatgcggccaagagccaggtcgccatgagccccatcaacagcgtctttgacgccaggcgtgtcagcggcaggagggtcagtgaggcgtctgtccagactcagacgaagttgtgg

SEQ ID NO: 290644 - DNA, 354 bp, Zea mays
acggacacgtgggcttttgatgtcagtaacttgaccattgacacccgtgtgtttgaggtgctggccaccaatggtgacacccatcttggacgtgatgattttgaccacaggatcatggtatacatcaccacattcatcatcaagaactacatcaatgacatcagcaaggacaaccgtgctcatggaaagctgcagaaggaagctgagcgtgccaagagagccctgaccatccagcaccagctcctagttgagatcgagtccatccttgatcggatcgacttcgcgagcccgcctgaccgtgtcaagtttgcggagctgaacactgactcgttcctcaacactatgggccctgtc

SEQ ID NO: 290645 - DNA, 411 bp, Zea mays
gtccagcagcacaagatcggggacgacagcagcctgactgacgagatcctcgcagcaggccccaacttctgaactaaagcaatggatccggatgaataaaacgatggtgtgtgtgcgtgggtgcgtgtgaagatgattacgacgacgacgaaaaaaaaggtgttggatcgatgagccaacatagtaatagattagctgggtatattgtcatgggtgcgtctggtctctggtcttgttatctataaagctgtctcaagcagctatcatattctatttcaaattctattctgtaagcgtgtagttcaaaacaatgctttacacaaccatatgcacagtctatctaaggttggtctgttctatcagcttgttgggaaaagtttgcgtgtgcttgtatcttgccccctgtactct

SEQ ID NO: 290646 - DNA, 430 bp, Zea mays
agaactggcaggtggctatggaactctggaggagttgcttgagatcattacttgggcacaactggggatccacaagaagccggttgggcttttgaacgttgatggattctacgacccgcttctgtctttcatcgacttggctgtcagagaaggtttcgtatcggaggcggcaaggcgcatcatcatctcagccccaacagccaaggagctagttatgaagctggaggactacgtcccggagtatgacgtcggcttggtctgggaggagcagaagcccaacagcttggtcccagctgctgggatcacctcatcctgatgatctctcaccttccagcctgcaccgcatcatatatacacatataactaagtaactaaccgatcgaagcctgccacaaattttttgttcatctgccaaagtcctaaccaaagg

SEQ ID NO: 290647 - DNA, 361 bp, Zea mays
gggtcgacgcccgcgtccacccacacgtccgcgatctcgtttcaaatccagccatcctcgtttcctccgtcccgcagcatctcaaccccatggccaagatcaagatcgggatcaatgggttcggcaggatcggaaagctggtggccagcgtggccctgcagagtgacgatgtcgagctcgtcgccgtgaacgaccccttcatcagcaccgactacatgacctacatgttcaagtacgacactgtgcacggacagtggaagcaccatgaagtcaaggtgaaggactccaaaacccttctctttggtgagaaggaggttgctgtgtttggctgcaggaaccctgaggagatcccgtggggttc

SEQ ID NO: 290648 - DNA, 384 bp, Zea mays
acattctactcgccgcatcttctagaatcatccagaggcgtacctgtgaagcgctagatcggtgacgcatggcaatgcagaccggggtcgcgacctctaacgtcctcatcctcgtcggtgcagggatgacgggctcgatactgctgcagaatggccgcatagctgatgtcttgggagaactccagcgtgtaaatcaaggaacttcttcgggtccctatgacattgcacttattcaagctcagattctgaatttatcgcaagaagtcagatatttgacattgtcaaagcccattactatactgaatggtaaatctgactcgggacgcactttatcatcctacatactgccatcagcagcacttggagcaatgggttattgctaca

SEQ ID NO: 290649 - DNA, 431 bp, Zea mays
ctcgtgggccgacacaagcctctacactcagtcgcagtatccgtctctaaactctagtctgtgcgaatctgctgccagcagcgaggaacagaacagtagccaatttgccatctcacagttgcgttcctccgattccccgtcccccgatggacctgtctcccagctcgtcggcgccatccgcgccgccggtgccgtgcgagtggtccggcgccgggctcggctccgcggcgtgcggcctcgcctgcacggtgctctgcgccgtcgccacctgcgtcttcgcggccgtggggtcgctggtcggggcggtgactgggtccatggtggggctggcgaccgagagcgggatgctgcgcggcgccggcatcggggccatctcaggcgccgtcttctccatcgaggtcgccgagtcgtcacgcgacctctggcactcg

SEQ ID NO: 290650 - DNA, 398 bp, Zea mays
  unsure (1)..(398): unsure at all n locations
ggccgcgctgcagcctgcctgtcaatctcgatcgatcaaggggtggcttgccgaaatggcggaccggccgtcgcttcctgctctcattattgctatcgccgttcttgctggcagttactgccgcgtggcgagctcggcctcgccggcggtggaagatgagctgcgcggtggaggaggagccggcggtccgacgacgatgccgcggcgcgccgcgtccgtgatggtgcccatcnacatcctcaagtccgctgttagcgacggagctgtgtgcatggatggaacgccacctgcttaccacttggatcctggctccggagcgggcagcagaagctggattgtgaacttagagggaggtgcgtggtgcaacagcgccaagacatgccggctcaccaggagct

SEQ ID NO: 290651 - DNA, 413 bp, Zea mays
  unsure (1)..(413): unsure at all n locations
agaacaatccttctgctgtttgtctactaattctatctcacattgttgatacaaatgggtatcttagcctcattaattttcttctctctgtctttctttatatgctatcgatttgtggcttccgctaagatgcttttcttgtttggataataaaatgttgcctaggattttaatatgtgagttgtcaagttttacagttagtccagttcccgctactgacatgcttgtttcctcgccagggcttgctatggtgttcttcgttatgttatggagagtggtgccaagggttgtgangtgattgtgagtggaaagctcagggcccaaagagccaagtccatgaagttcaaggatggctacatgatctcatctggtcagccagtgaacgagtacattgactcggctgtgagacacgt

SEQ ID NO: 290652 - DNA, 410 bp, Zea mays
  unsure (1)..(410): unsure at all n locations
aggcaatcaccatgggagatcaatctggctctagaaatggaccacaacagaagtacgtttcaggagcccagaatgcctgggatatgttctctgatgagctgtcacagaaacacatcactactggttctggtgacctcaatgacatacttggtggcgggattcactgcaaagaagttactgagatcggtggcgtcccaggggttggtaaaactcaactggggattcaactagcaatcaatgtacaaatcccagtggaatgtggtggccttggtgggaaagcagtttatatagattgctgaagggtgtattanggacatactggagcactttccgcacagccatgagaagtcctcttctgtccaaaaacaattacagcctgagcgtttcctggcggatatctattacttccg

SEQ ID NO: 290653 - DNA, 413 bp, Zea mays
aggacgcgtgggcggacgcgtgggcggacgcgtgggaaaaaaacaaaaagaaacattgagttgccttcacccggcttctcttgagaaaatacaaggcgttaagaaattctttagaaaggcatattattactacatatagagctaggagtagatcttcatccgaacccctccaacgacgactaggtcggcgttttctctccctgctgtttcagcttaaaaactagatgtaccaaacatgctatctgagcaccgcactgatacaacctttgatagtctgcgttttctctcgctgctgtttcagggcaagagaggaggcactctgactgtcactctgagcttcgcgtcacctgagtactgacggacgacatgggagaagttgaggacatgtacacccaagacgggaccgtggacat

SEQ ID NO: 290654 - DNA, 324 bp, Zea mays
agctggcttctccacaccctcttatcaagtcctcctcgggttatggttccttagggttttgtggacgggcgatggctgcggctgatgtggagtaccgttgcttcgtcggcggacttgcctgggccaccagcaacgagtcgctggagaatgccttcgcctcctacggcgagatcctcgactccaacgtcatcaccgaccgggagacggggaagtcccgcggcttcggcttcgttaccttctcctccgagaactccatgctcgacgctatctagaacatgaacggcaacgagctcgacggccgtaacatcaccgttgaccaggccc

SEQ ID NO: 290655 - DNA, 308 bp, Zea mays
agctcgcactccgtgcagccgcagcggatcgagctccccgggtcgctatcagaggcggccactgcacacgacggtgctggtatgttgcaagcacgtgcaggatggcgcaggtcgcgaacacgcttctccctgtgagcctgatggtcgtgtcggctgtggagctgtgccgcgccatcgagttcggcgaacgacatctggcatcggacgaagcgctgtgggacctgtgagagcggtgtcagacgcaccatcgggtgcaccgggaccatcggcataagggccgcctgttcgggaccttcaatgagaacgcg

SEQ ID NO: 290656 - DNA, 424 bp, Zea mays
cgcctatctccgcgactcaaagcttcttccatttcctaccgccgccgctgcagctccaccccattccgtcgacaccatgagggagtgcatctcgatccacatcggccaagccggtatccaggtcggaaacgcgtgctgggagctctactgcctcgagcatggcattcaggctgatggtcagatgcccggtgacaagaccattgggggtggtgatgatgctttcaacaccttcttcagtgagactggtgctgggaagcacgtccctcgtgctgtttttgttgaccttgaaccaactgtcatcgatgaggtgaggactggcacctaccgccagctcttccaccctgagcagcttatcagtggcaaggaggatgcagccaacaacttcgcccgtggtcactacaccattggcaaggagattgttgac

SEQ ID NO: 290657 - DNA, 372 bp, Zea mays
agacaacgtcaaggccagaatccatgacaaggagggcattcccccacaccagcagcggctcatctttgctgggaagcagcttgaggacgggcgcacgcttgccgactacaacatccagaacgagagcacccgccacttggtgctgcgcctcaggggatgcatgcacatcttcgtgaagaccctgaccggcaagactatcacccttgaggtggagtcgtcagacaccatctacaacgtcaaggccaagatccacgacaaggatggcatcacaccggaccaccagcgtttgatcttcgctggcaagcacctggacgatggctgcacccttgccgactatgacatccacaatgagagcaccctccacctggtgct

SEQ ID NO: 290658 - DNA, 353 bp, Zea mays
aaactacgccagcaacactggcaaaactaacctagtcatcgtcgacctctgttgaggcaccgtcgctgtgtcgctctagaccatctacgacggcaacttctaagtcacggacaccgccggtgatatccaacagggtggggaggacttcaacatcacaaggtcaatgatctcgactagaagttcaagtgcagtcacaatagtgacatcatcggtaacacgcacgcgctactgcgtctgcggactgactgcgagcagaccaagcccacgctgtcatccacagcgcagaccaatatcgatatctaatcgctgtacgagggcatctccttcgacaccagcatcaaccgagcccagtt

SEQ ID NO: 290659 - DNA, 337 bp, Zea mays
ggacgcgtccgagactcaaccgtcctcactcaccgggagacggcgacgtgtcacggttcctgatgcgtttgagtctgcgcgaagaaggcgagctgacgatgcagtcccgtatgcttcatcggagggcttgcctgcgccactagcaccgagtcactggtgaatactctcgccgccgagggcgagatccgcgactccaacgtcatcatcgaccgggagacggggaagtcccgcggcttcggcatcgttgccttctcctccgacatctccatgctcgacactatctactacatcaacggcatcgaccgcgacggccgtagcatcaccgttaaccaggccc

SEQ ID NO: 290660 - DNA, 427 bp, Zea mays
aaaaaaagcctccgcctcctcctcctcctcctcctccgccgccttccgcctgttctcacttcccgcccctccctccggacctagacccctccaagcgccagcgccggtgaacaccgctttcccgtacctgcgccatgggccgcccaaagggcggcgccgcgtcctcctcgaagaagccgaaggcgaagcagaaacagcgaggtggcgtcgacttcaagaagtacaagcacaaggtcgggcgcaagcttccgccgccgaagaatgccaccaacacggaaatcaagtccaaaacgatcgtgctgccggagcagagcatggcgtcggagaggacgggcatggcagtgaacaagcgcgggctcacgctacgggagctcctgcagcagacggggcactacaatgccaatgtgcggcgggctgcactgaatgg

SEQ ID NO: 290661 - DNA, 193 bp, Zea mays
cgtccgagcacatctagcatcttccatgccaaggccgggatcgctctgatagaccacttcgtcaagctcgtcacgtggtaggacaactattggggctacagcaactgcgtcatcgacctgatgcgccacatgttcaagacgcagtataggggtgttttccccatgcttctgcatgatgggagctgcaggtgta

SEQ ID NO: 290662 - DNA, 366 bp, Zea mays
agtgaccctccctcagccgcgtcgcgtcgcatcctacgatccaacgctctctctgctcgcagccatggcgatgaactacccgaccgtgagcgccgagtacagcgaggctgtggagaacgccaggcgcaagctccgagccctcatcgccgagaagagctgcgccgcgctcatgctcagcctcgcgtggcactccgcggggacgttcgaagtgtcatccaggatcggccgtccattctgaacgatgaacctctcgtcggacatggctcacggcacttccactgggctagacttctgcagttccgcgagccggagacggtcaggggagcactccagcactatctgcctgcgggtagggtttctcccggt

SEQ ID NO: 290663 - DNA, 441 bp, Zea mays
  unsure (1)..(441): unsure at all n locations
gggtccacgcacgcgtccgcacacgcgtccgcccacgcgtccgcccacgcgtccgggccaattgggaaagaatatattgaccctgaatgatgcgaatttctgtcagttgcttgttccgtctgggacagccgtgccataattttgagggtcttccgtctttaattggttgctagtatatcaaggttttcctcctacctatgcatggaaacatggatttaattgttctctgtacgtatatccatctcttgctaacggaacctgtggatcaaaatcatctcatgttcgattggtatactactttgtcatctcacttctatgtgtagattttagctttttttcatanggctgccgtctagttttacttctgtacgtatttcattcactagataggtatctagatacttggatggcgcaattgtcctgattcccaacccaacagca

SEQ ID NO: 290664 - DNA, 433 bp, Zea mays
gacgacgcgtccgatccgaaacgccgagtgcacaccacctttccccactccgatcgagtcgatggccgccgaaggcgagaagaagatgattaccctcacaagctccgatggcgacgagttcgaggtggtagaggccgtggcgatggtgtcgcagaccatctgccacatgatcgatgatgactgcaccgacaacggcatcgctcttcctaacgtcaactccaagatcctatccaacgtaatctagtaatgcaacaagcacgtacattccgccgcagccgcagccgccgcctctaatgccggttccgacgacgtgggtgccgcctccgccatacagcaccgccgcctccggtgaggacctcaataactgggattcggacttcgtcaacgtcgaccaggccacgcttttccacctcatcttgggtgcatactatct

SEQ ID NO: 290665 - DNA, 275 bp, Zea mays
cgtccggaagagtatgagtactgcatgcttcgccatgtggaccctcaagttccttatgccagagatcttatcactatcctgtacgatgctattaacattggatatccacatctaatagtggcacacgacattgagcacgaaactcttgcaatccttgtggatatcatgcttagacgttcattgttcattgtcgctactaccgtccctgtctcttggagagcacaacttcaagtgcctcattacattcctactctcattggaggcattgtcatcat

SEQ ID NO: 290666 - DNA, 380 bp, Zea mays
  unsure (1)..(380): unsure at all n locations
ggcaccacacctcttcctcctcttcctcctcctagcacagctagcgcctgctccccttcgtctgtgatcatgtcttgcagcagcggcaagtgcaactgcggctccagctgctcctgcggcagctcatgcaactgcatgtcccctgacgtggagaccgccgccgccagcagcatcaagaccatggtcctcgctgcgccgaccaccaaggccagcgccggcggcttcgaggcggccaccganggcggcggctgcgactgcaacacctgcaactgcggcaccagctgcggctgctcctgctgcagctgcaactgagccggcccgcccgggccggcgatggggcacgagagttcagaggacgacgacgacgaagccgtataata

SEQ ID NO: 290667 - DNA, 132 bp, Zea mays
gacccacgggcgcgctcaagaactcaatttcgatctcagttgaaagcaacccatcctcgtttcctccgtctagcagcctctcagcctcatggccaggatcaagatcgggatcaatgggtttggcaggatcgg

SEQ ID NO: 290668 - DNA, 408 bp, Zea mays
gcagcggtggccgctgccggcgccgtccatccccaccgcacaccaccgcctccaccacgccaccgactccgcctctcgctcccccctcgccgcgccgcccgaacgccacgatgcgtcacctcctcctctcccgcttcctccgccgcggtggcggcagcggcatccccaacggccactaccaccacctccccctcctccgcgccctctcctcctccccctccccggtctcctcggacgcagagctccgcaagtacgcgggctacgcgctgcttcttctcggctgcggcgccgcgacctactactccttcccgttccccgccgacgcgctgcacaagaaggccgtgccattccggtacgcgccgctgccggaggacctccacgccgtctccaactggagcggcacgcacg

SEQ ID NO: 290669 - DNA, 310 bp, Zea mays
cgacacgcctcagacaattcggacccgctggcccgtccgccactctctcggcctcacgtcactaaagcgcatcagttctcaagtgccagtcgcagagaagtctcaagaagccactgtccttcacatgcacggtcgccagttccacatgcactggatcatcggtgaaggtgtacaggccagtaacatacgcgcatccgtctcagcatacgaggaagagaatctgccacgagaactacatggacacagacctgtggggcccttcaatgtcagttagcagtagcatgtatatcacagtgatgcagaccccgct

SEQ ID NO: 290670 - DNA, 393 bp, Zea mays
  unsure (1)..(393): unsure at all n locations
tcgacccacgcgcccgggaactggcagaggttttggaggaggtgctggtggaggaggtggactaggcggtggtgccggtggcgggtttggcggtggcgcaggangaggtgttggtggaggtggtggccttggtggcggtgcgggaggcggtgctggcggtggtgcgggagctggcggtggtctcggtggtggtgtaggcagtggtgtcngtggtgggtttggaggaggcaaaggcggaggctttggtggtgggattggtgggggcggcggcgcaggtggtggtgccggtggtgggttcggangaggcaaaggtggcggttttggtggtggcaagggaggtggtttcggcngaggcgccggtggtgggttcggangaaggcaaagtggtggttt

SEQ ID NO: 290671 - DNA, 418 bp, Zea mays
actcactgctcgttgccggctgcccccgcggccccggccagtccatcccctcgctcgctccccaactccagcaggcagatcagatacatccatccattcgcggaccggaagtaatcatcaggaaaggaaagggttgaactatgagcgccgtggcggtttcgtcgtcgctgaacccggacgcgccgctcttcatcccggcggcgctgctgcaggtggaggacttctcgccgcagtggtgggacctcatcaccaccactgcctggttccgcgaccactggtcccgcgagcgcgcccatctggacgagatggccgagcagatcgacgcggccggcctcctccccgacgacgaggacctcttctacgacgaccagctcgagcatggccccgtcgccgccgcccttaagacagattcggtgct

SEQ ID NO: 290672 - DNA, 363 bp, Zea mays
agggaacgccggagcctcatgctccctctcgtcctcaatgccgcagtgctatgagtctacaagttgcactggatgaccatgctagtcacatcagtgtctttcatgagcgaggtggtcaattccacctgagctcgatcagctcataatgtatatcggactgtaatatatgccgttctctcacatcttatgatgagagatgtgctacacggattcagatgacccaaagcctttgcggcccttcaataatgcttagcgataggatcaatgtaccagtcatacagagacctctctgtgctaatgtgcatactgagaaacgcggcgggaacttcatgactgaattcatgatgggctgtgttgcagctg

SEQ ID NO: 290673 - DNA, 365 bp, Zea mays
acgcgtccaaacagaatccacagtcatacgagcaatcgcacgcaagtgtcacgtcacatatcggtcgacatggatcacacgcagtctgccgtagcggtcgccgtgatggccccggtgctgctgctggaagcggtggtgatgacctctgatggcggcatcaactgcgtgcaggtgaactccgccatcaagcgctacgtcacctaggcgtacgtcatggggtccggaccctccgcgtcttgcagtacctgcgtcatgaacgtgatgatcgccggcaggatcgccgctgacaggtgcgctgcctgcatctgcctctcgaacgccgccatgggcgtcaacggtctcaaggcctgcaacacggccagcat

SEQ ID NO: 290674 - DNA, 413 bp, Zea mays
aaccgacatcgatgtcccctgggagtttcgctgacacgccttcccctggaagagcttcatctagtgcctgtttggttcgatgaacttgccacacttttaacttttctgctaaggtaacttttctgctaaggtcagttctttaattcgaacgactaaatttagacaaagtgtgacacatttaaacacgaaccaaacataactcgccagagaagcacttgttgtctctcgatttctttttcatgtctgtcgcattggtcttctcctcaactcgctggccgctgacggtagatgcacaactcataatttaactgatcgagacgatgaactaatgaattcaaaatttaaataaatataaataaaacaatctttttccaacaaaaactgatgtgtactattctttttatacaaataac

SEQ ID NO: 290675 - DNA, 335 bp, Zea mays
  unsure (1)..(335): unsure at all n locations
tcagctcacactccggcagccgagcgatcgagctccccggtcgctagcacagccggccactgcacacgacggtgctggtaggttgcaagcacttgcaggatggcgcaggtcgctaagacgcttctccttgtggccctggtggtcgtgtcggcggtggagctgtggggggggatcgagtgcgacnagcggggacctggcatcggacgaggcgctgtgggacctgtacgagcggtggcagacgcaccaccgggtgcaccggcaccacggcgagaagggccgcgnggtnnggggggggggggggggggggggggttggggggggggggggtggggggg

SEQ ID NO: 290676 - DNA, 369 bp, Zea mays
cccacgagtccgcccacgcgtccgcccacgcgtccgcccacgcgtccgatggaagccgatcgtagacggggttcaccagaaaggagggatatttttctgtcagatttggcacgtatggagagtctccaattccacttttcagcctaatgggcaggctccaatttcaagcaccgataagccactaaagcctcaagtgagagccaatggtatagacgtggctactttcgcagttcctagacgcttagagactgatgaaatccctttggtcgtcaatgatttcagggtagctgctcgaaatgcgattgaagctggatttgatggtgtcgaaatccatggagctcacggttacctgattgatcagtttctaaa

SEQ ID NO: 290677 - DNA, 262 bp, Zea mays
aagtaggtggccggaccgtggtggcatcgcgaattcaactccgcatctgaattggcattcggcagcgcgccaactgcataggacgagatggcgctcataacaatcggtattgctagccatgcggtcatcgggcagaaccttgccgtcaacattcctcagtgtgggtgtctcagctgtatgtacaacaagataagctcacatgtggactagaccgtgctccgtgccaaggcagaacgaaaccttcccgtccatccacttccat

SEQ ID NO: 290678 - DNA, 411 bp, Zea mays
cgggccgacccaaacgtccactcaagtcgcgggacgacgcgtggcagttccacgacaggatgcagaggttcctgaagaaggcggacgacgagatcatccgggtgcagtgccaggagagcgtggcgctgtcgctggtgaaggagatcaccgagtacttccacggcgactccgccaaggaggaggcgcaccctttccggatcttcatggtcgtgagggacttcctggcggtgctggaccaggtctgcaaggaggtgggcaggatcaacgagcgcaccatcgccagctccgcgcgccacttcccggtgcccgtgaacccgatgatgccgcagctgttcccgcggctgcacgcgttgagagccgggttctccgacgacgagagctcagccgcttcggtgtcgtcgccatgaccga

SEQ ID NO: 290679 - DNA, 400 bp, Zea mays
  unsure (1)..(400): unsure at all n locations
accacgcgtccgcccacgcgtccgcccacgcgtccgcggcggtagagaagcccgtgctgcccctcgtgtatcaccggaacttgcagcgtttgtcctcttgtcaattcatttctcatttagctcgaagctaatgcgtgcgatttttcatggttgttgtgctggaatgttctaaatcttagattttcagtgaccccaacaatctcgctgcccccgattctcctgcttcatatatttgattactcanagcacgcgatgctcccctgaagtagtaaggaaaatgctgactctgctcttgctgaaaatattgtacagaaagacacaattccattttggtggatgcaattggaggattcagcgagatgcttgcctctacacggaggtgctatgtatttggaggcaa

SEQ ID NO: 290680 - DNA, 378 bp, Zea mays
ctccatcctcgtccctgcaaatcctgcaaacacaaccgcccgttttcccccccggaacaggaaaaacgggaaaaaaaaggtaaggcccgttttcggcccattcggcccggccccaagcacctgtaacgaactcctcaatctcaagagcaagatgggtcccggcggcaagatgaacgagaaagagcgggagaagcaagagcagctcgcccgagctaccggtggcgccgcgatgcagcggtcgccggtggagaagcctccgttcactctgggtcagatcaagaaggccatcccgccacactgcttcgagcgctcggtgctcaagtccttctcgtacgtggtccacgacctggtgatcgccgcggcgctcctctacttcgc

SEQ ID NO: 290681 - DNA, 319 bp, Zea mays
gtccacactggtgcttttgcatgggagactaatccggttcaagttccagtcgggacacgagaacccccaccattcattgacagagatgaaagtctgccataagtttgacggattgcaactaagtaaacgtcgtccaagttttagggagactggtggtacagttacagctggcaatgcttctagtacatatgatggagctgcggcattacgtttagtgagtgggcagaaagctcaagagcgtggccgtcaactccatggacgggtaacaggttaagctgatgcatctcaagctccggaactttttacaaccagtccagca

SEQ ID NO: 290682 - DNA, 436 bp, Zea mays
cgcttcgccgaattccctgtcctccgcccgcttcgccgaatttcctctcctccccgcccgccgcccgtcaccgcggcttcgtctgcgcttgtccctcccgttccaaggagcacgtgcttctcgccgcgccgttcgcccgccgccgccgccaccggttcatcgccagctatgtcttctcaggtcgacagccgcagccagtccgccgggaagcgcgcgcgcaccgacggcagccggcgtgaggacgactgggtttgccccagctgcaagaacgttaacttcgcctttcgcaccacttgcaacatgcgcaactgcaaccagtccaggccagcaaatcaaacaagggcaagcaaaacccggctcgccaacccaaattaagaaggtacaataacccaagggagccaacgttgaagttaccttgtgggtgtggccccccaaa

SEQ ID NO: 290683 - DNA, 429 bp, Zea mays
gaatcggcgcagcacgactacaggcatatggacgtggaagcgagccatgagtctccgcccttgcgcagcaagacgatgcgccgcctcctggtggcgaccaactgcgtgatgctcgcgcttggcgtcaccggtgggcagctcctcagccgcctctactttagcaagggcggacaccggcagtggctctccggatggctccagaccggtggctggccgctgctgctcccgccagtggcggcttcctacgtccgccgccgagcgcgcgaccggagcgccccggtgctgctcacccagacccagccgcgcatactgctggccgccgcggggctcgggctcatcgcgggcgtggacaacttgctctacgcctggggcctcgagttcctgcccgtctctacctccgcgatcgtcacctccacgcagctggccttc

SEQ ID NO: 290684 - DNA, 350 bp, Zea mays
cccacgcatccgcggacgcgtgggcgggtggtgaccctatggtaccgcccacccgaactgcttctcggcgcaacggattacggggtgggtgtggacctgtggagtgcagggtgtatcctggccgagttgctcgctgggaggccaattatgccaggacgaacagaggtggaacagctacataaaatttttaagttgtgtggctccccaacagaagaatattggaaaaagtcgaagctacctcatgctacaatatttaagcctcagcagccgtacagaaagcgaataagagagacgtttaaggattttccacaatcagcactgcagttgatcgagacactacttgcaattga

SEQ ID NO: 290685 - DNA, 427 bp, Zea mays
aaaagaacagcttgagagctcctctccgatcccgacccaccgcctgcaactcttcttctctcctacgtgttcgtcagcccgctaagtgttaagatggcttcaagcgatggtcagacagaagctgcggccccatctgtccccaaaaaccctgctatggcatcatgccggaagaagaaaacagatgatgctaccttcctcgaagatctgaaagaccacatcgatgagttcatccatgcctccatggatgagcacaagtcctgctttaagaagacgatccagaagatgtttgggatgtcgaaggctgttgcagagagatccgcggcggaagcgaaggaagctggagttgaaagtgctttgccacttcagaccagtgtctcgcagtagaatttcacgttggtagtttcttgctcgatgccgggcttttttt

SEQ ID NO: 290686 - DNA, 423 bp, Zea mays
caccggaggcgcacgtgttcaagaccgacgtgccggggctgaagaaggaggaggtgaaagtggagctggaggacggcaacgtgctccagatcagcggcgagcgcatcacggagcaggaggagaagacggacacctggcaccgcgtggagcgcagcagcggcaggttcctgcgcatgttccgcctgccggagaacgccaggacggagcagatcagtgcgtccatggcgaacggcgtgctcaccgtcaccgtgcctaaggatgaggccaagaatgccgacgtcaagtctatccagatttccggctagtatgctcaatctcacaagcagatggtgtgccgtcatcgtcttgtgttgatcgatctggtagttcttaacatgccggttgtccataacatgccaacgtccgtgtaactgtgttatactg

SEQ ID NO: 290687 - DNA, 366 bp, Zea mays
aatcaattgatgcacctaccttcgaggcaaaccatgtgctgacgactgacattttgtgcgcttttacttaaaaaatgttggattgcatgataattctctccccttggttttgcagaccactctttgtactgcaagattgtccatttgttaattttgaatgtattgtctgcacaaagaatcagccgtgattgaatcctactataccatgagatcacttgggtgccctgtttcacgacggagaggatgaacactatgtcatctggttttggttggtaaaggataacacacatgagtgcctactctgctcacggtactttgtgcgcaaggtcactcgagatgagggtgatccagatggccatgatgacg

SEQ ID NO: 290688 - DNA, 333 bp, Zea mays
  unsure (1)..(333): unsure at all n locations
aatgcagttggccgacacggcctctgggcgccggtccccgccgccggcgcccgaaggcgccaaggccaacaaccccttcaaccaccataccaaccgcaccccaaaaaataaccctgtggttaggttaaaggcctccattaataacttaccaaggaattacaacaaaaagatggtcaccaaggattcacggtgcctaagtcaaatgtttgctgctaaaattttcatgcatcgtttcttgctctcgagtgctgtccggacactanatcccaaggaagctgattggttctatacaccagtttacactacttgcgatttaactaacgctggactgcc

SEQ ID NO: 290689 - DNA, 342 bp, Zea mays
  unsure (1)..(342): unsure at all n locations
atagggtttttgatttagcccgccgcgccggtcaacccaaaaccccccaaaaaaacccttgccctccgccattcaatccaatggccttcttccccaacttcaaaaccgccaacggcctcaattccctcgaggtccacttcgccggaaaaacctaagtttctggtaactccattactaaggatgacattaacgtcatccccgcggtgccgtcaaaacctggcgctgagtttcctaatgccgcccgctggtacgagaccgtctctgcngctgtagcctcaagattccctggtaaagctgttggtgtaaaccagcctgcgggatcagctcctgccgtagctgctc

SEQ ID NO: 290690 - DNA, 369 bp, Zea mays
ggcgatggagtaaatgatgcccctgccctaaagaaagctgatattggtatagcagttgctgatgccactgatgcagccaggagtgcatctgacattgtcctgacagaacctggcttgagtgtgataattagtgccgttcttaccagccgggccattttccagaggatgaagaactacactgtatgtcagaaggaaacctaacgaaataaattttcaaaaaatagttgctttttctgatccaccttcacctttgcagatctatgctgtttccatcacaatacgaattgtgctaggatttatgctacttgccctcatatgggagttcgatttcccaccatttatggtacttattattgcaattctaaatga

SEQ ID NO: 290691 - DNA, 372 bp, Zea mays
acaaccctcaacgttcctaccagctgccaccgcctgtttacccgtgaatgtctccccgcccttgccgctggcgtggagcccatggccgtcgacgattccgcctccaagaatggccaagcgcaagcagctcaaggccgccgccggcgccgcggatgcagacgcggacgccgcttcggtcaaaaatcaaaatcaagtttgatattgatgctaacggtatcctttctgtcactgctgtggaggagggtacacggaagaatcaagagattacaattactggtgccaggactcagcccttcgacgatgtggagaggatggtcgacgaagctgacaagtttgcaaaggacgataaggaaaacacagatgccattgaca

SEQ ID NO: 290692 - DNA, 437 bp, Zea mays
gccagaggaagctagcagagtcgagagagagagagagagagagagagagagagagagagagagagcatggctggcaggagtttcctgattcggtcccccaaggaggaggagtccgacgccgccgtcagagaagctgtactgctgggagcaaagaacgccgcaatagctggtactgtggttgcagttcccacgttggttggctgccgtgtccttccttgggctaaggcgaatctcaactacactgcacaagcactcattatatctgcagcctgtattgctggcttcttcatcactgctgacaaaaccattctacggaacgcacgacaaaacaccatcgggaagcttgacaagtcaacctgatgcagagatgtagctgaagctgaaaaggttctctggttgccgcggcggttgatagggtgtcttttgccccatatgca

SEQ ID NO: 290693 - DNA, 274 bp, Zea mays
atcgccgccgaggcgcccgtcgtcttctcccgcgcctgcgagatgttcatcctcgagctcacccaccgcggctgggcacacgccgaggagaagacgcgccgcacgctgcagaagtccgacatcgccgccgccgtcgcgcgcaccgaggtcgtcgacttcctcgtcgacatcatgccgcgggacgaggccaaggacgccgacgctgccgccatgggagcatccgggatcccgcacggcgccgccggcctgcccggcgccgatcacatgggctact

SEQ ID NO: 290694 - DNA, 333 bp, Zea mays
aaagaataatcatagtcttgtaaatcaacaaggagttcaggtcccttgaaatacctcgatgatttacaagactatgattattctttagacatgtggagtcttggttgcatgtttgctggaatgatatttcgcaaggaaccattcttttatggccatgacaaccatgaccaacttgtgaagattgcaaaggtccttggaacagatgggctgaattcttatttgaacaagtaccacattgagctggaccctcaacttgaagctcttgttggaaggcatagtagaaaaccctggttgaagttcatgaatggtgataaccaacatctagtatcaact

SEQ ID NO: 290695 - DNA, 301 bp, Zea mays
agtcgtattaacatgttcactgacgcatcccgacagaatctaaatttactgaggttatgctaacacccacacatttggccatatctatggaatagtctgctggtggggagctatttgagaggatgtcgtaatgctgggtggacttagtgaggacgaggccagatttttctttcaacagctgacttcacgagttatttcttgccaatcagctcaaattcgccagcaagatttggatctagaaaacacactcctggaacatcctagatcacctccgctaaacatacgtgattttggttactcc

SEQ ID NO: 290696 - DNA, 268 bp, Zea mays
gggccgactcacgcgtccgcctcactcccgttccatttccccatctcccagatccaattcgcgagttctccctcctctgccgccatggcgctctctgtggagaagacctcgtctggacgggagtacaaggtcaatgatcgctcgcatgcggacttcggtcgcctcgagattgagctggccgaggtcgaaatgcccggcctcatggcatgccgcgccgagttcggctcgtctatgcccttcgacggcgctaggatgactgagtctcacc

SEQ ID NO: 290697 - DNA, 342 bp, Zea mays
gtgtacgcgtccaatgacgtctcttgcacagcgcaccataactcagcatttactgaacatggactgcagctcccctcggaggcgtcctcgctggcatgagcgggagaggagctactggtactacatctaatagcatggactggtctggtgaatgtggaccgtctgctttaatcatcaattatttaagctcataactatggattcattcctcacacgctttgtgaacacagtgatcctttggatgtactggttataatgcaggagcctgttatcccaggctgtttcctatgtgcgattgcaatcggccttatcccgaatattgatcagggagaagcagatgac

SEQ ID NO: 290698 - DNA, 338 bp, Zea mays
  unsure (1)..(338): unsure at all n locations
agagcaaccgcatcgaactctacctgcctttctctcgtccctggcggcggcggcaggatggcggcttctactgcgaagacnngtgaagatgtaaacccccacaattttgtcaaggctaatccggccaacctaaaagctccgggaagaatgaacctcccgaattggtttaccattgtgagaactgcaaggttcaaggacctccctccttaagaccctgagtggtaatacatcagggctgcatctgtaccagggaatatctatttgacaaagcacttgggtttggggcgtccacaaaatttatagtgggcgccacaggaaaaggtcacacccaaatcaca

SEQ ID NO: 290699 - DNA, 279 bp, Zea mays
taaaaaagccgatcaatatgatcgccctgtggagccaccagaaggtgtaccacccgtgcgccatcaatgcggcgttcgctgagttcatctccaccctcatcttcgtcttcgccggccagagctccggcatggacatcagcatgctgactcgtagctgcacgacgaccccagcgggtctgatttcagtggctgtcgctcaaacgttcgcactgtgcgaagcgctatctgttagcgcaattatctgcattggacaaattcaccctttcatcagcttccgta

SEQ ID NO: 290700 - DNA, 420 bp, Zea mays
accacacgtccgcccacgcgtccgcccacgcgtccgcccacgcgtccggtcgcgctcgcgcggcggctctcatccctagcttcaccccatccgtcgtctgatgccagccgccaggaaccgctcggttctctcgcaagggagccggagttacaagagcgcgaaggtggcagcgaagaggctggaagaggcatcgctctcctgcaaaggggacgaacgggtgcagctgctgcgccggtggctcgtcgcgctcaaggagacccagcgcgcgaccactgtggtccgggagccgcagcttggggacaatctggaccagactacgcccctgctggatttgtacatccattacgatagcggtgcggaaccgatgaactttttccatgtcttcctctacagtcaagccctcaagtgcgttgttcgctc

SEQ ID NO: 290701 - DNA, 432 bp, Zea mays
atcgatacctcaacctccaattaatcaattcagcaaacatcattctaatccccaaaaaggaaggcgcggaggtagctggggacttcagacctataagcctcatccattctttcattaagattatcaccaaaaccctggctcttcgtctggcgccgagaatgaatgagttagtttcaccttgccaaagtgccttcattcaaaaaaggagcattcatgaaaacttccttgcagttagaagcgctgttaggcgcttccagcgtattaattcgcccacgctattcctcaagctagacattgaaaaagcttttgactccgtccgctgggattacttgattgccttactccgcaatttgggattccctgtgaggtggactgactggatcgcttctatcctctccacctcaacatcaagagtgctcgttaacgggggtc

SEQ ID NO: 290702 - DNA, 273 bp, Zea mays
cgtccgacgccaacgcgcacagcgccgcctcctccatgtcgtctacctcctcgactcacaccttcttcgatttaccacctcctgccgctgcagcgccaccccagttcgcgtcgacaccatgacgggactgcatctcagatccacatcgtgcaagccgggtatccaggtcggaaacgcctgctgcgaactctagtgcctctagcatggcattcaggctgagtgtcagccgcccggtgataggaccattgcgggtggtgatgatgcgttcatcac

SEQ ID NO: 290703 - DNA, 342 bp, Zea mays
agtcaaagatgccatctcccagattgttggggatgccaaggagaagaataggaagttcactgagactgtggaacttcagattggtctgaagaattatgatccacagaaggacaagcgtttcagtggctctgttaagttgccccatatccctcgtcccaagatgaaggtgtgcatgcttggtgatgcccagcatgttgaggaggccgagaagatgggacttgactacatggatgttgaggctctcaagaaaatgaacaagaacaagaagcttgttaagaggcttgccaagaagtaccatgctttcttggcatcagaagccatcatcaagcagattccccgtct

SEQ ID NO: 290704 - DNA, 308 bp, Zea mays
gagactacaccacagccacttttgaaggatgactttgaattcaacggaaggaaactaacaaaggctggtgtgagacaaatgatataacgggatattttggagtatcatcgccagatgcttcaggactacatcgaatgtgcagatcacattcacttcctatacccaagtggggttgatcgcgtccaacgacagattgctcatctcgacgagaactacaggagacgagtatctagcagcccgtcgcgaacgcagcccacatcgctgccaagggagcgagtctgctcatcagatcatggtcacagtcacga

SEQ ID NO: 290705 - DNA, 225 bp, Zea mays
acggaccgcccagttctaccgcgacggcgctcagaacacggtcttgatcaaggtcgtcggcaacatctctgcggacgactatatgctcctcacgaccatctcggcggtctctgtcaccgttggctacctctctgggatcaagccgtggatcaggggcccgtcgatgtgtcacgggcggcctcatcgatgtcatgggagggttcatgtacgcctagcataactccg

SEQ ID NO: 290706 - DNA, 410 bp, Zea mays
ggaaaaagagagcagagaaccctagctagagtttggcgagtggtgcggaggcgcggctgctcctgctcgtcgcgacgtcgaatttcagcgccgcccgcgcgatccttggtctcttcgcccgtgaggagaggcgcgacaatggctgggaaaggcgggccgaccaacctggagaaggagcagatgtttgggatggcggagaaggagatggagtacagggttgatcttttcaacaggcttacaaagacctgttttgagaagtgcgttgaaaaaaggtataaagaagctgagctcaatatgggtgagaacagttgcattgatcgatgtgtttcaaagtattggcaggtgactaatttagtaggtcagatgcttgggaaccagcctcagatgtgaaccgagatgcactagttcca

SEQ ID NO: 290707 - DNA, 221 bp, Zea mays
ctcaagtccgccctgcgtctgggctcatggtaggtgtccggctcagtcagtactgtctgtaataaagatccaacgtggggccaatgtaactaaggctgctgccagtaagaaatgatctatctggcttgtgcagtccttgcttgttggttacctcgaggtaggcttaggatatctcgtcttgttgccatccttgcacttgtctcgttaacaagtaatctatg

SEQ ID NO: 290708 - DNA, 214 bp, Zea mays
agtgttaacctgtaccctgatcgcatcaagaagcttgccgacaactgcactggtctccatcgcttccacgtcttcaacgactgttggtggacgatcgggctctggccttggttccctcctcctacagcgcctgtctgttgactacagcatgaagtccacgcttgtgttcactgtgtacccttccgcacaagtttctacttcggaagttgagcca

SEQ ID NO: 290709 - DNA, 180 bp, Zea mays
agatcctcaaggtcatccgcaagaacctggtcaagaagtgcatcgagatgttcttcgagatcgcggagaacaaggacgactacgccaagttctacgacgccttctctaagaacatcaagctgggcatccacgaggactcgcagaaccgcgccaagctcgccgacctcctgcgctaccaca

SEQ ID NO: 290710 - DNA, 202 bp, Zea mays
acccacgcgtccgcccacgcgtccgcccacgcgtccgcccacgcgtccgatttggtgcgtttgtaagccgggctgctatctccactgttgatgttctgactcctaaagtattcatcgggcttattgtcggtgctatgctcccgtactggttctcggcaatgaccatgaagagtgtgggcagtgctgcgctcaagatggtgga

SEQ ID NO: 290711 - DNA, 197 bp, Zea mays
caagactcacttgcatttttggcacaccagcacagaagaagaagaaaaaacaggcactgagctgagatggcgaagcacttggctgccatgtgcaggtgcagcctcctagttctggtactgctctgcttgggctcccagctggcccaatcccaggtcctcttccaggggttcaactgggagtcgtggaagaagcaagg

SEQ ID NO: 290712 - DNA, 258 bp, Zea mays
gtgaactctcaacatccattgatgggaggattactgaatgctgtagagactgttttgaagctctcattaccaaatgtctacctgtggctttgcatgttttattgccttttccatctgtggttaaacatacttgctgagattcttcgatttggtgaccgagaattctacaaagactggtggaatgcaaagacaattgatgagtactggagaaaatggaacatgcctgtgcataaatggattgttcgtcatatatatttt

SEQ ID NO: 290713 - DNA, 254 bp, Zea mays
gcgccgtccacagaaaaaatggaagaggtaaaagaagcaactaagggctccaaaacatcaggagttttgagtcccgcagcaaacgttgagatagtaaaaaatcaaaaagtgccagcaatgactccgaaaagaaagaggatggccaatgtgctagatgtactggaaacaatcaaatcttcaagcacacctccgaagaaggctgctgtcactcctgaaacagcaactgaaatttctggttctacagctccagagca

SEQ ID NO: 290714 - DNA, 259 bp, Zea mays
caatggacggtgtcgtacttgaacatgtaggtcatgtactccgtggccactggaagcacagcgacatcacactcatggactccacgacccttctcttcggtgacaagccggtcaccgtctttggcatcaggaaccctgacgaaatcccgtgaggtgaggctggcgctgagtatgtcgtggagtccaccggcgtcttcactgacaaggacaaggctgctgcacatctcaagggtggtgccaagaaggttgttatctctgc

SEQ ID NO: 290715 - DNA, 433 bp, Zea mays
tcgtgggccgatacaagcctctatagtaagtcgcatgaaaggctgttgctacttaaaagaagtgtacggatattcaagcttggaggactcgcgggactagaatgaggcatggaggtgctagaagaattgccttgttttgcaactttggtgccacaatcaggaagctcccctgcaagtagattgtctgatagatcaagaactcgcagctgcttccactgacaaatctgattaggaataagcccagtaattcggttggagtagagaaccaccagctgtagtagtggggcttcaaaattcagtgacagtggtccattcaaagagttccttgagatgtcaaacgtcacaatgcttcttggcagccgtggtaccgagccagtgagctggtttgaactgagctgaaagattcccactgacatgaactcaaaatcacggg

SEQ ID NO: 290716 - DNA, 424 bp, Zea mays
accggtctagtaggcactcgcgggccgacccacgcgtcaggagacattcagggttcattatccctctgtcaagggtgcaaaagttgtgactgataaattgacaatgcgcacaaagggttatggatttgtgaaatttggtgatcctacagagcaagctcgtgcaatgactgaaatgaatggaatgccttgttcttccaggcctatgcgtattggtcctgcagcaagtatgaaaaatacaggaggtgttgttcaagagagagtaccaaattctcaaggagctcagtctgagaatgatcctaacaataccactatatttgttggtgggcttgaccccaatgtcactgaagataccctaaaacaagttttttctccttacggtgaagtcgtccatgttaagatccctgttgggaagacatgtggtttt

SEQ ID NO: 290717 - DNA, 342 bp, Zea mays
atgattacccacgataatctgcggtcttctcaactagcacgggtcttggcgccgcgcccagatccggcactgcccgcggctcgaacccgcaccccgcggcacgcaggccgggacccgtgggcgcgcgccgggcactaggaggtagaggaagggccgcatggcggcgccgccggtgacggcgttgagcgaatacaggaggggaggaggcttcgtgccagtggggatatcggtgttggcaagagttgcctcctgttgcggttctctgaggattccttcagtacaggctttagtaccagaattggcgacgaccttaggatagggacaatagaattggctggcaag

SEQ ID NO: 290718 - DNA, 416 bp, Zea mays
  unsure (1)..(416): unsure at all n locations
aaacattttcaaactttgtggacctaagtgacatcccttgacaagttcaagggccacttatgcatttaactcagaaaacattgccatacaataaaatactgtaacacaatcttcagagtagaacatgtatacatgtgcatcgatgctattcagcgctgctggtattatctcatattaagctctggaaggaaattctgttacagcacaagtctaggacattcctcgaatgcttaaaacaaaatttctcatatatacttgctatgcctatacagtacgttttttagtcacagatctttgctattattgacttcaggcgcgccagcaatgacctcgaggggtctactggagaaggatttcgagcagattggggagttcctcnnacangcagtgaccatctgcctgaacatccagaagga

SEQ ID NO: 290719 - DNA, 416 bp, Zea mays
aaggctgccacagctggaggtgtttctcagataagagcattatcaggatgcacagctggtggggaggatatactccagaacataatgcgccatgttcttcccaattttgatggtatatatgctggccagacaatggatagaatcaagtcgatgagcttactgcgaattgctactcaagatgcaattcacaggctcgttagtcaagaatccgtggagatcaatatagatttggggaatggccacatggtgtccaaagttctagaccattcagagtttgaacaagtcaaccgggcaattttcgacaagtgcgaaaagatcatcaaccagtgcttggctgatgcgaagtttggtacagaggacatcaatgatgtcatactggtcggaggttgttcgaagatccccagaatcagaagcct

SEQ ID NO: 290720 - DNA, 260 bp, Zea mays
cgcgtcagaaccattcctcccaacaccacctcgccgcgatctccgtagcctccgtcgcgtcgagcatcgatcatgtcggcctactgcggaaagtacaaggatcagctcatcaagaatgctgccgacattggcagccctggcaagggtatcgttgctgctgatgactctactggcttcattggcaggcgcctttccaccgtcgacgtcgataatctacaggacacggtccgctgcccacggtcagtaccaatcaggtagtc

SEQ ID NO: 290721 - DNA, 311 bp, Zea mays
cgcgtcagggcaaggatcaaaagtcgcagactaccgcaattactgccctgtaaaaccacagtattccatcatcatacataagtcatccatacctagatcagtaatgctcaaggtctaatgaccaatttacatgcaatcaatgcaaccctgaaaactgttgatgggccctcaactaacgactgcaggggtcaaagggctactaatttcaacatcattcccaacatcactggagctgctaaggctagttgaaaagtgcttcctgtcctcaattggaaagttgacgtggaatgtctttccgtgtcccaacctgt

SEQ ID NO: 290722 - DNA, 377 bp, Zea mays
gacgcacgaatcagcaattagctagcttcttctagctctagctaggctcgtctgctgcaagaaggtaacagtaacagcaggcatggaggggaaggaggaggacgtccgcctgggcgccaacaagttctcggagcgccagcccatcggcacggcggcgcagggcacggacgacaaggactacaaggagcccccgccggcgccgctcttcgagcccggggagctcaagtcctggtccttctaccgcgccggcatcgccgagttcgtcgccaccttcctcgtcctctacatctccatcctcaacgtcatgggcgtctccaagtccacctccaagtgcgccaccggtcggcatccatggcaatcacctggtccttcggcgg

SEQ ID NO: 290723 - DNA, 387 bp, Zea mays
tcccgggccgacaaacgcgtcagcccacacgtccgcaaagctccaactccgacgataatcgccactcctcgaaatctcgaacgactttctgcggcgaacatcttcgtcacgttacgtaatggtacaggtctcaccatcaatgtccatggaagtaatgcatattcataaggatgttgatgggcgttcatctaaacgactgtgacgggatggaatgggctcggacgtttcaacatcattcccaacaccactgaacctgctaacgctgttggcgatatgcttcctgtcctcaatggaaagttcactgaaaagtctttccgtgtcacaactgtcgatgtttctgttgttgatctgactgttacgcttgagaaatctgccacctaatatgag

SEQ ID NO: 290724 - DNA, 401 bp, Zea mays
atcagtgccgccgcacgagctggcgtggcgcagccgcgcggcgtcgctgtccgtgcacgagggggtcgggcggacgctcaaggggcgcgacctcagccgggtaagggacgccgtctggaagaggaccggcttcgaggactgagccgatgctgatcccccgccgcgcaggccgccggtatgtgtaggttagaatatgagcagcgctgctgattgcttatctcttgagttccttttctctctctctctctttttaaaaaaaagtcgggccagggtagtagtaagctctttttttttgtttcgttcatgttgatgtgagccaacagtgcgggggtgtgacggtgtgtcattcatatggtgtgacgattttaaggacaccttaagaaaaaagacgaattttgtac

SEQ ID NO: 290725 - DNA, 421 bp, Zea mays
ctcgcgggccgatacacgcctcaacacttcgtcccgctgaccgccgcgtccgcctcgcccagcgcagcagccgccgcagcacatcgctatctcgatctcagccatggcggaggtggagcagcaacaggacacgccgaagctgttcaaccgctggaccttcgatgatgtccaggtgaacgacatctcgctgaacgactacctcgctgtgaacgcgacgaagcacgcgatgtacctgccgcacaccgcggggcgttactccaagaagcggttccgcaaggcgcagtgcccgatcgtcgagcgcctcacaaactccctcatgatgcacgggcgcaacaacggcaagaaggtcatggctgtccgcatcatcaagcataccctggaagatcattcacctggctcaccgggatgccaaccccatcca

SEQ ID NO: 290726 - DNA, 349 bp, Zea mays
tcgcggtccgttacaatcctctataatggatcatattaaaaaaacaaaaaaaaaaaaaaaaaaaatcacccatgaaattcatcacacaaaaacaaaccaaaatcacagttatctcagaccaccgcccgctttggaaaatgctcaacaaaagcggggcgacacgctccagcctcacgacgaggaaacatgtgcatcaaggccagaggacagatgttcctgtgggactggttctaccgggtgctggcctctctcagcctgtggcaggaggaagccatgattttcttcctctaactcgacttcaccagcaacaccattctgctccacatgctcaatgacaagcggttggtgc

SEQ ID NO: 290727 - DNA, 205 bp, Zea mays
atcttggcattcgtgttcctgcttttaaagtaggtaatggacgtacccatgctgggatcaatctggccatgcatgagttcaggacttgacctgttggtgcaactgcatttgttgaagctcttcgtatgggcagggaactttacgatgtcttgaagagcatcaataagtcaaaatatggtcatggtgcatccagctgtcggacatg

SEQ ID NO: 290728 - DNA, 299 bp, Zea mays
aatagccactctagacccccgcttccagaaccttctcgagactctgaggcgcggcctcagctgcaagccgtaggcgacggaaccgatgcgcgtgctcgtcactggcgccgcagggcaaattggatatgcgcctgttcccaagattgctaggggagttatgcctggtgcaggccagcctgttactctgcacatgcttgatactccgcgagcagctgaagcccctaatggcgttaagatggagttggttgatgctgcaattcctcgtctgaacggagtcgttgccacaactgaggttgtgg

SEQ ID NO: 290729 - DNA, 372 bp, Zea mays
tatgatgagtcgttatacagatcaaatgctgatccttttaaaaacgggttgggttttaacaatggaaatggtatttactctggtgagcaagggttcgctattggtggtgaagagaggttaagcagatcaaatggctatctttctgagttggtcgcggcagcatatgtgtgccatggatgtttatgaaggaacaaggatggctacagcggaagatcttcctggcattagaaaaattattcggccgctggaggattctggtgttttggtgcggagaacagatgcacagcttcttgaagcgctagagtcattctatgttgttgaaagagatggttcaatcaatgcttgtgctgctctaattccaatccctgagga

SEQ ID NO: 290730 - DNA, 318 bp, Zea mays
  unsure (1)..(318): unsure at all n locations
aaatcntgtcaggttgctgaacgtgcgttgttcttgtggaacaatgatcatactgtaagcttgatagcacagagtcgtgttgtcagaggtcgaatgatatgggaagctcttgataggaatagacagacgccactggaatcctgcagttcatggtcgcacggccaatgtgcgcacgatgtttttggacatggacagtgaagtagttgaacagtgcgaccagcagtacatggagaaacaggcgacagccaaagagatacaggaacacgcgataagcagcatggagacacttggaagcagttgttgctgccacaggtggcg

SEQ ID NO: 290731 - DNA, 149 bp, Zea mays
cgccctgatctccgaattcatcgctacgctgctgtccgtgtatattaccgtggccacagtgatccgctagaagcacgagactgacgcgtccgcgtccggtatcgacgcggcttgcggcagtcttcgggtccttgggatcccctgggcca

SEQ ID NO: 290732 - DNA, 351 bp, Zea mays
agagtgtttcgcgcaaagaatccccatgcatacaaacagggtagaggtagagggagatgagaggagaggagaggataggagaggttgggtctgggacaccatgatctccgattaagctgtacggggcggtcatgtcttggaacgtgactatgtgcgcatcagtgctggatgaggctgggtccgactacgacatcgtgccgatcaacttcggcaccgccgagcacatgatccccgagcagctcgtccgcaacccgtttggtcaggttccagctctgcatgattgtgacttgtacctcttcgcatcacgcgctttctgcatgtacgctgttcgcataaacaaggcaaatctgt

SEQ ID NO: 290733 - DNA, 124 bp, Zea mays
aatgcaggagggattggatcgagagtcacaggggttggcgtcatcggtcgcggtttcgtgagtgaggggcttgagatggcggcgtcggatgttgagtaccgctgcatcgtcggcggcctcgcct

SEQ ID NO: 290734 - DNA, 370 bp, Zea mays
actcaggctgtttcctgagtacctctccgtaaggatctgtttgttgagagaccacccgggataatagtacaaccatgagggtagaatgggacaccattagctgattaattagatgaacttgggggtgtagttggatttgccagagggccatcaatgggggctagggcatagtgctcgctctgctaaggttgggtgccgaggttcatttgatttggttttgttagtcacccaccttagggaggagtgctgtgtttgtacgactggtgaaaccaaacgagcaactatgcactaggggaatctttgtaaaggctacatagtgtatccctggtggttcacctcggtagtgaagatcgggtcctgcaaacgcaag

SEQ ID NO: 290735 - DNA, 433 bp, Zea mays
agcatgtttgtccatacgcattggtctgaatactgtagctactagcgcgagtgccactgtgccgcagctgcctgctcgccattactgcaagctgtgttcaatcaaagcttaattaggctccctctacatctgatccagctaagtagctagccagcactacagaagggcgtggcaagaatcaggagagagatagcaggggggctagctagctgagctcgtgcgacgaagaatggccggaattggcaggaacatggtggcgccgctcctggtgctcaacctcatcatgtacatcatcgtcatcggcttcgcgagctggaacctgaaccacttcatcaacgggcagaccaactatcccggtacgtaagaaaggccagtagtaatcacgcatcatgcatatactcatgcatcgatatgcatggcgcgcctctgatgc

SEQ ID NO: 290736 - DNA, 298 bp, Zea mays
tcatcttcttcttcctcctcctcctatcacagctagcgcctgctccccttcgcctgtgatcatgtcttgcagcagcggcaagtgcgactgtggctccagctgctcctgcggcagctcatgcaactgcatgtcccctaacgtggagaccgccgccgccagcagcatcaaaaccacggtcctcgccgcgccgaccacgaaggccaccgccggaggcttcgacgcggccaccgagggcggcggctgccactgcaacagctgcaactgcggcaccagctgctgctgctcctgctgcagctgc

SEQ ID NO: 290737 - DNA, 349 bp, Zea mays
atgacatcagatgaggactctaacgctgtcatgttacacatctgcaacaacagttcagcaccttgtgaatccccgccctctaacggtacatctggcagcaaacagtctggcaaaattgcaaatgaaaaggagagtcctaaagttgatcctaaaagtatattccatggccatgacagtactgttgaacatgttcagttctgcccggtcggagtgcccaggagttttgtagtgtgggtgatgatgcttgtcttattctgtggtatgctcgagctggcactgacccatctgttaacgttgataaagctcacagtggagatgtacattgtgtggattgcaatccccttgatgt

SEQ ID NO: 290738 - DNA, 430 bp, Zea mays
attcgcacctgcccgcgcggccccgacccctagtcctccccacccatggcgcggcgatccgctcctctcctgcgccgcctcgtctccgcctcctccccgcccgcgcttcagtccctcacggaccacgtcggcgtcctcgcgcggcgcacggtgacctacatgccccggcccggggacggcgcaccacgcgccgtcacgctcatcccaggcgacggcatcggtcccctcgtcacgggcgccgtgcggcaggtcatggaggcgatgcacgcgcccgtctacttcgagacctacgacgtccacggaggacatgcccacggtcccgccagccgtcatccaatccatccggcgcaacaaggtctgcatcaagggcgggctcgccacgcccgtcggtggcggggtctcctccctcaacatgcagctgcgcaaggag

SEQ ID NO: 290739 - DNA, 375 bp, Zea mays
acgagcggccgcccttttttttttttttttattttttttttttttttttttttttttagaactagatatatgtatgttctaattaatacaccccgagcaactttactacatgtatcagtacaaggcacatagatacagctgcagtaacgtatacatgaataccctttgtctcgctcctgtttatctatgcaactgctggcatgcatgcaaaagacgcctcgggagataagacccctgttattctgctagtacgtatgcatgcatgtgcacgatcgatgggcgcgatggtcatatcatccgttgggtcagtagtatggctggatcttccaacactggttgtcgccctcgcaccacttccaaagcacgacgttggtg

SEQ ID NO: 290740 - DNA, 374 bp, Zea mays
gtcgacacacccctctaaatcgcatactcgcacccacgcactcgctggagcctggcgtggaccagcaggacttcaacacatacggtatccgtcatggcaaggatgacgtaacggcacagggaacgtttgcaaacattacgatcgtcaacaactttttgcacggagaagttggccccaagaccattcatgttcctactggggagaaactttctgcatttgatgccgccataagatacacatctgacggccatgctactataatccccgctgctgctgactatgcaagcggaagttctcctgattgcgctgctaagggtctcatgctcctgagagttaaagctgtgattgccaggagctttcagcgtatccacaca

SEQ ID NO: 290741 - DNA, 395 bp, Zea mays
ctcgcgggtcgatacacgaatctagcataaatcgatttactcctcatgtggagagcctccagagtcgcacatgtactcttacacgcaccgcaatggaaatttgaccgttctagtgaaacgtctggtgccccaacaccatttgcctggtgaatctgaaggaaaagtatggatgtggactaggtgctcaagatgtgatcatgaacatggggtatccaaaccaactccaagagtactaatatcagctgaagcgcgtaacctctcgtttgggaaattcctggaactcagtttttcgagccactctgcagcaagaaggttatctatatgtggacatctggtcaacagggattgcttgcgtttttttgggctgggctctaaagttgctatgtttcggtact

SEQ ID NO: 290742 - DNA, 317 bp, Zea mays
acgcctctagaatgagtcgtattaatcaacaagcaacatgaagggatcaacccaacaacagaagaccgaggtaaagattccgtgcacgacctctatattctgaggactgaaggaccgagcagcagccatgcgtccgggacaccttcaaccatatgacgaacccacgcgatcgtcggggcgcacaatatctcggtggaggcctgccacgcgcaactcacgccgctgcacctgcccgcactgctggctgccgacaaaggctgcatcccgccgcacgccgtcacagcggcctctgggggcgacagatcggcccgggactc

SEQ ID NO: 290743 - DNA, 356 bp, Zea mays
gtcgatacacgactctatactgacgtcctattagctcgtcggctccaggtcagcaatcatgcaaagcagcggtccgagagatggacacgacgatgttccggctggacaaccgcctggtggcggctctgcatcacctgctggacgtgcccgatggcgacaccagagcgggtggctacaaggcgggcggcggcgccacgcgcacctacctccgcgacgcgcgctccatggcggcgacgtcggccgacatcaaggagctcgcgggagcgtacgcgttcgtcgtggacatgctggggttgaccacggaccacatctgggtgcaggtggtggacgagcaggttcttgtgatcaactgcgag

SEQ ID NO: 290744 - DNA, 421 bp, Zea mays
agaaatccatccccgtgcaaaaacagataagggacggcacgcgacgcaactatcctcgagagagagagagagagagaggaagcccgtcgttctggaagtttccacgctccgcgcgtccgccccctggtctgagtggtctccgctccaatggcgccctcactcctcgccgccatgtccacctcgcccttcctagccagcagcggcagcagccgcaggccgctaggcgctgcccacacccgacgggctggactgcgcgtggccgcgcttaagtacgaccctgccaaggtggcgccgcagaacgaccgggttctcgtccgtcttgagcagattcctgagaaatctgctggcggtgtgttgctaccaaaatctgctgttaagtttgagagatatctgatgggtgagattctatcgatcggtgctg

SEQ ID NO: 290745 - DNA, 368 bp, Zea mays
aagtcaccccagccgcaaactgcagctctgcaagctacagaggccaccacgagtccacgacgccacgccctccgagagaaagagaaagagaaaaccaaagcacgataatgcccccgacccccacagccgccgcagccggcgccgccgtggcggcggcatcagcagcggagcaggcggcgttccgcctcgtgggccaccgcaacttcgtccgcttcaacccgcgctccgaccgcttccacacgctcgcgttccaccacgtggagctctggtgcgccgacgcggcctccgccgcgggccgcttctccttcggcctgggcgcgccgctcgccgcgcgctccgacctctccacgggcaactccgcgcacgcg

SEQ ID NO: 290746 - DNA, 174 bp, Zea mays
  unsure (1)..(174): unsure at all n locations
acaccagccgccgtcatgtcgaagcgaggtangggaggttcggctgggaacaagttccgcatgtcactgggtctaccggtggcggccacggtgaactgcgcggacaacacgggcgcgaagaacctctacatcatctccgtcaanggaatcaagggccgcctcaaccgcctcccg

SEQ ID NO: 290747 - DNA, 326 bp, Zea mays
acccaaattacaatggaacaatgggctgaaatggctaatcctggtaaccaaatggcaaaagaaaataataacggcgggaatggaaccaattggaaaaggcaccatgaaattccccctgaagggttgggtaaccattggaacccttgatggagctaatgttgaaataagaaaggaggttggaaaaaataatttcttccttttcggtgccaaagccgatgaagttgctgggctgaggaaggatagagaaaatggtctgttcaaaccagacccacgttttgaagaagccaagcagtttataaggagtggcgcttttggcagctatgact

SEQ ID NO: 290748 - DNA, 392 bp, Zea mays
gcgaagtcggcgtaccaggtcgagggcgccgcgtccaccaacggccgaggcccctccacctgggacgcgttcgtgcacaccccaggaaacattgtatacaatcagacggcagatgtcgcagtggatcaatatcatcgctacagggaagatgtcgacctcatgaaaagtttgaattttgatgcctaccggttttcaatctcatggtccaggatcttcccagatggcgagggaagagtcaatccagaaggtgttgcctattacaacaatctgataaactacctgcttcggaaaggcattacaccgtacgccaatctttaccaattccgatctccctcttgcgcttcagaacaagtatggagggtggttaaaggccaagatggcgaaactgttca

SEQ ID NO: 290749 - DNA, 301 bp, Zea mays
cctcctcccttcgcctgtgatcatgtcctcttgctgaggccgcaagtgccggtgcggctccagctgctcctgcggcagcggatgcatcagctgctgtatgtaccctgacgtggagaccgccgccaccagcagcgtcaagaccacggtcctctccgcgccgaccaccagggccatctccggcggcttcgaggccgccaccgagggcggcggctgcgactgcaacacctgcatgtgcggcaccagctgcggctgctcctgctgcagctgcaactgatctggcccggcccggtcatggcgcacc

SEQ ID NO: 290750 - DNA, 371 bp, Zea mays
caataaccaacgacaagggccgtctctccaaggaggagatcgagaagatggttcaggacgctgagaagtacaagtctgaggatgaggagcacaagaagaaggtggaggccaagaactcgctggagaactactcctacaacatgcgcaacacgatcaaggacgagaagattgcgtccaagctgccggccgatgacaagaagaagatcgaggacgccatcgacgcggccatcagctggctggacgccaaccagctcgccgaggcggacgagttcgaggacaagatgaaggagctggagagcctctgcaaccccatcatcgccaagatgtaccagggcgcgggtgaagacatgggcggcgctggcggcatggac

SEQ ID NO: 290751 - DNA, 321 bp, Zea mays
  unsure (1)..(321): unsure at all n locations
aactttgcctcctaacaaatccaccaccgggtaagggtccctaagggtttgtggaagggcgatggccgcggctgatgtggagtaacgttgcctcctccgggggcctgcctgggccaacaacaacgaatccctggagaatgccttcgcctcctacggcgagattctcgactccaaggtcatcaccgaccgggagacggggaggtcncgcggcttcggcttcgttaccttctcctccgagaactccatgctcgacgctatcgagaacatgaacggcaaggagctcgacggccgtaacatcaccgttaaccaggcccagtcccg

SEQ ID NO: 290752 - DNA, 152 bp, Zea mays
agttaacccacaaataagcgcattccagaaagcacaggattgtcttctgcccatgggaattacgtctgaaaatgttgcccatcgatatggtgtaaccaggcaagagcaagatcaggccgccgctgagtctcataggagagctgctccagcca

SEQ ID NO: 290753 - DNA, 386 bp, Zea mays
catgaaaccaccgagagcccaaccgcacaggcaggagagagagcagggagccagggacagtagcgtggggccggggagcaacgatggaggggaaggaggaggacgtgcgcctgggcgccaacaagttctcggagcgtcagcccatcggcacggcggcgcagggcgccggcgccggggacgacgacaaggactacaaggagcccccgccggcgccgctgttcgagcccggggagctcaagtcctggtccttctaccgcgcgggcatcgccgagttcgtcgccaccttcctcttcctctacatcaccgtcctcaccgtcatgggcgtctccaagtccacctccaagtgcgccaccgtcggcatccagggcatcgcctggtccttcgga

SEQ ID NO: 290754 - DNA, 383 bp, Zea mays
gtaatcttctttttcttctctccctcgcagaagtcgagaaaacaacccggtttagcatgcatcggtacggtagctcgctgcgttgattctgctgtttacgtgtgcctgagacaccagtacacggggggaatcatttttcttctgttgtgtttggggagggcggcctcgctggtgtgggggcgatccggctcctgggcgggggcgcggggccccccggcttgctgtccctcctggggacgcgaaggggtgagctgtgagcagcactgcgtgctctggaccttgtcagggcatgtacagtgggtgtcttaagttgtgtcttcgagtgtgtctaggggggtgattgtaaaaaaactcaagacatgtatcttgacgaagacacagtg

SEQ ID NO: 290755 - DNA, 226 bp, Zea mays
agcgctcgcggacaggacaaaggcgctcgatagccgcatgatcatcatcgcccgcgccaagcattacaccgaggaatactacgcgcagcaaaaggaggttgtgcagctcaagcgtgacgcccggttgaagggtgcgctcgatgtgagcctgcaggtcaagcttctgtatgtggatcagatccatggtagcaatggcatgcacctcaagagcctcaagatcttgcag

SEQ ID NO: 290756 - DNA, 196 bp, Zea mays
ggagcggaaggcgaaagagtagcagcagcaggcggcgccgagtagcggctccccacctcgagcttgccaccatggctagaggattgaagaagcatttgaagaggcgcagtgcgcccaagcattggatgctggacaagcttggcggagcttttgctcctaagccatcttctggacctcacaggtctagggagtgccc

SEQ ID NO: 290757 - DNA, 122 bp, Zea mays
gactcacgggccgacacaagcgtctacagacagtcaaataaaagcagtacagtgtgacgcgatatacagaaatacaacgagtgtcagactgtgaaataaaagcagtacagtgtgtttcttgc

SEQ ID NO: 290758 - DNA, 342 bp, Zea mays
aaacggcttattactattgtaccttcgcaggttcgcacgcacctggacggaagcgtatgcgacgacgagtcagaagagtcatcggcgtcgaggaccgcagggtggcggactacatcccttcaccgtggcacgcagtgcagctgctcgtcctcagcggggccggatctgtcaacatctacgacgccaacgcgggcgtgctccgcacgctggctgggacacgctgggccgtctccatcatggtgccagaccaaatcacaccggacctcgccgcctactctgccgcagcggaccggtgggtcgccgacaacctggtcccctactacccggggacacgggtcaagt

SEQ ID NO: 290759 - DNA, 351 bp, Zea mays
agctttgaatgtatgggcatcttttctttctgatacgatcgtccatgcaaatccactgtttacgtgcctgtgcaacatgaagaccacagtgggctatcatgagactctctcggacattctcgacgcagaggacaacgttaatgtcgtggaggacctgaatgacgccctgatgtggctggactacattcagtccgcctagaatgacgattactacgagaagctcaaggaggtggacgccgtgtgcatccccatcgtgtcagccgtgtatcaacggtcgggcggcacccccggtggtgatgccgacggcggcgtcgacgacgaccacgacgagctgtaaatggttgtcgggaa

SEQ ID NO: 290760 - DNA, 389 bp, Zea mays
ggtcgagcccgcgtccgaaatcaacatcacagcaagctccgcgcactgaaatcttccaagccacaggacacagctctacttccacagttcgcagactcgcacgcaccgagcggctagctatcagcgataaatgtcgctggtgacgcgcaccagcgtgttcgacacagtctctgtggacctcttgaaccccttcgagaccatgtttcgctccatcatgccgccgtcgttgtcgtcctcggcggcctcctagaccgcctccttcgccaacgcccgcatcgactggaatgagacgccctacgcgcacgtgttcaatgccgacctcaccggcgtgtacactgaggaggtcacggtgaaggttgatgactgtaacgtgctgctcatcagcgggc

SEQ ID NO: 290761 - DNA, 230 bp, Zea mays
tctcgtgtctgggattcgccatgcagatctgtacgagaactgatgctctggatgttgcacgacataccactgctgctgttgctaagggttttgccattggctctgcagccttggtttcccttgcactagggggtgcgtttgtaagtcagtctgctagctcctactgtttatgttctgagtcttaaagttttcatcgggcttatagtcggtgttatgctcctgttctggtt

SEQ ID NO: 290762 - DNA, 178 bp, Zea mays
caccgggcacacgccccgagctcagcttagctccactccatctccaatcagagtcgtggcgactgcaccagagctagctacatcggccctcacaatgccgattaataggatcgccctggggaaccatcatgatgtgtaccatccaggcgcactcatggcagcattccctgagttcatc

SEQ ID NO: 290763 - DNA, 417 bp, Zea mays
tgaagcgctcgggccgcccatgccgtcgtctccgttcgacggtgaggcagtgggcacgttagcgatttcagtctagatgtatcctgagtgcgagatccctttcaaacttctgctgattggtgattcgggtggtgggaagtcacgcttgcttcgcagatttgcatcataattcttatttggacaattagttcaccagggttgcggttgagttcaacattcgtacagtggtccacgatgggaaggccatattacttcggatttgggatactgctgggcaagagcgcttcatgacgatcattagcagctactatcgcggtgctcatggaatcattcatgtatctgacgtgacagaccaagaaagcttcaattatgtgaagcaatggttggtctagagtgaacgttatgcaggtgataatg

SEQ ID NO: 290764 - DNA, 414 bp, Zea mays
ctctagctaggctcgtctgctgcacaaaggtaagacccgggattcgccggcaggggaacgaggaggacgtccgcctgggcgccaacaagttctcggagcgccagcccatcggcacggcggcgcacggcacggacgacaaggactacaaggagcccccgccggcgccgctcttctagcccggggagctcaagtcctggtccttctaccgcgccggcatcgccgagttcgtcgccaacttcctcttcctctacatctccatcctcagcgtcatgggcgtctccaaattccacctccaagtgcgccaccgtcggcatccagcgcatcgcctggtccttcggcggcaatatcttctccctcgtctactgcaccgccggcatctccggcgggcacatcaacccggcggtgaccttccgg

SEQ ID NO: 290765 - DNA, 171 bp, Zea mays
tctctaaactgaatcgtattatatctaggctcctctgctgctcgaacgtactagtcatagcacgcatggaggggaaggacgacgacgtccgcctgggcgccaacaagttctcggagctctagcccatcagtacggtcgcgcatggcacggacgacaacgactaccaggagc

SEQ ID NO: 290766 - DNA, 433 bp, Zea mays
gggtcgacgcacgcctctaaactgagtcgtactatagctaggcgcgtctgctgcacgaaggtatcagtcacagcatgcatggaggggaacgaggaggacgtccgcctgggcgccaacaagttctcggagcgccagcccatcggcacggcggcgcacggcacggacgagcaggactaccaggagcccccgccggcgccgctcttcgagcccggggagctcaagtcctggtccttctaccgcgccggcatcgccgagttcgtcgccaccttcctcatcctctacatctccatcctcaccgtcatgggcgtctccaagtccacctccaagtgcgccaccgtcggcatccagggcatcgcctggtccttcggcggcatgatcttcgcccacgtctactgcaccgccggcatctccgggggggcacatcagcccgggg

SEQ ID NO: 290767 - DNA, 380 bp, Zea mays
tccatatcggccagcggacacacatactctgtatatccattacggtgggtgatcgatgaggagaatgttatcataacatcgcttcctccgcgtacgccgcatggtccacgcggtggatccctcgcgaagtgtatccgctgttcgtgcgcatggccgtgggcctgggtatccgcgcgtatcagcttgtgcgcaacatcacggggaaacccgatgtgcgggtgaccaaggagaatagagcgggccgcgtcctggacaaacaagatcagcgaataggtacccatgcacgcggtcaggacaattctctgcggaaacagtcccgagatcattgccttgatcaactcattcttcgccgaatcactcaacgactattaagctagatt

SEQ ID NO: 290768 - DNA, 320 bp, Zea mays
aggacaatctgtcttcgcgacgctgagccacaagaatctcgagagaactgacgctcgaaatgctgcaggaaataccataggtgcaagtcggaagggttttgcaagtggaacggaagcaatggcttctactgcagtaattggggcatctgtcatgcaggctgcaaactccactgtatacgtactgagtcataaggtactcatcgggcttattgtccgtgctatgctcgtgtactggatcacatcacagctcatgaacagtgtgcagcagtgaagctctaaagatcgtggtagaagttcatcagcagttcaacatgagccct

SEQ ID NO: 290769 - DNA, 381 bp, Zea mays
cgacaactaaaaagaaacggagggagtgctaatttgtgaattcttctacagtctgatgaagatatggaacttgaacaatttcactggtgtcattggagtgttcaattgtcagggagctggacagtgggtttggccagttaaacaaactgcttatgttcctaccaacataaacataactggtcagctctcaccgtccgacgtagaatctctcaaggagatagctggtgatgactggaatggggagactgcagtatatgctttcggttcatgtaaatatttgttggctgactgtttctttctaacaatcccatcgtaccactatactatcagtgactgattagccatctgttttgtctcccaggttctctttcaaggcttcag

SEQ ID NO: 290770 - DNA, 408 bp, Zea mays
acggacgcgtgggcggacgcgtgggagcacacacggatcaatcacactcactcgcggccattgtcctgctcgtgcgtgctctgccttttcaggcgatcgaccaaccaacttctcgtcactgccatggctctgctctccgacctcatcaacctcgacctctcggaccgcaccgggaagatcatcgccgagtacatctgggttggcggttccgggatggacgtcaggagcaaagccagggtcagtagtagtacacgcttttgttcaccttcaatcttatccttatcttggcagtacgctgtccggacctgttgatgaccccagcaagcttccgaagtggaacttcgacggctccagcaccggccaagctccgggcgacgacagcgaagtcatcctttgccctcgggccat

SEQ ID NO: 290771 - DNA, 413 bp, Zea mays
atatcatcattatctttcaggtatctacattattaaccttggaaagacctgggacaagcttcagttggccgccagggtcatcgttgccattgagaatccgcaggacattatcgtgcagtctgctaggccctatggccagagggctgtcctcaagtttgcgcagtacactggtgcccatgccattgctggcaggcacactcctggtacattcaccaaccagttgcaaacctccttcagtgagccacgccttcttatcctgactgacccgaggactgatcatcatgtaaaacttatatctgttgaaagaaaaactagagcgtgcaactcggtttgctgattcagaggactttaaaatcttctttatccaaactttgtacagcccattaaggagtctgcgcttggaaacattccca

SEQ ID NO: 290772 - DNA, 409 bp, Zea mays
  unsure (1)..(409): unsure at all n locations
aggcgaaacatctctcaaacgatacgaaacggcctcgccgctcagtctcacgctaatccccgccggcaccgatcgcccgcactaagcagacagcgcgcacgtcgacgggcggcaatgcgccgcagacgcatctggcgaccaacgcggcgcgcaagatggacccggccactcggggcttgaagaatccgcaccgcttcctcccgggcaacgtggcgctgcgggagatccccacgtattagacgagcactgacctgctgatacggaagctgccgttccagctgctggtgcaggagatcacgcangacttcaacacggacatccggttccaatcctcagccgtggccacgctgcaggatgccacccaggcctagctcgtgagcctcttcgaggacaccgacctctgctccat

SEQ ID NO: 290773 - DNA, 437 bp, Zea mays
gacgcgtgggacgacacaagcctctagactgagtcgtactagaacgtgaaggccctcgacgagcaggaggtcacctcgcagcactcgcgcgcccagaccagcgacgccgccgaggaggagcagcagcaggcggtggatccgctggcgcggcagtcgtccatcatgtcgctgacgctggaggagctgcagaactcgctgtgcgagccgggccgcaacttcgggtccatgaacatggacgagttcatggccaacatatggaacgccgacgagttccaggccgccacggccggctgcaacaaagagggcgcggagcgggagccggtgcccgtggcgactacgacgggcacaagtgagaatggacgacgaggaaatgggaggggactggttcgggaggggtcgttcgcgctggcgccgccgctgtcccggaagacggtgga

SEQ ID NO: 290774 - DNA, 417 bp, Zea mays
aagcctctatcctgagtcgggctatctcataaaagaccacaacaagcaagaagtcaacatcgaaaaaatcacacgcccagacaaacgaggacagccgaggaggagcgatcagcacgcggtggatccgctggcgcaggagtcgtcgatcatgtcgctgacgctggatgatctgcacaactcgctgtgcgagccgggccgcaacttcaggtccatgaacatggacgacttcatggccaagatacggaacgccgatgagttaaaggccgtcactgccggctggaacacacagggcgcggatccggagattgtgcccgtggcaatgacgactggcacacgtgagaatggacgatgaggaagtgggaagggactggttcggcacgggtcattcgcgctgccgctgccactgtcccagaagac

SEQ ID NO: 290775 - DNA, 361 bp, Zea mays
agtcgcccacatgtgcggcctcagcctcaagggccgcggggccatccccttcctcgagtccctcgtcgtcgccgacgtcgccgcgctcagggacggcaccggcaccctcaccgtcttcaccaacgagcagggcggcgccatcgacgactccgtcatcgccaaggtcaccgaccaccacatctagctcgtcgtcaacgccggatgcacggacaaggacctcgcccacatcgaggcgcacatggaggccttcaacaagaatggccgggacgtcaagtggcacatccacgacgaccgatcgctgctcgcattgcaggttgatgaatcataagagacttaagagagacttcaatgctgtttagtt

SEQ ID NO: 290776 - DNA, 416 bp, Zea mays
ccaaattagcgagcaggcagttacagacgcggccacgacggcacatcgccgccgtagtccttgaccttgctccacaaccccggcccgactcggcgtcctccgccaccctcctcctgggcagcgccggcggggggatatggcatcggagtacgtggtgggcaagagcaggggcgacacggccgtcaccaccatcgtcaacctggcggaggaggccaagctcgcgcacgagggggtcaaggcgcccggccaccagatcctcaccatctgcaagtcgctcgtcgccggcggcgtagcaggcggagtacaatggccacttctccccaagcgaaaaaaatctgctagaagacctttagagggctttaacattgggatggatatttgggcccttaccttgctttaagtggagattcagtttt

SEQ ID NO: 290777 - DNA, 355 bp, Zea mays
actcgctccacattcccttcgcaccacctttcccctctctctctccctctctctccctctctcactcgctctttctccggggccgccattcctgctccgtccactcccaacacatgcggcggcgcgggcgcctccccgcggcgctgtggctcgttgtcgtgacgttggcggcgctggtggcgcgacctgcgtgtgcggcgtggtgcatcgcgcggagcgaggcctcggacaaggcgctgcagtcggcgctggactatgcgtgcggccccgcgaggggtgccgactgcgcgcccatccaggccagcggcctctgctacctgcccaacaccctcgccgcgcatgcctcttacgcctt

SEQ ID NO: 290778 - DNA, 214 bp, Zea mays
atcggctcccgttcggaatgcgcagccctgcctccggcgaactggtccccaagcgatgtggcatggcgccggtgccgggtacgatcacgacggctaaagtgacgaaacctctattcttgaagaggccgatgcagttcggcatcagcggccctttgccgcccagtatagacctgcaccggttcgtcaagttgcccattgtcctgcgttgccagcg

SEQ ID NO: 290779 - DNA, 371 bp, Zea mays
cgatgcaagcctctagggcgtctcgcaccaacacccgcgatgtcatcctcctcgccgccgccgccgcacgtcgtcgaggacatgccccatgtcctccagcttctcagcgacggcacggtggtccgcttcgccgactacgacacgctccctcccccgtccgtgcctcccgcgccgctgcccgtccggtggaaggacgtcgtgtacgacgccacccacggcctcaagctccgcgtgtacagtcccagtccgccggcctcctgcggcaagctgcccgtgctggtctacttccacggcggcgggtacgtcctcggcaccttcgcgctgcccagcttccacgcctgctgcctccgcctggccggcgaggctcccgg

SEQ ID NO: 290780 - DNA, 381 bp, Zea mays
gactcgtgggtcgatgcaagactctaaactgagtcggatgaacgaacggacaggttgttgcacagaagcgacatggctttcgcgcccaaaacgtcctcctcctcctcgctctcctcggcgttgcaggcagctcagtcgccgccgctgctcctgaggcggatgtcgtcgaccgcaacaccgagacggaggtacgacgcggccgtcgtcgtcactaccaccaccactgctagagctgctgcggctgctgtcacggttcccgccgccccgccgcaggcgccggcgccggcgccggtgccgccaaagcaagcggcggcacccgccgagaggaggagccgtccggtgtcggacaccatggcggcgctcatggccaagggcaagacg

SEQ ID NO: 290781 - DNA, 428 bp, Zea mays
  unsure (1)..(428): unsure at all n locations
tcgatacaagcctctatattgagtcataagatatcgtgttattatacggttccgttgcaacgcacgggcactcacttagtataatattaagtatgcaagctcgaataaaacctgccactgtcgtcaacgcagcagcggctgaggcgagatttgtgtgagcctctggagcagcatgtcgttccacgtgtcgacagggccgggcaggcaccagtgcaggcagtcgctggcgttcctgacccagcgtttgtcgtagtgccagcccgggtggccgtcggcgcgcagcatcatcgccttggtgacgtccagcagctcaaacttggtgctgccgctggtctccctcaccctcgccacctcttggctctgcaccctcctcagctcncacccgatgctcctcggatcgaggtcgccttcctccagcggccgctcta

SEQ ID NO: 290782 - DNA, 323 bp, Zea mays
cttggtccatacaatgcatatcaattggctgcaatcttaccatgcagatcaggaccaagaggagaaaatccgaatggctgcacgtgacacacatgacgaactacgtgctataaaagctgatccaactgagggatttgagaatggagcaatcctttcaatcgcagccagagaactacacagtgagcatgaggcgacacgaactgaaccattgcattagctcttcactttgctggatcagtatcgtgctgagttcgtggcgtaactgaacgatatttttgatccactccttagtgcactttcagatccttcagacgcagttgtcc

SEQ ID NO: 290783 - DNA, 280 bp, Zea mays
aaactggattcccccgattccctcacccatcaaccccacagcggacaaaaggcaatatgttcggcttcgggcatcacggtcaccacggttagaacccgccggtgcatggcggcctgcaccagcccatcttcaatatcgtctgcaacgccgacgaggggtactgcttcaacgtccgcgacggcaacgtggtgctggcccccgccgacccgcgcgactaacaccagccttgggacaacgccatgcgcttcagcacgcatgtcatggtccaggagggcaggcc

SEQ ID NO: 290784 - DNA, 227 bp, Zea mays
caaaaacgcggtcagggagcgggcgcaggaggggatgaggggaggacagccgaaggcgcgggtccacgggttggccggggatgggaaagtgaaaacgttccctgtgatcgcagtgcccaaggagaaacttgttgacaccaacggggcaagtgatgctttcgttgggggcttcctctcacagttgggtctatgcaagggcaatgaagactgcgtgagggcaggttgct

SEQ ID NO: 290785 - DNA, 286 bp, Zea mays
aggccagcatgatctccatggtcgcgaatccgaagttcatcccggggcagacgcttcgccggaaggagaagcttctccttgttccaaggattgcttcctgataatcctacatctgtaaaacttgtgtcttgctagctgtaccgggaacaagattaaataatgcaaggaataaagtgactctgttcttcgtcagtaaaaaaaaaaaaaaaaaaaaaaaaaaaaaaaaaaaaaaaagaaagaaaaaaaatgaaaaaaaaagtaaatcaaaataaaaactgccaatgaa

SEQ ID NO: 290786 - DNA, 311 bp, Zea mays
aacaattcctccttcggatctcgcattcaacgcatcgcacgtgtgaaggaacggggacgccgatgaagatggggctcgcgttcgggaagctcgtcagccggctcttcgccaagaacgacatgcggatcctcatggtcggcctcgacgccgccggtaaaaccacgatcctctacaagctcaagctcggcgagatcgtcagcagcatctccatcagtcggtttcaaggttgaaactgttgagtacaagaacattagcttcactgtctgggatcttcggggtcaggagaggatcagacctctttgggaggcatt

SEQ ID NO: 290787 - DNA, 350 bp, Zea mays
taaacacgcgtccgcgagggtgctgaagcgcatgtccttgacctgggtgctgaagcgcatgtcaaggacgaggagggcaaccctgcgttcgccctcgtcaacaaggccactgggctcgccatcaagcactccctcggccagtcccacccggtgaagctggtgccgttcaacccggagtaccaggacgagtcggtgctgtggacggagagcggcgacgtgggcaagggcttccgctgcatccgcatggtgaacaacatccgcctcaacttcgacgccttccacggcgacaagggccacggcggcgtgcacgacggcaccaccgtggtgctgtgggagtgggccaagggcga

SEQ ID NO: 290788 - DNA, 354 bp, Zea mays
tctacagtaagtcctcataggcaatggctaccattatcaagctcgtggcccttggcttggccgtcctcgtgagcgttgggttctccgatgcagcgacggtagttaggcttgggagctatgcatctgccggacgatgcggcagccgtggacgctgcggctccggatctaccggggctgctgggtacagcagtgggtctggcggtggcagtggctacagcataggcaagggtggcggggactggtggaacaatttcgtctccagcgtagcgggcagtggtcgtgggggacagggccgacggggtggcaccaacagtggatacgggtccggcggtggatcgggctatggttctggca

SEQ ID NO: 290789 - DNA, 374 bp, Zea mays
agaaagatgtacaattcttgccaatttctggtcttgtgggaaccaatatgaagaccaggatggataaaagcatttgtagttggtgggatggaccttgtctttttgaagttctggaccgtattgaaattcctttacgcgaccccaaaggtccagtaaggatgccgattattgataaatataaggatatgggcactgttgtaatgggcaaaatagaggctggcactatcagagagggtgacagtttattgattatgccaaacaagtctcatgtgaaagtcattggtttgaacttggacgagagcaaagtacgtcgtgctggacctgctgagaatgttcgtgtcaaattgtccggagttgaggaggaggatgtaatg

SEQ ID NO: 290790 - DNA, 399 bp, Zea mays
ctcgcgggtcgacacacgcctctacacagattcctcagtctcggaagataactatccataagcgcaagactccaaagccgtcgccttcctatccatcccttcctcgccacaggggtcgcctgatatcacatatccaatggtgaatgctgttgctgtgcttggtaccagcgatggtgtcaagggcaccatctttttcacccaagtgggagatggcactaccactgtcaccggaagtgtctctggcctcaagcctgacctccatgggtttcatgtgcatgcgcttggtgacaccactcaatggctgcatgtcaactggaccacactacaatcctgctagcaacgaacatggagcaccatgttcatgataaccgtcatgccggtgatcttggaaatgtgaca

SEQ ID NO: 290791 - DNA, 144 bp, Zea mays
aaacagagcggcgtggggctcaggagggtccgccgtgagtacaaggcaaaaaagatgtcggaggaggactacgtcagtgccatcatggaggcggtcaacagggtcgtgaagctccaacaagagcgtgggattgaagtgcttgtc

SEQ ID NO: 290792 - DNA, 380 bp, Zea mays
aggcaccacacctcttcttcttcttcctcctcctcctagcacagctagcgcctgctccccttcgcctgtgatcatgtcttgcagcagcggcaagtgcgactgtggctccagctgctcctgcggcagctcatgcaactgcatgtcccctaacgtggagaccgccgccgccagcagcatcaagaccacggtcctcgccgcgccgaccaccaaggccagcgccggcggcttcgaggcggccaccgagggcggcggctgcgactgcaacacctgcaactgcggcaccagctgcggctgctcctgctgcagctgcaactgagccggtcaggcgatggcgcacgagagtcgagaggacgacgacgagtcgtataaatataatagcg

SEQ ID NO: 290793 - DNA, 373 bp, Zea mays
  unsure (1)..(373): unsure at all n locations
acaaaaggtcctcttgtttttctaagagtctatccttttcattcaaggcatcaatcaattcattaattttatctactttagttctatccaatcccttgaacaaactagagtaatctatttcatcatcactagactcatcatcgctggaagaatcataagtgacattgttttgattacataccttcttctcccttgccataaggcatgtgtgacgctcgttggggaagagggatgacttgttgaaggcagtggcggcgagtccttcattgtcggagtcggaggaggagcaatccgaatcncactcctttccgatatgtgcctcgcccttggccttcttgtaatgcttcttcttttccctcttgctcccgtgttc

SEQ ID NO: 290794 - DNA, 399 bp, Zea mays
  unsure (1)..(399): unsure at all n locations
caacggcaacaacaaatttccccaaattccaatcaaccctccgcaataaagcagcccaaggcggcggccggcggcggtcaaccaacaatccagaacgaaaaccgaacccgccgttgccaataaggcggggctggtcaagttcaagggcggacttctccggcggaagcgccggtaagcctcctccggcaaaccgggaacggaaggtggcaacctgggcgcctgcggcggcatcgggcagccgctctccctcctcatgaagctcaacccgctcgtctcctccctctccctctatgatatcgccgggacccccggcgtcgcggccgacgtctcncacatcaactcncccgccctggtgaaggggttcatgggggacgaccagctccgggaaggcgctcaagg

SEQ ID NO: 290795 - DNA, 274 bp, Zea mays
atacaatacgacaccccaagccgcacagcacagacccgggcttcgccggcgcggtagccagagcaagacatggacgggaggacgtacggccacgagaccaccctgatggtggctgctgcagcaccttctggaagtgcccagactgcgacgccggctcgcgcggcgatctcgcacgtcctgccgctgcgggcggcgggcatacgcgcgggttgcttcgcgaagcggccccgtcggcgcgcatccggccggcgttaccgtggccgtagcgcgctgt

SEQ ID NO: 290796 - DNA, 367 bp, Zea mays
aaatcgctagcagcagctgcatgctggcaatgtgcagtggtcaacctaagatgtcacagagcgttctaatcgccttcaggaatgtaggagacgacgctacgggagccgcattggccatcgacgcgttctttccctttgcctgtactgatgccatctaggaggcgtgctacaacagtatcggtatcatcgcccagccagtacgcagtaacaacgacgaagacgccgtcgcgtgctgcatcaagtatggtgtgtctctcgtcctcaccgatgtcaggcacttcaagctttacccgtcatgctccatggcaggtcatcttagcgtacggagttacggactttacaccaaccttcgacagctgctccttgt

SEQ ID NO: 290797 - DNA, 438 bp, Zea mays
tcgcgtttcgatgcacgcctctacagtgagtcggattcacttcgtgatccttacctgccgcacccaagagcagaaaagcagcgtcgcaaatggagcaggaagcgagcccgagtggaacgagaccttcgtcttcaccgtctccgacgacaccccgcagctccacctcaagatcatggacagcgacctcaccaacgacgatttcgtcggcgaagcaaccatccccctggaggccgtgtttcaggaaggcagccttcccccggcggttcacccggtcgtcaaggaggagaagtactgcggagaggtcaagctcgcgctcaccttcactccagcagcggaaactcgccaccgccctgatgacaacgaggaggggccgccttacagcagctggagttgatctatctgccatgggatgcatgcatcatatatatccaccaagag

SEQ ID NO: 290798 - DNA, 407 bp, Zea mays
aaagcaacatcgcatcagcacaagcaagaaccacacctcctcccttcgcctgtgatcatgtcgtcttgctgcggcggcaagtgcgggtgcggctccagctgctcctgcggcagcggatgcaacggctgcggtatgtaccctgacgtggagaccgccgccaccagcagcgtcaagaccacggtcctcgccgcgccgaccaccaaggccagcgccggcggcttcgaggcggccaccgatggcggcggctgcgactgcaacacctgcaagtgcggcaccagctgcggctgctcctgctgcagctgcaactgagctggcccggcccggcgatggcgcacgagagtcgagaggacgacgacgacgacgacgcgtataaatataatagcggcgtccagtaaataagatcctgt

SEQ ID NO: 290799 - DNA, 282 bp, Zea mays
acacacgcatctaaaatcagtctctatatggtgctccgtctcaggggtggtatgcagatctttgtgaagacactcactggcaagacaatcacccttgaagtggagtcttcggataccattgacaatgttcaggccaagattcaggaccaggaagggatcccaacccaacaacaaggcctaaacctcgccgggcacccatctaaaagaggcgcgcaccctggcagattacaagacccagagggagaacactctaccccgggcgctcccccacaggtgtgacat

SEQ ID NO: 290800 - DNA, 394 bp, Zea mays
taggataagcaggagatatgctgggtttcctcggttgtttgtccccgcgcacaggaaagtgttcgtcctcatggagccgccgcagccgaagtcgggcctcatcgtgggcatcaacatgggccatgtcgtcaccaagcgcgagctgcctctgcgcccgtccgagcgcacggggaaagcaacgaagagggtgtccatggtcatgggcctgatcacagaggttgctggctttgctccttatgagaagcgtatcatcgagcttctgaaggttggcaacgacaagcgcgctctgaagcttgccattagaaagcttgggactcacaagagggcaaagaaggagatataggacattcatgggcgtcatcaggtagatgagatcggctggtaaccacactga

SEQ ID NO: 290801 - DNA, 276 bp, Zea mays
aattccccggcgtcgcgcccaatgacttctacatgaaagatccacttcctgtgagagtctccaagctgatctcactcattatacatcttccctagtcctactattctctctcattctgcaagcggcggaacatctttgacagtgcacatcatctcggtgaatttcttccttgacatcgcattcacaattctccctatacgtttgtaatgatggagcctcacatttgtccagtcgtctgcagcatatctgttggggagatactacagatcttctcac

SEQ ID NO: 290802 - DNA, 407 bp, Zea mays
accacagcagcacaagcaagaaccacacctcctcccttcgcctgtgatcatgtcgtcttgctgcggcggcaagtgcgggtgcggctccagctgctcctgcggcagcggatgcaacggctgcggtatgtaccctgacgtggagaccgccgccaccagcagcgtcaagaccacggtcctcgccgcgccgaccaccaaggccagcgccggcggcttcgaggcggccaccgagggcggcggctgcgactgcaacacctgcaagtgcggcaccagctgcggctgctcctgctgcagctgcaactgagctggcccggcccggcgatggcgcacgagagtcgagaggaggaggacgacgacgaggcgtataaatataatagcggcgtccagtaaataagatcctgtcaactgca

SEQ ID NO: 290803 - DNA, 347 bp, Zea mays
ccaccctccaggacggttccccaaatatggtcaacctgtggggtttgtgtaaggccaagcggcgagagaattataagatactggagaagctctgggacaacatgttggccgggcctcgcccggagacagggctcgagaaactccgcaaggggaccaccgcccgtctgctcgtcatcaacaaagacgcggacggcggcagctacaagcgggcgcagtcgatgccgtcgaccccgacgacgccggtgacgccgtcgtcgtcgtcgtcgtcgacgacgccgcgcggcgccggcaacatatggcgcaacgtcttccatccggggagcaaactggccaccaaaggcatgggc

SEQ ID NO: 290804 - DNA, 420 bp, Zea mays
acttctatggatgagaatgctcaaaaactgaaagaaaactatcttcagaagctgaatgcacttgaatcccaggtccatgagctcaagaaacaaaaaagtgatgaggcagcaaagcgtttacaagaagatattcagcatataaaatctcagaaggatcagcttcaacaaaaggccaagcaagagtctgaaaaatttatgtcttggaaggctgcccctgaaaaggaagtaatacagctcaagaaggaagggagacgaaatgaatatgacatgcacaagctcttggctttaaatcagaggcaaaaaatggtcttacagaggaaaactgaagaagcagcagctgctacaaaaagattcatggagttgctggaagcaaagaactcatcacttgagacatatggcagtggaaatgcttcggggatg

SEQ ID NO: 290805 - DNA, 416 bp, Zea mays
  unsure (1)..(416): unsure at all n locations
ttcgattccatcccatgggttggcgttggcacgacgacgacggtgacagcggccggggcctcggcggtgtcnctgacctcgctggtggcgggggcgatggggcgcagtgcgccacgcgacgggtggtgcagtcccgctgccacacggaggaagtcgagcccggccgatttgtccgcaagtgcgagaagacggagcagctcctccgcgactgcgtcggcaggtatagcctgtgcctggtcctttccctcaatccgctaacgtggcgtttaatcggcggtgattgtgatcttagggtcgtgttatcacttgtccggcttacagctggtgatggctatggctttggtttattggttaagttagcctttgccgctaattttactctgttgtacttgtaactggcattttttctaagttaa

SEQ ID NO: 290806 - DNA, 373 bp, Zea mays
gaagttaatcggggcaacgagccatttcgttactccagaacttgatgctgggccaatcattgatcagatggttgaacgagtctctcaccgagacacgttacagagttttgttgtcaagtctgagaaccttgagaagcagtgcttagcagaggctatcaagtcatattgcgagcttcgtgtcctaccatatgaactcaggaagactgtcgtgtgctgatcagagcgcccttaatggtctgtcttagtgtacttgtatatggattgataaaatgaattttttagcgtacatatatccatcccctcgacattactttaggtaagaaattccgaaagtgctttgattatgaagaacttgtacgagggaccccttgat

SEQ ID NO: 290807 - DNA, 370 bp, Zea mays
attcttcttcttcctcctcctcctagcacagctagcgcctgctccccttcgcctgtgatcatgtcttgcagcagcggcaagtgcgactgtggctccagctgctcctgcggcagctcatgcaactgcatgtcccctaacgtggagaccgccgccgccagcagcatcaagaccacggtcctcgccgcgccgaccaccaaggccagcgccggcggcttcgaggcggccaccgagggcggcggctgcgactgcaacacctgcaactgcggcaccagctgcggctgctcctgctgcagctgcaactgagccggtcaggcgatggcgcacgagagtcgagaggacgacgacgagtcgtataaatataatagcggcg

SEQ ID NO: 290808 - DNA, 243 bp, Zea mays
cttgatcgcctcctcaagctacgctgagtttggggggcaaatacgaaccgcccaccaagcgtgtgagctgatgggcatcgacttcactaccgcctggtgctgtccaagcgacagcatcttcggactgttcgtcaagaacgtcacgaagttcagacaggtcgtcttcatggaagtagagatccagcaattgaaggatgtcactgggtcctacgaggtcgatgcgatgccgaacttcgacatcgt

SEQ ID NO: 290809 - DNA, 415 bp, Zea mays
acccacgcgtccgattccaaaaacctggtgggagtccactcacaagagtgtgccaggtggttatagcagcatttcgtaagtggcacattgaagtgccacatgatacatctctcctatatgaagttgatggccaaacttcagcaattgaaggaagccggaagctggagcacacaaatgagctcgagtaattctaattttctgcaatgcaatcacttctttagtttcagtatcatgtgatgcaacatttatggaatatttggaaatgacagtacttatatgtcataaagacattgaacttcactgcaaagtttttattatttcaacttgaggatactggaaaattagtacataaatacaatgaacaagaattaggaattattgataggatcaaacaagcatgataattcctccagta

SEQ ID NO: 290810 - DNA, 412 bp, Zea mays
atagtaaatcatagtaccactgctgccacagtcccgacctttgcaattgatgatgcggtattggtcgaacggaataatggccggtggctccactcagccagtgggaggacctagcagtcacaatttgcacctccacagtcgccaggagttgatgatgtaaatggacagccattgagtcatcggagagatgataccgctgacgtcttgaactcaaggcttgaagctttccatagacgaagcgaacctgtgagtgagtagtactccaagaacggcttactggtgaacctgcgtggatacacatgaccgaacgacgtgacagctgatgtggagaaagccctctcgtgacgaaatgtccactcctgatgttaaacatgacatctaccagtacccctttgattgggtttcttcaaaa

SEQ ID NO: 290811 - DNA, 377 bp, Zea mays
agtcgtattagaacagatcccaagtgctgccggcgagccagccggcctccagcttgtagcgaccgttcgtgacgtcgatgggtgacttcgtgggccacgtgctgccgggcacgctgctgctggcggtgggcctgtggcgggtgtgggcgtcagtggcgcgcttcgcggccgacccggcggcgttccgcgtccgcgcctggaaccccgtcccggcggcggggccgcggctgctggagctgcacgtggtggccggcggcgcgttcctggacatgtgcgtggagctctactacgccaacccgctccgcgtcctcaccggcggcggggtcgacccgggccacctcggggtggctcgagcaagccgagcatgctcctcatgt

SEQ ID NO: 290812 - DNA, 363 bp, Zea mays
actctgcgagtccaggagatttttttccccttcttcacgatactctcgacgagagtgtctccatggccggaaaaggagacgggccggcgatcggcatcgacctcggtacgacctactcgtgcgtcggggtgtggcagcatgaccgagtcgagatcatcgccaacgaccagggcaaccgtacaacgccgtcttatgtcgcgttcaccgattcggagaggctcgtcggcgacgccgccaagaaccaggtcgccatgaaccccatcaacaccgtcttcgacgcgaagcggctcatcggccggcgcttctctgacacgtcggtgcagagtgacgccaagctatggcctttcaaagtgattccgggct

SEQ ID NO: 290813 - DNA, 409 bp, Zea mays
cgggccaagcctctagcatgattcgccatatttgcactcaagcaagtgagcagctcccccgccctccagcaacatggagacggccaacgttgtcatcctctcgttcttcttcatctttgcaatccaccgcctcttcaaccgcctccatagcaggagcacgaagatgaagccgctgccaccgggccctctagccatcccggtcctcggccacctgtacctcctcctcgagaagaatattcaccacatgttcacgcgcctcgccgcgcgctacgggcccgtgctctacctccgcctcggctcacgtaacgccgtgatcgtgtcctctgtcgactgcgccagggagtgcttcacggagcacgacgtgaccttcgcgatacgcccgaccttccccacgctgcatctcatgacc

SEQ ID NO: 290814 - DNA, 414 bp, Zea mays
  unsure (1)..(414): unsure at all n locations
gggtcgatacaagactctaaagtaagtcttatcagattcgaacgggaattgacaatattgaaattgaaattaaccttgcccgaacccttgaacccggtaatgggtttgacaacataaatttctgggttaataatgttttgggattcaaatttggaaaaaaaatttgaacttgtcatgggattaaagggactcctgaagcgattgggctccatcctgatggacctgtgaagagaatgatgtattggcagtccgttgatagcttggtttcccgtggtggtatattggtcatcacatcatgcagcagaaccaaggatgagttggtgcaagaggtanagaacttcaaccaaaggaagcttggtgctgtgggctcaagctcagaaggattgccggctagtgaagctgcggtgttcagct

SEQ ID NO: 290815 - DNA, 271 bp, Zea mays
atacgatgcggcggtgcgggaggggattccacgatgccgggggccaacagcgtgggggaggctcctgatccagtccctcggtaatgcgtacgctgctggcaggaggcgagcgcgggattattgagctctaggtgggttttgcggttgccactggccttacgcatgttgcttagatgggattggctgggtcgtttcgcttcaactccttcctctcaggagttctttcaggcagaggaactgcagttcttgcggtttgcctcggcattcgagt

SEQ ID NO: 290816 - DNA, 403 bp, Zea mays
acgaatggtttgaaagtgatggcaattttgtccacaaaggactgcagtttggaagagtatatgggtgtgcccgcagcatcatcgttgctgaaagggttgtgctgcccgtccagcatgcatattggaaacaaggaaaactgctccaggtttacgtctgattgacaagtgggcagtactgattggtggcggaaagaaccacaggcttggtttatttgatatggttatgataaaagataatcatatttctgttgccggtgggattgcaaatgcaatgagatctgttgatcaattcctgcagaaggaaaaactcacaattcctgtcgaggtcgagacaaggacaatcgaagaagtgaaagaattggtggaattacgctgctgagaacaaaacttcattgacccgtat

SEQ ID NO: 290817 - DNA, 192 bp, Zea mays
tacagtacgtcgtattaggacaagcactacaagaaaatgttgaaaaattgtcagttaattaaaaaatgtctgggcccacactcttaatcgaagtaaaagtgtgggttttgttgcaccgacactcctaatttaagagtgtcggggtcccgcagaaaccgacacttttaatttaaaagtgtgagttttttctac

SEQ ID NO: 290818 - DNA, 358 bp, Zea mays
gggtcgagacaagcgtctaatctaactcatatcagattgagagagcagaccaacctagccacgcagcgagaatcgtcaaataggatgggaaagtgtcgtcatggcatcgattgacgcttcaagtagggcagttccgctagttcgtgctctggataaactcatggaagcgtcgtctgcgccagggaatggcaccgccctcaggcatgtggcagtcgcctgaggactccgtggctagaatacctgcgctccactccgacgctacgagggagcagcatcggaagaccagaatctcggatagtaccagtagctgcaccgccagctcggactacggcgtaccgatcctgttctcagatatttt

SEQ ID NO: 290819 - DNA, 387 bp, Zea mays
aaagtcattcagattaacgtggtcacagctatcaatcaacgcggataacacgaccgaccaataccaatagtgcaattggaactggagcttaactgtagatataccgtacgtcatcggcctcgatccggatcgatctcagccggctacctaacaaaacgtgtacgtagtactctgtaatcacatgaagtgtgcagctaatatctaaccggcacgttcagtcaacagataagtcatcactctgctgtggaaacacatgtagctaggcaatcctgtgctacgaagaagcaggatacctatttgtgtcgatgatacatgtactgattagactgcagactgagtcaaaactacagtgtgcataagaatcatagttacctgtgtgaaagggaa

SEQ ID NO: 290820 - DNA, 338 bp, Zea mays
aaactacggcctgcaatggtgttcttcgcgttgaaatgaacagtggtgcctatggatgttaggtcactgcgggatcgacagccacggctcatagacctacatccacgaagttcaaagatggcatcacgatctcaactggacagcgattgtatcagtacatccactcagccgtgtgacaagtcctcatcagacagggtgttctggggaccaaggtcaagatcatgcttgactgagacccgaagcggcacgttgcgcctatcaaccctcatcccgacctggtgaccatccataatccgagacgatgatgacaagcatctctctccgtgtcttggcaactg

SEQ ID NO: 290821 - DNA, 354 bp, Zea mays
cactgacgtcgtgactaacgcgtgggcggacgcgtgggggacggtgtggacacggatggggaccatggcagcaccctcattgcggtactcgactgtcacccctgagcagtaccttgacgagaagaccatcttccaccttaacccatctggccgctttgtcattggtggacctcacggcgatgctggcctcactggccgcaagatcatcattgacacctacggtggctggggagcccatggtggtggcgctttctccggcaaggacccaaccaaggttgaccgcagcggagcctatgtcgcaaggcatgctgccaagagcatcgtcgccagcggccttgctcgccgcgccatcgt

SEQ ID NO: 290822 - DNA, 391 bp, Zea mays
ctcgcgggtcgacacacgcctccaaagtgactcgtgctaacgcgtgggcggacgcgtgggtcaccaagtgcgtgcgccggcggcaccgcctcccgcaccttctgcgcgctcgaccccgttcaggtcaccatgatggccaagcacctggacaccatcgacgtctccgggtggcagtgctcgtctacgcacacctccatgaacgatcccggcccggacctcgccgactacccctacgacaccgtgcccaacaaggtggagcacctcttcttcgcgcagatctaccatgaccgcaagcagcgggaggcgcgcatgtcgctgcaccgcgccgagcgcgcgcaggcgccgtacgtcgacttcctcaagcccatcagcgccgacggcgacacaggct

SEQ ID NO: 290823 - DNA, 344 bp, Zea mays
  unsure (1)..(344): unsure at all n locations
cgtttcaaccttttccatcgctcctaatcctaacaaccaaaaaatctgagccgtaattattggccccaaaggcggaaaaaagcccggcgcaaaaaagtgcggangagaaccctcggaaaagcggctccgcggagaaagcccccgcggggaagaagccaaagcggagaagcggctacctgcgggcaagtccgccggcaaggaggcggcaacaaaaggtagaagaagcgaagaagagcgtggagacctacaagatctacatcttcaaggtcctgaagcangtgcaccccgacatcggcatctcctccaaggccatgtccatcatgaactccttcatcaacgacatc

SEQ ID NO: 290824 - DNA, 373 bp, Zea mays
tacactaaatctgtcaatactcgcccgagacgccctagccgaaccagtcagcccgagccttccgctgatgagcaaaagaataagacaagacgcctccggcgagtatccagttttgatgaggacgccggtaccttaactcctgctgctgaagaagtgcctgcaactggtcttactgacactgatcccgatgggtgtgcccaaactgttgctgatcccaatgggtgtgcttcttgcgttgccgctgtggaggatgaagacgaagaatatgaagctcccttaactcggaaaaacagtcggtagttcatcgccagcggtggaagtagtggagttccgtcacctgctttgtctgcccttattggtctgcaagaactgt

SEQ ID NO: 290825 - DNA, 115 bp, Zea mays
aaacttcgcgaagcagtcatacacgagactgactgctgtttgttgagacgcatagagctagctggaaacgtccagactgtcgctcgtgaggctcagtggcgtgtgcgaccccttc

SEQ ID NO: 290826 - DNA, 346 bp, Zea mays
gtgagtcgtattaaatgagtacgaacgctggaatgtcggtgctcatactggtcacctggttgggaatgctctgtcaaatccgtatctttctttcgcaacggctctaaatgggctaaccgggccactgcgttgccttgcaaagcaggaagtgcttgcatggatcatatctgtaattgaggaaactgtgagtggtgtcaccacacatgaactcaaagacgaggtcaggacgacactaaacagtggcaaggttgttcctgcgtttggtcatggagttctgcgtcagaccgacacaccgtattcatgtcaatcggagtttgcctcgaaacatttgcccatgggatcactt

SEQ ID NO: 290827 - DNA, 375 bp, Zea mays
aaagtcagtcgcatcactgctccggtcgttcacccgccgcagctgcgcgggcccgagcgctttcgcttaccgccaccaccaacgacagcaaccttggtctcccttctccaccagcgccgctgcggtcacgcaggacgaagcggcgaagaggttccctggactagggccgacggcgaagggggagaaggccagggtggtggtgttggggacagggtgggcggggtctcggctaatgaaggacctcgatacacaaggctacgacgtggtctgcgtcgccccgcgcaaccacatggtgttcacgccgctgctcgcctccacctgcgtcggcacgctcgagttccgatccgtccctgagccggtcgcgcgcatccagcc

SEQ ID NO: 290828 - DNA, 169 bp, Zea mays
tactacacccttacgtgagtcgtattaaacgtcggcgcctgcgtgagcggcgtgatcagccatgttctgagggctcgtgtagtgggtggctcagctgcgggggtccaccgtggggtgcctcgtgctccgcttctcgacgggcgggcaggctacgggcacctgctggctg

SEQ ID NO: 290829 - DNA, 229 bp, Zea mays
atcagcgacgaccggaactgtgtgaaggagtccagaggtacggcaagagtgacaacagtcgctgtcgcagatctgaaaggcagcatgggtgatgcagtagtttgtgtgcaacgtgatcctgaccagaggcttgctcgacgacctgttttaggcagcactccagaccaagtaattgcacccaaaggtgtgaagccaacattatcagcagatctcaatacacttgccttag

SEQ ID NO: 290830 - DNA, 298 bp, Zea mays
actctacactgcaatcactctatagtgagtcataatactgcctgaccagacctacctgattgcaacagccaacagcagctggtctgactgacatggcaaaggacatcgaggcatcggggcccgaggcgggcgagttctcggccaaggactacaccgaccctccgccggcgccgctggtcgacgcggaggagctcacccagtggtccctgtaccgcgcggtcatcgccgagttcatcgccacgctgctcttcctctacatcaccgtggccaccgtgatcgggtacaagcaccagacgga

SEQ ID NO: 290831 - DNA, 364 bp, Zea mays
cattgtacaactaagtcgtaaaacgtaaatcgtctactttggattacgagatgtttttcatttcaatataatatacatttgaacataagttatcgtgatattatatgttaccgttgcaacgcacgggcactcacctagtaaagaccaaagagtaattgtcactcgcgcgcggcacccaattttttctggcgcccaaaattggccgtagaggcccacctccagttgaactatggaccaaaccctatttcctcttttccaccacccggagttccgccgccagaagcaaggccccttcgtcgcctccgtccgccgcgctctcaactccatcgccatcctcctctgactcctccgacgacggctcctc

SEQ ID NO: 290832 - DNA, 374 bp, Zea mays
ctctaatcaaagtcatagcatggaaatgccaacagagtccggtaaatgatatagccctctgattatactaacatactgtaccaactcaactagaagaatttggagtacgacttgtgacctatgatcttcctggttttggtgaaagtgatccacacataggccggaatctcaattcttctgcactggacatgctctatctggctaatgctctcaatattccagagaagttctgggttgtgggctattctggaggtggcatgcatgcctggagtgctcttcattacattcctgatcgaattgctgcaatgttcgcacctatggcaaatccatatgactccaagatgacgaaagatgagaggagtaaaacatgggat

SEQ ID NO: 290833 - DNA, 161 bp, Zea mays
aaacggcatccagcgctatctcccggctcgccggcgtttagtttctcacgtgcacgtgcatggatcggtagactgtggtacgccgccgctgcggggggtgatctcgcatcgtttgcttccttggaggaggagtcatcgccgtcaggctgaactgcttgtga

SEQ ID NO: 290834 - DNA, 360 bp, Zea mays
  unsure (1)..(360): unsure at all n locations
cacaagcctcaagattgagtcgcatcaccctcttatcaagtcctcctcgggttagggttccttagggttttgtggaggggcgatggcggcggctgatgtggagtaccgttgcttcgtcggcggacttgcctgggccaccagcaacgagtcgctggagaatgccttcgcctcctacggcgagatcctcgactccaaggtcatcaccgaccgggagacggggaggtcccgcggcttcggcttcgttaccttctcctccgagaactccatgctcgacgctatcgagaacatgaacggcaaggagctcgacggccgtaacatcaccgttaaccaggcccagtcccgtggcggccgcngcggcgg

SEQ ID NO: 290835 - DNA, 257 bp, Zea mays
gtgagtcgtataagagggcccgtttcgggcctgaaccctggtttggcgtacagaagggcttcacgcttactttcctgtgcatgtcgagatcacgtgtagcactcagacactgcgtgtgcagccttgctggtttagattgtcacaggttggtctcactgcaggtaatgatcggatgatcctgcgcatgcatctctcacgaatccgtcagggctatttcagatgataaccacattacgttgtcatcactgacttgttca

SEQ ID NO: 290836 - DNA, 311 bp, Zea mays
ctcagggttgggacttaatagatcatgtcgggcaaacaggctcgagcttccaagcaatatgagaaggcagcccagtacattgactaccacacttcgttcagtgaagatgagaagaagcatccaagacatctgcaattcagcggcaacctatacactgctgcctgcaatctgaagttgaccgattacaaggaaactgcaaatctttgcacaaacgttctggaactacacagcagcatgtcaatgctcactacaggaaggtgcaagcttacattcagcttactgacctagatctagcataggccgatatcaaa

SEQ ID NO: 290837 - DNA, 365 bp, Zea mays
ttcccgggccagaactcgcggctcgacctcacgcgtccacagacgcgtacgcacgacggtattacgcactcaagcttatttagtttagcacacaccatcagccaaagcatactagggatcatatgcatgccaagatgttattacagcatcagattcagagctccagaagaagatggcgcatagctgcacgaggcttgcacgtggcctccaacgggacggctttgggcagagtgagcccgccgcccgcggccatgtcgatctcgtggccgtccactcggtcccagtcgaagcactggatcagcgtgccgagcaccaggctgatggtccgcagcgcgagggtctccccagcgcacttgctccgcccc

SEQ ID NO: 290838 - DNA, 406 bp, Zea mays
aggtattttggcatggaacgctagaatctgagatagaccgtgtctggttggtagtgctctgatgcagtttgttctgtttattcatgatgaacttgtatggtttgaatgctactatgtttttaatatgtgcaacaatatatttcttttgttctttttttatttatcacggtttagttcaaaaatgaactagcggatgataaatatttaagaacggaggtaatatctttttgtatgatgcatagcaggttatgaacttgcagtctgtagtttatatcttagaccactgaattttgtttctttttgctctttgtaactgtaggtgatcaaagtggagcaaaatgcccgtggtgtggatgcacctgaggtgcattgagaaaatcgaagcgctgacgtgagcgagaaatat

SEQ ID NO: 290839 - DNA, 192 bp, Zea mays
actgcggatgcgatggctgggaagggagggaaatgcttgctcgccgcgatgactactgcggtcaagtccgccgagaatgacaatgggaagaaggccccaatctcacgctcgtcacgcgctgggctccagttccttgttggaggtatccaccggtcagctgatgcagaggactcaggcaaatggtcttgttgg

SEQ ID NO: 290840 - DNA, 428 bp, Zea mays
tcactactaggacgcgtgggtcgttacaagcctctacaatgagtcgtactagcaggcggccgggcaggtcggcatggagcctcacatggagagcgcgctgcggcagggcctgtcggaggcggagcagcgggagctggagggcgtggtgcgcgcgcaccacacgttcccggggcgcgcgccggggacgtgcacgtcgctggtgacgcagcgcgtggacgcgccgctggccgccgtgtggcccatcgtgcgcggcttcggcagcccgcagcggtacaagcacttcatcaagtcgtgcgacctcaaggccggcgacggcgccaccgtgggcagcgtccgcgaggtcaccgtcgtctcgggcctcccggcctccaccagcaccgagcgcctcgagatcctcgacgaccaccgccacatcctcagcttccgcg

SEQ ID NO: 290841 - DNA, 387 bp, Zea mays
ctcgcgggtcgatacacgcctctagattcagtcgtaccaccattccgtcgtgtcaccaccgccgccgccggagtgtgtcatcgccgattcgcctggtatggcagcaccgcccgggggagcggggatagtgtggcagacgccggccaacccgcccgagtcgcacgactacatcatccgcaacggtcggcgctacgtgaggccttactacttcgagttcatctcccatgtgaagaacagatgggctggaaagaccatcgttgacctcttcactgatgagttcaaagggcgttcccgcgattactatgttcatgcagtgaagtgtgggaggcttcaagttgatgggcaaatggttcacacagactatattgtgaaatcatcacaaaagat

SEQ ID NO: 290842 - DNA, 218 bp, Zea mays
aagatattgccgtctcccgtttgcgtgaggcgaagacgagagcgagaagcagtcgccatgtctggcagcatccacaagatcgacgagaagctccagatggggggcgagcacaacaagaaggaggacgagcaccacatgaagggcgaggagcaccagagggaacgacgagggggagcaccaaaagaaggacggcggggagcacagtgaaggcatcgtgg

SEQ ID NO: 290843 - DNA, 318 bp, Zea mays
acagagctgctccgcgcccccgacgccggtcattaagagcaggaataatacgggttcggaatggccaagtctaagaatgatacggcgcataaccactcgtccaaggcgcacaagaacggcatcaagaagcccaagcaccaccgccagacctccaccaaggggatggaccccaagtatctgacgaactttaagtactcaatgaagggcagtagcagcagttgtgacggcgagtcagaagaatgagaagatgcccgattttatggcgacaaatccatcgcctgtgcccttaaggtccgaatcgtgaaattaattttcaga

SEQ ID NO: 290844 - DNA, 421 bp, Zea mays
  unsure (1)..(421): unsure at all n locations
tcgtggatcgatacaagcctctacactgcgtcgtatcattgcaaccgattgcctatccccctcccaaccaaagaccgatggcgcccaaggccgagaagaagcccgcggcgaagaagccggcggaggaagagcccgccgccgagaagacgacgcccggaagaagccaaggcggagaagcgggtccccgcggggcaagtccgccggcaaaganggcggcgaaggcaagcgtggcaagaagaagggcaagaagagcgtggagacgtacaagatctacatcttcaaggtgctgaagcaggtgcacccggacatccgcatctcctccaagggcatgtccatcatgaactccttcatcaacgacatcttcgagaagctggccggcgaagccgccaagctcgcgcgctacaacaggaagccaacatca

SEQ ID NO: 290845 - DNA, 254 bp, Zea mays
aatcctagcacctggcctccgtcgcgcatcagcgcatccccatggcccaacatcaagatcgggatcaatgtggttcggcacgatgagcacgctggacgccaaagtagcccggcacagtgacgatgtccagctcgtcgccgtggaggaccccttcatcaacaccgactacactgacctacatgttcaagtacgacattgtgcacggacagtgggaagccacaggaactcaaggtgaaggaccccaaaacccttct

SEQ ID NO: 290846 - DNA, 410 bp, Zea mays
aacactctacagtgaatcatcatatgcaagaaccacacctcctcccttcgcctgtgatcatgtcgtcttgctgcggcggcaagtgcgggtgcggctccagctgctcctgcggcagcggatgcaacggctgcggtatgtaccctgacgtggagaccgccgccaccagcagcgtcaagaccacggtcctcgccgcgccgaccaccaaggccagcgccggcggcttcgaggcggccaccgagggcggcggctgcgactgcaacacctgcaagtgcggcaccagctgcggctgctcctgctgcagctgcaactgagctggcccggcccggcgatggcgcacgagagtcgagaggaggaggacgacgacgaggcgtataaatataatagcggcgttcagtaaataagatcctgtc

SEQ ID NO: 290847 - DNA, 285 bp, Zea mays
aaaaatcgctcgcacgtggagtcaacccagccacgattcatccgtccagcatcctcgcatcctcagggtctacatcaacatccggatcaactgggtttggcacgatcggaaagctggccaccacggtggccctgcagaacgacgacgtcgagctcgtcgccgtgaacgatgccctcagcagcaccgattacatgacctacatgttcaagtaggacactgtgcgacggcagtggaagcaccacgaggtcaaggtgaaggactccaagacccttccccttggtgaga

SEQ ID NO: 290848 - DNA, 201 bp, Zea mays
aagtcacgtagcttcacacggtagggttctgcttctaggtcgtagtatcggttgtttggtatatagtagctgctctgtctgcgcaagggatgtagcggcgagcggttgcgattgttgctgctgcagcgatgatggtctccggatgacgggcggcgctggtgttggtaggcgttctctgcgcggtggccggccatggcggcg

SEQ ID NO: 290849 - DNA, 209 bp, Zea mays
aactatgttcagccactcccaggctgtggttgtgtgcccaggctgtcatactgttctgtgccaatctagcggtgggattgccaggctcatcgacgtgtgctccttcggtctcacgggcgattaagtccggcgtctcgtaacgtgagaagacatgaatttgctgttttgcagctttctcaggatatgtattgtagtccgtgaggatcttg

SEQ ID NO: 290850 - DNA, 369 bp, Zea mays
ttccgcgtccacccacgcgtccgacaatgtcggcaacctccatacatatatatgtgctactggagataatagtgctgttctacattatggacatgcggcagctccaaatgaccggactttgaatgatggagacatggcactaatggatatgggagctgaataccatttctatggatctgatatcacatgctcataccctataaatgggaaattcaacagaagtcagacaatagtatacaatgctgtgcttaaggctcataatgctgttatatcagacatgcggcctggagttaattggatggatatgcacagattagcagaacgggcaatacttgaatctctcaggaaggaacaaattgtacaacggga

SEQ ID NO: 290851 - DNA, 315 bp, Zea mays
agaattctagggttttgctgctctccgaccccgagctccgaaggccgcagcatcaggcgcggcccccctcgcgtgtgaccgagatggcgctgccgaatcaggggacagttgattaccccagcttcaagctcgtcatcgtcggcgatggtggatctggtagaactacatttgtgacgaggcatctcactggagagtttgagaagagatctgaaccacccactggtgtggaagttcatccgtcggatttcatcactaactgtggtaagatcaggttctactgctgggatgccgcagggcaagagaactttggtgggc

SEQ ID NO: 290852 - DNA, 367 bp, Zea mays
acaagcctctaaaatcagtcgtaataggcagcagcacaagcaagaaccacacctcctcccttcgcctgtgatcatgtcgtcttgctgcggcggcaagtgcgggtgcggctccagctgctcctgcggcagcggatgcaacggctgcggtatgtaccctgacgtggagaccgccgccaccagcagcgtcaagaccacggtcctcgccgcgccgaccaccaaggccagcgccggcggcttcgaggcggccaccgagggcggcggctgcgactgcaacacctgcaagtgcggcaccagctgcggctgctcctgctgcagctgcaactgagctggcccggcccggcgatggcgcacgagagtccagaggagg

SEQ ID NO: 290853 - DNA, 178 bp, Zea mays
aaacaggtcgcagggctgccagcttcaccatgagtcgtagcagcaccgcgtgctgcctacgctgtcggtagggttcgtcctgacttgagcggcaagcgcactggcatgtccgtccgggttcccaccgtggatgtgtcagttgttgactgtcactgtgagagtcgagaggggggcctgc

SEQ ID NO: 290854 - DNA, 422 bp, Zea mays
accacgcgtccggtagcctccaccaacagtctgccccgggtcgatcgaggtagcacgacgcccgaaatcacttgactctccgggaccgttgacgtgatcatcgccgggaggaccgagggacgtgtggagtcttcgcccttaccccctaactccaagcgatccaatgactgccaaacttcaaggtgtccaacgtcgacaattatgaacccaagcaagacccgggcggctggctagctgtctacacgaccgctgcccgggccgctacggcgatggaagatgtcttgatagcgtacatacccattgtcctatggcaggacacgctgcaatggctccgacatctacctcgacattgcatcgacgactaggacgacatcagccgctggtttgtcgctaactttcaatccctttctgataaaccgacg

SEQ ID NO: 290855 - DNA, 447 bp, Zea mays
cgggtcgtgtaagttaccaaaggtctttgcatgaacattcaccatttacaaagtggtgatagcggttaacatctcttatgataatttcacgctgctcaatctgtgaaatcagcttgatgacaacatggcagtcctcacaaactcgaagattctttgtcacaagcaactttgtcctaggcggtgtactaatgagtccaaatgcaatggccaacctctcgctgtggccccataccatgttcctcttttcatcatcttccacattatggaaaaccggcgtggtgtcaggcacatagccagtttgactgatgagaccttccaatcgctccaactcttcatatatatcatctgatctaggatgagaagcatcacccacaagaaaaccatgggacttccctttcaattcgatccagctacaagcaatgatctttttcaagcctctattggtca

SEQ ID NO: 290856 - DNA, 189 bp, Zea mays
cggggtcgtattagagcactcgctggggcagtcccacccggtgcacgtggtgccctacagcccggacttcctggacgagtccgtgccgtggatggagatccgcgacatcggcaggggcatcaggtgcgactgcaagctcgagctgttcgtggtcagcgtgcagtcggtgaagctcaacgtcgtcgcccg

SEQ ID NO: 290857 - DNA, 402 bp, Zea mays
gggtccagccacgcgtccgcagacacgtgggcggacgcgtgggcggacgcgtgggctctggaggaatttgagaaaataagagaggagaagaggaaagcactacttgcattgaaggctgaggagaggaaagttgaagttgacaaggatttgcagtctctgcagccactttcaaacaagaaagaaaatgatgaagttttcattaagctggttagtttccctgtaattaatgctttgataccttaagtttgctgagctttgcacgggttcttcgatgttcttttgttctcgtagggttctgacaaggataagaagaaggaaaatgctgagcgtgatgagcgtgccaagaagtcggtgagcatcaacgagttcctgaaacctgctgaaggagaaaggtactatggc

SEQ ID NO: 290858 - DNA, 353 bp, Zea mays
aaaaaagtcataataaaaaaaaaaaaaaaaaagaaaaaaaaaaaaaaaaaaaaaaaaaaaaaaataaaacaacaaaaaaaaaaacaaaaaaagaaacaaaaaattaaaagatacgtcgtcccaaaacagaactcacatcatacatcaacgacctggggggctccctacggagggcttgacgttttagaagccgggggagttcatggcggacccggttcgtgcaggaaccgggctccgtgtacgtccacatgtttggcaacgttctcaggtggaacaccttcggctccggccagatgatccgccccggaatgaacttctgtttcgcgaccatggagatcatgcagggcactctc

SEQ ID NO: 290859 - DNA, 439 bp, Zea mays
gtccatacaagcctctaaagtgactcgtaggattctcctccccctccggttcgggttcgggttcgtgaggttctccggggttcggtttcgtgggtgggcggatcgagatggcggcgtcggatgttgagtaccgctgcttcgtctgcggcctcgcctgggccacggacgaccactccctccacaacgccttcagcacctacggcgaggtcctcgagtccaagatcatcctcgatctggacatgcagaggtcccgctgcttcagtctcgtcaacgtctccacggaggacgcgatgcggaatgccatcgagggcactaacgggaatgagctggacggccgcaacatcaccgtcaacgatgcgcagtcccgcggcggccgtgtaagctgctgcagttgctaccgtggatgccgtggaggcggcggctagggcagtggcgggcg

SEQ ID NO: 290860 - DNA, 419 bp, Zea mays
cgcccgggccgttacaacaccctagactgagtcgtatgaggcgcgcggcagtgggcggagacgacgaccgatcggtcagaaggaatgtcgtcggcccaaatcgtgccggcggaccatgtgtgctatgtgcactgcaacttctgcaacacagttctcgcggtgagtgtcccggggaacagcatgctcagcatggtgacagttcggtgtgggcactgcacaaatctactgtcagtgaatctgagagcactcatgcactcagtcccagaacaagatcagctccagcaggagaacatcagggtccatggcacgttgcgtgagcatcatcagtgcggcggcggccaccatctggagctgggctcttcgtcgtcctcaaggttccggttgccgatgatgatgtcgtacgcgccgcagaacgaaca

SEQ ID NO: 290861 - DNA, 447 bp, Zea mays
ctcgtgggtcgatgcaagcctctaaagtgagtcatatgacgagatggcgacgccgaacgggcttgcgcggatcgagacgaccgggaagaagaagcaggacaacggcgtgtggtacgacgacagctcggcgccggtgcgcgcgcagaccatcgacgagctgcactcgctgcagcggaagcggtcggcgcccagcacgcccaagcggtcggcgcccaccacgcccatcaagggcggtgcccactcgcccttcgccgtcgcgatctccgaggaggagcgccacacgcagcagatgcagtccatcagtgcgtcgttggcgtctctgacgcgtgaaaccgggccgaaagtggtcaagggcgacccggccgcgaagggcgaggccgccgcgcagggcgcgccatcgacgccgagggcgcaccagcagcaccgccaccccgccgcccccgccat

SEQ ID NO: 290862 - DNA, 392 bp, Zea mays
tagaataacccggattcaatcccttcccaagggaatcctgcccccatagttgtatcaaaaagggcaaataccaatgatttttgcaaggctgttcttgttcaaaaataaccaagggcaagacttgaatccaggacattggggaccaatggggttggaatggggtactgtaattccgctgcaacaaccgaaccttaacgactccttgttgctgttgaaggccattctggattccgcttcagtgcaatggaagttgaaaccttggttaagtaccaactgcctgttgttgtaatcgttttcaacaacaaccgttttcaacgccgggacccgagaagccctgaccagattaccggaccctacaaagattacccagccccaaactcctttgttcccgc

SEQ ID NO: 290863 - DNA, 157 bp, Zea mays
acatccttgccaccatcaccattactggcactggcatccacgcagctaggagccgtggcgcggcgagcagcgacaacagggatcacgcatggaccgaggactggatcttctgggtccgccccttcagtggcgctgccctgggtgccagctaccaccg

SEQ ID NO: 290864 - DNA, 447 bp, Zea mays
ctcgtgggtcgatacaatactctacaatgggtcataatatcgggttcatccggaacgaggacgcgcggaagtacatgcgccacctcccgcagttcccgcgccggccgttcgtcagcctgttcccgcggatgcagcccgtcgcgctggacctcatcgagcggatgctcaccttcaacccgctgcagaggatcacagtggaagaggcgctggagcacccgtacctggaacggctacacgacgtcgccgacgagcccatctgcacggacccgttctcgttcgacttcgagcagcaggctctgacggaagaccaaatgaagcagctgatattcaacgaggccatcgaactcaaccccaacttccgatactagctagctagctagttcggacacacatcttaattatacgtttcaggctgtgtagtctgctgcaggtttcaagtgttcgtgt

SEQ ID NO: 290865 - DNA, 447 bp, Zea mays
  unsure (1)..(447): unsure at all n locations
ggtcgatgcaagcctctaaaatgactcctacgtagtgggctctagatcccgatggcctcgcgccgccgcaccctgctcaaggtcatcatcctcggcgacagcggggttgggaagacgtctttgatgaaccaatatgtgaacaagaagttcagcaaccagtacaaggctacgattggggcggatttcctcaccaaggaggtgcagttcgaggacaggctcttcactctgcaaatatgggacactgctggtcaggaaaggtttcagagtcttggcgttgcattctaccggggagcagattgttgtgtcctagtctatgatgttaattctatgaaatcgtttgataatcttcacaactggcgtgaagagtttctaattcaggcgagcccatcagatcctgacaatttcccttttgttctgttgggtaacanagttgatgtagatggtggg

SEQ ID NO: 290866 - DNA, 191 bp, Zea mays
aaatcgattataattcttcgctctgctgtggtagcagatgtacctagtcgatcttgtacgacgaagaagctggctagctagccgtctcgatcgtggatgtagtgattaatctgcagattgaataagaacgagagtacgcatatgatgcgtacgtacgtggtgtaaggtttgtgctcaaagagggcgagcga

SEQ ID NO: 290867 - DNA, 303 bp, Zea mays
cgtccagcgatactcatagaagtggaggccgcgcgtgcggccgtcgatacgcgtaggtatctgggcccgacgagcatcatcgcattcacggtcgaagacgcgtattcacccacgtatgggagatcgtcagcggagcataatgtagactgccacagaccaagtattgcccgctccgacatccgcagcgtgctagcactaacaaaccaccgcagctccagtggccaacagcctcaccttcgccgggcatgcaaggcaggccgcccgcgcctccgcgccactgctgtccaacaggttcatggcgtc

SEQ ID NO: 290868 - DNA, 384 bp, Zea mays
acccacgcgtcaggtccttcctccgtcttcctcctctgccgactggacatgctgggcgtcgcgcggaggcggctcggatccggatgcgtgctcgcccagctggcgcaggccctccgcgccgccgccgctcccgccaggacctactccgccgcggccaaggagataactgtacgggaagcattgaatactgcattagatgaagaaatgtcagcagacccttctgttttcttgatgggagaagaggttggcgagtaccaaggtgcatacaagatatccaagggtttgcttgacaagtatggcccggatagggttctcgatactccgatcactgaggcgggcttcactggcattggtgttggtgccgcttaccatggtcttcgacct

SEQ ID NO: 290869 - DNA, 374 bp, Zea mays
acactaccgaagcccttgtacccctcaccgccgccgctgctgctacggagcttccacccgcgcgcgcgccgcggtgaagacggagccagtggtggatgggctcgacgacgacgtggtgcacacgatcaccaatcaggtggaatactattttagtgacatcaaccttgctactacagaacatctgatgagattcattaccaaggattctgagggatatgtgccaatatcagtaaatgctggctttaagaaggtcaaaacttctgtgcgcaataatgtgatgcttgctgctgctctccgaacctcatcaaaacttgttgtaagcgatgacggtacgagagtcaatacgcagcaaccatttacagaatctgatttgc

SEQ ID NO: 290870 - DNA, 427 bp, Zea mays
  unsure (1)..(427): unsure at all n locations
aacaaggcaccacacctcttcttcttcttcctcctcctcctaacaaaactaacgcctggtccccttcccctggtattaagttctgcaacaaccggaaattccaacggttggtccaactgctcctggcggaactcaagcaaatgcattttccctaacgttggaaacgccgccgccaacagcatcaagaccacggtcctcgccgcgccgaccaccaaggccaacgccggcggcttcgaggcggccaccganggcggcggctgcgactgcaacacctgcaactgcggcaccagctgcggctgctcctgctgcagctgcaactgagccggtcaggcgatggcgcacgagagtcgagaggacgacgacgagtcgtataaatataatagcggcgtctaaataagatcctgtcaactgcacccgccattatcga

SEQ ID NO: 290871 - DNA, 422 bp, Zea mays
acctaaagcccatacaccagaagcgcaccaactccccaaccaccggagaccgcaccccagcacaggatggcatctgactccacggccgccgtgacggtggacggcagcgcgcttgcggggcgcgcgctggccgcggcgggcacgcggcacatgttcggggtggtgggcatccccgtcacctccctcgcgtcccgtgccgccgcggccggggtccgcttcctcgctttccgcaacgagcagtccgcggggtacgccgccgccgcctacggcttcctcacgggctccccgggcgctctactcaccgtctccggcccaggatgcgtccacgggctcgcgggcctctcccacgccaccgccaacgcctggccgctcctcatgattcccggattctgcgatcaggctgacgccggcaggggcgactt

SEQ ID NO: 290872 - DNA, 363 bp, Zea mays
gggcacgcgtccggcgaagcaaagcaatcggaattctctgcgatttctctagatctcgactaccccccactagttttggttcctcctttcgttcgagagagcgattctggtggcaatggcgaagagcgagggtccggcgatcgggatcgacctcggcaccacctactcgtgcgtcggcgtgtggcagcacgaccgggtggagatcatcgccaacgaccaggggaaccgcaccacgccgtcctatgtcggcttcagcgatactgaccatcgcaatcgcgcacgcgctggcactgttcgtgggcgtgtccgtcgcggcgaatatctcgggcggccacctgaatccggccgtgacgttcgggctgg

SEQ ID NO: 290873 - DNA, 386 bp, Zea mays
gcgaagcatcgagttggaattcagcgcgatttctctagatctcgagtacgcccgcaaagagtttggttcctccttacaagatggtgaagctcttctggtggcaatgtcgagaatccatgatcgcgacctccggatcggcctacgtagccgatactcgtgcgtcggtgttcttcatcatcgccggcgtcgagatcagccatcgcctacaggcaactgacgaatggcggcgcgctggacccggcgggcctggtggcgatcgcgatcgcgcacgcgctggcgctgttcgtgggcgtgtccgtcgcggcgaacatctcgggcggccacctgaacccggccgtgacgttcgggctggccgtgggcggccacatcaacatcctgacgggcgt

SEQ ID NO: 290874 - DNA, 388 bp, Zea mays
cgtcaaagccgcagcaagtgcccagaaggccagaaccagaaccaagcagctcgttgcaacctcatatcatcccctgccacgcacctccgtccgccgcgccatggaatcgaggaggagggccgtgcccaccgtgaggatcgacgtcggcaccacctactcgtgcgtcggcgtgtggcagcacgaccgggtggagatcatcgccaacgaccaggggaaccgcaccacgccgtcctatgtcggcttcaccgacaccgagcggctcatcggcgacgctgccaagaaccaggtcgccatgaaccccaccaacaccgtcttcgatgccaagcggttgatcggcacgaggttctctgactcgtcagtgcagagtgacatgaagctatggccgttc

SEQ ID NO: 290875 - DNA, 367 bp, Zea mays
aaaccggtccgagcggaccgctgaaaccagcacaacacgcaaagcagcgatccgacatccgagagatggacgcggtgatgttcgggctggagactcacctgatggccgcgctgcagcacctgctggacgtgccctacggcgacgccggcgcgggcggcgacaacaagacgggcagcggcggcagcgccacgcgcacctacgtccgcgacgcgcgcgccatggcggccaccccggccgacgtgaaggagctgcccggcgcgtacgcgttcgtggtggacatgccggggctgggcacgggcgacatccgggtgcaagtggaggacgagcgggtgctggtggtcagcggctagccgcgccgggaggagcg

SEQ ID NO: 290876 - DNA, 410 bp, Zea mays
ctctaaattaagatcatggattggcttgggcagtcacagtatgctacccaaacagtctactggtcatctttatcgtcagcaatctcagaggtagtattctcaaagaacgcgaccgtgaggctactcgtcgcctactgggcgcatctcatcccaaacaccgagaaatacctgaagagcctactgtactccaacgttctctgcgcgtcttcggcgtacaaccactgcagcggcaaggtcgagatcaagtactacgtggttcctgggcacaacgagaccgggcctgcgctgtcccagggcggcgccgcgacggggagccgttaccctggcttcaccagggtgaaccacggcaagtacgccgtcagcgacgtgagggcgaacgtcggcaccagcaacctcatctgggactactt

SEQ ID NO: 290877 - DNA, 307 bp, Zea mays
cgtgggctagcatggatagatgatagcacagttttacaaacatcaaatatcccttgcattgcttgggcaagtgtcatttttaggctctccaagtcagttaatctgcttcgcaggatgaacattcgcagccctacttcaagcctccccatcttgacaaccccatttgcactcttctgctgtctgaaaccacgatggcatttggcaggtcacttgtcactgacagcaacggtaactacaaaggacctctcacactttcactaaagcaagggtaagcgtaacaattgcgttaattaattgatcatactac

SEQ ID NO: 290878 - DNA, 219 bp, Zea mays
atacgatgcgactcacctcagaggcagcatcaagctctagtccgagctcgtcggctgcaacaaggtaacagtgccagcaggcatggacgggaagggggaggacgtccgcctgggcgccaacaagttgtcggagcgccagcccatcggcacggcggcgcagggcacggacgacaacgacgacaaggagcccccgccggcgccgctcttcgaacccgggga

SEQ ID NO: 290879 - DNA, 323 bp, Zea mays
ctcaaaagtgagtcgtgttacagcacaagcaagaaccacacctcctcccttcgcctgtgatcatgtcgtcttgctgcggcggcaagtgcgggtgcggctccagctgcgcctgcggcagcggatgcaacggctgcggtaggtaccctgacctggagaccgccgccacgagcagcgtcaagaccacggtcctcgccgcgccgaccatcaatgcgagcgccggccgcttcgaggcggtcaccgagggcggtggctgcgactgcaacacctgcaagtgctgcaccagctgcgggtgctcctgctgcattctgcaaatgagctggccc

SEQ ID NO: 290880 - DNA, 400 bp, Zea mays
atccgaaaataaataggttgattatgttgcatgggtttgcgatcaggatgcttatgcttgtagcggtcagaaatgctctgctcagtctgttctattcatgcacaaggtaaagactgtcaaatgtgtgttactttgctaattatctaggattgttattgtggactgttcatcgctgatgaagcatataatgttcctggttggttgatctatgacttgtgatcggtcctttggtgttttattttctagtaagttggtcaatctcctagggttgttacctctctaatcatattgatctaaaagttttggatcattatatatctgctcaagaggattagaaaagaaaagaaaaaggcatcgatcgctggtactgggagcgggtgacagttattgtgaatgcatg

SEQ ID NO: 290881 - DNA, 394 bp, Zea mays
actcgccggtcgacccacgcgatccagagcgggtcataatggggaaggtggagcttttgctttgtactcacttctttgcaggcatgcaaaattcagtctgctgccaaaccagcaagcagcagatgaagagctgtcaacttattaccatccaggcactgatcgagctgtggtttcctctccattcacaaggtttctggagaagcacaggaagctgcggacctgtttacttctttttgtactgtttggtgcctgcatggtgataggtgatggtgtctttacaccagctatatctgttctgtcagccatctctggattacaagatcctgccacaagtggactaggagatggatggatcgtattcatcgcatgtgttatgcgtgttggtctctttgct

SEQ ID NO: 290882 - DNA, 397 bp, Zea mays
gacccacacgtcaagccctatcacaccaggctctggatcagggcttataaacacaaaaatgtcacccatgacagtagctcgaattgctagtgaagatgcacgtgctatttgcatgcgggagtatggatcatctcctaatgtcgacatatatgggaatgttaaccccggatcaccatatattacaccacatctacatctcatgatttttgagctggtgaagaactcccttcgcgcagtacaggaacggtatatggattctgataagcttgcacctccggttcgaatcatagttgctgatggagcagaggacgtgactattaagattactgatgaaggtggtggaataccaaggagtagtctctcaagaatttttacgtatcgctatggtacagcagaa

SEQ ID NO: 290883 - DNA, 369 bp, Zea mays
aaggcggccattaattcatcgaagggttaagggcccccttaaccaccgggaccctcaaattccctcgcccggtgggacggaacctctggtgcaccgcggcgttgaaggactggcaaaccctgccgcccaaagtcgcctcccagctcatcgccagcgcgcagcacgtggagggcgaccgcggactgggcagcgtcaggcagttcaagttcacctcactcatgccgttcagcttgatgaaggagcgtcacgagttcctgcacgcggacaagtgcgagtgcaagaacaggctcatcgagggcggcggcatccgcgtcgccatcgaaacggcgacgtcgcacatcaaagtggagcccgcggccggcggcggga

SEQ ID NO: 290884 - DNA, 319 bp, Zea mays
taagttggacggcttccccttccccgcctaacaattcctcccccggttaagggttcctaaggttttgttgaagggccaatgccgatggcgatgttgaataacgttgcctccgccggggggcttcctggggcaacaacaaccaattcccgggaaaatgcctccgcgccatacggcgagatcctcgactccaatgtcatcaacgaccgtgatacagtgacgtctcgcagcttcagcatcgttaccttcgcctctcacaactccatgctcgacgctatctagaacatgaacagcacggagctcgacggccgtaacatcaccg

SEQ ID NO: 290885 - DNA, 373 bp, Zea mays
  unsure (1)..(373): unsure at all n locations
agcctctagagtaattcctattactctccctcgatgcctttgccggcgatgagcgcccattcgcccatcaaactgattagatggaactctctctgtctcaactgagctgtaaggacattancgagctcattgctgctggcaaggataattttgcatcagtctcatgtagcggtggcggtgtggctgttccagcagctgtccctgctgctggcagcgctcctgcagctgaggcgaagattgaagataatgtggacgacaaggaataaagtgatgacgacatgggctgtcagcctcttcgactaagcctgtgcaatattcaggagtattgtttttgagtcacggaagcaaatcgactacaagtcctagtcatgtt

SEQ ID NO: 290886 - DNA, 317 bp, Zea mays
tctcactaccccctccggtccgggtccgggtccgtaaggtcctccggggttcggtttcctgggtaaccggatcaaaatggcggcttcggatgttgattaccgcggcttcatcggcggcctcccctgggccacggacgaccactccctcaacaacgccttcagcacctacggcaaggtcctcgagtccaagatcatcctcaatcgggagacgcagaggtcccacggcttcagcttcgtcaccttctccacggaagaggcgatgcggaacgccatcgacggcatgaacggcaatgagctggacggacgcaacatcaccg

SEQ ID NO: 290887 - DNA, 384 bp, Zea mays
acagacagcagcgaggagcagtacctgttggctggattctctgcagtctagcagctagtcgagttaagtttcagatacacatggtgagcattggcaaaggcacagccacctggaccaccgtgccgcagtcggcgccgtcgacaaggaagctcatcacgatcctgaacatctatggcggcggcatcagcggccttatcccggagaccatcattgcgtacctcgacgccaacctccagtagctgtacggctcggacgctcggatcgccgactactacgatgtgattgcccggaccagcacggtcgtcctgatcgcgtcgatgcaggcggtgccggacgagaacaatcaggcgctgttcaccgccatgggactcatcacgttctacc

SEQ ID NO: 290888 - DNA, 373 bp, Zea mays
acaagcctctagactgactcatctaatcaacccaatccccctcaaccccaacaaccccgagttccccaacccgaatggccccaaaggccgaaaaaaagcaagcggagaaaaaacccggcggccgaggagaaagcggagaagacgaccgcaggcaagaagcccaagtccgagaagcgcctgcccgcctcgaagtcctccggcaaggaaggcggcgagaagaaggggaagaagaaggccaagaagagcgtggagacctacaaaatctacatcttcaaggtcctaaagcaggtgcaccccgacatcggcatctcctccaaggccatgtccatcatgaactccttcatcaacgacatcttcgagaagctcgccggcg

SEQ ID NO: 290889 - DNA, 260 bp, Zea mays
actccctatagtatgtcgtattacagtgcgcatctggataaccggtcaaagcccaccctcttctccaaggtaagactccacagggtgaagaacataaccgggctggtcgaaacttttgcgaagtgcgctaagctgatggagctggtaaaccttgtcatcgttgccgggtagaatgatgtcaacatgtccaatgacagggaagagatctctgagatagagaagatcatgaactcatcaatacccacgacttgctccggcaa

SEQ ID NO: 290890 - DNA, 333 bp, Zea mays
gtactatgattcttgaagagatcgagcttcttttgcaccacaatgtctaggatgtcttgcacctgcggataaatctgcggctgcggctcaagctgcaagtgcggcaagaagtaccctgacctggaggagacgagcaccgccgcgcaggccaccgtcgtcctctgcgtggccccggacaagaaggccgcgcccgagttcgtcgaggccgcagcagaatccggcgaggccgcacaaggctgcaactgccgtggcaactgcaagtgcgacccctgcaactgcggatcacatcgatcgacgaccatggatatgattactatctatctaacttgtggt

SEQ ID NO: 290891 - DNA, 259 bp, Zea mays
aacctcttccgccgcttcaacgcaggcgagctcggctccggtcacccgtcgatccacgcaaccatgtctgcagcagcggcaagtgaaaccgcgggggaagacgttccccctggacccaatgtccgtggaggagagtttgtccttggtgttgctcacatctttgcatccttcaatgacaccttcattcatgtcactgatttgtctgggagggaaactttgggtcggatcactggtggcatgaaggttaaggctgatcgtg

SEQ ID NO: 290892 - DNA, 440 bp, Zea mays
gggtcgatacaagcgtctacagtgcatgtctcatcatcttcatcgtcctagcacagctagcgcttgctcaccttcgtctgtgatcatgtcttgcagcaacggcatgtgcaactgtcgctcgagctgctcctgctgcagctcatgcaactgcatatcgactgacgtggataccgccgccgccagcagcatcaagaccatggtcttcgctgtgctgaacatgaaggccagcgcctgcggcttcgatgcagccaacgagggcggcggctgcgactgcaatacctgcgactgcggcaccagctgcggctgctcctgctgcagctgcaactgatccagcccgctcggccaggcgatggcgcacgatagtctagatgacgacgacgacgacgcgtataaatatactaacatcgtctagataagatcctgtcaactgctaccgccat

SEQ ID NO: 290893 - DNA, 371 bp, Zea mays
acggacgcgtgggtgcggatcctcgtggcggacgcggacgcgtacgtggccgtcgtcgacgagaaggtcatggtgaagatcgggacaaggtacgacgtgagcagcgtggtcccgtcggatttccacccggcggcgcacggcaaggactactgcgtctgggagaaagcgagcctccgcgtcccagcggggcgccacctctagcagctcagactgctcagtcttgtgctgcattgcaaacacagcagcacgacactgcataacgtcttttccttagtttcctaaattttaccttttcctagttcaatttcatatatgtatttctacatgtacacactatcacaatcagataaataaacaagcttagtcacctg

SEQ ID NO: 290894 - DNA, 394 bp, Zea mays
cgggccgacccacgactcaacatcgcccctgcaaatatagtctcggcggctctagaagacgatgggcaaggacgacgtgatcgagagcggcgctggcggcggcgagttcgctgccaaggactacacggaccctcccccggcgccgctgatcgacgcggctgagctggggtcctggtcgctgtaccgcgccgtgatcgccgagttcatcgccacgctgctgttcctgtacatcacggtggccaccgtgatcgggtacaagcaccagacggacgcgtcggcgtcgggtgccgacgcggcgtgcggcggcgtgggggtgctgggcatcgcctgggccttcggcggcatgatcttcgtcctcgtctactgcaccgccggcatctcggggggccacatc

SEQ ID NO: 290895 - DNA, 252 bp, Zea mays
aacaggagtaacaggccatcgccttaccagttctggtcccagatcacttaaggagtacgtgccgcgtgctcatcactcagccccaggggaggggagttcaagaacggccgcgtttctgcaacgaacatctattccctgtgcatggcgacgccccgctccgacccgcttaaatgggggaaggctggcgccgatctgatgggcatccaactgtacgaagtcaagcggatcgtggcgtagtatcggcatcccttg

SEQ ID NO: 290896 - DNA, 106 bp, Zea mays
atttctgctcaacgttgtgcgagggcaagatggggacggacctggtcgtgtgcaaggagtcgtgcgcgctctcccatcagtctatctctggtgctgtccggtagga

SEQ ID NO: 290897 - DNA, 351 bp, Zea mays
gcacagacgacactcggacacacatcggctgtgcagccgtcaactcaccccaagtttatgtcggccaatggatcactgacgtaatgatgggatccgccagcatgtggaccctctagatcgcctcccccgtggcaccacatcgcatgttcggcaccaccgtgatagacgggcagtaactgacgctcacagtctcgtcgcaagtcgtcaccaactctgagtccgtttagggtgactgctgcatcggaaccgtcaggcagttcatcttcaccacagtcatccggttcaacatcacgaatgagcgtctcgactaccccgactcggacacgtgcgagtgccagaacacgctcatcg

SEQ ID NO: 290898 - DNA, 389 bp, Zea mays
ccgcccccctcctttcaactcgctcgctcgctcgccttccatctttctccctctgtcggcagtctgcagcagcccagcgccgtcgcgcatgcaggaggcgtcatcggcggcggcggcgggggccgagcccggccgtcgggcggcgcagcatcagttcgccggcgtggacctccggcggcccaaggggtacgcggcgccggcgccggcgccggcggtgggcgacggggacccgtgcccgcggtgtgcgtcgcgggacaccaagttctgctactacaacaactacaacacctcccagccgcgccacttctgcaagggctgccgccgctactggaccaacggtggcacgctgcgcaacgtccccgtcggcggcggcacccgcaagaagccct

SEQ ID NO: 290899 - DNA, 362 bp, Zea mays
  unsure (1)..(362): unsure at all n locations
acctaaaaccatctgcttcaacccttaaccaaccccaaatttaatccggccgttcattaacggaattattaatggccccggcaaaaagcgggacccccaaaatgccttccccggtggccccgaaccgccggttcgcccccgccttaatgaatgggaaaacctgtgcgccaaaggtcgcttccaacttcgtcgcaagcgcgaaccccttgaagggcaacggcggctttggaaccttcaggcatttaaacttcacctcattcatgccgttcagcttcatgaaggagcgtctcaagttcctcgacgcggacaagtgcaagtgcaagaacacgctcatcgagggaagcggcatcngcgtcgccatc

SEQ ID NO: 290900 - DNA, 246 bp, Zea mays
agcttagctccactccaactcgaatcacagtcatgacaaaatcccgagaacaagctaaagggccttaaaaatcccgattaataggatccccctgggaacccaccagaaggtgtacgacacgggcgccctcaaggcggcgttcgctgagttcatctcgaccctcatcttcgtcttcgccggcctacgctccggcatggacttcagcaagctgaccagcagcagcccgacgaccccggcgggcctgat

SEQ ID NO: 290901 - DNA, 381 bp, Zea mays
atgctctcattgacaacagacaacaagcagtctggaaccttcaacctgtctggatccattagacggcaggttctgtctcccgctagttctcttcttagtccatgtagggggtgtttggtttgaggaatcactttatccaaaatgtagtggtgcatcatgggtccattcctcaaatttgttgggatgacctcattcctcatattagtactaactaaataactataaggaatgaggtgatgatggatcaactcaatccattacacaaaccaaacaaaaaattgaggagtgagaagacgatgacctagatcattcttcaaaccaaacagcctagtagtgttaaatgttttgcataccatgggcaccgttttgataaagttgtct

SEQ ID NO: 290902 - DNA, 340 bp, Zea mays
cactagtctgttgaagctcaacctgggccaatcttacgtaagaatggaaccacccaaggaatgaagggaaaggagaaggatttcgccttgggcccaaaaagtttctcggagcccaacccaatcggaacggcggccaagggcacggccaacagggactacagggagcccccgcgggccccgctcttcaaccccggagagctcatgtcctgatctttctaccgccccggtatcgcagagttcgtcgccaccttcctcttcctctacatctccatcctcaccgtcatgggcgtctccaattccacctccatgtgcgccaccgtcggtatccagggcatcccct

SEQ ID NO: 290903 - DNA, 341 bp, Zea mays
gcctggcatacgtggcagactccaactgtctactcctcggttcgcgaatcttccacagagagggaaactgtaggactcgcttcaagctcctcatctcgcgcaggggggtcgcctgatatcacacatacaatggcgaatgcagttgctgtactcgccggtactgatgtcaagggcatcatcatcttttcacaggacggggatggtccgaccaccgtaactggaagtatctctggactctgaccacagctccatgggttcaatgtgcacgcgcttggtgacactaccaacggctgcatgtctactgggtcacatttcagtcctgttcgcatagaccatgatgc

SEQ ID NO: 290904 - DNA, 355 bp, Zea mays
acaacaaggcaccacacctcttcctcctcttcctcctcctagcacagctagcgcctgctccccttcgtctgtgatcatgtcttgcagcagcggcaagtgcaactgcggctccagctgctcctgcggcagctcatgcaactgcatgtcccctgacgtggagaccgccgccgccagcagcatcaagaccatggtcctcgctgcgccgaccaccaaggccagcgccggcggcttcgaggcggccaccgagggcggcggctgcgactgcaacacctgcaactgcggcaccagctgcggctgctcctgctgcagctgcaactgagccggcccgcccggcccggcgatggcgcacgagagt

SEQ ID NO: 290905 - DNA, 368 bp, Zea mays
atgggctacagcctacagacctacagcaagcgctggccatggcagagcattttgtgctgtgccccgtgatggcagtactattactatccatggacgtcctcggcgccgccgccggtgtcttcaagccgccgccggcgatgtacgtgttcggcgactcgacgctggacgtcggaaacaacaactacctgccgggagcgggcgtcaccagggccaacaggccctactacggcgtcgacattcccggcggcctttccaacggaaggttcagcaacggctacaacaccgccgatttcattgcaaagtgcatacggttcatgagcagccctccgccgtacctgtcgctgctgggagcagcatgctgcggccgc

SEQ ID NO: 290906 - DNA, 352 bp, Zea mays
acccacgcgatcaaatatgatacaggaattattaccacaacaaactaagggggtgtttggttttagagacgactttttagtccctagtaaacaaactctacctattcatggaggctaactgactcatagacatagataggtacagctgcagcactactaatgaggttgtaaatgttatgcagcacattggggtagaacgttactgaggctgatcttcaggacatgatcaatcaggttgatgatgatggcaatggaatcatcgtctttcctgagtttctcaaacttatggtacgtaagatcaatgacaacgactctaaagatgagctcaaggaggccttccgtgtgttcgaca

SEQ ID NO: 290907 - DNA, 295 bp, Zea mays
atgtgctgtgtcatcaatgtggttctggctgacacagttgagaacgtcgtggtgtctgatctcgttgtggactcaccgtgctgtcttctcacgggtcactacggctagaccgctcccatggataggatcatcaacgcacaggccttcacggactcgggtatagaggtctagatgtcttcacactaggcaatggccatcaacccatagaatcctatcgtcactgagctgccgaagcttgcccacgctgacatcagtgacaagcctgtctgggatcacgtgatgctgctgttccata

SEQ ID NO: 290908 - DNA, 402 bp, Zea mays
agagccggagctggaaaagaaggtgaaattcgtgtacactgacaatcctgagagccagaggataatggccgacatgtttgacatggagaagctggactccgcatttggtggccgcagcgcgtctggcatcgacgttgccaagtattccgagagaatgcgaacaggagatcagattaggggtcttcgctaacggcaaatggaatactgctatctcacagttcgtcaagaaactgttcagataacaagataattaaaatggatcactacggaattctagtggttacatcacaacagaccaggatgaattatgatgtctgctagatatattattagctctgaatgattgggataccaggtttttgatgatccgtgtaatgagatgacatgacaatataaaaaaca

SEQ ID NO: 290909 - DNA, 352 bp, Zea mays
agggggtacccgaccagacgtacgacatgtggtcggtctccggtgtcagcgcctacacgggcggggtctgggtggcggcgctgcaggcggcggcgggcatggcgcgcgtcgtcggggaccgccccgccgaggcctacttccgcgcgaggcgggacagggcggcgcgcgtgtacgacgccgagctctggaccggcgtctacttccgctactacaacagcggcggctgcggcgccagcgagtccatcatggcggaccagctggcggggcagtggtacgcgcgagcgtgcgggctggagccggtggtggaggacgccaaggcacggagcgcgctggcgaccgtgctggactacaa

SEQ ID NO: 290910 - DNA, 347 bp, Zea mays
aggtgatttcaccgatgttcagatctagcgcgcgccaagcatctcttcacggcaggacgcgaatatcgcattcaagcactgacaagatggtgaagctctccttcggatgcgtcgggaactccttcagcgcgactaccatcacggcatacgtggccgagttcatcgcgagtctcatcttcatcttcgcaggcgtctgtacctccatcaccaaaggacaactgactaatgcgcgagcgactggatcagtgggggctgatctgggatcgccatggcacacgcgatggtgctgttcgtgagcgtgtctgtcacgacgaacatcacggggcggcacttgaaccgtgccgtga

SEQ ID NO: 290911 - DNA, 322 bp, Zea mays
aggaaattgtcagtgcattaggctggtgacacggtgaggagctagcatgagcctgtccctcgacctgatgagctttcacaactaactttcacgcatggtctccgtaggcgtatgcttggaatatcataccctgagttgacatagatgcaaatgcgggcaatttttgaagctgttagatcactgacaaagcataagcgctgagaacacctgaatacgctatttggacaagtgttcgcatcgataacggttcatcttgttgtgacatcacaagatctgcagcatcagttgacgcttagccaccaagatatcgagaaagtgttcg

SEQ ID NO: 290912 - DNA, 349 bp, Zea mays
  unsure (1)..(349): unsure at all n locations
agctggacatgctcaccgcgtggagcaacttcagccgccggggcaagcctgaagtggaccatcacgctcttctccctctccaccctgcccaacacgctcgtcatgggcatcccccggctcaagggcatgtacggcgacttctccggcagcctcatggtgcagatcgtcgtgctccagtgcatcatctggtacacgctcatgctcttcatgttcgagtancgcggcgcgcggatgctcatcaccgagcagttcccggacaacgccggggccatcgcctccatcgtcgtcgacccggacgtggtctccctcgancggcgcagggacgccatcgagacggaggccaaggtca

SEQ ID NO: 290913 - DNA, 390 bp, Zea mays
  unsure (1)..(390): unsure at all n locations
gcggcgtcgcgcacgccgtgctgctgctcaacagcaatggcatggatgtgttctacaggggcacgtcgctgacctacaaggtcatcggaggtcttctcgacttctacttcttctcgggcccgacgccgttggccatagtggatcagtacacgtcgatgatcggccgtcccgcgcccatgccttactgggcattcgggttccaccaatgtangtgggggtacaagaacctttcagtggtagagggcgttgtggaaggttaccgtaatgcccagataccgctggacgtgatctggaacgatgacgaccacatggatgccgctaaggacttcacactcgatccggtcaactacccacgccccaaactgctggcgttccttgacaagatccatg

SEQ ID NO: 290914 - DNA, 274 bp, Zea mays
agaatcctcccccccctgggtggcccggccaaaatggcttgcccccccgttacctccaaccccaacgcacaaggaggatccaagggcgacaacaaccggaagtttgccggccggaacaaaggacttcccgggaaacaaaaacaacttcacctccaaggaactcgcccgccttcccgtcgattaacacaacaagaagggcaatgctcttctggggttcgaaaaacttgtgaaaggcaagacacaagtggttgctggcacgatgtactatctcact

SEQ ID NO: 290915 - DNA, 213 bp, Zea mays
tgtgacctccctgggaacggcagcgagcttcacctccaccaactctcccgcttcgccgtcgatgagcacaacattaacgccaatgctcttctggggttcgagaagcttgtcaaggccaacacacaagtggttgctggcacgatgtactatcgcactattgacgtgaacgatggcaaagtgaagaggctctacgaagctaaggtctgggagaag

SEQ ID NO: 290916 - DNA, 324 bp, Zea mays
cacaatccccagcacgctgcgacactgtgccgtacgagtggcatgttcctcaagtgctgagcagtcaccggtggtgaccgacagtatcagcaatccaggaaacaagcagatcgacagctgcggtcgacgagcgctacactcaatcgcactcgctcatcacagtcctctactactgatttgccagacacaaactcatctggacatccatcacatgcccatcttcgccaaaatatgccataactacctacacaaagtcacagcgcctgtaactatctgaacacacagctttgactgtatctaatactcttgctatcgcaatttgtc

SEQ ID NO: 290917 - DNA, 264 bp, Zea mays
cacgcatctacgatgagtcggtcaacaacgacgagatcgccgctgacctcaaggagcacgtcatcaatcacgtgatgcctgataagtacctcgacgagaagaccatcttccacgtcaagcagtctgggcgctttgtcataggtcggccttacggtaactccggtctcagcggacgcgcgatcatcaatgacacttcccgccgcttgggaacccagagtggtggctccttctcacgctgtgacggcacattagtcgacggcagtg

SEQ ID NO: 290918 - DNA, 370 bp, Zea mays
aacaccggccaattccaaatcccctcccgaagccaaaacccaaaaccaaaacctttaaccggcggcggcggcaacaacaagaatggcaatccggcaacaacggtcccaaagccccttccaagggccatcgacttcaccccggattgaaccaatgtcttcggacaatgaggtcagggaggaaaaggagctcgacctctcctccaacgacgttgtcaccaagtacaaggctgccgccgaaatcctcaacaacgctctgaagattgttgtgtctcagtgcaagccaaaagtcaagattgttgacctttgcgagaagggcgactctttcataagagagcaaactgggaatgtttacaagaacgcaaagaggaag

SEQ ID NO: 290919 - DNA, 252 bp, Zea mays
tttgctgcactgacctcgtcaagctcaacctctcggacaagaccgagtgagatgagcgtggaatacatatggatcggtggatctggcatggatcccaggagcaaatccaggaccctctcaggaccagtgacctatcccagctcgctgccccactggggctacgagtgctccaacacggattaggcgcccggcgaggacacggaggtcatccctgtaccggatgctatcggtacagacccaatcaagaggggc

SEQ ID NO: 290920 - DNA, 353 bp, Zea mays
aaacgcggcgacctcaggaaccggatcgggctcggaaggatcggcgcggagcaggatctcgtgtcaggcgttcgtcaaggaggacctgaggtgcgagatcgacggacaccatcgcagcgccgccgccagcatcggtcacgacggcagcgcttgggcgcagtccgagagctgcgccgacttcgagcctgaggaggttgctggtatcatagaggactttgatgaacctggtagtcttgcaccagctggtcttttcgttggaggtacagagtacatggagatccaaggtgaacctggagttgtcagccgaggaaagagaggcactgggggcattacgatcaggagaggcggcaggt

SEQ ID NO: 290921 - DNA, 338 bp, Zea mays
  unsure (1)..(338): unsure at all n locations
aaccatatttccgaagaaaccctggaaaccaacgaatttcggttggttgaaaccaataaacctaccggcaacctccaacattgtcccccttaaggccaacaaactttttcaaccccttctcgatggacctctgggaccccttcgacaccatgttccgctccatcgtcccgtcggcgacctccaccaactctgagactgccgccttcgccagcgcccgcatcgactggaaggagacgcccgangcgcatgtgttcaaggccgacctccccggcgtcaagaaggangaggtcaaggtcgaggtcgaagacggcaacgtgctggtcatcagcggccagcgc

SEQ ID NO: 290922 - DNA, 357 bp, Zea mays
aaaggcaccacacctcttcctcctcttcctcctcctagcacagctagcgcctgctccccttcgtctgtgatcatgtcttgcagcagcggcaagtgcaactgcggctccagctgctcctgcggcagctcatgcaactgcatgtcccctgacgtggagaccgccgccgccagcagcatcaagaccatggtcctcgctgcgccgaccaccaaggccagcgccggcggcttcgaggcggccaccgagggcggcggctgcgactgcaacacctgcaactgcggcaccagctgcggctgctcctgctgcagctgcaactgagccggcccgcccggcccggcgatggcgcacgagagtcgagag

SEQ ID NO: 290923 - DNA, 374 bp, Zea mays
ctcaagcaagcgagcaagcttaagccccacctcctagcaacatggagacggcctacgttgtcgttctgtcgttcttcttcatcgttgctatccaccgccttctcaaccgcggcgaaagcaagaatatgagcaagcagccgctgccaccgggccctcgcgccatcccggttctcggccacttacacctcctcgagaagccgtaccacctggcgtttatgcgcctcgccgcgcgctacgggcctgtgttctccctccagctgggctcgcgcgccgccgtggtcgtgtccaccgcggactgcgccagggagtgcctcgcagagcacgacgcgacgttcgcgaaccggccgacctaccccacgctgcacctgatgacc

SEQ ID NO: 290924 - DNA, 355 bp, Zea mays
gcgtccagcattagtgtaccgaaacagggtaacctcgtgctaactgggccatcattggccacctcggcatacagtccaattgctttcttcctctagctccatgatggcagcccgcaagccggagaagccaccgaggacgacgaggatatcgggaggatactctgcgactgcatcggcgacgacttctccaactataacagggccatagtcgagattgtccaaaccggctatggccacgctgaagtgctcgatgccgtcctgagcaacggcgtccaaagcctggtcaccgtcgtacttgctcgaccgccatcgtacacagctggtgtagaagacgccaccagcattcttgggagga

SEQ ID NO: 290925 - DNA, 394 bp, Zea mays
cccgcccaagccaagaccgatggcgcccaaggccgaaaagaagcccgcggcgaagaagccggcggaggacgagcccgcggcggacaagacgaccgcggggaagaagcccaaggcggagaagcggatccccgctggcaagtccgccggcaaggacggcggcgagggcaagcgtggcaagaacaagggcaagaagagcgtggagacgtacaagatctacatcttcaaggtgctgaagcaggtgcacccggacatcggcatctcctccaaggccatgtccatcatgaacgccttcagcaacgacatcgtcgagaagctggccggcgaagccgccaagctcgcgcgcgacagcaagaagcccagcaccacctcccgcgagatccagaccgccgtgcgc

SEQ ID NO: 290926 - DNA, 146 bp, Zea mays
agatactcacagatctcggagaacaaaacagccaattgtgttctgcaatactaagaagacagcggacatgcgtgctaaggatctggacaagtcaggcttccgcgtcacaacccttcatggtgggaagtcacaagaccagagagaga

SEQ ID NO: 290927 - DNA, 360 bp, Zea mays
aaacgttttcgtgctcaaacaaccaaaccttaatccccattaaggcccaagggctccagaataaatccatggcacagtccaacggctggcaacccaggctctccgttaaggaaaaaaaggttgaaaaggacccaacaatcccaaaaaggcccccaaccccttcctcctcctcaagggagaatttaaggaaggattccaaggaaaaccaccccaagttaaagcaagtctccctgattggcaaggctggttgtgacaagtgaagtcctgtccgattccgagaacgctcactacgtgtctaaggcagagaagctcaaggctgagtacaccaagaagatcgacgcttacaacaacaagcagtct

SEQ ID NO: 290928 - DNA, 194 bp, Zea mays
aagagagacttgccgtacaagaggattaacacgacttcgtagatatacactggcaccatgccacctgctgtggagcatcgtgccaggaggtgctcccgagatccagttgttgtgacagatggtacagctgggaacgccactgatctcatcacccagaatgtcataatggtcgaacgagtcagacaaagatgcca

SEQ ID NO: 290929 - DNA, 342 bp, Zea mays
aggacgagcacgcgtaccgcacaggatacgcttcaaatccactgatgcgactcagtcatcgtgcccccaaactcccaccccgcagcatcaccacgccgccgcacctcgtcgcgtcgcgtcgtcaccggcgtgaagatggtcgggccaggcctctacaccgagatcggcaagaagaccagggatctgctgtacaaggactaccagactgaccacaagttcaccctcactacctacacctccaatggcgtcgctgtaactgcttctagcacaaagaaagctgacctgatccttggcgagatccaatcacagataaagaacaagaacatgaccatagatgtgaaa

SEQ ID NO: 290930 - DNA, 414 bp, Zea mays
gaaggtttcacatttgttgtggctgatccatataacgaagctcttgaagttgatgtcatcgactgggatcaggttgggaaccatgaaaagatgggaatgaccatgatcacacttatcgaactcgcaccaggtgacactaaagttacaactcttaacgtgcgtagcaccatggacccaaatgaggtagagaatgagacatcacatggtgagcttactctacagctcatatacatccctttcaatgtcgatgatatagataaatacgatacagctagtgctgatgtgctagcgagcgctccagatggtactccagctggtgatgccgtgcttcatgtgactgttcatgacgcccacgatcatgaggggaaagatcatccaaacccatatgcagcaagtactttcaatggcgaagac

SEQ ID NO: 290931 - DNA, 332 bp, Zea mays
accccccaagtccagatcatttattgcagacatcagaaaccacacctttgtcatagaaaggactatggtacgatgtttaagattccagtgacgtcaagtaaatgcagcatcgatgcactcaagcttctaagactaccgccatggcatacatggtacaatgatgacggtgaggtcagtggatggacccacaggtagacgggactcaattttgtgagtgtgacgggagcatgtcacaaagtccacgttaacgacgagacaggttcgcatgctagatgaatcgtgcgcgactgggagctcaatgcctgtgcaatccagctgacacagcaacgtgt

SEQ ID NO: 290932 - DNA, 419 bp, Zea mays
gggtcggcccacgcgtctaaatcactcctcgtcaaaaagacccaaaccttcggtgacctcggtccggcggccgcctcgggtcaacatctctctaccccgcggccccgccgtcaaccgataccgcagcgctgggaaggatcacgggggaccggagcgaggcggggggcccgcggttttgtcgcccggatggcggcgcagcgatgacactggcggcgggagcggcgcggcgttgggatgcggacgatctgcgatgtgtgcgagagcgcaccggcggtgctcttctgtgcggccgacgaggctgcgctttgccggccttgcgacgagaaggtacacatgtgcaacaagcttgctagtcggcatgtgagagttgggcttgcagaccctaataaactggcacgttgtgatatatgcgagaattc

SEQ ID NO: 290933 - DNA, 382 bp, Zea mays
ctatccccgcgtggacgcgtgtagtcctagtctctcgccagcaccatcatcatcaatcacggcggcgatcccgccccgcctcgatcgcccacgctgcccgactggaaccggacgctgctgctgctgctgctatgctgacagcgacgacgatggggccatggctcatatcttgctccacggcacgctccacgccagcatcttcgaggccgaatcgctctccaatccgcaccgcgccacctgcggcgcccccaagttcatccgcaagccggactactgttctagcatgctcaagagaacgctcctgcactgcactagttccctttgatcactctaccctaagctcgtctccaacttgtggaacggattgacgataccgtgggta

SEQ ID NO: 290934 - DNA, 402 bp, Zea mays
tcaatgtgcaggttttggatctttgggtttgatgacatcagtgttggtgtgccctgatggaaaaaccatcgaagctgaagctgcccatggcacggttacccgtcatttccgtgtccaccagaaaggaggcgaaaccagcacgaacagcattgcttcgatctttgcatggacaagaggacttgcccacaggtacaactggtgtttgcttttttacgaccttctataacattataatatagtcggggggggggggagttttacggctagctgattcgcttggggtactcccttaattatgcgccgcagggcaaagctcgacgacaacgctagactactcgacttcgctctcaaactcgatgctgcttgcgttgagaccgtggagtccgggaagatgactaaaga

SEQ ID NO: 290935 - DNA, 381 bp, Zea mays
tgaaaacctaaggcgatctgttctgtccacctcatggatcagcgcacaggcacgcaacgttcacaggggttcggtttcgtgggtgagcggatcgagatggcggcgtcggatgttgagtaccgctgcttcgtcagcggcctcgcctgtgccacggacgaccactccctccacaacgccttcagcacctacggcgaggtcctcgagtccaagatcatcctcgatcgggagacgcagaggtcccgcggcttcggcttcgtcaccttctccacggatgaggcgatgcagaacgccatcgaaggcatgaacggcaaggagctggacggccgcaacatcaccgtcaacgacgcccagtcacgcggcggccgtggacgccgcagcggc

SEQ ID NO: 290936 - DNA, 234 bp, Zea mays
  unsure (1)..(234): unsure at all n locations
aatcnccgccgccgcaggcggtcacccatcgccaccaagatgcagatctttgtgaagactctgacggggaagacgatcactttggaggtggggtcgtcggacaccattgagaatgtgaaggcgaagatccacgacaaggagggcatccccgcggaccagcagcggctcatcttcgccggcaagcagctcgacgacggtcggaccctcgcgggcgacaccattcacaaggagtcg

SEQ ID NO: 290937 - DNA, 425 bp, Zea mays
cgcagcagccaaaacctacctagccgccgccgcaggcggccccccatcgccgccaagatgcagatctttgtgaagactctgacggggaagaccatcactttggaggtggagtcctcggacaccattgacaatgtgaaggccaagatccaggacaaggagggcatccccccggaccagcagcggctcatcttcgccggcaagcagctcgaggacggtcgcaccctcgccgactacaacattcagaaggagtccaccctccacctggtgctccgcctccgcggtggcgccaagaagcgtaagaagaagacgtacaccaagcccaagaagatcaagcacaagcacaagaaggtgaagctctccgtgctgcagttctataaggtggacgacgccacaggcaagggtgaccgcctccgcaaggagtgccc

SEQ ID NO: 290938 - DNA, 414 bp, Zea mays
ctcgcgggtcgacacacgcctctacatcgaccctgcatatatagtctcggcggctctagaagacgatgggcaaggacgacgtgatcgagagcggcgctggcggcggcgagttcgctgccaaggactacacggaccctcccccggcgccgctgatcgacgcggctgagctggggtcctggtcgctgtaccgcgccgtgatcgccgagttcatcgccacgctgctgttcctgtacatcacggtggccaccgtgatcgggtacaagcaccagacggacgcgtcggcgtcgggtgccgacgcggcgtgcggcggcgtgggggtgctgggcatcgcctgggccttcggcggcatgatcttcgtcctcgtctactgcaccgccggcatctcggggggccacatcaaccccgccgtcacct

SEQ ID NO: 290939 - DNA, 386 bp, Zea mays
tacacgcatctaaattgagtctgaatatatcgtctcagctgctctacaagacaatgggcaatgacgacgtgatcgagagcggcgctggcggcggcaagttcactgccaatgactagacggacgctctgccggcgccgctaatcgacactggtgagctgaggtcctggtctctgtacggcacattgatcacccagttgatcgcaacgctgctgttactgtaaagcaccgtggccaccgtgatgggatacactcatcagacagacccatccgcgtcgggtgccgaaacatgatccggcggcatagcggtgctgtgcataccctgggccttcaggcgaatcatgttcgtcctcgtctactgcaccgccggcatctcgacgggccacatc

SEQ ID NO: 290940 - DNA, 384 bp, Zea mays
cccacgcgtccgcccacgcgtccgcccacgcgtccgcgcagatttttgtacccgccggctgggcctcggcctcggcgtgcaagaaactagaaagaggagcagacaaacaaaatcgattagaattaaccccaggccagaaacccactctctctctcccccgattcctttcctcgtcctcgtcctcatccgtccaggggagcaaacaagcaagcaagtaaacgggcgaggagctggatagaggccggcgacgcgaagcaaccgccgatcggagccgcggctgaggaggaggagcaagctcgagatggtgggtctcgtcggcggcagcacggcgcgggcggagcacgtcgtggccaacgccggaggagagacggagtacgtgcgccg

SEQ ID NO: 290941 - DNA, 396 bp, Zea mays
aaaaggcactgaagaagccagtcaatagcgagttctactactagtagctagcctgctgatctgttctgttgtttagttcgcaaagccttctgtttcggcgaccatggaggatgagaggaacacccagcagcaccagggcggtgaggcccagcaggacgccgccgatcaggtggacgtgaaggatagggggctcctggacagccttctcggcaggaagaagcacgacgacgaccaggagaagaagaagcagacggatgagctggcgaccggcatggagaagaaggacaagaagaagaaggataagaagaagcacggcgagggccacgaccacgacggcggccacagtagcagcagcagcgacagcgactgagatctggtgtcgcagatgtcgatgct

SEQ ID NO: 290942 - DNA, 418 bp, Zea mays
  unsure (1)..(418): unsure at all n locations
gcctcggctcgtttgatccccgcggggagctctagttccgccaagcgtgcgtaccggcgtccggatccgggaccgaagatgacggagtccctggtgcggaacaagccggggatggccagcatcaaggagatgccggtggtgcaggacgggccgccgccgggcggtttcgcgcccgtgcgcttcgcccgccggatccccacctcggggcccagcgccaccgccatcttcctcaccaccttcggtgctttcgcatatggcatgtaccaggtcggtcaggggaacaaggtccgccgctcaccagtcttagctacatgggggtggaatcatgcatgcanggcgctcaaagaagagaaaattgctgctcgcagtgctatactgccgatgctccaagcagaagaggatgaaagatttgtcaaag

SEQ ID NO: 290943 - DNA, 296 bp, Zea mays
tacacgcaactaaaatgcgtccgtatagcttggttttgccgaaatattgtgggggaggagtgataaggtcggtggggtttctatgttaaagtcgtggtctcgggcaatatgcgatttttctttatgccatgttttgggaaattttgtagctgcctaggcctcgtgctgttgtggtggttcattagtatgaagacgaaggctctgctggctatgggagtcctttttctttttgttagtattttgtttaaaactatgtatgaccgaattatttgtcatccttgactcaattctgctgc

SEQ ID NO: 290944 - DNA, 402 bp, Zea mays
  unsure (1)..(402): unsure at all n locations
tcggcccacgcgtccgatcacaacgaacagaagctctcgatctcaccgacaccgaggaagaagagatcaatggcgtccgagcagggagtcgtgatcgcgtgccacagcaaggctgagttcgacgcccacatgaccaaggcccaagaagccggcaagctggtacgcgtccccgtgcctcgtcttcctcgatccccattcccgtgattttgtttggaaagctgtttaagggattccgcggttcaaatcgattcgtctttggtttccttattatgcggtcgcccccctgttcaaatttgctctgaatcgcatctgggatgcttgtgttcgggggtgattaaggtgcggcgcgtgtantgggcaagattttanggattttagcgggtccgtacagtccgtctccgt

SEQ ID NO: 290945 - DNA, 183 bp, Zea mays
agggatacggagctcgctccgttcttttttgtaatcgccgagatggaaattgtatgacaacccttcttgttccacgcatagcatcctgagaggtgactgtgtcacttttcctgtccggtaaagtggcagttatgatggcgcaatatgaagaaaaaaggagggtgctctagacgatggaagctt

SEQ ID NO: 290946 - DNA, 377 bp, Zea mays
agcaagtgtgactgaggctctcgctgctcctgcggcatctcatgcaactgcatgtcccctgacgtcgtgaccgccgccgctagcaccatcgataccatggtcctcgctgctccgaccaccaatgccatcacctgcaggttcgaagcagccacccacggcggaggctgctactgcaacacctgcaactgcagcacgagctgcggctgctcctgctggagctgcaactgacccggcacgcccggcacggctatagcgcacgtagactctagaggacgacgacgacgaggcgtataattataatatcagcgtctaaataatatcctgtcaactgcacccgccattagcgatccatggtccctcctggggttcatgttcat

SEQ ID NO: 290947 - DNA, 255 bp, Zea mays
gggtcacaacccttggctctatggactttcatcgctaccatcgccagaacccacggccttctgttgcaccagaacgtgcgcttgcactttcacgaccttccagctataagaccctgggtctggcgacagtgcactctaatgagcagatgctgaggctgatacttctccgtcctacgcagaagactcgggtcgagactatgcggaaccagatcggaatcaagagcactgtgattcggaatctcgctaagaattgcc

SEQ ID NO: 290948 - DNA, 252 bp, Zea mays
tactctacatccatgtggaggttgctacatcagataactgctattgggtcagcacaattcacttcatcggccgtcattttacaacctctagacggggaaactgctgccgtttcccaacataatcgccgtgtatcagatcgccctttcaccagctggcggtataacgtggaggccagctccgatcacacttctcatcaattgatcatcctgaatgcagaatgggacgcgcactgtaccagagcatcaaccgcg

SEQ ID NO: 290949 - DNA, 371 bp, Zea mays
cacaggttgtccttaccaccaagtcgacatcaattgtcgttcatagcaacatccagtaacaagttactaaaagggttgcacagatcaaaagtctcattaatgcagcacaccaagaatattaaaaggaaaagctcactgatacgatagagattcttgctgacgatgttgctgtcattcatgtatcgtggttaatcatacttcatgtatcgcgtagcttgactcgtgcgagcaatgacacaaactgatctataatacatgaacttgagatttgtggataccctatatgcaactaaggatgccgttcaagaacgtattatagtacgcgtaggatgcactcttttgctgcttgcatctatagtcaactccatcaa

SEQ ID NO: 290950 - DNA, 338 bp, Zea mays
ctctaaagtgagtcggattaagcacaagcaagaaccacacctcctcccttcgcctgtgatcatgtcgtcttgctgcggcggcaattgcgggtgcggctccagctgctcctgcagcagcggatgcaacggctgcggtatgtaccctgacgtggagaccgccgccaccagcagcgtcaagacgacggtcctcgccgcgccgaccaccaaggctagcgccggcggcatcgacgccggcaacgaggggcggcgctgcgactgcaacacctgcaagtgcgggaccagcctgcggtgctcctgctgcagctgcaactgatctgggccggcccggcgatggcgca

SEQ ID NO: 290951 - DNA, 155 bp, Zea mays
acggaagtggaaagacaaagagggatagggagctcgcctccttcttttttgtaatcgccgaaatggaaattgtatgacgacccttcttgttccaggcatacgaccctgagacgtgacggtgtcacttttccggcccggtaaagtgacagttatat

SEQ ID NO: 290952 - DNA, 278 bp, Zea mays
aggactcttgggagcaagccattcagctctccttactcccgcatagcacccagtaatttattgccagtcccgccgtccagagggcaccactctgcctgctcatcctcgccatcctcgctctctcggccaccgccgctgcggctaagtctggcttcacgggctcgaaccagatgcgctctgtcaccgagagttctgcctcctcactcgggtcaacggtcctcgcagcactaggaggaacacgttaagcgcttcgtgtcgcacgcttcatcgtcaggtac

SEQ ID NO: 290953 - DNA, 324 bp, Zea mays
gcgttcgcaacaaaggaacaaaactcctcctcctcctcctcctcctcctaacaaaactaacgcctggtccccctcgcctgtgattaagtcctgcaacaaccgcaaattccaatgttggtccagccggtcctggcggaactcaatcaactgcaagtccctaacgttgagaccgcggcgccagcagcatcaagacacggtcctcgccgcgccgaacaccaagccagcgccggcggcttcgaggcggccaacgaagggcggcggctgcgactgcaacacctgcaactgcggcaacagctgccgctgctcctgctgcagctgcaactg

SEQ ID NO: 290954 - DNA, 352 bp, Zea mays
gggtcgagcccgcgtccgaacaaagcagcagcacaagcaagaaccacacctcctcccttcgcctgtgatcatgtcgtcttgctgcggcggcaagtgcgggtgcggctccagctgctcctgcggcagcggatgcaacggctgcggtatgtaccctgacgtggagaccgccgccaccagcagcgtcaagaccacggtcctcgccgcgccgaccaccaaagccagcgccggcggcttcgaggcagccaccgagggcggcggctgcgactgcaacacctgcaagtgcagcaccagctgcggctgctcctgctgcagctgcaactgaactggccccggccggcgattgcgcacgaga

SEQ ID NO: 290955 - DNA, 308 bp, Zea mays
cccacgcgtccgcccacgcgtccgcggacgcgtgggcggacgcgtgggtttacactgcatttaccgagtataaagtgcttgccaaatgaactgtgtgaatgctactggcatcgctgacctgattatgctgttgcagtgctgagcattgtgggcgcaactgttagagatccgactttattcctgaaggcatttgtctgaactttttcggaaatgagtgccggtggtgcttttggtggaaatagggggctgaggcctgtaccccctgaaaaaggtgtattcccattggaccacttacatgagtgcaactt

SEQ ID NO: 290956 - DNA, 409 bp, Zea mays
ggagaatacatctgacaaagatttaaaccagggaactcttgttatttttaacttggatccatcggtttctaatgaagaggttcgccagatttttggggcatatggggaagtaaaggagataagagagacaccaaacaagaaacatcataagtttatagagttctatgatgtaagagcagcagaggctgctcttcggtcactgaataaaagtgagatagctggaaaacgaatcaagttggaaccaagtcgtcctggtggaacacgcagaaacttgatgcagcagctcggtcacgatttggacaaggaggagcccagaagctacagacatcctcatgttggttcaactattgctaactctcctccaagggcatgggctcactatagtagtccaaacagatacaatatgctg

SEQ ID NO: 290957 - DNA, 374 bp, Zea mays
  unsure (1)..(374): unsure at all n locations
aggtgaccgagcatgcccgtcgtcctcttcctcctggtggccggctgcagcaggcaagatgccctttgtaaatatagccataggtgacggtcccgcgtgcgtgcggccgtgcgggagcgtcgtcaaatgggaagaaaaccgcgaggtgtgactgtgatgtaacaccccgtctgtaacattcgccagagtatataggaaatccatgttaatataccctccattccaactgacaaaggcatgcgctggcgcgtggcggcttgctgccggtgcagaacctcttctttctcctcacccgggcctatttggttcagcttttttctgaccagtttttctgagaatctagctgtggaaagaatctggctgtgagaganaaa

SEQ ID NO: 290958 - DNA, 307 bp, Zea mays
aacgacgaatgaggaacgaacggacaggttgttgcacagaagcgacatggctttcgcgcccaaaacgtcctcctcctcctcgctctcctcggtgttgcatgcagctcagtcgccgccgctgctcctgaagcggatgtcgtctaccgcaacaccgagacggaagtaagacgcggccgtcgtcgtcactaccagcataactgctaaagctgctgctgctgctgtcacggttcacatcgcaccgacacaagtgtcggcgacggagtcggtctctccatgcacaagatgcatgttacgatgagagacagag

SEQ ID NO: 290959 - DNA, 315 bp, Zea mays
ggccgaggcacgcgtcagtcccatcgcatcccatcccactaccacccatctcgtcgtccgccgattcgaccggttctccaacccagggctgtgatggcgacgaagaggagcgtgggcaccctcggcgaagcggatctgaaggggaagaacgtgttcgtgcgcgccgacctcaacgtccctctcgacgacgcccagaagatcaccgacgacacccgcatccgcgcctccgtccccaccatcaagttcctcctcgagaatggcgccaaggtcatcctcgccagccacctgggtcgtccaaaaggtgtccacccaaag

SEQ ID NO: 290960 - DNA, 416 bp, Zea mays
cccacgcgtccgatcgatgaactgccaataaatcccacccccatcttatggaggacgttgctttctgcttgtggaggccatggagatgtcgaacttggcaagcgtgtctttgagaggattcttgagctggacgattctcatggtggtgattatgtaatattctcgaatttgtgtgcaaacactggatactgggaagagatgaatagggtaaggaaactgatgagcgacaaaggtgtggtaaaggtgcctggctgcagctcaatcgagatagataacacggttcatgagttcttcgcaggagatggaaggcaccccaaatcacaagaagcacggaaaatggttgatgaagtgatcgattaactaaagcttgttggttatatccctgatacctcacatgtgtttcatgtcgaaatggg

SEQ ID NO: 290961 - DNA, 396 bp, Zea mays
cccacgcgtccggccagctgacggggttcctcgcagatccagatggtgttcttgatgtggtcccggcggacatggtggtgaacgcgacgctggcgtcgatggcgaagcacggcggcggcgcggcggggcccgggatgcacgtgtaccacgtgtcgtcgtcgacggtgaaccctctggtgttcggcgacctgagccggttcctgttccagcacttcacgcggtgcccctacagcgacgcggcagggcagcccatcctggtgccgcccatgcgcctcttcgacaccatggagcagttcgccagctacgtggagacggacgcgctgctgcgcagcgcccggtcgacctcgtcctcgtcgtcgctggcgcagcgggcgcgcgacctgtgcgccaggtccg

SEQ ID NO: 290962 - DNA, 320 bp, Zea mays
gtagttgtacatatatcaacgcaagaccacggcatcgaaggcgctgctgatgcataccttgttggcctgtttgaggacaccaacctgtgccccatccatgctaagcgtgtcaccatcatgcccaaggacattcacctggcaatgaggatccgccgcgagagggcctaatcgacacctcgaacatcgtgacaaaaaaatgacctcctgcggttattgttaatctgatgccattgtgatgacatatgagtagggtttgttttgtggatctcaggtcaaaacggcggtccaccagtccaggtcgattcgggaaggcactctca

SEQ ID NO: 290963 - DNA, 388 bp, Zea mays
ctcaagtagagaagacttctccaccaccagcaccactcagctcaccaccattggcgcccaagtcatcacctccacatgttgttgtgagctcaccacctccagtggtgaagtcctctccaccacctgcaccggttagctcgccaccattgacgcctaagccggcaagcccacctgcgcacgtgagctcaccacctgaagtggtgaagccatccacaccaccgacaccaacaacagtcatctcacctccatcagagcccaagtcatcaccgccacctactcctgtgagcttgccagctccaatagttaagtcctctccagcagcgtgcattggttagctcagcaccgatgacgcctaagtcgtcacctccaccggttgttgtgagctcac

SEQ ID NO: 290964 - DNA, 370 bp, Zea mays
ggatccttcacaactcgctggggatggacttcgtgaataatcgggatgtgtctcgggtcacgctgcgtaactccaagttcttccagattaacatgtaccggttcaaggatatgctgatcaaggaagtaactgtgacagcgcccggcgataaccccaacactgatggcatccacatgggcgattcatccgggatcaccagcattaacaacgtcattgtcgtcagcgacgactgtatctccatcagacccgggatctccaacgtgaacatcaccggcgtgacctgcaggcctgaccattgtatcagcatcggaagcctacggaggtacaatgacgaggaacgacatcacggacatcaacatcaacgattgca

SEQ ID NO: 290965 - DNA, 402 bp, Zea mays
cgacaccagcaagaactccgacgtcatgcgcgccctaagcaacgccgtgcacgcgctctcgtggcgctctggcaccaccggtgccgctgtagaagcgtgccactgggccgacgggtacccgctcaacgtgctcctctactgctccctcctccaggccatctttgatctgagggagagcaccgtcgtgctcgacgaggttgacgagctcctggagctcatcaagaaagacgtggccgacgctcggcatcaacaggatgctgcacagcgtgtgcttgtcgtgggtcttcttccagcagtacgtgatcacgggccaggtcgagccggacctcgccgctgcggcgctcgccatactcgttgacgtggcagccgacaccaagcacgggagccgtgacccgatgtacg

SEQ ID NO: 290966 - DNA, 415 bp, Zea mays
cattcctgcctcgcaaggatgagtggccggctaggctagctggtgcttggacgtcataagctgcctcctgcctgccgtttgattcctgtgcaacaagaaggctgacaaaaataaaagggggtgggtcagtgaatggacattttaaaaccagttagcaccggcatctaccgcaagctagtttgaagttggtataataggtgcaagcgaataagacggacacgtatcagtggacactgcaagtaaatccaccgccaaatttgccatcctagggaagaaaaatgattccctggttaacttgtggaacccgatttaatttgagacaagacaacaataccagggttgagcttgccacttggtcatgacacacacgagaatacgagatgaccaagtaaaaactggacagaatgcactcaca

SEQ ID NO: 290967 - DNA, 407 bp, Zea mays
gactaactgtgcattcttattgtcatcagttactagtttcattgacacgtcaatgattttattaattttattgctttgtgcagatgctgttaactaggacacgttgcatatgctgatttgtttcgcactactgcattgtagtttttggctcaacatttgaattcatatgcaatcaagaactttatcttagtgtgctaatttgtctgtcatgttagtcataaataatacctttagttcttaagagttcatactagatgttctctgatctgagtgctgcattctttcgaactatagtgctaagcttgtcgatcaagctcttgcctccggaaagatttacgatggagatgggttcaactacatcaaataatcttttgaaagtggtactcttcaccttactgggttgttga

SEQ ID NO: 290968 - DNA, 191 bp, Zea mays
aaccgggaggccactggctaaggcaacacaaaccgcagatcaccgatatgcacgtacggcagccaccgaagcacacgggcggagaacgactcggatatcatcagcatccacatcggcaaggccggggtccaggccagcacatcctgcgtggaggtcgactgcctcgagcagggcatcgagcacgatgggtc

SEQ ID NO: 290969 - DNA, 412 bp, Zea mays
agcagagcagggttgttgactggaacatggtgaagaaaggggaggatgaggaggagaagaagctgaatgcaacatacataatcagtgttgctaggaagctaggttgcactgtcttcttgctacctgaagacataatggaggtgaacccaaagatgatcctcaccctgacagcaagcatcatgtactggagcctgcagaatcaagggccatacaagagttcaggaccacaggatgctcttctagaggaagaggaaggcgaggaggaggaagaagaagaagaagaggaggaagaggaggaggaggatttcgaaggaggtgtcgaagatggtgtctctgaaacgaccacttgataagaattgtcacgcttgactagccattgccggtaaagtcactggtctattaagggcatata

SEQ ID NO: 290970 - DNA, 369 bp, Zea mays
  unsure (1)..(369): unsure at all n locations
gggaaaactctcttcctcntcctcctcctctcgaattcggtccctggcccctgtcgcctccccgcggttccgccgttttttaagggggaaaggaggcggcggagaagaatgatgagggaggaaaggttggttccgtgtgaggcagccctcgccggcggaatcaccgccgccttcgtcgctggactcgtcggtgtcgaccattccatgccgggctccgactacaactacctcaagttgccacgtaatctctacgaagtcgaaatcctcactgggcagcttcagaactaaactagtgactacaccctacacgtgttgggtatgttattgcgctgtgtacatcttcatgcagaccttcatgattccaaggac

SEQ ID NO: 290971 - DNA, 444 bp, Zea mays
gacccacccgtccacgacaaggccgggtacctgccgtggaatggcgacttcgggctcaagacgctgtggtacgccgagtacgccaaccgggggcccggcgccgacaccgccggccgcgtcacatggcccggctacaagaaggtgatcagcaaggaggaggccgaaaagttcaccgtgcagaacttcttgcacgccgagccgtggctcaagcccaccgggacacctgtcaagtacggcttctgggcgtgagcacatattcttgtggagaccagaggatgtcgatgaagcagaggaagtcatctatgcctagtttgcctatgcatggtggtaaatcactaatcgtccattgttgggagcatgttcatccacggacggacgagataaggtgctgagttgatatgaccataatccatgtacagtgtgtcacctgaacacttgtttgta

SEQ ID NO: 290972 - DNA, 358 bp, Zea mays
cccacgcgtccggcggtgccacaacctctcctgctgtcgctgctggtcgccgtgctagcggtggccgccgatgtcgccaacgccggccacgccaagcccctaacgcctggcgggcgcgtggtacacgacaaccacggcgagttcacggccgggccgtgggaacccgcccacgcaaccgtcgacagcgggcttgacgggtccggcaccacggcgggcgcctacgggtacaaggaaacgcgcacgcacgggtacagggttcatacggtggccgtgagcactgtgctgttctgtgatagggcaggctgcagtgggtggcaaaatgtgccgtgcattggggaaccctagcggtgcacacccg

SEQ ID NO: 290973 - DNA, 263 bp, Zea mays
acggaagcatgaggcggacccatcaagtacatggtcatccaaagcgagcccggcactgtcatccgcgggaagaagggatccgcatgcataactgtcacgaacacagggcaagcgatggtggacagcatctacgacgagcccatgacccccggccagtgcaacatggatggtcgagaggctcggcgactacctcgtaaagcaaggcctgtgaatggcttcagttaacctcgcacgctcgcgtgtccatggatcgagcatccagc

SEQ ID NO: 290974 - DNA, 236 bp, Zea mays
agctattatgcatcggtaagctcgaccgctccatccacggtgtgactcacgggaatggtacgtacacgatccatctcaacgacagccacgaggatgacatcatgccacgtggtctttgtggggagccctcgcaaggactgcgaccatgtgcacgcagacagggaccgcacctgcgtcgtgctcaccagcaacgtcgatatcagagacaatctgcgccccgccataccgctcagcta

SEQ ID NO: 290975 - DNA, 375 bp, Zea mays
ctccatctcaaagcatgtcatcctcagctggtagtccgagagtgacagaaaggaaagcagacagagacagccacgagcaccacgacgatgacgacgacggcgagaagggatcaggtttctttgacaaggtgaaggatttcatccaggacgtcggcgagaagatcgaagaggtggtaggcttcgggaagccgaccgccgacgtgaccggggtccacataccccacatcagcctggagaaggcggagctcgtcgtggacgtcctcatcacgaacccgaaccccgtcccgatccctctcgtcgacatcgagtacctgatcgagagcgagggaaggaagctcgtctccggcacgatccccgacgccgggaccatccacg

SEQ ID NO: 290976 - DNA, 398 bp, Zea mays
aatcgcgagcggccgccctttttttttttttttttttttttttgatcgattgaacagtttgacatcagcattttcagaggaacaaattaaatccacatgccatcagtcgaagtcacatccacagcagagtcggtcagttagaaaaggaaaccaatcgattaatcgagcagagcaggccggatcacgagagggacttggcgacgggggcagttgagaggaggccggagagcaagccgacgacgagcgcgctgttgtacgtggtcggctcgttctgctgcacgttctccctgtcgtcgacgaacgagtcgttcttgaacggcccgccgaccagcgcgcccgtggcgacattcgggttgggctcgggcgacttgagccactcctggccgtcgcagccggtg

SEQ ID NO: 290977 - DNA, 247 bp, Zea mays
cccaacaaggccacgatatccccggcaaatccaatacgccatttaaggacccccccaaggccaacatggccaagcaataagctaaaggtgggaatttgctccacaaagttttaccaccaggtgggagatatgccaagaaggagaccaaaccgatcattgtccagatttcgagcgtactggcctactatcacctccagggattattccaccggattttgagccccgggaatttccccttcaaaacagg

SEQ ID NO: 290978 - DNA, 439 bp, Zea mays
  unsure (1)..(439): unsure at all n locations
aacgtgaagaccaccatgtacgcgccgccgttcaccacgcacggctgctccatgaaccagcggctgctgatcctgcgtgtcaccgcgttcgtcgaggagggccggagctacagggtgaccgtggacgcgccgagaaagccggagctggcgccgcgagggtactacctgttgttcgtggtggcgaagggcgtgccgagcatgggtgcgtgggtgaaggtccggtgagatcgatcagctcacatccaccgtgtgggtcgctgcgggatcgtgtacacaagtggagagccagcctaactctctctctctctctctgtgtgtgtctctttgcgttctttggttttgttttcctgctanggatggatggatgtaaataggatcgatcagattggccagttcaccgctggatcactctnataggttgattggatacctgcccaca

SEQ ID NO: 290979 - DNA, 259 bp, Zea mays
agcacagcaatcaacggcccgcggtagcaaccaagatcctctccaatcgcctcccttcgccaaggtccacggcggtgaacctggaaacgggaaaaaaatattccgcacaaagtgcgcgcagtgccaaaccgtggatcgaggtaggtcgcacacgcagggacccaacctgcactgcctcttcggtcgtcagtcaggcaccaccctcggctatgcctactccacggccaacaagaacatggccgtcgtctgggaagagggc

SEQ ID NO: 290980 - DNA, 108 bp, Zea mays
gcgtccaatcacaagtaggtgcaccacggctcgttatcctcctcttgcactgcagtgcaggtcgtagttgaccagcactagccactgcagacgatgtcgtggcagacg

SEQ ID NO: 290981 - DNA, 348 bp, Zea mays
aggctgatccattggtagatacgtactcgggtggagcagaacagctagagacatggcgactacaagtcctgttgccgccaccgccgccggagtgctgctggtcctgtccgcgcttggtaacgctggcgcgggacgaggacccgtacttgttcttcgtgtgcaacgtgacgttcggtaccaggtctctgctgggcgtgccccagaatgtcatcatcatcaacagcgacttccccggcaccagtatcaactgctccgctagcagtatcatcgtcgtcaatgtcctcattcatctcgaccatcggctctcttccacctgtacagggatgcatcacatgaagaactcttgga

SEQ ID NO: 290982 - DNA, 419 bp, Zea mays
agtgggataggctctcctatgtggcctatccgggatcctcgtcgtggcggtggtcgtcagtgtggtcggcaacgtcacccgctccggcagaaatgccggcgacaacttcacggtcccgatggaggcttcgcttgacacgtccggcaagtcagtcaagtccctgtgcgcgctcagcctatactaggagtcgtgcgataagagactgtcccaggccaccaatcggaccgacaaccgcaatgaggtgttccagatcctggacaaggtggaactgcgctcagtccagacggaggtcgagcagtcgacgtctatcagctaggccaaggctaccgactcgatgaccgacagcgcacgcgaggactgcaataagctcctgtaggatgctgccgacgacctgatgggcatgctcgagatggccggcg

SEQ ID NO: 290983 - DNA, 257 bp, Zea mays
tccggccggcgcatacagcttgtgcgtctggctgtctccggtcggtcgggcttgtcgtgcgtcctccagtccgttgacggtcatgccctctagcggttggtcggtgttcgggagacctgccagagggatcgggagacacagatgtatacgggtatggagtgcctgctggggctgctcaaggtgcgggtggtgcgaggagttgacctggcaatctgcgacccgctcacccacagcagcgacccctacgtcgtcctcgc

SEQ ID NO: 290984 - DNA, 347 bp, Zea mays
tggacgtcaccggcgtcatcttcgtgaacatcaacggcacatccatcacgccggaggtcatcacgctcaagtgcgctaacagcctgccatgtcagggcgtgcacctcgtcaacgtcgacatgtagtacaatggatacggtaacaagaccatggacgtctgcatgaatgacatcggcaagtccatcggattggcaaacgagctggcgtgcatttgaaccaattgactatcattcatatattatgtactatgtttgtgcacgtgcgttgacactgaagttatacattagtatcaccctcatctacgtaacgatagatatcactatgagattcaaagtaagatacaaaga

SEQ ID NO: 290985 - DNA, 408 bp, Zea mays
acccacgcgtccgccgcctcgccgccgcgctcttccgggccgcgccaaccatgttgtacatcacgccgaaccttgtgtcctgcaacatcctgctcaagggccttgttggcatcggtgacctcgattctgcgctgaaggtgctcgacgaaatgactggatgggggatcgtcccggatgtcgtcacttacacgacggttctcactgcctactgtgccaaaggggatctcgagggtgcacagcagctctttgacgatattattgccagtgggcgtaggccagatgctactatgtacacagtgctcatagatgggtattgccatcgtaggaagttgcaagatgcagcaaggatcatggatgagatgggagctgctggggtgcagccaaatgatgttacatactctgtggtga

SEQ ID NO: 290986 - DNA, 432 bp, Zea mays
aacccagccttcgaccaagacttcggccaagccttcggcaattccttggttggcggggcaacaacttccctggtggccccggcgggccgcaatgcaaccggtggccgccaatttcgcaaaggccggcaacccaaaccccctgacccctgccggccccttggtacacaacaacaacggaaatttcacggccgggccgtggaaacaagccacgccaccttctacggcgggcgggacgggtccggcaacacggcgggcgcgtgcgggtacaaggacacgcgcgcgcaggggtacggcgtgcagacggtggccgtgagcacggtgttgtttggcgacggcgcggcctgcggcgggtgctacgaagtgcggtgcgtggacagccccagcgggtgcaagcccgacgcggcggcgctggtggtgacggcgaacgacctg

SEQ ID NO: 290987 - DNA, 198 bp, Zea mays
agacaacatccatgttcctcctgggcgtcgtctgaatcatgcatgacgacaaggaagattcatcgggcatcaatgcgacagcgtccgagtctgctgggtcgttcaagatcaccacattgggcacctccggaaatagcaagacagagagcactaaagctgtgcaagaggcatgggcatcagcgtacggctgaactggga

SEQ ID NO: 290988 - DNA, 424 bp, Zea mays
agtgccgccccgtcctcctctcgctccttttcctcctcgtcctcctcaccgcgccggcgttcggctcgacgctcctccccgccgcagccggcggccccggcccggcgggcaccagcgtcccggtcccggtcccggtcccggctcagccgagcgcgtacgagatgctggaggggttcgggttcccgaggggcatcctgccggagggcgtgaccgggtacacgtaccgcgcgtcggacggcgcgttcgaggtgttcatggacgacggggactgcgagttcgaggtggacggcggctaccgcctcacgtaccgccgcagggtccacggcaacgtcgcgggcggcagcatccggaacctcggcggcgtctccgtcaggatgttcctcttcgactggagcatcgaccgcgtcgccgtggaggacgcggc

SEQ ID NO: 290989 - DNA, 378 bp, Zea mays
aaaaagatcatgcaacagatggtgacaagtacctcgagtgggcagctcaaatggccctcagcacacaaacaggagttccatggataatgtgcaagcagtcttcagctcctggtgaagtgatccctacatgcaatggaaggcattgtggagacacatggacacttcgcgacaaaaacaagcctatgctttggactgagaattggactcaacaattcagagcatatggcgatcaagtagctatgcgttcagctgaggacattgcatatgctgtgttacgattttttgcaaagggtgggtcattggttaactactacatgtaccacggaggaacaaattttggaaggactggcgcttcttatgtgctgactggatactatg

SEQ ID NO: 290990 - DNA, 393 bp, Zea mays
ggccccttggccggccccttggggccgaaggcaacaagcccaactgggccaaaaaactggcaagccaagggcttgaacccctccaacttcaaatcaagttcatgggtcgggaacagacaagggcgtcggcagaaatgcatcggcaagtcaatcggcttggcaaaggagctggcgtgcatttgaaccaattgactaacatgcatatattatgtactaggtttgtgcccgtgcgttgacacggaagttaaaaattagtataaaacaaagatacataacgataaatatcactatgacattcaaaatccatgtggcaaaatatcactgtaaccatctatgattgtgcattgcgacgccacacaaattattcgataaaatattagcaattgggaaaaa

SEQ ID NO: 290991 - DNA, 389 bp, Zea mays
  unsure (1)..(389): unsure at all n locations
gcgctcccacagcctcacccctgcgcccccgccgattcgcgtcgccctttgttggaaggaacgatggagcagaccttcatcatgatcaagcccgacggcgtccagcggggcctgatcggggacatcatcagtcgcttcgagaggaaagggttctaccgcaaggggatgaagtgcatgaacgtgtagaggtccttcgcgcaggagcactacgcgggggggggcggcaacgcgtgggttggcnngtgtggtngagcgggtgattgccggccccgtgggggctggggtgtgggaggggaaggacgtcgtgttgactggccgcaggatcattggggccaccaggccttgggaggcagcccccggtaccattcgtggggactacgccgtggaag

SEQ ID NO: 290992 - DNA, 413 bp, Zea mays
aaaaaaaatcaaagggtggcatctttcttgctttatctcacggatgtcgaagaagggggagaaactatgttcccatacgagaacagtgagaatatggatataggctatgactatgagaagtgcattggcctaaaggtaaaaccaaggaagggtgacggactcttgttttactcccttatggtaaatgggaccattgaccggacttcacttcatggtagctgccccgtcatcaaaggcgagaaatgggtcgccaccaaatggatcagagacaatatagtgtagaaatcgaaaggctcaggtgtcatgtgccctccaaaaaaatagatcatgcgcacatatactgaccatatacttcagtgtttgttcaattgccatggacagttggaccaacggaaggaaagtgtaaccaatct

SEQ ID NO: 290993 - DNA, 395 bp, Zea mays
cggacgcatgggcggacgcgtagggggatgggcatcgctctggcagactccgaccacaacggcatcgggagcttcgctggtaaccgtgtggatcactacgtcagatgcgccatgacaaatgccttcgctaaggcattgggtaacgggctcagacaggggaacaacatggacatccaacgcaacgacaacaccagcgagatcatggcagggatcgccaaggacactgagcacctggctcagttcgagctggagatgttcagcccggtgctgaagctgtggcacccgttcccgggcgcgtccgtggtgagcacgctccacatctgctacagcgtcttgctgaagcagtacatgtccaaggcgacgtacctcatgaacgagctcgtgcacgtgctgaa

SEQ ID NO: 290994 - DNA, 409 bp, Zea mays
agatcatcatctccatccaccgcccgccgtagctagctagatctgctgccatggcttcctttggcgaggctcccggcggtgacgccggcagcggcgagaagatcttccgcaccaagtgcgcgcagtgccataccgtggagcgaggtggcgcgcacaggcagggacccaacctgcacggcctcttcggtcgtcagtcaaggaacaacctcgggtaagcctaatccaagggcaacaagaacatgggcgtcctccgggaagagggcacactgtgtgaataactcctcacacccaagaagtatattccaagcgcacaaagatggtcttcccggggctcaagaagcctaaggagcgaaccgatctcatcgcctacctcaaggaatccacggcttaacttcttctagctatctta

SEQ ID NO: 290995 - DNA, 350 bp, Zea mays
ggcgcgtgcgtgcgttcgtgcatccaccgccacgcttctgggcaccatgtctttcaccggcacgcacgccacgtgtccggcgtgcgactggaccgtccacgtcatcgccgtcttcatggccgtcggttgcatctaccatatcggatgcttcaagtgcagctaatgcatcggggtcctctcgatgtgcaggtcctcctccatggacggtgtgctgtactgcacgacctagttcgatcagctcttcaaagagactgggaccttctcctacaccttcacgccatctgccatgtcaatagatgacggtgaagtgacatggtgctcaaccaatctgtcgtctgcattttctggtt

SEQ ID NO: 290996 - DNA, 330 bp, Zea mays
gatgggattcctcgccaataacatcatggtcgtgggcgccgtccttgccgcgcttgtcgtccgcgggtcatgcgggccccccaaagtgcagcccgggatcagcatcaccaccaactacaacggcaagtggctcaccgccagcgccacatggtactgtcaacccaactgtgcatgcgctcctgacaactgctgtgcgtgcgggatcaacaacgtgaatctgccagcctacaccatgatcatcgcatgcggcaacttccccatcttcaatgacggcaatggctgtggctcatgctacgaagtgagatgcaaggaaaaacctgactgctcggg

SEQ ID NO: 290997 - DNA, 403 bp, Zea mays
acccacgcgtccgctgcattcatctcctccaccaccaccaccaagctcaacaacagccagctcgcgaaaatattgaaagccgcaacatggcatcatccggcgcgccccttggggtacccttcccccaattgggggcaacggcccaaaaggtaccgtaggcaaagagaagaaaaccggcggcaaccgctaaggcggcgaaggcaaaaatattcaggacgacttctgctcgacgctgttcaaaggcatgaaggggacggacctggtcctgtgcaaagagtcctgcgcgctctcccagcactccaacctggtgctgtacggcaggattcagtgcaagggcaagtgcaccgagcagaagggcatcacggcgccggccatgaaggtctgccaggaggattgcgacaag

SEQ ID NO: 290998 - DNA, 363 bp, Zea mays
atccacccggcttggtaacgccacgcatgaaaggtaagggaaaccttgaccggcaagggccagctgtgtggagcaagaactcctgcaccaaaaaatatgactgcgagatatttctcaaatcgctggtgatagacatcttgaacaaaggggaggtgtcctgggtcatactgcgcaacaccacaatcttccacaagatcatgttatagtgcaacgacgatatgatgatcgacgtgatcgtcatggcgccccgggacaaccccaacaccgatggcatccacataggcgactcatcagggatgattatcatcaacaccatcattggtgtcgtcgacgactgcatcatcatcagcgccgggaggacca

SEQ ID NO: 290999 - DNA, 380 bp, Zea mays
ctcgacaactccgtcggcgacctctcctggctcctccgcgtctcctcctcggccaacgacgacgacgacgacttcgacgcccacatcgggctcccgcccatcgcgcagaacgagcccatcctcttcctcatctgggagcagatcgcagtgctctacaccggcaacctcgaagcccgcgccgacgccgccgccagcctcgtctcgctggcgcgcgacaatgacaggtactctaagctcatcatagaggaagatggcgtgccgccgctgctcaagctcgtcaaggaggcgcatctcgaggggcaggagaactgcgcgctcgccatcggcctcctaggccgcgatccggagtgcgtcgagcagatggtccaagccggggtgtg

SEQ ID NO: 291000 - DNA, 412 bp, Zea mays
gagcagcaagaaaatctattcatttgacacgtctccatctcattgagcatttaattatttttgggcaggaaagaacacataccagagatgaggttgttggtttaatttgattctaagtcctaatgaagaagattgtgagctccggcccggcggtgccgccctctgggttgtgcatgtagtacgtctcggagtccttggaaccgacgaggcggtcgaaatgcgcgcgcatgtaggtgagctcgccgtcggacgggtgggacatatcggacggcagcacgccggcgcccatggacgtggagtggagcatccgcatcacgcagtcgtcccgctccgtcgcctcccgccgcgacgcgtgcccgacactctcgccgttcacctcggccgtccagaccggctcgtcgagcagcctcct

SEQ ID NO: 291001 - DNA, 310 bp, Zea mays
agctcggatctcgcatcgatgaagaacgtatcaaaatgcgatacctggtgtgaattgcagaatcccgcgaaccatcgagtttttgaacgcaagttgcgcccgaagccttctggcggagggcatgtctgcctgggcctgtaacctgttaatggatcggattctcggtgccaattcgtgatcttgaccggtctaagaagatggggacttgcgtctttgtttcattggttattatttctactagtgtgtatatggtaaagtcgtgtgctgtgaacctgctatcaaaaaaaaaaaaaaagaagggaaccacccg

SEQ ID NO: 291002 - DNA, 336 bp, Zea mays
aactagcctattggttaaggacttccgagtagcacctccaagtcctgggttcgattcccctcgggagcgaattttcaggcttggttaaaaaaatcccctcccagtattatattgagaagagaccgaaacatggtcccggccgagaaaatcctcgaaccctagccctcaatcactagcaggccatcaccgcccactctgcaacgggccaacggcccagccggagggtggtgtgcaagatgtaatccgggagcggatggggcacaacaagagattttttttaaccaagccagaaattcgcccccaaggggggatcgaaaccgggacctgaaggaactg

SEQ ID NO: 291003 - DNA, 338 bp, Zea mays
cccaggcctacgaacgcgtccaccacgcgtctgcgacatccgatttctcaccctactcatcagaacctagctagctaggcgtagaacgaatgacgaggcagggcggcagcaggtcgacgacgacgctggtcgccgccgtggccgtagttctggccgtggcggcggcgtcgtccctggccggcgtggcgtccgcggagaaggcgggcgggttcgtggtgacggggcgcgtgtactgcgacccctgccgcgccgggttcgagacgaacgtgtccaggagcgtggccggcgcgacggtggaagtggtgtgccggcacttccgcgcgtccaaggagacgctc

SEQ ID NO: 291004 - DNA, 287 bp, Zea mays
gacccacgtgtccgaacacgcgtacgcccacgcgtccgcccacgcgtccgcggacgcgtgggcggacgcgtgggggcttgcgctcaagttcgcagtgttcgactaggagatcctgaactcccctgaccgtgcgtgcaaccttgcaaagcaggcctttgatgaggcaatctccgaactagacagcctgggagaggagtcctacaaggacagcactctgatcatgcagctcctgcgtgacaacttgaccctatggacttccgacaccaacgaggacgccggagatgaga

SEQ ID NO: 291005 - DNA, 383 bp, Zea mays
cacgcgtccgataaatcgttctacactcaaacaatatcgtcacggtcaccctcaacgatgcagatgacatcgaagcgaggtaggcatctctgatctaggagcaatgtcgtggtaagcttacgtgaggaagcagctgatatgtgacatcaagggccagcaactcacggcggcgacgatctgctgccacaactgattcctctgggagcagagcatcgcgttccccgacttcatgaccgaagacatgggcaacatcatgaatgacttcgacgagccagagcacctcgcgccgacatgcctgttcctcggacctagcaagtacatggtcatccaatggtaacctggtgccgtcatccgtggcaacaacggattaggatgcatcaacg

SEQ ID NO: 291006 - DNA, 381 bp, Zea mays
acaaacctccggacaagtcatcgcgacaatcgtatgcctcggtaatagcatcatgggcatgggcgccgtccatgatgagctcctcgcccgcggttcttgcgggccccctaacgtgcgactcggcccgaccatcaccagtaactacaagggcaagtggcacaacgatatggacacgtgattcggtcagcgcaacggtgacgtggcaccggaaaacgaacgttcgtgcggcatcagaaacgtgaagttgctaccctataacggcattacagcttgcagcatagtcccgatcttcagcgtccggaaaggttgccagccatgctgccaggtgagatgcaaggtcatgcctgaatgttcgatcaatcgagtcaccgtgttgatcag

SEQ ID NO: 291007 - DNA, 406 bp, Zea mays
gcagacgctagcgcatgcactacacacaccgtaccgagtgaacgaaatggcaggtgcgtgagcgaagacctcgaggttccgcatggagcgctccttgtgaaagattctcaacagtgtacacatgaacatagtcggacaaagggaaagaagaaatgaacagaagttccaggaccagcgtgaagcagggtgggagttctcttacgtgtattttcctttcactttgtagttccagtagtttaaaattcacttaacgttttgatcattgaatgccacatataatgccacaccagacgcgccgggattcgatgaccaaacgtcaacgaagtacatcgcgggcgccaaggtgaggctggagtgcaagcacttccgaaccggcaaactcaagcgcgcaatctacggggtcacc

SEQ ID NO: 291008 - DNA, 466 bp, Zea mays
  unsure (1)..(466): unsure at all n locations
ggtcacaaatccgggtccgncacgcgtccgaaggaccgcaacgcaagcgccgacgccaaggactccccaaggggaaagaatggtcaacccaaaaggcaaaacaaaccaaatttaaaggaattcaaaccaaaaaattgcaaggcgtataaagaaaatcagaaggaacctgtaacaatgatggaaggatctccacctgatgttggtcaagatggtgatgatgagcaaggtattgatccatcttgggctgctgtagttacgccggttttacgagtcaagacaatttatatcagttcggcgattcttgctgcgaagagtcctttctttttcaagcttttctcaaacggcatgaaagaatcggaccagagacatgcaacccttagaaatactgactcagaggaaaatgccctcatggagcttttaagctttatgtatagtggaaagttgacaactactgagcccactcttc

SEQ ID NO: 291009 - DNA, 353 bp, Zea mays
agatacaacttcttttcatcacgcctcaaagacgctacaaggttcttgaaggagcacatgcatccttcatggagtcagtgcctttcaacacaatatgcaccttcacactcttccagctaatctatctgttgatcgtctttgggatgacatggataccagtagcatgaatcctcttcccactgctcttcttcttcctcattatcatcaggcagcacttcatcccgaaatattttgatccgatccacctgagggaattacatgcagccgaatacgacgaactgaaaggttttacacctgatccatcagtgtgtgatgacgagtctgttcgcagcggagatgctcatcctggatat

SEQ ID NO: 291010 - DNA, 462 bp, Zea mays
ttcgcccgtcgacccacgcaaccgacgccgcacgtcgggcgcgctcgacaactgcggggagctgctcgactacgccatcgacgacctccggacgacgttcgacaggctcggcggcttcgagatgaccaacttcaagagcgccgtggacgacctccggacgtggctgagctccgcgctcacgtaccaggagacgtgcctggacgggttcgagaacaccacgacgcccgccgcgggcaagatgcgcaaggcgctcaacagctcgcaagagctgacggagaatatcctggcgctcgtggacgagttctccgagacgctcgccaacctgggcctgccgagcttccagcgccggctcctcgcggagcacgctcgcggcgcgccctcctggatgcccgacgccaagcgccggctgctgctggtctcccccggcgacaacggcttcaggcccgacgtgacggtggtcaa

SEQ ID NO: 291011 - DNA, 329 bp, Zea mays
acgcgtccgacgatgccttcgtaaggtggtgatcccgggataagaggatgacacctcaatgattacttgaggacaaatttaaggtcggtaagaaactgcggggaatggacattgcaagatgtggtgtggtataagataggcaaaatgtgtgattattttttgtccgaggttatcaccccccttgccccagacaagatgataagatgtcaatgtaacaagccgtctgagcttctgtaagtaaatgactgttgctgcatgccccctgtgtacatgtagctgtttgagcagaattccgtttgcatgaatcgtgtgatcaccagccagggatc

SEQ ID NO: 291012 - DNA, 432 bp, Zea mays
accacgcgtccgctggcccataaatatatatctatctatcgccatcgagcaattataatctcacagaataataaacatcatggggcaagcctcacggctcgtcctcctcgccgtcgtggcgctgctgtccgccgggctcctcccgcaggcgctgggtaagggtaggggaagcaagcggaggagagcggcgatgcggcggaggccatgaagatccaggacgacttctgctcgacgctgtgcgagggcaagaaggggacggacctggtcgtgtgcaaggactcctgcgcgctctcccagcagtccagcctgctgctgtacggcaggatccagtgcaagggcaaatgcaccgagcagtaacggcatcactgcgccgggccataacgtctgccaggaggagtgcgacaaggcgtacgtggtgaaggcggccgaggt

SEQ ID NO: 291013 - DNA, 379 bp, Zea mays
gcgtccgatcggatcaacaatttcgtgaaccgggcaagggcggctaaattcaacgcgcacataatcagccacctgaagaaaaaaatgcctgcactgatgggcaaggccaaggcccagcaaaagctgctcgacgggctggatcaaaagttcgccaaggtccagaaggagctgcacctgccgccaggggacttcccgagcgtggaggagtacagggagctcctgagcgcctacaacttcgacaggttcgagaagctgaggcccaagatggtccagggcgtggacgacatgctggcctacgacatcccggacctcctgaagaaattcaagaacccctacaactgaagccggaaaccaatctctttgctcctcggggaagggt

SEQ ID NO: 291014 - DNA, 363 bp, Zea mays
aggcgcagcgtcacgtcgctccagacggaggtgtcggcgctgtccccgcgcgtggcgttcctcgaccaccagcgctcgctgctgacgctggggaacagccacctgaggcagcggatcgcggcgctcgcgcaggacaagatcttcaaagatgctcatcaggaggcactgaggaaggagatcgagaggctgaggcaaatctaccaccagcagagcctgaagagcggcagggagcccgacgcggccccgtcggtccgcgacgacaaggacatgatcggcagcgaggggaccgccgcgcccggcccgccctcgtgatgaggaggaggtggtggggcgacacgtccagacatccgagtcggtcgctgt

SEQ ID NO: 291015 - DNA, 408 bp, Zea mays
cgggggcagccaagccttcggtatcacccgattacctgggggcgggtcctggttcaaaacaacggaacaaccaagggcaaggaaacctggttttggaccaggaccaattgcaacaattcttacaattcaaggttgttcccaattacctggatgaggggtttgggtccaactttcaaattcgcaggaacaacgcggatcagcacaaggtccttcaacttcaaaacatccaattggaaaaacgttctgtttgagacagtgacagtcaaagcctccggcgacagctccaacacggacggcatccacatcggcgactccaacaacgttacaatcagcagcatcatcatcggcgtcggcgacgactgcatctgcatcggccccgggagcaacatgatccgcatccatggcgtc

SEQ ID NO: 291016 - DNA, 407 bp, Zea mays
cggacacgtgggagacatctggcaagtggtgctggtgggcaacccgcgcaagggctgccaccaaggccaagcgctcaaggaacgcgccggggtcctggtcaacaagaacgttgggatctccgacaacctgggccccggcaaaccgctaaggtactttaagggccttccgctccccgtttgcgccgcgctggtcaagcaactggactccggcgaagacgacgaccaattaactataccaagggggggttcccggcatgctgcacaaaactacaacgattcaaaacgaacgcatgggatgggtaacaatttctacgggaagaaaagggagaaaagggaaattaaaaatgtttcaaaatgcctgattccaaaaaaaaaaaaaaaaaaaaaaaaaagggcgggcgctccaa

SEQ ID NO: 291017 - DNA, 391 bp, Zea mays
accacgcgtccgcccacgcgtccgggagctcaacatggacctcttccgcaagtgcatggagcccgtggagaagtgcctccgcgacgccaagatggacaagagcagcgtgcaggacgtcgttctcgtgggcggctccactcgcatcccccgcgtgcagcagctgctccaggacttcttcaacggcaaggagttgtgcaagagcatcaacccagacgaggctgtcgcgtacggagcggccgtccaggccgccatcctcactggcgagggcaatgagaaggttcaggatctgctcctgctcgacgtctcgccgctctcgctcggcctggagacggccggatgcctcatgactgtgctcatcgccaggaacaccaccatcccgactaagaaggag

SEQ ID NO: 291018 - DNA, 394 bp, Zea mays
aaaaaaacttggtagaagcatatgctcaatttgtgaaagattattacattaaaaaaatggagacaccaccatcctcgtatgatcgagaatatctgaaggaaacaactccacatgattctagtaaggttctaggctctggtggttccaagtttgcagtgaggttgcctactttcaagtggcacccaaaaatgacagcgttcgttctgcaaggatcaatacgaggtaccatttggacctatgcagacatgtctttggggaaggcgtttatcccgatgtgttcatgacgaacttgtattatggaggcacaagaatcgctgcttctaaaatcgtgtttacaaatggctcccaagacccatggcgccatgcctccaagcagaaatcatcgaaagacatg

SEQ ID NO: 291019 - DNA, 415 bp, Zea mays
agcctgctggcgctggcgctggcagcgctggctttcgtctccagggccgcggcgcagggcaacggctgttccagcgtgatgatgaccctggccccgtgcatggacttcatctccagcaaggcgtcggagccggggatctcctgctgctcggtgctggctggagtcgtgcagaccgacccccgctgcctctgcatggtcctggacggcaccgccacgtccttcggcatcgccatcaaccagaccagggcactggagctccccggcgtctgcaaggtcaaggcgccgccgctcagccagtgcacaggcatgtcatgtgtcaggtcatcgttcaaatgcaaaccattgccagtttctgttgccgcttagaatcctagtacgtacctggtctcaggcgtccctgcggcacctgcaccga

SEQ ID NO: 291020 - DNA, 401 bp, Zea mays
ctctacacacacgttcctctaagatgaattgattgctctgaatgcttggcgtcgtataggtcgccaaacaagagaagctattaagaaaaaatttctacctgatctacttcaaatatatgaagaacaggttagggccttcattgaaggtactggtgacagcgacgtgcttgtgctgaatgtccaggacccgttccagaggctgcttctgcacggtgtttgtgagttctataacgtaacctcaatgaccacaagcagtgtaagggacgggaagccatggaagagcaccaccatcaagaagaggcatgtcaccggtcttcctccgagaatcacattagttagcttcctgaggatgaggaagaattagtcgtcccagtaacatgtggatgtgagggtcctacact

SEQ ID NO: 291021 - DNA, 402 bp, Zea mays
agtgaacatctacactatgataagttctctagttttttgaaacaattgcatgatgagattgtccgcttggagttcagtcactacgatttgaaatcatcgaacacaatatctgcaaaggactttgcgttatctatggttgcttctgctgatatgaatcacatagacaagttattggatagagttgatgatttggatgacaatcttgacctcaaggatctgcgcattacctttgaggagttcaaggcatttgctgatcttcgaagaaggttggaaccatttgcaatggctatcttcagctatggcaaagtaaatggtttgttgacgaagcaggatctaaaacgtgctgcatcacatgtttgtggagtggacttgactgacaaagtagtggacataattttccat

SEQ ID NO: 291022 - DNA, 403 bp, Zea mays
  unsure (1)..(403): unsure at all n locations
gacaaatccctctccttcttctcgcacggcgggtgcgcgtcgccggcgtcggtctcgaaccgccaactggcgccgtccggccgtttcgaccgtgcgcgcgccgcggcgcagtcggccatcgtccacgtcgccgaggtcgccgcgtaccgcctcgtcttcctggactcgcaccactccttctacggcgggctctacgtcgggggcgtcgccgacgcccgcatccgccccgcgctccgcgcgctgaagcagaacctgtcgctgctcgtctccatcctcgtggaccgcgcgcagccggtggccgtccgggaggtgatgaaggcctcgttccaggggttcctcatcgtcctgctcgccggcggcagcgacaggagcttcacggtgganggacacgcgatggtcgaag

SEQ ID NO: 291023 - DNA, 404 bp, Zea mays
catgaacaggatggacagggaagaacacctctacaccgcgttccagtacttcgacaaggacggcagcgggtgcatctccaaggaggagctggagcaggcgctcaaggagaaggggctcctggacggcagggacatcaaggacatcatctcggaggtcgacgccgacaacgacgggaggatcgactacagcgagttcgtggcgatgatgaggatagggaccgccgagccgaaccccaagaagcggcgcgacgtcgtgttgtagcctgtgtaggagcatgcgtagatgtagctgctgatatatggtatggtatatcggatggtaaaatggaacggcgtccagcagttgatgccattgccacgacagtggttgcttgcacgctggtcgagcagcacaaggcgcgcgc

SEQ ID NO: 291024 - DNA, 464 bp, Zea mays
  unsure (1)..(464): unsure at all n locations
cagacgcatgggcgctcagcgcgcctgggtcaccaggaacttgaaggttctgctgcatgcttccggttattgcactgcatgcctctctgctgcacgagagtgcaaaaatctaacagagcctcgttccctttaatttgcttcctctccagggtttgcaggacaagatggagctggtggccatcgatctgcaggacanaccggcttggtacaaggacaaggtttacgcacaagggcacggtgccttccctggagcacgacagcgaggtcaggggcgagagcttggacctgatcaggtacatcgacagcaactttgacgggcccgcgctgctcccagaggatgctgcgaaaaggcagtttgctgacgaactgttcccgtctgccaacgcgttcaccaaagccctctactcgccgttgctgtcccacgcggccgtgttagacgaagttgttgccgctctggataaact

SEQ ID NO: 291025 - DNA, 409 bp, Zea mays
  unsure (1)..(409): unsure at all n locations
ctcggaggtgggcagcgaggagctcgacggaggcggcggcagcggcagccccgaggcggccggcagcaacgccagcggcgcggcgcgtgggtacagcggcatcccggggtacccgatgggcggcctcgcgtccggcgcctggccggacgaggcgtcgccgtcgccgacgtccggcgcgaagcgcccccgcgactccggccccgcgctgcagcagccgctggcgccgcagctcagcctgcccagcggaaagaacaagggcggcagggcggcctcggcggagatggcggcgatcgagaagttcctccagttccaggacgccgtcncctgcaagatccgcgccaagcgcgggtgcgccacccacncgcgcagcatcgccgagcgggtgaggaggacgaagatcagcgagcgg

SEQ ID NO: 291026 - DNA, 457 bp, Zea mays
cggccaagcatccgggttaacaactaatcccctaaatggacgttttaaacggagatgttaacaagggcgtctgcaatttgtgattctaaaaccaatcctgggcgttaacactttcatactttacgcaaaagggaaatatgaagatggaaacttcagtgtcaaccagtcctatctatacataactatcatctatacaatctcatactctacggcattgtttgctcttgcactgttctatgcggcatgcagagatctacttcagccatataaccctgtcccgaagtttatcataatcaaatcagttgtgtttccaacgtattggcaaggtgtgctggttttccctgctgcaaaatctgggttcataaaaaatgccgagaaagctgcatatctccagaacttcgtgctatgtgttgagatgctcatagcagccattgggcaccgattttccttctcctac

SEQ ID NO: 291027 - DNA, 385 bp, Zea mays
ggcatgcagatcttcgtgaagaccctgaccggcaagactatcacccttgaggtggagtcttcagacaccatcgacaacgtcaaggccaagatccaggacaaggagggcatcccaccggaccagcagcgtttgatcttcgctggcaagcagctggaggatggccgcacccttgcggattacaacatccagaaggagagcaccctccacctggtgctccgtctcaggggtggcatgcagatctttgtgaagacactcactggcaagacaatcacccttgaggtggagtcttcgggatacattgacaatgtccaaggcaaaaattcatgaacaaggaggcatcccaccggaacagcaacgcctcatcttcgcccgcaagcaactggaa

SEQ ID NO: 291028 - DNA, 352 bp, Zea mays
cccagtcaggatcctcctaatcccggtcccgttccaccaacccccgcccggagaacaaacaacttgggccccaccggagaacgggtcaacaaaggccaaccaaggttgcaagcccgcaagtatcgacgccggcaaggccttgggccgccccgcgggcgtgctcatcaacggcaagggcggcaaggacctgtaggccgcgcctgccttcaccttcgaggccggcaagacgtaccgcctccgcgtctgcaacaccgggatcaacgcgtcgctcaaacttccgcatccaaggccactacattaaactggtccaactggaaggctcccacaacctgcagaacacgttcgactccct

SEQ ID NO: 291029 - DNA, 237 bp, Zea mays
  unsure (1)..(237): unsure at all n locations
agactttgacttgccatcgattcatccggcgcggcgggctatggacctgcagcagcaagctaattaanagggtgtttggtttctagggactaatgtttaatcccttcaatttaatctttttcagcatataaattgctacatacataaactataccttattttagtttctacatttaataattttctcactatattctactacactttcatgactaattattactccctaaaaaccaa

SEQ ID NO: 291030 - DNA, 381 bp, Zea mays
  unsure (1)..(381): unsure at all n locations
ggtccacgacgcgtccgcatcctattcccgcccgctaaaacccacccaaccgccgcgcgccgccggcggcgcaagggacccacgatggccatgcaggtggtgcgcaacctcgacctggaccggtacgcggggcggtggtggtgaacgagacgtgggccgacgggcgccgcggccacatcgaaggcacngcctggcgcgccgaccctgccagcgacgaggccaagctcaaggttcgcttctacgtgccgcccttcctccccctcatccccgtcaccggcgactactgggtgctccacatcgacgccgactaccagtacgcgctcgtcgggcagccctccaggaactacctccggatcctttgcangcagcctcacatggacg

SEQ ID NO: 291031 - DNA, 389 bp, Zea mays
acggacgcgtggggcgaccatggtcggcttgtctgaccagaccgtggacaccgcgaccagcagcctgcagaccatgtacaggctcaacgtcggcggctcttacattgccccgaccaacgactctgggctgtcgcgggactggtacgacgacaccccgtacctctacggagctgcggtcggcgtcacgtacaaacctgatgacaatgcccagatcaagttcccgagccctgaggcagagtacgcggcgccggccagcctctacctcagcagcaggtccatgggccctaacccaaaggtgaaccagaactacaacctgacgtgggtgttcgaggtggacagcaacttcacctacgttgtccgcctccacttctgcgagctgctgcttacca

SEQ ID NO: 291032 - DNA, 403 bp, Zea mays
atactcactcaatctccgatgcatacaagaagcctagcggtcctcaagaggcagttgcttcgcaagaagatggtccaaactgccaaggagggcatgatgaataatgctaccagttccgaagtttatgtcaaaatgcaatatgttttcataaaaatggaccacggaggcgacactatttctgctcacaaagaactgaaagacctgaaggatgcaattattccagaagggaatggatcaggaacagtgcctgaagtatttgatcctgaaaagcatgtagatgcttacttgcctgtccgggtgaatgagcagagagtaagcaatctgttgcagtcactgttgattgctggttgtattggagttacaccgctcattcagaagataccaacatcagtcctctggggtt

SEQ ID NO: 291033 - DNA, 400 bp, Zea mays
gggtcgaggacgcgtccgatttttcaagcttttctctaacggaatgaaaaaaccggttaaaaaacatgcaaccctaaaaattacggacccaaaggaaacggccctcagggacctttaaaccttaaggtatagtggaaagtttggaactactgagcccactcttctgctggatatcttgatggctgccgacaaatttgaggttgtttcatgcatgaggtactgcagccagttgctcacaagcttgccgatgaccacagaatctgcacttctctacctagatctcccttgctcaatttcaatggcagcagcagttcaacctctgacagatgcagctaaggatttccttgctgtaaaatacaaggatttgactaagttccaagatgaagtgatgaacattcct

SEQ ID NO: 291034 - DNA, 405 bp, Zea mays
aggcccccgggaagcccatgcccaagaccatcaagttgaccaaccccgtgggcttccggtgccccgcccccaaccacaaagacagcgtgatgtacgtgtgctgcgtcaaggaccgcaagttcaaggcgaagaaggctaacagcacgcggtaccagacacggcggaaagcggacctgacgttcgcctacgacgtgctgcaggccaacaccaacaactaccaggtgcaggtgaccatcgacaactggagccccatcagccggctggacaactggaacctcacctgggagtggaagcgcggcgagttcatctacagcatgaagggcgcctacacgctgctcaaggaaggccccgcctgcatctacagccccgcagcgggctactacaaggacatggaactcaaccccg

SEQ ID NO: 291035 - DNA, 276 bp, Zea mays
tctacagtgacgattcctgacacacacggatgaagatcgcagtgggtgcagctagaggcatcgagtacttgcacgaggtaaccaacccgccagtgatctaccgcgatctcaagggatccaacatcctcttgggcgcaagcttcaacgcgaagctgtcagacttctgtctgggcaagcttggtccgagccgcgacagaacccatgtcatcacaaaggggattgggacctactggtactgcgctccagaattagccatgactgggaagctgaccaaga

SEQ ID NO: 291036 - DNA, 414 bp, Zea mays
gccatgggcgcgggataccgggaggcgctggataagggtgatgttacagctcagatagctctgcagcctgcgttgaagttcaacggtgggggccatatcaatcacagcatcttctggacaaatctgagccctaacggtggtggagaaccccaaggggaattgctggaagccatcaaacgtgactttggttcctttgccaaatttaaggaaaagttgactgctgtatctgttggtgtccaaggctccggttggggttggctcggcttcaataaggagcagggacgcttacagattgctgcttgttctaaccaggatcccctgcaaggaacaacaggtcttatccccctgctggggattgacgtgtgggagcatgcttattaccttcagtataaaaatgtcaggcccgattacctg

SEQ ID NO: 291037 - DNA, 396 bp, Zea mays
gcatgatccctaccgccatgggcgcgggataccgcgtgatcagcgccctgcccatccagcaccaggactggactggaggaaaggagttcaagtgcaaggtcaacaacaaaggcctctcggcccccatcgtgaggatcatctccaggagcaaagggccggcccgggagccgcaggtgtatgtcctggacccacccaaggaagagctcagcaaaagcacgctcagcgtcacctgcatggtcaccggcttctacccagaagatgtagccgtggagtggcagagaaaccggcagactgagtcggaggacaagtacatttctaatttgtaacatacaaccatagtctgcaaaactattctgtgtatcactgacgcacatcccaaactgtttagttccagtc

SEQ ID NO: 291038 - DNA, 460 bp, Zea mays
gcatgatcccgaccgccatggccgcgggataccaaaagaccttcctcctgatactgcgctgctggacctgcaaaacaacaaaataactgagatcaaagatggagactttaagaacctgaagaaccttcatacactgattctcatcaacaacaaaattagcaaaatcagccctggggcatttgctcctttggtgaaattggaacgactttatctttccaagaatcaactgaaggaattgccagagaaaatgcccaaaactcttcaggagctgcgtgtccatgagaacgagatcaccaaagtgcgaaagtctgtgttcaatggattgaaccagatgatcgtcgtagaacttggcaccaacccgctgaagagctcaggcattgaaaatggagcctttcagggaatgaagaagctctcctacatccgcattgctgacacaaatataactaccatccctcaaggt

SEQ ID NO: 291039 - DNA, 463 bp, Zea mays
  unsure (1)..(463): unsure at all n locations
catgactcccgaccgccatgggcccgggatacgtgattacagagctagggtttccagcagggctccagatggtcaggcatggcttctatagcaggtctaaggaagcagcggggacgtcacaggacgaggagagggcaggtaactaccagaggcccctgtgggcatcagcaggggcctcacactgctcggtgacatcagatgcaggtctaaggagccaacgagtgactgcaggggctcgcccacccacagcttacttggcgagcgggtttctgaagctcctgccggcaaacttggccttgctgcccagttcctcttcaattcttaggaagcagaaagagagatggggagagaaagacagatgtcaaacttcaatgcaataaattttcccacccagagaggtagtcaaggacacacttcttgctangaacttggggacccaaccctcgctcagtctgcccgaata

SEQ ID NO: 291040 - DNA, 456 bp, Zea mays
  unsure (1)..(456): unsure at all n locations
gcatgatccctgccgccatggccgcgggatacaagcttatttttttttttttttttttttttctttttttttttttttttcaggtttatgcctttattgctgaaggaggagcggccccaagcaggaggccccaggaggggcctggaggggcctgggtcccaggaggggtgaatgtggtcccggttcctcctggtcccctgatggggcaggcggggatgacatcgtctgtccccagaggggccaaggctcccgggctctagatgtggcactgctcctccagctgggttgggttgaaggacagccggatgtgcatgggcagggccttgagggctttgtcgaatttctccagggcctcgtcgtccacctccggggtcctgaccaggcactggcaggccaggctttgctcgggctcagcactgttctccatgcanaagagcaggtatcactantgcggcc

SEQ ID NO: 291041 - DNA, 441 bp, Zea mays
  unsure (1)..(441): unsure at all n locations
gcatgatccctaccgccatgggcgcgggatacccaattataattccataatcacagtcaatccatcaattacagtccgtccactctccccgtggggtgttctgagctttgttttgattgtgggatgctatcagtgcaatgagggcaattctttcagcagggagggggttaggccccaccccggtgagttataaagtgcaaactccccccaagtgaggcgctgggaccaggtctgggatgcacagggcagtggaggggggtgggagccgttctggaagcagggatctgccctacaggggtattctgcataaagggggccctctcttctggcangagaggctgggaaggactagatcaggcagtgggggctggtcctgtggttctcagtatggctgcctattcangaagcgggagaacatggtgagggcagcctggggcttgt

SEQ ID NO: 291042 - DNA, 442 bp, Zea mays
gcataatccctaccgccatggccgcgggatacatggatatagctatttatttctatctactagaaaataaagtcatattttttcttaatttaatattggtcattgctaatcagaacacactattgccaggaacacagtagttattgttaaaatcagctgcactagatacaatttgaaaatatccagcaccaggttaattccaataacgaacccaatagattagttaatgctatgagaagactaaagagaaagagaaaagagacgcagacccaggcctggctccacatgctactaactaccagctctcagatgtgtcactgggaacaatacacactccatgcgttttgctacatctccagaagaggtaaggacttgagtccacacggggatgctcgcttgcaagtccttgaggcccacagcctggtgtgtttcacgcacagat

SEQ ID NO: 291043 - DNA, 447 bp, Zea mays
gcatgactcccgaccgccatgggcgcgggatacatgttcatggctggtctcgggctgctggttgtcgttggccttcatcagctcctggaatctagaaagcgcaagaggcccattcagaaggtagagatgggaacctcgagtcaaaacgacgtcgacatgagctggattcctcaggaaactctgaaccagatcaataaagcttcaccaagaaggttgcccaggaaacgggcacagaagagatcagtgggatctgatgagtaaatgttcctttgtgcaacaattcggtctttacttaacccgccctaatgtttttcggcctgatgggaattagtgcagagaagccatatcaccatagaaggcggctactacttatgtgtggactgagcaatccgagtctgtggcgatcatattgctgaaaatgcactgcatttatttttctaaagtaac

SEQ ID NO: 291044 - DNA, 370 bp, Zea mays
catgatccctaccgccatgggcgcgggatacaacttgactaagctggacaggaggaattcggggtatgtcctgaggctgtgagctttgggtcccatgcagctgggggagtccatacaaacctggaagtaaaccgtgtctggtttgtaaccttcgcttccgtgaatagagagggtggattaaatggttcccaggaagccctctgcgattgttgctcagtcactcagttgcatccagctctttgcggctccatggactgcagcacaccaggtttcctggtccttcaccgtctcctggagctggctcaaactcaggtccattgagttggtgatgccatccagtcatctagtcctctgtcatccccttctgcct

SEQ ID NO: 291045 - DNA, 355 bp, Zea mays
gccatgggcccgggatacatgacctcattggggcccagctggtggactgtgtctccaccacttctggaaccctcctccgcctgccagagacctgaggactctgttcatcattgcacacctccccagggtggggattgaggggcccagaagggctgcctgccctggctcaggcagggtcaccttgggaaggctcggaagcacaaatgagtgctgggcttgctgctgtgccaagggtcatatgtgactgccgctgttgacctgcgctgcgtcacagtggaggggtttgggcctgtgcttctctgccctttcacgaaagtggagccagaaaccttgccaaggccatggctgctgtctt

SEQ ID NO: 291046 - DNA, 414 bp, Zea mays
  unsure (1)..(414): unsure at all n locations
cgggctcgggatacaatgataccggttcctccatcgtccaccgcaaatgcttctaggcggactgttagctgcgttacaccctttttcttgacanaacctaacttgcgcagaaaacgagatgagattggcatggctttatttgtttttttttttgtcttttttgattttttttttttttggcgcttgactcaggatttaaaaactggaacggtgaaggtgacagcagtcggttggatcgagcattcccaaagttctacagtgtggccgaggacttgattgtacatggttttgttttttttttaatagtcattccaaatatcgcgaaatgcattgttacaggaagtcctttgccttcccaaaagccaccccgcttctctctaaggagaaggggccagtcctcgcccgagtccacac

SEQ ID NO: 291047 - DNA, 430 bp, Zea mays
gtatcatgacgctatcactacggagaacatcgaagtacatggtgaggaagtaaggattcagcgccctgaacatcgcgtggactgcaaaatgtctcctgaggttgagcgtgagtggcaccgtgttcaggccacagaggacatgtctgccgcacgggctgcagcggaggtaggtgctttctctcaggccgtggcaatcctggaagcccgtaggaggatactggaagcacaagcagcacaatcttcagacgaccagttcctggcattgatggcggagctgacggagatgcagcagagagtggagaaccggcggaagtacgaggagtcaggcagagctttcatgctggcaggcctgagctcagactcatggcagagagcatctgcacgaggggactcatcagagatcactaccactattcatacctaccagacg

SEQ ID NO: 291048 - DNA, 314 bp, Zea mays
gcgcagacacacacaaccagatgtcacccaaatccacccgtcggcacctccgcttcaagatgcatatctttgtaaaaaccctgactggcaagactatcaccctcgaggtggagtcgtctgacaccattgacaacgttaaagccaagatccaggacaatgagggcatccccccagatgaacagcggctcaactttgctggaaaacagcttgatgacggacgcacgcttgctgactacaacatccacaaggtgagcaccctccaccttgtgctccgatctcaagggacgcatgcagatctttgtgaaaaccctgac

SEQ ID NO: 291049 - DNA, 279 bp, Zea mays
acttatccgtcctctgctgtgccacggctggcaccgccgtcgacaccgacctctccgagtaggtcatccaaggccgcgtctattgcgagatctgctgcgcctggttcgtgaccattgtcaccgagtacatcacggagcgcagtgtgacgcgcgagtgcacgcacatcagtacctggatgccccatcgctccagcgacggcgtgacagatcggaaaggtacgtgaacgatctcactcctagacacacaggatgacgacatctgcgaagtggtcctggcgg

SEQ ID NO: 291050 - DNA, 386 bp, Zea mays
  unsure (1)..(386): unsure at all n locations
agccttcgaccaagccttcggccaagccttcgggttcaaaaccttcaaaaccccggcatgttcgtccccatccaagccgttctccccccggatgccaatgggccttacaaaaggtaccttctccaatccggaaaatggtttaagcaaaacgttcccaaccaagaaggaatagcccttccccaagccaatcttcggccttgactgggcgggtccgaactcaccgactaactaatgaagattctgactgagcgcggctactccttcancaacaccgctgagccgggaaatcgtgagggacatgaaggagaagctcgcctacatcgccctggactacgaacaggagatggagaccgccaagaccagctcttccgtggagaagagctacg

SEQ ID NO: 291051 - DNA, 404 bp, Zea mays
cgacgtggcggcgcgctggccggcctgctccgcgcgggagcgccgcggcggcgtcgacgtgttccgcctgctgtggcgcaccgcgttcgtcgcgctcatcaccctgtgcgccgtcctgctgcccttcttcaacagcatcctgggaatcctcggcagcatcggcttctggccgctcaccgtcttcttccccgtcgagatgtacatccgccagcagcagatcccgcggttcagcgccacgtggctggcgctgcaggccctcagcatcttctgcttcgtcatcaccgtcgcggccggggctgcctcggtacagggcgtgcgcgactcgctcaaaacctacgtgcccttccagaccaggtcgtgatgagcactgcacgtacggtcccatatgtagctcaaaaacttaa

SEQ ID NO: 291052 - DNA, 361 bp, Zea mays
gaaagacggaacggccttctgcaagcactccgctgacatctccagctccacgaccgcgtccgtcgctttcgcgtccaaagcctccaccgtccacgagatccagaacaagtctggcatcttctcgttcgatctgtcgtggagcgagatcgcaaccttgaagcccagcatcatctcccccttcgctcaggcaggcatgttaagaaatcctgcagcgaagaatgccggcaagctgatgactttgcccgaattcttagacttggccaaggccagcaacatcaccggtatactgatcgaaatagagcatgcttcctacctcgccaagagagggatcggcgtggtggaggcggtgtccagcgcgctg

SEQ ID NO: 291053 - DNA, 402 bp, Zea mays
ctaattttcatttcaaggaagacaactgtgtaattaagagaaggaacgggacaagatgttctttcagaggaagaaatcaaagaaagccaaagactccagaggatcgcagaagaaggggaaagatgggcgtgggaagaatgatcttttcgatcgtgccaagggagggcttgatgccctcgcaggaagcctgcaggaagccaagaaggacgccgaaacggcgactgagaagcttcaaggggatgtgaagtcgggcatggaaacgatccggcacaagggctcaggcctccttgagaaagccaaagaagaactcgggagtcactccgacgccagccgttcctcaaaggaactagagcgaggaagcgaggaacaggggaacaacaaggacatggacgctttcagtgc

SEQ ID NO: 291054 - DNA, 374 bp, Zea mays
aaaaaacattgatgtttattcacatagccccagaaccagatgctattagtgagtccataagtactttgaagttcgccgagcgtgtttccactattgagcttggagcagccaagtcaagcaaggaaggaggaggaggaggaggaggagaagccagagagctcaaagaacagattgcttgcctcagggcagcattagctaggaaagatggagatcatgagagcatacgaagcactcaatcgagcccagacatatatagaatgggaacgggtaatgcatcacctgcgtccaggcacccaatagaagatgggatcatagagaacgactcagcattgggagatttggctgaacactcacagttcgggagcagcaattcc

SEQ ID NO: 291055 - DNA, 395 bp, Zea mays
ctcgcgggccgacacacgcctctaggctgggtcgtggtagccggcgccacagcctctcctgctgtcgctgctggtcgccgtgctagcggtggccgccgatgtacgctaacgccggccaagccaatcccctgaggcttggcgggcgcgtggtacaccacagctaaggtaagttcaccgccgggccgtggaaacacgcccacgcgaccttctaccgtgggcgggacgggtccggcatcacggctggctcttgcggctacaaggatactcgcacgcaggggtatggcgtgcacactgtggccgtcagcacggtgctgtacggtgacggcacggcatgcagatggtgctacgacgtatgctgcgtgaacagccctagcgggtgcaagcccaccggagca

SEQ ID NO: 291056 - DNA, 366 bp, Zea mays
tcccgggtccatccaagcccccaaaattaatccttgtaaggacggcaaggggccggacacgccgctggaaaaagcggtctccggccggctgaagcaattcagggccatgaaccaattcaagaaggctgcactgcggttcatcgcggggtgcctgtcagaagacgacatccgtgggctcaaggagatgttcaagagcatggactccgacagcagcggcaccatcaccgtggactagctgccgacacggctggccaacaaggtcaccaagctgatcgatgccgaactccagcagctcatcgaagctgcctactccaacgggaacgggacgatcgactacgaggagttcatcactgccacgatgcacat

SEQ ID NO: 291057 - DNA, 237 bp, Zea mays
aaagctgacggctgtcagactcgagatgctggctcatctgcctcaggagctattattgtatgtgaccgtttgcgtgtcgcaaatgttgctgaggcaacagccgtgatttctattggaggacaagggattgcggtttcaacggattagaaagctgatcagacagattatacacagagatctgagcaggcatgagggccagctctgtggcctgcgatatggcgactgggtggtgttctt

SEQ ID NO: 291058 - DNA, 387 bp, Zea mays
cccgggtccatccaagcccccaaattaacttcctacaaggcgagggatgggaccattggactgcataaggaattgcgtccaaatggcatggggcccggcaacaatacgccgtcagccgcagtcaaccagatggttgccgacgccagacactacatcgacaaagactacaatgagcatatgaagcatctgcatgacacgaaacacagactgtgtagtctagaaaacaaactaacggacgtctgatgtgtccgaccaggaggtcaacagcatcctgaagcagttcgataagaaggatatggagtacatgcagttgcagaggcacattgttaacgtcaaagatttcgagctgctaacaatgatatggaacggagcttttggcgacgtcag

SEQ ID NO: 291059 - DNA, 430 bp, Zea mays
agcaatgcgtcggcctacgcgtccgctgagagcttcgaaaggctggagaagatcgggcagggcacgtacagcagcgtgttccgggcgcgggagctggccacgggcctgctggtgtcgctcatcaatgtgcagttcgacattgtgcacctccagaacttgcagttcatggagcaggaaagttgtaaccgccgcatcctcagtggcctgccgaagctcgtcgaactcgaaggcatcaatacctcccgctcctctccctccatctaactcatcttcgaatacctctagcacgacctggtcggcctcaactcctcatccgatatcatcttcaccgagccccagatcaagtgctacatgcgacagctgctggtaggggctggcgcactgcaatgcacgcggtgtgatgcaccgggacatcatttgcgccaacctg

SEQ ID NO: 291060 - DNA, 357 bp, Zea mays
aggtcaaccaaccccaaaccaaggaaaaattccattggcaagaagaaggaattgcctcccaatggcaaggagcccggcaacaatgcgccgtcaagcgcaaccaaccagagggttgcggcggccaagcagtacatcgagaaacactacaaggagcagatgaagcatctgcaggacaggaaagaaagacggtgtagtctagaaaagaaactagcggacgctgatgtgtccgaagaggaggtcaacaacatcctgaagcagttcgagaagaaagagacggagtacatgcggttgcaaaggcacaaaatgagcgtcgaggatttcgagctgctaacaatgatagggaagggagcttttggc

SEQ ID NO: 291061 - DNA, 361 bp, Zea mays
gaatcaagagtcatctctatgtctttgacattgcacggatgcagcttttgcctcgacgcataccagttgactccacactgctgcatgaccatcatagccatgtgacacggccaacagcgtggcttagtcatataaatgtgacgtaatacctcgatccaatgtccacgaacaaggattctacatacgctgtcgcctagatggctgctgtggccgaccgctgtattcactacgaaggtgaattccgtctcatcatgaacatcatcgtcaatgcactgattcccttgccgcacaaccagtctggcaatcgccctatcggctcgtcaactaccatgctgccgagcgatccggactgtgatttctc

SEQ ID NO: 291062 - DNA, 418 bp, Zea mays
gcggtggataagctcctcaccaggggcagcatgctccagctcgtccatgtgagggttgaagcaaacaaagatgagggtgacgcagagataacacagctatttatatcatatagagggtattgtgctcgtaaagggatgcatctgaaggagttgatcttggatggcactgacatctccaaagcaataattgactatgccactagcaatgccatcacagacattgtcgtcggcgcatcaactaagaacacattcatcagaaggtttagaaatcccgatgtcccaacgtgtttgatgaagatggcgcctgattattgcacggtacatgtcatccacaaggcaaaagccatccaggtgaaggcagccaaagctcctgcaccctttgctactctccctccaaagcaacactcgcaaccaaaca

SEQ ID NO: 291063 - DNA, 275 bp, Zea mays
acgcgtctaccctagcttctggtccacatccttttctctcctcatctggggattaatcctgattgttcttctggcagtagtaagactagaaggatcggatcggagtcatcagcctatgtcgaggtcaggttcgggaatggccgtctgtgatgaatgcatgctcaagttccaggatctctccgcatgcaggagcttcggcttcatcgtgttcaagatgaaccagaacgtgcagcaggttggtttggacaggctgcgggggccaggagatattctac

SEQ ID NO: 291064 - DNA, 457 bp, Zea mays
  unsure (1)..(457): unsure at all n locations
gggtcggccacgcgtccacggaacccggcgccctcaccgtcctcctcgcggacgagcacgtccgcggcctgcaggtccgccgcgccgccgccgacgactgggtcaccgtgcagcccgtccgcgacgccttcatcgtcaacgtcggcgaccaagtccagatactgagcaactccgtgtacaagagcgtggagcaccgggtggtcgtgaacgccgaggaggagcgcatttccctcgcgctcttctacaaccccaagggcgacgtccccatcgccccggcgccggagctggtggcggctgcgagcctgccggcgctctacccgacgatgaccttcgacgagtacaggctctacgtcaggaacaagggcgccaggggcaaggcgcagatcgaggctctcaangggcaggggaacacagaaagtcaattatagacgacgactagctagctactagctagtac

SEQ ID NO: 291065 - DNA, 285 bp, Zea mays
agtctacgtcgtctcactcaccccgcattcacgcctccctcatcaaatagcgtcccgcccttttcggacattcgcaggggggacaggaactcatccgccacggacacgagtccggcgacgaccttcgccgtcatcttatccgtcctcttctgtgccgcagctgtcaccgccgtctacatcgacgtcaccgactacttcatccaacgcctcgtctattgctacacctgccgctccgggttcgtgactaatgtcaccgagtacatcgctgccgccaatgtgatgctg

SEQ ID NO: 291066 - DNA, 340 bp, Zea mays
accaaaaaaaaaaaaacaaaaaaaaaagaaaaaataaaaaaattcaaaagaaaaaaatgacactcaaggagcaagcaaaagaaactcgaccagggcatcctgattataatgtttgagatgccttttaacatttggtgtggtggatgcaattccatgatagcgaagggagtaagatttaatgctgagaagaaacacgttgggaattattactctaccaagatatggagcttcatcatgaaatcgccctgttgcaagcatgggattgtcatacagacagacccaacagatactgaatatgtcataatcagtggggcccacaagaagacagaagattttgatg

SEQ ID NO: 291067 - DNA, 414 bp, Zea mays
accaaaacattcaatggccccaacggcggcggaggaaatggaaaggatggtggaggcggattggaaggaggggatgaggaaaaggaaccggtacgggctggtggagtaccgggcgctgccggcttacctgcgggacaacgagtacatccaccgccactaccgctgcgagtggccgctcccgcaagttctgctctccgccttctccatccacaacgagaccctcaacgtctggactattacagaggaggcaaatatagatactccagtaaaggaaatgaggatgctgaagagaaaaagctagcttgggaggaacgggagatcgattcttgcctgactctgattgcaatgcgtcgaattggcaaaatatttacgcgtttatttcctgcttgtgcttaattcctgcgtgtgtttctg

SEQ ID NO: 291068 - DNA, 305 bp, Zea mays
tattcacgggacaacacactagactgatgctcgtatagctcgccaaaataatgaagaggcccaccatggcatcatacgtcgctcccattggagctagccctcgcgctagtggcggccaccgccccacaagtagcggaggcaaagaagaagatacggcagagagcggcgaggcggccgatgcgaagaagatccaagacgacttctgctcgacgctgtgcgagggcaagaaggggacggacctggtcgtgtgcaaggagtcctgcgcgctctcccagcagtccaacctggtgctgtacggcaggatc

SEQ ID NO: 291069 - DNA, 394 bp, Zea mays
  unsure (1)..(394): unsure at all n locations
cgcgcagacagctccgaacactcagtgctcttcgcccacacctggcccagacagatatgcagatcacgtccccttcacactcgcagggcctgtcacggatcaagtgccctgggcttcctcacgttgtcaacaacgactacacgcactggctcatgtacgccattggcggcggcgacgcgccaaccatcatcagccagggcaaccgctacatagcaccaccaaacatcgccgccaaagtgatcaccaagcactacgcggaagaaggcgtgtggaagaactgggtgtggcacacggaggacgacctgttcatgaacggcgccatcttcaatccgtccggcggcgcccccaagcaggtcgacnacaacgagtgggtaaagcccaagccaggaaacta

SEQ ID NO: 291070 - DNA, 309 bp, Zea mays
cacgagctcgcgccatcagctcggggctacggcccacgtgccagtggtcagtctggagctgacggggctgcccggcgcagcaacagtccgaatacccggacaaggcagtcctggaatacgtgctgcggaccgtgggaacattcccgcccatcgtcgtcgccagcgaggcgcgcaccctcgaggagcgcctcgcggaagccgcagtcgggtgggccatcatcgtctatcgatgcgactgcgccgaaagcttcaacgagttcaacgccaacaatatcacggagaccttccgcgtcctcctggaaatgtccg

SEQ ID NO: 291071 - DNA, 429 bp, Zea mays
ctcgcgggtcgatacaagcctctacacagacgtcgtgtgaagagagaggcagaggcaggcggccggtgcatgcatgccccgccctccctccgtgcgcccccgaagacctcctccgcccccggcgcggtgagctcgtgaccgcccggacggcacccgcctctgcggtttgaagctcgctgcaagcactccaattaaacaaaagaagccaccatggcgttcaattctccggaggagatatggggggacatctaactgtgtaaaatatcggtggaggaggtgttcacgacactgaaatgcgaccgcaaggggctgtctagcacagagggcgagaaccggctcatgacgttcgggcccaacaagctggaggagaagaaggagaacaacctcctcaagttcctgggcttcatgtggaacccgctctcgtgggtc

SEQ ID NO: 291072 - DNA, 231 bp, Zea mays
aacacgtccgcccaagcgtccgtctcaccctcgctcgttcacacatctaataacgaaaggtctcgcccttttcctccgacatccacaggggggaggggaaaacgactgcattcacccggcggcagtactggcctcggttccggctccggcgacgacgaccgccgctgtaatcctactcctatgcgtcgtcctctcactgtccactgctgacgaccccaacctctcagacta

SEQ ID NO: 291073 - DNA, 301 bp, Zea mays
agtttatcacctctaagttgtgatttttcatgggagactcactgaagcagatgcacacagatactttcagtagcttatcgacggtgttgatttttgtcacaagaaaaggagtctaccattgagacttaaaggatgcttagtgggtcaactgtagggatctttccttctacatacgacctatgggactcgctttttggtaggtgcccgtgcgatgccacggaacataaattgcgaacctccaatggacttcatttgagacaagtgatgcccaagaaaatgggggtaaactgacacagctatc

SEQ ID NO: 291074 - DNA, 222 bp, Zea mays
cgcccaggccgatacaacactctagaggcagtcgtatcacacagccagcgggcagccatgagggagatcctccacatccagggcgggcagtgcgggaaccagatcggggccaagttctgggaggtgatctgcgacgagcacgggatcgacgccacgggccgctacgcgggggactcagacctccagctcgagcgcgtcaacgtctactacaacgaggccagc

SEQ ID NO: 291075 - DNA, 335 bp, Zea mays
acgcgtccaaacacacgtccgcccacgcgtccggcatcttccctgtcgtggatccacatgaacaaggttggccctacccctgctctttttaaggctgaaatgccctggtcagcccgaagaggaaatctctcggagaaacaaagagtcttcaaaacggtgaaaggaggttcctttatagcttacttgatgcaatgcagtctctaacatcgcaagctgttgttattggtgtgagttgccgcttggtgtcactcttgattgatgtttcaaacaaaaaagatgtcattcctggttatgtagtaatgatcatgcaacaccatataaagcacatgtgtttc

SEQ ID NO: 291076 - DNA, 247 bp, Zea mays
atgcgcaccggacccggagcaggatttcagcaccgggtacgacggcagggatgtcgtgctccagaacctggtccagatctgcgtgttcagggtcgccaatgggactcgcaggccgtggatgtggtgggactacgtgcacgacttcgctgtgaggtgcccgatgaaggagaagaagtacacgcgtgagtgtgcgaacggtgttatcaattcacttggactggacattgagaaaatcaacaagtgtgtt

SEQ ID NO: 291077 - DNA, 207 bp, Zea mays
gggtcagcagctcaatcatcctcacacacacagctcacacacactccaatatgaaacgacatgatcacggcctctggacctcggctatcgcacccaagacgagaagaaaaacgcgaacgcagcgcgagcaaaaatcagacactctgctcacctgtgcagggcagaagggaccgacctggtcgtgtgcaaggagtcctgcgcgctctc

SEQ ID NO: 291078 - DNA, 379 bp, Zea mays
accacgcgtccgcggacgcgtgggcggacgcgtgggatttcgaataacacagttgagcgcgacgatgggatccctcgctaataacatcatggtcgtgggtgtcgtccttgcagcgctcgtcgccggcgggtcatgcgggcccccgaaggtgccgcccggtcccaacatcaccaccaactacaacggcaagtggctcaccgccagggccacctggtacggtcagcccaacggtgccggcgctcctgacaacggcggtgcgtgcgggatcaagaacgtgaacctgccaccctacagcggcatgacggcgtgcggcaacgtccccatcttcaaggacggcaagggctgcggctcatgctacgaggtgagatgcaagggaaaa

SEQ ID NO: 291079 - DNA, 381 bp, Zea mays
acgcgtctaacacggtctaatgaagcgcaacgatttctgaccatcccctgacggtttgcggtggccgtccaaatccaatcccaggcgaccatgatctgcgtggacaactccgagtggatgaggaatggggactatcccccatcgcggttcgcggcgcaagcccacgccttcgccgtcctctccggcgccaagacggaggcgaacctggagagcacggtggggctggtggccatggcgggcaaaggcgtcagcgtgctcgtcccgccaaacaacgacttctgcaaagtcctgtcatgcatgaacgggctggaaattggtggtgaagcaaacttgactgctgcgattcacgtcgctcaatttgcactcaagaatcggcaagac

SEQ ID NO: 291080 - DNA, 311 bp, Zea mays
gccgtgctagcggtggccgcggatgtcgccaacgccggccacgccaagcccctgacgcctggcgggcgcgtggtacaccacaaccacggcaagttcacggccgggccgtggaaacccgcccacgcgaccttctacggcgggcgggacgggtccggcaccacggcgggcgcgtgcgggtacaaggacacgcgcgcgcaggggtatggcgtgcagacggtggccgtgagcacttcgacctcagcatgcccgcgttcctccagatcgcgcaggagaaggccggcatcgtgcccatctcctaccgcaaggtggcg

SEQ ID NO: 291081 - DNA, 342 bp, Zea mays
ggtcgagacaagcctctagtataattcgggctatggctccgcctcgcgcgcccgatccgggccgtcctccttttttcccctcttatatttgatcggtttctttgcgtcgttcacgcagggatcgtcggagaggaatcgcaaagagggccgtctcatccgagttaaggaagccatggagcacaaggaggctgggtgccaggcccccgagggacccatcctctgcatcaataactgtggcttcttcggcagcgcggcgaccatgaacatgtgctccaagtgccacaaggagatgataacgaagcaggatcaagccaagctggctgcctcctctatccacagcat

SEQ ID NO: 291082 - DNA, 344 bp, Zea mays
aagaccaatgtcaacgagtacatcgcaggcgccaaggtgaagctggagtgcaagcacttcggcaccggcaagctcgatcgctccatccacggggtgacccaccggaacggcacatacacgatccaactcatggacagccacgaggaggacatcggctaagtggtcttggtggagagcccgcacaaggactgcagaccaggtacatgccgacagggaccgcgccggcatcatgctcaccatgaacgtcggcattaacgagcttctgcgctcctggaaaagtctcgggtaactcaaggacttgccactgatcatctacgcatccctgctcaaacagttggactcag

SEQ ID NO: 291083 - DNA, 373 bp, Zea mays
actagttctagatcgcgacggccgccctttttttttttttttgcaaaagtaactccattgcatttgtgtacagatgtacaaatttgcttgtttgagctgctatacacattacattacacacttgctgcttcacttcactataggactatgtctcgcctcttcttgatgttcattggctcggcaccagccgtccctttcctcatcatcgccacaaactctgaataatctatccttccatcattgtcagagtcggcatcggagatgatgtctttgattttatcggcgtcatacaacccttgctccttcaaggcgtgctcaagctcttctttagtaatgtacccgctgttgtccttgtcgaaatactggaatgctg

SEQ ID NO: 291084 - DNA, 323 bp, Zea mays
gacacaagcgtctagagagagtcctgttagatcgacttgtgtcattgcacgagcacatccaccggcgagcaccgggggcgctctccgtccgctaccgacggagcaacgcgccgagctaagatgtgctagcatacgtatgtagccgagcaactgatgtgcgaaatagacggtaagcaactcacttcggcggccatcttcggccacgacggcgccatgtgcgctcagagcagcgcagtcaccgagttcacgcccaaggacatggatggcatcatgaacgacttcgacgacccggtgcagctcgcgtggacctgcctgatattggg

SEQ ID NO: 291085 - DNA, 336 bp, Zea mays
acccacgcgtccgctccaccaccaccaccaagctcaacaacagccagctcgcgaaaataatgaagagccgcagcatggcatcatcggccgcgctcttggtgctagccctcgcgctagtggcggccaccgccccacaggtagcggaggcaaagaagaagagagcggcggagagcggcgaggcggcggaggcgaagaagatccaggacgacttctgctcgacgctgtgcgagggcaagaaggggacggacctggtcgtgtgcaaggagtcctgcgcgctctcccagcagtccaacctggtgctgtacggcaggatccagtgcaagggcaagtgcaccg

SEQ ID NO: 291086 - DNA, 418 bp, Zea mays
cgggccgatccacgagtctgcccaggcgtcctgggagcacttggttttcatttacgagttcattgcaattacgagttatgttgagcgccgtagcgaacgtagccaaggccggccacgccaagcccctgacgcctggcgggcgtgtggtacacgacaaccacggcaagttcacggccgggccgtggaaacccgcccacgcgaccttctacggcgggcgggacgggtccggcaccacggcgggcgcgtgcgggtacaaggacacgcgcacgcaggggtacggcgtgcagacggtggccgtgagcacggtgctgttcggtgacggcacggcctgcggcgggtgctacgaggtgcggtgcgtggacagccctagcgggtgcaagcccgacgccgcggcactggtggtgacggtgaccgacct

SEQ ID NO: 291087 - DNA, 384 bp, Zea mays
gtcgatgacaagcctctagtgtgattcatcttaaagctcctgttaagatatttggagatttacacggacaatttggagatctgatgaggttatttgatgaatatggtgctccttcgactgcaggtgacattgcttacattgattatctattcttgggggattatgtagatcgcggccagcatagtttagaaactatcactcttcttcttgcattgaaggttgaatatcctcaaaatgtacatttgattcgaggaaatcacgaagctgcagatatcaatgctttgtttggtttccgaatagagtgtatagaacgaatgggcgaaagagatggtatctggacatggcatcgaatgaataggctatttaattggcttcctttggctg

SEQ ID NO: 291088 - DNA, 326 bp, Zea mays
cccacgcgtccgcccacgcgtccgcccacgcgtccggcggcggcggaggggcagtgggtgctcatggcaacggggcggacgccgaccaacattgcggtgatcaagtactgggggaagcgggacgaggcgctcatcctccccatcaacgacagcatcagcgtaacgctcgacgccgaccatctctccgccaccaccactgtcgccgtcagcccctcattcccttccgaccgcatgtggctcaatggcaaggagatctcgctattacgaggaaggtttcagagctgcctcagagaaatcagaaagcgtgctcgtgactttgacgacaa

SEQ ID NO: 291089 - DNA, 370 bp, Zea mays
tacgcgctgtcgtacaacgacgccggcgcggcggacggcgggcgacccatcgtgcacggcaccatccaggcgtacctccgcgacgcgcgggaccggctggaggccatggtgcttggcgcggagcgggagcgcgtgcggctggggctcaaggtcgtgcgcggtgcgtacctgacccgcgaggcccggctcgcgaccgcgctcggcgtgccgtcgcccgtgcacggcagcatccaggagacccacgactgctacaacggctgcgccgccttcctcctcgaccgcgtgcgccgcgggtccgcctccgtcatgctcgccacccacaacgtggagtcaggccaactcgcggcggcgcgtgcccaggagctgggga

SEQ ID NO: 291090 - DNA, 343 bp, Zea mays
cccacgcgtccgcgagcggcaggtaccgctggtacagctcgccgccgttggtcccgccggcccagccgccaccgcacacgcccgcgtcctcgatgcagctctggatccgacgccacgtctcatagtccccgaccatgtcctgcagccagtcggagtagtccgcgatccggtactccccgtacccggccccggacacggcggaggcggcgccccggttggtgacggcgaacgcgaaggcggtggccacgaacatgccgatgaggatcacgaagatggcgacgacgtacgcccagaggagcggcgtggcgcggcagcaagcgccggccagagccaggagcgacag

SEQ ID NO: 291091 - DNA, 351 bp, Zea mays
cccacacgtccgcccacgcgtccgcccacgcgtccgctcacgcgtccgcccgcctccatttcttcatggtcggcttcgcgccgctgacgtcaacggggtcccagcagtaccgcgccctgaccgtcccggagctgacccagcagatgtgggacgcgaagaacatgatgtgcgcggccgacccgcggcacgggcgctacctgacggcgtcggccatgttccgcgggaagatgagcaccaaggaggtggacgagcagatgctgaacgtgcagaacaagaactcgtcctacttcgtggagtggattccgaacaacgtgaagtcgagcgtgtgcgacatcccccccacgggcctgg

SEQ ID NO: 291092 - DNA, 273 bp, Zea mays
acgtagccgtatccaccagcaagggagcggtcacggcgacgacggtgaccaagagtcgcgctacatcaacacagccgatgcccacgtcaaaaaccggtcgctacctctctcgacattgatcgagatgctgaaggataagactgggaaggactacattgatgtagggtcaatccggctaacgctttttaacctcttcaaagacgatgccagcccgaagataaagaagttcatgaaggtcatgctgaacaagttacagcatgggcagcacggagg

SEQ ID NO: 291093 - DNA, 271 bp, Zea mays
acagacagtcacaagtacgagctcataaggaaggcatatgcaaaagcagccatggcgaactcgtcgtccggccttgcagtgaacgatcagtgcaaggtgaacttccgggagctgacgtcgcggcggagcttctggttcatcatgtgcaggatcgactacacagacatggagatcaaggtggacctcctcggcggaccgaaccagtgctacggccacttcaccgacagcctcccggccaaagaatgccgctacacgatctacgacctcgact

SEQ ID NO: 291094 - DNA, 329 bp, Zea mays
cagctgacccctgcactggacccttccgagagctactaggacccatcgaacgtgaacgaggaagcagtccccttcatgcgcacacaacagggagcttggaccggtcacccatagcaccatcggattcagaggcaacactgtcatcaccacagggcactcatcaatcaatgaaatctaagacaaacccatgaatcccagccagtacaacttgatcgcttcaaaagctgtcgcgacaaccatgctcatacaggggatgtaatgacaaccccttcacctgaaatgcatgttgatgctgtcgctggttccaacttcattttcagtaataacaa

SEQ ID NO: 291095 - DNA, 329 bp, Zea mays
agtgtctgctgttcggggacatcgacgtaacgtctaatgacagggacatgcatgtcagtctcgcattcagcgactttgagacggtgctggtgcagcgggcgctgcgcagccgtgagcgcttcatcgacgtggtgaacagcgactacacgcactggctcaggtacgcaataggaggtaaacggcatcctaccatcatcagcgacggcaaccgcgtccgcgtcgtcatcgacaatacgtgtaatgacgtgaggaagctggagtacacgcagtatagcgagtatccgagctgggtgtggaagtctcaggacgacctgttcctcaacggcgcc

SEQ ID NO: 291096 - DNA, 297 bp, Zea mays
tctagaagtcccgggccgacttcgcctcgacgtcgtctaatccacccggccttaaggctctctagtgcgattcagtcatatgacgtgtaggaagctgcggaaggtcctagcctgcacagatatagaccacgagcaagcaaccaagtgtgtcaccgaggctcttctgttcaaagctgatgcaccacaccggcaacgagctcttgcagcggacgcaataacctgccggaaattcgccgagcgggcttacaagtacagaccactcaaagttgttgagtttgatcggccctacccacagtg

SEQ ID NO: 291097 - DNA, 269 bp, Zea mays
gctcggcgcgatgcggcatgccaacctgctgccgccgctggcctaccactaccgcaaggacgagaagctcctggtctacgattacatccccaagggcagcctgctgtacgtcctccacggcgaccggggcatggactacgcggcgctggactggccgacgcggctcaaggtggccgtcggcgtcgcgcgcggcacggcgttcctccacacggcgctcgccggacacgaggcgccccacggcaacctcaagtcggccaacgtcctcctcg

SEQ ID NO: 291098 - DNA, 292 bp, Zea mays
ccccacccatcgcaacccgcaatgggtcgcgggggaagatccggaacacatcctcgccgcctcgccgccgctgcgcgacgctgccgttgtcgccgccagcctgcaggagttcgtcgcgcgcaattcgcacgcatcatcagacggcgtccggcggcagcgcaacgtctgcgtcacgtcgggcgggaccacggtgccgctggagcagcgatgcgtgcgctacatcgacaacgtcagctccggccaccgcggcgccgcgtccaccgagtatttcttaaaggctggctatgcggtc

SEQ ID NO: 291099 - DNA, 363 bp, Zea mays
ggaggccgcgatggtggcgcggtcctgccagccgaggaggaggcagcccctgtcctcggtgagccggtagccgtcgccggcgccgtagaggcccagcaagacctggctctgggcaacggcggccgggctgagcggcacaggctcaaatccacggccttccatgatgcgcctccaccgatccagccgctcgtgccgcgccacccgctcggcgccctcgcacgccaccacgttgcggatctccggcgccaggaggcactgctccaccttcatccgctgcgccgagtccgccgggaacgtcgcgtccagcgagtcgaagatcgccgagtagtagtgcagggcctccaaaaaccttcatggaataca

SEQ ID NO: 291100 - DNA, 383 bp, Zea mays
gccagccagccagccgcggcagcgcggccatggcgcccagcctccctgccctcccctcccggcgccccggcgcagcagcgcgacagccgacagccggtcggccagccagcagcgcggggctgagcctgccaggccgcctgagttgacccctgtcctccccctccctgcgttttgttctgaggaagaaagcctgttttgcgaaaatgcctcgacaaaatagactgcaatacgttcctgagcttcgaggaatcgacagtcaagctttgacgaccaagtgatcaagctcttcgagttctacgagattgaataccctgagcatctgtttggtgaagggtgatgctggagacttcgctgatgacgatgatgagttttaagtccaacga

SEQ ID NO: 291101 - DNA, 291 bp, Zea mays
taatggttaaggcttcagagtagaacatccacgtaatgggttagatcaaaatcaggggcaaatttctggcttggttaaaaaaatccactagactgtaggagagggataaagggttacgtcatgatagaaaacctcaggatgagcaattgaacagtgagaggtgaaggccagatagtgatggggggaaagggttcggggattttatcagccgggaccatgtttcggtctattcttaatataatacagggagggaggtatttagataaaaggatgagtttctgtttgataaaa

SEQ ID NO: 291102 - DNA, 326 bp, Zea mays
agcccacgcgtccggtttccggcgttgcgccaccgttcccgcgtgttgcgttgattcctcgggtcgaaccaacgcgcggcgcggggtcccggtcgcggccatggcgcggctgccgcccaagatccccaccgtagcgccggcgtggccggagttcgggggcgggcaccaacagcagcgcagcccctccgtgggcacgttcctcgccgccgcgcccatgcagccgtcgtgggtggacgagttcctcgacttctccgccgccaagcgcggcgcgcaccgccgctccgtcagcgactccgtggccttcctcgagcccgaacccggccccg

SEQ ID NO: 291103 - DNA, 390 bp, Zea mays
  unsure (1)..(390): unsure at all n locations
acccacacgtccgcatgaacaagttcaagaagaaggcgctgggcgtggtggcgcggaacctgccggtggaggagctggacaagtacgtgcagatgttccacctcatggagaaggaccacaacggcaacctcacgctggaggagctcatggacggcctccacatcaacggccagcccgtgccggagtcggagatcaggatgctgctcgaggccgccgacacggacggcaacggcaccctggactgcgacgagttcgtgacggtgtccctgcacctcaagaagatgagcaacgacgagtacctggcgtcggcgttcaggtacttcgacaaggacggcagcggcttcatcgagcccgangagctgcnggatgaactgggccccaacgaacaag

SEQ ID NO: 291104 - DNA, 322 bp, Zea mays
ccatgccagcggcgggggagacagaggaggcagaatgagattctagggagttaagggaggcgaccgccatgggggactccagcgacggggtggcggtcgacgtcgagcggatcttctttggcggcaaggggcatcgagtgaggacgaggcacggccctctatcggtttctgtatacggagacgaggacaagcccgcgctcgtaacttatccggatttagccttgaatcacatgtcttgcttccaaggattgttcttctgtccagaggccgcgtcgttgttgcttcacaatttctgtgtgtaccacatcacacctcaagggca

SEQ ID NO: 291105 - DNA, 418 bp, Zea mays
  unsure (1)..(418): unsure at all n locations
gccaactcgggtgcagcatgctgctgatgacgccgatctgcagggccttccggtggccatcaagcagctggaccgcaatggcttccagggcaacaacgagttcatggtggaggtgctcatgctcagcatgctgcaccaccccaacctcgtcagcctcgtcggttactgcgccgagggcgagcagcgcctgctcgtctacgagtacatggcactagggtccctcgaggaccacctgttattgctgcgtgacgatggccatggcagccctttgccctggcgcacgaggatgaagatcgcgctcggcgcggcgcggggcttagagtacctgcacgaaagcgctgtcatctaccgggacctcaagtcctccaacatcctcctcgnacaagactacgcgcccaagctctctgacttcggcctc

SEQ ID NO: 291106 - DNA, 259 bp, Zea mays
actcgcgggccgatgcaagcctctacagtgactcgtattgactgcgacgcgtccatcctgatcgacccgatgtcgaaccaggcctccgagaaggacgccggccccaacgtctccgtgaagggctacgacgtggtcgaggagatgaagacggagctggggaggaggtgcccgcgcatagagtcgtgcgcggacatcatcgcggtgagcggcgtcgtacgctgtgaggcacacgggccgtcgcgagtaggctttgtccctg

SEQ ID NO: 291107 - DNA, 441 bp, Zea mays
ggtcatggaatcccgggtcgatccaggcatcaattcgactaacacagttgaccccaacaatggaatccctcgctaataacatcatggtcttggttgtctcccttgcaccgctcgtcgccggcgggtcatgcgggcccccgaaggtgccgcccggtcacaacatcaccaccaactacaacggcaagtggctcaccgccagggccacctggtacggtcagcccaacggtgccggcgctcctgacaacggcggtgcgtgcgggatcaagaacgtgaacctgccaccctacagcggcatgacggcgtgcggcaacgtccccatcttcaaggacggcaagggctgcggctcatgctacgaggtgagatgcaaggaaaaacctgagtgctcgggcaatccagtcacggtgtacatcactgacatgaactacgagcctatcgctccct

SEQ ID NO: 291108 - DNA, 395 bp, Zea mays
tgcccacgcctttgggcaatgccggcaccaccatgcatggatgagaagtaggcagcaagcgggagacagatctcggcaaggctgaaaaattcaaagtgaggggaaagcaaatggccgtgcttaattattcaaaggctagtttcttgcctgttcaggtttaccactctagtttcgctgatgatgatgggatcacaaaagcttgcagctgtcctttgcttccactgaaaactcatatcaagggcccggcaccagcctctgaccctgataaagcggacattgttgatgaagccataactttctttcgagccaatgttttcttcaaaaatttcaatgtgaaaagctcagcagacaagttattgatctatctgacgttttatatcaatattgccttaaaa

SEQ ID NO: 291109 - DNA, 415 bp, Zea mays
gtttcaaagcaccatggggagatgtatgtccgctcgcatgggcatcccgtcaggagctttactctgggcttggttgatggtcgaggagagtctccagagcacaccgaacacgttcgcgacctcacatggcggtattgaggacttgtggagcatggggattgctcgccgacgtcgtgtagtctggggcattccgccgtgcgccgtggtcagggcaccagtgcgcataatccaagcagtgaggacacgtgtcatctgaagatcatcctggtacctagaatctcaagtcccaggtcagaacaagttacggcaggatgatcctcatggaaaatgctgcaataatttcttaattggcctaggtcttcgtctcccagtcaactttgggttgctggaccgttgtctccttataaggtaatta

SEQ ID NO: 291110 - DNA, 200 bp, Zea mays
cctccctccctcaaacaaattattaggaaaagtcccgcccttttcctccgacatccacaaagggggaagggaaaacaccttcattcaacccgccggaataattggctccgtttccggtcccggcaacaacaacggcggccttcacccaagcccaatccttcttctcccctgttgccccggttaacaacccaaacttcccc

SEQ ID NO: 291111 - DNA, 435 bp, Zea mays
cccacgcatccgggtgaagggcagcttcgggtacctcgacccggagtacttcaggcggcagcagctcacggagaagtccgacgtctactcgtacggcgtggtgctcttcgaggtgctctgcgcacggccggcgctgaacccgagcctgccgagggagcaggtcagcctcgccgaccatgcactgagctgccagaggaaggggacgctggaggacataatcgacccggtgctgaagggcaagatagcgccggactgcctgaagaagtacgccgagacggcggagaagtgcctgtgtgaccatggagtggaccggccgtccatgggcgacgtgctgtggaacctcgagttcgcgttgcagatgcaggacaccttcgagaacggcgggaagccggacggtggaagaggcagctcgagcgacagtggcaccgtgtctat

SEQ ID NO: 291112 - DNA, 407 bp, Zea mays
gttcgatctcacgagccgctgcacgcttaataacattgtagattggtacgacagggcgaggaaatggaataagacggctattccaatcctaatcgggacaaagttcgatgactttgcccagcttcctcttgaaatgcaatggaccattgttaaccaggccagagcatacgcaagagcgatgaaggcgaccctcttcttctcgagcgcgacgcacaacatcaacgtgaacaagatcttcaagttcatcacggccaagttcttcgacctgccgtggacggtggagcgcaacctcaccatcggcgagcccatcatagacttctgacgacctcctcctctagctaagtaattatgcagcacacacgacgacccttgtcggtatgatgggttgacagggtcgtcgcctcctc

SEQ ID NO: 291113 - DNA, 410 bp, Zea mays
actcgactccgcccagtttttccaccaggcgctgtacctggggggcgtcaccgccgcccccgctcggcccacgctccgcctcatgaagcagaacctcgcgttcctctcgagcggggtcaccgagcaggcccagctgccggccgtgctcgaggtgatgagggcctccgtggaggccttcctgacggtcgtcctcgctggcggcagcgggcgggccttcgcccgcggggaccacgccgccgtggccgcggacttcgcgagcttgaagcgcctgttctgcagtttcggggtcggggaggaggcggtcgagagggagacggtgcgggcggaaggggtgctggcgctcatggccgttccgacggaacagctcatccatgagttgctcggccactatgcttccactccgatgagag

SEQ ID NO: 291114 - DNA, 222 bp, Zea mays
ggggaattctgacatctatagatatcctgatgcctgttatcgcccaaaatattcctcctgattccactacattctataaggtcatgactcagtgtcctgggtgtggctcagtatacaccccaattcttgatgctcgtcacacaatgcattatggaaaatttttacattttcctgttcttgacatggatggaaatcttgtgactgtttttgatgttcttcaca

SEQ ID NO: 291115 - DNA, 354 bp, Zea mays
  unsure (1)..(354): unsure at all n locations
acgcgcatgccgcagcatataggcatagccacgcccacgggcacgggccatgtgatgactgtcacgatgggcatgatgaggagccgtcccaagctcgtcatgttgtcgggtcggagattcttgancttgggattgtatcgcactcagtgatcatccggctatctttgggcgtctcacagaatccttgcaccatcaaacctctaagtgctgctctctccttccaccagttttttgagggctttgcatttggcggctgcatttccgaggctcagttcaagagtttctctgcactccttatggctttcttcttcgctatcaaaagacctgctgggattaccgtggggtctggtatcg

SEQ ID NO: 291116 - DNA, 402 bp, Zea mays
ctcacgggtcgatgcaagcctctaaaatgagtctcacaaccgattcaactacaagcttgcgggcaaaaatggcaaaggctctcctaggtggcctatcggcgatcctcgtcgtggcggtggtcgtcggtgtggtcgccaccgtcacccgctccggcaagaaggccggcgacaacttcacggtcccgggggaggcttcccttgccacgtccggcaagtcggtcaagtccctgtgcgcgcccaccctatacaaggagtcgtgcgagaagacactgtcccaggccaccaatggcaccgagaaccccaaggaggtgttccacagcgtggccaaggtggcgctggagtcggtccagacggcggtcgagcagtccaagtcgatcggcgaggccaaggccagcgactcca

SEQ ID NO: 291117 - DNA, 396 bp, Zea mays
tacggtgagccgctgtacgtcgcggctgcgtccagctccgcctggtgccgggactccgtggttttgggcatctgcttcgtctctggtcgatctgcttcatatacttctagatctgcgccatctccgttgctacgaccttgaccccaagaagtttgatgaggacttcaatatactaaactggtggcatgaacataagttgtcctatcctattctatctatcttagctagagatgttatttctgttcctgtctcaacaatttcctcagaatctgcatttagcctttgtggcaggataattgaggaacgacgacgtcgcctagcaccagaaatggtagagatgttactttgcatgaaagattgggaactaagagaagcaagagggcaacactctacaca

SEQ ID NO: 291118 - DNA, 429 bp, Zea mays
ctcatgggtcgatacacgcctctagactgattcgcaccaaggtggcctgtgggcgatcgtcgtcgtcgcggtggtcgtcggcgttgtcgccaccgtcacccactccggcaagaaggccggcgacgacttcaccgtcccgggggaagcctccattgccacgtccggcaagtcggtcgagtccctgtgcgcgcccacgttgtacaaggagtcgtgtgagaagacgctctcccaggccaccaatggcaccgagaaccccaaggaggtgttccacagcgttgccaaggtggcgctggagtcggtgaaaacagcggtcgagcagtccaagacgatcggcgaggctaaggccagcgactccatgaccgagagcgcgcgagaggactgcaagaagctcctcgaggacgccgttgacgacctcaggggcatgctcga

SEQ ID NO: 291119 - DNA, 431 bp, Zea mays
tgggtcgttgcaaacctctacactgacttctggtacctggtgtccgcctgcctcatcctcatgctcttctccctcctgcggatcatcttcccgctgggcaggacggggaccatggtgtacggctgcatcgccgcgctcgtcttctccggcttcatcatctacgacaccgacaacctcatcagggtctactcctacgacgagtacgtcgccgccgccatcgagctctacctcgacatcatcaacctcttccaggccatcctagcggtgctcgaaggcgtcgactgatagggtcatatatataacacggccggctgaggctcatgggctgtgagcatatatacataggatcatatatatgcaatctatacatgagctaccactaccactacccagaaattggttccaagcttgcttggcaatctgttatccat

SEQ ID NO: 291120 - DNA, 223 bp, Zea mays
gtcgatgcacgactctaaactcgactcctatgtaaccactcaagtgcatcgtcggccagccgtgctagtagacagcggcccggtcgggcacatactcctcttcctatatacatcggatttggatgggcggcatatatgtacgtgtgtgtaatatattattactacatcttgtactatatgcgacgattgcttgactgatgaatcacgctttttaggttagacc

SEQ ID NO: 291121 - DNA, 414 bp, Zea mays
cgaagatggcgttcatcagcaataccgcaattgaaggcggcggccttggcccccctgcggccgggcccaaccgtttcccccggcgccccccccgccgccggtggcgttgccggagggggcccgtcggtgccggccggtccgctggacatcgcgcagctgggcgccaaaggcgacggcaagtcggacagcaccccgatgatcctcaaggcgtggaagaacgcgtgcgaggcgacgggggtacagaagatcgtcatcccgccgggcaactacctgacgggcgggctggagctgaagggcccctgcaagtcctccatcatcatccgtctcgacggcaacctgctcggcaccggcgacctcagcgcgtaccaaaggaactggatcgagatcgagaacgtcgagaacctgtcaatcaac

SEQ ID NO: 291122 - DNA, 418 bp, Zea mays
  unsure (1)..(418): unsure at all n locations
tacagacactcgtgcgaacgcgtgggcggacgcgtgggcggacgcgtgggcggacgcgtgggtgcgtgcctagcatgcatgcatgtgacgacctctcctcctcgctgtctctctgtatctgcaactgcaagcaaggaaattaattaaaagaagatcggcgccatggcggcaacgacgacggggatgcagatgatgcaggtgcagcaggcggcggcgttgctgctgtgcttggttgtgttggcggcgtctacgcgggtcgcgctgggcaactgccgcgacgactgcatggctgcatgcaacggctggaccatcgtctgccagctctcctgtgccagcgcatgctacggagaagtcgggatcacaaccttaggtacgtcggctgtattagcgaaagcagaagcgcctgcatcnagcacac

SEQ ID NO: 291123 - DNA, 296 bp, Zea mays
caggcacaggtccagaagtcgcgggacgcagcaggccacaagtccgggtgattgacccagcgacgacgccgccgaactcgtcaaccccaggaaaggcacgctccggcacgccgtgacccgggcccgggcgctgtggatcaacttcgcgcgcgacattgtgattcaactctggcaagaactcatcgtgaacagcgaaaagaccatcgaacggccgcgaacgcaagtgcacatcgttggcgcgcagattaccctgcagaacgtgcgcaacgtgatcctccacaacctgcacgtccacg

SEQ ID NO: 291124 - DNA, 399 bp, Zea mays
ggacaaaactcctatctgaacggtaatcaactcaacaatgactggaatgatgttcccaacaacaaaggacttcaattaagtgttcctgtaaatgaattgggcatatgggcaaattcctggtaaaatgacaattaagttccccaatggaaggcaatcaactgcccaattacacctaacaaaatccttagaatcatcaaagaatatgcttttgttgcatctccctatcctgttattaatactctagaagaacaccttacacctgatcttcaagagagagtagctaagatggtcctttaagtgtctggagacatcctgtattaccctgaatccaaacatcttcaagaatttccttcacctgaagctctaaaggggcgtgtcatgctgtcaacaaaaccccca

SEQ ID NO: 291125 - DNA, 362 bp, Zea mays
  unsure (1)..(362): unsure at all n locations
ccccaagattggattcccccccaaaaacaacaagggccttggcccccttctttccgggctcgtcccccgccggtccttccggccccccaaaggtgcaacccggcccaacaacacaacaactacaacggaaatggtcaacgctagggcaccttgtacggtcagcccaaacggtgccggcgctcctgacaacggcggtgcgtgcgggatcaagaacgtgaacctgccaccctacagcggcatgacggcgtgcggcaacgtcnccatcttcaaggacggcaagggctgcggctcatgctacgaagtgagatgcaaggaaaaacctgagtgctcgggcaatccagtcacngtgtacatcactgaca

SEQ ID NO: 291126 - DNA, 421 bp, Zea mays
  unsure (1)..(421): unsure at all n locations
cggctctagaccttggtcaacgaagtgcgcaacctcgggagcaccaaatgggatgaccatgaaatggccaaagttattctaagatcactcattttttgcaatcctacgcaagttcaattaattcgtggtgatcctagatataagctaatgtctcccgaggaggttataggaaagtttgtgagctttgaattgatgatcaaaggctccaaacaaatcatcaacttggagcaaggcggcacctccacacccgaggtgcaacccgtcgcattcaaaggcaacagaggaaaagaaagaatagtctcaatcaagtaggctttccatcgacgcctccaagctcgacaacgaggaaatggcactcatcatcaagagcttccgccaaatcctcaagcanaggagagggaaggagtacaaaccccgctcc

SEQ ID NO: 291127 - DNA, 404 bp, Zea mays
cgggtcgaccaagcctccgaacaagcctccggccaaaaggaaaggaacttagaaatcctccaaatccttgattcaaataaaacaactcctcctccctcccctcaataacaacccaaacttgtaaccggcaggattctaacaaaaacttaattactttatggacggattggtaggcctcttgaaagtccgcgtggtccggggtatcaaccttgcctaccgcgacgcaagaggcagcgatccgtatgtcgtcctacggcttggcaagaagaaactgaagacaagcgtgaagaagagatccgtgaaccccatatggcaagaggagctaactctgaccgtcacagatcccagccaaccactgaagctggaggtgttcgacaaggacaccttcagcagagacgacccca

SEQ ID NO: 291128 - DNA, 303 bp, Zea mays
tgtgtttctcttgcatgaggatcatcatcctacatgggatcaccagctcctcttccacacgactcgccggggcgggatatacgaaaccatcaatattatcatccaggattcagtacatcacctgattccacatcatccgcagcttagattctaccctgcttttctgttcgcagctcaattccaatatcccaattgcatctcaattcaattcaatcaattctatcaatcgcatcctgccaggcatcatccctaccaactaggctcactacactttcactcagattcgcttttacttatccaacc

SEQ ID NO: 291129 - DNA, 354 bp, Zea mays
  unsure (1)..(354): unsure at all n locations
ctcacgtacaagacgacgtcgtcgtgcggcggggacgactacgaggacggcggcggcggcggaggcggcgaatgcggtagatctaagaagtacgttgttcgtccgaaggtagggcagacagtcccgtgcggaggagagaggccggcgacgggatgctggacgcgggtggacccgtccctcttcaagctcaagagcgacaccttccgaaaagacaagaagaaatgcgcggctccaaactacgctgcctactatccgataggcgttgacctgtntgcctgccccaagaaggtccatcacatcgcgcagcacctcgacgttcggcagatcaagacgcagccaaaagatcccgtcgct

SEQ ID NO: 291130 - DNA, 427 bp, Zea mays
ctcgcgggtcgacacaagcctctagatgtatgcggatgaggccaatccttctcctatctcgtcccggagtcccgggggaaattttgccccagaaacactagcgcgtcggatcacaagcaagggcgaaaattttctgtggctccagcggctgaaggacgctgcggcacccatgtcggacgacactggtggccgcgctctacccaagttcggcgagtgggacgtgaacaacccggcgtccgcggacgggttcacggtcatcttcagcaaggccagggacgagaagaaagctcccccgacccaaggccacatcaggaacaacaggtcggtgtcggctgacagcaaggactccagggccgagaagatgacctcctacaacgccaggaccaacgcgtcgaagaaatggttctgccgtgtctcgcccaacccc

SEQ ID NO: 291131 - DNA, 396 bp, Zea mays
aaacgtccggatccttgcactccaaggggatttacacgcatagcaggatcagctaaacttcctgttggtgttcttgagccgaaggttgaatacagaccttttgctcattctgcggggaacttctctgagtgtagatctgcagcactaacactactgcaaaaaggaaatgagggatgtacatatcatgaatgccgccttggagcagcatttgtaccataattggaagggaaatttttggcgacagaaaacttttaccatacttcaaagttctttggtctgagttcgaagcccttcctttctgatctgatggtggctggggagaaattttgccatggggattggtcaaagattaaaaataagtacagttcctttgatgacggacaactgcttcttttt

SEQ ID NO: 291132 - DNA, 389 bp, Zea mays
acccacgcgacggatgaagcttctcctcaggagacgcatggaaatcttcatcaacatcctcgcggggtcgactatcaccctcgaggtggtctctgctgacatcaacgacaacgtcggcgtcactctacacgacaaggagggcatttctccagacaagcagctcctcaattgtgccaggatgcacctcgacgacagtcacacggtgagcaactacaacattcagctggatagcacgcgccacatgcagctgcttctcaagagccggatgcacatcatcatcaacactctggtcgactcgactaacacccttgatgtcgtctctgctgatatcaatgataatgtcggcgtcactctggacgaccaggagggcatttctgccgaccagcagc

SEQ ID NO: 291133 - DNA, 433 bp, Zea mays
tcgtaggtcgttacaacactctagactgagtcgtactcacctcacacaaataataaggaaaggtcccgcccttttcctccgacatccacaggggggaggggaaaacacgtgcattcacccggcggcaataatggcctcggttccggctccggcgacgacgaccgccgccgtaatcctatgcctatgcgtcgtcctctcctgtgccgcggctgacgaccccaacctccccgactacgtcatccagggccgcgtgtactgcgacacctgccgcgccgggttcgtgaccaacgtcaccgagtacatcgcgggcgccaaggtgaggctggagtgcacgcacttcggcaccggcaagctcgagcgcgccatcgacggggtcaccgacgcgaccggcacctacacgatcgagctcaaggacagccacgaggaggacatc

SEQ ID NO: 291134 - DNA, 412 bp, Zea mays
agtggttgtggccaatccttctcctatctcgtcccggagtcccgggggaaattttgccccagaaacactagcgcgtcggatcacaagcaagggcgaaaattttctgtggctccagcggctgaaggacgctgcggcacccatgtcggccatcgaccgatcaataaataaacatggacagaatcgaattggcaagcaggacgacactggtggccgcgctctacccaagttcggcgagtgggacgtgaacaacccggcgtccgcggacgggttcacggtcatcttcagcaaggccagggacgagaagaaagctcccccgacccaaggccacatcaggaacaacaggtcggtgtcggctgacagcaaggactccagggccgagaagatgacctcctacaacgccaggaccaacgcg

SEQ ID NO: 291135 - DNA, 426 bp, Zea mays
tcgatacaacactctagagtgagtcctattatggccgcgaacgtggcgccgtactacccctccacggacatctcactcgtgtccgtcgggaacgagatcatggacacggccgacaaggccctcatctccaacctggtgcccgccatgcgcgcgctcaaggcagcgctggtggcggcggggtacccgaagatccgcgtctcgacgccgcactccctgggcatcctgtccgtctccgagccgccgtccgccagccggttccgcgacggcttcgaccgcgccgtgttcgcgccgatgctggcgttccaccggcagagcaggtcgccgttcatggtgaacccgtacccgtactttgggtacaacggcgtgacgctcccctacgcgctggcgcggcccaacccgggcgtgccggaccccggcacgggcatc

SEQ ID NO: 291136 - DNA, 416 bp, Zea mays
agatcaagtcctcctcattgcaaaggtggaagtgtttcagcatgctttgcaaaatactgagggaaatgaccttgcgaaggttctgtggctgaagagtcgaacttcggaagtatggcttgagcgccgcacaaactacgctagaagcctggctgttatgagcatggttgggtatttgcttggtttaggagatcggcatccaagcaaccttatgttagatcgctatagtggaaaaatattacacatcgacttcggagattgctttgaggcttcaatgaatcgagaaaagttccctgaaaaagtaccattccgtttgactcgaatgcttgtgaaagctatggaagttagcggtattgagggtacattccgaacaacttgtgaaaatgtgatgcaagtccttcgcacaaacagagacagcg

SEQ ID NO: 291137 - DNA, 357 bp, Zea mays
ctcgccggtcgatacaagcctctacactgacgtcctggtaaatgcagcccaaatcgggcggtaaactccgtccaaggctaaatacaggcgagagaccgatagcgaacaagtaccgcgagggagctcgggttcttgttgggttttcctttgggtggagagcgagggagcgcagtcgagagccagcgagcagtctctcgtgcagtgcagtgcagtgcagtgcagctccggcgtagatgagattgtattgtgaccaagccgggagggaaagcagggaggggaggacaaagatgttttgtcacgtttcatgctccggccatcgccggagtttgtccggggaatatatcgatttcctattag

SEQ ID NO: 291138 - DNA, 388 bp, Zea mays
acaaccctctaaactgagtcgtattatggggaggtgatgatgctttcagcaccttcttcagtgagagttgagctgggaagcacgtctcccgtgctgttattgttgacctgtgatccctgtgtcagcgatgacgtgaggactggcacctagcgccagcgcttccatcctgaacaactcatcagtagcaaggttgatgcagcctacaacttcgctcgtggtcaccacatgattggcaaggagattgttgagctgtgcattgactgcatcaggacacttgcatataactgcactcgtctccaaggcatcctcgtcatcatcgctagttctggaagagttggctcttggcttggatctctccacctgtattgcttgtcagtggactatggca

SEQ ID NO: 291139 - DNA, 357 bp, Zea mays
atcaccgtcctcctcgcggacgagcacgtccgcggcctgcaggtccgccgcgccgccgccgacgactgggtcaacgtgcaggccgtccgcgacgccggcatcgtcaacgtcggcgaccaagtcgagagactgagcaacgccgtgtacaagagcatggagcaccgggtggtcgtgaacgccgacgaggagcgcagttccctcgcgcacttctacaagcccatgggcgacgtccccatcgcccccgcgccggagctggtggcggctgtgagcctgccggcgctctacctgatgaggatcgtcgacgagtacaggctctacgtcgagaagaatggcgccagcggcaacgaggacatcgag

SEQ ID NO: 291140 - DNA, 279 bp, Zea mays
acaagcctctagagtgattcttaatgctttcgagtagcacctccaggtcctgggttcgatccccctcgggggcgaatttatggcttggttaaaaaaatcccctcgttgtgccccacccgctcccgggttacgtcctgcgcgccaccctccggctgggccgttgcagagtgggcggtgacggcccgctagtgatggggggccaaggtttggggattttctcggccgggaccatgagggcggtctttccctccccggccgagttttatataaacaattttt

SEQ ID NO: 291141 - DNA, 353 bp, Zea mays
gagaggatggccggagtcggcgtgcctagctcgatcttgaaccatagctagccagcatggcgcccagcagcagcatagcagtactgctgctcctcgtcgtcgccgtcgtcctctccaacgtcccctcctcgggcgccctggcctcctcgtcgtcgtctctgctgcaccagtcgtctccgtctgagagtgagactgagaccgacagtagcatcggagaatcttcttcgtcgtcgtcgtcggaagaggccggcgagaaggagaaggagaaggagcaggagatggagaaggcggtcgcggcggagaaggctgcccagcaggagctgctcaagtacgccaaggagaagggcatcgtg

SEQ ID NO: 291142 - DNA, 416 bp, Zea mays
tcgtttgatcaatacaactctctaaagtgagtcatattatcatactatgtagttcctaatattacttggtactcatcacaggaagaaaaacatgaaattgttgaacgttacaaggccaaactcaggtctattgattgtaagcactttgacttcgaaaagggcacttgtccatttggaagcagctgtttttacaagcatgcctactatgatggccgtttggaagacgctttattgaatcatcatgatgccgacgatgcaagcgcagctattgccaaacttatgaagttgtcgtacatactgactcggctacatgtgtaatgaaactcaaacgtatccttgatcaaacatgctgacttcgattgagattctttgaccgagcatgcaaacttagatttcgcattgtaatggataatatt

SEQ ID NO: 291143 - DNA, 333 bp, Zea mays
gtcgtattagataccggcatggagctctggatgtggaacattagcgaatggcagcgttcctatcaatggacaatcttcccgaacacactgttgctggacttcgtggcgaatgcccaaatccgcaggatctcactgcggagtagcaggttcttcgacatgaacatcttctcgagcaagaacgtggtgatgtacaatgtgaccatcaaggcccccggaaaaagccccaacacggccagcatcaacatcagcgactcgatcaacgtgacgatcagtggcaccatcatcaccctcggccacgactgcttctccatcggccccgggaacaagaccatc

SEQ ID NO: 291144 - DNA, 386 bp, Zea mays
  unsure (1)..(386): unsure at all n locations
gtgggtcgatacaagactctacactgacgtcctgattacgcgtccgcccacgcgtccgctcggcggcggtgttcaaaaactgcctcatcatcacccggcggcccatggacaaccaccagaactcggtgacggcgcacgggcgcaccgaccccaacatgaagtccgggctcgtcatcaagaactgccgcctggtgcccgacaagaagctgttcccggaccgcttcaagatcccctcgtacctgngccgcccctggaaggagttctcgcgcctcgtcatcatggagagcaccatcgccgacttcgtcaagccagaagggtacatgccctggaacggcgacttcgccctcaagacgctctactacgccgagtacaacaaccgcgggccc

SEQ ID NO: 291145 - DNA, 336 bp, Zea mays
tcgcgggtcgatacacccgacttagtggcgcccagctcccgcatcttcgggcgccgcgaactggtgaaggaacccgaccagattgccatccggtacctgaagaacgacttcatcaacgacctggcaaccatgctcccgataccgcaaatgatcaaccgggttgttaaaccaactgtgaatacatcctccggcaatcacaacaacaacaacaagctctccaagattgtgccgattcaattcataccaagaatccaacccaaaataacccttaactccaaaattgttcaaggcaattgaattggtaacaaaaattgcctgggcgggggcggcttaaaa

SEQ ID NO: 291146 - DNA, 396 bp, Zea mays
tactactccctgaggtgagtcgtattataccctgcttcacacaaacagtaaggatcagtctcggccttttgctcaggcatccacaggggggattgggaaaacacttgcatgcatccggcggcaataatggcatcggttccggctccggcgacgacgactgccgccctaatcatatgactatgcgtcctcctctcctgtgccgcagcctgagtacctaaagctccccgactacgtcatccagggcctcgtgtactgcgacacctgccgcgccgggttcgtgaccaacgtcaccgactagatcgcgggcgccagcgtgatgctggagtgcatgcacttcggcaccggcaagctcgagcgagccatcgacggcgtcaccgacgcgaccggcacctacac

SEQ ID NO: 291147 - DNA, 354 bp, Zea mays
gggtcgacccaagcctctacacagacgcctgccacgcgtccggtcgtcatcacactcagcccgccttcacgcctccctcaccaaatatagtcgcgccctttaccgacattcacaggggggacaggaaatcaaccgtcatgtcctcgattccagcgacgaccttcaccgtcatcttatacgtcatcatctgtgccacagcgggcacagccgtcaacttgtacctcctcgactacgtcatcaatagccccttcgactgcgacacctgccacgccccgttctcgaccaatgtcatcgaatatatcacggtctccaaagttcggctggacttcacacagttcggtaacgacaagctcg

SEQ ID NO: 291148 - DNA, 196 bp, Zea mays
cagcctccagctgcctccaccccacctccgtcactggtgaagttgtctcctccgcaggcaccagtggcatcaccaccgccacctgtgaagactacttctccaccggcccctattgcttcaccatctccaccaccaccagcgccagtggtctcaccaccaccgcccgtgaaatcacctcccccacccgcgccagtgg

SEQ ID NO: 291149 - DNA, 196 bp, Zea mays
acaacaagggcctggccttctcggaggcggagcgcgacgcgcactacctgcggggcctgctgccgcccgcgctggcgtcgcaggagctgcaggagaagaagctcatgcacaacctgcggcagtacgagcggccgttgcaccgctacatcgccatgatggacctgcaggagcgcaacgagaggctcttctacaagct

SEQ ID NO: 291150 - DNA, 276 bp, Zea mays
ctagtgtaacggttaaggcttccgagtagcacctcaaggtcctaggttcgatcccctcgggggcgaatttctggcttggttaaaaaaaattcctcgttgtgtcctgtccggcatccgctcccgggttacgtcctgcgtgcacccttcgggtgggctgtttgagagttagcggttacggccagggttcggggattttctcgaccgggatcatgtttcggtctcttcttaatataatatcgagagggcggtctttccctcccctgtcgagttttctgt

SEQ ID NO: 291151 - DNA, 325 bp, Zea mays
  unsure (1)..(325): unsure at all n locations
agcgcctcacgggatgcatgcagatcttcgtgaagaccctgaccggcaagactatcaccctcgaggtggagtcctcagacaccatcgacaacgtcaaaggcaagattcaggacaagganggcaatcccccaagaccagcagcgggtcaatccttgccggaaaacaacttgaagaacggcgcaagccttccgactacaacatccaaaaggagaacaacctccacttggtgctgcgcctcaagggaagcatgcagatcttcgctaagaccctgaccggcaaaactatcaccctccaagtggagtcttcaaacaccatcgacaatgtc

SEQ ID NO: 291152 - DNA, 379 bp, Zea mays
  unsure (1)..(379): unsure at all n locations
accacgcgtccggccctcgtcatcgcggtcgccggcatttcccttcccttcatcatggggcaaccggaactcccttggtctccaagaaaaccttccccggcgggttgccaacggctcgtttcctcgtcttcaggggtgtcgcgctctccatcacggcgttcccggtgctggcacgcattctcgccgagctcaagctgctcaccaccgacctcgggcgcatggccatgtcagctgccgccgtgaacgacgtcgttgcgtggatacttctggccctggccatcgctttgtcaggcaccggttcccctcctgtccccttatggggtgctgctancgggaactggctttgtcctcccggcgttcctgttgctccgcccgggcc

SEQ ID NO: 291153 - DNA, 225 bp, Zea mays
ggtcgagcccgcgtccgacacgagtccgcgcaccagtgccgacagcgacagcatctcgctcattctcggccatcaagttctggatcgacaacatctccatgtccaaatgcaaagacagcgtcatcgacgtcatgcagacctccactgggatcatcatctccatctgccacttcagcaaccacagcaacgtcatgctcttcagcaccagcgattcctgggcggaag

SEQ ID NO: 291154 - DNA, 342 bp, Zea mays
accacgcatccgcccacgcgtccggaggaacggcgccatcatcctgtcggtgcggccgagcgccacgaactgcctcgccgacgagagccacgtgtgctggaggaacggcaagttcgcgcaggacatgatcctccggctcaggaacgtggagagcggggagattcagctgcagctgcagtggctcagcatccctcctgctgcagccagcaggtgaaggaaacgaagcaatcgcattttcaacctctttgtgaatgtcggattgtaacaacttaaaccagcaattaatggggtcagggtcagtcagggtagttcatgtgttgccctattaatggtacattgggg

SEQ ID NO: 291155 - DNA, 405 bp, Zea mays
accacgcatccgccgcgaccttggtgtcctgcaggagcttcaggaacgtggagtacgtgggcgaggcgaatcagctccggtcggcgacgctactggtcgtccccgacaaacttgccaagcctctggcgtcgctgcccgccgataaggtgcggccggcggtggagaaccacgtccttctcagttacttcgaccccatcaagctggacgagatgaagacacgcaccgccatcctccccacgctgctctccgtcaccgacaagaaactcggcgtcctcaactacaccagggccgacgacgggcagatgtacttcggcgctcccggagccccctgcgtggccaagctcgtcaaggtcgtcgcagcgcggccgtactctgtgtccatcatggagatcagcgagcccattt

SEQ ID NO: 291156 - DNA, 354 bp, Zea mays
acggggcactgctcacgtcgcgacgaggatctcctcgagggagacggagagctcgaggtggtggcgcacggaggccgggctacgcgtgggcgtgggcgtggtctcggcgcggcacatcgggcagctggtgctcccgcgcagccacgtgtcgatgcagtcggcgtggaagtagtgcatgcactcggggagcacccgcacgacctcgccgtcgtcgaagtcgggcaggcacaccgggcacgtcgactcgttccaggcctcctccttgcggtaccggcacaccaccgccgcgcccaccaggacgacgcatgcatggcgcggcgcgctagatgtggcccgcgacgatggtggcgggct

SEQ ID NO: 291157 - DNA, 388 bp, Zea mays
ggctgcggcggcggcctcaacgtgctcctggagcaggtctcgcaccggccgcccgtgacagcgctgcacgccacggacgcccgcggggaggtgcggctggtgtggtgccagagccccgcgccgcggttccacggcgccagcgtggaggccgcggtgcgcggcgcgcgggagctccgcctgctccggcacgccgagacgtacgttatcgggtgccccggcctgctgatccgcctcttcccgtcgcccgcctgcgaattgtccggggacgttcgcctcctctgcgccgaatccgggctccaaggccaactcaactactggcggacccggcggttcttcctccgcttccgcggctgcgacgcccgctgcgtcaggggcaggatcttccgct

SEQ ID NO: 291158 - DNA, 404 bp, Zea mays
agcccatcaacctgacggaccgcctccaccaggtgctgcgctgggcgaccgggtcggtggagatattcttctcgcggaacaacgcgttcctggcgtcgcggaggctcatgttcttgcagcgggtggcctacctcaatgtcggcatctaccccttcacctccatcttcctgctggtctactgcttcatcccggcgctgtccctcttctcgggcttcttcatcgtgcagacgctcaatgtcgccttcctctgctacttgctgactatcaccgtcaccctcatcgcgctcggcgtgctcgaggtcaagtggtccggcatcgagctcgaggactggtggcgcaacgagcagttctggctcatctcgggaacaagcgcgcacctgtacgcggtggtgcaaggtctgctc

SEQ ID NO: 291159 - DNA, 426 bp, Zea mays
  unsure (1)..(426): unsure at all n locations
cagggagcttcaccagggcacggtgttgcagggtcggacatcaatcgcgacgtccctagctccccgccggtgtcggggattgaacatgtgccgctgcgagcgaatcagttggccgctgtcaggaatcttcaaccgcttcaacgatttggtggtgctcggtggtcgggaagcttctctggctcacccctcacatgtgtgtggccttattggacaaagatagccttccgagctcgaccaattgctcatcggtgcaatggctccaccgcgggcgggaccactgctgcagacccatttcactcccttgccatcaccgcgtgaggtcacgagtcacctgaagatcatcctggtacctggaatctcaagtcncaggtcaagaacaggtaccacaggatgaggcgcatggaggatgctgcgatatgttcgtga

SEQ ID NO: 291160 - DNA, 426 bp, Zea mays
aagcagcatcaagggttgcccttggcgttcgtgcatatagccatggtcttgttgttggtgccgctatactcgaacgccaatggcagcaccaagggttgcctcaaggagcttgcatgcttctagaccctccgtcgactgacccatctctctagttataatttttctctcgtccttgcattgcccattacatgctatccattggtaacgcacaacagtaaaacgacagacatccgacagctatactatgttcgacggtgtaacaccctgaatttgagggtataaaatttcttctctaaataccatccacattcacgtgttacctcttgtctctctctctctctcttttccttttgattaacagtaagtgaattatgcgacggtttaattatttattttgtcaaaacttatgtgactcatgatacgttg

SEQ ID NO: 291161 - DNA, 419 bp, Zea mays
acgctcttgcagaaacgaggaaagaaaacatgtcttctcgctgggttagggcggaggtgtacccgctgttcgcgacgacaggggtggcggtggggatctgcgtgatgcagctggtgcgcaacatcaccaccaacccggaggtgcgggtgaccaaggagaagcgggccgccggggttctggacaaccacgacgaagggccgcgctactcccaacaacgggttccccaggtccgggtcctcaaaccgcggcaactacttccaggcaatggccaaggtgccaacggcccctattatgtagacgacgacgatataccccaatgcatggcaagaatatatatatatcagcacaacgcaactgcatgcgatgctgcttgttgctgcaattaatccactatactatatactatgggagtattattg

SEQ ID NO: 291162 - DNA, 398 bp, Zea mays
agacggaatcgtaggagagcacaatcatcgagccggagccgccggtgtcatgcgccacgctgtcatggctctaacaggacgagctcaactacccgtccatcagggtcatcctcagataaccgcccttcaccgcgacggcgaagcgcgccgtcacaatcgtcggcacggccagctcgacgtacaccgtcgccgtgaacgtgccggcgtcagtcacagtggaggtgatcccgccgaaactgactttcaaggcgctggaagaagtcctgaaatactcagtcacaagcaagtcggccaatggccagacgcttatcggccctgtcgagggggagctcaaatggttgtccggcaagtaattcctgcggaacacgatcctcgtcagtaacgaatccaggacctcg

SEQ ID NO: 291163 - DNA, 383 bp, Zea mays
gcccgtcacggtgcacacgctggtgtccatcctggagaggtacctgcgggtgaaggccaagaagaacgtggtggagatgcccggcaatggcgacgtgccctacacgcacgcaaacatcagcctggcccgggagcagctcggctacaagcccacgacgagcctggagatggggttgaagaagttcgtcaggtggtacctctcctactacggatacaaccgtgggacgcataccttccggaactcatgatgtcgctcgtgccttccactctcgtctgggtccacacaagttgtgggggaaattgtgttgactggctgttgtagttgggttaggacagaagaggaggggacggcgacagaacgatcaaacggagggccggcttttt

SEQ ID NO: 291164 - DNA, 417 bp, Zea mays
  unsure (1)..(417): unsure at all n locations
atcgagattctacgcgtggataacctggtcatcaccggcaagggaaaccttgacgggcagggcccagccgtgtggagcacgaactcctgcaccaagacgtacgactgcaacatccttcccacccgcctggtcaccatggtcataatccccagcaaggctgccgctgacacccgccgactctcactccacgtgaggctccgcgcccagcctctatgactcacccattgcgacaaccaccaggtgttcatccgcaactgctacatcaaggaccacgacgtgctagcccgccatatcgacgccggcaacggcgtgggccgccccgcgggcgtgctcatcaacggcaanggcggcaaggacctggaggccgcgcctgccttcaccttcgangccggcaagacgtaccgcctccgcgtctgc

SEQ ID NO: 291165 - DNA, 423 bp, Zea mays
gctaggataagcacaaacgcgtgcacgcgctgacgccgacgtcaaggtgtacggtaactcggagcgtcatcggagagagagacccgccaccgccacgcttgaccgtaatccgtggagagtgagtgcccggccgggctaccagctaagacacgacggtccatccagccatcggtggcccagcagattccacaatggcggcaacggcggacatggagcggatcttcaagcggttcgacaccaacggggacggcaagatctcgctgtcggagctgacggaggctctgcggactctggggtccacctccgccgacgaggtgcagcgcatgatggccgagatcgacaccgacggcgacggctgcatcgacttcaacgagttcatcaccttcagtaacgccaacccggggctcatgaaggacgtcgcaa

SEQ ID NO: 291166 - DNA, 294 bp, Zea mays
cgtattaaatctgcacctctagcactcgactggggatctactaaacctgcaagcagacgtgaatccttcggatctggtactcgaataatgcagtgcattgggactcgatgttgtagcagcagttgaccacaagccgcgagcatctcacagtatgtttgatgtcaattcgtcagggtgggagctggcactgggcactgctccaagcactcaaattatccaggcagttgagacaagattggctggaggctttgacgagctgctaattaacaggatctacaaagactaggccagtag

SEQ ID NO: 291167 - DNA, 431 bp, Zea mays
tacaacactctagagtgagtcatgctaatcacatggttgggaagctggcattagtctcccggagttagcttagctgtggggtagtgccgagaattgtcttggaagcacttcctgctgtttttactattcgaaaagaagcaaaaggcaaaagctatcgatataatagtgagtgaatgcagttaatagggataagggctatgacggtattgtgctcgagtcctggtcaagatgggctatttatggtgtgctggatgaccaagagctacgttacatggcacttgaatttgttaagcagctgggagaggttttgcattcagtcaattccaaaatcaagtagccaccatttggaattaatttatgttattccagctccaagaatgcaaaagctcaataataaggactttggacccaaagatctcatgcatctggct

SEQ ID NO: 291168 - DNA, 394 bp, Zea mays
cgggccgacccacgcgtctacccagactcctgctcgacggggcagctgcacgtggccgtgttcaagccggcggacgacgagcccatggccgccaacaacccgcgcggcctccccgtgtcgtccaccggcgaaggcctgaagaaagggacgcgcgtcggggagggggcgctgagggaggtcgcggcctacatcctcgaccacccacccaggagcgggaccgcggatgatgggttcgccggtgtgccgccgaccgcgctcgtccggtgcacgcacggagccttcaggcacggcggagccggatccggagccggagcgagggcgccggtgcccaagctggggtccatgcaggccttcgttagtaactgcggcagctgcgaggacatgggacccagcg

SEQ ID NO: 291169 - DNA, 391 bp, Zea mays
atccaagctctctcctcatcacccacccagcgcgacgaaaccggggggctatcgctccagctccgccgcaccaacgacctcaccccccgaggacccgccggcggtacaccgcctccctatcacgcctcatcgattcctcaggtctacgttttttttggttttgtgatttatccaaatttggaccgcaagcatgactacggcgaatcattatcagcacatcatttcacccaagcctgttgtgggcaaagcatgaaaattgaaggatctcatgataaaatgtgataataggatatgtgctgactgtggtgcacctgatcccatatgggcatctactaatattggagtgtttctttgcttaaaatgtggacatgttcatagggcacttggacct

SEQ ID NO: 291170 - DNA, 369 bp, Zea mays
atgacatccttgtcggaggcgcacaacttggaggttcgatgacatcagttcctgatgaggtcattcgatgtaatcatgtatgcacaatcgcggtccgagctgacatgccagagagtggcctgtcagcgttcggaacagcatttttgtcgacgttcaaatgttctcagatgccacatccactgttagagcacgtgaccttcgtggacactccaggagttttatcaggggagaagcatcggactcagcgcagctacgatttcaccggagtcacatcgtggtttgcggccaagtgcgagctcagccttctcctgtttgatccgcataagcttgacatcagcgatgagttcaaacttgtgatcgggtctctcc

SEQ ID NO: 291171 - DNA, 407 bp, Zea mays
ttcgccggccgacccacgcatccatcgacgccgagtacatcacgacggcgccatacgcgtgcgagccggagagcctgcccaagtacgcgcccaacaaggagatggacgctaagctccgagaagaatctagaaggaggagcaaccttccgagccaaggcggcgaggcggataagggtctgtcgagggggcacaagagcatgcggctgcaggacacgaaccagagccacgtgcacgccgaggaatcgctgcccgttgtggccgaaaacggggtgacaatggcggggaacgacggcgactcgcggctgttcgtcgacctggagcccgttccggccatcagcaagcggcacggcggcagcgtcggcggcgaccacgcggcgccgtgcgccagggctaggaccatgttcaac

SEQ ID NO: 291172 - DNA, 391 bp, Zea mays
  unsure (1)..(391): unsure at all n locations
cgggtcgacgctgaccgcgatggacgagctgctgcagtcgggctgcacaacgtcaaccgttaccatacaccaccgaacgaaccggcccaagacacaacgggccgccagcggttcggaagcccttcaaccgagccgcngcgcaatgagcgtcggccagcgcgacggcgggctgccgcccgattcggtggtcgagcgcgaacccgacatcctgcgcgacgcgcagcgcctgatcgagacctatcacgacgaaggccgctacgcgatgctgcgcgtggtcgtcgcgccgtgctcgccgttttcggtgagccgcgaactgatgcgcgacgcggccgtgctcgcgcgcgagtacggcgtgtcgctgcatacgcacctggcggaaaacgtcaacgac

SEQ ID NO: 291173 - DNA, 364 bp, Zea mays
gaatgtgagaacaatgtggtcaccaatgcgggctcaggttgcaatggttgtggagtgggtgtccttggggaccggcgataggggtggtcctccaagattccccgaagtcaatctaatcacgggcaactatgcgaaggactggctggacgctaaagcgacatggtatggcaagccgacgggtgccggtctcgacgataacagtagcggctgctggtacaaggacgtgaacaagcgccccttcaatagcatgggcgcatgcggcaacatccccatcttcaaggatggtctgggttgtgggtccagcttcgagatcaagtgcgataagcctgtggagtgctccggcaagcccgtggtggtgcacatc

SEQ ID NO: 291174 - DNA, 361 bp, Zea mays
actcaggcaacatcgacttcaacttcggcaactcggcggaggtgttccagatgtggctcatcatcagcctgcagaccatggacaagcacaacatatcagcaagggatcatcggcataacgataccaacatgagctgtggtgtcgtcatctataactgacgactaattccgtagataacctatgttcggactgtgtcaaaattaacacgtaaatgcacagtctcagaaacgagttctgcacgcttaatctcatggtgaactacaacccaaaatgcggttggcaaaatcggtgtcagtcctgtcacttgtcactggaggtccccggttcaattcagatgttgctttggcacgtgctattcttt

SEQ ID NO: 291175 - DNA, 402 bp, Zea mays
tacaattacttataccagttcctaccatgcactttattctgctttccggttctcaacgtcttggacatcgccggcgagcacagtctcctcggcaacttcttctactgctaactcgggtgcaaggcaaggaaactcggtatcgtcagagatatcttgatctaatggtaaaccatgaagtgaggcatatcttcaagacacgatctaaagttgtctcgtttatccggaagtttcttgatgaccgtgaatttttggaggtggagactccgatgatgaacatgattgctggtggagcagctgcaaggccttttattacacatcacaatgaattaaatatgaggctttttatgcacattgctcctgaattatatctgaaggaattggttgttggtggattggaccgtg

SEQ ID NO: 291176 - DNA, 434 bp, Zea mays
cgggccaagcctctagttcaaggcgcatgaggtctacaagatctgcgtgctggacatacggctcgccaacgccgatcgccacgccggaaacatactcgtccgcaagcacgacggcggcggaggcggaggcatgtcgctggttcccatcgaccatggatactgtctgccggagagcttcgaggactgcactttcgagtggctctactggcctcagtgcctggagcgcttcagcgacaagactgttgtatacgtgctgaccacactgtctgaggaggacgtgactatgctgaggctccacgggtgggacgtgtcgcgcgagtgcgcgcgcacgctgcgcgtcgccaccatgctgctgaaaaagggtgtggagaagggcctcacgccttccacatcgggagcatcatgtgcagagagaccctggacaaggggtcccc

SEQ ID NO: 291177 - DNA, 385 bp, Zea mays
ggttagtccagtgaaggatcacctacccccggttcgagcgctgctaagcaagagagcacgcctgcggcaacgaggactaggctgtacctctagaggaactacacagtgctggaaccttcataatggagcaagctcgcttacaagctataatgggagacttctcgctagacaatctcactacggccagcactacgcacgtctgcactcgcgtcatgggcaccttcggttacctaacaccggagtacgcctccagcggcaagctcacggacaagtcggatgtcttctccttcggcgtcatgctgctggagctgctcactgggcgccgtcccatcgataccattaacttcattgaggacagtctcttggactgggcgcgcccgctgct

SEQ ID NO: 291178 - DNA, 309 bp, Zea mays
gtcgtatagagccgcctcggcgactccgtcagcatcccgctgccgccgcgggccgcgtccgagatggcgagggaccaggaccgctgatacagcgaccactggggccgccgcgcctacgactcggtctcgctcagcagcgactccatgcccgtcctcacgggacgcacgcccgtcgagtgctacagctccttcattcgcgcgttccgccaccacttcgccacgcacctcgccagcacgatctcggcgatctaggtcggcatgggccccgcctgcgacctgcgctacccgtcgttctcggcgagcaacggc

SEQ ID NO: 291179 - DNA, 351 bp, Zea mays
atccgacgaaacacgcgtcgacctagtcgtcgtcgccctcctcggcctcgttttcgcaggcatgggttcagaactcgtcattgttgtaccatcagacacggtgtagatagcatcaacgtggatgctggtactaatcatgaattcatcacttgtcttaatcaagatcacacctgtgggaattctgacatctatacatatcctgatgcgtgttatcgcccaaaatcttcctcctgagtccactacactcgagaacgtcatcactcagtgtcctcaatgtgcctcggtatacactccaattcttgatgctcttcacacagtgcatgatgggaaatttttacatttgactgttct

SEQ ID NO: 291180 - DNA, 245 bp, Zea mays
ctgcaaataggtccatgcaccccctcctccttcttgacacaaatcccctttgtaatgaattaaccatgcatgcatgcatgcatgtatgcatgccccggtggttacgtgtcattcagctcacgcgctgaccgagtctatacatacgtcgtcaccggctggccacgcatgcgataaccatctgatattgaccggactatataatgtattcctaataatcctgcattttccaagctaattgttttttt

SEQ ID NO: 291181 - DNA, 351 bp, Zea mays
ccggtacgatcctagattcgccggtccacccacgcgaccgacctcgaagtacttggccgcctcctggggcggcctgcactgggagcggcagatccgtgcgtccgccgcgccgaggcggccccccgggtccgccgctggcgctgggatgtgggtgctggtcacgggcgccgcgggcttcgtcggtacccactgctccctcgcgctccgcaagcgtggcgacggagtcgtcggcgtcgacagcttcaacgcctactaccatccgtcgctcacgaacgcgcgcatggcgctgctggcctcccatggtgtcttcgtcgtcgagggcgacatcaaggacggccgtttcttgtgcaa

SEQ ID NO: 291182 - DNA, 381 bp, Zea mays
acatctctggatgttacagcgatggatcgcatcatgctacttatccttgtgtgcatcggcctggactgattcggcgtcctggacgccgtcgatgtgagaacgggctctggccttggttccatcctcctaaagctcctgtctgttgtgtacggcaacaaggccacgcttgaggtcaatgagtacccgtcccgccaagtttcgacttctgtagttgaaccatacaagactgtagtgtccactgactccctcttcgagcagactgatgttgctaaacagcttgatcataatgccatctacgacattagcctgcgatcccttgacattggaaccgcaacctacaccaggctcaacacgcttgtgtcccaggttatcgcatccctt

SEQ ID NO: 291183 - DNA, 334 bp, Zea mays
cccggcacggactgcaactaggtccacgcgctcacggatcacgccggcgtcctgctcacaaggaatgttggtatctacgacagccagcttgtcgctaacccgctcggctatctcacagacgtggagctcgccgtctgagacaccgctggcatcaagcagcatggaactcagcacgacgacaacgagcagtagactatagcacgggcgagtcccggacatgctgcacaatactacaccgatacacagcgaacgcatggcatggatagcactatctaccgcaagaagtcgcacacaaggatcatgacagatgtatcacactgcttgattcacttgc

SEQ ID NO: 291184 - DNA, 331 bp, Zea mays
aagacgcgtgggcggacgcgtgggggacgacgcaccgcacactacccgacggtggaactcctcgcccgcgtcgctgctccggtctccgcgctgctagccgccgactgtaggggctgtgtgcttctgaagagagatttcgttgaacaggatgaatgcattggcagcaaccagcaggaacttcaagcaggcagctaagctgctgggcctcgactccaagctggagaagagcttgctcattccattcagggagattaaggtttaatgcacaatcccaaaagatgatggaactttgggatcctatgttggatttatggttcaacatgataaatgc

SEQ ID NO: 291185 - DNA, 391 bp, Zea mays
aggaaaaaaggaacgggaagagagggtctgtttggttgagaggtagatgtgaaaaaagttgtttgtgaattgtaaactgtggaaaaagttgttgtgggctgtgagctgttaaaaaactacaaaatgtttggtggaaactactaaaagtcgttaaaagttcttcgatatatgttttcacagttccatctaaaagcaggtacataggtgctttgaggtcaaagtgggttgagtcgggggcgacgccgttctctcaattttttgggatcacgcctccaccaaaaactactccgggttttacctcgtccctacgtgaatctcatccaaacactattggaattgtggccgccctattccatccctccatatacatccaaccaaacattattgtgtc

SEQ ID NO: 291186 - DNA, 426 bp, Zea mays
atcagccggtcgggaacgatgaagaaagatgatgacctcgagtcggcgctgctggccgccaaagagccggcgccggcgcccgccaagggctacgcgtacgcgctcacctgcgcgctcctggcttccctcacctccatcatctacggctacaaccgcggggtgatgagcggggcgcagaagttcgtgcaggccgacctcggcgtcacggacgcgcagctggaggtgctcatcggcgccaccagcgtctactccctcgtcggctcgctggcggcgggctgggcgtgcgaccgcgcgggccggcgccgcaccatcgcgctgtcggcggccttgttcctcgccggctcagccgtcaccgccgccgccgacggctacgccgcgctcatggcgggccagttcgtcgccggcgtggcctgcggattcggcctc

SEQ ID NO: 291187 - DNA, 427 bp, Zea mays
cccacgcgtcagacgccgtctcccccgcgtccgccgactaccgccgcctcctcgcgcagctatcctccgcgggcctcttcgaacgcgtcagccccacccccaaggtccagctcgtcctgatggccgtcctcttctacgccgcgctgtacctcgtcctcgcatgcgccagcgcctgggcgcacctcctcgcggggggtctcattggcttcgtctggatccagtccggctggatgggccacgactcgggccaccaccgcatcaccggccatccggtcctcgaccgcgtcgtgcaggtgctctccgggaactgcctcaccggcctcagcatcgcctggtggaagtgtaaccacaacacgcaccacatcgcctgcaacagcctggaccatgacccggacctccagcacatgccgctctttgccgtctcccc

SEQ ID NO: 291188 - DNA, 361 bp, Zea mays
tcaccgacgtggcttacgccgtgtgcaccgacaccataactgggcgcaacttcgtgatcgccattgttgagttcggtggttcatgcctccagatcgacatcgtgaacctgttgtacatctgcgagtgcaacagcgtgcccgatgtggccaactactgtaagcaggtgatcaagatcacagattacaatcagaaccagttcgtgaaactcgtcgtggcctctatgttcagcaccgtcgacggtatgagcatcgcggtccatggcttcgccttcacgaaagacaccggtcacagtagggtgaccccggccattgacgtctgtaacggcctgctgggcgagaacgaccagatcagcatctacga

SEQ ID NO: 291189 - DNA, 424 bp, Zea mays
gccccttcgcgttgcgcgtgcgtatggcgctgagcctcaagggcctgagctacgagtacatcgagcaggacctgttccacaagggcgagctcctcctcagctcaaaccccgtgcacaagaaggtgcccgtgctcatccaccacggcaagcccatctgcgagtccctcgccgtcgtggagtacgtcgatgaggtctggcccggcgccgccaccaccatcctccccgccgacccccacggtcgcgccaccgctcgcttctgggccgcctacatcgacggcaagctgtttccggcgtggacagggatcatgaaggcggcgacggaggaagcgaaggcggataagctgagggagacgcacgccgcggtcctcaacctggagaaggcctcgcccagatcagctctagctccagcaacgacggcgcggcc

SEQ ID NO: 291190 - DNA, 175 bp, Zea mays
gcccaggcccggtccaggtccaagcgacggcgcgtccaaggtcacggagattcaggtcaccgtcgccttcagccacttcggcaacgggctggtgcagcgggtgccgcgctggcgtcacgggttcttccaggtggtgagtaacgactacacacacgggctcaggtacgcgatcggg

SEQ ID NO: 291191 - DNA, 428 bp, Zea mays
  unsure (1)..(428): unsure at all n locations
aagaagcccattgctgcgcgctttcatccttccgctccaaacaggatgatagtatccaacgaagatatcaacatccttgtgcgtgccaaggcgcacatgctcgtcgcgctgaagctcgaccgctgctccggcttctccactccctccatcgcactcgtcgcccgttcctgcaggaaactggaaacacttttcctggaagaaagcacaattgatgagaaagaaaatgatgagtggatccgtgagcttgctacgagcaattctgttcttgagacactgaatttctttctaacagatctcagggcatccccagagtatcttaccctccttgtgcgcaactgtcaacgattgaaaactctgaagattagtgaatgtttcatgcncgatctggtcagtttgttccgaactgcacaaacactacaagagttcgc

SEQ ID NO: 291192 - DNA, 281 bp, Zea mays
ggaggaccgatcactgcatacacgagtggaaaatgctactgctgttcagtttaagttcgcgttgtacttgtatgtatagtggctgctacttatgtgagttttgtacctgtactgtacatgaagtctcttttcttttatataccatggctaagggggtgttgactaagggcctgtttgtttacctcccagattatataatctggattaaataatcctaagaggcaaacaaacagtctagcttatttgcccagattatataatctaaccccttggattatgat

SEQ ID NO: 291193 - DNA, 280 bp, Zea mays
  unsure (1)..(280): unsure at all n locations
agnangagaactcgccgctcagctcggggaccaacgacgccgcctacatgcagctcaggaacatcgacacgtacatcatctacgcaacgacctgcgatgacgggaaagtcaagcccagaggatccaactgcatggacttggctgatccttgcgctcaatactacgtcgacgcttagctgaaccagccaaacgtgatgaagaccatccgtgccaacacaaggctcacgtacagatgggccagatgcaggggcacgttctagaagctgctcaagttcggtga

SEQ ID NO: 291194 - DNA, 411 bp, Zea mays
gatgggttttgctagaggttcttgacaaaatttctccagggtcagttaactggaagcatgcatccaaaccaccaatcattatgccgtttagaaaggttgaaaactgcaaccaggttatcaaaatcggcaaggagctaaacttttctctggtaaatgtagcaggaaatgatattgtgcaaggaaacaagaaactgattctagctttcctgtggcaactcatgaggactagtatcctacaattgctgaggaacttgagatcccactctaaagagaaagagatgacagatgctgacattctcatttgggctaatagcaaggtcaaggaatcaggcaaaaattcacatattgaaagcttcaaggacaaaacgatagcagatggggtgttcttccttgagctcctaagtgctgtgc

SEQ ID NO: 291195 - DNA, 428 bp, Zea mays
ctgacatcaacggcctcatgaccgacatggtcaagttcctgcacgaccacggcgcgcccttcgtcgtcaacatctaccccttcctcagcctgtaccagagcgacaacttccccttcgagttcgccttcttcgacggcggcaagaacatccaggacaagggcggcgtcacctactccaatgtgttcgacgccaactacgacacgctcgtgcacgcgctgaagaaggccggcgtgcccgacctcaaggtcatcgtcggcgaggccggctggcctaccgatggcaacaagtacgccaacttcaagctggcgcggcggttctacgacgggctcctcaggaagctggccaagaacgaaggcaccccggtccggaagggcaagatggaggtctacctgttcggcctattcgacgaggacatgaagagcatcgcg

SEQ ID NO: 291196 - DNA, 412 bp, Zea mays
atggctcttgctattgtggcaccaggtaatgaaaacaagatgccaacttctcaagacttatttgcccttgacaagactggatgggaattggcactggttactgcaccaagtaaccacacaaatcaacaagtggacaatcaattggctgggggatttgacaagctattgctagacagtctttacgaagacgaggcaaggaggcagcaaatagccagtgtgacctacactggaagtactgcagcaaacccatttgaccacagtgatccatcttgcaaagtcagcccatgggcagcgccgctcctgacgagcttccgctggcggccaagagctccaccacctccgacgcgtacgcatctccaaggcagcagcaagtcgccagcagccagcccatgtctggtggcgctcccgacga

SEQ ID NO: 291197 - DNA, 383 bp, Zea mays
acaacactctatagtgacgtcgtattaagccctcagaatggcatcaacacgtgtgatctccaccttgagtatagcggcagcaactaggcaggaccacggcgatatgcacaaactcgacgggcagcacaaatggttgactcaccgaacttgcatgcttcaaaacactgtctcgactgacgcatctcactacttatcagttatctcacgtccctgcattgcatatcatgtgctatccattggttacccacaacagtataacgtacaacatccagcagctatattatgttctacagtgtaacaccctgaattttacggtacaaaatttcatctttaaatgcaaaccacattcaggtgttacctcttgtctctctctctatcttttc

SEQ ID NO: 291198 - DNA, 294 bp, Zea mays
atcgggctaggctagctagctaggttaccactctggtacaacatggctggtgatggcatggaggtatctgccagcgggggtggcggcggcaacaagcagccgcagatcagccttttggggctgttcctcgtctgcgtcgccatggccttggtcaccgtcctcagctcctggtccctcggcgacatccggggcaacgtgcacgacgccgccgccgtggataagggcctcaagaccagcgcgctcgccatcttcgtcttcatcggcttcccattcccggtcctacgcagcgttccg

SEQ ID NO: 291199 - DNA, 430 bp, Zea mays
gggtcgatacaagcgtctacactcacttctgcgtgtctcagctatcgggtttgagggctatgagaagcgccttgagatcacattctctgaggcacctgtctttgtggaccctcatgggcgtggtttgcgtgccctctccagggcccagattgactctgttctggatcttgcacggtgcacaattgtgtctgagctctccaacaaggatttcgactcatatgtcctttctgagtcaagcttgtttatctatcctctgaagattgtcatcaagacctgtggcactaccaagctcctgctcaccattccaagaatccttgagcttgctgaagagctgtctatgccacttgctgctgtgaagtactcccgtgggacgttcatctttcctggcgcacagccagccccccacaggagcttctctgaggaagttgct

SEQ ID NO: 291200 - DNA, 330 bp, Zea mays
gggtcgagacacgcgtctagattgatgtcctattatctgtgttccactgctttgagggcgagaacatggagattgcatcacatcctatgaagaacgactccatgctggctaatcttctcttctgttacgtggaatctgcagcgatgaaagagactgtgggagtgattgatcactgtgacaggcttcatcggtccacttgcttctggattgcgaatcatatatcgtctcaaattcgtgcttgtcgatcgattattcggtgattcacacaagccactgtagtgttatcaaaatttggcgtccgtgtccatgtaaccttcagcttttgcaaca

SEQ ID NO: 291201 - DNA, 217 bp, Zea mays
agcgtgtccatcggccacgtgatctgcgacggcgatctggtggggaagttctcgctgtccgacacctgcaggacaggggcggccgaggcgatcctgcagctgaggtcgatggggatcaagtcggtgatgctgaccggggacagcgcggcggcggccaagcacgcgcaggagcagctcgggggcgtcctggacgagctcgactccgggctcatgccgg

SEQ ID NO: 291202 - DNA, 397 bp, Zea mays
actgagtcgtattactgaggaggaggatgctgcggcagcatgaagagcgccgccgaggaaccggaacggcactgtcatcatcacgttacgaggtcttcgtcggagcgcgtaatgaggtgcctgaccgacgaggacctggacgagctgcggggctccttcgagctcgggttcgggttcgacgaggagtccggcggcgcccacctccgcgacacgctccccgccctcgacttctacttcgccgtgaaccgtcagctgtccgaccccgccaagctgcggacgctgtcgtcggcggcgagcctcacgtccacgccgtcggccgtgtcctcgtcgtccacgctccccgacgtcccgaacgacccacgcagccccaacgtcggcgcaaccgccgcgtctggcg

SEQ ID NO: 291203 - DNA, 400 bp, Zea mays
ggaagggctccgcgtcgtgtcccttctcttcctcctcctcctcctcctctctccaacaccccatccatcagcgctgccctccgcattgctcttgatcccatccagtacatcgattctccccccaagatcaaaggccggaggaggaagaaagtttataattttggacctagccggttcccagccccaacccctgtcatctccactggcagagctcagccaattgcagtaccggccattcatctggaagagctgaaggaaattacaaaaaacttcagcagtgatgccctcattggcgagggctcgtatgccagagtctattttggtgtgctgaaagatgggacgaaatctgcagtgaagaagcttgactccagcaaacagcctgatcaagaattccttgtgc

SEQ ID NO: 291204 - DNA, 305 bp, Zea mays
aacctcaactcacacgtctgatacggtctgggacagctccctcacgcctttgcccgcctgagcgctgttgtacgtggcacgtacatgctgtcacaagccatagtgcaaagtcgagtttggtggtattggtaaatcgtatggggtcacttctgagcgggagaccgccagatgcatgaagatcatctgcgatccttcgtatttgccatgcaaggtgaagaaagttggaagggtggcccacgccatatgcatcactaagcatccgatcccggacaccattgactcgcactccgtgcagatcatcctcc

SEQ ID NO: 291205 - DNA, 398 bp, Zea mays
  unsure (1)..(398): unsure at all n locations
tgacttccaaggatatacaggaaatggcacccttacatctgtattggcacggcttggtgaattggaggagaaggtacaggcaattgaagcaaagccatcccaagtgccatttgaaaagcaggaattgttgcatactttcgttaaccgcgtgggtgtgttggaagctgaactaatttctatgaagaaggtcttgtatgagacattggttcggcaggatgagctgcttgcatatattgaccaacgacgggcagccaaattttgtcggcagaagttctgcttctgagtgctgaagtacctgccacctatgttcttctattcggagttggcatgctgctattgtggacacagaatacttgcaaatatcttcatattttgttgcggtgtanagaattgcaata

SEQ ID NO: 291206 - DNA, 256 bp, Zea mays
agcaatatctcctccctctccctcacggatgcaatcgccatcgcagcgaaatagacatgtctgatcgggcacagatgtcgtggcacgcatacgtcggcgaccacctgatgtgcgagatcgacggccagtacctcgcggcggaggacatcgtcggccacgacggtgccacctgcgcgcataacagagcagttccccgagttcaagaccgatgacatggccaacatcatgaatgacttcgacgagcctatgcacctcg

SEQ ID NO: 291207 - DNA, 335 bp, Zea mays
acccacgcgtccgcccacgcgtccgaccctccctccctcacacaaataataaggaaaggtcccgcccttttcctccgacatccacaaggggggaggggaaaacacgtacattcacccggcggcaataatggcctcggttccggctccggcgacgacgaccgccgccgtcatcctatgcctatgcgtcgtcctctcctgtgccgcggctgacgacccgaacctccccgactacgtcatccagggccgcgtgtactgcgacacctgccgcgccggggtttcggtttggaaaaccccccaaaaaaaacccggggggtttttcccccaaaaaacccccc

SEQ ID NO: 291208 - DNA, 329 bp, Zea mays
  unsure (1)..(329): unsure at all n locations
aggtctctgtcgcgctgttgtaaacgggttagcagaagaacacacagggtgacaacaaatccttgttcggttatttctaatacatatggattggatgagattggaaaaaattaagaagaagtttaacttgtttgcgattcaaacacatccaatctcattcaattcacatggattgagagctaaccgaacaagcctgtagttggacaagggtgtaacacttatttgtcaggcgtaccgggcacagaccgcttcctatttgttcngtgggggaantggnntttaaaaaancccnnttgggnnnttttaaaaaaaaaaggggggcccccccc

SEQ ID NO: 291209 - DNA, 259 bp, Zea mays
cccacgcatcggaattcctgcatgacgtggaggtgctcaactgcatgggcaacaccagcatggtgctccgcctcggagcatgcgcggagtacggctgtctcgtatatcattacatggatcactggagcatcaacgaacggctgttatgtcggggcagcacgccacctctcgcgtgagcctagcggttcaggatcgcagctgagatcacaacagcgcagttgttccttgcacacacgaagccagagccgctggtgcaccg

SEQ ID NO: 291210 - DNA, 327 bp, Zea mays
  unsure (1)..(327): unsure at all n locations
cgtggatggcggcgccacgacctctcctgttgtcgctgctggtcgccatgctagcggtggccgccgatgtcgccaacgccggccacgccaagcccctgacgcctggcgggcgcgtggtacacgacaaccacggcaagttcacggccgggccgtggaaaccagcccacgcgaccttctacggcgggcgggacgggtccggcaccacggcgggcgcgtgccggtacaaggacacgcgcgcgcaggggtacggcgtgcagacgggtggccgtgagcaacgggggttgggnttttttgggggttttttttttttggggggggggggccccc

SEQ ID NO: 291211 - DNA, 301 bp, Zea mays
ccggtctagccttcccgaggctgtcacgccgtcacgctccctctcccgccagccgccgcctccgccggggggcccaccccgccgggcgtcagcgcgcccgcccccgcggcgcagcagcagcagcagccgcccccgctcgcggtgctggagcgcgtgcgccgcgtcggcagcggcgcgggcgggacggtgtggatggtgcggcaccgcggcacggggcgcccctacgcgctcaaggtgctgtacgggaaccacgacgactcggtgcggcggcagatcgcgcgcgagatcgccatcctccggc

SEQ ID NO: 291212 - DNA, 331 bp, Zea mays
  unsure (1)..(331): unsure at all n locations
aactgcgactgcctccaagggttccaagtatgccactccctgggtggcggcactggttctggcatgggcacgctgctcatctccaagatccgggaggagtacccagaccgcatgatgctgaccttctccgtgttcccgtcgcccaaggtgtccgacaccgtcgtggagccctacaacgcgacgctgtccgtgcaccagctggtggagaacgccgacgagtgcatggtccttgacaacgaggcgctctatgatatttgcttccgcaccctcaaagctttcaaacccccaaaaaaaacccccccccccccnttttttttttcccccacaaaaa

SEQ ID NO: 291213 - DNA, 234 bp, Zea mays
agcccacgcgtccggctcaggcgacctgcaacggtcactccacaggtaccggcgctcctgttaacggcagtcacgtgcgcgaatagcaacgctcaactgacagcctagagtcccatgacgaggtgcggcatcgtcccaatcttcatcgactgtactggctgcggcacatgctacgacgtgaaatgcagcgaagaagctaactgctccggcaagccactcaacgtctgcatcact

SEQ ID NO: 291214 - DNA, 329 bp, Zea mays
  unsure (1)..(329): unsure at all n locations
aaaccgaattccctgcgattcctctcccctcgcctcctcgtctccccctaggggatcgtcggagaggaatcgcaaagagggccgtctcatccgagttaaggaagccatggagcacaaggaggctgggtgccaggcccccgagggacccatcctctgcatcaataactgtggcttcttcggcagcgcggcgaccatgaacatgtgctccaagtgccacaaggagatgataacgaagcaggatcaggccaagctggctgcctcctctaaatcggacagggccaaantttcccgggntttttgggaaaaaaaaaaacccccccggggggggg

SEQ ID NO: 291215 - DNA, 373 bp, Zea mays
tgcacacctgcggccacgacgcgcacaccgcaatgctgctcggtgccgccaggatcctccatgagcgccgcaacgacctgcagggcacagtagtcctccttttccagccgggtgaggaggtcggtattggcgccaagaggatggtggaggcaggcgccgtggagaacgtggaggccatattcgggttccacgtcaccgtgctgctccccaccggcgtggtgggctctagggccggcccgctgctggccgggtgcgggttcttcgaggcggtgatcaccgggggtcggcggccacgccgcctccccccagaacatcatacaccccgtcctggcagcctccagcgtcgtgctcatcctgcaaagcctcgtgtcgc

SEQ ID NO: 291216 - DNA, 371 bp, Zea mays
cccacgcgtccgcgcgtccgtatgatcgaccagatcaagcgcgagatctccgtcatgcgcctcgtccgctagacgaacgtcgtggatctgcacgatgtgatggtcagcatcatcaagatatacttcgccatggagtacgtccggggcggcgaactcttcgcccgcgtcgccagctgtcggctcaacgaggacgccgcgagaacgtacttccaccagctcgtcggcgccttcgactctctgccacagccgctgcgtctagcagcgcgaccgcaatcccgagaacctcctcgtcgaccatcagggcatgctcaaagtctccgatctccgccgcagcgctctcatgtagtgccagcatcaagatcgcctgctgc

SEQ ID NO: 291217 - DNA, 319 bp, Zea mays
ctctaactcagttggttaggtggtctgagtagcactcctcgggtcctgggttcgacttcccgtgggagcgaattttagactgtggttaaaaaattcccctcgtctgtcccacgccaaagcacaggtctaaggcttagccccggtcgtggtcgttctcacatgggcttcaatgccgctgtcgtacccccccccccccccagtacctgcacgtcaggtttttttttcagcaaattccatctgataaggtaagaaatttataatgtaattcctattaatctggcattttctaagctcattgtcttttttccacatataccgt

SEQ ID NO: 291218 - DNA, 308 bp, Zea mays
gtgagtcgtattaatacgtggtctgagtagcactcctcgggtcctgggttcgacttcccgtgggagcgaattttagactgtggttaaaaaactctcctcgtctgtctcacgctaaagcacaggtctaaggcttacctccggtcgtggtcgttctcacatgggcttcaatgccgctgtcgtacccccccactccccagcgtacgtcatcgtcaatttggtcacacatgcgactatccatgctgatatggacggcgctcatgtagtctattcctactaagtctggcattttccagggctaagtgtttttt

SEQ ID NO: 291219 - DNA, 403 bp, Zea mays
  unsure (1)..(403): unsure at all n locations
ctccaactaatcccgttggagtggcggcttcaaaagtggagttctccccttcaacaaacccaagttggttaacaacaacaagggcggagttggtaacgtcaacttatccaattgaggtcggcaacttcaagaacggaagtcctctcaacacaagcccaagttagctcacacatcagcggcaagtcgtcanctcaactgctcctgtaagcttgccacctcctgaagtaaagtcttccccaccaccagcaccgattagctctccaccacctccggccaagtcaccacctccaccgggccctatgagctcacttcctccccctgtgaagtctccanctccaccagcgccggtcagttcgccancanctccaatgaagtcccaacggcggcaggcacaattagctct

SEQ ID NO: 291220 - DNA, 409 bp, Zea mays
acctcagtctgtaccgcgccaaggtggagcaggtccggcagcaccgggcgcagctcaagcgggagatctccgactccgtcgccgaggtcgccgccatctgcgccaccatcggcgagcctccctccaccgtgcacacggcctgctcctcgctccagggcacagggagcctcaaggaggagctgggcctgatcgcgccggagctggcggagatgaggcggaggagggacgagaggcggcgcgagttcgcagacgtcacccagcgggtcgccaggatccaggaggagttgaacctgcagctaggtggcgggcagggccagtctgaagctcacgccgccgccgtcatcgtcgacgtcgacggctccgacctgacgacgaccaagctcgacgagctccgagcctatctgcagca

SEQ ID NO: 291221 - DNA, 389 bp, Zea mays
  unsure (1)..(389): unsure at all n locations
actcctccccaagaaaactggaattaaccggcaattttattgaaaagggaaatgaaaaggaaggccaaccaaaaattaagcggtacatgacaatgatggactccatgaccgatgcagagcttgacgggacggacccaaagctgatgaaccagtcacgaatcaaccggatcgctcggngatccggcangcgcgtggaggaagtggtgcacatgctggacgagtacaagcgaattgccaaggtgtggaagaaattgccagtgttgaacaacaacaggagatcggatatgaaccgcgacattangcgcataagcgatgcgattcctcccaatatgctgactcagcttggtggcatcgctgggctgcagaatatgatcaaacaaatgggcggg

SEQ ID NO: 291222 - DNA, 412 bp, Zea mays
accacacgtcgggttcttggatggttgcgcaacaactcccctggcggccccgccgggcccccttccaaccgttggcgcccattttcccaaagccgggcaagccaaacccctgaagccttgccggccttttgtacaagaaaaccaagggaagttcaacggcgggccgttgaaaaccgcccaagcgaccttctacggcgggcgggaccggtccggcaccacggcgggcgcgtgcgggtacaaggacacgcgcacgcaggggtacggcgtgcagacggtggccgtgagcacggtgctgttcggtgacggcacggcctgcggcgggtgctacgaagtgcggtgcgtggacagccctagcgggtgcaagcccgacgcggcggcactggtggtgacggtgaccgacctgtgcccgccc

SEQ ID NO: 291223 - DNA, 384 bp, Zea mays
tcggcaaccaccagaactccaaccgttcggccctggaaccttaagcctcttcgttccggctccggaatccaacggcggcgggaaaaaacgggcaattcccaaaacaggaaccgaaggaacaaggttggaggataaccccccgctaacaaaaacaataaagggtgcggtaaaaggaccccccccggggaacatctggggcaccgtcgtcgccacctggtacgacgtgccccgtgtggagcgccacgtcgcgctccctggccttatccggacgctcaagatgtgcggcacctacggggccaccttcgccaccatcgggggcctctacatcggcgtcgagcagctcgtgcagagccagcgcaagaagcgcgacttcgtcaacggggc

SEQ ID NO: 291224 - DNA, 403 bp, Zea mays
atcaggctggagcagctggacgtgtcgcggaaccagctcgccggcgccgtggcggagaacgtgtgcaagctcccggctctcgccaacttcagcttcgcgcacaacttcttcagcgtcgaggcagaggcgtgcgtgccgtccgaggactcgccggtggcgctggacgatagcggcaactgcctcgatggcggacgcccggggcagaagccgttgcctgagtgcgcgcttgtgctcgcgcaccccgtcgactgccgcacgaacgtctgttccaagatgcctgcgccaccagcgaagaaggttcctaggccaccagacgttagtccacatccgttgccaccagcgccatcaccgggagaacaaccaccaaagaagtccccagcaccacagccagtgagcccaaaag

SEQ ID NO: 291225 - DNA, 427 bp, Zea mays
cacacacatcaggtaccatctcggtaatgatgtctggacgggccacttatgacagacctgcaccgccgtcgtcaagaagggcgaccacagaggccatacagtggccgtcatgatcatctctaaagctaacatgacatccggcatttccagtgcagatgttcgtatggacgtcaagattttgaaatccctatcagggcaacataatctcgtcatattccatgatgcatgtgattgacccctcaatgtctacaatgtcatagtactaagtgcaggtgaagacttgctagacagaattttaccaaaatgtgggagatatccatgggaatatgccatagctatcattgtacagattttgagcgtacaggccttcagtcatcatcatggagtaatgcatcgtgatttgaagccagagaattttctcgtcaca

SEQ ID NO: 291226 - DNA, 374 bp, Zea mays
tcctcgaccaacgcaaatctgcctcgggacgaacaatgcgtcgtcgtccatcgatcatgaggcgtctccgacggagctaaaagagaccgatcagtgagcggtggtggattgaagaatcgagggcgaggaggaagacagggaggatggaggaggtggagcagcagctgaccaagaaacagatcgaggagttccgggaggcgttcagcctcttcgacaaagatggcgacgggacgatcacgaccaaggagctgggcacggtgatgcggtcgctggggcagacgccgacggaggaggagctgcaaggcatggtggacgaagtggacgcggacggcagcggcgccatcgacttccaggagtttctcacctgatggcgc

SEQ ID NO: 291227 - DNA, 332 bp, Zea mays
gcacgcgtccgatcatcatctccgatgcatcaacaatcgccgatagcgatcgagagatacgtcaagatgagtaaagtggcatcatcgtcagccgttctcttcgtgctagccctgacgctaatgtgtgccgcgctgatagcagaggcagagcagaagacattcgcagccgccgccgccgaggagaagtaggtgcatgacaacttctgctcgacgctgtacgatggcacgaatgggatggacctgatggtgtgcaaggagtcctgcgacctctcacagcgctccaagttgatgttgtaccgtaggatccaatgcaatggcaagtgcaccgagca

SEQ ID NO: 291228 - DNA, 343 bp, Zea mays
  unsure (1)..(343): unsure at all n locations
atagggtgcttgttgacactgctgcaccaatagaatctgttaaagaggctgtaagcaaatttggaggcattcttgactggaaagagagacgtaagaatgtccagaatgagcttgataaggcattggaagatgctcctaggtacaaaagaagagcggaagctgcagaagctgagaaaagcaaagttgtcatggaattgtgtaccactaggagaaccattgaagggttgaagctaaatctagagaagacacaaattgaggcaatacaagcacaacaagactcggagcttgctgacatacggttcaaagagattcaacaaggaattgcatgtanagagagtgctgc

SEQ ID NO: 291229 - DNA, 360 bp, Zea mays
tatactgactcctggaattgtaccacatgcaccacttaggcatcgtacatggggacgaacgaacattcaatggggatctatgcaacagcgtcctagcctggtgcgtccttctaaatcaccaaatggggcgcctccggtattggtaatatagacatcaagaaggctgttcaagatgtatgggcatcggcatgagacggtactggtaagcagacaatcgtcagacttacgggtgacttccttgtctgacaggtcaacttcacaggcccttgcatgggggacgtgacgatccagctggatgtcaaactgctgacgaccacggccgtactccattacaaggaccataggatatggatcaagatt

SEQ ID NO: 291230 - DNA, 364 bp, Zea mays
ggccaccccaacgtcgtcggactcgagggcctcgtcacctcccgctcctccccctccatctacctcgtcttcgagtacctcgagcatgacctcgccggactcagctcctcccccgacatcaccttcaccgagtcgcaggtcacattgttggagatgctcttagctttagcttgtctgcctcgcgcgggcaaacatgtcagaaactgcggtacgcatcagtcggacaccgcgatcgcgggggccatgcatgctgtcagctcttgacccttgtcaccatccaatccaatggcgatcggtcgatcgtcttgtcacgattcacaaccgttgcctgatgacgcgcgcgcgataacatgccgtgcgtgcg

SEQ ID NO: 291231 - DNA, 221 bp, Zea mays
  unsure (1)..(221): unsure at all n locations
ctgcgggaacactgtacaagagcgggaagccggcgctgccgtggcggcagcgcctcgagatcaccatcggcgccgcgcggcgcctgcactacctccacaccgccgccatctacacgagcatccgnctcgacgtgtccgcgaccacgatcctggtggacgacaactgggtagccagggtttccgacttcggcttgtccaagaccggcccgacggccatgaac

SEQ ID NO: 291232 - DNA, 376 bp, Zea mays
aacgagatcaagggctaacacctctccggcgcggacaacgacggccacgagggtgacgcatgtgcgcaaagaacgggtttccccgagttcaagagtgaggagatggcgaacatcatgaacgacttcgacgacccacaggacctcgcaccaacaggcctgttcctcgggctgacgaagtacatggtcatccaaggagaacctggtgctgtcatccatggcaacaagggatcaggaggcatcaccgtgaacaatataggtcatgcactcgtggttggcatcgacgatcagccgatgacgcctgcgcaatgcaacatggtgcttgcaacgctaggcgactatgtgcttgaacaaggcatgtgactactacgtagcagct

SEQ ID NO: 291233 - DNA, 447 bp, Zea mays
  unsure (1)..(447): unsure at all n locations
aatggtattgtgattatatggcaataaaattttgaactgaatatccacattttttgtataggaaaagaaccattacatcactaggtcaccgtagcagaaggtaataatagtacataatacaaacatgataacatggaatgcaaaaggtacaggatttctacaactaagccatctgtttctaacatgagtagaagaaatgacaggacaggtaaacaaacctctgcagagactgcaactgcatcaaaccagtggtcacatttcaaggcctgcagaagtggccgtagacgggtatcaaaattggagaccactgcagttttaacaccagctttcctcanagctttgaatacattttcagcatcagggtcacaaagcttcgaggcctancangcataataatcttctcgttagtcgagttgaagtcagagacaacgaaagaatgttgttttg

SEQ ID NO: 291234 - DNA, 454 bp, Zea mays
accacgcgtccgaaaaaaaaaaaaaaaaaaaaaaaaaaaaaaaaaaaaaaaaaaaaaaaaaaaaaaaaaaaaaaaaaaaagggcggccgctcagggggttccacccttaggttcccgtctttgctacgtctgcaactcttctaaagtgtcatccaaattcatttcactggtccatctttttgcaactttcttttctgggatcaccctggggtaacccatgttattccccttgttacacatctccctttcgcaacccgttttactagctggcatgctcgcacagttgccccttcccattacttttccaacctgtttggcaactggaatgccccctgtaacgcccccttaagcgcggcatttatcgtggttactctcatggttacccctaaacttgccagtgccctatccaccgcccctttcgctttccccccttcctttctccccaccttttccg

SEQ ID NO: 291235 - DNA, 276 bp, Zea mays
accacgcgtccgactgtcgacgacggagggaacagggaggaggagtctggctcacatttctccttactgtcacgtcttcagtatcctttctttgccattttcgctctgggtaggttgatgactaatgttaatggtcttgcattgtaactcatcgataccttccgcagtgggaggatgatgacatctggtaaggctgttaattatgcgagggccttggatccattccagctgattcttactatggattggcccacgtacctgttcaatgctgctagt

SEQ ID NO: 291236 - DNA, 351 bp, Zea mays
cgcgtcggccctgcctctgccacctcgaggtgatgaacttgtattccgcccccttgaacatctccaacctgtgaaatactcccggcctggattacccttgttgggttttggagaggagattttggacaatgctttgactaaggcagaaaaaaataagatcaatttacatttggtggctgcagaagaagctcttgcattgtcgatatggactatggctacagtttgtcgttctctgtctttggaaagtgtgctaggcttattcactggagttttgctggagaagcaaattgtggtaatatgcccaaatctgggtgttctgtcagcaattcttttgtctattataccgatgat

SEQ ID NO: 291237 - DNA, 186 bp, Zea mays
gcgtccagtccagtatcaacgtacccaggggtgcggcggcggggtccgtacaggaggtcaatgacgccttgacgaacatgttccccagtgagaccgagatcgttgtcaaaattcaggtccttgctggtggccgtgggctgggatcgtgcgcaactgtgctgcacggaggtgtccatgatgttaccg

SEQ ID NO: 291238 - DNA, 449 bp, Zea mays
accacgcgtcagaacacgcgtccgcgccattggccatcgcttgaatccatttaggaaaaggttgcttcttggacgtatgccgctataagcaaaacggagtgacaaagttggaagaaaatgcctcgagcaggtaaagttgtgtctcgctcggttgtaggaggtgaccgaaacagaagagaaccaacacttataaggattggtcaacctcaagcttccactaccgcgaaaagttcgactagtgccaaaccacatagatatcgtccaggtacgagagcgctgatggaaatacgcaagtttcaaaagagtaccgacttgttgattcgcaagttaccgtttgcacgtctggttaaggaaataactcagcactatcatcacgaacttcgctggcaagtggaggcagtactagcccttcaaacaagtgcagaggactacctagttggtttgttgga

SEQ ID NO: 291239 - DNA, 386 bp, Zea mays
cacgcgtccacaaacagggactcgacagatatggcttccggtgttgcagtagacgatacatgcggaaaggagttcactgttcttgtgagaagcacgccaagaaagtaccgtgctattatttgcaaactcactgatgacctgtcttctgtatgtgtggaaaagacgcttcccgcagccaacataaccaagtgcagtgcacaagaagactggaaaaagtttgtgactgaattgccccaaaacgattgtcgttttgcagtatatgactttgagtatcacacttctgaatgtgtttccaagaatataataatatccattctttggtcacctgaaactgcgaatattacgtccacgatgttgtaatcttctatcagagaagctcttgttca

SEQ ID NO: 291240 - DNA, 452 bp, Zea mays
taccggtcgtatatctcgggggctcgaacacgcgtcaagagaatggcatcaccttctttacaagtagaacaacgaccagtcacggaaacctattgtatggtctaatatcggagtgggtgcagttcttcaactgtttgaagttactactcgtggacagccgtttgaagttatcaagacacagcttgctgcaaatcgaaaggacagcatgatttctgctttgaagactatctattctagaggaggcatattgggcttttaacaaggactgattccctgggcatggattgaagctagtacgaaaggcggtgtcttatttttggcgcataatgaagcttctacctttgttgcgtcgttgggattttctccaaccgtttcagatacggtaggatgtacatttggtggtgtcgcacaagcttatactactatggggttctgtacgtttatgaaaaccg

SEQ ID NO: 291241 - DNA, 446 bp, Zea mays
attgcccttgtcgtctatcatagacacacgttaaccttggtccattactactaggaatgacccttcgtaaaccagtctttaccaaagtagaaaaactacaacccgggacacaggggcacaacttgatcgttcaagtgatgaacgtcggtgaggttatggaaaaagtgagaccgagtggtgacaaactgcaaatcgccgaagtgctacttgcagatgaaactggagcggtattatttacagcaaggaacgaacaaatcaaactttttaaaaagggagagtgtgtgaccgttcgaaacgcaaaagtcaatatggtgcgaggctttattcgtttagtagttgacaaatggggagctattaagccgcctggaccaacggaaaagttacaaggaccaccaaaagtagaaaacaatatttccaacatagaatatgaactcgtgtaagacact

SEQ ID NO: 291242 - DNA, 364 bp, Zea mays
agcaagatgttgtgtacacggattggatagatcgtccacaacctcgattggaccgtcatacaggaaatgggtttacagtgacgctgggaagagtgagggaatgttccgtgatggacataaagttggtattgtttggacataacacagtggtaggagctgcgggtggttcgattattactgcaaagttgagtgtcgccaaagggtttattgcacaaaaaggaaaacaaagtgtatatgcggcagtatctcgtcactagtgtgtgtcactagacagaatagtgtgtttgtgttgtttgtgtctgtgttttccaatgaaagacattgaccactagaactatgtgaaaaaaaaattacagtcaaccac

SEQ ID NO: 291243 - DNA, 382 bp, Zea mays
acccacgcgtccgcccacgcgtccgggttaagagcctcaaaggaggtaaggagatgaggatggatgttcttctgatggaaaatcttttgtttgagcgcgatgtgacaacattgtatgatttaaagggctctgccagatcaagatataacccagactcaaatggtagcgataaagtacttcttgatcagaacttaattgaagcgatgcctacatcacctatatttgtcggaaacaaggcaaagaggctgctggagagagctgtttggaatgacacgtcctttcttgcttccatcgatgtaatggattactctttacttgttggtgttgatgagaaaaggcatgaacttgtaatgggtattatagatttcataaggcaatatac

SEQ ID NO: 291244 - DNA, 407 bp, Zea mays
cacacgcgtcaaatcgtcttgggggaaaacacatgatagacctaaagaaagctcaggcctgcgcataggacttttcgaatctcgaagggcctagccacgaaagccatcagggcctagaggagtctcgcacaggtttcgattgaactccgctacgaggggcgttacaacgcaacgagagcagtctggagagcatgggcattgggctttgacggagagaggatggtcaagtccttcatgaccaagggcaacgtcgttgtcgtatgtgacaacttcataggcccttgcaagggcgacgtgaccatccaggtggatggcaatctgctggcgaccacggacctaagccactacaaggaacatggtaattggatcgagattctacgcgtggataacctggtcatcagcggcaa

SEQ ID NO: 291245 - DNA, 378 bp, Zea mays
  unsure (1)..(378): unsure at all n locations
acggaggccgggcccgtgctgtccatgtgcccggcgttcgccaaggagccggcgcccgccaagccggggtcgtgcggcacagtggtgcgcaacgcggagctcaaggtggtggacccggacacgggcctctccctcggccgcaacctccccggcgagatctgcatccggggcccgcagatcatgaaagggtacctgaacgacccggaggccaccgcgaggacgatcgacgtccacggctggctccacaccggcgacatcggctacgtcgacgacgacgacgaggtcttcatcgtcgaccgcgtcaaggagctcatcaagttcaagggcttccangtgccgccggccgagctcgaggctccggctcttcgccaacccgtc

SEQ ID NO: 291246 - DNA, 424 bp, Zea mays
ccacgcgtccgacaagccctccacttcaaggaaaacaagcaccgttttgggttcgctaaatcacggctgacatatggtaatattgggggaaggttcgtgacagggagaaccatttgttgaggagtcatatcagagggttgccctggaccggcttcttaagcttgcaagaatagaagacgatgacctgctgatcatgtcggacgttgatgaaatcccgagcggccacacaatcgatctcttaaggtggtgcgacggcattccagacatacttcaccttcagctcaggaattatctctactcgttccagtttttcctggacgacaagagctggagggcatcgatacacaagttacaagctggaaagacgacctacgcgcacttccggcaggcagacgagctcctcgccgattcagggtggcattgc

SEQ ID NO: 291247 - DNA, 420 bp, Zea mays
acgaacagacacatagagagactggacctcccgtcacaatcaaagagggaagaacctcctatacagcgaccaccatcgattgctcgtcccagctcatcagcagcgacatttctgtacctcactcacgcgacagacacgctagtcctggcccacgtactgtgctcagttccaatgtcgctccctcgaggcagaccatcgttatcagtgactcacctctataaagtcactgtcatcaccttcatggacacctagatcgacgtcaagcccgcatgtctgatcgttcagggactgtttggtgacatcattccaaatatcgacagaaacttccgagcactttgcacaggggagaaaggaattgccaagtccggcaagcctctgtggtacaaggggtcgacgttccacaggattatcccggggttc

SEQ ID NO: 291248 - DNA, 328 bp, Zea mays
gctacacgtcagcgcaggcatccgtccacacgaccacccactcatttgtagccgtaaccagcgctgggagcgtcggacgatggtacgtctacaacattcatcaccgacagacggtctatgtggagctgggtctcacgggcaggatttctgtcgtcccgcaaactcgtactttcatcataatcacccttgttgtcgaatcttcagacatcagttacactgtcactgtcaagattcaagaataagagggaatccctccataacactagcggctcacttttgccggtaatcatctctacgacggacccacactgagctactagaacattca

SEQ ID NO: 291249 - DNA, 382 bp, Zea mays
cgatcgacccaggatacttgccaagaggcggcccacgcgtccgcccacgcgtccgtgctgaagccgtccatggtgacgcccggcgcggaggccaaggacagggccaccccggagcaggtggccgcgtacaccctcaagctcctccaccgccggatccccccctccgtgcccgggatcatgttcctctccggcgggcagtccgaggtggaggcgacgcagaacctcaacgccatgaaccaggggcccaacccgtggcacgtgtccttctcctacgcgcgggcgctgcagaacacctgcctcaagacctggggcggccagccggacaacgtcaaagctgcgcaggacgcactgctgctgctcgccacggccaactccctggcgc

SEQ ID NO: 291250 - DNA, 390 bp, Zea mays
gagatcacgtcgcaagaacctgaacagaggtaattgggaaattacccttccccttcttccaaccaagcccttactatatcgggagttggaatttatactgcgcagtggcggacgcggacacgatggcgctggacgacatgcagcgcgacgaggtgttcaacagggacaacatcccgacgtggctgtcctacgcggggtacgccgcgctgagcctgatcgcggtgatcgccatcccgatcatgttccgggaggtgaggtggtactacgtggtggtggcgtacgcgctggcgccggcgctggggttctgcaacgcgtacgggaccgggctgacggacatgaacatggggtacaactacgggaagatcgcgctgttcgtgctggcggcgtggg

SEQ ID NO: 291251 - DNA, 413 bp, Zea mays
gcggcagtgggaaaataccgcaccgcacgcaccaatggagaacgccaacgcctcctcttgccgcaacggcgacggcacccagacgccaccgccgcacgtggcgatgcttgcgacgcccgggatgggccacctgatcccgctggcggagctggcgaagcgcctggcccagcgccacggcgtcacgtccacgctcatcacgttcgcgtccacggcgtccgccacgcagcgcgcgttcctcgcctcgatgccgcccgccgtcgcgtccatggcgctgccgccggtggacatgtccgacctcccgcgcgacgccgccatcgagacgctcatgtccgaagagtgcgtgcgcgccgtgccggcgctcaccgaagcgctcctgagcctcaagcagcggcccaccacgaccggccgtctcg

SEQ ID NO: 291252 - DNA, 219 bp, Zea mays
cgggtcgaccacgcgtccacccaagcgtccgctgacgcgtgggcggacgcgtgggcagagccagtgcctacaccgaggcctgaacctaagaccgaacctatgccagagcctaagcctgaatctaagataagttcagagctaaagcctgaacgaaaaccagagcctatgccatagcatagacctgaggcagtgccagagcccaaagctagaccgttccca

SEQ ID NO: 291253 - DNA, 222 bp, Zea mays
ccacgcgtcaacggacgcgtgggtgcggactggttccaattatcaggtcagcgacagtgcacagtttacataattgctgactcaaggtgagctaacaggtcaatcatgggcgaaagatgtacaagtgacgaatgaacgcgtcagtcagatcataatgcatatgagtcctgaccacacggcgatccagttcatgtgggtttgggaagagttcttctacatcat

SEQ ID NO: 291254 - DNA, 404 bp, Zea mays
agatcgcccgccccatctagtcggtgtcggtgtggtgtgggggcggtgctgcgcgtgtgcgctcctctgttcggcaggactccttcaagcagaaggggcggagcagcatggcggggcgctacgacggcaaccccttcgaggaggaggacgtgaaccctttctcggaacaagcgcgcggcaaggctggcgggcagtccaacttcggcggtggtgcgttttacatgcctaacaccagaaacatgcctcctgcatccaattcgcgcctttcgccgcttcctcctgaaccagcagacttcagtgctacagtggacatacccctggactcgtcaaaggacctgaagagaagggagaaggagctgcaagcaagggaagcggaattgaacaagagggagaaggaactaaaa

SEQ ID NO: 291255 - DNA, 421 bp, Zea mays
agcacatcacacttcaactcaattcccattttatataccccaaacttctttactcttcataaacccacataatcgccacaatgcccatcaccgttccccaagctaccgagctcaaggacctcttcagccttaagggcaaggtcgtcatcgtcaccggtgcctccggccccaccggtattggcacagaggctgcccgaggatgcgctgagtacggtgccgacctcgccatcacctacaactctcgcgccgagggtgccgagaagaacgcaaaggagatgagcgagaagtacggcgtcaaggtcaaggcctacaagtgccaggtcaacgagtacgctcagtgcgagaagctcgtcaaggacgtcatcaaaggactttcggaaaggtccatgtcttcatcgccaacgccggaaagactgccgac

SEQ ID NO: 291256 - DNA, 410 bp, Zea mays
agcccacgcgtccgcccacgcgtccgaacctcacaagtggaaggcatggttatcgctggctgaattctggtacaatacatcataccatacttccctggattgttctccattcaaggccttgtacggctatgatccaccatttgctgctgcccctattattccatctgatactgatcattcagtggcccaggtgttggctgagcgtgctcactttactgagatgttgaaagaccagttggctgttgctcagaacaggatgaaactcaaagcggatcgcttgcggtctgagcggcagttccaggtgggggatttggttttgctcaagttgcaaccatatgctcagcattcggtggtgaaccgaccctgtcccaagctcgcgttcacaatttttggggccatacaaagtgctg

SEQ ID NO: 291257 - DNA, 330 bp, Zea mays
agcccacgcgtccgcccacgcgtccgcccacgcgtccggtatgtagaagtacctagtgacagtggtattacattcaatgttgcacccaatatgaaggcgcttgaaattgctgagaaagccagggatgctctcctaagtggaaagtttgaccaggtacgtgtcaacctgccaaatggtgacatggttggtcacactggtgatattgaggccaccgtagttgcttgcaaggcagctgatgaagctgttaagattattttggatgctgtcgagcaagttggtggtatttaccttgttaccgccgatcatggcaatgctgaggatatggtgaaa

SEQ ID NO: 291258 - DNA, 368 bp, Zea mays
  unsure (1)..(368): unsure at all n locations
agcggacgcgtgggcggacgcgtgggggcggcggcggtgtgccgcccatgcttgttggtggaaagcgcaagctgatgatacctgcgtcactggcgtacgggcctgaaccggcaggctgcttctcaggagactgcaacatccccggaaactccacacttctatatgaccttttcctcgtcgggatctacaagtgagccctcgatgacagggaatgttcagaacctaagagcagagacaaggaggaattcttggcggtgaaagcacctgcagaggcagagccacttgcagaagcttctgtactccagagagctacctggattgaataaaatgatgatatatataaaccatccttgttacgtaatanaana

SEQ ID NO: 291259 - DNA, 271 bp, Zea mays
ttgttcttcagatcaagtccctcaatgaggactttcgcaacgaccattgtcaatcgcacacatccgggtgggactcagtccctccttacccatcttagtcattcctttcatgctacctgcatcaaccttcgtgagtttgttgccatcgacatctagttcattaaggcaaggaggaataccttctcggatggtacttatatttgtgtcatcatcacggatctactagaccttcttcattccctgaacagctcccatttttaatacctcacct

SEQ ID NO: 291260 - DNA, 309 bp, Zea mays
tccgtgtcaacgatgacatgctgcgcgccacatttaaagaaatagcttatcaggccacacaggacaatttccagaagggctccatcttccgacccttcacacatcatcataaagatctctgcgcacatcactgcagccgtggttgcataatcctacgagctcggtctggctacacgtctgactcacaccattgacgtgatgatatatgcatagaactgcatgtacattcccgtctatcgcaactaccgttaatgctgcggggatcaattttgcagtaataacatatctatcaacgcagatggtactctg

SEQ ID NO: 291261 - DNA, 342 bp, Zea mays
aggatgttacatgtgtttccaccacattatttgagccagtaatattgtttttgcaggctatatgattgttctatttcttgcttattttgtataccataatagtgctgctatatacaatgatgattttgtttaataaaaaaaacatatatagaagtgacagatgtaaagatatatgttctcttcctcaactagttcagtctgccagctaaatttcttttttgattcatgatttgtagagtaaaatctttatttttaattgatttcagttcaaggagctcgcacaagcctatgaggttttgagtgatccagagaaacgtgagatttatgatcagtatggtgaag

SEQ ID NO: 291262 - DNA, 362 bp, Zea mays
agcccacgcgtccgattaccattgtcaactgtcactcaagtgcaaaccattaccgtcgtcgtcccaatccccgtcgctgcacacgccttcaggacaaacccaagggaaagcagattataaatcactgagtgaagaggagtggaagaagcgcctgactgaagagcagtattatgttactcggcagaagggcactgaaagagcattcactggggaatactggaatactaaaacgccaggcatttatcagtgtgtctgctgcgacacccctctgtttcagtcatcaaccaaatttgatagtggtactgggtggccatcctattataaaccaattggtgaaaatgtcaagagcaagcttgatatgt

SEQ ID NO: 291263 - DNA, 344 bp, Zea mays
agcggacgcgtgggatctccctcggctgccatgccgtctggggcgccctcaaatacatccccgacaggatcgccggcgcggcgatgatggcgccggtggtgaactactggtggccagcgttcccacggcgatctggttgtgagacgtgtacgcaacccaggaggtgggcgatcactgggcgctgcgcgtgtcgcaccacgcgccgggcatcctccactggtggatggagcagagctggctgcccacctccacggtggtggccggcaccacgccgctgcccaacgagcgcgacgccgagatccggagcaagatgaaggcggacggcacgttccagcagaagcggg

SEQ ID NO: 291264 - DNA, 380 bp, Zea mays
gaattcccggctcacgcgtcagggtggcgattgatctgtgtacaggatctgacccggagagcctgcggtggaacgtgcaggcggagctggtgcactgccggtgggcgatgctcggcgcggcgggcatcttcatcccggagttcctgaccaagatcggcgtcctcaacacgccctcctggtacaccgccggcgagcagcagtacttcaccgacaccaccaccctcttcatcatcgagctcatcctcatcggctgggccgagggccgccgctgggctgacatcatcaagcccggaagcgtcaacaccgatcccatcttccccagcaacaagctcaccggcaccgacgtcgggtatgtacatctctctctatctctccttttg

SEQ ID NO: 291265 - DNA, 418 bp, Zea mays
tggacagcgctgcgccgcggccagctcaaggcgcaccagtgggaggaggtggctgccaaggttgcctcacgatgcaccgccacccctggggtcctcgcccaccgcagcacgggcacccagtgccgctacacgctcgaaaagctccgcaagcgctatcgcaccgagggcgcccgtcccgtcacctcgctctggccctacttccgccgcatggatctcctcgaactgaggccactcgccgtcgcgtcttccgcttacccggccgcgactggttcaccgcctgacgccgacggcgaccaacaaggataggaggaatactacgaggtggaggaacacgaagcggaataataagacatgcacgacgcaaacgagcaggatgaaaaactcccccaacccaagaacaacacccggagcatcaacg

SEQ ID NO: 291266 - DNA, 380 bp, Zea mays
  unsure (1)..(380): unsure at all n locations
ggaacttgatgcatgtgtgaacagagagggggttctcgtgaaatgtgaagcatacggtgaagtccaagtaaactgcagcctcccaggtgtgccagagctgaccatgtcctttgctaaccctgcaattatcaatgatgttaccttccacccctgcgtccgattcaggccttgggaatcaaatcagatcctatcatttgttcctcccgacgggcagttcaagctcatgagttacagggttcagaaactgaagaagacaccgatctatgtgaaaccacaattaacatcagattccgggaactgccgtgttagcgtgatggtcgggattcgaaatgatcctgngaaacctattgattcgataacagtgcagttccagttgcccc

SEQ ID NO: 291267 - DNA, 377 bp, Zea mays
gcagaactacgatggtggtgacctccacggagaccctaccagcggccttcccatcaccaacctcaccctcaagaacatcaagggcaagaacgccgttgacgccaagggaaagaatgctgctatcgtctgtggcaagggagcttgcactaactggacttggtccaacgttcaagtttctggtggaaagaagtacgacagctgccagaaactttcccagcgttgcttcttgctaagggatatccatttattaattttccaactccacttggaggatttacaacgtgtaatatggaaagatagacttcattcttgtatataacataaccattggggccagctcgacaagttcttgctgtggttcctaacaatataactct

SEQ ID NO: 291268 - DNA, 428 bp, Zea mays
acccaaggtgtcgggcttcgccaaggtggacctcgaggccggcaccgtcgacaagttcatctacggcgacggccggtacggcggcgagccctgcttcgtgccgcgccccgacgcccccgcgggcgccgcggaggacgacggctacgtgctgtgctacgtgcacgacgaggcccgcggcgcgtcggaaatgctcgtcgtcaacgcccgcgacatgcgagccgaggccgccgtcaagctgccgggccgcgtcccgtacgggttgcacggcacgttcatcgccggcaaggagctgcagcggcaggcctagtgtggtgccgttgccgtgtcgtgctgctgctacctcgtcgatcacgaactcgaccaactcacgtacatacactgatacacacaacagacactacaattaccaggcttgatattgacttggc

SEQ ID NO: 291269 - DNA, 450 bp, Zea mays
ccggtcggccacgcgtccacccacgcgtccgcggacgcgtgggcggacgcgtgggcgactgcgagcgcgtgcgcgtcgacggcctcttcgtcagctcgccggcgtccagccccaacacggacggcgtccacgtcgagaacaccaagtccgtccagatcctcaactctaggatctacaacggcgacgactgcgtctccatcggcgccggatgctccgatgtccacgtcgagaacataacatgcggccacggccatggaattaggtacctgtcagtctgtcactcactcactcaccaacgtgcttccatggcgcgcggtaccgtttgtagtgaacctgacgcggcgagctgctgctgtcaccctcgcagcatcggcagcctgggtgtccacaacacccacgcctgcgtgttcaaagttcacggtccggaacgtgcggatactcgactccgac

SEQ ID NO: 291270 - DNA, 387 bp, Zea mays
acgtcagagagacttcaactggccttggaagagcaaactgaaatggcaaatcatagccaacagcagtgtgataggctaagaaatgaacggatcttgtgtcgaatttgctttgaaagagacatatgcattgttatgcttccctgccgccatcatgttctctgcgagccatgctctaacaagtgtcagtcatgcccaatttgccgattgaccgttgagggcaggctatttgtttatgatgcagtgatgtcatccaatccatcatgttacgcagtttaaaagtgcacatgttgacagtatttgtagggtacctacttctggtgttgacaaagatggcccacacctgtttcctggcagtgaatgacaggttgtgaaattcttggtatgaaa

SEQ ID NO: 291271 - DNA, 378 bp, Zea mays
aacccacgcgtccgcccacgcgtccgcacacacaccacaccacacctcctcgcttccactccgctcgtctgacatctcgtcccgtcctttcgtttcgaagcctcgcgagccccgacgatggccaccgccgcggtgtcggtcgacgagaagctcgacaagcttcgcgccgaggtcgccaagctcgaccagatcaggcgagtgcccccctcctctccgcactagatctcgccgcccgatcgcttcgcctcccatttttgctgatttctgagtgtgtttttccgcgcagcgagaacgagaagtccgggttcatcagcctcgtgtcacgctacctcagtggggaagcggagcagatcgagtggagcaagatccagaccccta

SEQ ID NO: 291272 - DNA, 428 bp, Zea mays
  unsure (1)..(428): unsure at all n locations
accacgcgtccgcgacagacaaaatcagtcaagatggtcaacgttcccaagacccgccgtacctactgcaagggcaaggagtgcaagaagcacacccagcacaaggtcacccagtacaaggctggaaaggcttctctgttcgctcagggtaagcgtcgttacgaccgtaagcagtccggttacggaggtcagaccaagcccgtcttccacaagagggcgaagaccaccaagaaggttgtgctcccgtcttgagtgcactgcctgcaagaccaaggcacagctcgcccttaagcgatgcaagcacttcgagcttggcggtgacaagaagaccaagggtgccgcccttgtcttctaagcgtgtctcctctttctctctcttttgctgggccctcggcgtagtcttcaagcggacangatgggtggctttc

SEQ ID NO: 291273 - DNA, 319 bp, Zea mays
ggcataaactgggctctagttcgtgccgccacgcccccagagctggaggctcccctccaggatacattggaggccacactgcctcctcctgcagctgatgcggcccacaccgatatgttctgatcatacattgatctatgatgctgcatgttaatttgcttaaaggaagaaaaaaaatagatgatgaagatgcatgactttggcatagatgagaacaataatgtatgttaaggactaattatcttgatccatcaaaaaaaaaaaaaaaacaaaagaaaaaaaaaacaaacaaaaaacaaaaataaaaaaaaaataaaaa

SEQ ID NO: 291274 - DNA, 396 bp, Zea mays
cccacgcgtccggtggagcgtgaggcggcggaggtcggagagaaggttgcgcgcgaggcggaggcgctgcgcggggacgcgagggcgcggatcgccgtcggggagacgctgatgaagatgctgctgcggctcgatgcggtgcgaggcgcgcgggaataccggaagagggtcaccaagcgggtcctcgcgctgcaggatgctgttgacgccctcgaaccaaagccggcgccggattcggaggtcgtggcggaggagaacgagtctgaggtgacgtccgagatggtggacgacagcgcggaggcgacggaaatgccggtcgccgctgagcacagcggccggggttggggtgaatgcggcggctgaaacggttgccgatatggaggtggacgggggcaa

SEQ ID NO: 291275 - DNA, 418 bp, Zea mays
accaagcatgagcctacgcattgatcgcatacgtcatgggatctgcacataaaactatagttcccagatcgtcaatatagcagggaaagaacacttcatcttttaccgcggtaattttgctgttatatgcataatcagtttccaagcagattaaagagaaaagattaaagtttcgtcagtttgccttaaggtggttcaaatggtctgtgatacgaaacgtatgttgctatctcgtaaggcgcatgtgggatagttacattgccgaatgctactatctacgagattttctcgtgtaaatatcagctagttttttgctgacatagtcagacacactgcacaagctggattttcatgagatggtgatgtacctgcagcatctcggaattaggacattagcacacgatgatctagagatagt

SEQ ID NO: 291276 - DNA, 430 bp, Zea mays
atttttgttaatgttcagtggatcgtccactttttcgtgtcaatagggtaacactacgaacttggttcttgtttcttcttcctaacggtgtgcagttctgatgcataacttttttttttttgctttgttcaggtggccttacccatttctagacttgacattccctggtgcacctgtatggtaaggtcgactagacgaaacaagtgactctatttttgctaaataccatggtctcatgtgtagcttacgcattagtttggctctgtttgtttacttccaggattatataatccagcttagggcctgttcggttagctctaaatccatgtggattgagtgggtttgggtgggttcaaatcccaaacaagtcaaaattgttctcaattttttccaatcccgtccaatccatagctaacgggattaaccgaac

SEQ ID NO: 291277 - DNA, 413 bp, Zea mays
  unsure (1)..(413): unsure at all n locations
ggctaacctccttttttctctctctatctttctctccatctgtggacttctccggttttgtttgacgagatgcctgcgctcgccgtcgacgccgcgacacccgtggcgcacgccttcgcgtcctgcgacgcggcgcgcttccccgccccgcccgtggtgggccccgccgccgcggccgaggccgccccctggtcggccgacctctccgcggcgctctacaacgtggacggctggggcgcgccctacttcttcgtcaacgacgacggcgacgtggccgtgcgcccgcacggcgccgcgactctcccgggccaggagatcgacctggccaaggtcgtggccaaggccgcgggcccgcgcgccggaggcgggctcggcctgccgctgccgctgctcgtgcgcttcnccgacgtcct

SEQ ID NO: 291278 - DNA, 350 bp, Zea mays
acggacgcgtgggcggacgcgtgggcggacgcgtgggcctcgcctagcctgccactgccagcaggtgccaccgccatctctgctctgctctcgcaacgcaagcacacgcccggccgcctgccacagttgccatggcgaccatagccacgatggcgctgctgaagcccgccgccaaggccgcggcgcggtcggcgccgtccaccagcagcggcagcgtctcgctgcgcgtccggacggggcaggccgccaagaaggctgcgctgtccgtgtccgcgtcgtccacgctggcgggcgccttcctcgcggcgctggcgtcgtcgcccgacgctgcgctggcggacgtggcggcg

SEQ ID NO: 291279 - DNA, 377 bp, Zea mays
acccacgaatccggtggatttcttcgacctcgtgatcgacgagctcaacaagcccgaccctataatgaacgagaacatcgcgttggacctgttgttcctgctcctcttcgcgagccacgagacgacgtcgatgggactgaccgcgatactcaagttcctcacggacaacccaaaggccctgcaagaattgaccgaggagcatgaaaaaatcgtggaaacaagggtggatccggactctgatatcacctgggaggagtacaagtctatgagattcacatctcatgttatacatgaatctcttaggctagcaaacatcgctccggtggtgttcagacaggcaaaccaagacgtatacataaaggggtacactatcccag

SEQ ID NO: 291280 - DNA, 411 bp, Zea mays
aaacacacctcacgtccaactcacacaacaaattgtcacgactcctcatccagctggaagaattcatcaccgcggctcatttgctcgaacaacccacaatcacacgggggtccgcagtcaagaccgatcagttaaggccacacactgaagtggatccattaacatccaccgcttatttacaccattagcattgtccaccagtcgccgatatctctcatattatccatgctgccatcttgacaccggatgagttgttgtcattctacgcgcacactgcgcccaacgcaggtatccgcatacaactgcaacaattgcctaaattcaggaaccgtacattcgaattttcatcaacattctcactgtataccatcaatgtgagttgcttcatttaaaatgcctaataattaaaat

SEQ ID NO: 291281 - DNA, 409 bp, Zea mays
agcggacgcgtgggcggacgcgtgggcgagatgcgggagaggggcgtgacccccgacgcgttctcgtactccaccctcctcgccgcgctcacccgtgcgggccacctcgaccacgcgctcaccttcctgccgctcatggaggatgacgccgtggctccggacctgatcctcttctccaacctcattcacctcgccctccgcggtggcgacgcgcccaaggcgctggcgctgttctcccggctgcgtgccgcggggatcaggcccgacctcaaggcatacaacgcggccgtcgccgcctactgcaagtccgaccttctccgcgacgccaagcggatgctgctccacgacatgccggccgacggcgtcgcgcccgacgcggagacatactcccccatcctcgcggcgctgg

SEQ ID NO: 291282 - DNA, 350 bp, Zea mays
acccacgcgtccgcccacgcgtccgcccacgcgtccgcccacgcgtccgcggacgcgtgggcggacgcgtggggtttgtcatacttgccagtgatggattgtggaaggtaatgaacaagcattaagcagtggatctcgtgaactcaaccaaggatccacaggcaacaccgaagcgattgaccactgaaacgttggcaaggaatagcaaggatgatatctcttgcattgtcatccgtttccgctgctgagttaccctctctcaacggcactgaaacccactcatcgcctcatgatttagattgagacaatttgtctttgcccaattttccgatagaatatgctgtacctat

SEQ ID NO: 291283 - DNA, 438 bp, Zea mays
  unsure (1)..(438): unsure at all n locations
gaccgacccgtccacggacgagtgggcggacgcgtgggcggacgcgtgggcttcccgtgtggctgggagtcggcgccgccttcaagttcgccatcgacaaggacgtcaggaacttccaggtcctcaaagagatgtacaacgagtggccattcttcagggtcaccctggacctgctggagatggttttcgccaagggagaccccggcattgccggcttgtatgacgagctgcttgtggcggaagaactcaagccctttgggaagcagctcagggacaaatacgtggagacacagcagcttctcctccagatcgctgggcacaaggatattcttgaaggcgatccattcctgaagcaagggctggtgctgcgcaacncctacnatcacaccctgaacgtgttccaggcctacacgctgaagcggataagggaccccaact

SEQ ID NO: 291284 - DNA, 392 bp, Zea mays
  unsure (1)..(392): unsure at all n locations
acccacgcgtccggcgaggacgtggccgtcagctgctcggcgctgcggctcgggtaccgggatgtgctccgcgcggccgaccgcgcctacgagccggggcgctacgccgcctgcagggtgaggttcgtgtgcctgagggcgccggcggaggtgctcgcggagagggtgctgcggaggtcggtggaaggggagcacttcatgccggcgagcctgctgcggagccagctcgacctgctgcgggtcgaccccgcggagggggtcgccgaggccgacgcgacggcgcgccccgacgacatcgtccgcgacaccgtcgccctgttcagggacgagctagcggtgtcgtccggcgtcnctgcttgacttgtttctggatgccaacgcggtgcagtttc

SEQ ID NO: 291285 - DNA, 429 bp, Zea mays
  unsure (1)..(429): unsure at all n locations
acccacgcatccggcttggcaagattggtcgaccggtcgagtcatggcttccatctctggcatgctccctaccgagatcacagccctccgtgatggtagactcatccatcttcctgccaaggacctggtgaacggagatatcgtccaagtgtcattaggtaacaagcttcccgccgatcttcgctttgtcgacgtgtcctcggacctgagactggaccgctctgtgttgaccggagagtcagagcctatccagggaaccatcgagcagacggacagcaacttcctcgagagcaagaacgtcggacttcagggtacactttgtgtcggcgggtccggtacaggtgttgtcattcaaacgggcgatctcaccgtttttggtcgaatcgctaagctctcatcctccggtgctccatcgnatgacactctgca

SEQ ID NO: 291286 - DNA, 419 bp, Zea mays
  unsure (1)..(419): unsure at all n locations
aaagagaattaaaaatcctaactacaagggtaaatggaagaccccatggatcgataatccaggtaagcaaataaaaatcctaactgctgattttgaatgaaaccacacttaagctttaaagatcaggcgctgtcaactgtattatttttgcagagtttgaggatgatccagatctttatgtgctgaagcctttgaagtatattggaattgaagtttggcaggtaaaagctggttcagttttcgacaacattctgatttgtgatgaccctgagtatgcaagaaaggttgttgaggaaacttggggtgcaaatanggaggctgaaaaggaagcttttgaagaagctgaaaaggagaagaaagctanggaagatanggaaggtcaaaaggcanaggacgatggtggccggcatcgaatacac

SEQ ID NO: 291287 - DNA, 415 bp, Zea mays
acggacgcgtgggcggacgcgtcgggtacatatctttgaggcagttcatgacaacgacaatcctatgcggaaaccgcacctacgcaagcgaccctaagaagcaactgggcatccaaagaacattatacccctcccattgggcttcctgcccttttttgtagtgcaacaaatggcgtcattattccacaatgctcacttgcacatagtgccattattcgacagttcctccctccagttacgtcaatgggcttcgaacatgcagctgtgcaagcctagaggctacaacaagcgcttgcggagagcgtcttagaacaaccaattgcccaattacaacaacaatccttgggacatctaaccatacataccatcgcaacgcagcagcaacaagcactgagccaactaaccgtggtgaacc

SEQ ID NO: 291288 - DNA, 308 bp, Zea mays
gggccgagccacgcgtccacggaaacgtgggaccaggcgttccgcgacgccccggcaaacaagctcacgggcacccccaagtccgccaacttccgccccttttcgttcaacttcagggcccccaacttctctccaacaatcaaaccctccccaacaagggccatggccaacaacatggtcaaggtcacctcctggtactacaaccattggggctacccccagagggtcgtcgacctcgctgacatctgccccaaccggtgaaagtgaaccgttgcattgtaatagcactttgtaactcctcaccctcc

SEQ ID NO: 291289 - DNA, 385 bp, Zea mays
cccacgcgtccggacggacaggccgttgccgcccaggagcccgcaaagaaggctgtgaaggttgagacccccagcagcgacaagaagaaggtacagttcaccaagaacctcgagatgggccccactggctcgcccagggttgacgaaaagaaggaagccgcaaagcccgccgccaagggaccccgcaacgtcagcggcgtcaccgtcgacgacaagagggagggtaagggcaaggccgccaagaagggcgaccgtgtcgagatgcgctacattggcaagctgatgaacggcaaggtgttcgactgtaaggcatgaatcccaactaacttgagctgtactgacgtgctaccagccaacaagaagggtaagcctttcgccttcaagc

SEQ ID NO: 291290 - DNA, 415 bp, Zea mays
agcccacgcgtccgagaggtgtagatatttttaagaaagcgtacataattttgccgattaatgaatcgatgcactggagcttgatcattgtttgcatgcctacaaaagaggcagattctgggccaataatacttcacttggactctcttggtcttcactccagtcaaaagctttttgacatagttgcgagggaggatatggaggcgtctttcgaaaaatatcaatagggaaaagattgaggtgccacgtcagcgtaacgagtatgattgtggcctctttatgctttactatattgacaggtttattcaagatgcgccagagaggttgacaaaagagggccttggcatgtttggacgcagatggttcaaccatgaagaggcttcagcgtttcggggagggataccggcgctactga

SEQ ID NO: 291291 - DNA, 415 bp, Zea mays
  unsure (1)..(415): unsure at all n locations
agcccacgcgtccggcatccccctgcagtgctggccacataatggcgaataagtccgctgccgctgctattctgctcgccgccgccgtgctcggctgtcttgtctcggcgtcgctcgccgaccagggcaccgccacctactacaccgtctacactccgtcggcgtgctacgggaaccaggacgagggcacgctgatcgcggcggcgagcgacgcgctctggaacggcggcgccgcgtgcggcaccatgtacacggtcacctgcgtcgcgggcaccaacgagaccccgaacccctgcaaccccggcgcctccgtcaccgtcaagatcgtcgacctctgcccgtcgcccggctgccaggccacgctcgacctctcncagcaggccttcgccaccatcggcaacctcggcgccggcaa

SEQ ID NO: 291292 - DNA, 404 bp, Zea mays
aggacaccatgaaggtgctgatcgttgcccttgctctcctggcgctcgctgcgagcgccgcctccagtacaagcggcggctgtggctgccagacaccaccgtttcatctaccgcctccgttctatatgccgcctccgttctatctgccgccgcagcagcagccgcagccatggcaataccccactcaaccaccgcagctaagcccgtgccagcagttcggatcctgcggcgtcggcagcgtcggcagcccgttcctgagccagtgcgtcgagttcctgaggcaccagtgcagcccggcggcgacgccctacggctcgccacagtgccaggcgctgcagcagcagtgctgccaccagattaggcaggtggagcccctgcaccggttacaggcgacatacggtgtg

SEQ ID NO: 291293 - DNA, 404 bp, Zea mays
agcccacgcgtccgcccacgcgtccgcccacgcgtccgcccacgcgtccgagaacctccgcgtccgcgtgtacaggccgacgacgccgccgggggcgaagaagaagctcccggtgctcgtccacttccacggcggcggcttctgcctggggtcgtgcacgtgggccaacgtccacgagttctgcctccgcctggccgcggaggccggcgccgtcgtgctctctgcgggctaccgcctggcccccgagcaccgcctccccgcggccttcgacgacggggccgggttcatgcgctggctccgggaccagtcagcgatcggcggcgccggcgcctcggacgcctggctcgcggaggccgctgatttcggccgcgtgctcgtcaccggcgactcggcgggcgccacga

SEQ ID NO: 291294 - DNA, 183 bp, Zea mays
gacccacagcgtcagcccacgcgtccgcccacgcgtccgcccacgcgtccgcggacgcttgggcggacgcgtgggatggcgccctcgtagaccgctagttcggtccacgacttcagtgtcgacgatgctatcggcaatgacgtttacctcagcactgtataacgggaaggttcttctcattgt

SEQ ID NO: 291295 - DNA, 384 bp, Zea mays
agctcgtaaagagaaggaaaaatatccccaaaccctagctcgcgatctcgatggcgaaccctcgcgtcatcttcgacatgaccgtcggcggcgccccggcgggccggatcgtgatggagctgtacgccaacgaggtgcccaagaccgcggagaagttccgcgcgctgtgcacgggcgagaatggcgtgggcaagtccgggaagccgctccactacaagggctccaccttccaccgcgtcatccccgagttcatgtgccaaggcggagacttcacccgcggcaacggcaccggcggcgagtccatctacagcgagaagttccccgacgagacatgcgtgcgcaagcacaccgtccccggtgtgctctccatggccaacgccgggc

SEQ ID NO: 291296 - DNA, 401 bp, Zea mays
  unsure (1)..(401): unsure at all n locations
acctcgccccgccgcacccgaatgaaatccagaaatcatttcttcgttctaaattgaaagtctagaaataggtgtttatagattcatcgcgacacgatcttcaccagaaaaggttacaagagaaatgcagagatttattctatggagaaagcatcagggcattctgctttgcgtcacaaagtttcaaacccagcaaaacccccagtcgatatatcagataggatgattggtgataccaaaggaagcaaactcaaacacacaaagtttcagaagcacagctactgcttgctcnctcaggcgaccttgacctcgatggtcttgggcttcttgggctccggcggnggcagcttctcgacggtcaccgtgagcacgccgtcnctgcacacggtgtcgcatcgggc

SEQ ID NO: 291297 - DNA, 425 bp, Zea mays
agcggacaaggagaaactcggccggaatgtgccgcaggtttcgtcggcgttgttcttcagctacaacacatcattggggccgccgtatcgggtgattgtggataccaacttcatcaatttctcgatacagaataagctggatttggagaagggaatgatggattgcctttatgcaaaatgtaccccatgtatcacggactgtgttatggctgagcttgaaaagctggggcagaagtatcgtgtggccttgagaattgccaaggaccctaggttccaaagattagcatgcacacacaagggaacctatgctgatgactgcattgtggagagggtcactcaggtaaaagctctctcttcttgaacactctttgtttgtttggagcatgagtactgggagtattctattaagtgctaactctatagcg

SEQ ID NO: 291298 - DNA, 333 bp, Zea mays
caggtggtttccaaagccaactgtgtactagcagtctagcaaccagctacctcgggcggcagcatgcagccatcatgtctgacgacaagcaccaccacttcttcaaccaccacatgaaggacgacgagcagcccgccggcgagtacgggtactccgataccgaggtggtcatcgccaccggctagggcgagtacgagacgtacaagaaggacgagaaggagcacacgcacaatcagcacctcagcaaggccggcgccatcgccgccggcgccttcgcactctacgataagcacgaggctatcaaggaccccgagcacgcgcacaggcacaaga

SEQ ID NO: 291299 - DNA, 359 bp, Zea mays
gggccgacgcacgcgtccacacaacacgctagctctgcatcatccgttctggtgagcgagcgagcgagagacctagctagactgaccggtcgccggcagcgcaggccgagaacgaagcgtttgtgcattgaaggagcaagagccatggcggaacagcagcagccgcaggagatggacgttgaccgtaccggtggcctcgaactgcctccagggttccgcttccacccgagcgactttgagattgtcagccactacctcaagaataaggtgcacgacagggactacagctgcatcgccatcgcggacgccgacctaaacaagaccgagccatgggacctcccgaaagttgcaaagatggg

SEQ ID NO: 291300 - DNA, 403 bp, Zea mays
acgacttgtttcattgattcttgaagagatcgagcttcttttgcaccacaaggtcgaggatgtcttgcaactgcggatcaagctgcggctgcggctcaagctgcaagtgcggcaagaagtaccctgacctggaggagacgagcaccgccgcgcaggccaccgtcgtcctcggcgtggccccggagaagaaggccgcgcccgagttcgtcgaggccgcggcggagtccggcgaggccgcccacggctgcagctgcggtggcaactgcaagtgcgacccctgcaactgctgatcacatcgatcgacgaccatggatatgattaatatctatccaacttgtggtggtggttgaacaataataagcgaggccgagctggctgccatacataggtattgtgtggtgtg

SEQ ID NO: 291301 - DNA, 433 bp, Zea mays
acccacgcgtccgcccacgcgtccgcggacgcgtgggggccgctcgacccaccatcaccgtctggtccgccgagggagagtcctctggctcgctccccctgccccaggtcttcaccgctcccatccgattggatgttgttcagcaggtccacaagtcgatggccaagaacaagagacagccatacgccgtcgccgagaacgctggtcaccaaacctctgccgagtcttggggtactggacgagctgttgcccgtatcccccgtgtgtcgggtggtggtacacagcgatctggacaggctgccttcggtaacatgtgccgaggtggtcgaatgttcgccccaaccaagacttggagacgatggcacgtaaaggtcaaccagaaccacgaagagatacgccgtcgcctccgccattgccgcttcgggccctccat

SEQ ID NO: 291302 - DNA, 261 bp, Zea mays
cgcgtccactaaaaatccacaaaactcccagatcgttggggaggtcgacccagatcagcgtctggttcaccagggagagtcgtctggctcactccccctgccccaggtcttgacggctcccatcagattggatgttgttcagcaggtccactagtccgaggctaaccatgagagacagccatacgccttcggcgaaaaccctggtcaccaaacctctgcaggatcatggggtactggccgaaatgttgcccgtaacccccg

SEQ ID NO: 291303 - DNA, 430 bp, Zea mays
aggttacaattcaacaatgattggcgttggcatgtgcatggagggaatagagcacaatccagttgtttatgaacttatgtctgaaatggcatttcataataagaaggttgaggttgagtgagatcgggattaattgaagttttctgccttgagttaaatgttgacctgtgcatcagagaaggattgtccaaaacaccaaacatttgtaatttgtgtagtttcttggtagacatgctttctgcgaccttgtttacatgaggattggctaaaaacatactcctgtaggagatatggtcaagcaaatgctgacatagagaaagcttggagatatttgtatcatacaatatacaattgcactgatgggattgcggaccataataaagactatatagttgaatttccagacataagtcccagctcagttacttat

SEQ ID NO: 291304 - DNA, 381 bp, Zea mays
ctctacgcgctgctcaccgaccgggtgctcctcgtgcacgtcccggcggagcaggagggcctcttctgcgagccgttcccggtcagctcgtgggtgctcccgggcagcttcccgcagaacaatccccacaagctccacatcggcgcgccggagagctacgcgaacatgctcaagaacaacatcgtccgcaacgacgacggccccggcgcgccggcgtcgtcgtcgctgcctccgtacgtctacctccacctggagcagttccagctgaagctgtccgacaacgtcttctgcgacgaggaccaggtcacgctcagcaagttcaactggatgctgctcaagtccgacagctacttcgccccggcgctgttcctgacgcccatg

SEQ ID NO: 291305 - DNA, 317 bp, Zea mays
  unsure (1)..(317): unsure at all n locations
aaacgcaacagagtttgacacagccagttggttaatccattggcagtggctaacccattggtcgctaccttcctgcagcagcaacaacaattgctgccatacaaccagttctctttgatgaaccctgccttgcagcaacccatcgttggaggtgccatcttttagattacatatgagatgtactcgacaatggtgccctcataccgacatgtgtttcctagaaataatcaatatattgatttagatttatctcgatatatttctgaactatgttcatcatatatataattganaacatcanatcataattttaaaaa

SEQ ID NO: 291306 - DNA, 407 bp, Zea mays
agcgccgagtgctccggcgggaaaaagttcttcgccggcgacgcgcccgggtacctggacgtcgcgctgggaggcttcatcggctggctgcgcgcctgggacaaggtggggggcgtcaagctgctggacgccggccgggtcccgcgcctggccacgtgggcggagcgcttcgccgcgctcgacgtagccaaggaggtcatcccggaccccgaccacatcgccgagtttgccaaggtgctgcaggcacgctccgcggcagctgccaccagcaactgagctcgcaagtgaatgctgctgctctgccttcctgataaaatcatatcatggtacccggtttgttcgtttaatctggcgcggaaaaaacatggtttgttgtcgtaccaaactaagagtatgcatgcatgctt

SEQ ID NO: 291307 - DNA, 418 bp, Zea mays
  unsure (1)..(418): unsure at all n locations
aagaccaacaagcaacatagaaagtggaatccagtagcaacaatagagcaacaatggcgaacaagataatttcccctccttaaggcccttggctctttccgcaagtgttggcaaagcgacaattttccctcaatgctcacaagctcctatagcttcccttcttcccccataccttccatcaatgatagcttcagtatgtgaaaacccagctcttcaaccctataggctccaacaagcaatcgcagcaagcaacatacctttatcacccttgtttcaacaatcgccagccctatctttggtgcagtcattgggaaaaaccatcaaggcaaaagcagctggaacaactcgtgctacctgtgattcaacaagtagctctggcaanactttctccctactctcagcancaacaatttcttca

SEQ ID NO: 291308 - DNA, 432 bp, Zea mays
cccacgcgtccgcccacgcgtccgcccacgcgtccggactccagctcggagcagatagagcacctagctagttagtcgcaactcgcaacgcaagagtgtgtgactagtgagaaccgactaccgagtgaacgatcatggcggcgtctctgcaaggcctatacaatgggggcagcggcttgggcgggagggtcgtccacgccaggagcggcggtcgccggtcagctgcggcggtgaagcggctgctgtcgaggttgaggcgctcttggagaagacgcacggcgcggccgaggcgaaccgcggtgaggttcgggtatgacctgcatagctactaacagaacttcgacgacggcactgccttccgcgcccaccaccgcttgtagctcattgactcattgtaccggaaccctcacttgtagaaaaataactgaaagc

SEQ ID NO: 291309 - DNA, 441 bp, Zea mays
acccacgcgtccggagaccagcaagcaacatagaaagtggaatccagtagcatcactagagcaacaatggcgaccatgatattttccctccttatgctccttgctctttctgcatgtgttgctaacgcgacaattttccgtcaatgctcataagctcctatagcttcccttcttcccgcataccttccatcaatgatagcttcagtatgtgaaatcccagctcttcagtcctataggctccaacatgcaatcgctagaagcaacatatctttatcacccttgtttcaacaatcgctagccctatctttggtgcagtcattggtagaaaccatcatggcacagcagctgcagcaactcgtgctacctgtgatcaaccaagtagctctggcaaaccgttctccctactctcagcaacaagaatttcatccaatcaaccaactg

SEQ ID NO: 291310 - DNA, 442 bp, Zea mays
ccgggccgacccacgacgtccagtcacttacactacactgatcagcatacactgcaaggatggcgacatggaggaggctagaaagctgttccgaaaaatggcacagaaaggggctacgcccactgttgtgacctacagtgttatgattcatgggtacgccacaaatgggaggatccatgaggctgaaaagttcatacagcacatggacaacaaagggtttgttccagatgtatacacctatgcatcgctatttcatgggcactgtgtcaatgggaacgtggatgtggcgctgaagctattcgaatagatgacgcacaggggaacggaacctaatgtcgtggcctatacagctctgatatcaggtctagccaacgaacggagatcagaggccgcattccaactgtatgatcatatgctgaaagctggattgagtccacatgac

SEQ ID NO: 291311 - DNA, 397 bp, Zea mays
acccacgcgtccgcccacgcgtccgcccacgcgtccgcccacgcgtccggatgagatgctggcatcatatctatcttttgttgatctgatcccttagcttgctgttgatatacatgcatgcataatattattattagtagtaattccgtcgtcaggccagcgttcgttgttcacgcttggttcgccgtcgttgacaaatatcggcgaattgaagctttaggctgtgctcagcagaattagcaagtgcaacgcgcagtgtccaagagcatcccaacaaggaagatatatcgaaggctgcagtgatcgatcgatcgatcgaggatggaaggcgcggcggctgggtggccggagccggtggtgagggtgcagtcgctgtcggagagcggcgcggcgacga

SEQ ID NO: 291312 - DNA, 375 bp, Zea mays
aatcgacggtgccctcgtcgtcaacgtcggcgactttcttgagatcctgagtaatggaaaattcaccagcgttgagcacagggccgtggtacacccaaccagagagagaatgtcggcggcgctgttcctgtaccctcgccagaacatgagggttggtccattgccggagttcgtgaatggcggtaaagagcggtatggatcaacggattatgaggaatttatgaagcattactttgcaacgaagcttgacggaaggaagcacctagacagattgaagttggagcagtaggcagtagctatctctaccgtatctatctcgctggagggaccaataaataatttttctatgcgatatataataaatggcgaccacaa

SEQ ID NO: 291313 - DNA, 394 bp, Zea mays
gagccacgcgtcgaggggacccaacaacaaaaatcaaggacaagccggcaaccaaaaatcctgtggttgggaacccggcgaactttgccaatggcaaacttaaggaggaaatgttggccatcaggtttggttcggtagaaaactgcaagaagttcaaggagttggttgaggagatagctgagtcgcttacaaagaacgagggcaaggaaggtgaagatggtggttccacggctggattgctggcgaagctcactgtgagcgagggcaaatctgagggaagtggcaagtctgagtccactgattctggcaaagtgactgaaaccaaagccgacacagccccagctgagtagttggtgtggttgcacttgcacgcagattcgcctggtgctgaact

SEQ ID NO: 291314 - DNA, 440 bp, Zea mays
  unsure (1)..(440): unsure at all n locations
acgagaagatcctcgtcgaccacgaagaacggaggcgccttgctcaagcttccggcggcgagtttgtggcgactgacctcgtcgacgtgctgctgcagctcagcgaggagagcacgaagctggagtcggagtcggaggccaggctccctcgcgacggcgtcaaggccctcatccaggacatcatcgccggtggcacggagagctcggcggtgacgatcgagtgggccatggcggagcttctgcgacacccggaggccatggccaaggccaccgatgagctcgaccgcgtcgtaggcagtgggcgctgggtcgcggagcgcgacctgccggagctccactacatcgacgccgtcgtgaaggagaccctgcggtgcaccctgtcggcccgctcctcgtcncgcactacgcccgcgagcgcacggtggtggccggctacgacg

SEQ ID NO: 291315 - DNA, 392 bp, Zea mays
  unsure (1)..(392): unsure at all n locations
gcgtccacccacacgtccgaataaaccaaacagggtagagactaaactttagttccgaaactaaaggaaccaaacaggtaagaccttgcctctcagcaccctgcacgtcataacactgaatatgaaggacagaatagcagtatagtgggaaacagcaagcctcacaccttggtttaggaacttatttaaggattcgaggttcttggtgcatgtactgacggacagatcatccacagtaactttaatacattgatgtgcttgttcccaggcagaggaagggcatgtcgagcttctgggcaatcttctgtatgctgcaaaggttgtagcagagcaggaagggcttgctgatggcttcagaattgtcatggacgatgggcccagangatctcaat

SEQ ID NO: 291316 - DNA, 328 bp, Zea mays
acccacgcgtccgcccacgcgtccgcccacgcgtccgcccacgcgtccgggaccaatgacaaggagaagggtggcgatgtccccaacctgcagctcaccttcagccagcaagcaaggagaagcaccggcttcaagcaaaaggagattaattatctagctgactgtgatggattgtatgtcatttgcatgtgtttgctacttatgcgatggacgtgtaagccatatattgtattttattgttagaatcaggcacccctgaattatattgttgcaaaaaaaaacagttaacaacataaaaactgtatgcttgaaatttgtaacataaaaa

SEQ ID NO: 291317 - DNA, 327 bp, Zea mays
accaagcgtccgcccacgcgtccgcccacgcgtccgcccacgcgtccgaaaaatatcaaaaaaaacaagaagatctcaaaaaggaaagaaaggtaacaaaaaaaaaaacgatcaacctttctctaaaaaggattggtaatgacatcaaggcaacgtcagtgttcactgtgcacaatcatcgggaatactctcgtatccagaaaacagggtatgaggattgcttctgaaggtctgaagcacagaatctttgaagtttgcctaactgatcttcatggcgacgacgataaagcttacacgaaaatcatgttccatgctgaagatgtgcaa

SEQ ID NO: 291318 - DNA, 435 bp, Zea mays
  unsure (1)..(435): unsure at all n locations
acggacgcgtgggctggctaggcggcttctcttcactcacctgcagagtgcaccgcaataatcagcttccggatggtggcgttttgtcagttttggatggaaatgccgaactggcagcgtctgttttccctatgcatatgtaatttcctgcctctttatattcactcttgttgtcaagtccaagtagttcgccgacgagaacaagcccgccggactggtcaagctgaacccggcgagcgagtacccgcccggcctggaagacacgctcatcctcaccatgaagggcatcgccgccggcatgcagaacactggctacgcggcttctcttcactcacctgcagagtgcaccgcaataatcagcttccggatggtggcgtattgtcagttttggatggaaatgccgaactggcagcgtctgtnttccctatgcatatg

SEQ ID NO: 291319 - DNA, 391 bp, Zea mays
agcccacgcgtccgcccacgcgtccgttttttttttttttttttttttttttttacaatacaatcgtacatatagtacgttttattcgacaagcagcctctgcatgcaataatagtacaacccccgatttaattaattggactaatgcatgctgaggatggatcagatggagatgctgctggggatgcccctcccggtgactcccggcttggagaagggcttgagcagctcgtacggcacgatcccggcgccgcagcggttcttgaggtccaggttgttgttgcactcgtcgatgaacccctcgatctccttcatcctgccgccgaacttctcgaacgccgccttcaccatgggctccgccagccacgacggctccgcgaactcccccaag

SEQ ID NO: 291320 - DNA, 393 bp, Zea mays
cccacgcgtcggcagactcgtgggaggcagcgtgggatccacatggaagtgtgagactgcttgttgccactgttgtcggcgaagggcacgtctgcgccaatggctaccacacactcatcattgcgattcaatagctactagggatgctgccatgcacacgttcattgccaatcggcagagtcttttggcaccctgctgacgatacgacaccatcccgaaagctcagtatcctgtacaaacttttcccgatatcattcgtaatgaaccaggcaggaggacaatcattcacaggcaagcaaaggcctcttgatgtggtcccagccaagatcgacgataggtccccgatattcctcggaagctacaacgacgtggaggagatcatagcgttgtacg

SEQ ID NO: 291321 - DNA, 426 bp, Zea mays
acccacgcgtccgcccacgcgtccgcccacgcgtccgcaatgatggatttactcagggccaacctagtctacaggcaacccggcagacacaaaagtaccctatcttacagtcgaagtcgcatattaagccatctgatcaattgcaggcaagtttttcgcgtgaaaattctccatcattgttcagaccttccatcgaacttggagaagtctctttacccagtgactccacccccataagctcagatctgacaagtgctagtaatttgttggctagtctcgtaaagagtgggttcaaaccaaataaccacagtgatgcacaggctcttggtccaagtggaccacttccagtggcttctttatcacttcaaaatgctgctggtgaaaataccactttgcaggcacatacaccaaacacttctcgtccaa

SEQ ID NO: 291322 - DNA, 424 bp, Zea mays
acggacgcgtgggcggacgcgtgggcggacgcgtgggtgcaagttatcatttctttgcacggaatgctcttattttaaccatgtatccaaattcagtatttcattgcgacaagggtttagcccatttttcaaccgccaacttttgtggtagtttgaagttcagccttgaactatgaaatcgagtaccaaacgctctccaactttcaaaactagacaaatttggccatcttcctggttccgaaggtggttttctttatttctaaaaataataaaaatctgctttaatctctataaattcacaggtaattgatttcaaatcagaaaaatatgaagtagtatcattttttctgaaaaagttatctttgaggttgaaaatgtactttaccctaattaagcatgacgctctcactgttgcattgccaat

SEQ ID NO: 291323 - DNA, 431 bp, Zea mays
acccacgcgtccgcccacgcgtccgcccacgcgtccgcccacgcgtccgacgacacaaacacaatcatggccgacattgactcacgaccgcgcaaatcggtcgcattcgccgagggcgagaccattgtcgactccaacggcgaggtcacccaggccgtctcggagaccgaaaaggacaccaccgccgaatcacactcaaagcctgacgccgccgtcgacgaggccaccgacgactttgaggctctcgcgctcagctcgaagaaaaagaagaagtcgaagactgaggatggcgaggtcgacctgagtgcgctcaagaagaagaagaaaaagcccaaggcgccgctcgtcgacgacttcgaggccaagcttgcggctgcatgtggcgacgaggagaatgtgctggccgacgatgcggctgagaagcagtccgc

SEQ ID NO: 291324 - DNA, 322 bp, Zea mays
caaacctccggccaagcctccgaaaaaatgccgaaaataaaccaccacaaaccgttaagtttccccaaggcttcaaggtcccccgggggctgatgacttaggaagatggactcatttgctcgaaggctggaagagaatttatgggatcaaaacatgatcggaccttggaactaaaagctccacccaagataacggtaaccaaatacacaaggcggctgtcattggtgacaccattggggatcctcacaaggacaggtctggcccttccctcaatatcctcatcaagcttagggcggttgaatcccttgtcttcgcccccttc

SEQ ID NO: 291325 - DNA, 423 bp, Zea mays
ttcacgcgtcgagacaagcctccgaccaagccttcggcccacgcgtccggtgaaacgctgagaagtattcaacatcggaatcttcttcccatcataactgcatgctcgagtatagatacaacgggaaattcttttaaggctttaatttatgagcttatgcctaatgggaacttggataaatggatacatcacaaagacaatgaggcacttccaaagcgtctaagcttagctcaaagaattgcagttgtcgtcaatgtagctgatgcattggattatttacaccacgactgtggaaggcccaccatccattgtgacttgaagccaagcaacatccttctcggtgacgatatgaatgctgtcttggcagattttggcattgcacatctttattctgattctcagtcaacttggaaaagttcattt

SEQ ID NO: 291326 - DNA, 375 bp, Zea mays
ccgggaagccgctccactacaagggctccaccttccaccgcgtcatccccgagttcatgtgccagggcggcgacttcacccgcggcaacggcaccggcggcgagtccatctacggcgagaagttccccgacgagaagttcgtgcgcaagcacaccgcccccggtgtgctctccatggccaacgccgggcccaacaccaacggctcccagttcttcatctgcaccgtcgcgaccccttggctcgacggcaagcacgtcgtcttcggccaggtcgtcgagggcatggacgtcgtcaaggccatcgagaaggtgggcacccgcaacggctccacctccaaggtggtcaaggtcgctgactgcggacagctctcctaga

SEQ ID NO: 291327 - DNA, 399 bp, Zea mays
cccacacttcggcgtaaattaaaagtatcccataatgaacagataccaccaacatagttaaagtttttaccgggattaaagcggccatttttcaaaacggggtcgggtgctgaaaaaactcaaattgttttggggtcccacgctcggtgacgtcagtttggtctgggcaagcgcaggacgataccgatccggccggtcagggcgcacgcgggggcgatccgatccagcgagtctaagggtatccgcaaccgttattcctaaatttttctccctatatcactttttccccctattttccccctatttttcatctctcgcagcggttccccctaaatactccccttataccccactaccactataaaatatcattttctaatacaactatcaatttttttt

SEQ ID NO: 291328 - DNA, 446 bp, Zea mays
ggtccgagatacccggggccagccaagccttcgaccaaaccttcggccaagcgtccggtgaataagtgatcctgcaaaacttaactcaaaccaacacaaacttgggctaaaatgtgagttagagggaattagaaccaagtttgagagtagagagaagagagaagttcctttcacttgattgctccatcaagatttaatttagatttagagcaatatcacaagtgaagaattggaacaaagaagagataaagattgcaataatgtaaatggcacaagagacatgacaattttattccgtggttcggtcaagcataatatgcttgcctactcacgttgtgtcgtcccaatgaacgagggttgcactcaacctctctcaagtgatccaaagaccaaacttgagtatcttagttcctcctaaggttttaaaatatccccgattgtgagga

SEQ ID NO: 291329 - DNA, 420 bp, Zea mays
acccacgcgtccgaccacgcgtcagctttcaattaactgggggtgagggatatatgctctgtgtagtttattattttttgtgtatgaccaaagcaatagcaaacctaaatggtccaattgatgttctgttttttggtgcatgcacactactgtataactttagggcctgtttgtttcagcttatagattatataatctgaattataatctaaattatataatccagattataatctagatatattataatatatatgtagttgtttggtagtttagattatacaaatgtagattattcacaaagacaacaatacccttattgcttatttaaggtgagaaaaaaaggatgtcatatattgtaatttctatttacattaccatgggtagtaggtcttttgccaaaataatctcaaataagct

SEQ ID NO: 291330 - DNA, 383 bp, Zea mays
accacacgttcggcggacgcgtgggccggacgcctggaaaataaggaaaatttttgaaaaggtttgaaatatatcttcatcagttgacaccaaatgccattgtcaggctgagtgtctacatatgggctctccgaagctagggcaaagatgctaatgcccaaggtttctgttgagtgcatgaattgcactaccagacgaaggctagagctgatggccttcacaagaactttggatgttataattttgcataccgaaaggacaccagggcttcggtgatcggctaccgcactaagtggccgaccgggtggacaaacgaatggttctacgtgaaagccgatgagaagaagagggaaaaactcatcactatggttatgagtcccctg

SEQ ID NO: 291331 - DNA, 188 bp, Zea mays
ttcggacaagccttcggccaaggcttcggccaagccttcggccaagccgtccgcaaggataaaattctcacagatggggtattgattagagagatgatggaagattctcttcttaacaagtatagtgtaattatggtggatgaagctcaagaaaggtccatctcaaccgacatgttgctgggtcccct

SEQ ID NO: 291332 - DNA, 396 bp, Zea mays
acccacgcgtccggactagttctagatcgcgaggggccgccctttttttttttttttttaaagcaattagtagcacttagcagcactgctcgtttttctaacctaccgatacctacacccgatcatggcggtggatcagcgctagctcagtcctcgaatccggtcttcttccagacggcgtcccggacccggctgaggtcgcgccccttgagcgtcctgccgatcccctcgtgcaccgacagcgacgccgcccggctgcgccacgccagctcgtgcggcggcaccatctccgccccgccgcgcgccctgccgtagctgctgccgtcgtcgtcgtcgtcgtcgtccgcgccaggctcccactcgcccgcgcggtggtggtcccggtactccaccccg

SEQ ID NO: 291333 - DNA, 400 bp, Zea mays
ataaaagtcaattaggaaggctggtcctagcactaaattggcaacaaaagaaaacgaatttatcgaggcagatcctctgcgaccttgatggctcattgcaattatgagtacatatatattgcctttatcttatgcttagtagaacaaactgagcatatcatatatcatctattttgtttttttctcttaacatacctctggtcacattccatacttttactccttatatattgcatagttatatgtaatatataaatatgcaatatataactttattaattcctacctatgcttatcaacaggttgccctgtgaactttgagttccaaaactacacaatcatcacaagcaagtgcaaaggaccgaagtttccagccagccaatgctgtgccgcactcaag

SEQ ID NO: 291334 - DNA, 431 bp, Zea mays
  unsure (1)..(431): unsure at all n locations
ccacgcttcggaagggcaattaatacccctttgaattacattcaaaaaaagtttaagggaacctcaacaaaactcccggtacaatcaaggccaaaacggggcattaacttggtcccttgccggccaatccccaatggtttttgactaaccaaaatgtctttgctttcgactacacaactcaagttctgtttttcatcatgctgtcgtgcctgatttcagtctcggtgaacttcagcacttttctcgtgatcgggaagacgtctcctgtaacctacaaagtacttggccatctgaaaacatgcttggtcctcacctttggctatgtcctgcttcacgacctatttagctggagaaacatacttgggatcctaatcgtggtaattgggatggttctgtacttgtacttctgcactanagagactcancaaata

SEQ ID NO: 291335 - DNA, 366 bp, Zea mays
gtccgcccacgcgtccgcccacgcgtccgcccacgcttccggaagcggcagcaagcgaggatgccgtgcctgaacgtgtcgaccaacgtgaacctgaagggggtggacacctccgccatcctcgccgaagcctccaagtccgtcgccaacatcatcggcaagcccgaggcctacgtgatggttgttctcaagggttcggtgcctatggcatttggaggtacccaagagccagcagcttacggtgagctggtttccatcggaggcctgaaccctgatgtgaacaagaagcttagtgctggcatcgcttctatcctggagtcaaagctgtctgttcccaagtcacgcttctacctcaagttctatgac

SEQ ID NO: 291336 - DNA, 326 bp, Zea mays
accgacgcgtccgcagacgcgtgggcggactcgttggaaggagagtacgtggaggagcagccatggcttcatcggtggccgccacggtaagcacattcctgggcacccgcctggcggtgccggagccacagaacgggtgcatcgtggtccggttcgggttcgggttggtcggcagggctaaacctgctccgaaaaatgtggcaactatatcgaactcctctgaccgaccgctgtagttcccccgggccgtggcgcccgagtatctggatgggtcactggtcagcaattacgggttcgatccgttcggtctcgggaagcccgtgggg

SEQ ID NO: 291337 - DNA, 245 bp, Zea mays
accacgcgtccgaatcgccagccctatctttggtgcagtcattggtcgaaaccatcagggtacagcagctgcagcaactcgtgctagctgtgatcacccacgtagcactggcacacctttctccctactctcagcgacaacaatttcttcaagtcaagcacatgtccacttttagccgtgtctgcgtacttgcagcatcacttatgaccatacaaccagctaactactgcctaatcttagcaaca

SEQ ID NO: 291338 - DNA, 392 bp, Zea mays
  unsure (1)..(392): unsure at all n locations
accacgcgtccgcgccgacaaccgaggtttcgacgttcctgcacgcgtgcgagggggaggcggtgacgaagctcaccaacgagaaggtggcctacttcaacgcgcccatctatctgcagaacaagacccagatcggcaaggttgacgagatcttcggccccatcaacgaatcctgcaccaccgcggcccgaaaaacaagctcaaaccttaaccaccgacgatgccagcacgatggcccgctacgaccccgccatcactatcttctccgccgacggccacggcggcgangtggagtacgctcttgaggccatccgcggcacgaacaccgttgtcctccgcgtcgagaagaagtccacacccaagctcgatgactccaggcgcatagctatgtt

SEQ ID NO: 291339 - DNA, 265 bp, Zea mays
gccctacagaggaaaccagaacctccccacaaaggcaaacggcgaggtcgagactgaaccttccggcccactcgctgtgctcaagggcttcaagaacttgcccacggggatgccgtccgtgctcctcgtaactggactcacctggctctccttggttcccgttcatcctctacgacaccgactgaatggcccttaaattcaacaacggcaaccccaaggttacaaacccccaattcccggctttcaacaaaggcttcaaatttgg

SEQ ID NO: 291340 - DNA, 311 bp, Zea mays
  unsure (1)..(311): unsure at all n locations
cccacgcgtccaggccgggaccgtcgggtacgtggcccccgagtacgggcagacgtggcgcgccacgaccaagggcgacgtgtacagctacggcgtgctgctgatggagctcgccacgggccggcgcgccgtggacggcgccgaggacgagtgcctggtggagtgggcccggcggatggccagagaagggtggagttcggcgggcgccgtcgtcggcaccgtgtcctgngagctcctgatgctcggcatgcggtgcacggcggacgcgccgcaggagcgccccgacatgccggacgtgctcgccgcgctgc

SEQ ID NO: 291341 - DNA, 381 bp, Zea mays
atgattattgaactatcattaatgaaatttaactttaatttgttacaaatgccaaatgcaaactcctttgtttaaatatactgggtaattcttgtagttatgttgttttgtaggtacctatagcatattggcgaccatgtcatcccgtaaatgtcagcaaagtaggtgagccgtcaaaacacgctcttaaacaaggcagctactagttactccgatttattagttatgttcggtttgtattaatgtaaggctcttaaatatgaaagacatggtacggtaacaccgattattagggtatgtacaatcctgatattgttgtatgatactttaagtataagacacaactaaaacacaatataatacagtaacaaaataaatgct

SEQ ID NO: 291342 - DNA, 286 bp, Zea mays
tccgggtcgacaacgcgtccgaccacgcgtccggacacgtcttctctccggttgcgacttgcgagcacggtcggaagagctagggtttcgccgcagcgagatgtctgcgtacgacgaggtggagatcgatgacatggattgtgaacccgagctgaaggcgtacacttttccgttgccccggggccaactcctccagatcacgctcgacgacctccgcctcggggaggagattgcgcgctgcccctcgtgctccctctttcttaacgtcgtccacaacgccgaggat

SEQ ID NO: 291343 - DNA, 365 bp, Zea mays
  unsure (1)..(365): unsure at all n locations
acccacgcgtccgatcaagcacggccgcgacaacgacaaagcgaagctgctctgtggcggtccagaaacaccttcctgggtctcttcgcacagcgacaaggcctaccacaacggctactgggtccaacccaccgtcttcacaaactgcaccgacgacatgaaaattgtgcgcgaagagatcttcggccccgtcatgtctatactcacgtataagactgttgaggaagtcgtcgagcgtgcaaacgccaccgacgtgggtctcgcggcaggtgtcttcaccaaggatcttaatctcgcgcataaagtcattgctcagcttgaagctggcatcacctgngttaacacgtggggtgagagtccggctg

SEQ ID NO: 291344 - DNA, 404 bp, Zea mays
cccacgcgtccgcccacgcgtccgcggacgcgtgggggctgtgtccgtggctccattcctaaaccccgttgtggacgatggccggtgatgatggccatcgctaagatcatcttatgtcaagcactcaagccacagattgttttcttggagatccacctttaaaggccccattatttaggttgaatgtggatgacagatttatgttgttgactggatgagatgtcctagggtttcctcacgttgtagaatacaactctcacaagtataagaatctaggaacatattccttcgatgtaacatacctcttttgtttaatctgttttgtaagagaaaccagaagaacaccttgtatttcggttgatattttgaaacccacagccaattgaatgccgggttttttaggc

SEQ ID NO: 291345 - DNA, 195 bp, Zea mays
ggaaatgatcgagtacatggataaggtcacgaaaacggttgccacggaggagcacacggtggaggaccccatcgacgagtccgttgcctagacgatcgtcattggaaccctccgtgcatcatggcgtatcacatcgtccatcgagccgacggacgagggtcaaggcgatgatgaccgtattacagacattatgga

SEQ ID NO: 291346 - DNA, 376 bp, Zea mays
cccacgcgtccgcccacgcgtccgggattatttacaagcggtattcaagctcttatttttgcaacgttagccgcagcctatataggtgaatccatggaaggtcatcattgaattaactagtttttgaaatagtctttctttttttagcttagcccaattcatgcatgattccggataatcctcttagttggaaaactaaatagttcgaaaggcgtatgaatatacaacctagagttgtaggagagagaatagactatattatggaagaggtaaagtatatatgcattcaggggggccaagtcaggttagatctatatctttaatgcctataagacagtcatcttttgtgtggctttctaaagaatgattttagaat

SEQ ID NO: 291347 - DNA, 417 bp, Zea mays
gggtccagtcagactccgatttagcagttttctgctccagctggcttccttgaccatcctcacaggggatttgagaacgttacctatatgctcgaggctgctttcagggcggcatcagttaccacgacttttcaggccacaagggaaccatcaacccaggagacgttcagtggctgacggcggggcgcggcgtcgtgcacgcggagatgcccgccgccggccagggagtacagaggggcatcaacatctggatcaacctctctgccgccgacaagatggtggagccgacgtaccacgacctgccgagccacgacatccccgccgccgcggcggacgccgcttgcagcgtctccgtcaaggtcatcgcgggcgagtgcctcggcacgcgctccccgctccggccccgcaccccgggct

SEQ ID NO: 291348 - DNA, 310 bp, Zea mays
agaggtggtggtgctcctgctgctgagtccaagaaagaagagaagaaagaagagaaagaagaatccgatgatgacatgggtttcagtttgttcgagtaatgcggtatacttggcatttggttttgctgtaccctttcgaaatctttatgtcgttgtttagtttgttgtattcgactatcttcttagactttgctgaaattctcaagagatttttttactcaaacatcagtccacttgtgattggcatttatatttcaaaaaaaaggatatgagtgaaagcgctggaaaaggccaaaaaagataacaaaaa

SEQ ID NO: 291349 - DNA, 421 bp, Zea mays
acacttgggcggacccttgggcaattgctttcctgaacaattacttgccggcggtaaggcccataacttgcacggtgctgcacctaatggcgcaggggctgggcctcgacgacagggacgtgttcagccggctggtgctggaccgggacagcgactccatgctgagggtgaaccactacccgccagcggcggagacgaggcggctgacggggttcggcgagcacaccgacccgcagatcatctccgtcctccgctccaacgacgcgtccggcctcgagatcacgctgcgggacggcacctgggtgtccgtgccctccgacacggaatccttcttcgtcaatgtcggcgacgcgttgcaggtactccatagtcccatctaacattacattgctactttattattacatacacacatgacctg

SEQ ID NO: 291350 - DNA, 385 bp, Zea mays
agcggacgcgtggggtgctcagttaggaactgcgccaagttgccaacgtcgctcggtccaccccctagttccagcatagatgagattggaggatgggggacagtaccaacactggagtcactaggccccagtgttacgaagtctgagaaaggaatgcatttcataggaggagagagcgcagctcttggtagggtacatgagtacttctggaagaaggatcagctgaaagattacaaggtgaccaggaacggcatgttaggtccagactactccacaaagttctctccttggcttgcttctggcagcctttcgccgcgttatatttgcgaagaggtgaagagatatgagaagcaaagagtggcaaatgattcaacatattgggttt

SEQ ID NO: 291351 - DNA, 388 bp, Zea mays
agctcactgcagtcacacatcacacatcccatcttctgacatccccccatctctctgcaaaactcgcacaaccggtcgccaaactgcggtatccacatctctccggctccaacatggacttctccgacatctttcgcatggtgaacttcgccgtcgccgccttcattgttctcggcggtgttgcgaaattgttccctttcaacgatttctcgcacatcattcttggtgtctacctgatcatcttcggcgctggcactgctcttctcgaattccagatccctccacagatcgctcgttatgcctcgttcatgttctctttcctcggccgcggtatcttttacgtttttatcggttgcgtaactgtcggctctggctggtatcgctacat

SEQ ID NO: 291352 - DNA, 389 bp, Zea mays
  unsure (1)..(389): unsure at all n locations
cggtctagatatccgggtcgaccagcgtcagccgcaacagccaacttaagtgggcatttgtgaaaacgtgaaaccttctctgtggcctcttcgcgaaagctgggctggattacttntcttgctcccctttcagggttcgattgctaggctanctgcagctcaagtgcttgtctgaggctgcctcctcattggcaaccggattgcctgctgctggtggatgtggtgatcaacagtattattacagagccatgctatgtgaacattactagtagcagtgctcataaaagctacaatcccatgtccttttttttccccagtcatgtaaaacttccaaactgctccatggttcaaaactctgttcttcaatacatcatcaattatcgattaaa

SEQ ID NO: 291353 - DNA, 355 bp, Zea mays
cccacgcgtccgcccacgcgtccgcggacgcgtgggaaaaaaaaaaaaaaataaaataaaaaaagaaaagaataaagaaattggaaaagaaaagtaaaaaaagaaaaagaaaaatgtaaaataaagtaaaaatgaaataaaaaatttttttcaaaaaaaaaaaggggtggccgcccaaaaggttcgaggttaacttaagcggataggcaatttcatactccttcaaaggggtccctaaatttaatttcaggggccttcttttaaaaacttctgaaggggaaaaaccgggtttttacccagttaaacccctttgaaaaaaatccccttttcccaacgggggttaaacccaaaaagg

SEQ ID NO: 291354 - DNA, 230 bp, Zea mays
aatcagcccacgcgtccgcccacgcgtccgcccacgcgtccggggagcaataccatagcccccggaaactgctgctcgccatgatcgctgaagtccgagagctgtcaaagctgttcatgtggaaaggggaggtgctcacgggcctcacggactgagacgatgagggcaacgagcatctcgactatgagctctccgacgtgctgctctatctggaccgcctctccgacatg

SEQ ID NO: 291355 - DNA, 303 bp, Zea mays
cacgcgtccgaccacgcgtccggtcacaactgaagaagtgtctcaggtacctgaagagcagctaccaatagaggatcttagtgttcaagatgacctgacttatgctgagtatcccataaagattcttgatacactgactcctgtcacgagaaataaggttataaagatgtgcaaagtgcaattgcgtcactatggcgaagaagaagatacttggaagagagaagaagagcttcgcatagactttccccatcttttccctagatcttcttaaatctcgaggacgagattatttttaaggggggt

SEQ ID NO: 291356 - DNA, 387 bp, Zea mays
atcgtctccatgccgtgcaagccgaggttctacttcttgccagtggtaaggacaatcttctaccaagcggagaagaagcggatcgactcttcaaggcactgaaaaactgcagagttcgatacttcaaggacaatggccatacactactgctggaggatggcgtcaacctgttaactgtcataaaaggagcgaacatgtatcggcgtggaaggcaaagggattctgtaaccgattatctcacgcctactctaagtgaattcaggcaaacatttgatgtggatcacaggctgttccaccttgcactgagcccagtcatgatgtccaccctgaaggatgggaaaatcgtccgcgggcttgccggtgtccctgacaaaggcccggtcttgt

SEQ ID NO: 291357 - DNA, 123 bp, Zea mays
aaccacgcgtccgatgcagacacggtgcaacacccagcgatccctgcacttgtgtttgacatagcaaaagcccctactgtttagtattaattatcaataaatttgtttgggacggttgaattg

SEQ ID NO: 291358 - DNA, 420 bp, Zea mays
ggtgatagacattcctggaacaactggagccagctttggtcaggagctcatgttttacgagaggccagagccgaggtccggcatacaccgcatggtgttcgtgctgttccggcagctcggcagggggacggtgtttgcaccagacatgcggcacaacttcaactgcaagagcttcgcccgtcagtaccacctggacgtcgtggctgccacgtatttcaactgccaaagggaggcaggatccgggggcagaaggttcaggccggagagctcgtaaggaatgaagcatgcacagaagaagactgcagcgctttcgtatgcatatgatctatcgtcgtcctgcggaatatatatatagtaaccgttgttatatggaataatgtgcatgaaattggtatcagatgcaccgacccgtacgtacgt

SEQ ID NO: 291359 - DNA, 359 bp, Zea mays
gcgtccgcccacgagtccgcggacgcgtgggcaagttcgaattaacagtggaatccgatcccaaaagatttgaagatatattcggacttcggaaattagagctgcgcaaataagcatggaagacttttgtgcagtttgctcaaagaggctggaatgggtggcctataggtcatgccggcatcgccaactgtgctccacaagcatcgtccgcctccgtttcgtgatgggcgacaacaagtgttgcaactgcaagaacgtctgcccatcctccttgtcaccagagccacgggtaaatccactagagtgatcacggatttctccgtgtgacccgctggggtaaatgagggcaaagctgggga

SEQ ID NO: 291360 - DNA, 411 bp, Zea mays
cggacgcgtgggggaagtcgccggctcagatccagccgggctgcggcgctggccggatggccgagcagggcggcgcagccggggaggccgctggcagcgacccccctgcgcctgcgcctgcgactgccccggcgcgagccccagcgcttgctgcggacgcggccgggcagaggtccctgccgacgccgttcctgaccaagacgtaccagctggtggacgacccggcggtggacgacgtgatctcgtggaacgaggacggctcgacgttcgtggtgtggcggccggcggagtttgcgcgcgacctcctccccaagtatttcaagcacaataacttctccagctttgtgcggcagctcaacacctacggatttaggaagatggtgcccgaccggtgggagttcgccaacgact

SEQ ID NO: 291361 - DNA, 355 bp, Zea mays
cggacgcgtgggcgacccactcgtcggactggctgctacatcttactgcagggaaatacggttgcagccatgggcaactataggggaaggggactgaacctagtgatgaaggattgtacatgattgcatgaataatgtatagcatccagtgttacatatcaacgaactactcatcatacgtgatctaccacaaaatcctgctctagcctaagaccattgggacagatttctcccgaagttcattgatgaagaatgttcagcatacaaagcctcaatctacagagaagaaatcgtacacaccctttccaacgcctcaacagcctaacgataatgatcttgatcttgataacggtga

SEQ ID NO: 291362 - DNA, 377 bp, Zea mays
  unsure (1)..(377): unsure at all n locations
acccacgcgtccggccgacttcttcgtcggcgacgccgactcgcccaacaactaccccaacggcggcctcctctacgtccgctcctcgcccgccacggtgggcttctaccgccactggcaggcgtcgcgcgcgcggttcccgggccaccacgagcagtacgtcttcgacaggatcgtcaaggaagggtacgccggcgcccgggtgcagttcctggacacggccgtcttcgggggcttctgccagcacggcgacgacctgngcagggtggccaccatgcacgccaactgctgcgtggggctggacaacaagctcttcgacctcaagaacgtgctacaggactggaagacctacagagcgcgcgccgccgctggcaacg

SEQ ID NO: 291363 - DNA, 366 bp, Zea mays
ctctaccgtggtttcatgccctccgttgctggtatcgttgtctaccgtggtctgtacttcggtatgtacgactcgatcaagcctgtcctcctcaccggttccctcgagggtaacttcttggcctctttcgctcttggttgggccgtcaccactggtgccggtatcgcctcttacccccttgacaccatccgtcgccgcatgatgatgacctccggtgaggccgtcaagtacaagggtaccatggacgccgcccgccagatcgtcgccgctgagggtgtcaagtctctcttcaagggtgctggtgccaacattctccgtggtgttgccggtgccggtgtcctgtccatctacgaccaggcccagctc

SEQ ID NO: 291364 - DNA, 375 bp, Zea mays
aacccacgcgtccgggggaactcaagtgtggagccatatatagcagctcataacatgctactggcacatgcatcagctaccagactgtacagagaaaaataccaagctgtgcaaaaaggagttgttggtataaatatatatacaatgtggtcatacccactaacaaactccactgccgatttagaagcaactcaaagatttctggacttctattccggctggatactagaaccattggtgtttggagattatccaagcgtaatgaagaagaatgttggttctcgccttccgtcattcagtaaagttcaatctgaagccattcgtggcactctagatttcattggaataaaccactattattctttctatgtgaac

SEQ ID NO: 291365 - DNA, 388 bp, Zea mays
acatgattttggcgatggtgtctcctgtcactcattctgtgggcaactgtgttaaacgtgttgtggtcattgtaacatcagtgctgttcttcaggacacctgtttctcctatcaactctctcggtaagcatgtttcttaacctgtttctctgtctttgttctatttcatccttctgttgtatcaccattacatgctttcatctgtgtgtataggtactgcgattgcacttgccggagttttcctgtactcacagctcaagcgacttaagcccaagccgaagacggcttaaatagggattgtattttccatctctttgtgttaatggagttaaacacttctatgtttcaggtgactgcattttaaaagatttgtgcttataacaacaac

SEQ ID NO: 291366 - DNA, 375 bp, Zea mays
ttcgaccaaagcttcggcttcatcacaaaccgcacattggaaatcttccccaatttggatggcttggccagggacattgaaaggtcccacccaccattaaatttgtgaaggaatttcgtaaacggtacttcaccccccggttcggtccttggttcggttgttcacatgaaacaggaaaattttgacaaggtcattaatcctgtatccgttgcacatttcccaaagttacaagtaatttgatttgcaactcaagaagcttgaaggtattggtttccagacatgctttcccagtgagattggtaactcaacacaagatttggtactggaaagcaagatattgatgggacacaagtgcacatcccttgatcagactga

SEQ ID NO: 291367 - DNA, 403 bp, Zea mays
ttcccgggacgcgtccgatttgtctgctacagatgcaagaaatttggggaactctattgggccctggaactgtgaactttgtgaagatcaagacatttcatcagaaccgtccgcgactctgcgcgagaagcgagagtatggacacccaagtgaagcttgctgttgtggtgaaggtgatgggaaggaccggctccaggggtcaggttacccaggtcagagtgaagttcttggatgaccagaaccgtctcatcatgaggaacgtcaagggaccggttcgcgagggagacatcctcacactgctcgagtctgagagggaggctaggaggctgcgttgaggcgggatactgtcttggtagttttcgtatggagttggatgtcatctaattgtgctatgtttgtcaaa

SEQ ID NO: 291368 - DNA, 251 bp, Zea mays
gacccacgagtccacaaaatatccccaaaccctagctcccgatctcgatggcgaatcctcgcgtcttctgcgacatgaccgtcggcggcgccccggcgggccggatcattatggagctgtacgccactgatgttttactcaccgcgtaggaggtggcattgaagatcatcttctttaagttctacctatcgctgattacatcggttcagaagtaacttttcaaagctaacgctcgtccgatcaatctgaac

SEQ ID NO: 291369 - DNA, 451 bp, Zea mays
cccacacatccacccacgcgtccgcccacgcgtccgcccacgcgtccgattacagtatttcacccttgcccttgacctctactccaagtataacgttacggaaatgctgtcaagtggagggatacaggtttcaaatggtaaggaatatgcactgagcgatgtcatcgataccatcaaacatgcttttgggggatcgccacaaattgtttgcaagaggggttcaatcgaagaacttaggttatgcttcgacaaagaattgaagcctcgtgattgccttaccacttctttggcgaatggaagtgtatcaaaaagcaagcactgcccgcggtacatcaccttgccaacatatgatccccttgtgcttgccaattcaactgtagagatcatgacacagttccaagaaatttgatttgcctgaagctctttatacagcttaaaatgcaattgttgc

SEQ ID NO: 291370 - DNA, 129 bp, Zea mays
acctcagctgattatcctgagcagtggccaagtctccttcattgggtttcacacaatttagacttgcagaaccaaatttttggtgctttacatgtcctgagggttcttgccagaaaatatgagttcaag

SEQ ID NO: 291371 - DNA, 347 bp, Zea mays
acccaaacgtccgctgattagcctgagcaatggcgaactctccgtcattgggtttcacacaatttagacttgcagaaccaaatttttggggctttacacgtcatgagggttcttgccaaaaaatatgatttcaagtctgaggatgagaggataccattatttcacatcgtataggacacatttcctcgtcaactaaacatttttatcaaactggttcaaattgtcaatccacgaagtgaagttgctgacttaatcaagttgatatgtaaaatattttggtcttctatatatttggagattcggaagcagctatttgatacaaatgtcgtcaatgcatggatggttct

SEQ ID NO: 291372 - DNA, 333 bp, Zea mays
agctcatccctctcttaccaagtcatcctcgggttagggttccttacggttttgtgaacgggccatgcgagctgttgttgtggagtaccgttgcttcatctgtcggcttacccgcgccaccagcaactactcccaggcaaatgccttcgcatcctaaagccagatgctcaactccaacgtcatcaacgaccattaaaccgggaagtcactcggtatccgcaacatcaacatctcctccgatataaccaattgcgacgcattgaaccacgactgcttatatgcagcatcaaatacgattaccatttatccagccagctacatcaagccgtgctt

SEQ ID NO: 291373 - DNA, 384 bp, Zea mays
acccacgcgtccgcaatcgaccaccaaactttacatacaagatgaaactcgtcagattcctcatgaaattgaacaatgaatcggtaacgatcgagttgaagaatggtacaacagtttctggaacgattactggtgtcgacccttcaatgaatacgcatctcaaaaccgtcaagatgactgtacgaaaccgggaaccgacgacacttgaaactctagcgattcgcggcaacaacgttcgatactttatcttgcccgacagtctaccgttagatactctcttgatcgatgatgcacctaaacctaaaaagaagaaggctgacggtgctgcacgaggaggagctgccggtcgaggagcgagaggtatggatcgtggtggaagaaggg

SEQ ID NO: 291374 - DNA, 378 bp, Zea mays
agagtgcatccaaacaggagggctaatagttgtactccctccgtttctttttattagtcgctggatagtgcaattttgtactatctagcgactaataaaaagaaacggagggagtactattttttagctaaaccttgaactagttattagccaactagctagccaacaccagctactttgagctccacatcccaactagtaactagccttagctcatccaaacaagccctaaaacatgaaattgatgcttactatgggcatttggtgagaattttaggcctgatgggattgcagaaatttgagtgcaaacagcaaagtgtttatctctctgttcagctagcttattggtttcattttcatagtcttcttacgagaact

SEQ ID NO: 291375 - DNA, 368 bp, Zea mays
agggtccttctggggctggcccgaggtcaacatccgtccctgggcgccgctgctggaggagatggccgccgagatgggtcgcctgccgtgggcggaccgggagccgtacgcgtactggaagggcaaccccaccgtgtccgccgagcgcgccgacctccgccgctgcaacgactcctcgtcgtccggcggcacgcgcgtgttctggcaggactggggcgccgccatccgggacggcttccgggactccaacctggccaagcagtgccgctaccgctacaagatctacgtgcgtggccggtcctgatcggtcagcctcaagtacatcatcgcctgcgactcgccggtgctgctcatcgccacccccttca

SEQ ID NO: 291376 - DNA, 368 bp, Zea mays
agcacatccatcggttaggagttaatggtgttagcttaggagctcagcaccacaggtcttaacaacttcgttcgtatctaagtcatatactcctattcgaagaggatataacatgaaaatggtgtgatcattaaatatgaatgacacatattcattagcttaagcaaactcctttttttaatgaatgacttgatataaattaaatatctttttttttgatatttttgcagtcgtttcatttacccctaatccatatcgactacatcctgtcggtgttaaaattctaagatcatgagttgtaaggagggacatatgtcacgacatgcagaaactaatccaaatgttggatttaaagctggtgtcaacga

SEQ ID NO: 291377 - DNA, 374 bp, Zea mays
aatccaaatcagcagagcggcagtgcgtagagaggatcgtccaacagaacagcatgaaaatggtcaacgttcacgtcgtgtgcctggctctgtcagctgccaacgcctctgcaatgcaaatgctctgcccctgcgcggagctgcaaggcttgtacggagctggcgccagtctgacgaccattattggcgccctgggcctgtaacccgaagctgagtaactgaggcaccctcagtgcaccccgctggcagaggtgccctactacgcagggtgtgtggcatcctagcgcaatgttccatccgctccggcaacagtgctgccagcagcagatgaggatcacggacgtatagtccgtcacgtagcagttgcagataat

SEQ ID NO: 291378 - DNA, 341 bp, Zea mays
acccacgcgtccgcccacgcgtccggtatcctctcagttgctgccattgataagggcactggaaagaaacagaatcacaacatggtgcaatacccaccaaggtaagtttaaaaatggaaaaaaccataattttccagggggacaaagagaagagagatgcaatcgacaccaaaaaccaggcggactcagtggtctaccagactgagaagcaactgaaggagcttggcgacaaagtccccgctcctgtgaaagagaaggtggatgtgaagctccaggagctcaaagacgccatttctggtggatcaacacagagtatgaaagatgccatggctgctctgaac

SEQ ID NO: 291379 - DNA, 393 bp, Zea mays
agtgaagaagctcaacaagaacaagaagctcatcaagaagcttgctcgcaagtacgatgccttcgtcgcttccgactccctcatcaagcagatcccccgtctcttgggtcctggtctctccaaggccggcaagttccctacccccgtctcccacaacgaggacctttccgccaagatcaccgacgtcaagtccaccatcaagttccagctcaagaaggttctctgcatgggtgtcgccgtcggccacgtcgacatgaccgatgaggagctcgtcggtaacgtcatgttgtccatcaactacctcgtctccctcctcaagaagggctggcagaacgttggctccctcaccctcaaggcttccatgagcccccccaagcgtctctactagacgtt

SEQ ID NO: 291380 - DNA, 420 bp, Zea mays
  unsure (1)..(420): unsure at all n locations
tcccgggacgcgtccaatttgactgctacagatgcaagaaatttgcggaacactattgggccctggaactgtgaactttgtgaagatcaagacatttcatcagaagctgcaaccgttagcgataaatcacattgtaatggcaagaaattaccctttgcacagtgtggcatgtgccatggcacatcaggtgcatttagaaagactgtagatgggaagtgggttcatgctttctgtgctgagtggttgttggacaccaagtatgtaaggggacaagataaacctgtanaaggaacggaaagccttgtagagggaaaggacacttgttgtgtctgcctccacaatgttggcgtgtgcttaaggtgtagcagtggggattgcaacattacatttcatcctaattgcgccaaaaatttgtggttt

SEQ ID NO: 291381 - DNA, 465 bp, Zea mays
gggtcgagcacgcgtccgcccacacgtcagcccacgcgtcagcccacgcgtccgcggacgcatggggttcgagggtattgcggacgaatttcagaacaacaacaatgtcaggctgcttttgaagtatgatgatgctctggcacatatgatctttgcagcatcagacatgttcattgttccttctatgtttgaaccatgtggcctcactcagatggtatctatgcgatatggttctgtgccagttgttcggagaaccggcggtttgaatgacagtgtcttcgatttggacgatgaaacgatacccatggaggtgcgaaatggcttcacctttttgaaggctgatgagcaggattttggtaatgcactggaaagagctttcaactactaccacagaaaacctgaagtttggaaacagttggtgcagaaagacatgaagatagatttcagctgggatacttcagtttc

SEQ ID NO: 291382 - DNA, 369 bp, Zea mays
agcggcggggaacggcacgttcatcgactgccccgcgccgcagcagtacacctgctccaaggagatcctcttccaccccttcaagaagtggatgctcaagcagcagctcaaccaggacgacgaccctttccagctgcctggcgtcgccatggacaactgatacaccgtaccgtcgtctctgtttgcgtttctgtcaagtgtgcatggaataatactgtaactgtgtttcctgccgggcaatgcactgtgatatgatgcccaacgaataaatgtcgcttttatttttaaaagaaatgcaaaggacaaattttcagtggattccagaagcaacgaaacaatttgagcttgccttcacgaaatgaaataaag

SEQ ID NO: 291383 - DNA, 299 bp, Zea mays
cccacgcgtccgcggacgcgtgggcggacgcgtgggccagaattgccgcttgatctgtagctccaagggtttcaaggacggtggctggtgtgacgaaagcgtggagcacaaagtgtgctgctgctcccattagaaatataatagcgtatgttatgttgatgcatatatatatgcatcgtccatctacctctgtggtgcaaaattctgaataaaatctggcttttttggtaaaaaacaaaaaaaaaaagaaaagaacaaaaaaaagaaaaaaaaatcacaagaaaaaaaaaaaaaaggca

SEQ ID NO: 291384 - DNA, 323 bp, Zea mays
cacgcgtcagcgaacgcgtgggagaccaataagcagcatagaaagtggaatacagtagcaacaatagagcaacaatggcggccaagatattttccatccttaagctccttgctctttctgcaggtgttgcttacgccactatttttccacaatactcaaagctccgagtgctgcccgtcgtcattcatacattccatcaatgagtgcttgattatgtgaacatgcagctctttatacctacaggttcgtgctcgcaatcgcaccaagcaggccagtttcagcagacccgttcttgtaaaatgccgccagccccatctttggtc

SEQ ID NO: 291385 - DNA, 219 bp, Zea mays
cgacccacgcgtcagcggacgcgtgggcggacgcgtggggcaagatgacgtcgtcgacggcgttcagccaactgttcccttccgccgctgcggtatcccccgtccctcgctgcgtctccctgcagctcttctgcgccagcggtggagttgtccctggatggaggagaagatgccgccgcatggccatggtgcgcgcggccaccgtggacgcggcggcgc

SEQ ID NO: 291386 - DNA, 403 bp, Zea mays
agcccacgcgtccgcaagttccctggccgccaaaagattattgagagcagaaagtggtgagtgcatgatgaattcattgctgccatgaaaccaaaatgccatagcctaatagcttgcataagttattttttattattgttttttgatttgcactgtcttgtccaggggcttcaccaagttcagccgtgccgactacctgaagtacaagagtgagggtagaattgttcctgatggtgtcaacgcaaaggtacagctatcacatatcttgctacatttagatatatctctgaattagttttgggatagtaatgtaatttccattgatacgcatattttgaaatggagctattcttacaatgtttgctccgtcttctcttcggcagtatattaaccagttcataat

SEQ ID NO: 291387 - DNA, 421 bp, Zea mays
cacacgcgtccgcccacgcgtccgcccacgcgtccgaaaaaaaaaaaaaaaaaaaaaaaaaaaaaaaaaaaaaaaaaaaaaaaaaaaaaaaaaaatagggaggccactctaagggttagaaactttattttggcttccatgcaatgtcatttcttttttattctggccgtcaatttcaattccctggccttcgttttatacccttcttttcgggaaaatccctttcttttcccattttagttttgttacatcccgtctctttttcaagttctgggtttttatccatgtgcccctttcggttcccccttttctacatttgggccccctttttgtcgactttaatttcccttggggggtgtcattaattccgggggttttcctggttccgttcaacttgtccgggcccctttgcttctccctt

SEQ ID NO: 291388 - DNA, 417 bp, Zea mays
cagacgcgtgggcggacgcgtgggcggacgcgtgggcgcgcgctctttgcactccgtgtccgtgatcaccaccacaccgctatcctgctagctaggtagctgaattcggagccaggctcgagcgagggggggcggaggcgagatggaccacgcggcggacgcgcaccggacggacctgatgaccatcacgcggcacgtgctgaacgagcagagccggaaccccgagtcccgcggcgacttcaccatcctgctctcccacatcgtcctcggctgcaagttcgtcgcctccgccgtcaacaaggccgggctcgcccagctcatcgggctcgccggcgagaccaacgtgcaggcaagtgcgctgtacggctagctagtttttccttcagagagattgatcgagatgtgacgatgccgctg

SEQ ID NO: 291389 - DNA, 232 bp, Zea mays
cgcgtccgaccacgcatccgcccacgcgtccgcccacgcgtccggactagttctagatggcggtggcgctttctccggcaaggacccaaccaaggttgaccgcagcggagcctatgtcgcgaggcaggctgccaagagcatcgtcgccagcggccttgctcgccgcgccatcgtccaggtgtcctacgccatcggcgtgcccgagcctctctcggtgtttgtcgacacgtac

SEQ ID NO: 291390 - DNA, 389 bp, Zea mays
aggacgcgtgggcggacgcgtgggcggacgcgtgggggtctggggagcgtgactttgaccgtgatcgtcagtatgagcgaagcagaggaagagatagggtttatgattacagggacagaggatcagaacaccgaagcaatcgctacagaaatgggagggattctgaaagaggtggacacagatacaggagtggtggtatgacaaatgaccgagggagaatgaggagcagatcacgttctccaaccaggcatggctatggaagatctagaagtccagatcattagctgcctagctggacatttagatagttttattcacagttgggactcatgaggtagacagttcccttctgctatttattactgtacaatgggttttattgaagtgtc

SEQ ID NO: 291391 - DNA, 448 bp, Zea mays
accacgcgtccgggacaaggagggcatcccacccgaccagcagcgcctcatcttcgccggcaagcagctggaggatggccgcaccctggcggattacaacatccagaaggagagcactctccacctggtgctccgcctcaggggtggcatgcagatttttgtgaagacattgactggcaagaccatcaccttggaggtggagagctctgacaccattgacaatgtgaaggccaagatccaggacaaggagggcattcccccagaccagcagcgtctgatctttgcgggcaagcagctggaggatggccgcactctcgcggactacaacatccagaaggagagcacccttcaccttgttctccgcctcagaggtggtatgcagattcttgtaaagaccctgactggaaaaaccataaccctggaggtttagagctcgggacacatcgac

SEQ ID NO: 291392 - DNA, 212 bp, Zea mays
atccttgcaagccctagtataattcaaggtcttgagttcccgggcctggacctgccagattctgctggtgaagttgtagtttgtggagttcttgttctacaaggacagcgtgtgctaaatatgattgcacgatttatccaggcgaaaaggcagagaggtgatcatggagtcaaagcacaaggggatggctggttgctgactgttgctctgat

SEQ ID NO: 291393 - DNA, 428 bp, Zea mays
acgcccacgcgtccgcccacgcgtccgctctgtcactgacgatggttgaacgtcggatcgtttttttgagaagaacctatttggagctggaacagagacgacctcgaccaccgtcgaatgggccatgtcgctgctgctgaacaatccagggacactcgagaaggcacgagaagagatcgacgccgccgtggggcactcccgcttgctcaacgcgggcgacctgccgcgtctcggctacctcaggtgcatcatcgccgagacgctgcgcctgtaccccgccgcgccgctgctgctcccgcacgagtcgtcggcagactgcaaggtcggcggctacgacgtccccgccggcacggcgctgctggtgaacgtgtacgcgattcacaaggaacccggctgtttggaaggagccgggcaggttcgtgccggag

SEQ ID NO: 291394 - DNA, 340 bp, Zea mays
acgcggacgcgtgggcggacgcgtgggcggacgcgtgggctttccccgtcggcgcctccccagatttggccgccgccgccgctgacccaggttgtcttgatggcgcccgctgtagaagccgtgaaggagacaggcaccttccagaaggttcctgccttgaacgaaaggatactgtcatccatgtccaggaggtctgttgctgcacacccttggcatgatctggagataggtcctggtgctccaaccatattcaactgcgtcattgagataccaaggggcagcaaggttaaatatgaacttgacaagaaaactggactgattcaaggtggacgtgtgctgt

SEQ ID NO: 291395 - DNA, 458 bp, Zea mays
ggggccagccacgcgtccgcagacacgtgggcaccgacccatacgagttctaccagtatgtgcatttgtcggaggttggtaactgtgtcggatctggtattggtggtactactgccctacgaggcatgtacaaagaccgcttccttgacaggcctgtccagagggatattctgcaagagtctttcatcaacacaatgagcgcctgggtgaacatgttgctcatgtcgtccactggaccgatcaagactccagtcggagcttgtgccactgctgttgaatcgattgacatcggttatgacaccattgtggaaggcaaagcacgtgtctgcttcgttggtggtttcgacgacttccaagaagaaggttcgttcgagttcgccaacatgaagggctacaataatgccgaagacgaatttgcgcacgggcgcacaccgcgagaaatgtccgccctaacaaaa

SEQ ID NO: 291396 - DNA, 357 bp, Zea mays
acgattcattctaggaagtctcactctggccctaatcatgctttcatgtataagggtgagacatctagctctaggcaatcaacccatgctaagttgcctagaaagaaagctcctagtgcatcaaatgatcataatatttcatttaaaacttttgatgcatcttatgttttgactaacaaatccggcaaggtagttgccaaatatgttgggggcaaacacaaggggtcaaagacttgtgtttgggtacccaaagttcttgtatctaatgccaaaggacccaaaaccatttgggtacctaaaatcaagaactaaacttgttttgtaggtttatgcatccgggggctcaagttggatact

SEQ ID NO: 291397 - DNA, 189 bp, Zea mays
cgagaaattgtgcgggacatcaaggtgacgcttgaatatctagctcttgactatgtgcaggagttggcgactgccaatatcacctcctgcgggttgtcaagagctatgagctgcctgatgggggggtgatcacgatcggcgcagagagattcacgtgcccggaggtcgtcttccatgcatccatgtttg

SEQ ID NO: 291398 - DNA, 342 bp, Zea mays
agcccacgcgtccggtgctatccattgctctgggcgacacggtatacctgtgggatgcctccagtggatccacgtctgagcttgtgaccattcacgaggacagtggtcccatcaccagcgtcaactgggctccagatggccaccatatcgctattgggctcaactcatccgatatccagctctgggacaccagctccaaccgactggtatgtgcactctcctgcttcaaccagaaatgcatgcacgctctgtcattgaatttaggttgttttttgcctgcagttgagaactctcagaggtgtgcatgaggaaagagttggctcactggcatggaacaacaac

SEQ ID NO: 291399 - DNA, 216 bp, Zea mays
gtcctcaccaccgccgtcacggcgctccccaggaatgggcagcgggcgtcgtcctccttcctcggcgggaagacgctgctgagacaggccgaggcggcccggccgtcgttcgccgtgcgcaccgcggcggaccccaacaggccgatctggttccccgggagaacccctccgccgtggcttcgacgggagccttcccggggacttcggctttgatcc

SEQ ID NO: 291400 - DNA, 417 bp, Zea mays
ggtaccaatcagccaatccccgtccgacccacgcgtcaggactaccgcatcatgcgcggggacagccggatgcacaacatgcgagacgcactaatagggatctaacaccagtggcatctaagacattatcattccttgcacttcttgccctttttgtgagtgcaacaaatgcgttcattattccacattgctcacttgctcagagtgccattattccactgttcctccctccagttacttcaatgggcttcgaagacccagctgtgcaagcctataggctacaacaagcgcttgcggcgagcgtcttagaacaatcaattgcccaattacaacaacaatccttgggacatctaaccatacaaaccatcgcaacgcagcagcaacaagcactgagccacctagccgtggtgaacccta

SEQ ID NO: 291401 - DNA, 343 bp, Zea mays
atcagcattgattcttgacgagatcgagcttcttttgcaccacaaggtccaagatgtcttgcaactgcgggtcaagctgcggttgcggctcaagctgcaagtgcggcaagaagtaccctgacctggaggagacgagcaccgccgcgcaagccaacgtcgacctcggcgtggccccggataacaaggccgccccctacttcctccaaggcgccgttgactccggcaaggccttccagggctgcagctgcggtggcaactgcaactgcgacccctgcatctgctgatgacatcgattcagtaccatggatagtggtactatccatctacacttctggggtggtct

SEQ ID NO: 291402 - DNA, 333 bp, Zea mays
acccacgcgtccgaggccccctggtccgacttctgcgagaccatgaacgccacccatctggagctgcccaagaacctgcacgggtcacccgtgaatgtggccaatttccgccaggcatgacaccacaacccgttctcacatgccgagctgcaactgcagaactttctgatcgtgctcttgttcccaggtcgcaccgacagtcccatcaactagtcgtctgagaatatggacgtctactcgcgcctcgctctcgtcaacagtctccggtgacacacgattacgacctccagtgagcgagaatcatcgttctctgacagtctgtatgctcttatg

SEQ ID NO: 291403 - DNA, 307 bp, Zea mays
acggcaaaggcaagcgctctcaggccatggagtccatcagcgccagcaccacgctcgtcaagttcacctacgacgatatcaaggctgccaccgacggattcgccaggaagagtattattggccacggtggctttgggaatgtctacaagggggtgctgcgcgacggtgctgaggtggcggtgaagcggttcaagaactgctccgcggctggggacgccgcctttgcccatgaggtggaagtggtggccagcgtgcgccatgtcaacttggttgcgctgcgtgggtactgcattgccaccacacagag

SEQ ID NO: 291404 - DNA, 383 bp, Zea mays
acggacgcgtcggcggacgcctacgcggaccagtgggccctcagcagattcatccccgatcgtctcacacggaccaggatcacgttcagctacgccttatgcttcaacggcggctcacacatcttcagcgacggcaggttggacgacctcgggaacacgagcatcatcgacgcggagagcatccttgccatcttggcctgccagatcatggtcatgggcgacttcgacggcgaccgcatcgcctgcggccagctcggcgaggtcgtcaactcgctctaacccggcagcagcatccatgcgctcggcctctccaacgatcccaaagcattcgccaaactcaaagtcatcgagctcagtaacggtcgcctcgccatgttctccaa

SEQ ID NO: 291405 - DNA, 376 bp, Zea mays
cccacgcgtccgcgatctgaacctcttccagctacactcatgatgacaattcgcaccccctcgagtccaatgaccatggttctcggaaagtgtgtccgtctcgtcgagtcacggcgcggtacggacgcggccaagatggtagtggtggtcacctaccgccttgtggaacactgtgcaggtcacatgcaccgcaggacgacatcatcgtgcatgtcaagaagttggtggcggcgcaaacggggacgcgcaccgagaagatccgcatccacatgtggtacaacatctacaaggaccacatcacgctcaaggactactaggtccactacggcatgggccacgagctctactacaactgatccgccgcgcttctctccct

SEQ ID NO: 291406 - DNA, 315 bp, Zea mays
cggacgcgtgggcggacgcgtgggcggacgcgtgggttagaggttaatttggactgtttaatatttaaatgttgtgggtggattaaggggttatttagtgttttaagtacaaacagaggaggacaattcatgcacatactttagctttttattgcaatgatagataatttatatgaagtttaggacttattttggatataatatgtcagaatgacagagattcacctgatatgcgagcatgagttctcgctaaaatgtagcattgagtattgactgcagttcagtaagtaaattaaagcatgatagtattgttga

SEQ ID NO: 291407 - DNA, 314 bp, Zea mays
acccacgcgtcaggagtcagtcctataacaccacccggaacctgtgccaggccggcacggtgaaacggataagggaggtgaacttcaaggtgacccgtcagccgccgctgtccagggagttcgccagagaagaacaacgcgcaccggaatgagacaacctgaaaccgccagccactacccaccgggcctggaagacacgcgcatgctcacgatgacgggcatccccgctggcacgcacaacactggccaggccgcttctcttcactcaccttcagaatgcagcgcaataatcagcttccggacggtggcgtttt

SEQ ID NO: 291408 - DNA, 365 bp, Zea mays
acgcgtccgcccaagcgtccggtgatcagagtctgagcgaatttttaatcaaatcgtcctaaaatgccactttttggattcagcctattcaaaaaagtcgtcccgggagtctcggcccaatcggacgacgacgacgaactgatcgaccctcaggtaactataagggaatcgtgcgcccctcactgtgcctctctcaaagcgaaactcgacgaatgcaacgcccgggtgaactcgaggtccgcgaccaccgaaacttgcaccgaggagcttttcgatttcgttcattgcatcgaccattgcgtctccaaatcgcttttctctaaactcaaatgaaagaaggacgacggaaccacccttttagcgtc

SEQ ID NO: 291409 - DNA, 263 bp, Zea mays
agctctgacaaatcctgacctaattgaccagtgcgcaagagaggattttgttgagagagttaaaactcaacaagattaagggtgcaatgtccatggttttttagatgtcagtaaagttgccggacaatttcactttgccccaggcaaatgtttttatgaatccaacatagatgtgcctgagctgtcattacctgaacgtggttccaatattacccacacgataaacaaactgtcctttgggacagaatttcctggtgttgtca

SEQ ID NO: 291410 - DNA, 293 bp, Zea mays
gacccacgaatcagcaggcctgcggtggacacctaggcagccagcgacgaggaagggcgtaccaagcgacaatctgccttggggacttgcgaatgagcctagatcaggagattcccacgtcagtcaagctttcgaatcgcttgcagactccctgattatgtacgacaccattctgctcaattgatagctcttagtaccgcgaggtcacgacatcactctcgacgtccttgttatccggctaccgaaacgggatcagcctaaatcgtgaacactgggttgtgggagagcgatac

SEQ ID NO: 291411 - DNA, 366 bp, Zea mays
aggtttacatgcataccaacaggtgtcttacatgattttggcgatggtgtctcctgtcactcattctgtgggcaactgtgttaaacgtgttgtggtcattgtaacatcagtgctgttcttcaggacacctgtttctcctatcaactctctcggtactgcgattgcacttgccggagttttcctgtactcacagctcaagcgacttaagcccaagccgaagacggcttaaatagggattgtattttccatctctttgtgttaatggagttaaacacttctatgtttcaggtgactgcattttaaaagatttgtgcttataacaacaaatgaaaaaccgcaaacggaaaaaaaaaaagggcggccgct

SEQ ID NO: 291412 - DNA, 435 bp, Zea mays
agcccacgcgtccgcaacgagtccgacagcgtcaccgacgacaaggccaagggctgggccggcatccatgcgatcccaaggaagatctggctggaccccaccgggaagcagctgctgcagtggcccatccacgaggtcgagaagctcagggggaaggccgtcagtgtggacgccaagctggtcaagcccggcgaccattttgaggtcacaggcatcgcaacttatcaggttagttttatactctagctacgttttgaattcgatggatcataaaactgtttttttttacttagtaactagtggcaagctaaggccggcggtaacatgtgtgcgtgcgcacacagctggtcacctgtcaagcttcgattcgcagcttgtcggtagtatacactacactagtactagcagggtatctgtctagccagcccagctgcc

SEQ ID NO: 291413 - DNA, 146 bp, Zea mays
gcgtcaaacgtattgcaggcctagacgttgaatcggataccggagcccaccgtccaggttccgccccaccggccgctgtctaccgatttcgccgacgacaacaagcccgccggattggccaagctgacccccgcgagcgagtatcc

SEQ ID NO: 291414 - DNA, 234 bp, Zea mays
ggaatgcccgctcgacccacgcatcaggttcttggtgtaataaccccaagaacagcactgcgcacccgcgcttggttgacattcatcacattgaaattcatggcagtgggcagaaattaaattgcatcagaatcccagaggactgtcgcattgctttgtattgattaaacagtcggtttcccattgtctgtaacagttctgactcggttgttcgtccccggggaaggcccccga

SEQ ID NO: 291415 - DNA, 395 bp, Zea mays
  unsure (1)..(395): unsure at all n locations
cccacgcgtccggtggcgtataggagcaaagttggtctctgatctttcccctgcaagggaaagagaagaacagagacctctgcccctctcgtcactctctctctctctcacaccaccagtgtagtatagggtttcggcttgcctgtgcgtgttactgtcgcaatggcaggaggtctcttctccatggagcacccatgggcctctgtttttggcattctaggcaacatcatctcatttctggtgttcctcgcaccagtgccgacgttcctccgcgtgtaccggaagaagtcgacggaggggttcagctcggtgccgtacgtggtggctctgttcagctgcacgctgtggatcctgtacgcgctggtgaagnacaactccagcccgctgctgaccat

SEQ ID NO: 291416 - DNA, 393 bp, Zea mays
agcggacgcgtgggcgaaaagcaggctttgggtttggggacaaaatcagggttcagattaccctcgtctattttggggagctttcacaccaaacacggtgattaagcaagtttcttgtggagctgttcatgtcatggctctatccgaggatggtctactgcaagcatggggctacaatgagtatggtcagcttggcagaggtcgcacttctcaaggacttcagggagctcgtgtgttaaatgcttatgcaaggttccttgatgacgcccccgagcaagtgaagattgttagagtgtcatgtggagagtaccatacagcagctatatctgaaaatggggaggtgtatacttggggactgggaagcatggggcagcttgggcattgctccctcca

SEQ ID NO: 291417 - DNA, 350 bp, Zea mays
gacccacgcgtaagctcatccccctccggttcgggttcgggttcgtgaggttctccggggttcgggttcgtgggtgagcggatcgagatggcggcgtcggatgttgagtaccgctgcttcgtcggcggcctcgcctgggccacggacgaccactccctccacaacgccttcagcacctacggcgaggtcctcgagtccaaggtccgttcccgtcccagatccgtccatggcttcgtccagatctgacctgtcctgacacaccctcacccggatctgtccctccttcccctctcccctgcagatcatcctcgatcgggagacgcagaggtctcgcggcttcggcttcgtca

SEQ ID NO: 291418 - DNA, 364 bp, Zea mays
aggatcgatcggtcgaggcgggtaggacaggttcaaaaggtacctaccaagggcggaggaaccttcggcccctccggggggaacggaaccccccccgggaaaaatgccaatggtgtaaggggccaacaaaaccaaccaaactttcaagcccctcaattggcaatggaacaacttcttccccccgggcaaccgcaacagtaccgcctcgtcatcgtcaccgcaaagcgcaccgccgcctccgcggtcggactcacgggaccaggcacctcggatgtgctgccgtacgtggaggcggatctcaagcgctccgccctgcgcgtcgtcgaaaaatccaaagcctctgcacacaggcgagcgacgctgt

SEQ ID NO: 291419 - DNA, 402 bp, Zea mays
agtataaggtgaagctccaaagtcgttcctaaggggatgcagagcttaaagactccaatgacgtccctaaggggatgcagagtcttgtttgttccagtgtgggcgtgtgtgtgtgtgtgttcggcgtcaccatcatattgtatcatatcatcgcatcattccacataacattatgtaacaccctaaagttcactcttgtgaaaatgaggaaaattctccaatcaaacacctttccttgagaatattcataatttcaaagttgctactccaaaaattaacataattttgttttaaactaaaataaaagatacctaaataaactaaattacccttagagtgaaattataagaattatgattaaactatttcttaatatataatctacaatataaattatattcc

SEQ ID NO: 291420 - DNA, 364 bp, Zea mays
acgaaatctctaatactagatgggtgccggcgctggcgctgctcctgggacgacgagaacacgacgatcagccgcgcgcgtctatatactgcagtacaagaacacgacggaggcggcggtggacgcggcgcgcatcatcctccggcagtgcgcgctgtccggcacggtgaagcgcgtcatccacacggcctcggtcacggccgcgtcgccgctcaaggaggacggcagcgggtacaaggacttcgccgacgagtccaattggacgccgctcaacctctcctacgaattcaccaacgcttacctggacgtacgtaatacagtgctatataggactaatctatatattgactactcatgtgcatgc

SEQ ID NO: 291421 - DNA, 417 bp, Zea mays
acgatgtacgcctagctagctcggagcttgtccaagcagagctctgcacgtactgaacctgaacacacagtagagtagcgcaacggatctcgaaatggctgcgaggcttgcgctcctcatccttgccacgaccttcctcctctccgccgccgcggacgggggcagcaccaactgcccgtcgccgccaatgaccccgaccccgacgacgccacagcctcctccgtccgacgggggcgggggcgggggtggtaacggctccgccggcagctgcccgatcgacgcgctgaagctcgaggtgtgcgcgaacgtgctgaacctgctgaggctgaacatcggcgtgccagacgacgagcagtgctgccgtttccggaggggttccccaacttcgacgccgccgtctgcctctgcctcgccatc

SEQ ID NO: 291422 - DNA, 362 bp, Zea mays
  unsure (1)..(362): unsure at all n locations
agcccacgcgtccgcccacgcgtccgcggacgcgtgggtttttttttaacatgacatggcttatgtaactggcaagccaagctgctgctggtacagggaaccttcaaaggaaggaaaaatattgcctggcaatggcaatggcagtcacccgacctggcaagaatggaagatgatgatggggctatggacaaataatttacctattccttgtgttcgcctctactgacagcaatcaatcgatcatttacagtgtgtgtttgtgtagattaaccttggacacgacaataccttgtttttgttcctatccttcctcaacaacaacanannaacaaaacaatgaaagaaatgaatcttgccgccac

SEQ ID NO: 291423 - DNA, 356 bp, Zea mays
  unsure (1)..(356): unsure at all n locations
agaggaccccaccaaggtggaccgcagcggcgcctacgtggccaggcaggccgccaagagcatcgtggccagcggcctcgcccgccgctgcctcgtgcaggtgtcgtacgccatcggtgtgccggagcccctgtccgtgttcgtcgactcgtacggcaccggcacgatccccgacaaggagatcctcaagatcgtgaaggagaacttcgacttcaggcccgggatgatcagcatcaacctcgacctgaagaagggcggcaacaggttcatcaagaccgccgcttacggccatttcggccgtgacgacgccgacttcacctgngaggtggtgaagcccctcaagttcgacaaggcat

SEQ ID NO: 291424 - DNA, 337 bp, Zea mays
  unsure (1)..(337): unsure at all n locations
agcccacgcgtccgcccacgcgtccgcccacgcgtccgcncacgcgtccgcggacgcgtgggcggacgcgtgggtcgccatggcctccctctcctctgctgccgtcaccgccccttccttcgccgcatcagcgccagcccgcgccgtggtcagaaggaggtccttcaccgtgcgcgcctctctccgcaaggccaccggcaccgccgccgtgggaatggctgccagcgccctgcttgccggcggtgccatggcccaggaggtgctgctgggcgcaggcgacggcgggctcgtcttcgagcccagccagttcatcgtcaaggccggcgacaccatcaca

SEQ ID NO: 291425 - DNA, 316 bp, Zea mays
ttcgacggacccttggccggttcaaaatggcggcttcggatgttgattaccgctgcttcttcggcggcctcccttgggcaacggacgaccactccctcaacaacgccttcagcacctacggcgaggtcctcgagtcaaagatcatcctcgatcgggagacgcagaggtcccgccgcttcggcttcgtcaccttctccacggaggaggcgatgcggaacgccatcgagggcatgaacggcaaggaactggacggccgcaacatcaccgtcaacgaggcccagtcccgcggcggccgtggaggcggcggcggtgggta

SEQ ID NO: 291426 - DNA, 417 bp, Zea mays
cgggccaagccagccttcgacggaaccttggccaacttgttccattgatccttgaaaaattcaacctccttttgcacaacaaggccaaggatttcttgcaactgcggttcaacctgcggctgcggctcaagctgcaagtgcggcaagaagtaccctgacctggaggagacgagcaccgccgcgcaagccaccgtcgtcctcggcgtggccccggagaagaaggccgcgcccgagttcgtcgaggccgcggcggagtccggcgaggccgcccacggctgcagctgcggtggcaactgcaagtgcgacccctgcaactgctgattacaccgatcgacgaccatggatatgattattatctatctagcttgtggtggtggttgaacaataataagcgaagccgagctggctgccatacat

SEQ ID NO: 291427 - DNA, 326 bp, Zea mays
gatccacagcatttgcatcaattcccacacatctcttaacgaagaggttcttcttggccatctcggtgtgcagcgccaccttggtctcagcatcgaacaccatatcctggagcgcagtctttgcggcgatggcctggtgcgcggtggagaagagcgcgaagcccatgggctggtcgcccttgaagttgatctgggacgcctcgaatctcgggagccagcgcagcaggttgtgcagctccctttccttgacgtctgcagggagccccgtgatgaagatggtgcggacctcgtccgggccaacggtgccaggcgcgccggggacggga

SEQ ID NO: 291428 - DNA, 211 bp, Zea mays
agaagcaggtaaagctctggaaaccttgaaaaattggaaaggggaaaaatccagggataaggtcccccaatccttcaatccccccaacctaccaaggacggcattaacggttgccaatgggttaaaggaccttgctggatttgtccttgaaaagctaggacctaaaaatgcaatcttcaccaaagcagccgatgccatggtggaatggaac

SEQ ID NO: 291429 - DNA, 286 bp, Zea mays
aggtgtagtcacggcaaaattcttgcaccgacttataaaaaggtggcttcggtttcaaatttggataaaggatttgtaatggcaaaccttgaccctaaaaaaaaaaggaatttggctaaaaattagggattaatgggattcccaaccttaaattttttcccaaaggaaaccaaacctggtaaaaattataatggtgaaaggaacttggttgactttgtcaagttcattaccaagaaaattggtacaacccgtgacacaaagggtcaactaacctcaaaggctggcc

SEQ ID NO: 291430 - DNA, 273 bp, Zea mays
cccacgcgtccgggaccgcacctgcgccgccggcgtggggctggtggtcccgtcctgggcgccgcagacccaggtgctggcgcacgccgccacgggcgccttcctcacccactgcggctggaactccgtgctcgagagcctcgtctacggcgtgcccatggtggcgtggccgctctacgccgagcagaggcagaacgccgtgctgctctccgacggcgtcggcgctgcgctccgggtgcccgagtcgtccaagcggagggagattatcgcgga

SEQ ID NO: 291431 - DNA, 419 bp, Zea mays
  unsure (1)..(419): unsure at all n locations
ttcgaccaaaccttcggccaagccttcgggaaaattgttccttcccttcccaaagacaaacaagcgaacacaaaacaaaaaagcttcaaaccaaaaaaaccaatccaattattgggaagggttccttcctccaaaaaaatggggttaaaaaaggggcaatgaacccccaaggaggacaaggtcttgttccccaaaatcaaaaccttcggccaaagcaactggcgcgcgctgcccaagcaagccggcttgctgcggtgcggcaagagctgccggctccggtggatcaactacctgcgcccggacatcaagcgcggcaacttcagcaaggaggaggangacgccatcatcagcctccacgagcagctcggcaacaagtggtccgccatcgccgccaggctgcccgggcggacggacaacga

SEQ ID NO: 291432 - DNA, 397 bp, Zea mays
aaactccgccggccctccccccaacggtccccttcccccccaaatccggcgggaaggaaaatggccggcttttccaacctcaaggcgggcaatttccccttcggcttcacaacttggggcgcaacaatcacttcctttgtcctgccggacccaaaaggtggccatagggggttaattcaggttgtatggccggttaaaaatttcgtcggtggcggtgactcgccctacatcacgttgtactaccacagcttcgatggaaaacaaggtttcccaggcgacctggacgtgtacgtgacgtaccagctggcggccccctacgtgctgcgggtgcacatgaacgcgacggccgtgaacaaggcgaccccggtgaacctggcgcagcacacgtactggaacc

SEQ ID NO: 291433 - DNA, 400 bp, Zea mays
agcccacgcgtccgcccacgcgtccgcggacgcgtgggttcgccatcatgctggctgagcgatcgacccctcgcgctcggcggcgtcgcctgcaggccaggtccggtttcatcgcatgtcgccgcccgctggtgcttccgtgtcatgggagggagcttcgtttatctttctgaccgacatgtaatgtgcagtgctaggactgctgctgcaacgcttcgcgatgcaaggacgtcgttccagcaggacgattctgtttggactccggaactgcggtttggagttctgaaggcgaataaattgtgatgaaacctgagattctttgtatgaaatacggaatgtatcgcttggacactgtatcgcgaattggtggatgagcatgttgtattccgttgcccttttg

SEQ ID NO: 291434 - DNA, 420 bp, Zea mays
  unsure (1)..(420): unsure at all n locations
ggccaagccagccttcgacgggacgtcagccaaccatttactccaccaatccaaaattgggaaattcaacaccatgaaggtgcggttcgttgcccttgccccccgggggctcgctgcaaccgccgcctcaattaaaaccggcggctgtggttgcaaaacacaacggtttcatcaacggcctcggttctatatgccgcctccgttctatctgccgccgcagcagcagccgcagccatggcaataccccactcaaccaccgcagctaagcccgtgccagcagttcggatcctgcggcgtcggcagcgtcggcagcccgttcctgngccagtgcgtcgagttcctgagggcacagtgcagcccggcggcgacgccctacggctcgccacagtgccaagcgctgcagcagcagtgctgccacca

SEQ ID NO: 291435 - DNA, 360 bp, Zea mays
agatcagatgttcgatgcaataatttgtgacccaccatatggagtccgggccggtggccggaagtctggtggtcggaagctcataaaaggcgtcaaaggcccttacacagtgcctgatgagaaacgggacaatcacatcccatcaaccgccccatatagcctcgcagagtgcgtccatgacctcctccaccttgccgcaaggatggtagtcatgggtggcaggctcgtcttcttctaccctgtactgcgaggtgaagatggcactgcgaacccgcagttccctgagcacccctgcttcaagttaatcacctcctctgagcagatcctgagctttcggtacagccgggttctgctgaccat

SEQ ID NO: 291436 - DNA, 344 bp, Zea mays
acgcgtcaagccaagcttcggccaacgccttcgccaagccttcagatttccggttggccccgtcctcaccttctccgtcacggctcaaatcacggcttgcatcaatggcgtcgttctcggaggctccccccgggaacccgaaagccggcgagaaaatctttaagaccaactgcgcgcaatgccagacggtcgacaagggcgccggccacaatcaaggtccaaacttgaacggtctttttgggagacagtccggtatcactgcaggcgatgccgacactgcgggaaacataaagaaagctgtaatctgggaagaacacacgttgtataagtaacggccaaaacct

SEQ ID NO: 291437 - DNA, 279 bp, Zea mays
caaacgtccgggtttaactcaatactccaaaaactgacaagctatctgaaaatggagaaaatgatagacttaagtttgggccttcaaccatgcaaggatggccagcaaccatggcagatgctcaatcagcaatgccagattttgaaaaccagacaacaatccttggtgtttttgaagggcaaggaagaaaaatccttgccaaattctgttgcaaaaaaccgcatggtcaagtcctcaaaagccaagcccattcaactggtgacctaggcactgctgtcc

SEQ ID NO: 291438 - DNA, 272 bp, Zea mays
gcgtcagattgagaccaactagcatcatagaaggcagattattgttgcattaatggcagccaaaatattttgcctccttaggcaccttggtctttcagcaactgctgcaacggcgaccattttcccgcaatgctcgcagactcccatatcttcacgtcatctcccgtatctcatacctgcggtatcgcctgtaagtgacaactcaactcttcacacctacacgatcgaaaacgcaatcatcaagtggcaacttatatttaacacccctgatc

SEQ ID NO: 291439 - DNA, 179 bp, Zea mays
agaaactgtacgacgaccttaccactgggttccgcaccctacaacatgaggcacggtgaactgctgtacattttgtgtaacacaataatggctgccaaatggtttacaaggtacggcagttgctcattgacaccatgtccgagaattttccccaccgctactcatttctttgccaccac

SEQ ID NO: 291440 - DNA, 446 bp, Zea mays
accacgcgtccgcccacgcgtccggggaagctcgtgccgtccgacatcatcgtcaggctcctgctcacggccatgctccagagcggaaacgacaggttcctcgtcgacggattccctcgaaacgaggagaaccgccgagcgtacgagagcattgttggcattgagcctgagttggtgctgttcatcgactgcccaagggaggagctggagcgacgcatcctgcaccgcgatcagggaagagacgacgacaacgtcgacactataaggaagcggtttcaggttttccacgactccactctacctgttgttctgtactacgacagaatggggaaggtccgacgggtcgatggcgccaaatccgctgatgcagtctttgacgatgtgaaaggcatatttactcaactacggaccactcagggaagccaaggtggcaatgcgagcagcag

SEQ ID NO: 291441 - DNA, 420 bp, Zea mays
accacgcgtccgcccacgcgtccggaaaataatctcaacggccatattccttcaaacataggcttcctaacgaagctagaaggtatagtcctttccaataataatctcaccggtgtcatcccaccaaccttgggaaacatctccacactaggggtagttgatttttcagtgaatcaactaagcggaagcattcctaataaagtttggcaaatcccaaacataacagtgttaagtctagcacaaaataacctatcaggtggaatcccagatactctctctaacttatcttctcttacatcattaggcttgaacaacaataagctaggcagcgcattgccatcaaacattggcgatgtgttccctcatctaaatatactatacttagattacaacatttttgtgggtacaattccatcttcc

SEQ ID NO: 291442 - DNA, 300 bp, Zea mays
gcgtccgatcacacgtccgccgacgcgtcagcggacgcgtgggcgggtttgccgtgttcctcgtccatctgaccaccgatcgctatcaccgggaccggtatcaaccccgcgcggagccttggcgccgccgtaatttacaaccagcaccatgcctgggctgacaagtggatcttctgggtcggccccttcatcagcgcagcgctggctgccatctagcaccacctgatcttcatggcgatcgcgttcaggagtaggtcttaaaggatcagatgctgctgcttcgacatgctgccggtcttg

SEQ ID NO: 291443 - DNA, 337 bp, Zea mays
cccttcgggttcgggttcgggtccttaaggttctccggggtccggttccttgggtaaccggatcaaaatggcggcgtcggatgttaagtaccgctgcttcgtcggcggcctcgcctgggccacggacgaccactccctccacaacgccttcagcacctacggcgaggtcctcgagtccaagatcatcctcgatcgggagacccagaggtcccgcggcttcggcttcgtcaccttctccacggaggaggcgatgcggaacgccatcgagggcatgaacggcaaagagctgggacgccgcaacaaaaccgtcaaccaagcccaatctcgcggcggccgt

SEQ ID NO: 291444 - DNA, 351 bp, Zea mays
gagctttattatatggttttgtttgagagttaaaaaaaacacgattaaagattgtataaatggcagccacgccatcagcctcacacctataggaagcacgaccaccaccaccaccacaaaaccacgtacgaggacaaggatggcgactggatgctcgtcggcgacgtcccctgcaagatgttcgtggcaacctgccagcgccttcgtctgatgaagggttcaccggccgtgaacttggcaccaagagccgcccgatgaggcacacgccgttgggcgttggcacgcacccacgcactggcgtcttgcaggaaagggggaactctgctggtcttgcggacgctcttcccgtca

SEQ ID NO: 291445 - DNA, 417 bp, Zea mays
acccacgcgtccgaagttgtgaaggtttctaaggatgatattaccatgcaaaatcctgccaccggggatatttcagtcccttatgggatggctgtctggtcgactggctaatcgccgtgtcttggctactgatgaatggctaagggtccgtgaatgtgatggtgtctatgcaataggtgactgtgctacaataaaccagaggaaagtaatggaggacatttcagaaatattcagagtcgcagataaagataagtctggaaccttgactgtgaaagaaattcaagatatccttgatgatatctacgtgaggtacccgcaagtacagctctaccttaagagcaagcagatgaacggcatcgctgatctagtgaggagcgccaaaggagacgctgagaaggaatccgtggaactgaacat

SEQ ID NO: 291446 - DNA, 387 bp, Zea mays
aggacgagtgggcggacgcgtgggaagagcctggaccaacaactcttgctttagggattgatttgacctcgttggggttgaatttgaactcccaagataatctttacaagacatttggctctccgtggtcaagcgagccagctgtaggagaacctgattatcagatcccagcttgtttctctgcagagccaccaccagcgctgcaaccatttcattttcagaagtttcaccctttgacactattctacatcttttacagcatgcctaaagatgccgctcagttatatgctgctaatgaactatacaataaagggtggtttttacacaaagactaccgtgtctggctaacaagagctcctaattccgcacctcttgtgaaaactccac

SEQ ID NO: 291447 - DNA, 408 bp, Zea mays
gggccggcccacgcgtccgaacgaacgcgctcttctggatccggcactccatcgtgcgcgccatgaccctgtcaagcttcacccgcttcccgttcgccatggattcggaccggcaggaaatcggcagggcccgggaggagctggcgttcgacctcggccggccgcccacggacgaggaggtgcgggcgagggtgggcctctccccgcagaggtaccgcgacgtgctgcggatggccaggcccacatactcgctgcacgcccggaaccgcgtcacgcaggaggagctcatcggcgaggtcaccgacgccgaagccgtcggggtcgacgccggcggcaagcacgacgcgctgctccgcctcgccatcgatgacctcctggactctctgaaacccaaggagagcctggtga

SEQ ID NO: 291448 - DNA, 399 bp, Zea mays
cccacgcgtccgcttcgggcccaactccaccaccttcatcgtgccggcggagatcttcccagcaaggctgcggtccacctgccacggtatttcttcagctgcaggaaagtgtggcgccattgtcgggtcatttgggttcctgtacgcggcgcagagcacggatcccaccaagacggactccgggtacccgccgggcatcggagtgcgcaactcgctgttcatgctcaccggatgcaatgttatcggtttcctgttcacgttcctggtgccggagtccaagggaaaatcgctggaagagctctccggcgagaacgacgaggaggcagcaccgcagcaacagcagaccgtgccgacagatttgagtgaataaaacagagaaacagtacactcctactacta

SEQ ID NO: 291449 - DNA, 401 bp, Zea mays
aaaggagtagaaataaaataaatcaaggctttcttttggccaaaacattgtgtcattttcagtagatatgtctagactcgggcacaatactgttaactgtgcgagcttcagactgctcctgaaggtcacgctattgctgaggccgaagatgcccttctggctgctgatcatgacttggggcaggcgccagtggtggggtggtggaaattgagcccaggaagcttgagagtgacttgctgaagcagcagaagtcgtaggctgttgattgcctacgtatttcgggatatatggagagtagcacgaagcagtatgcaggacctgcttcggctaattctgccgtgcctcgacttcagcaatttccttttgcttttgtatcatgacctggcacgtccttgttgtgt

SEQ ID NO: 291450 - DNA, 209 bp, Zea mays
cccacccgtccggccaagatggctcctgagggctaagaaaagctgtacaccaaggtcaagagcattcacgacagcctgatcgaggctggtgtccgcgtcgagtccgactaccgtgagggctactcccccggatggaagttcaacgactgggagctcaagggtaatcctcttcctaaccaattccgtcccaaggattcccaaaaaggttt

SEQ ID NO: 291451 - DNA, 382 bp, Zea mays
acccacgcgtcggtctttgcgcatttagaaacacaacacacgtttcgcactaccaacatgctaacagcagtggctaccacgatattaaccgtcgttgcgcttcgtgcgccttttgcgagcgaaacacatgcttccattagtccagattgctcacttgctccaatctctattagtctacacttcatcccatcatttacgtcagtggccatcgaagagccacctgtgcatccctatacggtacaagaggcgattgcggccagcgtcatagtccaggcagttgccgagttgcaagtgtaagccttgcgacatctcatagtaaacgccatcgcaatgcactaggtccatgagtatcgaccagcactgaaccacctaaccatggtga

SEQ ID NO: 291452 - DNA, 335 bp, Zea mays
gcgtccgaccacacgtccgcccacgcgtccgcccacgcgtccgcccacgcgtccgcggacgcgtgggcggacacgtggggggttgctttccaggtcacattggtgttcacgaagtcttccaagtcatcaaggtcctgggtactccaacagtggaagattttcaatgcatgaacccgaattacacacagtttaagttcccacaaatcaaagctcacccatgggacaatgtattcaacaataggattccgccataacctgttgatctggtctctcagctactccagtactctccaaatctgaaatgcattgctgtggatgcgcatgttcacccattc

SEQ ID NO: 291453 - DNA, 344 bp, Zea mays
  unsure (1)..(344): unsure at all n locations
agctttcttcaaatcattggttcctctttggtgccgacagatcccatacaccatgatgaagttcgcatgcttcgaaaaaacagttgaacttctgtataagcatgtggtgcccaaaccacgttctgaatgcaccaaaggagaacagttggtggtaacgttcgccgccggatacattgccggtgtcttctgcgccatcgtctctcaccctgcggacaccgttgtatccaaactcaaccaagaaaaaggctcttctgccctagacgtcgccaaaaaggttggctttgccggtctctggaagggattgggtcctcgtatcatcatgatcggtacattaancgccgccc

SEQ ID NO: 291454 - DNA, 297 bp, Zea mays
acgtcaacccacgcgtccgcccacgcgtccgcggacgcgtgggcgcacggagtgaacaaggctgagcgtcgcctcattccgacttccgatccccaacggaaagcggagccaggaccgggagctggaccatttgcctcccccttcgtcccgttaaacgggccttaaatttccccctacacacataccgggagataaatctctcacaaccaacgtttgaaaaaaccatttgtaactaaatttttcaaaaagccacttgagaactaccattacatggctgttatatttgggaatcatcat

SEQ ID NO: 291455 - DNA, 256 bp, Zea mays
acccacgcgtccgcccacgcgtccgcccacgcgtcgggcttccgggctccggcttcttctcctcgccgtcgcgtgagactgcgctaaagcctaggctttgagacaccaatggcctccgcgacggcgacggcgcccacattcgctctcgcatcgtcattctcgcgcggcggtttccttcggcaccttcttcgggccggccggccaagccttaatcccctgcggtccttcccttaacccttaaaccgcgggcccgcgc

SEQ ID NO: 291456 - DNA, 407 bp, Zea mays
  unsure (1)..(407): unsure at all n locations
cggacgcgtgggcggacgcgtgggatcacattgagtagcaagtaatgtgttccaataatatgtagacatttgagacaaatctgcattattattactaacaaaaactaagacagcaacatcaacacacccaacaacagttcaattcacccaaccacctcctctccctgctctttgatgtcgccctcgcttcttcctccccgaccggccatcagttccgacgactgcttccttcgtttgtccctgcagccagctgtttccaccgttcccagggcaatggtcgcggtccccgcctcgttcgactactcacctgccgtttccaccggttggcaggccgccccatgacccataccagtagaaaattaacgaagctaatgggtacagacacangacagttctaaaatgggact

SEQ ID NO: 291457 - DNA, 386 bp, Zea mays
cagacgcgtgggcggacgcgtgggtctggcttctatgggctaccgggttaggcagaacttctgacttttccaaatgaatcctggtgtatgcgagaagatttcaaaggccaagatccgcgaaaagttccctgatgaagttaccaagcacgaagcagacccttaccaccatcggtatccgcgcgcacagtcgtatcacgaccttgccgtacgcatggaacccattcattctaaaacttgaccgtgaatagaatgaccttctcatcatcgctcatgagtctgtccttcgtgtactttacgggtaactgatggcatgtaatgcggccgacatatccaagctcgagtttcctcgcgatgagatcattgagattataccctcatcctacaac

SEQ ID NO: 291458 - DNA, 348 bp, Zea mays
aacaccgaccgtctccaacggcgacaactgcgtctccatcggcgcaggcaccctcaacatgcacttcaaaaacttcacctgcgggcccggcggccacggaatcagcattggaaccctgggcaaccagggctcccggccttccttggccaacttcacggtgcgcaaccccttgatccgccactccaacaacggcttccggatcaagacttggcagggcggctccggcgccgtctcctccgtgtccttccagaacgtgcgcatggacgcggtgcggaaccccatcatcatcgaccagtactactgcctctccaagagctgcgagaacgccacctcggccgtcttcgtctc

SEQ ID NO: 291459 - DNA, 383 bp, Zea mays
accacgcatccgaccacgcgtcagcggacgcgtgggcggacgagtgagacgactcgtgagtggcggccgggatggtggacgcgatggtagtctcgacaattctggcaggtagtcttctaaaggggtgcctcaactcgggagacgggtcacctccttcgccgtcctctgctccataaagaggatcaataccgagatgccctacgggattggaggtgggattaccgttgacgtgaacgtcaacgggaaaaacggcaagggaaagggcatggtaaaattcgtctacaagtacggcgcgaacttcgacgggtacatcccaatctataacgaagatcactggtctgataacggggatgtcaacgtcgatgtaaacagtgggcttaaga

SEQ ID NO: 291460 - DNA, 433 bp, Zea mays
accacgcgtccgcggacgcgtgggcggacgcgtgggcggacgcgtggggctgccgacgacggaggcctccatggttccagtcccagggatccaccatcagcaccagtggcagtggcagtgacagtggcggaggtggaccttgagatggctctgcctcctgcatatgcacctgcccatgcgtagagagagcactccccttcactatcatccagccgacgagttcactctagctccagctatacatccagtctgtgtgtgtatattatatacagatccactgtttgttttctaagacctcgatgtatactgaaagaaaagtaaagacagcagaacagacgcataaaggaatagattagattatatagccgatttcgttccactatttgttttttgagaatgctgtagtatttaagatattgtgggttttttcagt

SEQ ID NO: 291461 - DNA, 431 bp, Zea mays
aaaaaaagagaaggagaaaaaggaaaaagaagaaaaggaaaagaaagaggagaaaaaacctgaaccgaattttgaaatattgagtaaccctgctcgtgtaatgaaaaatcaacttaaagtcatctcgcttgtcgattccggaagttacgttccgctcaaagatgtttccatcggcggcatcgtcatggttcgtcatgtcaaggccggatctgaagatgaacaacttgtggagccagttgctgcatttggtcccaaagctgatgacgaaaaggagcctgacccaccagagccatttgaatacaccgaagaataaaatccaacattaaattcaattatatattttttttctacttttttttctctcactaataataatacattggatttattcgtttagaaaaaaaatctatgtctaatttaatatatactta

SEQ ID NO: 291462 - DNA, 371 bp, Zea mays
caagcaaggaagcacacgatggctcatcgcgttcgcctctacctctctcccgcgtaaggcacggcagttgcggccaccgtcggacctgaggactcgctgatccggaacgtgattctgcggtggagatgataacaatctggagctgaacgcggagtcccacttcctgaactacgtgcatcggtacggcaagtcgtacaatgacgccgacgagcactcgataaggctgtccgttttcaatgccaacctactccacgcactccggcaccacctgcaggaccagtcggcggagcaccgcgtcactaagttctcagaactcaagcaggcagatttccgccggacgtatctcggactccgcaagtaccggtgcgctc

SEQ ID NO: 291463 - DNA, 392 bp, Zea mays
aggacgcgtgggcaaagatgcagtggcatatgcagactgggttaagaaacatcatcagttttctgatatgcttgttcaaacctcaccagctgtaactgggcatgcctttcctagactgaaactacggtacaaaccatcacttgttcagagtggaaggaaagacttgaagctaggacatgccttgatgtgtcctcaggcgaaacatctggaaagggggcttttgctgcttgatgtgaggaatgattatgaatgggatgttgggcactttgaaggtgctcagcggcctaatgtggactgcttcagaagcacttcctttggactttcgggagagatcctctaaatggtgtagacaaagagaggacagatatactaatgtactgcaccggggggga

SEQ ID NO: 291464 - DNA, 419 bp, Zea mays
agcggtgtaccactgggaaattgttctctctgggatctgtaattttttcccccttcctgtgcgcgcatgtcatgtgcagggctggtgcagacctgggcggcggtgatcatgggcgtgttcgcgggcagcgtgccgtggttcaccatgatgatcctgcacaagaaggtggcgctgctgacgagggtggacgacacgctgggcgtcttccacacgcacgccgtcgcgggcctgctgggcggcgtcctcacggggctgctggccacgccggagctgctggagatcgagtcccccgtgccgggcctccgcggcgcgttctacggcggagggatccgccaggtcggcaagcagctggcgggggccgccttcgtggtggcctgggacgtcgtggtcacgtcgctcatcctgctggccatcggcct

SEQ ID NO: 291465 - DNA, 418 bp, Zea mays
aggctcgagatccccgagggggtcaaggtcaccatcaagaccaggaacgttgtcgttgagggtccccgtggcactctcgagaagtcgctcggtcacttggctgtctccttcacccaccccaagaagaacctcatcaagatcgagctccaccacggctcccgcaagagcgtcgctaccctccgcaccgtccgcaccctcatcaacaacttgatcatcggtgtcacaaagggctacctgtacaagatgcgttacgtctacgcccatttccccatcaacgtcaacgttgagaagaacggcgagaccgatcagttcgaggtcgagatcaggaacttcattggcgataagcttgtgcgcagggtggtcatgaaggccggtgtccaacttgaaggctgctatgaaccagagggatgagctccac

SEQ ID NO: 291466 - DNA, 350 bp, Zea mays
agagttgctccgagcatcttaattattatatgtattattacaaggcacaatggcacatacatacagtgatacagctgcaatatacatgaacaccctttgtctcgctcctgctttatctatgcaactgctggcatgcatgcaaaagacgcctcgggagataagacccctgttattctgctagtacgtatgcatgcatgtgcacgatcgatgggcgcgatggtcatatcatccgttggttcagtagtagggctggatcttccagcgctggggcaatcccacccggtgcgcctggtgccctacaacccggactttttggacgaatccgtgctgtggaccgagagccgcgacgt

SEQ ID NO: 291467 - DNA, 267 bp, Zea mays
acgcgtcaacggcagcgtgggcaaatccttttgattttgggtccaggcagggtttgcccactgctgcatctattaaggcaatggcacatcaaattccaagggatcctgcattcagccggctggccgcgcacctaccgacatgtgcttaaagcacaagagaacacggcacacctccattaatgcctcaacaatacactgaatcagtgcctcaggtcatggaattcccccactttaggaccaccgcagatcctcaggggaattctcgca

SEQ ID NO: 291468 - DNA, 367 bp, Zea mays
agcacgccacttcttggggctttcgttgcggacagttacttgggaaggtactggaccattgttgtggtcctcccggtctacatcgtggcaatgctcgtcctgatagcttcagcatcactcccggtattgttccagagcgacgtgcaccctgcagtggtttaccttggtctctaccttgccgccattgccagcggtggcgtgaagccctgcatttctgccttcggggctgatcaatttgacagcaatgacccggcggagctggtgaagaagggctccttcttcaactgctggctccagggtgtacaggtttagggaaatgggagtaagcccccttgtgagcttacttcaagtggttgttgcagctgtc

SEQ ID NO: 291469 - DNA, 337 bp, Zea mays
cccacgcgtccgcgtctgaccgaccggacatgctgggattgccaggttgaagcagtatgtgcctgcaggggtagaattcacgcgctttgggagccaactcagggaccaataagtcgagacacagcagcttctcggcaatatcgcagggcagaacgatatactatgaacgcgatgcattcctgaagcaggggctggtgcagcgcaaaccctatatcaccagcctgaacgtgttccaggcctacacgctgaagcggataagggaccccaacttcaaggtgacgccccatccgccgctgtccaaggaattcgccgacgagaacaagcccgccggactggt

SEQ ID NO: 291470 - DNA, 388 bp, Zea mays
accacgcgtccgatcccaccaaaaatgagcaccgaatctctcgtcttcaagggcagcctcgtcggccacaaggatggcatcaccgcgatcgccacctcgtcggagaaccccgacatgatccttaccgcttcccgcgacaagaccatcattatgtggaccctcactcgtgacgattcgtcgttcggataccccaagcgtatcctccacggacacaaccacttcgtctctgacgttgttgtttcgtctgacggtcaattcgctctctcctcctcgtgggacaagaccctccgtctttgggacctcaacacgggacttaccacccgtcgcttcgttggacacacttcggacgttctctccgtctccttctctgctgacaaccgtcaaatcg

SEQ ID NO: 291471 - DNA, 434 bp, Zea mays
  unsure (1)..(434): unsure at all n locations
agcgtactccgtggcgctcctccgggggcccccgcttcccgccggtccgccccccggcctcctccctccgggcaaccttcggcaacctccccttcaaaaatcaaccaaggtcctcccggccccttccaaaggccccttccaaggacaaaatcggcccccgggaacaatttgttcgaggacctcaaaacgaagtgggaccccgttgaggacaacccaaccgtcctcttgtacggccgcngcgccgtcgtcgccctatggctgacgtccgtggtcgtgggcgccatcaacgccgtgccgctgctccccaagatcctggagctcgttgggctccgctacaccgggtggttcgtgtaccgctaccttctcttttaaggaaagcangaaagagtttggcgccgacattgagaactttgaagaaaaaaattaactggaac

SEQ ID NO: 291472 - DNA, 439 bp, Zea mays
  unsure (1)..(439): unsure at all n locations
aggacgcgtgggcggacgcgtgggcggacgcgtggggctggccaaggctgcagagaaactggccgactgccagaagacgatagcttcactgagcagccagctgaaatcgttggctgatttcgacgaattcccccctgaaactgagaccagtggcgctgactcagacgacgcctgggacagcgatctgaagcttctccaacccgcaagctatcccacgcagattggctgtttggcagtcacatgattcacgatcctcgttggcaagtggatagcgaaactgtttttgcttggcttccgccgcatgattgctgtgatgagattgccatgatgttccaccacatgtcatatagagttaagttaataggtgagcaaatgttcatatggaagctgtttatanagttgtttggtgaagcctcaaagggactcatattgaatatta

SEQ ID NO: 291473 - DNA, 370 bp, Zea mays
gggtccacgcacgcgtccgcacacacgtccgcggacgcgtgggcgaaaaggccatcgcggacgggagcctccttgacctccggggcaaggtgttcacgttcgggctctccctgttgaagctggacatcgggcaggagtctgaccggaacaccgacgtgatcgacgccatcacaacgcacctcggcatcgggtcgtaccgcgagtggcccgaggacaagaggcaagagtggctgctgtcggagctgcgaggcaagcgcccgctgctgcccccggaccttccccagaccgacgagatcgccgacgtcatcggcgcgttccacgtcctcgcggagctcccgcccgacaagcttccgccctacatcatctccat

SEQ ID NO: 291474 - DNA, 289 bp, Zea mays
tcgtggtgagtcagaacgtgtgtctcgccacccgacggtgcgagtactcaggatgcctgccgccgtcaggatctacatcgagatgcttgcgcacagcagggacagcgccatgcagctgtacatggacaagaagaagaaccgcaggtacgagaagcacatccggtacgagtcgaggaagctgctggcggacatgaagaatcgggtgaaagggcggttcgtcaagtccaccgaagcactcatcgccgccatgtacggcggatgacgcagccatatatatatgcatgggctg

SEQ ID NO: 291475 - DNA, 175 bp, Zea mays
tccagcctagctctatatctcgagtattgctagctcacaacaagaaacaatgcagagcaccaacaatggccgccgcctcctcgtcctcggtcctcctgctgctcctgcccggggcgttggctggcatcagcgccaactccgggagggtgaccatcaccaacaactgcgggttcac

SEQ ID NO: 291476 - DNA, 310 bp, Zea mays
aatccacccacgcgtccgcaaaaagtactgtgacatggacagcattaatttctggttatgcccaagataatcaggtcgaaccatgtctccatttatttgcactgatgaggcagtctgtgtgcaagccaaatgacaccacatttggagggatcttgattgtctgcacaaatcatccattccttgtccttggaaaaattttgcaaccccaacaattaaaaatgggttttggttccaacttcaatttttcaattccattgacaccattttatccaaattccggaacaatgtgtaaaccccaactgtttttttt

SEQ ID NO: 291477 - DNA, 403 bp, Zea mays
  unsure (1)..(403): unsure at all n locations
aaccaagcgtccgcgagttcgctgccaaggactacacagaccctcccccggcgccgctgatcgacgcggctgagctggggtcctggtcgctgtaccgcgccgtgatcgccgggttcatcgccacgctgctgttcctgtacatcaggggtggccaccgtgatcgggtacaagcaccagacggacgcgtccgcgtcgggcgccgacgcggcgtccggccgcgtgggggtgctgggcatcgcctgngccttcggcggcatgatcttcctcctcgtctactgcaccgccggcatctcggggggccacatcattctttttttcaccttccgcctcttcctggcgcccagaggtcccccggtgcgcccgctgctctacaacctggcgcagttcctccgcgccatctgcg

SEQ ID NO: 291478 - DNA, 312 bp, Zea mays
cccacgaatccgtattttgaccctaactatagacgctatgctctcaaaaaatcacaggtacatgttgacgaatatttcacttattatctcggaatttctggtgctacgtcggctgagagtttttggcggttgtagtgaaattatgcatcttcatgggggctatccactacttgtaaggtttacatgcgaatgtcaccgccttgacaatgtggtatacccagctcgaactctatatgcacacattgccggtattttggtcctagtggataaagtcagcaaagggtatgctataactagctttcaatgggaaag

SEQ ID NO: 291479 - DNA, 292 bp, Zea mays
cccacgcatccacagacgcgtgggctctctctcccctctatgtacaatgtgccctggcctcctccgccgccattgcagcgagcaagatcaatccctctgctgccattcatgagtcaaggtggggcattccctcctgtgaagaacatcagggtggggtttgtcatatgcggcccaagcattggcaagggcacccagtgctccaagattgtcacacactttggattcacccaccttatcgcatgcgacctcctgcgccaacaagttcagtcacatactgaacacggtgccatga

SEQ ID NO: 291480 - DNA, 146 bp, Zea mays
ccacgcgaccgaacacgcgtccgggtgcttctggtttcgcacccattcgcctgacggcaagccttactggatcatcaagaactcgtggggccagaactggggggaaaaccggtactacgggatgggcacgggttccaaccttccca

SEQ ID NO: 291481 - DNA, 401 bp, Zea mays
cacgcgtcagccaacacgtccgcccacgcgtccgcccacgcgtccgaacacgcgtccgatcgcccgccgctccaccagaagcctcggcaacgtcagcaacggcggaaggatccggtgcatgcaggtgtggccggcctacggcaacaagaagttcgagacgcggtcgtacctgccgccgctgtctacggacgacctgctgaagcacgtggactacctgctgcgcaacggctggataccctgcctccacttcagcaaggtcggcttcgtctaccccgagaactccacctccccgtgctactaccacggccgctactggaccatgttttttttttccatgttcggctgcaacgacaccacccacgtgtacaacgagctgcacgaggccaacaaatcctaccccg

SEQ ID NO: 291482 - DNA, 429 bp, Zea mays
ccacgcgtacggagtagtctctctatcaaagcacttccaggcattggtcatacagtttcatctaaactgaaaagcaaagaaattgaatattgtagtcaacttcgcaatgtttcaaaggatgcgcgcgacaaggatttcggaaaaaagactggtgatggtttatggaattattgtagaggaattgatcattcaattgttggatctgttcaggaaacaaaatctgtgggtgccgaaattaactggggagtcagatttaatgacaacaaagatgccgaacattttcttaacaacctttgcaaggaggtttctctacgcttgtattgttgtggagttcagggacgtactattacccttaaggtgaaaacaagaagggaaggtgctggggaaccaataaaatataagggatgtggtgactgttaaaacacgagt

SEQ ID NO: 291483 - DNA, 372 bp, Zea mays
gcgtccgcacacaagtccgcccacgcgtccgcccacgcgtccgtttctgtatactttccccgttctattgctaccgcgggtcttatgcaatcgatcggatcatatagatatcccttcaagagggggagtaggtcatcgaaaggatctcggacgagtcgggaaagcacgaaagccagttagaaaatggattcctatttgaagagtgcctaaccgcatggataagctcacattaacccgtcaattttggatccaattcgggatttttcttgggaagtttcgggaagaaattggaataatatcgattcatacagaggaaaattttttttattgatgcaaacgccgtacctacaggataaggatagaggaagaagg

SEQ ID NO: 291484 - DNA, 395 bp, Zea mays
gcgtccgcatgcaatccatcctatcaccgcggtacagcttgaatagacactatggtctagagatgcagaagaagatataatccccacttgcagagaacttggaattggaatcgtggcttagggtcgactatgcagaggtttcttctctagtggagggggactagttgactcactatctgagcaggacttccgcaagcatatgcctatatttcagccagagaatctcgacaagaacgctcagatattccagcgcgtgagcgccatcgcagcactgaaaggatgcacgccatcacaactcccgttggcctgagttcacttttttttttatgacgtctgccccatacctggcacaacaaaaatccataactttatccacaacgttggggcactgtctg

SEQ ID NO: 291485 - DNA, 426 bp, Zea mays
cacgcgtcagagacaaccatctaccagcgattcagcgagcgagagcagcacacacgcagctagctaggagcagcagcagcggcggcggcgatggcggcctccatgatctcctcgtcagctctggcggtggcgcctcagggcctgccgcccctcggccggggcgcctcctccttcgccgtcgtctgctccaataagaagatcaagaccgacaagccctacgggattgggggtggcctgactgtcgacgtcgacgccaacgggagaaagggcaatggcaacggcgtgtaccagttcctcgacaattaccgtgccaacgtccactgtttttttttactctacaaccacgatgactggtctcccaccggcgacgtctacctcggtggaaccactgggcttcttatcttggtccgtaccccttcctgggga

SEQ ID NO: 291486 - DNA, 414 bp, Zea mays
gcgtccgcaaacgagtccgcccacgcgtccgggtacccgcaaaagttgttctggtggcacatgcacctcgggctcaggaattcaaggggacttcaatcttaataatcttgaagatggtagagtggcctcagcatttatggttgggttgttggtgtggtcgttgatatttgcaagccttgtaaaaagatataatcctttcaggcttattggtgttggcttgttagtgtggactatcgcaacagctggttgtggagtatcatttgatttctggtcaattactatatgccgcatgtttgttggcgttggggaatcttcattttttagtctcgcagctccattcattgatgacaatgcaccggtagctcacaaaacagcatggcttggtatgttccacatgtgtttaccaactgggat

SEQ ID NO: 291487 - DNA, 443 bp, Zea mays
gcgtccggaggcaagggtggcttctcatcccagcgccatcacggcaagtcacagtcccatgtggctttcgagaacacatctaccaatgttgccgcctcgcaaatgcgcaatgcgctcaacaggcgggccgacaccgtcaccgaccccgccgaggggaggtacttcgagacggaaatggacaacttcttcgctctgttccgacgatacctcaatgacaaggccaagggtactgccattgactggaaccgcatcgctcctcccaaggccgaccaggtcgtcagctacgatgacttggccaacaccgaggctgtctaatattttttttttttggcggtcgttaatcttaacggtggtctcggtacctccatgggttgccttggccccaagtccgtcatccaggtccctcaacgtatgtccttcttggacttgtcaatgcgccaaat

SEQ ID NO: 291488 - DNA, 289 bp, Zea mays
ggtgccggtgtcttctgtgctattataaaacaaccggctgacaaccttgtgtctttcctgaacaatgccaagggagctacattgggagatcctgttaacaagcgggggctctggggtctcttcactagaagacggcgggggcgtatcgtcatcattggtacccttactggtgctcactggggaatttaccatgcattcaaactcatcgtttgactcccaacaactggaggtgttacacctgccccatcagcatacgctgaattcaaagccactccttgatttttttttc

SEQ ID NO: 291489 - DNA, 435 bp, Zea mays
cacgcgtccaatacaacgcgcaagcaggtgagagcctgaacatgagataactgagcccgtacctggaggccgtgggctctgacttcacgggcggcgccaacttcgccatctccggctcctccacgcggccccgcaacgtccccttcgcgctccacgtgggggtccagcagttcctgcacctgaagcagcgctcgctcgacctcgccgcccacggcgggacggctcccgtcgacgccgacggcttccggaacgcgctctacctcatcgacatcggccagaacgacctgtccgccgcattcggtagcggagcgccctacgactacttcttttatcataggatcccggctatcgtgtcagacataaaggacgctatcatggtacctctgcaaatagtatcactcaccatagattagaacttccaactacggcctttgc

SEQ ID NO: 291490 - DNA, 409 bp, Zea mays
ccacgcgtaagcaaatatccttaggctagacatcaatcatccaccaaatattcatcttcatacgggaatttttgtacgcgctacaaaacgtcaacatcctcttcacaatcataccacaaggggaggactgcctaatcatttcaaagtaactgggggggagacttatcctaacatcagacatgagccaaatcttcaaggtcctgttatcacggttatatctgatcaaaatactgttgactctatcagccacagtcaaaatcccacctccaccaacttgttgcccgacgtcttagacaaagctaccatccatgaattcgttttttttcagcacattaccgatcgaaagcattatgctatacacgctctcaatgatccactcttaagtttacatgatcactaccttatacct

SEQ ID NO: 291491 - DNA, 195 bp, Zea mays
gggactcgtgggctcaaattgcaccatgaaatccatcgagaggccgtcggcaggagaataaatggaaagggcctcgagcagcacccaccgccgcctcatcctcgcagccgccgtcctgctctccgtgctcgcggctgccagcgccagcgccaggacctcctgcgtgccagggtgggccatcccgcacaacccgct

SEQ ID NO: 291492 - DNA, 244 bp, Zea mays
gcactcttccgccaacattcaagcttgaaagcggaatccagtagcaacggcagaggaacaattgcaaccaacatatgccccctccttatgctccttgctctttctgcatgtgttgctaacgcgacaattttccctcaatgctcacaatctcctatagcttaccttcttcccccataccttccatcaatgatagcttctttatgtgaaaacccatctcttcttccctattagctccaacaagcaa

SEQ ID NO: 291493 - DNA, 236 bp, Zea mays
cgatatcctaaagtgttttgttttcttatcatcaccatgtctttactttcaggccgcatcaaactcaatctctcagaacccacataaaagatcattgctgagtacatatgggttggtggatctggtatggacctcagaagcaaagccaggactctacctgggccattgagtgaccctgcaaaactttcgaagtggaactatgatgggtctagctatttatcaagctctaatggatg

SEQ ID NO: 291494 - DNA, 184 bp, Zea mays
gcgcccacgcgttcgatctccttctcaataactatattattcttccattcccgtctggatttaatcatacataacccgtccattcacatgcgaggatgaaatcaactcccctgtgtctcctgctactctttacaaggccctaattacagatacctacaacttcatcccaaaagcacttgattcc

SEQ ID NO: 291495 - DNA, 126 bp, Zea mays
caacattgctttaacactagtaccagctcttactcagctggctgaagcaaacttttaatggctacttgcacctactatttccattcaaccaactgactgtgtccaactctgctgcgtacctacaac

SEQ ID NO: 291496 - DNA, 259 bp, Zea mays
tgagaccaacaagctacatataaagattaaaacttgatcaacaatagagcaacaatggagaccgtgatattttaactacttatgctccttgctctttctacatgtgttgctaacgctacaattttccctcaatgctcacaagctcctatagcttccctttttcccccataccttccatcaattataacttcattatgtgaaaacccatctcttcaaccatataagcttcaacaaacaatcacaactaaacaacatacct

SEQ ID NO: 291497 - DNA, 451 bp, Zea mays
attccccgtccagccactcgtccatcacattaccaacatacccactttgctaaaccaccttaaaagatatcttaggctcatcaaagaacttttgcatgcactggactcatttgctcaaagtacaacttggttatcacacctataaacttgaaccttttcaatgttaaccttgcaatggcttttacaggcctgtatcatctttcactgaagatcatgcaacattacttatcccatgataaagatgctgcttcacaactgtaatcatatataatgacaacaatcaaagaataactgattgtaaatcctgcatcctatgagtctactcttgattttttttttctgtgcaagcaaacaataacttatctttcatgtttgttttcctgttattctgaaatcttgagcattctaattttaaaatctttccccaaaaataaaaaccaattaaatcatt

SEQ ID NO: 291498 - DNA, 365 bp, Zea mays
cagaccattagctctatctactccagagcgcataacaacccgatcgacaccatgagggggttgctcgatgccctcgctctcctggctctcgctgcgagcgccacctacacgcatacaagcggcagctgcggctgccagccaccgacgccggttcatctaccggcgtcggtgcatctgccaccttcgggtcacctgccacctactgtgcatctcccaccgccagtccacctgacggcgccgggccacctgccaccgccggtccatgtgccgccgccggttcatctgccgcctgcaccatgccactaccctactcaaccgcaccggcctcagcctgatccacagccacacccatgctcgtgccaaca

SEQ ID NO: 291499 - DNA, 446 bp, Zea mays
attgcgggaaaatggtcacaagctcctatagcttatcttcttcccccatacctctcaccagcggtgtcttcaggatgtgaaaacccaattcttcaaccctacaggatccaacaggcaatcacagcaggcatcttacctttatcacccttgttcctccaacaatcatcaaccctattacatcaattaccttcggtgcatttattggcacaaaacattaaggcacatcaactactacaactcttgctagcaaaccttgctgcctacgctcatcaacatcagttacctttggtgcaatttgtggcacaaaacatcagggctcaacatctactacaactcgtgctagcaaaccttgctggctactcttaacatcagcagtttctgccattcaaccaactagctgcattgaactctgatgcttatttgcaacaacaacaactactaccatt

SEQ ID NO: 291500 - DNA, 235 bp, Zea mays
tcccgaattcgacggcacgcactcacgcgacccgtatcagcaaagcgtcagtgcgtacagaggatcgtcgaacagaacagcatgaggatggtgatcgctctcgtcgtgtgcctggctctgtcagctgccagcgcctatgcaatgcagatgccctgcccctgctcgaggctgcaaggcttgtacggcgctagctcacacctgacgactatgatgggcgccggcctactcgacccat

SEQ ID NO: 291501 - DNA, 403 bp, Zea mays
aagagcccagatgagcaccctttcttttccaaggatctgcctgagccccggttgccaggtatgcggtacccaaaggttttgcatcccattgctgattctatcaatatcaacaaagagatttggaaaatgtattttgatgaacttctaccaagattggtgaaagaaggaagtgatggtaatgctggatccagtgctctttgtgacacaacctgcttgcaggcactctccagaaggatccactatgggaagtatgtggcagacgcctagtttcaagagtcccctgaagcttacacgccagccataatagcccaagtctgcttttgttccaactattagtatttctagtactactattttcatttattttttaatctaattccaaagtttcagaaccaaattgttt

SEQ ID NO: 291502 - DNA, 442 bp, Zea mays
cggacgcgtgggggagaactcgacaccctgaacgtgctgatcgttgcccttgctctcctggcggtcgctgctgacgcctcctccagtacaagcggcggctgtggctgccagacaccaccgtttcatctaccgcctccgttctatatgccgcctccggtctatctgccgccgcagcagcagccgcagccatggcaataccccactcaaccaccgcagctaagcccgtgccagcagttcggatcctgcggcgtccgcagcgtcggcagcccgttcctgggccagtgcgtcgagttcctgaggcaccagtgcagcccggcggcgacgccctacggctcgccacagtgccaggcgctgcatcagcagtgctgccaccagatcaggcaggtggagccgctgcaccggtaccaggcgacatacggtgtggtcctgcagtccttcctgc

SEQ ID NO: 291503 - DNA, 383 bp, Zea mays
cccacgcgtccgctcagcattccaagtacttttgcgagttctgtgggaagtttgctgtgaagaggaaagcagttggaatttgggggtgcaaggactgtgggaaggtgaaggctggtggtgcttacaccatgaacactgctagtgcggtcaccgtcaggagcacgatccgccgcctgagggagcagactgaagcatgatatagctctttatattattggggtttcctgtagttgctcttgtcaggcatgttgtgggggccttctctagtggaaatgtggaatcactgtactggctgttttgccgagacaatgctccttatatttggtttatgctctaggatctcaaagttgtggtgttaagatttgccctcggttaccgttctg

SEQ ID NO: 291504 - DNA, 365 bp, Zea mays
cggacgcgtgcggagcgaggcgacgccttaggcacctaatctccgtcgaatggatatggggaccgttccaggggatctgatcttgcagattgtgaggaagaataactcctttctggtgaatcatgttgttaactgcaaggctactttccaccttaccaagctactctacagcttgaacagtatacacaagtacaatcctattgttttatctaccatggaacaatctcgttacaatatcattgttgaaactactgagctttatctttagatttgactgatagatctgcaagaggacttcatgggaggtgctgaacttattgtttatcctcctgttgtgtccttccatgaaaccgttcttgagaagt

SEQ ID NO: 291505 - DNA, 260 bp, Zea mays
cggacgcgtgggccgacgcgtgcgttcttggatgatgtatgtcgtcaaccagaaaactgggttatggaattaccactatgaagcggtatgcgtacgtcgacgagcacctgttgtgcgatatcgaaagacagcatgtcagcgtcgacgacatcgtctgtcacgacggcagcgtttgagcgcattccgagagcttccccgagttaaagcctgacgaggatgctggtatcataaaggactttgatgaacctgatactcttgca

SEQ ID NO: 291506 - DNA, 208 bp, Zea mays
  unsure (1)..(208): unsure at all n locations
cccagcttacatgtcaccttgtcttacgcttgaaagtactggaaagactgcggcttatctggatatttggtaattcatccataaattgctatgctnattagtatttactcattaaccanattttttctgtcttatatatcctgaattggttaaaaaaaataaaataaaataaaaaaataaaaaaaaaaaaataatatataaagggcat

SEQ ID NO: 291507 - DNA, 331 bp, Zea mays
cacacacttgagaactccatttcgatctcatttgaaatcaacccatccttgtgtccttcgtctgagcatcctttcaccctcatggccaacatcaagatcgggatcaatgggtttggcatgatcggaaggcttgtggccattgtggccctgcacagctacgacgtcgagctcgtagccgtgaacgaccccttcatcagcacctattacatgacctacatgttcaagtatgacactgtgcactgacagtggaagcaccatgaggtcaacgtgaacgacttcaagacccttctctttggtgagaaagaggctgctgtgtttgactgcacgaacc

SEQ ID NO: 291508 - DNA, 435 bp, Zea mays
cggacgcgtgggtgctgctcgacgcgagcagacgacggagaacaaccggaggtggcagtagcagcacggaggagcacaagctgcctcctggctccctgggtctgccgttcctcggcgagactctccagctctactcccagaacccgaaggtcttcttcgcctccaggctgaagaggtacggcgaggtgttcaagacacacgtgctgggttgcccctgcgtgatcttggcgagcccggaggcggcgcggatggtgctggtgtctcaggcgcacctgttcaaaccgacgtacccaccgagcaaggagcgcatgattggcgcgcaggccctcttcttccaccagggcgactaccacctccgcctgcgccgcctcgtgaagggctggcttggcccggacgcgctccgcggcctcgtgcccgacgtcgaggccgccgtgg

SEQ ID NO: 291509 - DNA, 304 bp, Zea mays
taagcgcatgggccaactcacaacatatagagtccacaagtacaacaactattgctggcaaaagatgctgcctactcacagaaccaagagtttctgccagttctgctactagctgcattgaactatgatgcttataagcaacaacaactaggactaccattcaagcagtcatatgatgtctaccctcagtaatttgttacattcaaccaactaccagcatggaactatcaggtctatgtacaggcgtaacaactactaccattcaggcagctaaatgatgggagccctgatgccttcttgacac

SEQ ID NO: 291510 - DNA, 336 bp, Zea mays
accattgcaacgcaacaacaacaacaacagtttctgccatcactgagccacctagccgtggtgaaccctgtcacctacttgcaacagcagctgcttgcatccaacccacttgctctggcgaacgtagctgcataccagcaacaacaacagctgcaacagtttatgccagtgctcagtcaactagccatggtgaaccctgccgtctacctacaactactttcatctagcccgctcgcggtgggcaaatgcacctacgtacctacaacaacagttgctgcaacaaattgtaccagctttgactcaactagctgtggcaaaccctgctggctacttaca

SEQ ID NO: 291511 - DNA, 416 bp, Zea mays
cgtcctatgcgggtacgacaggatcctgaggtagctagcctggctgagaagcgtgtggcctgcagcggcgaccgaagcgccccccgggaagaatactattgttgtaggggtccaccagagccagcacatgttctaccctctccagtggcactgcatcacttattcccgtcaggccagccgtagcaataccgcctagtcgtcgtaaccgccaagcccaccgccgtcttcgccgtcggcctcaccggcccaagcgcctcggatgtgctgccgtacgtggaagccgatcttaagcgcctccgcctgctcgtttttgaaaaagccaaaggcctttgcacacaggcgaacgacgctttatttgaagcgctggaaggggacgcttggaacgtcctttgctaagctttcaagaggcacggggc

SEQ ID NO: 291512 - DNA, 439 bp, Zea mays
cccaaatgatgacagaggtattgccattagatttatatgacatgacgccgtcaagtaatggtcgggtgttaccagtttctgttgtttttgtgccgcgcaggtctatgcaaacgtctcaggagaggcgccgctggatgagcctatgatcgacgtgagttcgagtcagttctacggtgaaggatacgatgacagtgataagagaattcctgacatgactataatcaacaagcagctaggttggaacccaaagacacctctcaaggatctgctggagacaacattgacgtaccagcacaagacatacaaagaagctgtgaagaggcaaatgtcgcaggcttcagcaacaagttaagttggcgctggctggggacggctcctcgtttagagccctagtcgcagcagctgtttcgcaagtcagaatacatatacgccggtaatc

SEQ ID NO: 291513 - DNA, 438 bp, Zea mays
acgcggacgcgtgggctgaactgtccgtcggcgtctaggcggccccgcgcgtcggacatccactcgctcctgaggtcgatgagcctctggccggcgtcgttgacggtgccgtcggcgttgacgagcgcggcgtcctgcctacacatgtggccctgcatgaacccccagagcacgacgccctgcaccgccgggtgcgcgaacgcctcgcgcaggaccacctctaggtcgtcggcgcggagcgcgtcatcgggctcgcagacgtcgacctccgtgaaccagacgggcaagccggtggcggcgtagaccgtgtcgagcgcgtcgcagatgacctcggcgacggggtgggtgacgtggccctgcatcccgacgccgtcgacccgggcgccgtcccgctgcagggctcggacgaggtcgacgtaccgctgcggcgtggtggac

SEQ ID NO: 291514 - DNA, 206 bp, Zea mays
ctatcaaaccttgttgcctactttcagcaacagcagattcttccattcaaccaactaggttcattgaactctgcttcttatttgcaacatcaacatctaccatttaatcagttacctgctatctacctccaataatatcttactattcaccaactatcaatcattgaactatactttatcatataccgcatctacaactactacca

SEQ ID NO: 291515 - DNA, 436 bp, Zea mays
cgcgagcggcggtcggcgggtctgactcgcacggcgcacgcgctgcgtctggtgtcccctcccctggtgtggctggtggtggaggcggcccgggaggctggtcccacggcacagctgctgcggcgcacgggggtggtgtaccggcacctgacctacgcggagaacttcacatcggaggcctgggaggaggagcggcaccaccagaggaaccaggcgctagcgcacatcgagcggcaccgtctgcgcggcgtcgtcctcttcgcggggctcgccgacgtgtacgactgccgtctactggagcagctcaggcggcacatcaggacaaggagtgtgggcgcgtgggcagtggcgacagtatgggagcaggaaaagagggtggccgttgaaaggcccgtcgtcgtttgcaacaccaacaccaccaacatcaccagcgcag

SEQ ID NO: 291516 - DNA, 305 bp, Zea mays
  unsure (1)..(305): unsure at all n locations
nctgctgctggtgtagagacagtggctgtcttgccacaacatgctggcacaattgtactagcaggtgaagaaactggattactagtgtgggctgcaaaatgacggcgaatcaattgtgaatgttgctggtgttcattcaactcttcatcttccttacgaccacactatgtatggtcagaaccttactgttcagaatttcttcaattcatgagttcctgttgctgtgcaagcagccttccactacaagtacgctgggagcaagtacttgcagcctgcagcttatgacctggccgtttacatattga

SEQ ID NO: 291517 - DNA, 414 bp, Zea mays
aggcacgcgtgcacgcacgcgtgagatttcagcttttatgaccgcatggctccaatttatacacgggaccacaacatggcaccttcgaaggttcttgatgctgatgtgacagctaatagtttaacataccgtaatgttactacgtgatacacgagtaagaataatgaaggtgaactccgatcttgcatatctgaaggtaacaaggttgatgtcaagaacatgctgaggaaggtcaagtgagtgacattacatcagaataagaacctggcctaatatgggatgctggctattagcattgggaaatattcatgcattatgatagccatcattgacaagaatgctcgaattggagacaatgttaagatactcaatgctgacaatgtgcaagaagctgcaatggagacagactggtac

SEQ ID NO: 291518 - DNA, 264 bp, Zea mays
acgatccatatcagcatatcggcaattctcttagaggatcgtcgaacagaacaccatgaagggggacattgatctcgtcgtgtgcctggctctgtcagctgccagcgcctctgcaatgcagatgccctgcccctgcgcgttgcttcagggctagtacggcgctggcgccggcctgacgacgatgatgggcgccggcggactgcacccctacgctgagtacctgaggcagccttaatgcagcccgctagctgcgacgccctacta

SEQ ID NO: 291519 - DNA, 294 bp, Zea mays
tcgtccacgcgttcgtacacgcgtcctttgtttcgtgggcaactagcaacatagaaagcacggtagtgtaccaacaatggcagccaaaatatattgcttccttatgctccttggtctttctgcaagtgttgctacctctaccatttttccactaatgctcacatgctcctatagcttcccttcttccttcatacttcttaccagcggtgtcttcaatgtgtgaaaacccatttgttcaaccttacaggatccaacatgctatcgctacaggcttcttaccattatcacccttgt

SEQ ID NO: 291520 - DNA, 282 bp, Zea mays
atattttcagcattcaaaaacacaccttgctattcgcactagcaacgacctaacaccaatggctaccaagtatattagctcttcttgctctgattgcccttttagtgagctcaacagatgcattcattattttatagtgaatacttgtttacattgcctgtttaccacaatatattcttgagattaataacatagttttgcacaatgatgccctactgttgcttacattgtgtttcttgctcttattgatgattcttcaatgatagctgattccagttatat

SEQ ID NO: 291521 - DNA, 316 bp, Zea mays
atcacatgtgatcgccacgaacgtccgcatgctgggaatgggcactgatcagcctgacagtcgagagagctctcgaatcgcgcctaggtatgccagataggaggccctgtgagccgcatttgccatggacgcgttctttgcttcagcctggaatgattccttccaggaggcttgccacaacggcatccgcatcatcgcccaacctggacgcagtatgaatgacgaggacgccgtcgcgtgctgcaacaagtattgtgtgtcactcggtctctacggcattaggcactttatgcattatccgtcatgccccatggct

SEQ ID NO: 291522 - DNA, 392 bp, Zea mays
ggctttagaaaatttatgtccaaagcttgtcctcgtttccaagttccatctaggagaacttgcacaagggatattgtacgtcattactttgaagagaaagccaagctcaagaagttgttcaaagattcttgtcagagagtgtgcctgacaacagatgcttggacttctcaggttcaagatggatatatgactattacagcaactttcattgatgaaaactggaacttgcacaagaaagtgataagttttttcatggtaaagggtcacaagggggaggatattgggaagaacttgacaagatgcttagctgattggggtttggatagaagaatgactataaccgtggataacgcatgtgcgaatgacagtggtgttgattatttgaggaagca

SEQ ID NO: 291523 - DNA, 171 bp, Zea mays
atcaatcacccttgaggtggagtctttttatttcattgacaatgtcaaggccaacatccaggacacggagggcatcctaaaggacctgcagcacgctgatctttgagatcacgcagccggtctacgaccgtaatgtggccggcaagttcgtctagcatgccggaactctag

SEQ ID NO: 291524 - DNA, 452 bp, Zea mays
tagatgcgtagcggcacgctttcggagaccaacaagcaacatagaaagtggaatccagtagcatcaatagagcatcaatggcgaccaagatttgtccctacttatgctccttgctctttctgcatgtgttgctaacgcgacggttttccctcaatgctcacaagctcctatagcttgccttgttacgccataccttacatcaatgatagctggactatgtgaaaacccagctcttcaaccctataggctccaacaagcaatcgcagcaagcaacatacctttatcacccttgtttcaacaatcgccagccctatctttggtgcagtcattggtacaaaccatcagggcacagcagctgcagcaactcgtgctacctgtgatcaaccaagtagctctggcaaacctttctccctactctcagcaacaacaatttcttccattcaaccaactgt

SEQ ID NO: 291525 - DNA, 415 bp, Zea mays
ctaaactggcactcttgaagcgagccatgggttttgttatacagcatcttggcccatcggatcgcctttcagtcatcgctttctcttcaaccgccagaaggttgttccatctccaacggatgtcacactctggccggcagcaggccctgcagactgtgaactcgcttgttgctagtggtggcacaaacattgctgatgcactgaagaaagctgcaaaggttattgaggaccgaagccatcaaaatccagtatgcagcatcattctcttgtctgatggccaagatacgtacaatattccctcaaatattaggggtgcccggccagaatacagttcactagttccatcctccattctaaaccacacatttggcttagtgccggtgcatgggtttggttttggagtagaccatgattc

SEQ ID NO: 291526 - DNA, 401 bp, Zea mays
cccacgcgtccgattgaaccgtgctgcttacttgcagcagctactattaccattcagacagatagctactgcctactctcaacaacaacaacttattacatttaaccaattggccgcactgaaccccgctgattatttgcagcaacagatactactaccatgtagccagctagctgcatcaagccgcgcttccttcttgacacaggagcagacgctgcctttctaccagcaggttgcggctaacctcacgaccattttacaactactacaatagctgccctgtgtccaacttgctttgacaaaccgagtagcctgctaccaacagcacatcattggtggtgccctattgaagactgcttattagatgtaactcactactcaagtctttgggatgatgtatg

SEQ ID NO: 291527 - DNA, 381 bp, Zea mays
cccactcgtccgggggacactatcctgggttatagagcggttcaggttaattggaaagatctggactattgcaatgtttgtgatatggatgaggagtatgaagacaacttattcttgcaatgtgacaagtgtcgtatgatggttcatgctagatgttatggtgaacttaaacaattggatggaggactttggctttgcaacttgtgtcgaccaggtgcacctcgtgtgtctccaaaatgctgtctatgtccagtcacaggtggtgcaatgaatcctacaacagatggccgttgggctcatctcgcatgtgctatatggatccctgaaacatgcttaaaggatgtaaagagaatggaacctattgatggactgagcataatc

SEQ ID NO: 291528 - DNA, 438 bp, Zea mays
  unsure (1)..(438): unsure at all n locations
gcaggatttgactgtgactataatttgtacccagataaagatgcccagtatcacttcttcaggaattatctgcaccctgatagacctagtgaggtatgtgaaacaaaaccaattgaaatctattcttggaattcaagttctttctgaagtaaatgaagctttctgttagtacctactctatgtaatatatatttgacgctatgagtagttccatctttgcttgttttttatgaagttagtaatacctccatatgtgccacatgtgtttgacattttgagcgttgttaagctttttttctgaacaaacataggaggtctgcgtgccatttcattaacgccccgtttggatcactggaattgaattccattctaataataataatttaagcatatatcaattaagctaattcattnttatacaaaatatatttgtatact

SEQ ID NO: 291529 - DNA, 381 bp, Zea mays
gtcacgcgtccggaaccccgctgcttatttgcagcagcatatactactaccatttagccagctagctgcagcaaaccgtgcttccttcttgacacagcaacagttgctgcctttttaccagcagtttgcggctaactccgcaaccctcttacaactacaacaattgttgccctctgtccaacttgctttgacagacccagcggcctgctaccaacaacacatcattggtggtgccctcttttagattgcttattagctgtaattcaataatatagttttttggatgatgtatgtggccaaccagaagtacgatgttacatttccagattctaatgtgatattggtctccaagggagtccgattaaagaagccgaaatcaaa

SEQ ID NO: 291530 - DNA, 387 bp, Zea mays
cggacgcgtgggcggacgcgtgggcggacgcgtgggcggacgcgtgggctcagttttcatgaaaggttctatggatcacgcggaagggacgagagcagatcaaacaatgatggattccgtgctaggagcagaagtcctggcaagcctgtggaagtttccaactggtgattgcatccactaggtgcaatccaatttttgcgatggtgacgaaaccaagtaaaagatggtacctcgacaagttatattttcctcttatcctgcttaaatctaaggatgtcctggaacatcactaacttaggatatgggtgatggtctgatcccaatggacaatggtctcctactttcttgatttgacgcctgagagacgcctgattccataccatatgc

SEQ ID NO: 291531 - DNA, 343 bp, Zea mays
tcgcggacgcgtgggcggacgcgtgggcggacgcgtgggcggacgcgtgggtggcaaggttattccaggtgcaatggacagtgctgtatcgaaacatttatcgcatgcatatggatctttggctgaacaagtggctactattgcccagaacgaaggcttgggaaagcgccttgctcatggatacccatttttggaagctgaagtagcatactgtgctcgttatgagtactgtgaatctgccgtggattttgttgcaaggagatgccggcttgctttccttgacacagatgctgctggtagagcatttgcccgaatcattgaaattttagcttcagagcacaag

SEQ ID NO: 291532 - DNA, 137 bp, Zea mays
tcggccacgcgttccgcttggaggtcctgcacaacgtgcttcgacctcaagcccgacatccaggtctccaagaaccagatcctgtactgtacaagcttgagctggagtgcggacggaagcaccatctagcctgcgta

SEQ ID NO: 291533 - DNA, 311 bp, Zea mays
gcaagcgcgaggcgcgcgacgtgcacaggcactcgaacgacgcccgcaatgtgattggtgctaagggcaatacgttcgccaagaaacgctatgctgagaacgctcatatgaagaagaccctgaaaatgcacgatgaatcacataatcgacagaaggttgatgatgatgtccaagagggtgctcttcctgcgtatctactggatcgtgatcagactcagcgtgctacggtactcagtaacgcactcaagcacacgatgaaggaaaaggctggcgaatgggatgttccgctgccaaaggtcatacctgttgct

SEQ ID NO: 291534 - DNA, 331 bp, Zea mays
cacgcgtccggccctccaagtaactgcgaagagcatagtgcatgaggaatgagcttgtagctagctcatatgtctgaataataagcacagcaagaagatgaatgcatttctcggatcgttcatccggaacaataattaaaggggatccggatttgttcttgtgatataattaacgattcctgttatacttggaagtagctaggctcgtccccatccaatgcaagcaaagatctgatctcccaacgtgcatgagaaaatgtgagcgatttacttcaccggtccttcctctaattaaatggaaatgtgaagtggaacataagaaattaaggtg

SEQ ID NO: 291535 - DNA, 415 bp, Zea mays
  unsure (1)..(415): unsure at all n locations
gaaggattgaagcatgctggtttgttttggtttggtttgtatgttccattccagtgcagcgcggtggcgcagaacgagtgcaacaacggctgcgccggcgggctgatgacgaacgcgtactcgtacctgatggagtccggcggcctgatggagcagagcgcgtacccgtacacgggcgcggcggggccctgccgcttcgacccgacccaggtcgccgtccgcgtggccaacttcaccgccgtgccggccggcgacgaggcccagatccgcgcggcgctcgtccgccgcgggcccctcgcggtggggctcaacgcggcgttcatgcagacgtacgtgggcggngtgtcgtgccctctcatctgcccgcgcgcatgggtcaaccacggcgtgctcctcgtcggctacggcgcgcgcg

SEQ ID NO: 291536 - DNA, 439 bp, Zea mays
cagacacgtaaggacgcggtgaaccctggcacctacttgcaacagcaattgcttgcatgcaacccacttgctatggcgaacgtaactggataccagcaacaacaacagatgaaacagttcatgccagtgctcagacaactagccatggtgaaccctgacgtctacctacaactactttcatctagcccgctcgcggtgggcaatgcacctacgtacctacaacaacagctgctgcaacaaattgtaccagctctgactcagctagctgcggcaaaccctgctgcctacttacaacagttgcttgcattcaaccaactggctgagtcaaactctgctgcgtacctacaacagcgacaacagttacttaatccattggcagtggctaacccattggtcgctaccttcctgcagcagcaacaacaattgctgccatacaacc

SEQ ID NO: 291537 - DNA, 452 bp, Zea mays
agccttccgtgaaggtcctccggggttcggttccttggttaaccggatcaagatggcggcgtcggatgttgagtcccgctgcttcgtcggcgggctcgcctgggccacggacgaccacttccttcacaacgccttcagcacctacggcgaagtcctcgagtccaagatcattctcgatcgggagaaccataagttccgccggttccggttcgtcaaccttttcaacgaagaagccattccgaaccgccttcaaggccttgaccgcaaaggagctgaacggccgcaccataaccgtcaacgaggcccaatcccgcggcggccgtgaaggcggcggcggtgggtacggtggtggccgtggaggcggcggctacggcggtggcgggcgccgtgatggcggcggcggctacagcggtggcggcggctacggtggcggcggcggctacggtggtggt

SEQ ID NO: 291538 - DNA, 303 bp, Zea mays
gcgtctttacaacaaccaatttcccagttgcaacaacaatccttggcacatctaacaatacaaaccatcgcaacgcatcagcaacaacaattgctaccaacactgggccacctagccatggtgaacccttgcgactacttgcaacagcagttgcttgcatcatacccacttgctctggcatacgtaattgcaaaccatccacacaaacagctgcaacagtttctggcagcgctcagtcaactagccatggtgaaccctgccgactacctacatcagcatcaactgcttgtatttagcccgctc

SEQ ID NO: 291539 - DNA, 275 bp, Zea mays
acgggctggaggacctgttggcggaggttgtccgactgcatgcacttaacacgtccacgcctgaacggagtggctgggggaaaccagaaacagaatatactaaaaatggtcctggtgcacctggtgggcaatcatggacagttgaatggctgatgtttgataacagttacttcaaggatatcaaagagaaacgagatcaggatcttgtgtcctacctacagatgctgctttatatgaggacctccagttcaaggtgtatgccgtgaaatatgtgc

SEQ ID NO: 291540 - DNA, 431 bp, Zea mays
cccacgcgtccgcaagaacaggggagggaggaagatctggcaggaaatggagaagaggatagggaccataattctatcattccaagccgtgaggagttgactgaagaattaagaaataaagttgcatatagtgaggaagaagcttacaggttgtactgtgactatgggcaccgcatgggctttagtgttcgaaaaggaaagcagtactactttactggaaccaaaaccatccgtactaaagattattactgctcaaaagaaggcttgaaggatgatgaacagcttactgaagcaaactttaataagccggagaccagaactaattgcaaagcgatggtccgttttagggttgattctgaaggtcaatggcgagttattcaaataattcctgaacacaatcatgagctagttcgaccggaaaaaatacactt

SEQ ID NO: 291541 - DNA, 194 bp, Zea mays
cgcacgcgtgagacaaccactaccggttcttctgctagctggagtgagccctgctaccgttttgactcaaccacattatgcgccgtactagcagatcgctcatcctaatgctggcacactgctgcaactgcaacaagtgctgcccttgaaccaacttgcttcgacagacccaggagcaatctagcaacaaccca

SEQ ID NO: 291542 - DNA, 212 bp, Zea mays
aaagaagctctatctttcgcgcaatgttatgtgctacaagtgcaagggcaaggacatgaagtctggcgccttaaagatgtgccgtgagtgccagtgctaaggcatgaatgtcactattggtgagatgaacccttatatgatgcaccagatgcttgaatcttgcgacgagcgcaatgtgactggacagagcatcaatgagaaggaccgctgga

SEQ ID NO: 291543 - DNA, 424 bp, Zea mays
caagtagctctggcaaacctttctccctactctcagcaacaacaatttcttccattcaaccaactgtctacactgaaccctgctgcttatttgcagcaacaactattaccattcagccagctagctactgcctactctcagcaacaacaacttcttccatttaaccaattggccgcactgaaccccgctgcttatttgcagcagcaaatactactaccatttaaccagctaggttgaacaaaacggggcttctttttgaacccacaaccggtgctggctttctaacaacaatttgggggttaccccggaacccttttaccactaccacaattggtggcctttggccaacttgctttgaccgacccaacgggcttctaacaacaacacatcattggtggtgcccttttttaaaatggttattaat

SEQ ID NO: 291544 - DNA, 119 bp, Zea mays
gtgcgctccatcaccacccagttccaggccgtcgtcggcatctcgctgctggagatcctgtccagccactcctccgacgaggtgtacctcggccagcgcgacaccaaagagtggacgtc

SEQ ID NO: 291545 - DNA, 434 bp, Zea mays
caagcaacatagaaagtggcatccagtttcaacaacagagcagcaatggcgaccaagatattttccctccttacgctccttgctctttctgcatgtgatgctaacgcgacaattttgcctcaatgctcacaagctcctatagcttaccttctttccgcataccttacatcaatgctagctccagactgtgaaaacccagctcttcaatcctatacgctccaacaagcaatcgcagtacgctacatacctttatcacccttgttgtttcaacactgcggcagtcctatctgtggggcaacacattggtacgaaccatcacggcacactaactgcagcgactcgtgctacctgtgattaacacgagttctctgtcaaacctttctccctactctcagcaacaacactatcttccattcaaccaactgtctacactg

SEQ ID NO: 291546 - DNA, 388 bp, Zea mays
tcgcaaaaaattgccatgtttgagaagaattgtggaatgcaggctctaattcaatatccagatatgacaactgcagccgttgctaaacaagctttggagggacactgcatatatgatggtggttactgctcatgatgatagaagcagagactacactctttcagaccctaatgcgcagctgcaagctgctgcacaggcgccagttataagttctccgggagtggcatggcgaaaccctgcattagcaccagttgttcctttctatggaagcacgggggcttaaactcctgttggacaaccgcttgctgggaaccctaaaatgcaggcccttggttttcattttgattggacagggtacccaaaccaaccattaatggccaattcaagg

SEQ ID NO: 291547 - DNA, 436 bp, Zea mays
gtcttcttcgacatgaccgtcggcggcgccccggcgggccggatcgtgatggagctgtacgccaacgaggtgcccaagaccgcggagaacttccgcgcgctgtgcacgggcgagaagggcgtgggcaagtccgggaagccgctccactacaagggctccaccttccaccgcgtcatccccgagttcatgtgccagggcggcgacttcacccgcggcaacggcaccggcggcgagtccatctacggcgagaagttccccggcgagaaggttcgtgccccaggacaacggccccggtgtgctcttcattggccaaggccggcccaaccaccaacggttccaagtcttcatctgcaccggcgcgaccccttggctcgacggcaagcacgttgtcttcggccaagtcgtcgagggcatggacgtcgtcaaagccatcgag

SEQ ID NO: 291548 - DNA, 449 bp, Zea mays
aagatattagccctccttgcgctccttttcctttcagtgagcgcaacaactgcattcattattccacaatgctcacttgctcctaatgccattattccacagttcctcccatcagttacatcaatgggcatcgaacaccctattgtgcaagcctataggctacaacaagcgcttgctgcgagcgttttacaacatccgtttgcccaattactacatcaattcttgtctacatttaaccatacttacctttttttctcatcttgtagctactgtttttctcctatttttgccatctatctctttggtacatctgtttttttcttttttatcttttgttttttttttatccttttttttttgctttttatttttatttttttttttttattttatttttttatttttttctttatttcttgttttctttattttctttttatttttttttt

SEQ ID NO: 291549 - DNA, 307 bp, Zea mays
tcgaggcacgcgtccggcgacgcgtgccggctaaccctgctgcttacttgtaacagctgcttccatttaaccaacgtgactgtgtcgaactcttgctgcgtacctacaactgcgacgacaggtacttaatgcactagcagggcctaacccattggtcactggctttctacagcagcaacaattgctatccatacagtcagttctctttgatgaaccctgccttgtcgtggcagcaacccaatcgtggaggtgccattttttagatttcctatttatatgttaatcgataatggtgcccttataccgg

SEQ ID NO: 291550 - DNA, 429 bp, Zea mays
cccacgcgtccgcccacgcgtccgcccacgcgtccgcccacgcgtccgctggagctgatcctttctactggatgcgtgttatcctcgcatcaaaccgtggcactgtgatggagttgggtattactccaattgtgacctctggtatggtaatgcaacttcttgtcggatcgaagatcattgaagttgacaacagtgtgagagaggatcgtgctctgctgaatggtgcacataagttgcttggtatcttgatcgctattggggaagctgttgtattttttctgactttaatttattgatttttatgttaaattttttatctaatgtttttttctttttattatattttttattttttttcatttttttattttggtttttattttttttcttattattttttttttgttttttttttattttttttttata

SEQ ID NO: 291551 - DNA, 429 bp, Zea mays
atcgggatatcaaaggggctaatcttctaataactggtggtaagttgttaaaactcgcagattttggccttgcaaggctgttcactagagacggatctttaacaaatcatgtcatcactttatggtaccgaccttcttagttgctttttggtgccacaagttatgctgaacctgttgatattttggttgttatttgcatattttcagtatttttacttttgattactttttattccttttttttttgtttttgtgctattttttttttttttatattcttatatttattttatatctttgtttttttttttatatattttgttttgtttttttttattttattaattatttttcttttgttttttttttttattttattttttctttttgttatttttttataatttttttttattatttttaattttt

SEQ ID NO: 291552 - DNA, 176 bp, Zea mays
gttggcttatcctccacatacggttcggtttcgggttcgtgaggttctacggggttcgggttcgtgggtgagcggatcgagatagcgacagtaggatgttgagtaccgctgattagtcggcagtctctacagagtcacaaacgactacttacttcataattacttgagtacctaca

SEQ ID NO: 291553 - DNA, 259 bp, Zea mays
cccacgcgtccggcaacatacatagtgaagtacactagcaacatcttaacaccaatggcagccaatatatttgccctacttgccctaacttgctctttcagcaaacgttgctactcgcactattattgcacactgctcacaacaatacctctttccggtgacagccgcgagatttgaatacctatctatacaatcctacttgctacaataggccatcgtattaagcatcttacagtcgttagcatagactgtcctatat

SEQ ID NO: 291554 - DNA, 383 bp, Zea mays
gaatgaagggattgtgccagggttgatgacctacggagcagtggtggatgggctggtgaagtgtgggagagtggaggatgcatggaaggtggctcaggaaatgggggggcagggactagcacccagtgagtttgtgttctccgctgtgatcaccgggttttgcaagtcaggagaggttgacagggcattgatggtgtgggagacaatggtggcagctagggtaaagccgaatgttgttttgtattcagtactgattgatggttttgcacggtctgggaggatgacagaatctgataagttatttgaagaaatggcttatgcgaaatgtatcttagatatttggacattcgttttaatgtgtctgttatttttttacttttttt

SEQ ID NO: 291555 - DNA, 463 bp, Zea mays
ggcaaacgtttggtcacatttttaggcctgctcatattatgcccttgcttgagattgttcggacggagaagacatcaccacaagctatccttgatctcatcaccattgggaagataataaagaaagttcctattgtggtcggcaactgctcaggatttgcagtcaaccgttcatttttttcttacacacagtgttcttattttttagttaggtcttgtaattgattgtttttatatattgtttttttattatcattctttttgattgtcttttgattactttgaaattatttttttttttttttttattagttttgtattttttattttttatattttatattgttattattattttgtttaatatattatgtttttatttatttttatttcttttttttattattgtttatttattgtatttgtttgtattttaatgttattttatattttttttttatatt

SEQ ID NO: 291556 - DNA, 188 bp, Zea mays
cgagcggccgacctttttaattctatttttaagaatctaaaaatgtactatcttatctggggcaagccacaaacatcagacaaaaaactttattattgaactataactcataagaaatgtaaaagagggcaccaccaatgatgggttgttggtagaacactgctaggtttgtcaaagcaagttgtctg

SEQ ID NO: 291557 - DNA, 378 bp, Zea mays
cgatatgctgcggttgagtcaccatatcccgcaaaaggaaggtctgcctcaaagcttccagtgtctgcacctgggcgtgcagcgcttcctagtgccaccccgaatctaaacattgggatggacatttggaatgcttctcctgccttggctgtgcctgcagtgcagggggaagtgagtcctgggttggcacttgcccgacgtgatggcgttactcaactggacgaacgtgaaatgaagagaaggatcggcgttaaaatggtattgtgaagggagaggtttttaagcaaaatactgtaccgtcgttttgccatcgagtatatttgaccctcgattatatagatcacattaaatttttggagcatcaattttataaaataa

SEQ ID NO: 291558 - DNA, 422 bp, Zea mays
cccacgcgttcggacaactatcaacatagaaagcacaatagtgtaccaacaatggcagccaaaatattttgcctccttatgctccttggtctttctgcaagtgctgctaccgcgaccattttcccgcaatgctcacatgcttctatagcttcccttttttccccgtacctcttaccatctgtgttttcggtatgtgaatacccatatttttaaccctatatgattcaacaggcaatctcaactgtctttttatctagtttactattgtttttttaatatttatcatttttattacattattttctctttgttgcatttatttgtcttatttttttctttgttcatacatcttttttttctttttttttgttattctttttaatttttcttatttttatatttttatttttctaattaatttt

SEQ ID NO: 291559 - DNA, 304 bp, Zea mays
gaggcacgcgtcacgcgtgcgcttacgcgtagcatcaactaattcacaatggcgaccaaagtatttttccctccgtatgctccttgctctatctgcatgtgttgcttacgcgacaatttatacacaatgcttacaagctcctatatctttcctttattatctcataccttgcatcaatgatagcttcagtatgtgaaaacccatctcttcaaccctataggctccaacaagcaatcgcagcatgcaacatacctttatcaaccttgtttcaacaatcgtcagtcctatcttaggtgcattcatt

SEQ ID NO: 291560 - DNA, 196 bp, Zea mays
cagacacgtaggtacacacttgaacttataagtcaacagtgtagcatcacaggtgagcgcgatattgttatgctttatgctccttgcgcatgttgtatgtgtctgctaaatcgtcaattatagctcaatgctcacatgcttctattgctttccttcttaccctatacttttcatcaatgatagctttagtatgtga

SEQ ID NO: 291561 - DNA, 314 bp, Zea mays
acgcggacgcatcgagtcgttccaaatccatgcatgctcgtctgctcatttccgcagcgatgtaacacggatgtccaagatcaagatcgggatcaatgggctcggcaggatcggacggctgatggccagggcgaccctgcatagtgacaacttcacgctcgtaagcgggcaagactgcttaatcagcacagaatacatgtcctacatgaccaagtacgacactgtgcacggactgtggacgcactctgcaaccaatgcgaagtgactgcaaaactcctgttcgtttagcgagaaggatgttgcctgtgttagtc

SEQ ID NO: 291562 - DNA, 324 bp, Zea mays
cccacgcgtccgcccacgcgtccgcccacgcgttcgctcaaggtctggtgatacgagcgagttgtcttcttcccccccggagaaaagtgcttccgagaataaatttttttccatcggaatgtctgaaactatgttgggtgtatcctagtggttggttgagcattaatggctcatattttgtcaggtctatgtgttgccgtgaaacttttaatcaaatcagttcactctatataataatatatattatttttatctattgttttttttttatttctttttttttttgttatttttcttttttatttatatttttttatttttttt

SEQ ID NO: 291563 - DNA, 440 bp, Zea mays
tcgctgactgcttggtcggacccttgggttataatcacacctaacgaagcgcactatcaacgacctaacaacaatggctaccaagatattatccctccttgcgcttcttgccctttttgtgagcgcaacaaatgcgttcattattccacaatgctcacttgctcctagtgccattattccacagttcctcccaccagttacttcaatgggcttcgaacacctaactttgctagccaacatgctacatcaagctcttgctgcgtgcgtcttacatcttccaattgtccatttgcaacaacaattcttgccacatctaacaattcaatgtattcacatcgcaatcatctctacagtttctaccattacttgattcttctatccatggtgaaccctgtcattttatttttgtatctcttgtttgcattttactcaattttttt

SEQ ID NO: 291564 - DNA, 370 bp, Zea mays
cccacgcgtccgcccacgcgtccgcggacgcgtggggtggtgtgtggaggatgaagtatcatcctagtattgcagatgttgtattggctgcgtgcatgcacaatgggtttgccattgtaaaagtaggttctggagatgctaccgtaatggaaacatattgcaagcatgagtccttagcatacggtgcagattggcagaaaagtgaagaggtggagcaaaatggaaattcttcagttgttgctacttgtgcgttttatgatcgccttctccgtgtgtggcaaccagagaatctagctgagctttaaagacctaaagctttttttgaattgaattcaagcatgactaggtcttgaatcttattccttgaatg

SEQ ID NO: 291565 - DNA, 351 bp, Zea mays
gagacacatagacatggtgacaaatgcagtgttactcagaacatgattagtttagctacacacaaatggctgtggccaacgatagctggatacattgatcaacagcaggtgcagcagattatgccagagcttactgaagtagcaatggcgtaccgtgtcgagtacctacacctactatcatttagcgcgctcgaggtgggcaatgcacctacgtacgtacaacaacaggtgctgcaacaaattgtaccagctgtgactcatctagctgtggcaaaccctgctgcctacttacaacagttgctgtcattcaaccaactggctgtgtcaaactctgctgcgtacctacaacag

SEQ ID NO: 291566 - DNA, 306 bp, Zea mays
  unsure (1)..(306): unsure at all n locations
ggcacaacaactacaacaacttgtgctatgaaaccatgctgcctactctcagcaacagcagtttcttacattcaaccaactggctgcattgaactctgctgcttattnagggcaacaactaccattcagtcagctagcgagtgcctaccctcagcaagttcatacattcaaccaactggcagcattgaactctgctgcttatttacaactgcaacagctaccaccattcatccagctagctgatgtgagccaaagtgcctaaatgacgcaacaacagatgttgacgttctacctgcacgctgcgcc

SEQ ID NO: 291567 - DNA, 211 bp, Zea mays
tctttcgctagcattcgcagtttcccctctccttgatacgcatcttttttctaggagtaagtttgttcttttattgatatggcgaggtaggagaatgtctacatggccatgctggcatatttgtccgaaaggtatgaatagatggttgagtatatggagaatgtgtctaatactgtatatgtggaagtgctcactgttgaggagcgtaact

SEQ ID NO: 291568 - DNA, 314 bp, Zea mays
gcaggcaggcagccagcagctgattacccgcaagaatcaggggcagtcaaccaactggcatcattgaactctccggcttatgtacagcagcaacaactactaccattcaggcagctaagtggtgtgagccctgctgccttcttgacacatcaacagttattgccgtgctaccggcacgctgcgcctaacgctggcaccctcttacaactgcaacaatttctgccattcaaccaacttgctttgacaaacccagcagcgtgggaccgacaacccatgagtggtggtgccctcagatagagatcttatgagttata

SEQ ID NO: 291569 - DNA, 425 bp, Zea mays
atgatttgattgttccaacatcctgccaatagcccgtaaaaatgcatgcctgcacacttggccctcactgagcagccttccaagtttgatttttacgatccaaaaacacctttcttcactgcaccccgatgcttgccttcgacgcaattggacaagtgcaagatgaaatatgcatttatctcagatggttgcttactgagagaatgcaacatcgagcattctgtgattggagtcggctcacgtgtcagctttggatgtgaactcaaggactccgtgatgatgggagcggacacctatgaaactgaagaagaagcttcatagctactgttagctgggaaggtcccaggtggaataggaaggaacacaaagataatgaactgtatcattgacatgaatgctaggattgtgaagaacgtggtgatcac

SEQ ID NO: 291570 - DNA, 327 bp, Zea mays
gccacgcgagcgagcagaaacacaccaagcgaagcacatgagcaacaaccgaacaacaaaggctaccaagagaggaacccaccgagcgcaactggcgcaaagtgcgagcgcaacaaaggcggtcaagaggccacaatgcacacacgctacaagctccaggatcacacagcacctcccaccagggacttcaaggggctgcgaacacccaggagggcaagcctataggcgacaacaggcaagggcggcgagagagggacaacaaccaaaggcccagtagcaacaacaatccggggcacatctaacgaaacaaaccaggggagcgcaaca

SEQ ID NO: 291571 - DNA, 307 bp, Zea mays
gacacactagcatgcagcctgcgagctacgggctactggtagcatctacaacgtctgcgatctaactaaatgtccgcactgaaccgcggtgccttatttgcagcagcaaatgctactaccacttagccagctagctacagcaagccgtgcttccttcgggacacaacatcaggtgctgacggtctaccagcagtatgcggctaacctcgcttccctattacaactacaacaattggtgccctttgtcaaaattgatgtgacagacccaggagccttctaccaacagcacattattggtggtgccctc

SEQ ID NO: 291572 - DNA, 357 bp, Zea mays
acgcctgcagtaccgtccgattcccggtcgaactctcctgcttatttacagcacaacaactactaccattcaccagctagctggtgtgagccctgtacttttgacacaccacattgttgccgtctaccagccgctgcgcctaacgctggcaccctcttacaactgcaacaattgctgcattcaaccaacttgctttgacaaacctagcatgttctaccaacaacccatcattggtggtgccctcttttagatttcttatgagttatagttcaataataaagttttttgtctgatgtttgtggcttcccagaaataagaatgtacatttctataaaaataatttaatttattataaat

SEQ ID NO: 291573 - DNA, 252 bp, Zea mays
tctaaaagcactgacttgattctgaaggctgcatacaatgtgggtgggcattcagtgaactcccaaactatccagaactcgattctaggatgccagtcccaccgcccttctctgtgggttcagacactatttacgccgacgaaaaaatctgggagctccatacatccatatgctcttcagtacgcagagccaattgcgcactttgcgctctcgaccggttcgttttcagacccacctgttaggttgtacaca

SEQ ID NO: 291574 - DNA, 292 bp, Zea mays
cgcagcgtccggctatgcgaagctcaatcaatctactcatagcaagttcactaatacctgataagatgcttgaagacaagaacactataaccgttccggaccatgtccatgatgactctgaccagcgtatcagatcaggacacctgagatacatgctaccacgcataggacatcgtgtgatccataggcttgagaaggaggctgctgcaatgaacaagccggacttgatgtgcacatgggtgcttgacaagctcaacgcttagactgaaagaggtctcaccattgacatgtg

SEQ ID NO: 291575 - DNA, 430 bp, Zea mays
acgcccacgcgtccgcagaaacacaccaagttatacacattagcaacagcctagcaacaatggctaccaagatattatccctacttgcagcttcttgcgctttttgcgagcgcaacaaatgcgttcattattccacaatgctcacttgctccaagttccattattacacagttactaccaccagttacttcaatgggctacgaacacccacctgtgcaagcctataggctacaacaagcaattgatgagagcgtcttaccacaacctattttccagatgcaacaacaacacttggcacatgtaacattacaaaccatctcaacgcatcagtatcaacaattcctaccagcactgtaccacctagccatggtgaaacctgatgcctacttgcaacaacagttgcttgcattaaacccacttgctctggcaa

SEQ ID NO: 291576 - DNA, 418 bp, Zea mays
cccacgcgtccgcccacgcgttcgcccacgcgttcgcccacgcgttcgggcgggagcagcagctgtggagacggcggcggcggcggcagcggccaacggaaaagcgtgctggcacgccgtcaaggggcccgggtacgccacgccgctggaggccatggagaagggccccagggagaagctcgtctacgttacctgcgtctacaacggcactggaattaacaagccggattaccttgcgacggtggatttggatcccagctctactacatactcccaggtgatccacaggctcccggttacccacatcggcgacgagctgcatcactctggctggaactcctgcagctcctgccacggtgacccatctgccaagcgccgtttgctgatcctgccttccttgctgtcaggccttgtgtat

SEQ ID NO: 291577 - DNA, 439 bp, Zea mays
agccgggtgctgcgagtcagcggcgagcggcggcgcgcggaggagcacaggggcgaccactggcaccgcgaggagcgctcccacggcaggttctggcgccagttccgcctccccgagaacgccgacctcgactccgtcggcgccagcctcgacaacggcgtcctcaccgtgcggttccggaagctggcccccgagcaggtcaagggcccgcgcgtcgttgggattgccgggggagacggtgacggcgacgcgaagaagagtattggcggcggcgccggggatggtcatcatcagaccaagaaggtggagctctgaacagtcaaacgaggggtgttcgcgtttttttttttttttgggtatgttctttatgttccacgacgtatccggtatctccacctgtattgtatggagaggcagagaaagtgtgccatcttgactg

SEQ ID NO: 291578 - DNA, 260 bp, Zea mays
ggtaatttttctacagatgaaccactgctagcacagtagtgatccaacaactgctgacaagatatttagcctccttaggcttattggtctgctgcggacatgctgatagcacaaccattatcacggagtgctcagaatctgctatagcaaccgtgctaactccgtacctatcacgagagacgtcttcggtatgtgaaaacccatttgttgaaccttataagatccaacacgctgtcctagatggcttgttacctttatca

SEQ ID NO: 291579 - DNA, 415 bp, Zea mays
agcgtccgtccggtttcgcagtagggtggcgatggtagctgacgcgaaggaagatgggattgagtaagtgagctattaaacttgttgcttatagacagcaatgcaactaccatgattgatccagatagctgatgtgagacctgtagcctttttgacacaacaacagttgaggccgttatacctgtacgctgcatctaacgctgtcaccatattacaactgcaacaatcgctgtcattaaaccaacttgctttgacaaacacaacaacgttataccaacaacccatcattggcggtgccctattttagattgcttatgagttatagttcaataatgaagttttttggaagatgtttgtggcttcccagatataagaaagcacatttctagattctataaataatattaattttttt

SEQ ID NO: 291580 - DNA, 432 bp, Zea mays
aaccgtcccggcctcagcctcatccccagccacacccatgcccgtgccaacagccgcatccaagcccgtgccaacttgaaggaacctgccgcgttggcagcaccccgatcctgggccagtgcgtcgagttcctgaggcatcagtgcagcccggacggcaacgcctaattgttggcttaatggccggccgtgccggagcaatgtttgcaggaacttaagccagttgagcccgcagcaccggtaccaggcgatcttcggcttggtcctccagtccatcctgcagcagcagcgtaaagcgggcaggtctcgtggctgttggcggcgcacatagcgcagcaactgacagcgatttgcgggctgcatcattcgactctatgcgcttactcctgtgtcggcggtgttctccactgtagaaactatgtgctgttgtata

SEQ ID NO: 291581 - DNA, 273 bp, Zea mays
cccacgcgtccgactgtatgcattgctagtgtagtattctgtgacaaaaccaataatcaaaccagcccacagacctgtgcaagatgatccagatgaacgacatgatcctgactctgatatggaagtggatgatcacaaggctgtggaagagtcatcgaggaggagcattctaggtataaaaatcaagagagaatttggtgaaaatgcgaccagagttcaggatggtggcagaatcgcatttgaacatagaggactggaacccatggcagaaga

SEQ ID NO: 291582 - DNA, 320 bp, Zea mays
gatcagcaaacggcggtgcgtagagaggatcgtcgaacagaacagcatgaagatggtcatcgttctcgtcgtgtgcctggctctgtcagctgccagcgcctctgcaatgcagatgccctgcccctgcgcggggctgcaggtcttgtacggcgctggcgccggcctgacgacgatgatgggcgccggcagactgtacccctacgcggagtacctgacgcagtcgcagtgcagcccgatgtcagcagagccctactacgccgattgtggacagcctagcgccatgttagagcggttctggcgacaccactgccatgagcata

SEQ ID NO: 291583 - DNA, 266 bp, Zea mays
gccctcttttagattgcttattagatgtaattcaataataaagttttttggatgatgtatgtggccaaccagaaataaaaagttacatttccaaaaaaaaaaaaaaaaaaaaaaaaaaaaaaaaaaaaaaaaaaaaaaaaaataaaaaaaaaagcacaaaatataaaaaaagaagcctcctaaaataaaaactatggtctctgctattacagaataagcctattctacattatgatgggccattataagtgcacattgatattata

SEQ ID NO: 291584 - DNA, 436 bp, Zea mays
ctgtagcgtgggtactacaaacacaccgagcgaagcacattatccacaacctaacaacattggctaccaagatattatgagtacttgcgcttcttgcgctgtttgcgagcgcaacaaatgcgttcattattgcacaatgctcacttgctacaagttcaattattacacagttcttcccaccagttactccaatgggcttcgaacaccgagctgtgcaagcctataggctacaacaagcaattgcggcaagcgttttacaacaaccaatttcccagttgcaacaacaatccttggcacatttaacattacaaaccatcgtaacgcaccagcaacaacaattcttaccagcattgagccacctagccatggtgaaccctgccgcctacttgcaacagcaattgcttgcatcaaacccatttgctctggcaaacgtatt

SEQ ID NO: 291585 - DNA, 286 bp, Zea mays
cccacgcgtccggagccaagaagaaaggagggtgctctgacggcggcagaacggcaatgtccgacaggaggcgcggcacctgcgccagcaccggcactcgcaaggatgaggtgacgacccgacagtacaccatcaaccttcacaagcgcctcaacggatgcacgtttaacaagaaagcgccgaatgccatcaatgagatcacgatgatcgcccaaacaacaatggataccaacgatgtccggatcgatgtgaagctcaacatgcacgtctggagcacacgaatccg

SEQ ID NO: 291586 - DNA, 407 bp, Zea mays
cgttcagcattcagaacacaccaagtcgaagcgcactatcaacgacctaacaacgggggctgtcaagatattagccatccttgcgcttcttgccctttttgtgagcgcaacaaatgcgttcattattccacaatgctcacttgctcctagtgccattattccacagttcctcccaccagttacttcaatgggcttcgaacacctagctgtgcaagccaacatgcaacaacaagcgcttgcggccagcgtcttacaacaaccaattgcccaattgcaacaacaatccttgccacatctaacaatacaagccatcacaacgcaacagcaacaacagttcctaccagcactgagccacctagccatggtgaaccctgccgcctacttgcaaaagcagctgattgcattca

SEQ ID NO: 291587 - DNA, 441 bp, Zea mays
aacgaaacccagctgcaccagcaacttctgccagcagacccaacgacggaagcttttgttttctttcttttcatcgccgccgctcggggttcaaggttcagcgcgtccccgaatgacgggcacgtacgaggccttcgaccgtcctgctcctcccaactccgccggctaccggaccgacaaagtccggcgaaagcggctgacggcgcagaagaggaaagagatcaaggaggcgttcgacctcttcgacatcgacggctccggcaccatcgatgcaagggagctgaacgtcgcgatgagagcccttggattcgagatgacacctgagcaaatcgggcagatgatcgcggaggtggacaaggacggcagctgcaccatcgacttcgacgagttcgtgcacatgatgacggacaagatgggcgagcgggacgcccgtgacgagct

SEQ ID NO: 291588 - DNA, 396 bp, Zea mays
  unsure (1)..(396): unsure at all n locations
cccacgcgtccgcccacgcgtccgcggacgcgtgggttgagcgggtgagacatttgaggagagtccgaggtgttagcaaagatctggggtgtagctgggttgagctctacaaccgagttcatgtgtttgttgttggggaacaacaacatcctgaagcggaaaatataaatgtagagttgataaggctagcgaagcatatgaaggacgaagagtgtttcctgtttgatgacgaaaaggatgaactaggagattctcatgaaggtgaacaaatggaattgatatcaacaacatattactgagttcgcaagagattgatcccatgatgtcagacaaacaccctgttaaagcaatgtgtgacatccgtgatttggggttattntatgttgtattttcttt

SEQ ID NO: 291589 - DNA, 430 bp, Zea mays
  unsure (1)..(430): unsure at all n locations
gacactcaatccttgaatgctaaattttatacttaactccatgctcaccagatcccggactacaatggcatggctaacaactcgaatgatcctaacaaccttaccacttcctataaagacattaacaaggatctaagcgtacattttaagaacacactgtagactgcctatgcacttggccagttggctttgaccaatgctatgctataccttgaggatgttattgctcacatgcaggcatttccattgcacagatactactgttgtgttcgtcgcacctggcacactaagaatgatcactccaataggcanggtccaatacatgattaaatgagaacaatgtcatcctgcatttgatgaacaatgctgatactcacgatgatgtgcatagctaagatcttgacatgctctatattttacacgttcatgt

SEQ ID NO: 291590 - DNA, 221 bp, Zea mays
cggacgcgtgggcggactcgtgggcaactacaacaattgttgcccttggtccaactggctttgacagacccagcggcctcctaccaacaacacatcattggtggtgccctcttttagattgcttattagttgtaattcaataataaagttttctggaaatgtaacttcttatttctggttggccacatacatcatccaaaaataagaagttacatttccag

SEQ ID NO: 291591 - DNA, 436 bp, Zea mays
attctgacggccaaggggcagccagatgtcgccacccggctgttcctgcggaggctggaggttgagctgaagctgccagtgctcgcgctggtggattctgatccatacgggctcaagatcttgtcggtgtacatgtgtggttccaagaacatgtcgtatgacagtgccaatctgacgacgccggacatcaagtggctcggtgtccggccgagcgacctggacaagtacagagtgccggagcagtgccgtctccccatgaccgatcacgatatcaaggtggggaaagagctgctcgaggaggacttcgtgaagcagaatgagggctgggtgaaggagctggagacgatgctgcgcaccaagcaaaaggctgagatacaggccctcagttccttcgggttccagtacctcaccgaggtctacctgcctcttaagttgc

SEQ ID NO: 291592 - DNA, 399 bp, Zea mays
ccttcacattgactgttataatggcaactaatcgggcagacactctagatcctgctgtgttgggtcctggtagacttgacaggaaaattgagttccctctgccagaccggcgtcagaagaggcttgtttttcaagtttgcactgccaaaatgaacctcatcgctcaggttcattttggcagtgcaaacttgaacctgagcgatgaggttgatttggaagattatgtttccagaccggataagatcagtgctgctgatattgctgctatctgccaagaggctggcatgcatgctgtccgcaaaaaccgatatgtcatcctccccaaggactttgaaaagggctaccgaaccaacgtgaagaagcccgagacagactttgatttctacaaatgagtcaacc

SEQ ID NO: 291593 - DNA, 430 bp, Zea mays
  unsure (1)..(430): unsure at all n locations
gcacagcacatagaagtgaaatccataccaccaccgaaccacggattgcctacganaaattgttcccttctttacccccttggctctttctcaatggttgctaacccaaaaattttccttaaaggtcacaagaatctcatatagttcccttttttcccatatacctcacataaatgatctctacagtttgaaaacccccatctcttcagccctataggctccaacaagcaatcgcagcaagcaacatacctttatcacccttgttgtttcaacaatcgccagccctatctttggtgcagtcattggtacaaaccatcagggcacagcagctgcagcaactcgtgctacctgtgatcaaccaagtagctctggcaaacctttctccctactctcagcaacaacaatttcttccattcaaccaactgtctac

SEQ ID NO: 291594 - DNA, 416 bp, Zea mays
accatccaggtgctggtgggctactgtgccgtgtacatattcatgcagacgttcatggtcccagtggccattttcatgtccctgcttgccggggccctctttgggcagctcggtggtctagccctggtgatctttgctgccactgccggtgcttcttcctgttatttcctgtccaagctagtagggaaaccactggtcttctcgttgtggccagacaagctcacgttcttccaaaagcaggttgcaaaaagaagagagaagctgctgaattacatgcttttcctgagagtcactccaacactgcccaatactttcatcaatttttcttcacctatagtgggtgtgccataccatactttcttctttgcgacggccattggcctcgtaccagctgcctatgtgactgtcaaggctgg

SEQ ID NO: 291595 - DNA, 320 bp, Zea mays
gtgcctgaggcagccgcagagcagccctttggcggctgcgccctactacgccgggtagaggcatggtagcgccatgtaccatccgctccggcaacagtgctgccagcagcagatgaggatgatggacgtgcagtccgtcgcgcagcagctgcagatgatgatgcaacttgagcgtgccgctgccgccagcagcagcctgtacgagccagctctgatgcagcagcagcagcagctgttggcagctcagggtctcaaccccatggccatgatgatggcccataacatgccggccatgggtggactctaccatgaccagctgc

SEQ ID NO: 291596 - DNA, 404 bp, Zea mays
cgcacgcgtccgcggacgcgtgggcgttacgcgtgggcagcacctcaagaaggtgcaggccttatcaaagtggaacgtgctctcctgtaatgggcggtgcgccgatccatcacgatgtccagatggctgatggtgccccagatgacttcgccttcgggagcagcagcaacggcaacaacgagtcgcctggtctcgtgaaggcatgggagggggaacggatacacgaggagtgcgcctcggacgagcatgagctggagctcacccttgggagctcaaagactcgtgcagatccttcctgatcatgctgcaagagacaagtctttgagctcccaagcatgagctggagctcaccctcgtcagctgagcgactcgtgcatatcctttcttatcatgctgcaatacac

SEQ ID NO: 291597 - DNA, 423 bp, Zea mays
cccacgcgtccgcagaaacacacctagcgaagcgcactagcaacgacctaacaacaagggctaccaggatattatccctctttgcgcttcttgccctttttgtgagcgcaacaaatgcgttcattattccccaatgctcacttgctcctagtgccattattccacagttcctccctccagttacttcaatgggcttcgaacacccatctgtgcaagcctacaggctacaacaagcgcttgcggcgagcgtcttacaacaaccaattgcccaattacaacaacaatccttggcacatctaaccatacaaaccatcgcaacgcaacagcaacaacaatttctaccagcactaagccaactagctgtggtgaaccctgtcgcctacttgcaacagcagttgcttgcatccaacccacttgctctgg

SEQ ID NO: 291598 - DNA, 386 bp, Zea mays
tcggccggtgctctttgctttaagactgtatccagttcgagctgttgccgcacttcaagaggtggagcagcgcatccaacaagtttggagcacgctgatctgtacgatctttcctgatgctatctggtccagtcggcgatttattgctgagatagagcatgtacggcaccagaatgagtttttttgtatctcgtagaagtgatttagctgatgtcgttgactgtttacttggcttgatgtaattgagtgaagttattcaaaaaaaaaaaaaaaaagggcggccgctcgcgatctagaaccgggttcgtgaggttctccggggttcgggttcgtgggtgagcggatcgagatggcggcgtcggatgttgagtaccgctgcttcgtcg

SEQ ID NO: 291599 - DNA, 289 bp, Zea mays
cccacgcgtccgcggacgcgtgggcggacgcgtgggctggaatcccagagagttgtagcatgaggatcaaaccgtgtaacggtttgatcctgatgctggaatcccagagagttgtagcagtagctggcccaaatgcatgctgggtggttttatctattgctgatgagttgtttaagcaagatccattcctgtattgtactccataagccacttgggtgttgctttgtattgttcactactgtgttttttctatgtgtgggaccgcatctacagtactagttgcttgtcg

SEQ ID NO: 291600 - DNA, 361 bp, Zea mays
cggacgcgtgggcggacgcgtgggcggacgcgtgggcggacgcgtgggcgggggcgtgttggtcgtcatgtccatggctgacgtcccgctcgggttcggcattgcggcgaggtcggcgcaggattgcaggaaggccgacaccaacgccgtggtcgtgctgcaccagtcggacgccggggagtacctccgcaaggaggaggagctcatgtgaggtgagcgcataggcttggctggttaggtcatattcatgagtgaattatggaagattgtgccttactgttgtgtgttccaaggcttggggcatatatatatgtactgaatgattaatcactggttatgagatgcgattattgctgttgcc

SEQ ID NO: 291601 - DNA, 242 bp, Zea mays
attcccgctcgagccactcgtcctccgagcgtccgcaactagcaacatattattcacaatagtgtaccaacaatgtcagccagaatatttttcctccttatgctccttggtctttctgcaagtgctgctactgctaccattttcccgcaatgctcacaatctcctatagcttcccttcttcccccttacctttcaccagtgttgtcttcattatgtcaaaacccaattctttaaccttacat

SEQ ID NO: 291602 - DNA, 278 bp, Zea mays
ccgcatcgtccgcggacgcgtgggcgatcccttcatcagcaccgactacatgacctagatggttatagtacgacactgtacacggacagtggaagcaccatgaagtcaaggtgaaggactccaaaacccttctctttggtgagaaggaggttgctgtgtttggctgcaggaaccctgaggagatcccgtggggttcggttggtgctgaatatgttgttgagtctactgttgttattacttacctgtaataatcctgcatcttactttaaattctatcc

SEQ ID NO: 291603 - DNA, 389 bp, Zea mays
ctaacaacatacaaagcacaatttcgttccaacaatagctgccaaaatatttgggctgcttattctcctagctatttctgcaagtgctgctactgctaccatattccctcaatactcacaagctcctataacttaccttcttcccccgtacctatcaccaactgtgtcttcagtatgtgaaaacccaattcttcaaccctacacgatccaacatgcaatcacagctgacatcttacctttatcacccttgttcctccaacaatcatcagccctattacatcatttaccttttgtgcatttattgtcacaaaacatcatgtcacaacaactacaacaacttgtgctagcaaaccttgcttcctactcttatcaacatcattttcttccat

SEQ ID NO: 291604 - DNA, 418 bp, Zea mays
cgagctgctaccctttttttatctttttatattataccaccaactgtccaatatactagttcggtcttatcaacaactatgtcatccaatatgcccttcctaatcataatatcatctccatctaacaccttgttcacgagatcatgactgttggcccacacttcaaagaggccaacaacttcctctggccattcaagctgaaagcgccccttggtggcctcaagaagaagaggaaccactatgtggagggtggcgactctggcaaccgtgagaactacatcaactagctcatcaagaggatgaactaggctctcttgtatcctgtgaaaatgcattctatgtcggcatggatatgcaattttgttccatggctgtcatacgtcacgacttcaactaagaaatgggtcctgtttatatt

SEQ ID NO: 291605 - DNA, 388 bp, Zea mays
ggtgatgcgacgcccgtcccgttccaagtcctgacaaccgagcgtacgctgagctggagtgaacggcgctggctaccggaagagccgagccggaccaagtctcctcgtccctcacctcgtcgccgatggagggcggcgactcgtccggcgccggcgccggcggcgccgtgggccgcggcggccaagtggcggagcgacgcgtcgcgggcgttccagtactacctggaccgctcgacgcctcacgccacggggcggtggctcggcacgctcgccgccgcggccatctacgcgctgcgggtttacatggtgcaaggcttctacatcgtcacctacgggctcgggatctaccttctcaacctcctcatcggtttcctctcccccatggtcg

SEQ ID NO: 291606 - DNA, 361 bp, Zea mays
ctcacgcatccgttgacgcatcccggctacaccgtccaactgctgtaccaggcggacggctacatccctcgggctggcagtatcacacgcctaaccagccacaacttcagcatcctgaacctcgtacagataagctcggctcctgtatacctgtaccaggacgccatcatgtttccgctctggaacttcaacgcctacatctccatctaccacatcaagggctgtacacgggtacagctcgtcagctacaacgctaccacgtctttagacgacctgctctgacctgcgctgctactcatcgcaccttactgctacctgcaagccacctatgctcactgagcaagctcgcattacatcgcct

SEQ ID NO: 291607 - DNA, 377 bp, Zea mays
gcaaagcggcagtgcgtagagaggatcgtcgaacagaacagcatgaagatggtcatcgttcgcgtcgtgtgcctggctctgtcagctgccagcgcctctgcaatgcagatgccctgcccctgcgcggggctgcagggcttgtacggcgctggcgccggcctgacgacgatgatgggcgccggcgggctgtacccctacgcggagtacctgaagcaaccgcaatgcaacccgcttgcggccgcgccctactacgccgggtgtgggcagccgaacgccatgttccagccgctccggcaacagtgctgccagcaacagatgaggatgatggacgtgcagtccgtcgcgcagcagctgcagatgatgatgcagcttgagcg

SEQ ID NO: 291608 - DNA, 191 bp, Zea mays
aggaccttcgtctcccgttcattatctcacatcttcccgagcgagttcttggtgtacgttttcctcttcggaccagctccaatgctcttggtgtatcttgccactctcaccaatcaagttttcatgtctgatctctacattcatatcccaactgccttcgatcccttctctgaatccaattcttgtcactc

SEQ ID NO: 291609 - DNA, 289 bp, Zea mays
ggggatttgacaaactcgacttccggatctcgatcaccaaagttcgcccggatcgcaggtgggtcattcaaggccgtaacctgtacttagccggtatgcacatgtcgaagaacctctacgggaggtccacccacaagacagagggcctgatcaaattctaccactaccaccacttcataaacgtcattgaacagccttgccctgagtttgtgccaatgccagtcaacctgaccaagacgatgttccaaggggttccctatctataccacgataacattaaactattggc

SEQ ID NO: 291610 - DNA, 343 bp, Zea mays
caggatccaacaggcaatcgcagcagggttgaagaattgggtattcacatactgaaggcccgctggtgagaggtatgggagaagaaaggaagctataggatcttgcaagcattgtgggaaaatggtctacgacaccttacatattataaacacgatctatactcatagaaacaacaatttcttacattcaaccaactggctgaattgaactctgctgattatttgcaacatcaactaccattcagtcagctagctgatgcctacccccagcaatttctttcattcaaccaactggcaggattgaactctgctgcttatttacaacatctacaactaccaccat

SEQ ID NO: 291611 - DNA, 418 bp, Zea mays
cccacgcgtccgcccacgcgtccgcccacgcgtccggtgcgatatggagtaaaatccgtggagaattaggtggagaagaaggttaagttcaacgctccttaggtgttcgatggtacgctagttgaaaatcgtgcgaagcgaagggtgtggatcaaaacaactcacaagacgatgtcggccgatgatcctgaagctagatgaactaagcgggtgtcagaataaaagttgatcgtcaagtggccatcatctaacaacactaacatagtgttatcccaggttataattttgttctgttgtggatggtgctaagtgccggtgggctcggccttcttatataaactgcgatccatttccgagcttcgaggaatcaacagtcaagcttcggcgaccaagagatcgaactcttcgagttctacga

SEQ ID NO: 291612 - DNA, 399 bp, Zea mays
  unsure (1)..(399): unsure at all n locations
gtttcttggagctgcgcaaaaaactaacagaataccatacatgtacatatacaanagtncaagcttctgacaacagagcacagcacacaacaatacaatacactggagttcttaaggtaaccattacaatcaggcagctaatcgttggtgcagtttcaacacatatatagttccgcataccgcaggaaactatatgcatgcatcgacattatttggggggcatcggaccggagcatctcatatccatccagaccgaccgtgctcgtcagggtccgccatgtcctcgttcagctggtccatgtaggcctgctgatggtaccgtgtctgcagggaaggatcattgccatggtgctgaaggagtccctggaacggaccaagaacactactcccactgtgccc

SEQ ID NO: 291613 - DNA, 384 bp, Zea mays
  unsure (1)..(384): unsure at all n locations
cccacgcctactcgtacgcgtgtagtcaagatcctctacagctagatctgccacaccaggatgtacttctgggatgccaaagggcatactcccgtgtaccctcagatctttggccaccaagctaaacgtattataaacagtgttgtagatggtgatactgacctaacgtacaacgaccatgtcctacctgtgttcactgtgcagtgcattgagacgatacacactgcaagctggctatatatcaacatgtgtgcaccgctgangatcaacaccgactcgtactgagatgatcgccgatagcaatacccaggttctaaatcaactacaagcctatataccactttggaaacacttacaccttgatcgagtacaccgacatgcata

SEQ ID NO: 291614 - DNA, 259 bp, Zea mays
  unsure (1)..(259): unsure at all n locations
ggtgggttggcttctcctccccctccttttcgggttcgggttcgtgaggttctccgnagttacttttcaaaaatgagcggatcgagatagcatcatacaatgttgagtaccgctgcttcttcagcagcctcgcctgtgccacagactaccactcacttcacaactccttcagcacctacagcaaggtcctctagtccaaaatcattctagatcggcaaacacaaaaatcccacgtcttctacttctttaccttcttcac

SEQ ID NO: 291615 - DNA, 410 bp, Zea mays
aagaaatagaagaggggaatgcgtctggactaattgctgtggctcccgagtcagaagggatgatgatgccccatttatagatggaaaccaagcagagggtggtgcactgtgggatatttttcgacgggaagatgtgagcaaactgcatgattatctaatgaagcatgctgatgagtttagacattgcaactttgagccagtgaagcaggttactcatcctatacatgatcagtgtttttatctaacaattgagcacaagagaaagcttaaggaagaatatggagtcgagccttggacatttgaacagaagctaggtgaggcagtatttatcccggcaggatgtccccaccaggttagaaatttgaagtcttgcataaaggttgcactagattttgtttctccggaaaatg

SEQ ID NO: 291616 - DNA, 378 bp, Zea mays
  unsure (1)..(378): unsure at all n locations
gacgatggtgctcctcgagcccctgaatactttaacggccctgtcaatgctcatgctaanggancctacctncgacataaggctgggcagcctcagcataccgaaaggcaacgggatcgccatacccgtcccgttcctccaccgagacagagaggtctggggcgacaacgccaatgacttcgatccgttgaggtttcagaacggggtcacgaacgcggccaagaccccgcaggctcttctgtcgttctcgatcgggccgagggcatgcatcggccagaacttcgcgatgctggaagcgaagtcggtgatggccatgatcatgaagaagttctccttcacgctttccttgagctacgtgcacgctcctgaggatcatat

SEQ ID NO: 291617 - DNA, 346 bp, Zea mays
gcagatttgggtggttttgatggggattcttattacgacaacaatgtggaactagatagtaagctatatcctgttaatgggacctactatctctggtaaaactttacttgcaaagacattatctcgttttgtgaatgtaccatttgtaattgctgatgcaactacattaacccatgcaggttatgtattataggatttataatctatattatacaatttactcactttttcatattttaatgtacaagcatttcatcattttatattttacatatactatttttataatatcataatataagtttgaatatttaactttattataaacttatctttttaatttttt

SEQ ID NO: 291618 - DNA, 417 bp, Zea mays
cacgcgtccgaagagttcttcagcgccttcgaggaggagatggaggtcaagcggcggctcgagcaggggcaggcggcgctcgagggcgccactgaagacatggacctcatgggccggctcctcgatgagctcgacctgctgcagcgccgctcccaggacgtggacctcgacatggtggacgtcaaggtgcagaagctcatgccagagctcgggttcatgcctgaggacgccgaccgcctcgtcgcctccttcagcggtgggtggaaaatgaggatgtctctaggcaagatacttcttcaggaccctgatttgcttttgcttgatgagcctacgaaccatgtcgatttagataccattgagtggctggagatgtatctcaagacgcaggatgtgccgatggtcattatatctcatgac

SEQ ID NO: 291619 - DNA, 357 bp, Zea mays
cccacgcgtccgcccacgcgtccgcccacgcgtccgcgagattctgaatgtaatatagtagaatcatctataagctgtcggatatcatgtatctcttacaaaaaaaaaaaaaaaaaaaaaaaaaaaaaaaaaaaaaaaaaaaaaaacaaaaaaaacaaaaacaccaaacaaaaaaaaaacaaaaatacaacataacaaatcatatatagatccaccatgacgcaaaccgcccgcctccctacaacaacgtccgcatctaaaacaaccctgtcgctacccaacatacccttacagcacaacaccctggtttcaccagatgatgtaacaaccaatagtcccgcacataccgatcttacc

SEQ ID NO: 291620 - DNA, 440 bp, Zea mays
cccacgcgtccggccacgcgtccggccacgcgttcggaaaaacagattgtaaatgacaggggcgtatattctttagaatgaactgggcctaaaggtgaatttattccgatgaccaaactaaaccaaaatatcaaggatatgaaatctatcctttacggcaatggtgaatcagagcctgtaactgaagcatgtgtacaattgacccaagaattcttcagggagaacactttacggctattaatcatacatcttccaaaactaaatttggaggtatgtaatttgacctgtttttgcatgtagattgacagtactactggagtagcttttattacatacataatacatacccctcttgttatcgtttttacacaaaaaaactgatacattcgtatggatgtatctctacttctgattgttgcagactaggaaagatgctactc

SEQ ID NO: 291621 - DNA, 440 bp, Zea mays
tcggcacacgttcggccacaccttcgctttatggagcaagggaatcacattggcattgcaggcgagaagtttgcattggttgggcttctaactttttgtgcaaacggcaattatggtaaccatattccaagggacctggtaacaattctggtggcaatgggttacaatgaacccttggttccatacttgattaaaccacaagggggtggcaacctggtaacgtgggcgacccttaatctgcaacaacttgtggccttaccgcttcagccgtgccaaatgccaatgatgatgccaggtatgatgccaccgatgacaatgatgccgatgccgaatatgatgccatcgatgatggtgccgactatgatgtcaccaataacgatagctagtatgatgccaccgatgatgatgccaaacatggtttcaccaatgatgatgccgag

SEQ ID NO: 291622 - DNA, 441 bp, Zea mays
cctgtatcggcgctctccaccgccccggccccttcctccaccagcgcgccgccggctgggtccacttcctcgcgccgcacaggaagacccgaccgccccccgcgatgagctggcttgggaagctgggcctgagcgggcttggaggcagcccgcgcgcgtcggaggcgtcggcagcgctggcgcaggggcccgacgaggaccagcccgcgccggggaacgagttcgcgcaattcggcgccggctgcttctggggcgtggagctcgcgttccagcgcgtgccgggagtcacccgcacggaggtcggctacagccagggcaacatccacgatccgacctacgaggacgtctgcaccggcaccacataccacaacgaggtcgtccgcgtgcagtacgacccggccgcctgcaagtacgacgacctactcgacaccttctgggcgc

SEQ ID NO: 291623 - DNA, 443 bp, Zea mays
cccacgcgtccggcttgaagtccaaggatgatgtccgtggattagttttagaggtagcgggggaatatgattctgaaggtagcatcactgatgatgatattgatactgaggaacatgaagataaaactgttcgtggagcagaaaatggtgctgctgatggtgataatgctagtaatggagctgaagttgaaagccagagttctttgccggataacaaagttcgagtgttatggcttgatgatagtgaaaaaacagaagacattgatgaggtagttgttgttgatagaagtttccttcatggtgatttagttgcctctgcctcagatccaactggtcagatggggcttgttttggatgtcaatcttgtggttgatttgcaaggtgtgaatggcgatatgataaagggtgtttcttccaaggatttgagacgaatcaaggaattc

SEQ ID NO: 291624 - DNA, 443 bp, Zea mays
agccttccgcaaggaccctttcttggaactcgcccttttgctttaaccacattgccctcgtcggcggggccgaccagctgccgccgcgtccagcaaaacaaccggccgtaggtccaaaatagttccccatggcgtccatatcgtcgcttccctttgcgccgctgcgcggagccgccgagtggaggccgtcgtcgacggcgccggccgtctccggcgccgtcgtgctcagcgcgaggtctcggcggggctcgggctcgggctcgggctcggtggtgcgctgcgtcgccacggcgagtgatgtcccacctactgttggagaaacaaagttgaacttccttaagtcatacaaacgcccaatcccaagcatttacagtacggtcttacaagaacttctggtacagcaacacctgatgagatacaaaagaacctatcagtatgatgct

SEQ ID NO: 291625 - DNA, 420 bp, Zea mays
gggtccggaagcgccggcagccagcaccagcgagcgtcgtcgtccctgctgatcaccgggggcgttcgagggaaagcgaagctgacaccgcccctcccgcgcgggttctacggcaacggcttcgtcttcgtggaggcggagctgtgcggggcgacgcgctcgctcggtggcacggtcgagctcgtgcagaaggccaagcgcggcatgacggaggagtacgtgaagtcgatggtggatctgttctcgctcggcggggcgccgccgtacgcgcaggggtggacgttcgtggtgtccgacataacgcggatcggggaggacgagttggacctggggtgggcggagcgggtggccggcggcgtgcccattgtcggaaacgacgacgcgaccaagatggttagctaccagatgaggtgcaagaac

SEQ ID NO: 291626 - DNA, 208 bp, Zea mays
cttcggtggtgccaaatctgggtgtatttggtattattaaccagaaaaccattggtggattagcgagggtatcaagaaaaggcctgaatcttctggcactaatcctgcattgcattcaaaccatttatatcttgcaacaacctctaccgattgtaaattccaaatggtctctacctttattaaaggtgtaaaccccaagggatcacca

SEQ ID NO: 291627 - DNA, 295 bp, Zea mays
cacacgcgtacgaagttgcttattgcctccacatacataaacttatctggtcagtcatgcctcaactttgagtatctggtctcacgcaagaagtatgtgatttcaatagatgacaattgcctaccagctaacgacactgatgtgtcgactgttgatgtatctgcacagcacatgtccaatctgaaatcacgtgctacacatttctttttcaacacactctatgatccatacaggaaaggtgctgactttgtccgttgttacacattcagcctgtgcgaggtggttgagtgcatgc

SEQ ID NO: 291628 - DNA, 146 bp, Zea mays
agccttcggccaagccttcggaatgatgtgttggtggtggtgcccttttttaaaatgcttaatagggggaattcaataattaaggtttttggatgatgtatgtggcccacccgaaattagaagttacattttcagattttaatggg

SEQ ID NO: 291629 - DNA, 411 bp, Zea mays
cccacgcgtccgcccacgcgtccgcccacgcgtccgcggacgcgtgggcgagggcaagttgcacccgcaacaaccgggttaacaagcctaaccggaccctggccattctggttccttggcggcggcggcggcggcggcggccggccggtggcggttggctttgggacccggcaagccagggcccggcttccggggacccggcggccgaagaggggagaggaccatatgaacgcggagaggaagaacgtggggggcgcgcgaaaagagggccccggcgacactctcgccgggggagagcgtattgcgcgggctcacactctgcgggtcctacagcgtatcgaggtgaacgacggcgtgggcatgaggttcgtgtcgttgttcgccgagatgttccagaagatctggtggatc

SEQ ID NO: 291630 - DNA, 329 bp, Zea mays
ggaccgtggcgaccgtggcgacctggttcagaacacacctacgggccactacacgactacacaaggctaccaaatttatccttttgcgctcttgcccttttggagcgcacaagcgtcattattccccaatgctcacttgctctaggccattattcacagtctccctcagtcttcaaggcttcgaacacccactggcaagcctacaggctacaacagcgcttgcggcagcgtttacaacaaccaattgccaattcacaacaatctggacatctaaccatacaaaccatcgacgcacagcacacaatttctaccagcctaaccaactagct

SEQ ID NO: 291631 - DNA, 420 bp, Zea mays
  unsure (1)..(420): unsure at all n locations
gccagttaacttccaattactggggtttccacgtttaaggttgctcctatgaaggctgcaagtaacttcaataagatccaatgtttctgctttgaggagcaaacacttcttcctggagaacagattgacatgccagtattcttctatatcgatcctgagtttgagacagaccccaaaatggacggngtgaacaatatcgttctttcgtatacattcttcaaggtgaacgatagttaggaaacgtgccaacagcattgttgtattaggaaaacaacacttgaacaatccatatgcagatatgctgcggaatagcatctcatgtaacaccaagagttttttttggtagttagctcacgttagtctgtggagaattttgcaaaaaaaaaaaaaaaaaaaaaaaaaactagaaaaaaagggcgg

SEQ ID NO: 291632 - DNA, 275 bp, Zea mays
ggctctgttagcctaccatggctgatcaccaccggggtgcgacgggaggtggcgggggctacggcgacctacagcgcgggggcggcatgcacggcgaggcgcagcatcagcagaagcagggcgccatgatgacggcgctcaaggccgagacggtcgcgaccttctgcgggtcgatgctggtgctgtccgggctgatcctggccggcaccgtgatcgcgctcacggtggccactcccatgctggtgatcttcagcccggtgctggtgccggccggc

SEQ ID NO: 291633 - DNA, 406 bp, Zea mays
ccgctcctccgcgagggtgtcgttgtcccgcaagaccctgtgttgttgtcatcaactgagagagaaacaactcgatcgatcgatcaagaagaccggcgaggctctagctccagaccgacaatgccgtacgcagccacaaggacgtcgccgcagcagcacagccgcgtggccagcaacgggagggccgtggcggcgtgcgcaggccacgcgggcgtgccggacgaggtggcgcggcaccacgaagcacgcggtggccgcggggcagtgctgctctgtgatggtgcagtccatcgcggcgccggcggacgcggtgtggtcgctggtgcgccgcttcgaccagccgcaggggtacaagcgcttcatcaggagctgccacctggtggacggcgacggcgtcgaggtgggg

SEQ ID NO: 291634 - DNA, 436 bp, Zea mays
cggacgcgtgggattaagcagaacctttacctttttatgtttatcatgtagcaacaatgagtatttttatccatttattaggttgataacctgagaaatcgctgtgagcttcaagaacttgagcttcaaaaatcagcaaaaaaagtactagaggccatgacactggttgccgaagaatctgcaaaatccaaagctgcaaaagaagttataaaatctttaaccgctcagctcaaggatatggctgagagattaccaccagaccacggggcctataatgtcaatgagacaaagcaatcacataatccgaatggcattgactcacatgctgctagctactctagcatgaatggaattcaccagacacggaatgagttgctcaatgcttcaattgcacatagtctgaactctggacgaccatcgtcgcattgcaatggaa

SEQ ID NO: 291635 - DNA, 426 bp, Zea mays
acgcgcacgcgtccgcccacgcgtccggcgccgacgcttcccaattccttccaatcggcacgctcggcgtcctcgtgtgcaatccccagctctcctcgcccctccctcccaaactccagcggccccccctgaccaagctccggggacggatggacggaggagccggctttccgggcacgcagccggtctcccgctcgccggaggacgtcttccgggactaccgcgcgcgccaggccggcctgatcagggcgctcaccaccgatgtggagaagttctacgtgatgtgcgacccagagaaggagaacttatgtttatatggacttcctaatgagacatgggaaataaacttgcctgctgaagaggtccctcctgaactgccagagccagctcttggaattaattttgctcgtgatgggatggatgaaa

SEQ ID NO: 291636 - DNA, 263 bp, Zea mays
aaaaaaaaaacataaaaagcacaataatatataacaagaaaaacaaacaaaatattgggaggtcacatactcattgatatgtctgcaaatgctgctactgcgaccattttaccgcaatgctcacaagctcctataacttcatttcttccccaaaaccccttaccagccctatcttaataatgtgaaaacccatttctacaaccctacatgatccaatatgcaatctgaccttacatcttacctttatcaacctttgttcttca

SEQ ID NO: 291637 - DNA, 363 bp, Zea mays
cccgagggctgcggctaccagttccagatgcagtacggctccatcgggtggtcggtcggcgcgacgctcgggtacgcccaggcggccaaggacaagcgtgtcatcgcgtgcatcggcgacggaagcttccaggtgacggcgcaggacgtgtccacgatgctccggtgcgggcagaagagcatcatcttcctcatcaacaacggcggctacaccatcgaggtggagatccacgatggcccgtacaacgtgatcaagaactgggactacacgggcctggtcaacgccatccataactccgagggcaactgctggaccatgaaggttcggacggaagagcagctcaaggaagccatcgccatggcg

SEQ ID NO: 291638 - DNA, 440 bp, Zea mays
cgttcttcggcttcattgtcacaaggttcgagttcgtcaccgtctagtacgactgtgcgagggaggaagaggcgaggagaagatgcagatcttcgtgaagaccctgacggggaagaccatcaccctcgaggtggagagcagcgacaccgtcgacaacgtcaaggccaaaatccaggacaaggaagggattcccccagatcaacagcgactgatattcgctggcaagcagctggaggatggacgcacgctggctgactacaacatccaaaaggagtcaactcttcatttggtccttaggctgaggggtggaaccatgatcaaggtcaaaactcttactgttatagagatcgattatgacttttatcttacttgatttatttactgatcattggattctttttaatataatgtttgttatttttcttatttttatatttttt

SEQ ID NO: 291639 - DNA, 290 bp, Zea mays
cgtccgattcccggtcgcccacgcgtcgcccacgcgtcgccacgcgtcgccacgcgtcgggacctgggtgagcgggggaaacacactagcgaagcgcatacacgacctaacaacaatggcttacaagacattatccctcttgccttttgccttttggagtgcaacaaatgcgttattattccaaagctcactgctcagtgccattattccacagtctcctccagttcttaatgggcttcgaacacccactgtgcaagcctataggctacaacagcgcttgctgcagcgtt

SEQ ID NO: 291640 - DNA, 302 bp, Zea mays
cgttctcgtcatgtacctacctcttttttacaacaactcctccaacatacagaagcagctttaattcaactatctgtaaccaacccttttacctacttacaacaatatattccattcaaccaactttctacactaaacccttctacttattttcaacaacaacaactactaccattcaaccatctatctatcttctactctcatcatcaacaatttcttacatttaaccaatttaccttacttaacccctttgcttattttcatcatcaaatactactaccaattttccatcataactacaa

SEQ ID NO: 291641 - DNA, 416 bp, Zea mays
tagaactaacttatcgtaaaaaagattaagaaaaaaagaacccatgactgcggggtgcctgttttccaacaagttgtcacttccttgagctgaaccatgttgaataaaggaaccaagcgatccacaatggagaaatgacaacaagatatgccaagataaatgtaactggctcgttcgacaaaccacaactatatttgttggattccatcacatcacgtataaaacattgggccttgtaatgaaacttccgtgccaatgagatgaaaatgcctacctacaacagcaacaactgctttcatgtagccctctcgttgtgggtaatgcacctacatacctgcaacaacaattgctgcaacagattgtaccagctctgactcatctagctgtggcaaaccctgctgtctacttgcaacaac

SEQ ID NO: 291642 - DNA, 151 bp, Zea mays
atcgtcctccactccaaggagatctgcatgtctgtcatcctcatccgacacaacgtgagtttccttcgatacctccgcaaccttatgaacaccaacccgttccactcgcccatccactttcactccccctccaatatccttcatcacacca

SEQ ID NO: 291643 - DNA, 405 bp, Zea mays
gccgccgccaccgaagcggcctcccaggtaagcaggatcgtccagcccgccgccgccaggaagcgcaatccccgcgtcacgagctcccgccggaagtgccgcaaggcgcactttacggccccgtcctccgtccgccgtgttctcatgtccgccgggctgtcgacggagctccgccacaagtacaacgtgcgctccatcccgatccgcaaggacgactaggtgcaggtcgtgcgcggcacctacatgggccgtgaggggaaggtggtgcaggtgtatcttcgtcgctttgttatacatgacgagcgggtcacttttgttattttttatcttttcatttttatcttttattttttctacttcttttttattttttatttctttttttttttttatgtttttttattt

SEQ ID NO: 291644 - DNA, 374 bp, Zea mays
atcacgcgtacctggaatcgccatctacagacccgcatccagggcatttccatactacagcgagcgagctttacatatcatatccaaaatcacctacgcgttcaagatacattggttctacatcatcaccacccctaaccccgtgttcagccacctggctgggaatacttccgtctggaacgccatatttcctgatgtgctgcaggcattcttcaacaccactcctgagatggataaactgttccgcttcaagatgctcgactcgtagatctttttcgcgcctttcagcttcaactgaaacaccagctcttcaatactttttatatgagatcgttcttgattgttgtcaatgtcattgatattaataattaaat

SEQ ID NO: 291645 - DNA, 255 bp, Zea mays
  unsure (1)..(255): unsure at all n locations
gatcagcaaagcggcagtgcgtagagaggatcgtcgaacagaacacatgaaatgggatcgntctcgtcgtgtgcctggctctgtcagctgccagcgcctctgcaatgcagatgccctgcccctgcgcggggctgcagggcttgtacggcgctggcgccggcctgacgacgatgatgggcgccggcgggctgtacccttacgcggagtgcctgaagcacgctcagttcatccagacagcggcggctacttactact

SEQ ID NO: 291646 - DNA, 396 bp, Zea mays
caaaaaaaaaaataaaaaaaactaaaattaaaaaacaaaaacaaaaaaaaatagaaaagctacattttcaaaattaaaacaatctccaactgcttataccaataccattttcccacaatgctcacaaactcctataacttcccttcttcccccatacctctcaccatctgtatcttctatatgttaaaacccaattcttaaaccctatacgatccaacatgcaatctcatctttcatcttacctttatcaccctttttccttcaacaatcatcaaccctattacaacatttacctttggttcatttattgtcacaaaacatcatatcacaacaactacaacatactgttctatcaaacctttctttataatcttaacatcaatattttctttctat

SEQ ID NO: 291647 - DNA, 296 bp, Zea mays
gcagactacaacatccaaaatgagagctccctccaccttgtgctccgtctcgggggtggtcagtaagtcatgtgtcgtttaagctgccaatgtgcctgcgtcgtctggtgccctctctccatatggaggttgtcaaagtatctgctgttcgtgtcatgagttgcgttaacattggattaattatggatcgcttgtcttgtctgtgcgtactacccaggactatcactattcatgattcaagcttatgtatgcattcataccacgtgctcaatcttctatagtgtgacctaacttta

SEQ ID NO: 291648 - DNA, 419 bp, Zea mays
cgaagctaaaccaggcatcgcttttgtggagttcgaggacgacggccagtccgggggggcgatgcaggctctccaaggcttcaagatcaccccggagaaccccatggctatatcctatgccaaaaaatgagaaccctaggggactctgtaccggctttgtttcggtactctagtattgatcccaaatccacgtgtgctgaggtggattgtggtgtaaattagtttaagttacaccctaatctacctcaatacatgtagattgagctcaatactagagtatccaaactagacctaagatctttccgctccgcctttagaaatcgagccacggtacccactttccagtcatgtgtttttggaaagcactcgcttgatttcgaaattaaactcttaacacttttaaatcaaggtttggccct

SEQ ID NO: 291649 - DNA, 366 bp, Zea mays
cggacgcgtggggccactaccctacttaaccgccccggcctcagcctcatccggggccgcacccatgcccgtgccaacagccgcatccaagcccgtgccagctgcagggaacctgcggcgtaggcagcaccaagatcctgggccagtgcgtcgagtttctgaggcatctctacaatcgatccgaaatccactactgctcacctgaattccagtctaaattactgtaagttacaccgttaattacctcaatacatgtagattgatctcaatactagagtatccaaactatacctaagaggtgggcgttcctcctttataaatctagccacgtaactcactttttcagtcatgtgtttttggaaagca

SEQ ID NO: 291650 - DNA, 294 bp, Zea mays
cccacgcgtccggaagggccagacgtgtccttccctcaacatcctcatcaaggttagggcgaagacaagggattcaaccgccataagcttgatgaggatgttgagggaagggccagacgtgtccttgagagcacctcctctggcgccaccaatgacaggcgccttgtagaggctcagaacgttttggtccaagggtcctggcatgcacttaaactccagtcttaatgtacttatggtccgaccatggtggcatgctcttcaaatggctctacacacgctagagactcatgataa

SEQ ID NO: 291651 - DNA, 189 bp, Zea mays
caaattcgttccgtccaggcaaggaagtaatctagcagccaaggagaggagaagatggcgcgggctaagcaaaccggccgcaagtccaccggaagcaaggccccgcgcaagcaacttggcaccaaagccgccaggaaatccgcgccgaccaccggccgcgttaaaaaaccccacaagtacaagccccgg

SEQ ID NO: 291652 - DNA, 262 bp, Zea mays
taaagttggaatcctttatctttcaacagcatcaacaatggccgaccagggaatgtttccactccttatgttcgcttgctcttatctgcatgtgattgctatactctacaatttttccctcaatgcttcacaatcctcctatatctttcccttcttctctccatacctttccatcaattatagctacatgtattacaaaacccaactcttcatccctatagtctccaacatgcaatcttatcatgcaacatacctttatcac

SEQ ID NO: 291653 - DNA, 375 bp, Zea mays
gagaccaacaagcaacatagatagtgttatacagcatcaacaattgagcaacgatgggggccaagatatcttccatcctaatgctccttgctctgtctacatgtgttgctaactcgaccatctttcctgaatactcacaaactactatatctacaattctttcagcatatattgcatcaatgtccacttcaatatgataatacatagccatacaaccatacacgctgcatcaagctttctcaacttgtacattacctatatcatgcctaacgtcataacaatcatcaaccgtatggagcttgccgtcattaacataaacgataacgacgcacaatctggaggaactcgtgctagcagtgatcatccatacagctg

SEQ ID NO: 291654 - DNA, 208 bp, Zea mays
aagtactttaattgctgcaaagaagtgtttaatctcaaattaccatgcaacattttaagtccggatttaatagtattatcgctggtttggagaagaaaaatagggtcattagcatactgcatcgccttactgtaacttaccatgaatctttacatgcattttctgtattttactaggaacatgctgtgcctcttctaaaaattacaaa

SEQ ID NO: 291655 - DNA, 382 bp, Zea mays
tatggcagcatggacgctaaattctacatacgacccgcactccaaattcgcctgctcaggtatcaccatccatcccgctagctactgcctactctcatcaacaacaacttcttccatttaaccaattgtccgcacttaaccccgctgcttatttgcatcatcaaatactactaccatttatccagctagctgcatcaagccgttcttccttctttacacatcatcagttgctgcctttctaccatcagttttcggctaacccctcaaccctcttacaactacaacaattgtttccctttgtccaactttcttttacaatacccatattcttctaccaacaacacattattttttattcccttatttatatttcttattattt

SEQ ID NO: 291656 - DNA, 269 bp, Zea mays
cccacgcgtccgcccacgcgtccgcggacgcgtgggcgcacagccttcgaggtggcttgcatctcgctcgtgggtcgatctcactgagccctcgacgctcttctctccacttcctgcgttctccatcctccttcttcgctgataggctacgccgcttgctagcctgcgcgcgccgcagcctaaccctgtgtgcaccctgttcctaaccctgcgtgtgtccaccgtcgactggcttgcgtgcgcctccacatgcgtctaacactgctagc

SEQ ID NO: 291657 - DNA, 266 bp, Zea mays
caaaggctttggcagaatcgtaaggctactcgccagattacccctgcagagctacaaggtcgaactcatactctgaaactactcgatcatcagaatcatatacatgacctatatgatcaagtatgacactgtacactgacagtgaatataccaacatgtctaggtgattgactcatatacctttatatcctatgagaaggaccttattgagctttacagccataactctgacgatatctcatgaaaaccgacatgcgctgaatatt

SEQ ID NO: 291658 - DNA, 431 bp, Zea mays
accggtgcggagacccacgcgtgcgattccactctgcccgagcaagccgaattgtcgtccgaattcgctcgcggggagcacttgctacctcgcgcccgccttctgtcgcgcggattcgttgctgcgcctggagatggacccgatggacatcgtcggcaagtccaaggaggacgtctccctccccaaatagttgtttaaaatcttctactgctgattgaactttctgctttgcactttagcaacaatgtttaagataattaaggagatgcttcctcctgatgtacgagtggcaagagatgcacaggatcttcttgttgaatgctgtgtagagttcatcaatctcctttcgtctgaatcgaatgaagtgtgcagcagagaagagaaaaaaacgattgctcctgagcatgttatcaaggctctaagtgatcttg

SEQ ID NO: 291659 - DNA, 418 bp, Zea mays
attcatagacacaccacgcgaaacacattagcaacaacctaacaacaatggctaccaagagattatccctacttgtgcttcttgcgctttatgagagcgcaacaaatgcgttcattattccacaatgctcacttgctacaagttccataattacacagtatctcccaccaattacttcaatgggcttggaacacccagatatgcacgcctataggctccaacaagcaatcgccgctagcgtctaacaacagccaatttcccaggagcaacaacaatacttggctcatataacaatacaatccatctcatcgcatcagcatctacaatttctaccagcactgagccacctagccatggtgaaccctgtcggctacttgcaacagctgatgcttgcatcaaacccacttgctatggcaaa

SEQ ID NO: 291660 - DNA, 428 bp, Zea mays
gtctgtctactcgcctacctacgcggctcaaacctttcccccttctgccaattcccgcgggcgctccataccgtaacgcgacaccatgagggagtgcatttcgatccacatcggacaggccggtatccaggtcggaaacgcgtgctgagagctgtactgccttgagcatggcattcaggctgacggtcagatgcccggtgacaagaccattgggggaggtgatgatgctttcaacaccttcttcagtgagactggtgctgggaaacacgtgccccgagctgtttttgctgaccttgaacccactgtcatcgatgaggtgaggactggcacctaccgccagctcttccaccctgagcagctcatcagtgggaaagaagatgcagccaacaactttgcccgtggtcactacaccattggcaaggaagatg

SEQ ID NO: 291661 - DNA, 448 bp, Zea mays
gtcactcgcagctggcatcttaccctttttaacctttttccttccaccattatcaaccgggataccggcatttcccttgggtccattaattgccccaaaacataagggcacaacaactacaacaacttgtgctagcaaaccttgctgcctactctcagcaacagcagtttcttccattcaaccaactagctgcattgaactctgcttcttatttgcaacaacaacaactaccatttcagccagctatctgctgcctaccctcagcaatttcttccattcaaccaactgacagcattgaactctcctgcttatttacagcagcaacaactactaccattcagccagctagctggtgtgagccctgctaccttattgacacaaccacagttgttgccgttctaccagcacgctgcgcctaacgctggcaccctcttacaactgcaacaat

SEQ ID NO: 291662 - DNA, 420 bp, Zea mays
cccacgcgtccgcccacgcgtccgagttccagcagttcggatcctgcggcgtcggcagggtcggcagcccgttcctgggccagtgcgtccagttcctgaggcaccagtgcagtccggcggcgacgccctacggctcgtcacagtgccaggcgctgcagcagcagtgctgtcaccagatcatgcaggcggagccgctgcaccggtaccaggcgacatacggtgtggtcctgcagtgcttcctgcagcagcagccgcagggcgagctcgcggcgctgatggcggcccaggtagcgcagcatctgactgcgatgtgcggtctgcagctgcagcagccagatccctgcccttgcaacgcagctgccggcggtgtctactactgaagaaactatgtactgtagtaataatgtaatggaacccgtg

SEQ ID NO: 291663 - DNA, 408 bp, Zea mays
gagcacactaagcgaagcgcactagctcaacctaacaacaatggctaccaagatatggtccctccttgcgcttcttgcgctttttgcgagcgcaacaaatgcgtgcattatttcacaatgctcactagctgctagttccattattccacagttcataccaccagttacttcaatggccttcgaacacccagctgtgcaagcctataggctacaacaagcgattgcagcgagcgtcttacaacaaccaattgcccaattgcgacaacaatccttggcacatttaacaatgcaaaccatcggaacgcaacagcgacaacagttactaccagcactgatccacctagccatggtgaaccctgtcgcctacttgcaacagcatctgcttgcatccaacccacttgctctagc

SEQ ID NO: 291664 - DNA, 400 bp, Zea mays
ccgactcgtgcgctcactcttgctattttctacaaaccacaatagtcgaggatcaatggcaccaacgatatgctgcttactgatgctgatacctctctatcgaagtgctgcttatgcacacactctggaacggtgcttactaattcgcactgccttacaacatgactcatcactattacctcaagacagttaccaccgagaaggacgagatgattaccattgctggaaacaacggccagacgccgtcgtaaattgatgttcaactcccttaccagtacaacatccagcttgccaagaacatgacttgtatcaagatccttcggaatctcaaagcacattggttgacccacggacatccactaggacctctactacctcattaataatgtcattacgatta

SEQ ID NO: 291665 - DNA, 446 bp, Zea mays
  unsure (1)..(446): unsure at all n locations
cccggtcgaccagcgttcgcgagcgtncggcacgcgtccgccatgcgttcgttctatgtctgaatacctcatgggtgaagaggttccagatgctgatattgctgttgtccgtgtcaccatcttcagtcgaccctaatgccacttatatgtggatgtctttgactctagtgaagacttcatatacctaatgcacacacttgctgacttcgaagcagctacaaagcttctgacacttgcaaaggttacattctgttatgatgcgctacatggtggtgctggagcttatgccaaacacatctttgatgaaaaacttgatgctgactaaaagctaactgaccaattgtgatccagaacatgactttggaagtggtcatgcggatcctaaccttacctatgctcaagactcggttgaactgatacgtcttggaaagtcattctcaaatgtt

SEQ ID NO: 291666 - DNA, 431 bp, Zea mays
gcactgcatccgcaccgtgctgcgcgacgaggggcctagcgccttcttcgtttcctacgggacaaccgtggtcatgaacgcaccctacacggccgtccactttgccacctacgaggcggccaagcggatgctcggggacatggccgccgaggaggagtcccttgccgtacacgccactgctggggccgcagcaggggcacttgccgctgcggtcaccactcccctcgatgttgtgaagacgcagctacagtgccagggtgtgtgcggctgtgaacgcttctcaagcagctcaataggagacgtgtttagaacaatcataaagcgagatgggtattccgggctcatgaggggatggaagccaagaatgctgttccatgcacctgcagctgcaatatgttggtctacatacgaggccctaaaagtcatttttc

SEQ ID NO: 291667 - DNA, 414 bp, Zea mays
  unsure (1)..(414): unsure at all n locations
tcgctcagctagctgcggcaaaccctgctgtttacttacaacagttgcttacattcaaccaactggctgcgtgaaactctgctgcgtacctacaacagcgacaacagttacttaatccattggcagcggctaacccattggtcgctaccttgctgcagcagcaacaacaattgctgccatacaaccagttctatttgatgaaccctggcttgcagcatcccatcgtcggaggtgccatgctttaaattacatatgagatgtactcgacaatggtgccctcataccgacatgtgttgactagaaataatcaatatatcgatcgagatgcatctcgatcaataaaaagctttaggaaccccggtcggngtgtggtgggagttcggcaaggacggcgacacccacctactcggcgac

SEQ ID NO: 291668 - DNA, 442 bp, Zea mays
cccacgcgtccgcccacgcgttcgcccacgcgtccgcggacgcgtgggctattctgctgccctggtgctctccagtacatcagcggtgtgatcctcttcgaggagaccctgtaccagaagaccaaggatggcaagccttttgttgatgtcctcaaggagggaggcgtcctccctggcatcaaggttgacaagggcaccattgaggttgttggcactgataaggagaccaccacccaaggccatgacgaccttggcaagcgttgcgccaagtactacgaggcaggtgcccgctttgccaagtggcgcgctgttctcaagattggccctaatgagccatcacagcttgccatcgacctgaacgctcagggtctggctcgctatgccatcatctgccaggagaatggtctggtgccaattgttgagcctgagatccttgttgatg

SEQ ID NO: 291669 - DNA, 439 bp, Zea mays
cttacgtcttcgcattcatgttcccaatggggctcggtgctgcagcaagcatacgcgtgtccaacgagcttggtgcaggacggccacgcgaggcccgcctggcgactcgggtggtcatgctcctggccttctccctgggcgtctcggaaggccttgtcatggtgctggcgcgcagcctgctcggctacgcctacgccaacgacaagcaagtcgccttgtacacctctaggttgatgccgatcctcgccgcctccaccctgtttgactgcctccagtgcgtcctatcaggtgttgtcaggggctgtggccgacaaaagatgggccgccttatcaacgttgcggcattctacattgtcggcatccctgtagcgtccgttttcgccttcgttcgtcacctcggtggaatgggtctttggtttgggatcttgtgcggagtagc

SEQ ID NO: 291670 - DNA, 370 bp, Zea mays
tgtggccaaccagaaataagaagttacatttccagattttaatgtgaaaaaaaaaaaaaaaaaaaaaaaaaaaaaaaaaaaaaaaaaaaaaaaaaaaaaaaaaaaaaaaaaaaaaaaaaaaaaaaaaaaaaaaaaaaaaaaaaaaaaaaaaaaaaaaaaaaaaaaaaaaaaaaaaaaaaaaaaataaataaaaaaaaattactacaaaaatacccactgaaaaaaccacttgactacccatacaaaacaattagctgaataaaaccctttaaccagctaacgtaatagcaaatacaaccctaccatttgccctaaataacagaatgccaaaccaaatggccaatgggacaccccctgaatcgccgcatta

SEQ ID NO: 291671 - DNA, 444 bp, Zea mays
  unsure (1)..(444): unsure at all n locations
cagaaacacacctagcgaagcgcactatttacgacctatcaacaatggcttccaagacagtatccctcgttgcgcttcttgccctttttgtgagtgcaacaaatgcgttcattattccacaatgctcacttgctccgagtgccattattccacagttcctccctccagttacttcaatgggcttcgaacacccagctgtgcaagcctataggctacaacaagcgcttgcggcgagcgtcttagaacaaccaattgcccaattacaacaacaatccttggcacatctaaccatacaaaccatcgcaacgcagcagcaacaagcactgagccacctagccgtggtgaaccctatcgnctacttgcaacaacagctgcttgcattcaacccacttgctttggcaaacgtagcttgatacaacaacaaccacagttgcaacagtttct

SEQ ID NO: 291672 - DNA, 314 bp, Zea mays
ctcgaaccttctctgtcttttggccagttgcgtaaaccctaagtgcttggctaccgtgggccgtggcaaggtgatggcgatggacccggacgcggtggcgaaagccttgattgagcactactaccggacgttctacaccaaccatacggagctggtggggctgtatcaggagacctacatgctcaccttcgacggccagatgtccatggcccatccgtcattgccgtcaagctcggatctctttccttgacgtctgcgatcaccagatcgtcaccgtcgtctgacagtcgttggagccccatggaggcatgctc

SEQ ID NO: 291673 - DNA, 392 bp, Zea mays
ttgttggagccatttgctatagcgctcatgagttatatactcaacaacgacgtcatttggatgatgttcgggcagcgctaaaactactagccttcatgaacagagtcttatacctacaacagcaacaactgatttaatataaccactatagaagagggtaatgcacctacataccatgcaacaacaattgctgcaacagattgtaccagctctgactcagctagctgtggcaaaccctgctgcctacttgcaacagctgcttccattcaaccaactgactgtgtcgaactctgctgcgtacctacaacagcgacaacagttacttaatccactagcagtgcctaacccattggtcactgccttcctacagcagcaacaattgctaccataca

SEQ ID NO: 291674 - DNA, 441 bp, Zea mays
  unsure (1)..(441): unsure at all n locations
ggatctggcgtcgcccgggccggacggttgaccgctccaccgcggagcacctgttcgaggtgatcaactccagggaggacgtgctcaggcgcctcatccgccgctgcgcctacctcaagtacgtcgaggcgcggctcggagaccgcacgctgtatgccgacgagatactcaaggacggcttctgcctgaacatgatcgagacgccgctctgccctctcaaggtcgtcactaacctgcnagaggccgtctgggatgccgacatcgtcgtgaatggggtgccgtccaccgagacgagggaggtgtttgatgagatcagcgagtattggaaggagaggatcagtgtcccggtgataatttccctcgccaagggaattgaggcctcgttggatccaatacctcgtatcattacacctactcaaatgattagctctgcaactggag

SEQ ID NO: 291675 - DNA, 428 bp, Zea mays
cagagagcgccacagatctcgatcctgaagcttacgagcgagttcttacgtactcctcgcagtcagccatggcccgctgctactggcagtcgcagtcctccgtcggtggcggctgctatagctgccgttgttcccgcataccttccatcaatgatagcttcagtatgtgaaaacccagctcttcaaccctataggctccaacaagcaatcgcagcaagcaacatacctttatcacccttgtttcaacaatcgccagccctatctttggtgcagtcattggtacaaaccatcagggcacagcagctgcagcaactcgtgctacctgtgatcaaccaagtagctctggcaaacctttctccctactctcagcaacaacaatttcttacattcaaccaactgtctacattgaaccgtgctgcttatttgca

SEQ ID NO: 291676 - DNA, 419 bp, Zea mays
cccacgcgtccgcccacgcgtccgaaacaatcatatatgcttagaactgctttcatttcaaagtaacttatgtacatctgacaaaatgcaaactagctacatttctatactttgtatttgctttggtttgtgttggcatcagtcaccaaaaagggggagattgaaagggaaatggcctcaatcatttcctataatcgattttggtgtttgacgaccatcacaaaccttatggactaactagtttgcctagttgatcttttctcaggtgcataaagtttatatacacatataaggaaaatgacccttgggccaattctataagtatggggcaagtcaagattgcaccagcctgcatgcaccggactgtctgtgtgcaccggacagtgtccggtgcctaagctgtcgcacccaacgaatag

SEQ ID NO: 291677 - DNA, 363 bp, Zea mays
  unsure (1)..(363): unsure at all n locations
gagaaaccctagaatggacagactacatgtcgctcgccttcacacagcacgtaagagcatgtagacatcttagcatgcacagcaacggaaggcggtgaaattgacaattaattgactgcatatccacccacccatgcaatgcaatgcatacattcatgcgttcaggtgatcacggagacgctgcggatgggcaacatcatcaacgggatcatgcggaaggcggtgcgagacgtggaggtgagaggccacctggtccccaagggctggcgcgtcctcgtctacttccgcgccgtccacctcgacgccgccgtccacgacgacccgcacgccttcaacccctngaggtggaaggagaggcccgac

SEQ ID NO: 291678 - DNA, 315 bp, Zea mays
attcaaccaactaggttcattgaatggaagaatttatttgccacaacaacaactacggttcaggcagctaccttctgcttaccctcagcaattgctttcattcaaccaactagcagcattgaactctactgcttattaacagcaacaacaactactaccattcagccacttagctcgagtgagccctactacctacttgacacaaaccccttgtgaatgcagactactagcacactgtgattgatgataacaccctatttcaaatgcaccatttgttgacattaaccccattttttttgataaaaccagtacttt

SEQ ID NO: 291679 - DNA, 380 bp, Zea mays
gcgcacgcgtccgcaattgaaatgaaatgaaaaaagtattgttcattcacgtcatcgagcaaacggccaattgcaacaacaatgcttcgcacaactaaccctacaaaccattggaacgcaacaacctcaacaacagtgtttgccattaattatccacctaaccatggtgaaacctgtcacctacttgcaacagcagctgcttgcatccaacccacttgctcttgccaacgtagctgcataccaacaacaacaacagctgcaacagtttatgccaatgcttagtcaactagccatggtgaaccctgccgactacctacaactactttcatctagcccgctcactgtgggcaatgcacctacctacctacaacaacaattgc

SEQ ID NO: 291680 - DNA, 410 bp, Zea mays
gatgattatgacggcaacaccaatatcaactgggaagagtttattgctgtaacagtgcccctaaataaaacagaacacaaagaacacttgatggcggccttaacatatttcgacaaagatggaggtgattacatcactgtcgacgagcttcaaaaggcttcagtggaacacgagatgaaaaatgctttccttgaggacaccatttatcaggttgatcagaacaatgacggccagaccaactatggcgagttcgtcacaatgatgcagagcgacagctctgggcttgggtggcaaacaatggaaagcagcatgaacgtacccctggaggaggcacctgaagtttactgatgtctctgtcggtgcaaagatactgttctatttggctgctttcgtggtggttcgtcagtcac

SEQ ID NO: 291681 - DNA, 368 bp, Zea mays
gcgacgcgtgcgcccacgcgttcgcctacgcgtatgcccacgcgtgcgcccacgcgttcgcgggcgcgtgggcaagcccaaggctgcttgatcatagacctttgcaggtacatccaatagaacttttgaagttatgctatgccattggaatgattagtgagtgccgcagttagaatgatgtttaaagaagagctaccacttcagcagataatttgtgacttgcttgcattttttggaccgatttgttcgcgtattaataattttgcagtgacgatacttctgttgtgctgtttataagcttctgaaaaaaattaaaccccttagcaggaaccagcttgtaaactcatttttgcggcaaacaaaatcta

SEQ ID NO: 291682 - DNA, 283 bp, Zea mays
cgcggacgggcagctcgacccggtctttaaccccaagctctcctcctcctacgccgtcgtgccatgcaccagcgacacctgcgcccagctggacggccacagatgccacgaggacgacgatggagcgtgccagtacacctacaagtacagcgggcacggggtgacgaagggcaccctggccatagacaagctggccatcggaggcgacgttttccacgccgtggtcttcggctgcagcgactccagcgtcgggggccctgccgcgcaggcgtcggggctggtc

SEQ ID NO: 291683 - DNA, 421 bp, Zea mays
caaagacactgtgttaatttatgttcctgctgtcagatgctcaacaagaagcatacggtagcgcatacttggcacatctgaagtaggtgcagattggtgcataaaaggcatccaggacatcagtagttatagcatcctctcacatctgacgctttcaaaatgtcatctccccatagttagaacgaattcatctcaagactgtaggtcctctgcttgagaagcatcctcaccgctgtcctatacggctcctcgaatgcatccaacacccaggctgcaccagcagccccattccaaactgtgtcccctgttccttcctcacttggcttgatggccacaagcgttgcgccatttagcaccagccccccaggcagctcaatacatggtgcgtaccacagtcacatgctaagctctggcatgagcg

SEQ ID NO: 291684 - DNA, 146 bp, Zea mays
tgtgggcttctcctccccctccggtgcgggttcgtgttcgtgtgggtctgcggagttggggttcgtgggtcagcggatcgagaggtggagtatgcgatgttgagtaccgctgcctcgtagggtgactcgcctgggccacggacgac

SEQ ID NO: 291685 - DNA, 114 bp, Zea mays
agcacgcgtccgcgcaaattgcaccaagaaatccatcgagaggccatcgacaggggagtgagaggcgtcgtcgtctagcagcatgcctccggcggctcatcctcgcaaccgccg

SEQ ID NO: 291686 - DNA, 317 bp, Zea mays
agttgctgcacaaacaaaagctattgctgctaagatcaaggtctgtatcaacgtaggggttgcctattatccagtttagtctagggtaactggtaaagttgctcaccccagctcatgctcaggaagtgcacacctccctgaggtattggctaaatgccaatatcatccctgactgagctgcatctactattatcattttcttaagcagtgtaactactgataactgtaaagagctttcatcacattctgatgaagatgaataaatgccagaggagcttctttgaagcctgacttcatcgacatcatcaacgcggtca

SEQ ID NO: 291687 - DNA, 323 bp, Zea mays
ggaccaactagcagcatataatgcacaataatgtaccaacaaaggcagccaaaagaggttgccttcttatgctccttggactatctgcaagtgctgctacggcgaccattttatctcaatgctcacaagctcctatagcttccattattccaacgatcctatcatcaaagaaatattcaatatggtaaaatcccaatttttaactctacatgatatttcaagcattagcatcaagcatcttacctttatcactcctggttcgcttcaacaatcatcagccctattacagcagttacctttggtgcatttattggcacaaaaca

SEQ ID NO: 291688 - DNA, 323 bp, Zea mays
atgctgctcatgctggtcaagagttgattggcttgatattcagtgataaggaactgtgggttggaagagcacagaagatgtatgaaagagagatggagttgaaggagaaatttgtaatgaatgttcaagaggtagctgagaagttgcaaaacacatacttatatttgaagaacttataggtgaacatatttgatgataaattgcgtgagctctttgatgattatggtaatattacttttctgcaatgttatgctgaattctaatggggttatcagaggttctggatttgttgctttcaaatctgctgaatatgctaaccgagc

SEQ ID NO: 291689 - DNA, 325 bp, Zea mays
agcagctgtgcaagcctataggctacttcaagcgattgcgtagagcgtattacaacggcgaattgcccaattgcaacatcaagcagtggcacatctaacaatacaaaccatcgcatcgcaacagcaacaacagtgcctaccagcactgatccaaatgtgcaatggtgcccttgttgactaattgcagcgtgtgctgattggatacaactgacttgctagagcaaacgtagtttcaaaccagcaacaacaacaactgcaacagtttcggacagcgcttagtcaactagccatggtgaaccctgccgtctacctacaacagcaacaa

SEQ ID NO: 291690 - DNA, 323 bp, Zea mays
acgccaatcttctacatgcacaatcctgttaagaccatcaagtacaaatgttattggtaccgtgaacatgctgtgacttgcatagatagttggagctaggattttgttgacatcaacatatgaagtttatggtgatccacttgagcatgcttaaacttatgcctgattgtgcagtgttaacctaattgtaatcagtgattgttatgatgagtgtaagcgtgtttcagattcgatgatgtttcgactattacaggcagcatggtattgatattcgaattgccaggatattcaacacctatgggccaaggatgaacattgacgat

SEQ ID NO: 291691 - DNA, 322 bp, Zea mays
cagaaacacaccaagcgaagcgcactagcaacaacctatcagcaatggctaccaagagattatccataattgcgcttaatgcactttttgcgagcgcaacaaatgcgtccattatgaccacaatgctcacttgctcctagttccattattacacagttccattcaccagatacttaaatgacctaagaacactcaactgtgcaagccgataggctacaacaagcgagtgaagcgatcgtcttacaacaaccaattgcctaattgcaacaacaatccttggcgcatctaacaatacaaaccatcgcaacgcaacagcaacaac

SEQ ID NO: 291692 - DNA, 345 bp, Zea mays
ctggctttgacagacccatttgacttctaccaacaacacatcattggtggtgccctggtttagattgcttattagttgtaattcaataataaagttttttagaatctggaactgtaacttcttatatctgtttcaccacatacatcatccaaagattacaagatacatttccaaattctaacaaatttacaaactgggcgctcattatacagtatccaaacttacctacgcttgcatgcaactctataacttttctatagcttaacttatatcaaatacgctggccccgatagtacttcctcatgactgctaaaactttatcgatacccagcttcagcctcttac

SEQ ID NO: 291693 - DNA, 324 bp, Zea mays
gcaacatagaaagtggaatacagtagctacaatagagcaacaatggctgccaagatagggtccatccttatgctccttgctatatatgcatgtgttgctaacgcgaccatttttcctcaatactcacaagctcctatagctgcccttctttccctatacctatcattaatgaccgcttcaatatgtgaaaacccagcccttcaaccctacaggctccatcatgcatttgcaacaagcaacttacctttatcacccctgttattacaacaatcgccagccctatcgttggtgcagtcattggtacaaaccattagggcacaacag

SEQ ID NO: 291694 - DNA, 326 bp, Zea mays
tcgcccacgcgttcggatcagcaaagcggcagtgcgtagagaggatcgtcgaacagagcggcatgaagatggtcatcgatctagtcgtgtgcctggctctgtcagctgccagcgcctctgcaatgcagatgccctgcccctgcgcgaggctgcaagggtggtacagagctgactccgacctgacgacgatgatgggcgcctgcaggctgtacccctactcggaatacctgagtgagccacagagcatcatgctggcagcggagccctactacgccaggtgtgggcagccgagcgccatgttccagccgctccggcaacagtgctgt

SEQ ID NO: 291695 - DNA, 315 bp, Zea mays
ccacgcgtccgtccacgcgtccgcccacgcgtgcggcagcttctgcttgctctggggggaaggagagagagagagagcgagagagagatctagtagagaggctagtaggtggtccttgaacgaagatgttggcggtgttcagcgggcatgtggtggaggtgccggttgatctggtggctgagggcagtcggacgccgtcgtccaatacgaaggcgtggcatctggtggggcgctttctggccgtgtccgatccggccgtgttcgagcagatcggcgaccactatcacctcgcctactcccacaccaaccaggcgc

SEQ ID NO: 291696 - DNA, 321 bp, Zea mays
acgtggtatgcccgtaggagaagagcaagtggcggcgcctgtcgcgacgcgactaccggaccccgctggtcttccacgacggccagctcgcgtttctgccgacgccactcaacacggtggccatgttcacgtggcttcctctgggcgccgcgctagagatagtgcggctgtccgtagcgctagcgctgtcgtgcaaggtctgcacggagctgctggtgggcactggacagtcagggcgcctccgaggctcactcccgacgcctgggaacagcggcgggtccggacagctgtacgcgtgcaaccaccgtacgctgatcgacc

SEQ ID NO: 291697 - DNA, 139 bp, Zea mays
acgaagacatcgagtactccaagcgcgcttctaaggcagatgcaaagacaatgtccagggatgaaccaggcagagtcaaaattgaacctgttagctcaactaaattgcaaggccaagcagatcgcgtccacaagccata

SEQ ID NO: 291698 - DNA, 323 bp, Zea mays
atcgaagatgccgttgacggcgccatcagctggctggacagttaccagctggctgaggtggaggagttctatgacaagatgaaggagcttgaggggatctgcaaccccatcatcgctaatatgtaccagggcgagggcgcggtcatggagcgctgatattgatatatgatttgttgctccagatggtagtagcagttctggttccaatatcgaggaggaggattaagtaggttagtgttcgaggtttggtttagggaggtgtgaagagcctaaactctgatggttgtttgtgaggtgtggtcgcaatagctgcggcctgtggt

SEQ ID NO: 291699 - DNA, 266 bp, Zea mays
ggatcacgtatgaatggccagctcccacatctgaactagtctctatcatcatgcaatgcacatcagcaaagcggcagagcgtacagaggatcgtagaacagaacagcatgaagacggtcatcgctctcctcacgtgcctagctctgtcagctgccagctcctctgcaatgcagatgccctgcccctgcacggggctgcaaggcttggacggcgctggcgctcggctgaccacgatgatgggcgcctgctggctgtacccctacgcg

SEQ ID NO: 291700 - DNA, 432 bp, Zea mays
  unsure (1)..(432): unsure at all n locations
acgggcncnagccaggaggcgggtcaggttacggtcaccgncaagactgctccagccaagggagggccacaagggtccgactcgtgatgcaccaggccaagacaccgaacagatcgacggagtacttgtcctctccatcgagaagctccaggagatacaggacgagctcgagaaggtaaatgaggaagcaagtgacaaggttatggaggtggagcagaaatacagtgagatccgcagacctgtctatctcaagaggggtgacattatcaagaccatcccggacttttggctcacagcgtttatgagccatcctctattaagtgagcttctgactgaagaaggaccagagatattcaagtacttagactccattgatgtggatgattctgatgttaaggcaggatactccattcatcttaacttctctgagaa

SEQ ID NO: 291701 - DNA, 412 bp, Zea mays
cccacgcgtccgatggtcggcaacgccatgaccgtcaccggcgtcaccatgaagaagctccgggaggacgtcaagatccagaggaacctggtggagacggcgctggcgctgggcgcgacgccgcggcaggcgacgctgcagcaggtgaagcggtcgctggtcatcgcgctgtccccggtgatcgacagcgccaagacggtggggctcatcgcgctgccgggcgccatgacggggctcatcatgggcggcgcgtcgccgcttgaggccatccagctgcagatcgtcgtcatgaacatgctcatgggcgcctccaccgtcagcagcatcctctccacctacctctgctggccggccttcttcaccaaggccttccagctcgacgacagggtctttgcagactaagatacctgct

SEQ ID NO: 291702 - DNA, 348 bp, Zea mays
  unsure (1)..(348): unsure at all n locations
gcgccgttatgataatttacatcatcaactttaaccattcacccagctagctcgggccggctctcagcaacaacaacttcttccatttaaccaattggccgcactgaaccccgctgcttatatgcagaagcaaatactactaccatttaaccagctagctgcagcaaaccgtgctttcttcttgacacagcaacagttgctgcctttctaccagcagtttgcggctaaccccgcaacccttttacaactacaacaattgttgccctttgtccaacttgctttgacagacccaacggnctcctaccaacaacacatcattggtggtgccctcttttagattgcttatta

SEQ ID NO: 291703 - DNA, 460 bp, Zea mays
  unsure (1)..(460): unsure at all n locations
taccgatccggagttccaaccaagccgtccgtggaaaacccagttcttaaaccttataggctccaacaggcaatcgcagcaggcaccgtacgttaataaccctggtttcaacaatcgccagccctatctttggtgcagtcattggtacaaaccatcagggcacagcagctgcagcaactcgtgctacctgtgatcaaccaagtagctctggcaaacctttctccctactctcagcaacaacaatttcttccattcaaccaactgtctacattgaaccgtgctgcttatttgcagcaacaactattaccattcagccagctagctactgcctactctcagcaacaacaacttcttccatttaaccaattggccgcactgaaccccgctgcttatttgcagcagcaaatactactaccatttagccagctagctgcagcaagccgtgcttncttcttgacac

SEQ ID NO: 291704 - DNA, 261 bp, Zea mays
cccatttcgacccatgcgtacggcgaacatacaaagcacattagtgtactaacattttcagccaaaatattttgcttccgtatggtccttgatctttctgcaagtgctgctaccgcaaccattttaccacaatgctcacaagctcctatagcttcctttctttccccatacctatcaccatcggtgtcttcagtttgtgcaaaccctattctttaaccctacagcatccaacaggctttttgtagcacgcatattaccttt

SEQ ID NO: 291705 - DNA, 393 bp, Zea mays
  unsure (1)..(393): unsure at all n locations
cccacccttccgccaacccttcggccaagccttccggccaattggacccagaaattggttcaaaaggccgtcaccgggggaattaatggcgtcctcgtctagcagcagccaccgncgnctcatcctcgcagccgccgtcctgctctccgtgctcgcggctgccagcgccagcgccgggacctcctgcgtgccggggtgggccatcccgcacaacccgctcccgagctgccgctggtacgtgaccagccggacctgcggcatcgggccgcgcctcccgtggccggagctgaagaggagatgctgccgggagctggcggacatcccggcgtactgccggtgcacggcgctgagcatcctcatggacggcgcgatcccgccgggcccggacgcgca

SEQ ID NO: 291706 - DNA, 218 bp, Zea mays
cccacgcgtccgcccacgcgtccgcccacgcgtccgagaggtcacacatatcagcatgagaactttattattacagtataaatcataaaaaatctagcagagtatttagtgttagattattgtagaaattacgatttagacttgtttctaaatgaataattgtatatataattagaagatcatgatcggttgagaaaaaaattggtggtattggaact

SEQ ID NO: 291707 - DNA, 345 bp, Zea mays
gcgacgagcgcgtcacatcagccaattgaggagttacaagaacattcattggggcaggtaaccatacaagagatagcaacgcatcaattacaacaatctagaccagcactgagccaactagctgtgaagaaccatggcgtctactggcaacaggagctgatcgcatgcaaccaactagctctggctaacatagtggcataccagcaacaccaacagtcgcaacagcattctaccagcgctcagccaactagccatggtgaaccctgacgtctacctacgacagctacaactgagttaatgtagcacctataggtgagggtaacgcacctacatacctgcagcaac

SEQ ID NO: 291708 - DNA, 420 bp, Zea mays
cccacgcgtccgcaagatctcacagggcggcctgcagagaatctatgagaagtacaggtggaagctctactccgagaggctgatgaccctgaccggcgtgtacgggttctggaagtacgtgagcaacctggagaggcgcgagacccgccgctacatcgagatgttctacgccctgaagtaccgtagcctggcaagccaggttccgctgtccttcgattagtacggggaaagaaggagaagaagaagaagaagcccaggccggagaaccatcgcctgcatttcgatctgtttcaccgcaattcgcattgttagtcgtgtattggagttatgtgtacttggtttccaagaactttggttccttgtttttttttctttcttgtttgagcgtttttgggcagcgctggcctggttcctagtatg

SEQ ID NO: 291709 - DNA, 402 bp, Zea mays
  unsure (1)..(402): unsure at all n locations
aagaaaagaagaaggaggaagattggttctgatttaaatcttggtagaactgaccatacaacatgtctatgaatcaatcaatttgttttgcaggcgtacatggtcggcgagcacggcgacagctcggtggcggtgtggtcgagcgtgagcgtggcggggatgccggtgctcaagtcgctgcaggagagccaccgctgcttcgacgaggaggcgctggagggcatccgccgcgccgtcgtcgacagcgcctacgaggtcatcagcctcaagggctacacctcctgggccatcggctactccgtcgccagcctcgccgcgtcgctgctccgggaccagcgccgcatccaaccggtctccgtnctcgccagggggttccacggcatccccgacgggaacgacgtc

SEQ ID NO: 291710 - DNA, 414 bp, Zea mays
accaggtgatctcaagtaattaacagaaaatatattccatcattgaaaatgagttccgttgttttgggtgctactggtagggagaataagacatcatggcctgaggtggtgggcatgtccatcaaggaggcaagagagatcattcttaaagacatgcccaacgctaacattcaagttctaccggttggctcgcttgtgacccaagactttcgccctgatcgtgttcgcatcttcgttgatattgttgcctagactccaacagttggctgacaaggatatgccttatctataggccaaataaacaaagcctacttttatgtatcatggctaataaatcctacatttcttggttaaaaaaaaagaaaaaaatataaaataaaaaaagaaaaaaaaaatataaaaaaaataaaaata

SEQ ID NO: 291711 - DNA, 367 bp, Zea mays
  unsure (1)..(367): unsure at all n locations
gggatagcagccaagatactttgaaggtttgacaatcgccttggtcactaggatccgtcttggttgtcaaaccttcaaagtatgtgggatagcagccaagatggatgttaacgaccatgccgatcaccaaggctccaaagccagtggaatgccaaccaagacagatgctaatgatcaatgcagcaaccaaggttttgttacatgtccctttaagacagctgagaggttagatcatcttctgaaccaaccagcaaacagatactgtgctgattgtggtgctccagatccaaaatgggtgtcaatgactnttggtgttttcatttgcatcaagtgttcaggagctcatagaagtcttggagtacacata

SEQ ID NO: 291712 - DNA, 318 bp, Zea mays
  unsure (1)..(318): unsure at all n locations
gacagcaagcggatgcgtgaggacgcgacaacactgaagatggcatgtctgcggtgcctggctctgcactgcacgcttgaatgcaacctgcccctgccgggctgaggctgacggctgcccgctgacacatatgcccgcgctgtccctccgagcctgagagcgatgacccgtgcgcgcccctataccggtgggcaccacccagtcaacgttcgcacagtgctgcagcagcgatgaggatgatggacgtgcagtccgtggcgcaccagctgcagatgatgatgcagcttgagcgtgccgctgccgncagcagcagcctgt

SEQ ID NO: 291713 - DNA, 296 bp, Zea mays
acgctcacacgtccggtgctgctgcgcttattggacctgctcgagcggcacgcatagggggtggtgacgctgtatacgtgggacaaccgcatgatctggtcatgcctattggccgatgtccccatggtgtcttcgatgcgtgcggtactacaccggttgggctgactagatccactgcctgattgcaccagtcgacggcgcgcaccacgttcttgtgctgcactagccggtcggaattgtcttacagatcatcccctggatcttacatcttctaatgttcgactcgaaggtcattc

SEQ ID NO: 291714 - DNA, 431 bp, Zea mays
cccacgcgtccgtcattacatacacatatatatggggcctcagcaagacgggcggtcgtccggggcgaacggcggcacggcggcgaggcgcaaggaggccgccgcgaagccggtggtgcggtaccgcgagtgccagcgcaaccacgcggcgtccgtctgcgggcacgccgtggacgggtgccgcgagttcatggcgtccagcgcggagggcacggcggcggcgctcacgtgcgccgcctgcgggtgccaccgcagcttacacaggcgctaggttgcgacggcgacggagacggtcgccgactgccgtgaccgcgcctacaccacctgcgggtgaactcgacgaagagtcgtgatgtgcattggtggaatggttgtttacagtggttgttcttggatgatttttgagtggatttttattgcgtgtgctatat

SEQ ID NO: 291715 - DNA, 341 bp, Zea mays
gcaaattgcaccaagaaatccattgagaggccgccgacaggggaattaatggcggcggggtctagcagcagccaccgccgcctcatactcgcagccgacgtcctgctctccgtgctcgcggctgccagcgccagcgccgggacctcctgcatgccctggtgggccatcccgcacaacccgctcacgagctgccgctggtacatgaccagccagacctgcagcataggaccgcgcctcccgaggccgcagctgaacaggagatgctgccgatagctggcggacatcacggcgtactgccggtgcacggcgctgagcatcctcatggacagcacggacccatc

SEQ ID NO: 291716 - DNA, 380 bp, Zea mays
caatgacctgaaggaacaatacttttttcttttcatttcaattgttcattcatctcagtgctgacacttacactgacaagcattgtcatgcatcacacattatttctcaatgattgccgttaaattactcatctattttgcctcccactggttatattactacacatacagatccctacaccaactgatccagcaccctccaacattgccagttctggagctaatgctgcagaagctctggctctggctctcgtgctcacactctctgtggctcaacttttatagccacgcactctcggggctgaaccggatccttatgaacccaagcgagtttatgcaaatctggtaccctacgcttgttaacccattcaactggttcc

SEQ ID NO: 291717 - DNA, 426 bp, Zea mays
ttgagcattcagaaacacacctagcgatacgcactaccaacgacctaacaacagtgggtaccaagatattatccgtctttgcgcttcttgccctttttgtgagcgcaccaaatgcgttcattattccacaatgctcacttgctcctagtgccattattccacagttcctccctccagttacttcaatgggcttcgaacacccagctgtgcaagcttacaggctacaacaagcgcttgcggcgagcgtcttacaacaaccaattgcccaattacaacaccaatccttggcacatctaaccatacaaaccatcgaaacgcaacagcaacaacaatttgtaccagcactgagccaactagctgtggtgaaccctgtcgcctacttgcaacagcatttgcttgcatccaacccacttgctctggcaaaca

SEQ ID NO: 291718 - DNA, 362 bp, Zea mays
gagctacgacctacgcgtccgcccacgcgttcgtgataagattgcctttgttcccatttctggttttgagggggacagcatgattgaaaggtacaccaaccttgactggtacaaaggcccaaccctgcttgaggctctagaccagatcaccgagcataataggcctttacacaaacctctgcttctgccacttcagcatgcacacatgattgatgccattagaacagtaccaacatgacccagaggagactcataacatgaatcctggtatggaactcacctaacgtgcaactgagctctatacttacgaggattatgcctatatgcaccaaagagcacttcaggaaagcttttaccatgac

SEQ ID NO: 291719 - DNA, 403 bp, Zea mays
gttacacattcggatcgccatgtcagactcggatgagcaccacttcgaattggatgggcgcgccggatcgtccaagacctacccagcacatgctggcaccgtccgtatgaactgcttcatcgtcatcaagaaccgaccctgcacggctgtggaggtttctaccttaaagactgataagcatggtcatgccaaatgctactttgtagccatagatatatccaacggtaaaaagttcgaatatattggtccttcatgacacatactgcatattacagctgtgaaccgtactgagtatcacatgattgatatatcagactatggattagcgagctttcttacttcagatggtaacactaatgatgatcttaaactcccaactgattatactcttgtagcccagatc

SEQ ID NO: 291720 - DNA, 427 bp, Zea mays
acccacgcgtgcgcccacgcgtaccagcacacctgcgcaactagcaacatagaaagcacattcgggtgccgacaattgtatccgaaagatttggctaccttacgctccttggtctatgtgcacatgctgctaccgcaaccatttttccacaatgcttacaagctactatagcttcccttcttgcaacatacatctcaccagccctatatgcaactgcagacaacccaattaggcaacattcctggatcacaacttgcagtctcaacaagcatcttacctatatcaccctcagtcatcgcaacacacgcaagacgtatcacaagatgtacctactgtcgctacctgggaacaacccattaggtctcaccaactactataactagtgttagcaacacttgctgcatactttcaaccaacatgagtacac

SEQ ID NO: 291721 - DNA, 369 bp, Zea mays
cccaattggacccacgcgtcacgctacactggaactccggctaatcttaaataccatggcgacacattcaaatctcctgcgtgtgcggtaacttccacgattagtgatcaacatcattctacacaaaccctggatcaatccctatatggacccctaccatacacccttctacaatatacctgaacggcaacgctaatcagttgctgcaagagaaggcttaaagcttacttcttgactacttgtacaggactccagtacgcattcacatcaaacactctgtatcagatgcaaagcccatcacgcttaccattaagaaccatgactacatatgtgacattaacatactgaaagagtaccttggcaaagata

SEQ ID NO: 291722 - DNA, 298 bp, Zea mays
cccacgcgtgcgctaccattcagccagctagctgctgtgagccctgctgccttcttgacacaggaacagttgttgccgttctacctgcacgctgcgcctaacgttggcaccctcttacaactgcaacaattgctgccattcaaccaacatgctttgacaaacccaacagcgttctaccaacaacccatcattggtggtgccctcttttagattgcttatgagttatagttcaataataaagtttttttgctgatgtttgtggcttcccaaaaataagaaagtgcatttctagtttctt

SEQ ID NO: 291723 - DNA, 304 bp, Zea mays
caactcctgagcactttctcctcgtcccagacaagccaatcgaagccgagatacgacgatgggctccaccggcaccggagcagggggtaaggggaagaagggagcggccgggcgcaaggtcggcgggccaaggaagaagtcggtgtcgaggtccgtgaaggccggtctccagttccccgtcggccgcatcgggcgctacttgaagaagggccgctacgcgcagcgtgtcggcaccggcgcccccgtctacctcgccgctgtcctcgaatacctcgccgctgaggttctggagctcgccggtaat

SEQ ID NO: 291724 - DNA, 447 bp, Zea mays
ttgcgagccggacccacgcgtacgagcaactagcaacatagaaagcacaattttgtaccaacaatggcagccaaaagattgggcctccttatgctccttggtctttctgcaagtgctgctaccgcgaccatcataccgcaatgctcacaagctactatagcttcccttcttcccccgtacctcttaccagtgatggcttcagtatgcgaaaacccaattcttcaaccctacaagatccaacatgcaattgcatcatgcatcttacctttatcacccttgatcctgcaacaatcatcacccctattacaacagttacctttggtgcatttattggcacacaacatcatggcacaacaactcgagctagcacaccttgctgcctactcttagcaacaacagttacctttggtgcatttgatcgcacaaaacattaaggcacaacaacta

SEQ ID NO: 291725 - DNA, 304 bp, Zea mays
acccacgcgtgcggaaggagcaggctgctggcctctaggaatatatgaacattgatctgcgtctggtgggggtatctgcttctgtgacgatgctcttaagtgatatcagagtagatctgacccattggaaagcgaagcctcccactgaagcaaaacctgccattcttgatgagtttgctcatcctttccctgagaatcactgctatactaacagagctttcgtggattgtacaccagatacaagcgtcgcctctcactattatgattgactaactaaagccatacatgtcattactgcaaacca

SEQ ID NO: 291726 - DNA, 303 bp, Zea mays
tctcttcttcccccatacctctcacctgcgttgtcttcagtctgtgaaaaggcaatggttaaaccctacaggatccaacatgcaatcacaacatgcatcttacctttatcacccttgttcctccaacaatcatcagccctattacatcacttacctttcgtgcatatattggcacaaaacatcagggtacaacaactacaacaacttatgctaacaaaccttgctgactacgttcagcaacagcagctacctttggtgcaatagctgtcacaatacatcatggcacaacaactacaacaactc

SEQ ID NO: 291727 - DNA, 355 bp, Zea mays
acgcctactcaaccgccccggccttagccttatccccagccacacccatgcccgggccaagagccgtatccaagcccgtgccagatgcacggaacctgcagcgtttgcagcaccccgatcctgggccagtgcgtcaagttcctgaggcatcagtgcagcccgacggcgacaccctactgctcacctaagagccagtcgttgctgaagcagtgttaccagcagctcacgcaggtggagcctcagcaccggtaccaagcgatctatggattggacctgcagtccatcctgcagcactagccgcaaagtggccaggtcgctgagctgttggcagctcatatagcgcatcaactgactg

SEQ ID NO: 291728 - DNA, 290 bp, Zea mays
acgcgcggacaaccagctttccggggacattcctccggggatagggaacctgaccgattggcaggtgctggatatgtcgaataaccgattgttcgggtcagtgcctgcctgacttgcacgctgcttccagcttatggacctgcagcttgtggggaaccagctctttggggcactccttccggagctagacgcactatctagtctcaccgttctagatttgtctaataacaagatctctggggagattcccgtagcgttggctgggtacacgtctttggaggtcgatgact

SEQ ID NO: 291729 - DNA, 301 bp, Zea mays
gcgcgcttctcctccccctccggttccggttcgggtccgagaggttctccggagggcgggggcgtgcgtgagcgtatcgagatggcggcgtctgatgttgagataccgcttgattgtccgccgtctcacctgtgccacggacgaccactctctccacaacgcctttagcacctacagtgaggtcctcgactccaagatcatcctcgatcgggagacgcagatgtaccgcggcttccgcttcgtcaccttcttcacgggagacgcgatgcggaacgccattcgagggcatgaacggcaagga

SEQ ID NO: 291730 - DNA, 381 bp, Zea mays
acccgcgcgtacgcgggcctggagatcgggttccacgtggttgagttctcgaaccccgtctacttcgcgtgacttgtggaatactaggactgcgacggcgacgtggtgcaggtggacctgatggagtccaagacggcgcgcggcccgccgacggggcggtggacgccgatgcgcgagtcctggggctccgtctggcgcatggacaccaaccaccgcatgcaggcgcccttctccatccgcatccgcaacgagtccggcaagacgctcgtcgtcaacaacgtcatcccggccaactggcgccccaacaccttctaccgctccttcgtccagtacagctagctgatcgggatgcctgccctgccctgccctgcccgcaattgg

SEQ ID NO: 291731 - DNA, 342 bp, Zea mays
cccacgcgtccgcccacgcgtccgcccacgcgtccgcccacgcgtccgcggacgcgtgggcagtgatgtttcgtgcccaatgcagccttgttgttgactgtggcttctctttcacccatgcatcccctgtacttcagaactttactcttaattatggtgttcggcgtatggaccttggcggcaaggcccttacaaactatctcaaggagctcgtctcataccgttcccttaatgttatggatgaaactctcctcattgatgatgcaaaggaaaagctatgttttgtctcgcttgatgtccctggtggtctacacgttgccaggttatcatttaaggataacc

SEQ ID NO: 291732 - DNA, 304 bp, Zea mays
ctacttacgcttattgccatcactacaaaagcatccattattgcacaacgctcacttgctgctacttccattattccacagtttctaccaccaattacttcaatagccttctaacacccatctacgcaagcctacttgctacaacaagcaattgcggcaaccatgttacaacaaccaattgcccaatagcaacaacaatccttggcacatctaacaatacaaaccatcgcaacgcaacatcaacaacagctcctaccagcactgagccacctcaccatggtgaaccctgtcggctacttgcaac

SEQ ID NO: 291733 - DNA, 332 bp, Zea mays
tccacgcgtccgaatacaaacagtttcaaggtcatccttaaaggaaggaaaaggaaggtgtgggagagtatcatgggcactattggaccacatgtactcatagttgatgacacctttgttgatcgccttgtggcatctcgagttttgaagacttgtaacattcaagtgacaatggtggagggcccaaagcaagccttagattttctagatgtggagaatgatgtaaatttgattctgaccgattattgtatgcctggtatgactggatatgatctcctaatggaggtgaaggaatcaccaaagctgaagcacatgaggagtattggtcatgt

SEQ ID NO: 291734 - DNA, 325 bp, Zea mays
tcccacgcgtccacccacccattttcattatgcatcaacctaaccacaattggtggcagaatattatccctgcttgcgctacttgcgctttttgcgaacacaacatatgcgttcattattacacaatgctcacttacttctagttccattattccacagttcctcccaccagttacttcaatgaccttctaacacccaactgtgcaagcctataatctacaacaagcgattgcgacgaacgtcttacaacaaccaattgtccaatttcaacaacaatccttatcacatctaacaatacaaaccatcacaactcaacatcaacaac

SEQ ID NO: 291735 - DNA, 433 bp, Zea mays
accggaccggaaggctcggaccacgcgtgcgcggacgcgtgggcggacgcgtggggacgggcaaaatcctccgccggcgggtgagggcggagaggagccgcagctctcgaagaatgcgaagaagagagaggagaagaggaagaagctggaagaggagcggaggctcaaggaggaagagaagaagaacaaggctgcggctgccagtggaaaacctcagaaggcatctgctgctgacgatgatgacatggatcccactcaatactatgagaataggctcaaggctcttgattcactgaaggccacaggtgtaaacccctatccccataagttcccggttggcatttctgtacccgaatacattgagaagtacaggaccttgagcgagggggagaagcttacagatgtggcagagtgtttagctgggaggatcatg

SEQ ID NO: 291736 - DNA, 366 bp, Zea mays
gttgaaccaagccttccgttccaaccccaacttccaaaggccgcatattcagccccgcccccatttcctattaaccggattgcccctgccaaataagggacccgttaattccccaactttaaaactcgtcatctccgcgaatgttgaacctgtaaaactaccttttttaaaaagcatctcactggagagtttgaaaattaatatggaccaaccattggtattgaaattcatccgttagatttcaacactaacctttgtaaaatcaaggtctacttcttggataccctacggcaagaaaaatttggtggccttaaggattgataccatattcattgccaatgttccatcattatgcttgatgtaacc

SEQ ID NO: 291737 - DNA, 336 bp, Zea mays
atgggagcgaatcgagatggcggcgtcggatgttgcgtcccgctgctaccatcacggcgtgggctggggcaccgacgaccacatggctcacgacgtcttcaacaattaccgcgaggaccgtcagtacaagatcgttctcgatcggttgactcagacgtctctcggcttgggcttcatgacgggcccacagtggaggcgatgcttaacggcatacatggcatgaacgccaacgcgcttgactgtcgcaacatgaccgggcacgatgaccagtcccgcggcggtcttagaggccgcagcggtaggttcggtggtggtcacggactcggctgctacggt

SEQ ID NO: 291738 - DNA, 357 bp, Zea mays
ggagcacactagcaggaacaactctgatcaatccagtacaaccacgacaacatgggggacgttcctaaaacgagactgacgcactgcatgaacatagagtgcagcaagcacacactccacacggtgactcacagtaacaagggcactgatagacaatctgacaaatcaaagcgcactaattaccaagggcagtcaggatatggacgtcagaccaatcctgtcttccacatgatggccaagagcacctacaagattgttctgaaactgccatgactgagcagcaagcactactcacaaggagcatatctataaattcacgcattttcagattggtagcaacactaactgcaacggcac

SEQ ID NO: 291739 - DNA, 408 bp, Zea mays
cccacgcgtccgcaacaacaactaccattcagtcagctagctgctgcctacccggaggagtttcttccattcaaccaactggcatcattgaactctgctgcttatttacaacagcaacaactaccaccattcagccagctagctgatgtgagccctattgccttcttgacacagcaacacttgttgccgttctacctgcacgctgcacctaacgctgtcaccctcttacaactgcaacaattgctgccattcaaccaacttgctttgacaaacccaacagcgttctaccaacaacccatcattgctggtgccctcttttaaattgcttatgagttatagttcaataatgaaattttttggatgatgtttgtagctatccagaaataaaaaagtacatttctagatctt

SEQ ID NO: 291740 - DNA, 263 bp, Zea mays
ggcgagaagctgaccgactgagttgcttttattgctaccaatatattagacctccaggagggtcttccccttttagtgatctctacaaatactttcattattccacaatacttacttcctcctagtgccattattccacatttacttctaccacttactctcatcggctattaacatcaaactttgcaatcttacaagctacaactatctcttgccgctagcgctttacatacaaccaattgcccaatttcaacatcaattct

SEQ ID NO: 291741 - DNA, 405 bp, Zea mays
aaaatgcatataaactccaaattaattcattccagttcctaaaattttgcaattggaggctctataacctagagcctctgttttgtaatgaaaccagtaaaaaattgattcttcacttaatcctatttaaaacacatgaaacctttgaaaattcataactcaaatgctataactccaaaaattatgattcctgttcctaggattttattataatgtgtagaatattactgtgtgttttgtttacatgtttggtgtgatgttaatttccctatatacggtgtttgtttgtattgtggcgagtagaagaacccgtgaccgaggatcctggtgagcagcaggttgaagtagctgagcaggagctcataaaaggcaagttgtgcccttgaccactttttacccaataat

SEQ ID NO: 291742 - DNA, 355 bp, Zea mays
caaccagttctctttgatgaatcctgtcttgtatggcagcaattgttgctgctgtaggagaggcggtgaccaatgggttagccactaccaatggattaagtaactgctgtctctgttgtaggtactcagcatagttcgacagagtcagttggttgaatggaagcagctgttgcaagtaggcaatagggtttgccacagcagcaacatttgctgccttacaaccagatctctatgatgtatcctatgttgccgaggcatcatcccatcgttggaggtgccattttttagattacatatgatatgtactacattacggtgccctcctaccgacatgtgtttactagatgtaatcaat

SEQ ID NO: 291743 - DNA, 388 bp, Zea mays
  unsure (1)..(388): unsure at all n locations
gagctttcaaaaccacaccaagcgaagccctttaccaccaacctaccaccaatggctgccgggatattatccttccttgcgcttcttgcgctttttgcaagcgcaccaaatgcgttcattattccacaatgctcacttgctccaagttccattattacccagttcctccaaccagttacttcaatggccttcaaacacccagttgtgcaagcctataggctacaacaggcaattgcggcgagcgttttacaacaaccaatttcccagttgcaacaacaatccttggcacatctaacaatacaaaccatcgcaacgcaacagcaaccacaattnctaccagcactgagccacctagccatggtgaaccctgccgnctacttgcaacagc

SEQ ID NO: 291744 - DNA, 348 bp, Zea mays
agctactgcctactctcagcagctacaatttcttccatttaaccaattcaccggactggacccctgtgcttatttccagcagcaaatactactaccatttggccagctagctacaacaagccccgcttccttcttgacacaacaacaattgcttccgttctaccagcaatttgtggctaaccccacaacccttttacaacttcaacaattgctgccctttgtccaacttgctttgacaaacccaacaaccttttaccaacaacacatcattggccgtgccctcttttaaattgcttattaactgccattcaataatgaagttttctggcttgatgtatgtagcctcct

SEQ ID NO: 291745 - DNA, 341 bp, Zea mays
tgggatcctcgcaaggtttgttgtagacagtcactccagatcccagccgaatgcggctgtacgtctaatacaggtttgtgactgatgtggatgatgatccactggctgctgcacagcaagctgacccagatgtcctttcccaagacatgctgaacaaatacataacctatgctaatctgaatgtgtttcccaaaatacatgatgcccatctagacaagattaaccatgtttatgctgaacttcgtcatgaattctctcatggccaagtagtgtctattgcaataaggcatatagagtcaatgatgcggatgtctgatgcacatgcaacgatgcatttaaag

SEQ ID NO: 291746 - DNA, 415 bp, Zea mays
atctgcccttgccgccgactgctcactcctctccggtccgctccactccgaatggccggcacgaagcagacggcgcgcaagtcgaccggcggcaaggcgccgcggaagcagctggccaccaaggcggcgcgcaagtcggccccggccacgggcggcgtgaagaagccgcaccgcttccgccccggcaccgtcgcgctccgcgagatccgcaagtaccagaagagcacggagctgctcatccgcaagctccccttccagcgcctcgtccgcgagatcgcgcaggacttcaagacggacctgcggttccagtcgtcggcggtggcggcgctgcaggaggccgcggaggcgtacctggtggggctcttcgaggacaccaacctctgcgccatccacgccaagagggtcaccatcatgc

SEQ ID NO: 291747 - DNA, 323 bp, Zea mays
cgagccacgcgttcgctctgctaccgatccatgtacatttgccgagcgcggtagatctccgttcggcagcgtgtgatctgaccgatccgtgcggttgggtctggatcgggtggtgaaggtagcggtcgcggaagaagatggggctcgcgttcggtaagctcttcagacggttctttgccaagtatgagatgctgattcttatggacggtctctactcctacggtaaaaccaccatcctctacaatctcaagctcggcgagatctgcacatccatccgcaccatcggtttcaatgtttacactgctgactgcaagagcattatc

SEQ ID NO: 291748 - DNA, 233 bp, Zea mays
aggagaagaaccctaagaacaagtctttagtttcggtggggaaagctgctggcgagaggggttaatccctgagggagtcagacaaagctccctatgtagccaaagctaacaagctcaagctcgagtacaacaaggccatcactgcctacaacaagggcgagagcactgcagctaagaaggctcctgccaaggaggaagaagaggaagatgaacacgaatatttcaagaccaaa

SEQ ID NO: 291749 - DNA, 317 bp, Zea mays
gcgcgacaacctgatcgctaggcacaccaaccttgactggtacaaaagcccaaccctgagtgaggctcttgaccagatcaccgagcccaagaggccttcagacaatcccctgcgtgtgctcctccaggatgagtacaagattgctggtattggaactgtaccgggtggccgagtggaaactgtagtaatcaagcctgttatggtaatcacctttggtccaactggactgactaccgacgtgaagatctgatgagatgcaccacgaggcacttgatgacgttcttccggacgacaatgatggcttgaacctgaagaat

SEQ ID NO: 291750 - DNA, 400 bp, Zea mays
ccgactcgtacgtcatgcaacaaaaccctttaatgatggaaagtacctcccggttcaggtgggacctataaactggttattttttcgcgactacaggaaggtgtggaagtacttcacgaagttgattgcttagcaactggaagatatgctatcattgatgcactaaggtggaacgttggaattatcgatgccacatacagcacacgaataccgaagaacatgctgatgaaaatggctgaaggaaaatgtcagatcatatttctgtgaacactatgtaatgaccaacatgttcttgagagaactatacaatcgaaagttcaacaaagacctgactatgcatagcatacagaatatgaagctggcgtacaagatttcaaataccgattggcctattatgaaa

SEQ ID NO: 291751 - DNA, 312 bp, Zea mays
gccacacctgcctgtacgcatgcaaccatgcctacgctactcgtagatctcactatcaaggctgtgaaccacgttacttatgacacggacaagatactactaccattcaacgacgacgatgcaccaaagatcgctatcttcactacactggatcacttagttcttgtctaatacgacttaacctttaacacctaccccatgttactgatccagaacatggtgaccattgagcaagacgcattcaacaacctagcacactcgtacctacaactcataattgacgagggcctgtcttagatggaccatgagctg

SEQ ID NO: 291752 - DNA, 399 bp, Zea mays
tcgcggacgcgtgggcggacgcgtgggcggttcgcgtgggcggacgcgtggggtcaccaacggaaagtgcaccaagaaatccatcgagaggccgtcgacaggggaattaatggcgtcgtcgtctagcagcagccaccgccgcctcatcctcgcagccgccgtcctgctctccgtgctcgcggctgccagcgccagcgccgggacctcctgcgtgccggggtgggccatcccgcacaacccgctcccgagctgccgctggtacgtgaccagccggacctgcggcatcgggccgcgccttccgtggccggagctgaagaggagatgctgccgggagctggcggacatcccggcgtactgccggtgcacggcgctgagcatcctcatggacggcgcgatccc

SEQ ID NO: 291753 - DNA, 400 bp, Zea mays
acccactcgatctcaagaatcaacatataaagttcaatcctttaatatcaatacagcaacaattcatatcagcatgttttcactacttatgctccctactctatctacatatgttactaacaccacaattttccctcaatgctcacaagctcctataacttccctttttcccccataccttccatcaattataactacaatatcttaaaacccaactcttcaaccatatacgcttcaacaaacaatctcaactaacaacatacctttataccccttaatatatcaacaatcacctaccctatcttttatacaatcattgatacaaaccatcatatcacaacaactacaacaactcctactaccctttatcaaccaattaactctcacaaaactttctacc

SEQ ID NO: 291754 - DNA, 335 bp, Zea mays
aaaaaaaataataataaaaaataattaattaaaaaaaaaaaaaaaaaaaaaaaaaaggaagaaaaataaaaaaaaaaaaaaaacaaaaaaaaaaaaaaaaaataataaataccaaataattaaaaaaaaaacataactaaaaacacaaacaaccactccctccacaacaccttcaacacctacaattaactcctccactccaatatcatcctcgatcggaaaacccacagtttccccaaattcaacttcatcaccttctacacccacgaggcaatcccgaacaccatctaaaacatcaactgcaaggaactttacaaccttaacatcaccttcaa

SEQ ID NO: 291755 - DNA, 429 bp, Zea mays
cggacgcgtgggcggacgcgtggggtcctgggctatgaaggccggctaaagccccaatgatgacatgtgaaacatagataagaaaaggagaaaaaaaatacctagagctattatgcaatgctgacgtgattctccaaatcccataccacgatcttaccatccaatcctgatgtgctgaatcgtttgatactaccgtcgcttacttttctcaagggtacaatacacgttatgcaattctcatgggccccgccacgaggttttgatggttcaacggtatcactactagtcccttgctttgattggccgtatagctttccaagggcttcagagagctgcgaggcttttgaagctgatggggcagctgtcctgtagtgcaagaatcttatgagagtccaaagcccagtatcatcagcagcacagatcatagga

SEQ ID NO: 291756 - DNA, 239 bp, Zea mays
aaccattttgcttacgaggggcacctagctcgctctggtaacgtaccatggctgatcaccaccggcctgcgaccggaggtggcggaggctactgagacctccagcgccggggcggcatgcactgagaggcgcaacagcagcagaaacacggcgccatgatgacggcgctcaaggccgcgacagccgcgaccttccgccggtcgatgctgcagctgtacgggctgatcctggcctgcacc

SEQ ID NO: 291757 - DNA, 307 bp, Zea mays
acgggttggcttctactacccctgcgggtcgggttcgggttcgtgaggctctccgggttgggatgcgtgcatgaccggatcgagatggctgcatcagatgttgagtaccgttgattcgtcggcggcctcacctgggccacggacgaccactagctacacaacgccttcagcaactacggcgaggtactagagtccaagatcatcctcgatccggagactcataagtccgccgattatgctacgtcaccttctccacggaggaggcgatgcggaacgccatagacggcatgaactgcaaggagctgga

SEQ ID NO: 291758 - DNA, 317 bp, Zea mays
tcgtgattcctctgatgctgcggctgcacaagctctacgtacagaccaaagacggggctgcgaaccggtttgcatagttgtgggttctcacgttaaccctagtgactctatggtggatacttgatcctattttttgctagaagctttcgcattgacctgtcaacccgctaggtcacgcctggtgtcatgtgcttctgggccttaacttataccatgcggacacactgctaatggtttgttagtctcagcagcgcatgctgctagcacgaatccccttacctgttggaaatctggcttacgtcatggcacagaaacca

SEQ ID NO: 291759 - DNA, 352 bp, Zea mays
ttcaacatcccatccccacctccacggctgggggctacctccttcttcacctacttgctctttcacttcctatcctacttacaccttttttccatatttctcacaccacttcctttctcctctgactgcctcaacattctattccccaactataccctccttcttgctacaataacccatcacaccatgcatcttactgtcctagcattcactgtccatcaaccatatgccctatcgctacagccatccttagtgcatctatatcttcaaacattcgtatcacatcaacttcaacatcaattgcttacaactattaatcacgtccttgcagcgaaccttgatgcttaccttc

SEQ ID NO: 291760 - DNA, 290 bp, Zea mays
cccacgcgtccgcccacgcgtccgcggacgcgtgggaaaaaaaaaaaaaaaaaaaaggaaaagagaaaaaaaaaaaaaaaaaaaaaaaaacaaaagtaactacttcagaaaaaaaaaaaaaaaaacataaataaagcaaaaagaggccggccattctaaagaatccaacattcaaaccgagaacgttgtacgcatgaagtacgttatgtatactgctaaacaaagtaagaggccatttgagcatagcttccagtgcggaaactacaaggttccaacaaactgatgatatc

SEQ ID NO: 291761 - DNA, 432 bp, Zea mays
  unsure (1)..(432): unsure at all n locations
gtattcaaaaacacaccaagcgaaacatattagctacaacctaacaacaatggctaccgagagtgtattccttcatggcgcttttgggctttttgggagcgcaacatatgcgttcattattccacaatgctcacttgctacaagttccattattacacaggtcctaccaccagatacttaatgggctttgacacccagctgtgcaagcctatatgctacaacaagcaattgcggcgagcgtcttacaacaaccaattttccagttgcaacaacaatccttggcacatctaacaatacaaaccatcgcaacgcaacagcaacaacaattcctaccagcactgagccacctagccatggtgaaccctgtcgnctacttgcaacagcagttgcttgcatcaaacccacttgctctggcaaacgtagttgcaaacc

SEQ ID NO: 291762 - DNA, 364 bp, Zea mays
agcgttatctactccagagcgcagaataacccgatcgacaccatgagggtgtagatcggtgaggtcgctcttctaggtctcaatgttagcgccacctgcacgcatacaagcagcagctgcagatggcagccaccaacgacggttcatgtaccggctttacaacatctgccacctgaaaacacctgcgatctcctatgcatctgccaccgacgagacacctgtttgtcgccggtccacctgtaaccgacaggccatgtcccatcgccctttcatacgacgccgccaccatgacagtacattactcaaccgctgcagcctcagactaatccccagccacaccgatgctactgccaacaggagcatt

SEQ ID NO: 291763 - DNA, 328 bp, Zea mays
agaaggtagcaatgtcgtgaagcgtacgtgaactggaaacggatggacaagtatatgtgcaggttgatgtggtgtttccggatcgtgtgtttgtctcagatgaaaaatatacaatattttgagtccaagttaatcaatgttccatttgcctatactgagctcaatttgctaggtcgcatgttccatgtaattactatatctgcctatatcaattttcaagctcttttagatgtgcttaatacttaaccggtctaacctcatctacatgctaagggacctctttcctcagtacccaatcttacgcaagtgcgaatacgactgcatatct

SEQ ID NO: 291764 - DNA, 419 bp, Zea mays
cctgctggactcggactacacggcgaagctgtcggatttcgggctagcgaaggctggacctggagaagacgagacccacgtgtcgacccgagtcatgggcacgcagggctacgccgcacccgagtacatcatgacagggcatctaacgaccaagagcgacgtgtacagcttcggcgtcgtgctcctggagctgctaacggggcggaaggcgttggacaagaaccggccgccgcgagagcagagcctggtggaatgggcgcggccatgcctgcgcgacgctcgccggctggagcgcgtcatggaccggaggctgccgcgccccaccacgcccacccgagcagcccaaaaggccgccgggatagcccaccagtgcctcagtgtcagccccaaatcccggccccaaatgtcccacgttgtac

SEQ ID NO: 291765 - DNA, 433 bp, Zea mays
  unsure (1)..(433): unsure at all n locations
caagaagatgaacgacatctacggcgactggccggaacaggactgagagcgcgtacgaggcatcacctgctcgatcgaagctaccatgtctaccttcctgcctttgatcaccgtgatcgacaacatcagattgttacaggctcctatagcttnccttcttcccccgtacctctcaccagtgttgtcttcagtatgtgaaaacccaattcttcaaccctacaggatccaacatgcaattgcatcaggcatcttacctttatcacccttgttcctccaacaatcatcagccctattacagcagttacctttggtgcatttattggcacaaaacatcagggcacaacaactcgtgctagcaaaccttgctgcctactctcagcaacatcagttacctttggtgcatttgttggcacaaaacattatggcacaacaa

SEQ ID NO: 291766 - DNA, 380 bp, Zea mays
aagtatcttgcctccttatgctccttggtctttctgcatgtgctgctacggctaccattttccggcagtgctcacaagctcctatagcttcccttattcccccgtacctgtcaccagtgctgtcttcagtatgagaatacccaattcttcaaccctacatgatccaacatgcaattgcatcaggcatcttaccttcatcacccttgttcctgcaacactcatcatccctattacagcagttacctctggtgcatatattgtcacaaaacatcatggcacaacaactcgtgctagctaaccttgctgcctactctcagctacgacagttacctttggtgcatttgtaggcactgaacattgcggcacaacaactacatcaa

SEQ ID NO: 291767 - DNA, 414 bp, Zea mays
cctgcattggccatcatcgcaaaggttgaagacgtcgcaaaagcactgaatctcaggggaaggaagaaggacaacaacactgtcagcattcaagggaggaaggaggggggcaatggtgtccttaagtttgacacgcaaatctttgagatcacaccatcctgccatctcgttcagattaaacaaaccagtggcgatctacttgagtacgagaaactgttggaagagggcatccgaccagggttaaaggacgttgtctcggcctggcatagagatgatctgcagcagaagtagcttcggatgtctcccgtagattctgttctagtacatttcattccttatttttttagcagctacattccttttttgtattggtggtgatatgaaccattagcttgtgttttggttagtaataat

SEQ ID NO: 291768 - DNA, 187 bp, Zea mays
ccacgcatcctggcaccaccaatgatgggttgttggtataacactgttgaattataattcaatgatcgatttttttggatgatgggcgagccattccacaaataagaaagtacatttctaaaaaaaaaaaaaaaaaacaaaaacaaaaaaaaaaaaaataaaaacaaaaaaaaatataatacacaac

SEQ ID NO: 291769 - DNA, 176 bp, Zea mays
gccatctctcatgcatcatcatcagcagctgctgtcaccccaaggtctcaaccccatggccatgatcatggctcataacatgtctatcatgattgtactctaccaataccatctgcccaactaccgtaccaacccctgtagcatctcctcttccatttctacctactactgattca

SEQ ID NO: 291770 - DNA, 231 bp, Zea mays
cgcgtccgtggacacgccgatccctctcctcaggttgtatttccaggctaacatcacctcgcagggccggctatgttgttgctgcctacctgcttgctattctcgctgggaatgccagcccctccgttcattatttgactggcattctggactcagctgactaagaagatgacaatgaatagatggaactgctgctgtcccaactgacctgtaaggacattaccgatctca

SEQ ID NO: 291771 - DNA, 184 bp, Zea mays
atttataccaacaagcattttacttattggaatccagtagcaacaatagagcaagcatttttaccaagataggttccctccttatgctccttgatatttatgcatgtattgctaactccacaattcatcccttaatgctcacaaactcctatagcttcccttcttaccccataccttccatcaa

SEQ ID NO: 291772 - DNA, 305 bp, Zea mays
gagaatgcatgcagtgagcttggagcccgtatgtctgccatggacagctctagcagaggtgctggcgatatgcttgatcgtctcacgcttacttacaacaggacacgccaagcatccatcaccacagagcttactgagattatatctggtgcatcagcccttgaaggataggccaacgacagtgatgatgccgtgcgcctttgcatattgcaaaaatgatgttctacatctatggtgaatggctggttttcataaatggtgatgatcaatatatgtatcttgcacatgattagcaagttcacgtg

SEQ ID NO: 291773 - DNA, 285 bp, Zea mays
atgagttgttccatacattttagtttatgtttgagattgaaccaagaagtgagcattatgctggaggggtggactcgctttgccgtgcaggaatggaagagcgagcttatgagatcatacaggggatgccaatgagaccttccatttctgtctggggagcactacttggggggtgcaagatgcatgggaagacagagctaggaaggattgctgctgacaagttgtttgaacttgatcctcaagatttatgcaatcatgttttgctctctaacatgcttgcatctg

SEQ ID NO: 291774 - DNA, 217 bp, Zea mays
acacatcacatgcagctcgagatttatttatagagaaagattccgttttttaagcacgatcaccacaaccagtcggctccccctacctcccaccccaaccacacattcaacatcttctgccacaccaaccaaaactactgcctgaccactcttaacaacaccaccatactctcccccatcaaccccaaatactaccaccaacactaatacaaataca

SEQ ID NO: 291775 - DNA, 181 bp, Zea mays
cgcgcaaattgcaccattaaattcatcgagaggccgtcgacagtgaagatagtttcatcgtcaagtagcaccacccacccccgactcatcctcgcaaccgtcatactgctctccgtgctcgcagctgccaacaccagcgccgacacctcctgcatgccgcggttggccatcccatacaacc

SEQ ID NO: 291776 - DNA, 149 bp, Zea mays
caacccgcacctgtttcgctctgttagcggagccatctcctgaagctaggtcagtacggtaggggcgccggccctacactatccggacgcacttgatggtcggcagcatcagcgactactccatggccagtgtgttccaatttatcatg

SEQ ID NO: 291777 - DNA, 425 bp, Zea mays
  unsure (1)..(425): unsure at all n locations
cccacgcgtccgggaggaactgtggaattatggcactaggagcaagtgagcagggtggggtaatgaacgcatttgttacttcaatgggcttcgaacacctagctgtgcaagccaacatgcaacaacaagcgcttgcggcgagcgttttacaacaaccaattgcccaattgcaacaacaatccttgccacatctaacaatacaagccatcacaacgcaacagcaacaacagttcctaccagcactgagccacctagccatggtgaaccctgccgtctacttgcaagagcagctgcttgcatccaacccacttgctctggcgaacgtagttgcaaaccagcaacaacaacagctacaacagtttctgccaacgctcagtcaactagccatggtgaaccctgccgnctacgtacaacaacaacaactg

SEQ ID NO: 291778 - DNA, 248 bp, Zea mays
ggtgggttggcttctcctccccctccttttcgggttcgggttcgtgaggtctgcggggttctgtttcggggtgagcggatcgatatggccgcgtcgatgttgataccgctgcttcgtcggcggtctcgcctgggccacggacgaccactccctacacaacgccttcagcacctactgcgaggtcctcgagtccaaaatcatcctcgatcggcagacgcataagtacctcggcttccgcttcgtcacct

SEQ ID NO: 291779 - DNA, 379 bp, Zea mays
aaagaagctcatggaaatttagttggtgtttgttctggctatttgctttccactgaagtaaccgttagactgtagtgtgacatcctaaatattagctccactgtcaactccaaccctgattctcacactcacaatttgattgttggaattctaattgtgctttagggttctatgtgaagatacaaaaaaatattgcattcctattctggtcccgtattgaaattgccagtggtccctctgaattttgatccaattgttataaatttcagatgaactgaataaaactactacttgtaggcaaacaataaaattgtacgggcatttggagagaagagagtagaggataatttgaagaaccacgtggacctttgcaggatgc

SEQ ID NO: 291780 - DNA, 418 bp, Zea mays
aagatctgttatatcatgtgagcggcttgcctccacatgatataacagatcggattgtggtccatgaacaccgtggtcaacctgatggtttgattgtctcccatctaccacatggtccaactgcatactttgggttgctcaatgtggtgacacgtcatgatatcaaggacaggaagactatgggcaaaatgtcagaagcttacccccatttaatactggacaacttctcaacccagattggcgaaaggactgcaactattctgaagcacctctttcctgtcccaaagccagattcaaagcgaataattacatttgctaacagagacgattacatctctttcaggcatcatgtatatgaaaaaccaggtggccccaaatcgattgacctgaatgaggtcggcccccggttcgagttgcg

SEQ ID NO: 291781 - DNA, 412 bp, Zea mays
ggactcgtggtcggacgcgtgggcggacgcgtgggcaactagcaacatagagagcgcaatagtgtaccaacaacggcagctaaaatattctgcctccttatgctccttggtctttctgcaagtgctgctacggcgaccattttcccacaatgctcacaagctcctatagctgcccttcttaccccgtacctatcaccaacggtgtcttcagtatgtgaaaacccaattcttcaaccgtacaggatccaacaggcaatcgcagctggcatattacctttatcaccctcgttactacaacaatcatcagccctattacagcagctacctttggcgcattcattggcacaaaacatcagggcacaactactacaacaacttgtgctagcaaaccttgctgcctactctcagcatc

SEQ ID NO: 291782 - DNA, 392 bp, Zea mays
cggacgcgtgggcggacgcgtgggcggacgcgtggggttggtgcacacattagtttgtttgtggttttatatgacctaggcaattttatcccagaaataattttgttaaaagactctgtactgttctcatgttctgtagcatggtgattttttgctagatgtcatgtttccttttaggaagatgagatgagatattttgatgtgccctcgtttacaattaccatgttatagttgctttacatttaaaaaaaaaggaacttactccatcagccatttggttaaacagcttgtttctgtctgagataggaagcatgagacttaaaaaatctactgaaatcatgttccagggtttgattgcaactgcctggatattggctctaatcctattagtg

SEQ ID NO: 291783 - DNA, 255 bp, Zea mays
tcggactcgtgcgttcaaaaacacaccattcgaaactacctagcaactactcagcatggatatctaccaagatattatcccttctttcgctttttgacctgtcagcgagcgcaacatatgcattcattattcctcaacgctcatttgctcctagtaccattataccacagttcttacgaccattatcttcaatgggcttctaacacctatctctgcatgcctacaagctacaacatgcacttgcttcgagcgtgt

SEQ ID NO: 291784 - DNA, 342 bp, Zea mays
cattggcgaccaagatatgggccctccgtaagctgaatagctctatctgcatgcagttgctaacacgacaatgatcactcaatgctcacaagctcctatagctacccgtattcacgcataccttccatcaatgatagcttcagtatgtgaaaacccagcatcttcagccctataggctccaacaggcaatctcagcacgcaacatacctttatcacacttgttgttgcaacaatcgccagtcctatctacggtgcagtcactggcacaaaccatcatggcacagcacctgcagcaactagtgctacctgtgatcaaccaagtaactctgacaaacctttctg

SEQ ID NO: 291785 - DNA, 394 bp, Zea mays
cccacgcgtccgcccacgcgtccgcccacgcgtccgcggacgcgtgggtttcaatcagagccagtatcctcgcattgttaccgaggacttcttgccacttcccagcaaagggaaatctgggaaggatggctggtatcctcctggtcatggtgatgtgtttccctctttgaataacagcggaaaacttgacatcttattggctcagggcaaagagtatgtctttgttgcaaactcagacaacttgggtgctatagtcgacatcaagatcctaaaccatctgatcaataaccagaacgagtactgcatggaggttactccaaagacgctggctgacgttaagggtggcactctcatctcttacgaaggaagagttcagcttttggagattgcccaa

SEQ ID NO: 291786 - DNA, 294 bp, Zea mays
tcccggtcgcccacgcgtcctcccactcttccgcccactcgtccgctttctcgttcgctccactgacagccgcggaagatcaatactcaactatacaatcctacatggttcaagaggccatccaagcttgcatcttacgttcattaactaaaatcctacatcaaccatatactatattgcaacatccattcttaatgcatctgtataatcaacgaatttcataacaacaactactacatcaaattcataccaacaatcaatcaagtagtttcagcgaatctttgtgcttacttt

SEQ ID NO: 291787 - DNA, 384 bp, Zea mays
gtgctggcgataccgatctcaccttcctaatctacacaaattttggatatcaggcgggtcacattgactaagctcttaaaaccactattcaccaacaaagagatgacgatccttatggcagatctctatgcacatggtaagaccaccatcctctactagctcaagctagtagaaatcgcgaccaccatccctacaatcgggtttaatgtggagactgttgaatacaagaacattagcttcactgtctgggatgttggaggtcatgacaagatcaggccattgtggaggcactatttccagaacacccaaggccttatctttgttgctgatagcaatgacagagatcgtgttgttgaagcaaaggatgagctccacaggatgctg

SEQ ID NO: 291788 - DNA, 217 bp, Zea mays
gcgttgttttttttttttttgtttttcttttttttcttttttttttttttttttgtgattgcacaaacaaatcccaatcccctttaattattgttccggatgaaccatcctagaaatgctttaatctttttgctcgccttattatttaaacatatgaactagcttcaagctcattcctcatgcactatactctttgcaattacttggagggcatttt

SEQ ID NO: 291789 - DNA, 299 bp, Zea mays
cccacgcgtccgtcaacgggctttgggcatttcgcaattgctaatgatgatgtgtacgagttagctgagaatatcaaatccaagggtcgtaagatcacccgcgaacctggtcctgtcacgggacgatccactgttcttgccttagcacaagatcctcatgtctacatgtttgagcttattctgaggtctgactcacctgagtctctttgccaatatacgctattggtcttttacctttatcgtgtactaagctgtacgagatggtcctacacatgcaactcctattgatgaaggatgat

SEQ ID NO: 291790 - DNA, 364 bp, Zea mays
aagaaaaaaaacaaataacaacataaaaagcacaataatataccaacaatgacaaacaggatcggtcgctttcttagacccaaaaggtctgtatgcaagcattagtaaagctaacatttttatacagtgctcacaatctaatatatcttccgttgtttaaccataactcaaatcagaggactcttcaatgtaccaaattacaattgcttaaccctactcgatccaacatgcaatcgcaacaagcctattaccattatcacgcttgttcctccaaaaaccgtgacccctattacagcaaatacctatggtcccatttatggcacaaaaaatccggccacaacatctacaacaacttgtgctacca

SEQ ID NO: 291791 - DNA, 397 bp, Zea mays
cacattaacaacaacttaacttcaatgcctaccaacatcttatcgcggtctggtccttcttgcactttttgcgagcgctacaaatacattcattattacacaatgctcactcgctccaagttccatcattacacacatcctaccaccagttacttcaatgggcttccaacacccaactgtgcaagcctataggctacaacaagccatttccgccagcgtcttacaacaaccaattttccatttgcaacaacaatccttggcacatctaacaatacaaaccatcgcaacgcaacaacaacaacaattcctaccatcacttaaccacctaaccattgtaaaccctgccgtctacttgcaacagcaattgcttgcatcacacccactttctcttgcaaac

SEQ ID NO: 291792 - DNA, 429 bp, Zea mays
  unsure (1)..(429): unsure at all n locations
cggcgctggcgcggtccccgcgggagttcagctacaaggagctgagcgccgccgacgcggggcttcgacgcgtcccgcgtcatcggcaacggcgcgttcggcaccgtgtacaagggcatcgtgccggacacgggcgccatggtggccgtgaagcgctgcagcagcaccggcgcgcgcggcggaggcaacgcgagcggcgagcaggcgcggtcggagttcctgtcggagctgtccatcatcgcggggctccggcaccgcaacctgctccggctgcaggggtggtgctacgagaagggggagatcctgctggtgtacgactacatgcgcaacggcagcctggaccgggcgctgttcgacgcgtcggcgcccgtgctgccgtggcgccaccggcgcgaggccctggcnncgcgttgcgtcgcgcttgcgtac

SEQ ID NO: 291793 - DNA, 396 bp, Zea mays
gcgccgacgcctgctaccactcttcttaccactcgtatgagccttcgccgcatagggatggactatctcatcaatcgccacatcacatctatctctcgatcttacccatagtggatgtacaacaactacaacacacccctaagctgttcatacgttgtacattcgatcatctacatgtgaacgacatatccctgaacgactaccttgctgctaactcgacgaatcacgcaatgtacctgccacacaccccagaacattactccaagaatcgactccccattgctcagtgcacgatcgtgcagcgccttacaaactccctcatgattcacggactcaacaaccgcaagaaggtcatatctgtccgcatcatcaagcataccctgtagatcatttaaa

SEQ ID NO: 291794 - DNA, 340 bp, Zea mays
cggtactggccgtccctctactgctccaaatctggaacatgcttcatcggcaaggggctctggtggactcacgagtgggagaaacatggcacctgctctgcccctgcggttcacgatgaattacagtatttcacccttgcccttgacctctactacaagtatgacgttacagaaatgctgtcacgtggagggatacatgtttcaaatggcaaagaatatgcactgaacgatgtcatcgataccatcgaacatgcttatgggggatcaccacaaattgcttgcctgacgggctcaatcgaagaactaatgttactcatcgacagaaaaatgaaccctcttg

SEQ ID NO: 291795 - DNA, 391 bp, Zea mays
acccactcgtacgcagacaaagtgaagcgcactagcagcttcccaacaccaacggctaccaagatattaagcctcgttgcacttattgccgttttagagagctcatcaaatgcgttcattattccacagtgctcacttgctcctagtgccattattacacagttccttttatcagttacttcaatgggcttctaacattcagccgtgtaagccttctgactacatctagcgctttcagagagcgccttacaacaaccaattgcccaattgcaacaacaatccttggcacatctaaccctacaaaccattgcaacgcaacaacatcaacatcaacagtttctgccattactgagccatctacccgtggtgaaccatgtcacctacttgcaac

SEQ ID NO: 291796 - DNA, 396 bp, Zea mays
attgtcccaacaatggcacccacaatattggggttccttatgcgctttgttctgcctgcaggtcctgctaccgcagccattatcccacactgctcacaagctcctatagctgcctttatatctccatacctttcaccatcggtgtctccagtatgtgaaaacccatttcttcaaccatacaggatccaacaggcgatcccagcaggcatcttaccttgatcaccatcgttactacaacaaccgttagacctattacaggagttacctctggagcatccgttggcacataacatgacggcacacctactacaacaacttgtgctacgacaccttgctgcctactctgatgaacagtatcagcttccattcaaccaactagctgcattgaactctgct

SEQ ID NO: 291797 - DNA, 304 bp, Zea mays
aaaacaaaaaaacaaaaaaaaacaaatataaaatatagaaaaaaaaaatcaaaaataaaaggagtagggtgaaaaataaaaaaaggaagcataaatagaaactaaaaaaacaatgaaacaacaactaacaacatctggtgctagacaaaccttgatgactactctcatcaacatcagtatcttacattcatccaactacatgcattgaactccagcttcttatatgcaccaacagcaactaacatacagccagctacatgattcctaccgtcagcaattcctatcattctaccaactgacagca

SEQ ID NO: 291798 - DNA, 401 bp, Zea mays
gggaaatcgctgctgtgtcgctgtctgttacagtgcattactgaattgactatgtggaactggactttcacaaggaggtgatagaaatgtccagaccgagtcacgaaaatgtcccaaagatggtgagatactgcatggagtctgacccatcctcgagaatgctagtctttcagtacccaccaaaagggacactgtacgagcatctgcacgatggagatagctggcagctatcttggcctacactgatgaaatcagcactcgacatatacagggctatcagatacttgcacactgagctgcaacctccgtctgcagatgctgcactgacgtctagttcagtgtacctaactgaagacttctactcaaagataatcgattgcgacaggaggagatatattgcg

SEQ ID NO: 291799 - DNA, 415 bp, Zea mays
cccacgcgtccgcccacgcgtccgcccacgcgtccgatggcccaagtatactcaacgatattgggttactcttttttccttaaaaattgtgttccctgtttctcagttatcatgaaaatagagtattatttcattccatagtgccggcttttcgcaacgtcattgatgtgcctcttgtggttagaggattacgcaaatctagatctgaggtgaggaaggaactaggaattgaggagaatgctaaggtgctcgtttttaattttgggggtcagccagcaggatggaaactgaagcaagaatgtctccctgatggttggatttgtttggtctgtggtgcctctgattctcaagatgttccaccgaacttcattaagcttgcgaaagatgcttacacacctgatgttatggcagcatc

SEQ ID NO: 291800 - DNA, 261 bp, Zea mays
cgcaaccctcttacaactacaacaattgctgccctttgtacaacttgctctgacagacccagcgggctcctaccaacaacacatcattggtggtgccctcttttagatagcttattagctgcaattcaataatcaagttatctggatgatgtatgtggccaaccagaaataagaagctacatttacagattctagaggcaaaactggataaaaacgatagactgctggatttcacacacaaaccttgatctgcatgtgttg

SEQ ID NO: 291801 - DNA, 400 bp, Zea mays
ggatctcctatctggcgacgagctcctgataaaccaacatctcaacgccggcgtattggagggtgttctgtgggacgtagaggcaaagttgctcacgcgaggtgctgttgatgtggacataggtgccaattcatacgtcgagggtggtgaggacgaaagcgttgatgacacagctgcgaacgtggttgatattgttgacacatttcgtgtacaggagcaacctccttttgacaagaaatcatttgcgtcttacatcaaaaaatacatgaagaatctcactgctgtgttgcagccagagaaagcggatgagttcataaagggtgtcgagggtgctaccaagtttcttcttagcaagctgcatgacctccaaatttttgatggtgagtccatgaaggatgat

SEQ ID NO: 291802 - DNA, 478 bp, Zea mays
  unsure (1)..(478): unsure at all n locations
ctgctgtcttcaataggtccagcagatttgggaagcttcagggtattcagtgtgcactagcaggtaggaaccttgacatgaggttcacttgtagtactggagatgccatgggaatgaatatggtgtcaaaaggtgttgaggatgtcttgggctacttgcagaatgatttccccgacatggatctcatcagcctatctggtaactattgttcagacaagaaggctgcagctgtaaactggatagaaggtcgcgggaaatctgttgtttgtgaggccacagtcaaagggggagttgtgcagagtgttcttaagacttctgtgcaaaaacttatcgagcttaatattgtaaagaatctcgctgggtcagctgtagccggagctcttggaggtttcaatgcccatgcaagcaatatcgtaactgccctgttcattgctacggngcaggatcctgcccaaaatgttgaaagctcgcagtgcat

SEQ ID NO: 291803 - DNA, 397 bp, Zea mays
gcaactggcgagactgcacatgggctgggcacctaggtgcaatggttggcacaaaacatcagggcacaacaactacaacaactcgtgctagcaaaccttgctgcctactctcagcaacagcagtttctgccattcaaccaactagctgcattgaactctgctgcttatttgcaacaacaacaactactaccattcagccagctagctgctgcctaccaccagcaattgcttccattcaaccaactggcagcattgaactctcctgcttatgtacaacaacaactactaccattcagccagctagctgctgagagccctgctgccttcttgacacagcaacagttgttgccgttctacctgcacgctgcgcctaacgttgcaccctcttacaactgca

SEQ ID NO: 291804 - DNA, 440 bp, Zea mays
cggacgcgtgggagaccgacaaggacttgcaggtttatgctcctgccgctaagctcaggtgcctataaccacgacgactgcccctcattgctcacatcctcctataccctgtatgttaccaccgtacctttcaccagcgatgtcttcagcctgtgaaaccccaattcttgagccctacaggatccaacaggcggtcacatgccgcatcttacctgtatcaccctcgaacgtacaactgtcatcaaccctattacatcaactacctatgatgcatttatagctacatctcatcacgctacagcagctactgcatctcgggctaccaaaccttgctgactacgctcaacatcagcagttacctttgatgctattgatggcacagaacatgagctcacagctgctacgacagctcttgctagccaaccttgatgtctactctc

SEQ ID NO: 291805 - DNA, 428 bp, Zea mays
ccgacgggaacccggacttcgcggcgctcgaggtgctccggcgcagggcctacgacggggccaaggcggacgcgtggtcctgcggggtcatcctcttcgtcctcctcgcgggccacctccccttcgacgacgccaacatcgccgacatgtgccgcagggcgcaccgccgggagtacacggtcccgcggtgggtgtcgcagccggcgcgccgcctcgtggcgcgcctgctggacccgaacccggcgacgcgcctcgccgtcgcggagctcgccggccacccctggttcaagcgctcgctcagcgtggactcccagctcggcggcctcctggacggccaggcggagcgcgagctggcgttccaggccccgccggcgctgaacgccttcgacatcatctccatgtccccagggctggacctgtcgggcctg

SEQ ID NO: 291806 - DNA, 461 bp, Zea mays
gacacacgcgtgcgccgacgcgtacgattgacaccaactagcaacatagaaagcacaatagtgtaccaaccgtggcagctaatatattcagcttccttatgcttctagatcactctgctatagctgctaccgtaaccattatcccacactgctcacaagctactatagcttactttcttcccccatacctatcaccaaccgcttcttcataattacgaaaacccaatcctttaaccttacacgatccaacatgcaatcaatacaacgtatttcacctttatcaaacttgttcctccaacaataccaagtcttactacagtagctacctcaaacccatttgcctactcacaacatctggttacattaaatccactaactatggctaactatgctgcgtacctactacaacgaccacaggtacttaatacattggcaattgcttacccataactctgctgctt

SEQ ID NO: 291807 - DNA, 445 bp, Zea mays
gcggacgcgtcctccggacgcgtgggcggtctcgttggctctcggtgctcttctacacccaggtccctcctaacatcttctgcaaccgcggcaagctctacgagttctccagcacgcagagcatgccaaaaacacttgaaaagtaccaaaaatgcagttttgcagggcctgaaacagcactccagaatagagagaatgagcaactgaaaagtagccgcaatgagtacctcaaactgaaggcacgtgttgataatttacagcggactcaaaggaacttgcttggtgaagatcttgagtcattaggcataaaagagctggagcacctggagaagcagctcgattcgtccttgaagcacataagatctacaaggacacaacacatggttgatcaactgacagaacttcagaaaaaagaacaaatgttttgtgaagcaaataagtgtct

SEQ ID NO: 291808 - DNA, 432 bp, Zea mays
cccacgcgtccgggcgtgtacagcgactacgacgtgcgcaacgacaaagctgcaggcggcagcagcagcagcaggaggccggagatggcgtggtacgagcggcgccggccacggctcgggatcgtgtcgcgcaaggggaggcgcgtggtcgagaaccaggcggccgtggcgcagctggcggcgtcggtcgggttcgacgtggacatcatggagacggccaacggcgcgccgctctcggccgtgtacgcgtccgtgagctcgtacgatgcgctggtgggcgtgcacggcgccgacctgaccacgttcctgttcctgcgccccggccgcgcggcgctggcgcagatcgcgccgctcggcatcaccatgctctcgcgcaacctcttcggcgtgccggcggccaggatggggctgcactacgtgcagtacgacgtg

SEQ ID NO: 291809 - DNA, 430 bp, Zea mays
cggacgcgtggggcgtaccataacggattcgtagatatatgtatctacatcaacgagaggcaaccattactatttctggaggcatactcactggcctcagacgacattcacatactacaattcatagtgctcaggacctgcttgatcacgattgacgaatgagatatcgaatgctgcatatcgtacattatttttgactgatgcatgtactcataatgctacaacctttgattgtactgctgaacattctacagatagatcgcatgatactaacgctaacgctccttgtcaattctttgacatgctatcccgaggatctgccagactctatctatatagagatgccactgcattgcgaatcctacttgatcatggacacctgatatcatgatcactgtcatactccgtgaacatgtgactttatggacaa

SEQ ID NO: 291810 - DNA, 427 bp, Zea mays
agagcaactatcatcatagaaagcacattattgtaccaacactggcacccaaaatatttggcctccttatgcttcttggtctttatgcaagtcctgataccgcgaccattttcccacaatgctcacatgctcctataactacccttactaccccgtacctctcaccaacattgtattcggtatgtgaaaacccacttcttcaacactatacgatccaacaggcaatatgcactggcatcatacctttatcacccttactacttcaacactcatcacacctattacagcagttacctttgctgcatacatttgcacaaaacatcactgcacaacatctacaacaactcgtgctagcaaaccttgctgtctactctcagcaacagcaagttcttccattcaaccaactacctgcatagaactatgctgc

SEQ ID NO: 291811 - DNA, 287 bp, Zea mays
ggggtttcaatctctgcaaccactgtctaacaacaaagacaatgatgaaattttcattaagctcttttatgacaaggatgacaagaaggaaaatgcttagcttaatgagcgtgccaagaactctgtcatcattaacaaattccttaaacctactgaaggatatatgtactacggcagacttcatcgtctaatgctccgagatcatcgtcatacatttagatgcctatactaaaaggcatacattcatgctccatctactgctgctccatacattgaatatcaacctc

SEQ ID NO: 291812 - DNA, 440 bp, Zea mays
aacacaaacagtgagaaattattagtaaagtgtgcattgtggtgcggccactgtgccatgtccgaaccaccgggcaagggcccgtgccctttcgaaccttcccggtcccggattgccttcaacccgaaaggccaagccttaagaaccaacagttccaagccgccgatccgaagaacttcgcaatccgtactctgttccggccttgaaggaaggggatggtcgccgattttatgccaatttactcgcgccccacgccgcgagtctttgatcgatgtgtttgtacagtcgaaagagcattgctttacataggaccattcatatatatatattgatcttccctcccttcctcttcccgcgggccgtcagaggcaatttcgccctcgattcgaccccgattcgttcgcccgcgaccgggattcccttcggcaagcgcggatctg

SEQ ID NO: 291813 - DNA, 405 bp, Zea mays
tcggactcgtgggcggactcgtgggcgttctcgtgggaaaaaaaaaaaaaaaaaaaaaatggaaaataaaaaaattaaaaaaaaaaaaaaaaaaaaaaaaaaaaaaaaaaaaaaaaaaaaaaaaaaggccggccttttttaaggttccaacttttcttccccttccttccaacttcttaccttttttttagtgtcccctaatttcatttcattgcccttctttttacaacttcttgactggaaaaaccttggctttacccaacttattccctttgcatcacttccccttttccccagttggcttattaccaaaaagccccgcaccattcgcctttcccaacatttccccagcctaattggcaatttgaaccccccttttaccgtccctttaaccccggcggtttt

SEQ ID NO: 291814 - DNA, 390 bp, Zea mays
gaagatatttccacgaccaactgctggtctctctcgtgccattgatcaatgccagactgtgaagtacaacatgaattcaagggctgggagaggctttacccttgaagatttgaaagctttgtgtattccaaaaaggcttggtccaaccattgacattactgtggaataactgctcatgaacaaatacctagaggagcttcacgccaatgtccagaggcttaagacatatctagccaagctggttatattgccaaggcgtgctcataaggtctaggctgctgactctactctggaggagcttaacaatgctacgcagtatcagggtgactacatgccaattactttcggtgagaagcgctatgtcaaggtcgtgaacgtcacagatgaaat

SEQ ID NO: 291815 - DNA, 434 bp, Zea mays
acgggatccaacaggcaatcgcagctattatcttaccttcatcacccttgatcctgcagcaaccttcatccctattacagcagttacctttggtacatttgctgacacaaaacatcagggcacaacaactacaacaacttgtgctagcaaaccttgctgcctactctcagcaacagcagtttcttccattcaaccaactggctgcattgaactctgctgcttatttgcaacatcaactaccattcatccagctatctgctgactaccctcagcaattactttcattcaaccaactggcagtattgaactctgctgcttatttacaacaacagcatctaccaccattcagtcagctagctgatgtgagccctgctgacttcttgacacagcaacagtggttgtcaatctactcgcacgctgatcctaacgctggc

SEQ ID NO: 291816 - DNA, 444 bp, Zea mays
  unsure (1)..(444): unsure at all n locations
gccacatggagacgccacagcagcaattcgccgccgccgccgccgccgccgcccacgggcaggacgacggcgggtcgccgccgatgtcgccggcctccgccgcggcggcggcgctggcgaacgcgcggtggaacccgaccaaggagcaggtggccgtgctggaggggctgtacgagcacggcctgcgcacccccagcgcggagcagatacagcagatcacgggcaggctgcgggagcacggcgccatcgagggcaagaacgtcttctactggttccagaaccacaaggcccgccagcgccagaggcagaagcaggacagcttcgcctacttcagcaggctcctccgccggcccccgccgctgcccgtgctctccatgccccccgcgccaccgtaccatcacggccgcgtcccggcgccgnccgcgatgccgatgccgatgccgc

SEQ ID NO: 291817 - DNA, 323 bp, Zea mays
ccacgcgtccgcggacgcgtgggctgacacgtgttcggacgcatggggcgagctgcgcgcccgggccgcatctctccccgacgagtacttcctcgtgctcgtgggcgacatggtcacggaagacgcgctgcccacataccataccatgatcaacacgctcgacggcctccgcgactagactcacgccagcaactgcccctggccagtctgtacgcgcgcctggaccgacgaagagaaccgccacggtgacatcctctgcaagtacatgtacctatccggccgcgtcgacatgcgcatggtcgagaagacccgtcagtacctca

SEQ ID NO: 291818 - DNA, 340 bp, Zea mays
cccacgcgtccgactagttctagctcgtgatggccgccctttttttctatttcggttgctttttttttgtagaatctggaaatgtaacttcttatttatgcatggccacatacataatccaaataactttattattgaattacaactaataagcaatttaaaatacggcaccaccaatgatgcattgatgttagcaagcctacttgtttgtcaaagcaagttggacaaacggcatcaattgtcgtatttctaaataaccagcgcagagagccacacgtatcatgtcaccatttgtgcttaagcaatattttctaatagattatcatctgaatcttggaac

SEQ ID NO: 291819 - DNA, 397 bp, Zea mays
cggacgcgtggggcagtttctttcattcaaccaactagctgcattgaactctgctgagtattggcaacaacagcaactaccattcaagcagctacctgctgcctaccaggagcaatgcctttcattcaaccaactggcagcattgaactctgctgcttatttacagtagtaacaactactaccattcagccagctagctggtgtgagccctgctaccttcttgatacaaccacagttgttgacgttctaccagcacgctgcgcctaacgctggcacactgttacaactgcaacagttggtgccattcaaccaacttgctttgacaaacccagcagcgttctaccaacaacccatcattggtggtgccctattgtagatgtcttatgagttatagttc

SEQ ID NO: 291820 - DNA, 316 bp, Zea mays
aggaaacccagccgacggcgcatcggtcttccaggtaagcagtagcgttcacgtcaggggccgtcatgaagcgcaacccccgcgtcacgagctttcgccggaagtgccggaaggcgcacttcacggcccagtactctgtccggcgcgtgctcatgtccatggcgctatcgacggagctatgacacatgtacaaatgtgcgttccatcccgatcctgcatagacgacaaggtgcaagtcgtgcgcggtacctacaagggacttgaggtcaaattggtgcacgtgtaacgacgttgctatgttatacacgtatagcgg

SEQ ID NO: 291821 - DNA, 352 bp, Zea mays
aagacgcttgctgatctagctatgaatagctgatagctccttcaaagagcaggacagcattgatctgaccctagactacgcgaacactatagcactttctattattaagcaaattatagaggataagatcacccctatcaacgtcgatatctccaaggttgcttccaagtaccacctctacacccatgccgacgtcgaatcctagatctctaagctgtgaaacgctttcgtagctcgcgatatacatgtcatcaatcacctatagacgaaccttttacaaatcgtagacatcctatgatcttgattatacctgtcatcttactctgttgttaactcctcaatgacaatctat

SEQ ID NO: 291822 - DNA, 421 bp, Zea mays
cagcaaagcggcagtgcgtatagaggatcgtcgaacagaacagcatgaagatggtcatcgttctcgtcgtgtgcctggctctgtcagctgccagcgcctctgcaatgcagatgccctgcccctgcgcggtgctgcagggcttgtacggcgctggcgccggcctgacgacgatgatgggcgccggcgggctgtacccctacacggagtacctgaggcagccgtagtgcagcccgctggctgctgcgccctactacgccggttgtgggcagccgagcgccatgtgccagccgttccggcaacagtgctgccagcagcagatgacgatgatggacgtgcaatccgtcatgcatcagctgcagatgatgatgcatcttgagcgtgccgctgccggcagcagcagcctgtacgagccagctctgat

SEQ ID NO: 291823 - DNA, 420 bp, Zea mays
gcaacacagagtaccaacaatggcagccatacaatttagcgtggttatgcatcttgggctgcgtgcgagtgctgctatcgcaaccgttgttccacaatgcttacatgctcctatagctttccttcttcctccatacctatcaccagcgcggcttcatgcgtgaagacccaatggatgcaccctacctgatacaacaggcactcgcaacaagcatctgagcagtatcaccactgttgcatcaacaaccgtcatccctattacaagagttaccttaggtcgatgcggtggcgcaacacattctggcacaacaactacaacaacttgtgctagcaaaccttgatgcatactcgcagcaacatcagtttctgccattctaccaactggctgcatcgaactatgccgcctatttgcaacaacaac

SEQ ID NO: 291824 - DNA, 402 bp, Zea mays
aattgttcaaccctacaggatccaacaggtaatcgcaacaggcattttaccattattacccttggttcttcaacaaccggcaggcctattacagcaggtacctttgggccatttgggggcacaaaacatcaaggcacaacaactacaacaacttgtgctagcaaaccttgctgcatactctcagcaacatcagtttcttccattcaaccaactggctgcattgaactctgctgcttatttgcaacaacaattaccattcagccagctagttgctgcctacccccagcaatttcttccattcaaccaactagcagcattgaactctgctgcttatttacagcagcaacaactactaccattcagccagctagctgatgtgagccctgctgccttcttgacaca

SEQ ID NO: 291825 - DNA, 356 bp, Zea mays
agtgttaacgcatccagcggaacgcttttgcttcggcctttgaacaattggttccaaagtttgagaccctcttggcgcttatggacttttcggggaacccaaaactagggttcataattgcccaaggcgaacttgctcgtactgccatatttacacagattgtccaaccaatccctaaaatgggcttcgaacacctacctgtgcaagccaacatgcgtcaacaagcgcttgcggcgagcgtcttacaacaaccaattgcccaattgcaacaacaatccttgccacatctaacaatacaagccatcacaacgcagcagcaacaacagttgctaccagcactgagccacctagccatg

SEQ ID NO: 291826 - DNA, 422 bp, Zea mays
acgcccacgcgttcgcccacgcgtccgtccacgcgttcgaccacgcgttctcttacgaaagggctgttgcacaggaaaaaaccgagcaagaaacaggtgcacgggtctcaatcagtgatggtacagtcactattgttgctaaaactcaagaaattatggataaagctattgagaaggttgagttcctcgtgggacgtgaaattgaagttggtcgtacatacaaaggaattgtttcttcgattaaggagtatggcgcttttgtggagttcaatggtggacaacaaggcttacttcatatttcggagtagtcacatcaaccggttacgaaagtcttggatgttgaaactcttgcgcaatatctgtctatgagatgcattggacaggacatgcgtggtaacattaaaattttacttaaagcaacc

SEQ ID NO: 291827 - DNA, 397 bp, Zea mays
  unsure (1)..(397): unsure at all n locations
aagttcccctcgattagctacactgatcttcagcaacgagtctcttaggaaactgctgttccacaggaaaaaatcgagcaagaaacaggtgcacgggtatcaatcagtgatggtacagtcactattgttgctaaaactcaagaaattatggataaagctattgagaaggttgagttcctcgtgggacgtgaaattgaagttggtcgtacatacaaaggaattgtttcttcgattaaggagtatggcgcttttgtggagttcaatggtggacaacaaggcttacttcatatttcggagttgtcacatcaaccggttacgaaagtctcggatgttgtaactcttgggcaatctctctctctgagatgcattggacaggacatgcggngtaacattaaac

SEQ ID NO: 291828 - DNA, 394 bp, Zea mays
ctctcaggaacaacaattccttccattcaacctactgtctacactgaaccctgctgcttattggcagcaacaactattaccatttagccagctagctactgcctactctgaacaacaacaacttcttgcatttaaccaattggccgtactgaaccccgctgcttatttgcagcatcaaatactactaccatttagccagctagctacaacaagccgtgctttcttcttgacacaacaacaagtgctgacgctctaacaagagcttgcggctaaccccgcaaccctcttacaactacaacaattgctgccctttgtgcaacatgctttgacaaaaacaatagcctcctaccaacaacaccttattggaggtgccctattttagattgcttattag

SEQ ID NO: 291829 - DNA, 433 bp, Zea mays
cggattcccggtcgacccagcgtcgcgacctgggtagctttggcaccgcataggctaccatatccaggcacgtgtcaccactactgatgccattggctaccatgaacccatggatgcagtactgcatgaagcaacagggggttgccaacttgttagcgtggccgaccctgatgctgcagcaactgttggcctcaccgcttcagcagtgccagatgccaatgatgatgccgggtatgatgccaccgatgacgatgatgccgatgccgagtatgatgccatcgatgatggtgccgactatgatgtcaccaatgacgatggctagtatgatgccgccgatgatgatgccaagcatgatttcaccaatgacgatgccgagtatgatgccttcgatgataatgccgaccatgatgtcaccaatgattatgccgagtat

SEQ ID NO: 291830 - DNA, 239 bp, Zea mays
accgggggtacaatgccgttgttagctcgtttagaagagtatcggctatgtgcaagggatggcgatatgcattcaaccaacttgctttgacaaacccagcagcgttctaccaacaacccatcattggtggtgccctcttttagattgcttatgagttatagttcaataataaagttgttgtgatgatgtttgtggcttaccagagataagaaagtacagctctagatgcttatgtgcaa

SEQ ID NO: 291831 - DNA, 409 bp, Zea mays
ccggctctagccactcgtccttcgacatataaagcacaatattttaccttcaatggcagccaaaatattttgcgtccttgtgctccggggactgtctgcaaccgctgctaccgtgaccattttaccacaatgctcacaagcttctatagcttaccttcttcccccatacctctcatcatcggtgtcttcagtatgtgaaaacccaattcttcaaccctacaggatccaacacgcaatctcatcattcattatacctttatcacccttgatccttcaacaaccttcatccctattacagcacttacctttgatgcatttgatggcacaaaacatcaagacacaacaactacaacaacttgtgctatcaaaccttactgcctactctcataacaatcaaataattcaatta

SEQ ID NO: 291832 - DNA, 382 bp, Zea mays
cccgacgcgtccgggctgcggctgccagccaccggcgccggttcatctaccgccggcggggcatctgccacctgcggctcacctgccacctgcggtgcatatcccaccgccggtccacctgccgacgccggtccacctgccaccgacggtccatgtgccgtcgccggttcatctgccgacgacaccatgccactaccctactcaaccgctccggcctcagcctcatgcccagccacacccatgcccgtgccaacagccgcatacaagctcgtgccagctgcatggaacctgcgagcgttggcagtactcccgatcctgagccagtgcgtcgagtttctgatgcatcacagcagtcagaccgcgacgccctactgctagactc

SEQ ID NO: 291833 - DNA, 409 bp, Zea mays
aactactaccattcagccagctagctgatgtgagccctgctgccttcttgacacaacagcagttgttgccgttctacctgcacgctatgcctaacgctggcaccctcttacaactgcaacaattgctgccattcaaccaacttgctttgacaaactcaacagtgttctaccaacaacccatcattggtggtgccctcttttagattgcttatgagttatagttcaataatgaagttttttggatgatgtttgtggcgtcccagaaataagaaagtacatttctagattcttatgtgcttctagtctccaaatgtggtcgatagttattttgctctaagatcgggagtaatgaagtaaaaaaaaagatataacagaagacaaacactgaagaaaaaaaaaaagggcggcc

SEQ ID NO: 291834 - DNA, 308 bp, Zea mays
gcgctagcagaacagaatgaggacggtttttccatccttttttatttgcaaaaaatcgtgcccagatgaatggaaaaattttcttgaaagggtgcattgcgagagtgaagatcaactccacgagactgagcattctgaagagcagcttcgcctttgggcatcataccgatgacaaactttgacaagatctgtaagagggatgatgtactacagacaagctatagtgcttcaggcttcccttgatatggccagagatgatgaccttatggagggttttagagcagctgacctgttatctgaatctgatg

SEQ ID NO: 291835 - DNA, 185 bp, Zea mays
tctgactcgtgggcggacgcttttgtgctctccttgctttcacacttggtgtggagcagatgatttgctgctgcaacaagatggatgctactacacccaagtattcaaaggcccgttatgatgagattgtgaaggaagtctcttcctacctgaataatgctggatacaaccctgatcagatctac

SEQ ID NO: 291836 - DNA, 276 bp, Zea mays
aacaaatgcattcattattccacaatgctcacttgctcctagtaccattattccacatatcctacctccagatactccaatgcgcttctaacactcatatatgcaatcctataagctacaacaatctctcacttctatcgtcttacaacaaccaattttccatttacaacaacaatcctatatacatctaaccatacaaaccatagtatctaactatcttaacaactcattcaacaaaacatgataaaccctatatcctactttcaacaacagatt

SEQ ID NO: 291837 - DNA, 420 bp, Zea mays
cgttctggtcgtgtgcctggctatgtcatctgtcagcgcgtctgcaatgcagatgccgtgcccctgctcgttgctgcaagtcttgttctgcgctagcgccggcctgacgacgattatgggcgcctgctggctgtacacttacgcggagtacctgaggcagtcgaaatacagcacgatggcggcgactccatactactccgtgtgagggcagactaacgctatgtaccaggcgctgcggtaacagtgctgccatcagcagatgaggatgatggacgtacaatacgtttcgcatcagctagagatgaagattcagcttgagcgtgccgctgacgtcagcatcagcctgtactagccactgttgatgcatcatcagcagcatctgatggcagctcatgctcttaaccccatggccatgatgat

SEQ ID NO: 291838 - DNA, 192 bp, Zea mays
  unsure (1)..(192): unsure at all n locations
tcgcaccaacgtcaaattgcacccaagaaatccatcngagaggctcgtcgacaggggcaattaatggtcgtcgtcgtctagcagcagctcacccggcgtcttattctcgcagacgccgttctggtcttcgtgctctcgggtgtcagagccagcgcccggacctcctgcgtgccccggtgggccataccgcac

SEQ ID NO: 291839 - DNA, 361 bp, Zea mays
cccacgcgtccgcccacgcgtccgcggtactcgtgggctcctgcctatgtacaggagcaggaactactaccattcagccagctagctgctgtgagccctgctgccttcttgacacagcaacaattgtagtcgctctacctgcacgctgcgcctaacgttggcaccctcttacaactgcaacaattgctgccattcaaccaacttgctttgacaaacccagcagcgttctaccaacaacccatcattggtggagccctattttagattgcttatgagttatagctcaataataaagactttttgatgaaaaaccaacaacacataattggtggtgccctcttatagattgctaataaaaaga

SEQ ID NO: 291840 - DNA, 403 bp, Zea mays
  unsure (1)..(403): unsure at all n locations
atttgtctacactatcaatgtagttgctgaatctgtattaacatgcctcactggcagggacatgcaattctgaaggacctcgtccgcaaggctatcaatgaaacacatgagctgaagcagtttcccacccttcgtgtggaagtaggcaatgcagcttttgagtcattggatagaatgagggatgaaagcaagaaaaatacattaaagctagttgacatggaatgcagctacttgacagtagatttcttcaggaagcttccccaggatgttgagaggggtggaaatccaagccactctatttttgatagatataatgactcttatcttagacgaattggacaaactgttctgtcatatgttaatatggtgtgttcgaccttgaggaactccatcccanaatcta

SEQ ID NO: 291841 - DNA, 268 bp, Zea mays
  unsure (1)..(268): unsure at all n locations
cttctttccctttttataaactcaacaaattccttcattattccacaattctcactttctcctaataccatttttccacanttcctcccaacaattacttcaatnnncttcnaacacctanctnttcaatccaacattcaacaacaatctctatctactaacttcttacaacaaccaattacccaatttcaacaacaatccttaccacatctaacaatacaatccatcacaactcaacatcaacaacaattcctaccatcactttacc

SEQ ID NO: 291842 - DNA, 429 bp, Zea mays
cgtacccctcgctctcctggctatcgctgcgagacgccacctccacgcatacaagctgcaactgcggctgggagccagcgccgccggttcatctaccgccggcgcagcatatgacacctccggttcacctgacacctcctgtgcatctcccacctccagtccacctgccaccaccagaccatgtgccgccgccggttcatctgccgcacccaccatgccaataccctactcaaccggcccgtcctcagcctcatgctcagccacacccatgcccgtgccaacagccgaatccaaccccgtgccagctgcaggaaacctgcggccttggcagaactctgaccctggcacatgcgtccagtacctgaggcatcaatgcagcccgacagcgacaccctactgctcgcctcatagccagtcgttgccgcaaca

SEQ ID NO: 291843 - DNA, 361 bp, Zea mays
  unsure (1)..(361): unsure at all n locations
cagcaacaacaacttcttccatttaaccaattggccgcactgaaccccgctgcttagttgcagcagcaaatactactaccatttagccagctagctgcagcaaaccgtgcttccttcttgacacagcaacagttgctgcctttctaccagcagtttgcggctaaccccgcaaccctcttacaactacaacaattgttgccctttgtccaacttgctttgacagacccagtcggcctnctaccaacaacacatcattggtggtgccctctnttagattgcttattagttgtaattcaataataaagttttttggatgatggatgtggccaaccagaaataagaagttacatttccagattct

SEQ ID NO: 291844 - DNA, 354 bp, Zea mays
cccacgcgtccgcccacgcgtccgcccacgcgttcgcccacgcgtacggagccctgggaccttcttgatacaaccacagttgttgccgttctaccagcacgctgcgcctaacgctggcaccctcttacaactgcaacaattgctgccattcaaccaacttgctttgacaaacccagcagcgttctaccaacaacccatcattggtggtgccctcttttagatttcttatgagttatagttcaataataaagttgtttgtctgatgtttgtggcttcccagaaataagaacgtacatctctagattctaacaaaaaaagcccaacagtaggcacagtctcaaaaaaatattcccg

SEQ ID NO: 291845 - DNA, 412 bp, Zea mays
  unsure (1)..(412): unsure at all n locations
ctagatcgcgggcggccgccctttntttttttttttnnnnnnnnnnnnnnnnntnttggttggttttttttttttagaatctggaaatgtaacttcttatttttggatgatgtatgtggccaaccagaaataagaagttacatttccaaaaaactttttttattgccgcccttttttttttttttttgaacagataacattcatttacgaatttttttttggctaaaaagatggacattggttacttttttcagacttgagaaccaatattgccttcccagtctacctattaaaactaaatttttagttgcattaccacattttttccatccaagtttgtaacatattttttacaagacaatttttgcaccacggactttgggcccttattcagccatgttgaccagaaatt

SEQ ID NO: 291846 - DNA, 434 bp, Zea mays
  unsure (1)..(434): unsure at all n locations
gatgaaaatcgccgctcacatctcatctggcatactatggcggcgcctctcgtcgggcggacctcggcttccaccggcggtgcctagatcggcggcgcccggaccttggcctctgtcggcggtgcccggctcccctcggcatccaccgacgccggccgactcactatctccctccccccgttgatgcccgacatcaatggcggagcaccatcctgatctcatcatatgccggaagcagcctggcatcgtgattggtcgcgtgtgcgagaaatgtgatggcaagtgtgtcgtctgcgacgagtgcaattatggttcgttccagggaaggtgtgtgatatgtggaggagtcggcatctcggacgcttactactacaagaagtatggttctaagaagagatgatcgagatgatttgngctgtgtgtggttctctttg

SEQ ID NO: 291847 - DNA, 451 bp, Zea mays
  unsure (1)..(451): unsure at all n locations
attacaacaacaatccttggcacatctaaccatacaaaccatcgcaacgcagcagcagcaagcactgagccacctagccgtggtgaaccctatcgcctacttgcaacaacagctgcttgcatccaacccacttgctttggcaaacgtagctgcataccaacaacaacaacagttgcaacagtttctaccagcgctcagtcaactagccatggtgaaccctatcgcctacctacaacagcaacaacttctttcatctagcccgctcgctatgggcaatgcacctacatacctgcaacaacagttgttgcaacaacagttgcttgaacaaattggaccaactcttactcaactagcttgggcaaaccctgctgnctacttgcacaactactttcattcacncaactgactgtgtcgaactctgctgcgtacctacaacagcgacaacagttac

SEQ ID NO: 291848 - DNA, 418 bp, Zea mays
gcgacatagaaagtggaatccaatagcttcaacagagcaacaatggctaccgagatggtttccctacttatgctccttgctctttctgcatgtgttgctaacacgacaattatcccttaatgctcacaagcttctatacctacccttattccaccataccttccatcaatgatagcttcagtatgtgaaaacccagctcttcagccctatatgctccaacatgcaatcatagcaggcaacatacctttatcacccttgatgtcacaacaatcgccagccctatctatggtgcactcatagctacaaaccatcagggcacagcatctgcagcaactcatgctacctgtgatcaaccaagtagctgtggcaaacctattatgctactctgagcaacaacaaattcttccatttaaacaac

SEQ ID NO: 291849 - DNA, 415 bp, Zea mays
cccacgcgtccgcgcggagcaggtgcatcagcacttcgctctgcgctctggcgttactgctcgcaataccagcagcagcagcaccgtgccaacgaggctttgctcccgcgcgtgcgcgcgcgcgctcgtgatggcagcagccccggccgcgtcgtcgtccacgtccgggtcgccggccgccggcgggccgcggtagaggatcgtcgacacgacgctgacgaacgtgttcgtgggcgagatggcgtgggagacgctctcggaggggctccagcagcacttcgagcggtacggcgacatcctggaggccgacctcatcacggaccgcttcaccggccgctgcaagggctacggattcgagacgttcccggagccggacgcggtgcagcacgcggtgcaagacctgaacccgacgatc

SEQ ID NO: 291850 - DNA, 229 bp, Zea mays
aaagcagcgacccgagagatggaccccagggtggtccggcttgaaaaccccccggtgggcgggcttgattaactggttgaccttccccaacggcaacaaggcggccggcgggccaaccgcaactacgtccgcgacgcgcgccgcatggcggccaccccggccgacgtcaaggagctcggcggagcgtacgcgttcgtggtggacatgcccgggctgagcacgggcgaca

SEQ ID NO: 291851 - DNA, 348 bp, Zea mays
ttgcgacccaccttacaaggtggaatccagtatcatccatagagcaacaatggctaccaaaatattgtccctccttatgctccttgctctctctgcatgtgctgctaacgcgacaattttccctcaatgctcacaagctcctataactatccttcttaccccataccttacatcaacgatagcttcagtatgtgaaaacccatctcttcaaccctataggctacaacaagcaatcgcagcaagcaacataccttgatcacccttgtttcaacaatcgccagccctatctttggcgcaatcattggtacacaccatcaaggctcagcatctgcaacaacttgtgctacc

SEQ ID NO: 291852 - DNA, 376 bp, Zea mays
ggcggggccacgtgaactctcgctttattgcgagcgacgtgcttctggcgatccgtgacgaggttgagcttggaaagctgttggacagcgtgaccattgcttaccgtggagtgctggccaatatcaaccgtgttctgctgcccatgatgacggcggagaaggcgtccagtggcggtagcaaggaggcaaagtcgtccatgaaggccgccctgttctctactaacgcatagactgactgttcggagtgatctgatgtttagcagtaccttgttaccagaatgctgagatgcgtatgctgcagatgggacgaatgtgcttgtatgtgtatgtaggctgctgtaagttgaactttgctatttacaatggaagaagaaat

SEQ ID NO: 291853 - DNA, 276 bp, Zea mays
tcgcccacgcgtacgcccacgcgtccacggttcgtgggtgagctgatcgagatcggccgcgtgggatgttgagtaccgctgcttcgtcagctgcctcgcctgtgccacggacgaccactccctccacaacgccttcagcacctacagcgaggtcctctagtccaagatcatcctcgatcgggatacgcagaggtcccgcagattcgggttcgtcaccttgtccacggaggacgcgatgctgaacgccatcgatggcatgaacgagctggaactgga

SEQ ID NO: 291854 - DNA, 433 bp, Zea mays
cccacgcgtccgctgataccgtactaccgtctacaggatcagtatagctgaaggcatgagcaaattggagggtgtagacggtagtacggtatcaaaacaaggacttcgatttgttttcactgatggatctaggattatcttccggctttcgggaaccggatctgctggagctactatccgcctctacatagaacaatttgaatctgatatctcgaagcatagtctcgatgctcaaacagctttgaagcctttaatagacctggctttgtctgtttcgaagctcaaggacttcacaggaagagagaaacctactgtcataacataggccctgtttgtttcggcttttggcagcttctggccaccaaaagctactgcgtactgtcaaacgctcagcttttcagccagcttctataaaattcggttggggcaaaaa

SEQ ID NO: 291855 - DNA, 263 bp, Zea mays
cggacgcgtgggctcgctctgctagcctaccatggctgatcaccaccggcgcgcgacgggaggtggcggtggctacagcgacctagatcgctggggcgggatgcacggcgaggcgcgacagcagcagaagcatggcgccatgatgacggcgctcaaggtcgcgacggccgcgacctacagctgctcgatgctggtgctgtccgggctgatcctgtgcggcaccgagatcgcgcttacggtggccacatctgtgctggtgatct

SEQ ID NO: 291856 - DNA, 138 bp, Zea mays
tgactctccctgtaacgtcacattatgcgcggcgggtgtcgtggttactctcatcgtgaccgttacacttgtcagtgctctaacgcccactccttttgctttcttaccttactttctcgacacgttcaacggcttttc

SEQ ID NO: 291857 - DNA, 413 bp, Zea mays
agttaaaacatcattttggtggtggggaaatttgtaaccttttcaagttattggcctggttggattttaccccgttgtgtgagaaatctaatactccgcttggatgtcgatattggagaggatggaattgaattgggttgaataccaaatcaggcatgatattgaaatgagatataatttcaattctattgtttggatgtcactgaattggagtttggaattatgcggtctaattctaggcaataccgagggggtgaggctttgtattggaagagggggtttctagttatagtctaatttcagggaattgggcctctgattccaaatctcaattccacatgcaacgaatcatcataatttaggaaagctgattccaattctcaattctgtgattcaatctctacatccaaacg

SEQ ID NO: 291858 - DNA, 434 bp, Zea mays
gcaccgacacttccgcccacactttctcatgtcgcattagaacaaacaataacaaccaggatgttttccctccttatgctccttgctctatctgcaatgtgttgctaacgcgacaatatttccctcaatgctcacaagctcctatagcttcccttcttcccccataccttccatcaatgatagcttcagtatgtgaaaacccatctcttcaaccctataggcttcaacaagcaatcgcaacaagcaacatacctttatcacccttgtttcaacaatcaccagccctatctttggtgcagtcattggtacaaaccatcagggcacagcagctgcaccaactcgtgctacctgttatcaaccaagtatctctggcaaacctttctacctactttcagcaacaacaatttcttccattcaaccaactgtctacattg

SEQ ID NO: 291859 - DNA, 317 bp, Zea mays
ttgtgatttaagtttggccaggggccttgattactacactggtggcatatattaagccggtgtgaaaggtgccacttaaggtggcttccttaccggttgttggtcgtgccaacaaccttgtgggtttgttaagtgggaagcaaatccctgctgttggtgtgagccttggaattgaaagagtctttgcaatcatggagcagcaggagaaagaaagaaatgagaagatccggcctacaaagacagaggtgctggtgtcaattcttggaaaggaccttaccctaactgccgagctcgtgagcgagctgtggaatgcttgg

SEQ ID NO: 291860 - DNA, 262 bp, Zea mays
cccacgcgttcgaaaaaaaaaaaaaaatataaaaaaataaaggaaataaataaaataaagaaagaatataaaacataaaaaaaaaaatggctgccatttttcaggatccaagtttaactacccttgattgcaaagtactaactcttcataatcgtaccctaaattaacttcactgcccgtcatttaacaacttcgggactgagaaaaccttggcgtttccaaaattaatctccttgcagtaaatccccctttctccatatgg

SEQ ID NO: 291861 - DNA, 290 bp, Zea mays
cccacgcgtcccgccaagccttccgccaagccttccgccaagccttcccaacccttaaggtttggcccccaaaacccaaattttcttccattaattacttgagcccttgacccccaccgaacccggtacaaagccaagaacggggctgctgggcgcaaggctggcggccccaggaagaagtcggtgtcgcggtccctcaaagcccggctgcagttccccgttggccggatcgggcgctacctcaagaagggccggtacgcccaacgcgtgggcaccggcgcccccgtcta

SEQ ID NO: 291862 - DNA, 418 bp, Zea mays
ccgacgcgtccgcaagatcaagatcggtttcaatgggtttggcaggatcggaaggctggtggccagggtggccctgcagagcgacgacgtcgagctcgtcgccgtgaacgaccccttcatcagcaccgattacatgacctacatgttcaagtatgacactgtgcacggacagtggaagcaccatgaggtcaaggtgaaggactccaagacccttctctttggtgagaaggaggttgctgtgtttggctgcaggaaccctgaggagatcccatggggttcggttggcgctgaatatgttgttgagtctactggtgttttcactgaccaggagaaggctgcagctcacttgaagggtggtgccaagaaggttgtcatttctgctcctagcaaggatgcccccatgttcgttgttggtgtc

SEQ ID NO: 291863 - DNA, 434 bp, Zea mays
gtaatgctggcttctaccggtgaaggaaaccaaccaggggccttggaacaattcttcggggatggctatgataagcagaccgaggattttcaaccattatgcaccataggtcctggattttctgagcaacagcttgaagaacgttctgcgagccttcgaagtaaagtgatagaaaaaccaaaggcatactatagatttggcgacacaatgaaccccgatgtgtggtttgagccatcagaggtctgggaggtcaaagctgccgatctgagcataagccctgtacatcgtgctgccaatggtatagtcgatccaaataaggtctgtagttcttttttgcattgccattcctccccatctcgattgtatacttctggtatagtatgttggaaggctaatgctgaaatcgaaccaaggtatctctctaagattccctc

SEQ ID NO: 291864 - DNA, 342 bp, Zea mays
tagaagaaaacacgagcaccactgagagagcgttccaggatcggcagtatcaggttgacgcggacatagttcgaataatgaatactcggaatgtcctcaaccacacccttctaataactgagctttaccagcagatcaagttccatggcaagccagctgatatcaataaaagaatagacagcttgatcgaccgggagtacatgtagcgcgacaggagtaacacccagatctacaactatctggcttgacaacgttctggtggatcgttcgcatctcattactatgagacataggcactgtcaatcaatttattctccggattatcagcatttcatgctatta

SEQ ID NO: 291865 - DNA, 283 bp, Zea mays
tcgacccaccctttcgtccacgcgtccgccaacccttccgaatgccccttccgaaggccgccttcaaaaaccggtagaaccatactttatcttccaccccctactaccacctgaagaagacgtccgcttgctacctctgcactgtcactgtccccgtctacagcacgctgtacctgaccaacctgaacgtcgccttctgcaacgacctgccgatctccttcgccgcgccgtctggccagaccgtctggagctactacaaagttatgatcccccttggcaagat

SEQ ID NO: 291866 - DNA, 377 bp, Zea mays
cggacgcgtgggtcaaaccataagctttatctactcaaaaccgcaaaagaacccgagggagaccttgagggtgttgctcgttgccctcgctctcctggctctcgctgcgagcgccacctccacgcatacaagcggcagctgcggctgccagccaccgtcgtcggttcatctaccgtcgtcggtgcatctgccacctgcggttcacctgccacctactgtgcatctgccaccgtcggtccacctgccgccgccggtccacctgccaccgacggtccatgtgccgacgccggttcatctgccgtcgacaccatgccactaccctactcaaccgtcccggcctcagcctcatccccagccacacccatgcccgtgccaac

SEQ ID NO: 291867 - DNA, 356 bp, Zea mays
cgagcgctcctttctagccttcacttctcagcacggctgcctttgacccccgactgcggtcgtcagcacgtccatggagcaagccgacatgccagacgttccccgcgtaaagctaggcatacagcggcttgaggtgtctaagctggcgttcggctgcatggggctaacgggcacttacaacacgccactcggcgacgaggccatggccgacgtcttcgcgcactcgtttcgtcgagggatcacctgtttagacacctgctattcctacgggccacggaccaactagaccctactggggaaggcgctcaagcatctgccgagggagcaattgcatgttgccaccaagttcgtgataa

SEQ ID NO: 291868 - DNA, 225 bp, Zea mays
tgatgatctcccccgaggacccgtgcaagtgcttcgtcaagcgcgtaatccggatgcacgggtactccgtcacctaccttgtcgaccccggcataagcgactgcttcttcagaaccgctgttgtaccgcaagatcatgtctgggtgcacggcgataatatctttgcttctcatgattccaggcgatttggatccccgccttattggctgattacacggaaaatat

SEQ ID NO: 291869 - DNA, 353 bp, Zea mays
cgacaaccattgttccgcaatgctcacaagctactatagctcatcttctcgcgagaggcctcttaccagcgtggccttcagtatgtagaaaacctaattattcaacacctacaggatccatcatgcaagcacagcatgcatcttacctttatgcacccttgatcctccaacaatgataatccgtatcacatcagtcacctatgctgcattaattggcacagatcatgatggcacaacatctacaacatctcgagctagctcaccttgctgtctacactcagctacagcagttacctgagatgctaatgatggcacaaaacatgacgacacatcatctacatcatctagtgcta

SEQ ID NO: 291870 - DNA, 337 bp, Zea mays
cgcacgcgtccgcgtacgcgtgggctgacgcgtgggcgctactgccgtacccagggcgggagtccggcagcatggacgaggctgcctaagcgtgcgcaatcgtctcttggacagcctactgtccacgaccgctgacgcaatctccaagttcgacagcatagccgataggatcagcatcttctgctcgtccgacgaggctgcggaggcctctatctctaccttgaagaaccttacttgtgactggtaactcgcagctatgctgtaccacagcttatcgtaacactactccgcgcagtctctcagagcgatcaatgaggacgtaagcacgcttgtcttc

SEQ ID NO: 291871 - DNA, 389 bp, Zea mays
gcagccctacggcgactccctactgctcgcctcagcgccagtcgttgaggtagcagggttgccagcagctgatgcaggtggagcctcagcaccggttccagacgatcttcggatcggaccttcagctcattctgcagcatcagccacatagaggacagctagtggcgctgctggctgcgcaaatagcgcagcaactgacggcgatgtgcggactgcagcatacgactacatgcccatacgctgctggcggacgtgaaccgactgaagaaactatgtgctgtactatagccgttggctagctagctagcagagtcatttagcggcgatgatcgaatcatgatgattgacgcatgatcatgggtggaacgaacagtgtgaacaatagcctg

SEQ ID NO: 291872 - DNA, 393 bp, Zea mays
gctgggtatcagacaagtcatggaagggcaaatggcaatggcctgaccattggatgggatggttgttgctatatgtgcttctatatagagagaaaataaggggtagatccgcgagtacctatgtacgcaatcattctgcaccatcagccacatagcggccatctagtggcgctgctggctgcgcatatagcacaacagctgacggcgatatgcgggctgcagcatactactccatgcccatactctgctggcggacatgaaccccactgaagaaactatgtgctgtactatagccgttggctagctagctagctgagtcatttatcggcgatgatcgaatcacgatgattgacgcatcatcatgggtggcagagtcagtgtgaacatagcctg

SEQ ID NO: 291873 - DNA, 281 bp, Zea mays
  unsure (1)..(281): unsure at all n locations
ttcgtaccatcataaccgacctgatgttccttgccttcgggtttgcaattttcttggtccggaaggcactcatctggggcaagaaatcctaaggcgccgtgccattaaccaccatgtttgctctggtactcctctggttcggcatctccgtgccattggtctttatcggcagctacctcggcttcaagaaacctgccatggangacccagtgaggacaaacatgatagcacgggcaataccggagcagccatggtacatgaaccccgtcgtctcggtgctg

SEQ ID NO: 291874 - DNA, 238 bp, Zea mays
gttctagatcgcgactgccgcccttttttttttttatgcattcattcaatcacatcggtatggtttttaataaatatgcaaaaattcctctaataactcttatttcaactctgcactatttctaaccatatcccatggaacttgccacaactactgatgccatttactaccatgaacccatggattcaatactccatgaagcaacatcctgttgccaacttgctaacgtaaaccaccc

SEQ ID NO: 291875 - DNA, 430 bp, Zea mays
acgaaaagcctgacggctgtaacaatgaccttaagtttcatagtccatgctaagagactccggggtgtaaagaatgcggactcaatgctataaatataagcttagatacactagtacctgcaaagtttgacttcatgacacggcgtcaaggacactcagaggtcttgtaatcaatagatgctgctgtaaaacttgggtatagccctgttaaggtcaactgtgtcatcatgcatggtataaatgatgatgagatctgcaattttgttgaattgacgagacacaagcccatcaacgttagatttattgagtttatgccatttgatggtaatgttaggaatgtgaagaagctagttccttatgcatagatgttggacaaagtgcggcaaaggtttaaaggagtagagagacttcaagatcaccccacagacac

SEQ ID NO: 291876 - DNA, 443 bp, Zea mays
  unsure (1)..(443): unsure at all n locations
cccagcctccggccaagcgttcggccaagccttcgccgaccccttgggaactttggtggttaattaccaccggcaccggttccaacatttaagccggttacttaaggtaaccccggtggccttctggacacacacagttgttgccgttctacctgcacgctgcgcctaacgctggcaccctcttacaactgcaacaattgctgccattcaaccaacttgctttgacaaacccaacaacgttctaccaacaacccatcattggcggtgccctcttttagattgcttatgagttatagttcaataatgaagttttttggatgatgtttgtggcttcccagaaataagaaatgtactttcttacttcttcctggagagaaaaagcagaagacaatacaaagatgtccaagatggcggaggagaaggcggcngcagtgggcggactc

SEQ ID NO: 291877 - DNA, 196 bp, Zea mays
cgagtgccgaatactcataggagcgatttgaagtgatggtgaacgtcgtcttattctgcctcggcaaaatcgggtatcaagcctgttatgattgccttagtacagatctctgcatttgagggctacaacatgatagagaggtcaaccaacctagactggcacagatgcccgaccctgctacaggctattaaccaga

SEQ ID NO: 291878 - DNA, 422 bp, Zea mays
  unsure (1)..(422): unsure at all n locations
cccacgcgtccgcttgtccacgaagaatgggctgggtttgcacctttggaagtgggagctcctcgtgttcgtgctcatctgcgggcgtcttgtcttcggatgggtcattaagattgccgtcttcggtgtcgaacgcaacttcttgcttaagaagcccgtgctctactttgggtatggagtgcccaacgccgtgcaaaacgcgctcttgctcggcctggtgctcgcctcttggcacttcttgtttgacgagaatgtccagcaagagacgaactctccagtactgccctatgtgacgaaggtactattctgctttcttgttgccacgctcatccgccttgtcaagacattgctgctgaaggtactggcctnctccttccatgtctcgacgtactttgatcggattcaagaggcattgttcaatc

SEQ ID NO: 291879 - DNA, 445 bp, Zea mays
atcgcgggcggccgcccgcgatctagaaccggacgcgtgggcggacgcgtgggcggacgcgtgggcggacgcgtggggagagaccgaggcgcccgcggttctgctttccttccttgccccgttcacgagagaattttctggagtcttcgactcgagcagggttccgatggcgctgcaatggatgatcctggcgtgcgtggtggcggtggaagctgcggtggctgcgctggtcacgctcccggtgccccgcgctgtgcggggccagatcgtcgcgctcacgtccttgttcctgcagcccctgtccagtgtgatacccttcggcgccttccagatcctcgatctctactggaagaaggagcacagactgatgtgcacctcggagatttgcaccgccgaagagcgcattcgcttcgagaaatctatgtttaaagctcagagaaatgtc

SEQ ID NO: 291880 - DNA, 412 bp, Zea mays
gccctggttcttcaacaaccggcaggcctaatacagcaggtacccttggggcatttggtgggaccaaacataaaggacaacaactacaacaacttgtgctaagaaaccttgctgcctactctcagcaacagcagtttcttccattcaaccaactggctgcattgaactctgctgcttatttgcaacaacaactaccattcagtcagctagctgctgcctacccccagcaatttcttccattcaaccaactggcagcattgaactctgctgcttatttacaacagcaacagctaccaccattcagccagctagctgatgtgagccctgttgccttcttgacacaacaacagttgttgccgttctacctgcacgctgcgcctaacgctggcaccctcttacaactgcaacaatt

SEQ ID NO: 291881 - DNA, 406 bp, Zea mays
  unsure (1)..(406): unsure at all n locations
nccacgcgtccgaaaccggcaggtaatgttgggccggtattaaattggccaccaggggcagaggcttattattggccattaccccaggttattggaaaccttttggcaccagaacaagctttttttggttaattaaaccattcaaatttggttaaaccttgaagacccatttgcacgtgataggtacaaccaatgatttaaagtcgcctagtcggctggtcgaaccctgggactgaccaggcgactagtcgcgattaggcgacgactagggcgactagtcgacccctagtcggtcctagtcggtccctggtcgtcctagactagtagctatacttatataggtatatatataaatatacctgtatacattatataaattagaacaaacaactaggataaacaaagt

SEQ ID NO: 291882 - DNA, 424 bp, Zea mays
  unsure (1)..(424): unsure at all n locations
ggcgactatcgcctccgcgattcccaccctcgcgagcgtgccgatgctggcgtgggccaaggccaacatcaaccccaccggccaagcgctcatcgtctccacggtggccgggatggcctacttcatcgccgccgacaagaagatcctgtcgctggcgaggcgccactcgttcgaggaagctccggagcacctcaagaacaccttcttccagggcaccggacgcccccacccggctttcttcaagccatgatgagatcagatatatatatgacacatccggcgacctcatcagtcatagaacccaagcagccagtcagtcagtcagcacaagcacaagcaccaaagatgatgccattcaagtctgcatggttgcatttataaaaaataaactgctangctgatgacgcgctctaatataagctag

SEQ ID NO: 291883 - DNA, 277 bp, Zea mays
gaggaattttcctttattttaaaagggttgttaccggaagaatgccaccttcaaccttgcggggatggaagcctgttaacgtgtcaactctggatgtgacctcaaggcctccgtgatgatgggagcggacacctatgaaactgaagaagaagcttcaaagctactgttagctgggaaggtcccagttggaataggaaggaacacaaagataaggaactgtatcattgacatgaatgctaagattgggaagaacgtggtgatcacaaacagtaagggc

SEQ ID NO: 291884 - DNA, 406 bp, Zea mays
cggacgcgtggggtggaatccagtagcatcaacagagcaacaatggcgaccaagatatgttcgctccttatgctccttgctctttctgcatgtgttgctaacgcgacaattttccctcaatgctcacaagctcctatagcttcccttcttcccccataccttccatcaatgatagcttcagtatgtgaaaacccagctcttcagccctataggctccaacaagcaatcgcagcaagcaacatacctttatcacccttgttgtttcaacaatcgccagccctatctttggtgcagtcattggtccaaaccatcagggcccagcagctgcagcaactcgggctacctgggatcaaccaagtacttttggcaaaccttcttcctaattttaagaaccaccatttctttc

SEQ ID NO: 291885 - DNA, 331 bp, Zea mays
  unsure (1)..(331): unsure at all n locations
ttccacgcttccgaaaacgcacaatcgcatagcaacttccaccacctaacaaccgtgggttcccagaatataatccttcctgggcctcctggcccttttggcaagccccacaaaatgcgntcaatatttcacaatgctcacttgctcctagttccattattccacagttcctcccaccagttacttcaatggccttcgaacacccagctgtgcaagcctataggctacaacaagcgattgctgcgagcgtcttacaacaaccaattgcccaattgcaacaacaatccttggcacatctaacaatacaaaccatcgcaacgcaacagcaaca

SEQ ID NO: 291886 - DNA, 413 bp, Zea mays
cggggaccaagcgtccgcgcacgcgtccgcggacgcgtgggttttgttttcaatttccatcccaagaaaacttgcgagggctacaaagtgggatgcgatttgcctgggaaatacagagtagccctggactctgatgctctggtcttcggtggacatggaagagttggccacgacgtggatcacttcacgtcgcctgaaggggtgccaggggtgcccgaaacgaacttcaacaaccggccgaactcgttcaaagtcctttctccggcccgcacctgtgtggcttattaccgcgtgaacacatcaggtgatgatgcacttaccaatgcattggagatattcaatacatctagtggagctcttcacttcattgcatctaacaatgactgtagtggtagagagtatgatatggaaag

SEQ ID NO: 291887 - DNA, 414 bp, Zea mays
cggacgcgtggggtgttgctaacgcgacacatgtagaaagagcaaggagcataaggagggaaaatatcttggtcgccattgttgctctattgttgctactggattccactttctatgttgctaacgcgacaattttccctcaatgctcacaagctcctatagcttcccttgttcccccataccttccatcaattatagcttcaatatgtgaaaacccagctcttcaaccatatacgcttcaacacgcaatcgcagcaagcaacatacctttatcgcccttgttgtttcaacaatcgccagccctatctatggtgcagccattggtacaaaccatcatggcacaacagctgcagcaactcgtgctacctctgatcaaccaagtaactctggcaaacctttctccctactctcagc

SEQ ID NO: 291888 - DNA, 284 bp, Zea mays
cccacgcgtccggatctagaccgcattctcgatcttcaagttgttcattatttatggtgcccatttcctagtagaatcccgtgcttaagaatctggctgatgatgagcccgttatatagaatgcccctgccgggaagaatcccaatgcagcaaaacgtgtaccaacaggcaagtccatcagcaaggacggcgctgtggaaaagaaggaccgtaagatgcgcacgaatagcgtggagacctacacgatctacatcttcaaagtgctgaagcatgtacaccagtac

SEQ ID NO: 291889 - DNA, 179 bp, Zea mays
ccgggttgaaccaagccttccaaatatatattcctgaacaatccaaaactggttaaggggggtggcctaactgcataatgccggatttaaatagagagggatggatagacgacacacattatcatgtgtggtatgaccaataatatatgcatgatcataataaagttttggttttaatg

SEQ ID NO: 291890 - DNA, 305 bp, Zea mays
cccacgcgtccgcatcccgcctccaaacccgaactccaagtcgccccgcatcgatggcgcccaaggccgagaagaagcccgcggcgaagaagccggcggaggaggagcccgctgccgagaaggcgccggccgggaagaagcccaaggcggagaagcgtgtcccagcaggccaggcccgccgccaggaaggccgccagggaaagaagggcccggagaaaggccaggagaaccttgagaccttccaggaccaccttcttcaagggcctgaaccaggtccacccggccatgggcatttcctttaaggc

SEQ ID NO: 291891 - DNA, 388 bp, Zea mays
tccggggtggaccaagccttccgtaaccaaacttggggaataatgtattttatgatgggccacaaattgccattgtgcgggcggttctgaaaacaagattgatgtctctccgcgcacttcaatgaacagctgattcttaactaaaataccgtccatcaatgatagctccagtatgtgaaaacccaactcttcaaccctataggctccaacaagcaatcgcagcaagcatcatacctttatcaccctcgtttcaacaatctccagccctatctctggtgcagtcattggtacaaactactgcggcacatcatctgcagcaactcgtgctacctgtgatcaaccaagtagctctggcaaaccgttctacctactctcagcaacagcaatt

SEQ ID NO: 291892 - DNA, 401 bp, Zea mays
cacacgcgtgcgcattgaaccattctaactatgggaacgcagctgcaacaagcactgggcgacgtagccacgttgtactctatcgcttacttggaacaactgctggttgcattcaaccgactcgctttggcaaacgtagctgcataccaacaacaacaacatgttgcaacagttggtgtcagggctcaatcaactagtcatggtgaacatctatcgactacctacaacagcggcagcttgcatcatttagcccgatcactattggcaatgcatgtacatacatgcaataacaggcgttgcaacaactgaagctgtaacaaattgtaccagctcttactgagctagctgactcaaaccctgctgcctacttgccacatctacttgcattcaaccaactgact

SEQ ID NO: 291893 - DNA, 300 bp, Zea mays
aaatattttggccccctatacccattgagccaattggaaatgcttcttccggctgcaattttcccgcaaagttaccagcctccttatcatacatttttatcgcgtaccttttaccagcgttgactctcaaatgtgaaaacccaattcttcaaccctacacgatccaacattctatggcatcacgcatcttacctttatcacccatgatccttcaacaatcatcaggcctattacagcctatccatttggtgcatttattggcgcaaaacattatggcacaacaactcgtgctagcaaacc

SEQ ID NO: 291894 - DNA, 411 bp, Zea mays
aatatcttggtctccattgttgctctattgttgctacatgtgttgctaacgcgacgattttccttaattgctaacaggctccaatagcttccttttttccccaatactttccatcaataatagcttcagtttgtgaaaaccaagctcttaaaccatataggcttaaacaagcaatcgcagcaagcaacatacctttatcgcccttgttgtgtcaacaatcgccagccctatctttggtgcagtcattggtacaaaccatcagcacacaacatgtagaaactctcgctctacgtgatatcaaccaagcatctggggcaaacctttcttactactctcagcaacaactttttctattatacaaacaacttactatgctgaacgctgcttattatatgcaacaactattaccaa

SEQ ID NO: 291895 - DNA, 416 bp, Zea mays
cgaggtctatgcatggacaccagtaaagatctcaaatggcaattactttctggtaaaagggctactgaagacggaagcatattgctctctgctgcagtgccaatttttcatcaatcttttgatccaatccgtgaagctctcactggtagagatctgattcctgagatggttaacggttaagataaccgaacaacactttgttttggaggtatgcataaggtcctcatctcatgtaaatgtaccaggaggggacctaaggagggaatgcccgggcaagattacagtggaatgtactgcgcactgttaactgtgggctctaccgaggtgtcagcagcacttctgcgtgtaatgggaggcgatgtggccgagctgccactagttgctacaagccaggatgttcaagggctgggctactt

SEQ ID NO: 291896 - DNA, 308 bp, Zea mays
ctctgtcgatattctgaccaatgacttaggagctgctgttgcttcaaatgatgcaggagaacctattggctctaacatctatgttgctggtggaatgattaaggacacaccgagtggaaactacattctatcagctgcctgatccattgagttatgtcccataagacgatatagtatatgctataaaagccatcgccgtcacacatagggaaaatggaccaactgattaccgcatgtatagcatgattaagtatacagattgaccgtcgtggaatagataggtatcggactgaagttgaaaaatatta

SEQ ID NO: 291897 - DNA, 238 bp, Zea mays
cacaacgtccttccacagagaccatctacgtctgatcttcgccggacagcagataggggatggtcttaccctagcagactacaagatccataaagagagcactctacagctggtactacacctccacggtggtcagctagccatgcttcacttatactgctgttgaacctatgtatcagcgtcgtcttgtgccaactggtgtacctatatatagatgtagtcctctaataaacatctg

SEQ ID NO: 291898 - DNA, 318 bp, Zea mays
cgtccgcgcacgcgtccgcggacgcgtgggcttacgcgtttgctgacgcgtggaaggatttggaaatcgggaatttttaaaagcgtgctgctaatcatgcaaaggagcctaagaatgtaaatcgaatatcactgacgactaataaagtacaacctgatcaatcagcaagccaaccaaaacatgttgccaatgcctaaaagtaccgaggtcttattacatattagctagagagtatttcttacatacatccaaaacaaccgtttaaatattgataggatattgccatcgaatcaacacctggttcactattaaatacac

SEQ ID NO: 291899 - DNA, 356 bp, Zea mays
gctacgcgtccggctacatgccatattatctggggctttgcaaggctatggactgagctaggcacagatgtttaacttatgaaatggcacgactgccatcatgtcggacattacagttcacatgagattgaatacaagaatgctgtaaatgatgctttgaagaccgctcttgataccttctgactctgtaaccaactatatgactcagatatggatggtgaccaggagtattagatagcgcacttactgtgcactctacacaatgctgcagacaattcaaatgagagcttaagaagggttgctgacagttctagcgatcactgtttgttgcctagtgctaaggatcatgatcaatc

SEQ ID NO: 291900 - DNA, 409 bp, Zea mays
gaagaacccgctcgacaccatgagggtgttgctcgctgcccttgctgtcctgggtctcgctgcaagcgccacctccacgcatacaagcggcggctgcagctgccagcctacggcgccggctgatttaccgacaacagtgcatatgccaactccggataagctgacagctacggagcatctcacaccgccgattcacctgccgacgccggtacacctgcaaccggcagaacatgtgccgacgccggctcatctgacgacgcaactatgccagtaccctactgaaccgagccggcgtgagcatgatccccaagcacacacatgcgcgcgccaacagccggatccaagcgcatgccagatgcatggaacctgcagcgttggcaggacgccgaccctgagacagtgcgaagag

SEQ ID NO: 291901 - DNA, 435 bp, Zea mays
gtgggtacttggggtccctagccttcttcagggtcgtggggcgttgaagaagattgaagataacaacactctggtcttcattgttgacctcaaggcagacaagaagaagatcaaggctgccgtcaagaagatgtatgacatccaggcaaagaaggtcaacaccttgatcaggcctgatgggaagaagaaggcttacgtgaagctgactcccgactatgatgctcttgatgtggccaacaaaatcggcatcatctaagtgctgcattaggcatcctagttcatctgttgtgtcctagttctatgtgaaaccagagttttgtagctatggctctcaatcgttccattaccatgtgttatgcacacttctgaatttgatatcatccaagtgaccttttgaactagtttgcgttctgcacttcattacacttggacacc

SEQ ID NO: 291902 - DNA, 405 bp, Zea mays
cccacgcgtccggctctttctgcatgtgttgctaacgcgacaattttccctgaatggggacaagctcctatagcttcccttcttgccccataccttccatcaatgatagcttcaatatgtgaaaacccagctcttcagccctataggctccaacaagcaatcgcaacaagcatcatacctttatcacccttgttgttgcaacaatcgtacagccctatctatggtgcagacattgagtacataccatcaaggcacaggacctgcaatacctcgtgctacctgtgatcaaccaagtagctctggcacacgcttgtgcctactctgagctacatcaatgcattgcattcaacctactgtctacactgaaccctactgctaacgcgcagcaacaactattaccattca

SEQ ID NO: 291903 - DNA, 392 bp, Zea mays
ctgtaaataagcaggagagttcaatgctgcgcctaacgctggcaccctcttacagctgcaacaattgctgccattcaaccaacttgctttgacaaacccagcagcgttctaccaacaacccatcattggtggtgccctcttttagatttcttatgagttatagttcaataataaagttttttgtctgatgtttgtggcttcccagaaataagaaagtacatttctagattctaaaaaaaacaaaataacatgcaatatgcatatatatagacaacaacaacaatggcacaacggacgacaacaccaccgaccgacgacgagccggtccacgctatgcatgcatgcaactacgtaacatatattaccaggttctaagatattcttatatatat

SEQ ID NO: 291904 - DNA, 431 bp, Zea mays
  unsure (1)..(431): unsure at all n locations
gcaattagctcatcgaactccagaatgggagaacctcgccacccttgaaggtccgaatggtggccttggttttctggcccctggttgcaacccccgcttcagtacaagcggcgctgtggctgccagacaccancgtttcatctaccgtctncgttctatatgccgcctacgttctatctgccgccgcagcagcagccgcagccatggcaataccccactcaaccaccgcagctaagcccgtgccagcagttcggatcctgcggcgtcggcagcgtcggcagcccgttcctgggccagtgcgtcgagttcctgaggcaccagtgcagcccggcggcgacgccctacggctcgccacagtgccaggcgctgcaacagcagtgctgccaccagatcaagcaagtggagccgctgcaccggtaccaggcgacata

SEQ ID NO: 291905 - DNA, 422 bp, Zea mays
cccacacgtacggccacacatttcattaaacaaaatgcctgtatctaactgtgatgagcatcagcgacaacctcatccattcagccacctagctactgactaccagaaccaatgccttgcattaaaccaactgactgacatgaactctgctgctcatatacaacagcaacagctaccaccattcagccagctagctgatatgatccatgtcgccttcttgacacaacaacattatgctacaatctacctacacgctgctcctaactctcacaccctataacaactgctgcagtatctgccattcaaccaacttgctatgacaaaccctacaactttctaccaacatccgatcattgacggatccctaattaatatcgtatacaagtaatagctcactaatgaagattaccggaacatgtaag

SEQ ID NO: 291906 - DNA, 264 bp, Zea mays
gcttggtcttcagagagagcaccagctctctctgaagaccgatagggaaaagaagcgtgagatgtacttccccatgatgcagtatgctatgaaggcctaggtcagaactgcgagacgctgtgcttagcatatgatagggtgtatgttaattattgggatgaatggacatttgctgtgggtcggaagtacgacgtattcctccatttccataaatggctaaattggactgactggcgcaaaactagcaaagaagaggactcgcgt

SEQ ID NO: 291907 - DNA, 416 bp, Zea mays
gcattcagaaacacaccacgcgaagctcattatcaacaacctaacatcaatggctaccagagtatattatccctccttgcgctatttgcgctttttgcgagcgcaacaaatgcgttcattattccacattgctcacttgctccaagttccattattacacagtatgctacatcaggtacttcaatgggcttcgaacacccagctgtgcaagcctataggctacaacaagcaattgcggcgagcgtcttacatcatccaatttcccagttgcaacaacaatccttggcacatctaacaatacatactatcgaaacgcaacagctacaacaatttctaccagctctgagccacctagccatggtgaacactggcgactacttgcaacagcagatgcttgcatcatacccacttgctct

SEQ ID NO: 291908 - DNA, 419 bp, Zea mays
attgataccaaactgcctccttaaaaggcccattgtgtcccacattgcacttaggtatgtgcctcctatcctcctggccttctgcagtgctgctacagcgaccatgtttccacattgctcacaagctcctatagcttcccttcttacaccgtacctctcaccaacggtgtcttcggtatgtgaaaacccaattcttcaaccctacatgatccaacaggcaatcgcagctggcatcttacctttatcacccttgttcctccaacaatcatcagccctattacagcagttaccttaggtgcatttattggcacaaaacatcagggcacaacaactacaacaacttgtgctagcaaaccttgctgtctactctcagcaacagcagtttcttccattcaaccaactagctgcattgaactctg

SEQ ID NO: 291909 - DNA, 384 bp, Zea mays
ccgactcgtacggagcggattatcctaccactacggttcgggttcggattcgggagggtcatcctcgttcggcttcgtgggtgagcggatcgagatggcatgcgtccgatgttgagtaccgctgctacatctgcggtctctcctgggccactgacgaccactgcgtccacaacgccttcagcacctacggcgaggtcctagagtacaagatcatcctcgatcggtagactcagacgtccagcagcttcggctttgtcaccttcttcacggatgaggcgatgcggaacgccatcgcaggcatgaacggaaaggatctggacggacgaaccatcaccgctaacgatgcccaatcccgctgcggactctgaggcagaacaggtgggt

SEQ ID NO: 291910 - DNA, 419 bp, Zea mays
tcacggttccgataacgcttagccgtatgcgcagatgaccatcctgacgacgggtaggacccgctcgaacttccaatgatcagctacgtgctggtcagcgacttcgtaggtgtacacctgccacgagcaccgatgctggaggcagtgcctggcgcagtttatgaggggatctgcttcaggaacttcagcttcagagggataaggcggcatcaggacagcaggtggcattgcgagtatgcgtatggagaggcgcatgacgttgtccctgcaccgagtgaagagctcacgagagatggatcctcctactggtgtggacttctttgaccatctactctatctagtagtaatacatactacagcgcccacaaattttgtgagtggatgatatatgatctttagattatacagacaaactcaat

SEQ ID NO: 291911 - DNA, 417 bp, Zea mays
gcgcaatccttcaagcgcaagctgcctccttctcgtcgtccggtcgtgagaagggagggcggtccatggcaaggctatcgacgctggctccgcgaataaggcaacgtcgaggagctccaaagccggactccagttccccgcctgcaggattgctaggtccctcaaggcgagcaagtactctaagcgcgtcagcgccggcgcccccgtgtacctcgccgccatcctctagtacctcgcggctgacgttctcgaacttgccggaaacgccgagagggacaacaagaagacccgcattgtgccgagccacatgcagcttgctgtgctcaacgacgaggagctgaccaaactgatgagtaggtgccaccatcgcgagcagaggcgttatgcctaacatccatcagcatctgctgcccaaga

SEQ ID NO: 291912 - DNA, 408 bp, Zea mays
tcggacatagtcgacttcatcaagaatagctgggtgaccgcaggcgcccgccataatcagggttagccagccgcgaccgtcttccgagaaggcagtcgccggcgagcccttcaaggacgagctgtgagcatcctatgtgtggacggctgccgctgcgtaagcatgggaggaaaacctggcgctgacatgccttcaacgcctagttcttgctggaccagatggagagagagagagggacggagtcagagagagaggggatctgcgacgtgttatgctatgcgcacgcatgtctgtgtatgccattgaggttatgaacacacttacaccgtggacgacggatgttacttaagtaatcatgacaagtcacagtttataggaacagactgagatgacgctgaatggatgaat

SEQ ID NO: 291913 - DNA, 433 bp, Zea mays
  unsure (1)..(433): unsure at all n locations
ccggattccggtcgaccagcgtcgtgctccaggtcaatattcacatntcttcacaagtcctaagggctggacaccactgtcaggctataggctcaacagcgatgcggcgagcgtgttacaacaaccaattgcccaattgcaacaacaatccttggcacatctaacaattcaaaccatcgcaacggaacagcaacaacaggttctaacacggcttagcccactataccatggagaaccctgtcgctaactggaaacagaatctgcttgcatccaacccacttgctatagcaaacgtagttgcaaaccagcaacaacaacaactgcaacagtttctgccagcgcttagtcaactagccatggtgaaccctgccgtctacctacaacagcaacaactgctttcatctagcccgctcgctgtggccaatgcacctac

SEQ ID NO: 291914 - DNA, 288 bp, Zea mays
ctcactagctcacatatcttcccttgttcagccatacctgtcaccagtggtgtcttcaatgtgcgaaaacacagtcgtttaaccctacaggatccaacacgcaatcgcaacaggcatcttaccatcatcacacttgatcctcaaacaaccgtcagccctattacaagaataacctttaggtccatttgacagccacaaaacatcactgcacatcaactacaacaacttgagctagcaaaccttgcttgatactctcaccaacatcactgtctcccaatgaaccaactg

SEQ ID NO: 291915 - DNA, 303 bp, Zea mays
gtacgcactagagtaacacagatgtataacaggtagaaagaccaaccatacaagcgagtatgctcccttaagatcattgaccacatcgtacgggatgggagtgacggtctcgatggtagtcccctcaaccatgaagacaggcttggggcccaacggctgcctcttggtgctgatgacctcgccgcgctcctttgtatgcgccttcagctggtcattgatcttaagggaggattctaggtatgctgcttgctgatcctacctggtcacactagagctacacagatgtagaacaggtagaaagac

SEQ ID NO: 291916 - DNA, 423 bp, Zea mays
  unsure (1)..(423): unsure at all n locations
agcgcctncacgatctcgacgagaggatgcccaatcgcgaaaccgccgccctattgcaatggcgcccaaggccgagaagaagcccgccgtcgagaagcctgcggaggaggagccggcggcggagaaggccacggctgggaagaagcccaaggctgagaagcggctccccgccggcaagtacgcaggcaaggagggtggctagaagaaggggaagaagaaggcaaacaagtcggtggagacgtacaagatctacatcttgcaggtgctgaatcaagtgcacccagacattggcatctcgtccaaggccatgtccatcatgaactccttcatcaacgacatcttcgagaagctggcggcggaggcggccaatctggcacggtacaacaagaagcctaccattacgtccagcgagatccagacctg

SEQ ID NO: 291917 - DNA, 431 bp, Zea mays
cccacgcgttcgcggacgcgtggtttccaacctattcccaaaggtccccttccttccggagggctaggctggtggtgtcatcaaaaagccaaaccgttcttgcttgtgctccaaggtcaccaaagaaactgagaaggttgtgtgcatggagaaggttgtgtatgttgctgagcagtgtaagaggccatttgagcatggcttccagtgcggaagctacaaggttccagcaaactgatgatatcgcaagagggaagcgcttgacgtagtctttagatttcaattgttgcagccgatcaaccttcttagggttgtataatatgaagtcaatgttgagactaatgtgaggtgggagaggcctattgatgcatcaaaagtattatgagctaataataaagccttctccacataaaaaaaaaaaaaaaaaagaagaa

SEQ ID NO: 291918 - DNA, 286 bp, Zea mays
gaactatctatattatatcattatcaatgttatgctaaataaaaaaaaacaagaagggaaaaaaaaaccaaaatcaatactatcagaaacaacaatattataacattcaaccaactgtctacactctaccctgctgcttattcgcactaacatctactaccattcagccagttagctactgcactactctcaatatcaacaacttgctgcattcaaccaattgaccgcactgaacccggctgcttatatgcaacagcatatactactaacatctattcagctagct

SEQ ID NO: 291919 - DNA, 260 bp, Zea mays
gaacgccatcgagggcatgaacggcaaggagtttgactgccgcaacatcaccgtcaactaggcggagtggtttttaggtcgtggaggcagcggtggttggtactgtggtggtcatttatgcgtttgatacatgtgtggctgacgccgtgatggcttcatgctacatactgctgtggcatatgctacagtgtctgctgctgctactgtggtggtggcagaagctactgcattggcaaccgtttctactgctactgtaacta

SEQ ID NO: 291920 - DNA, 402 bp, Zea mays
  unsure (1)..(402): unsure at all n locations
cccacgcgtccgcccacgcgtccgggggcgcagaggcgcagcagggctctggaggagggaggaggagggagccgctgcggcgcggggccgtcagcgcgcgcctcccggtgccggaccacatacgccggccgccctacgtcggcacggccgccgtcccggaggtgtgccccgaccggcaggtgcacgacggcgagagcatcatgcggatgctggacgcctgcgagctcgccgctcgggtgctgcaccatgccggggcgatggtcaagccctcggtgacgacggacgagatcgacagggctgtgcaccagatgatcgttgacgccggcgcctacccctnccctctcggatacggcgggttccccaagagcgtgtgcacgtncgtgaacgagtgcacctgccacg

SEQ ID NO: 291921 - DNA, 431 bp, Zea mays
cccacgcgtccggagaccaacaagcatcatataaagtggaatccagtagcaacaacagagcaagaatggcgaccaagatatgttccctccttatgctccttgctctttctgcatgtgttgctaacgcgacaattttctctcaatgctcacaagctcctatagcttcccttcttcccccataccttccatcaatgatagcttcagtatgtgaaaacccagctcttcagccctataggctccaacaagcaatcgcagcaagcaacatacctttatcacccttgttgtttcaacaatcgccagccctatctttggtgcagtcattggtacaaaccatcaaggcacaagaacttgcacaactcgtgctaccttgtatcaacccaataactttggcaaacctttcttcctaatcttaacaaccaccatttctttca

SEQ ID NO: 291922 - DNA, 293 bp, Zea mays
gccacgcgtccagttggcttctcctctatcttcggttcgactacgggttcgtgaggttgcggcggggttcacactcgtggatgaccggatctacatgtcaccttctgatgttgattaccgctgattattctactgcctcatctgagccacggactaccactccctacacaacgccttcatcacctacagagatgtcctcgagtccaaaatcattcctgatcggtagacgcataggtacctctgcttcggctctcacaacttttccacagaagaagccatgcgtaaccccatcg

SEQ ID NO: 291923 - DNA, 429 bp, Zea mays
cccacgcgtccgcccacgcgtccgtttttattaaccacacctctggcaaggagtacaagctgaggccaattggtgatgctggccctgtaattgaggcgggagggatctttgcctacgcccggaagacaggaatgattgcgtcgaaagctgctgcatgagggaaagatcagcttatgcagccgagcctctgcggagatgaagaagtaagctggagttaggactaagagttactgcacctacttgatgtcgacggtgtctcaaaataaattgggggcctaacaaattattatgaatcaattaatttgggctttggcaaaaaatcgttttttttggtaactagacctggaccaatggacctctggcttgttacggtcctaaccggttgaattacctgtctggtggccaaaaaaaaaaataattttaatagat

SEQ ID NO: 291924 - DNA, 418 bp, Zea mays
cctagcgaagcgcactagcaacgacctaacatcaatggcttccaagacattatccctccttgcgcttggtgccctttttgtgagtgcaacaaatgcgttcattattccacaatgctcacttgctccgagtgccattattccacagttcctccctccagttacttcaatgggcttcgaacacccagctatacaagcctatagtctacaacatgcgcttgaagctagcgtcttagaacaacctattgcccaattacaacaacaatccttggcacatctaaccttacaacccatcgaaccgcaccaacaccaaccactaacccactaacccttgttgaacctaatggcttactgccaccaccacttgtttgattccaaccaatttcctttgccaacctaacttgcaaccaaccaccaccac

SEQ ID NO: 291925 - DNA, 466 bp, Zea mays
cccacgcgtccggggcacaacaactacaacaacttgtgctagcaaaccttgctgcctacgtgtcagcaacagcagtttcttccattcaaccaactagctgcattgaactctgctgcttatttgcaacaacaactaccattcagccagctagctgctgcctacccccaacaatttcttccattcaaccaactggcatcattgaactctcctgcttatttacagcagcaacaactactaccattcagccagctagctggtgtgagccctgctgccttcttgacacaacaacagttattgccgttctacctgaacgctgcgcctaacgctggcaccttctaacaactgcaacaattgctgccattcaaccaacttgctttgacaaaccaagcagcgttttaccaacaaccaataattggtggtgccctctttaagatttctaatgagttatagttcaatattaaagttt

SEQ ID NO: 291926 - DNA, 263 bp, Zea mays
tagccgctggctagctagctagttgagtcatttagcggcgatgatggaggaataatgtgtcacgcatcaccatgggtggcagtgtcagtgtgagcaatgacctgaatgaacaattgaaatgaaaagaaaaaagtattgttccaaacaatgctggagagaccagcgatccagatgacggcagtgtgcagtacctgaggaggaggctcaaggaggagatgctgctgaatgatgatgctctcgacgagctgtagaaggataggcat

SEQ ID NO: 291927 - DNA, 390 bp, Zea mays
cccacgcgtccgcggacgcgtgggattcctttgcctgagttcatgttcatcgcaggtcagacagcccattctcttcctttctggattgcaagatgaactagtcccccctccacacatgaagatgttatatgacaaagcttctgatcataacagaaattgcagatttgttgattttcctagtggtatgcatatggatacctggatgtctggaggggaccgctactggaggacaatccaattgttcttggatcaatacgctcctggagtgcagaatcatgatgccagcttcaaaagtgaaattgccgaagatgatgaagctgctgattgactggaaaatctggatcggactttttccaaatttctggttcctgatgttgctgcaatttggca

SEQ ID NO: 291928 - DNA, 447 bp, Zea mays
agaccaactagcaacatagaaagcacaatagtgtaccaacaatggcagccaaaatatttggcctgcttatgctccttggtctttctgcaagtgctgctacggcgaccattttcccgcaatgctcgcaagctcctatagcttcccttcttcccccgtacctctcaccagcggtgtcttcggtatgtgaaaacccaattcttcaaccctacaagatccaacaagcaatcacagcttgcattttaactttatcacccttggtccttcaacaatcattaaccctattacattaattacctttggtgcatttattggcacaaaacattaaggcacaacaacttccacaacttgtgctaacaaaccttgctggctactcttaacaacagcagtttctttcattcaaccaactatctgtattgaactctgcttcttatttgcaacaacaacaac

SEQ ID NO: 291929 - DNA, 385 bp, Zea mays
agcagctcaggcaggcggagccgaaggaccggtaccaggcgatcttgggcttggtcctgcagtcgatcctgcagcaggagccgtaaagcggacagatcgcggtgctgatggcggcgcagatcgcgcaccagctgaccgccgattgcggcctgcagcagccgactctatgcccctacgctgctgccggctgtgtcccccactgaagaaactatgtgctgtagtatagccgctgcatagctagctagttgagtcatttagcggcgatgactgagttatcatgtggcacgcatcaccatgggtggcagtgtcagtgcgagctgagaccctaatgaacaatggaactgaaacgcagcaagtcacgacacacaacatagtcgctatgaga

SEQ ID NO: 291930 - DNA, 338 bp, Zea mays
agcaggtcaggcaagcggagccggacttccggtaccaggcgaccttaggctgggcggtgcaatccatcctgcagcagcagccgcaaagcgctcagatcgccgtgctgatcgcggcgcatatcgggcagcagctgactgcgatgtacgacctgcagcagctgactttatgcccctaccctgctgccggccatatactccactgtagaaactatttgctgtactataacgcctggctagcttgctagtttaatcatttagcggcgatgatcgaggaataatgtagcatgcatcacgcatgggtggcagtgtcagctgaagcaaagtccttaatgaacaat

SEQ ID NO: 291931 - DNA, 326 bp, Zea mays
tcatcgttctcgtcgtgtgccaggctctgtcagctgccagcgcctctgcaatgcagatgccctgcccctgcgcggggctgcagggcttgtacggcgctggcgccggcctgacgacgatgatgggcgccagcaggctgtacccctacgcagagtacctgaggcaaccgcaatgcatcccgctggcagcggcgccctactacgccgggtgtgggcagccgagcgccatgttccagccgctccggcaacagtgctgccagcagcaaatgaggatgatggacgtgcagtccgtctcgcagcagctgcagatgatgatgcagcttgagcgt

SEQ ID NO: 291932 - DNA, 417 bp, Zea mays
cgccgactcgtagcggccacgcgtctcgaatttacaatattccctcaccctgcacggagctgtggcaacgtgtaccgcggctggcgcacggcctgacgacgatgataggcgccggcgggctggacccctacgcggagtacctgaagcaaatcgcatggcaccccgttggccgctgagcgctactacgacctgagtggccagacgagcgccatgtaccagccggtccggcaacagtgctgccatcaccagatgaagatgatggacgtgcaatccgtattgcatcaactgcagatgatgatgcagctcgagcgtgccgctgccttcagaaacatgctgaaccagccagctctaatgcagcagccccagcagctggcggcagatcacggtctcaaccgcatggccatgatgatggcccat

SEQ ID NO: 291933 - DNA, 131 bp, Zea mays
  unsure (1)..(131): unsure at all n locations
ntccggctctgtcagctgccaacgcctttgcaatgcaaatgccctggccctgccccgggctggaaggcttgtaccgggcttgcccccggcttaaaacaataatggcccccgccggcttgaaccctaacccg

SEQ ID NO: 291934 - DNA, 397 bp, Zea mays
cctactcagacccgagaagcgcagctgctgccatggacgccaccggcactggagctggagggaaggcgaagaagggagcggcctgtcgcaaggccggctgtccgaggaagaagtcggtgaccaggtccgtgaaggccgggctccagttccccgtcggccgcatcgggcgctacctcaagaagggccgctacgcgcagcgcgtcgtctgcggtgcccccgtctacctcgcggtcgtcctggagtacctcgccgctgaggtcctggagctcgtcggcaacgctgccaaggacaacaagtagacgcgcatcgtcctgcgccacgtgctgctggcgatccgcaacgacgaggagctcgtgaagctgctgaccggcgtgaccatcgtccacggctgcgtgtt

SEQ ID NO: 291935 - DNA, 379 bp, Zea mays
cccacgcgtccggctacgcgtccgcactgagttctaaccacgcagacctcaacaagaagcagcgtgctcgtctccgaaaggtaaggcacgtgacaagatgtcgatacaagcatacgtcgaatagctcctgatgtcctagatcgaatgacagcatctaatctcctactacatcttctgtcacgacagcagcgtttgggcgcagtccgagtgcttaccccagttaaagcctgctgaggttactgctatcataaacgacttatatgaaccttgtactcttgtaccaactggtattttaattggatgtacaaagtacattatgatccaaagtgaacctggaattatcatccgatgacagaaggtcactgctggcattactatc

SEQ ID NO: 291936 - DNA, 443 bp, Zea mays
  unsure (1)..(443): unsure at all n locations
ccgacgcgtccgcccacgcgtnccgcgtacccttggttcctggcccagaacccacggaggacacttcaaaggttgggcacctaattagccatcgattcaggctcttatccatgggctgaacaggcactactactcaattgcaatcaattaccggaaaaatgagctagaggagaaaatgttgttgaacttgcacaaaaagaaatggacagatggactaattttgaagaggtttgacactcactcaaaaaccaacgagcagactgtccaggaaatgctaaacctagccatcaagtacaacaaggcagtgcaagaggaggacgaactgccacctgagaaacttgcgatagcaaatgtgggtcggcaagatgcanaaaagcatttggaagagcatgtgtccaatttgatgtcatcaaacatagttcagaccctangaaccatgctcg

SEQ ID NO: 291937 - DNA, 164 bp, Zea mays
ggtggacgatgggggggtggcgtgggaggtcgtgggcacaagggcaagggtggcgaatagtggcagtgtcagtgtgagcaatgacctgaatgaacaattgaaatgaaaagaaaaaagtattgttccaaattaaacgttttaaccttttaataggtttatacaac

SEQ ID NO: 291938 - DNA, 307 bp, Zea mays
cggctcgacgcatgcatccacgggtacaatgattgacaacaatgctctaacagtttacactaatataatactcaattgtgactgtgttcaagaagctgctatgtagacagaccgatacttcatcaaaagtgcaatcagtcacactaatcaaggatgctttactcactactggaacagttatatgaagtgaactttcgacatgcagctgtgtatctctacattctacaatgatcagcacctgattacatgcatcatctgcacatcagtctgatcgagatcatcgcatcaataaaagtctcatacaagg

SEQ ID NO: 291939 - DNA, 364 bp, Zea mays
ccagagcgcagaagaacccgatcgacaccatgatggtggtgctcgttgccctcgctcggctggggctcgctgcgagcgccacctacacgcatacaagcggcggctgcggctgccagccaccgtcgtcggttcatctaccgccgtcggtgcatctgccacctgcggttcacctgccacctacggtgcatcttccaccgccggtccacctgccgccgccgtaccacctgccaacgacggtccatgtgccgccgacggctcatgtgtcgtcgccaccatgccgataccctactcaacctgcacggactcaggctaacattagtcatacgcatgcccgggctaactgtctcatgcaagcccgtgccag

SEQ ID NO: 291940 - DNA, 426 bp, Zea mays
cccacgcgtccgcccacgcgtccgcccacgcgtccgcggacgcgtgggcgccggcctggccttcctggtgctgctgctgggtgcccaggatcacgggcgtggagagcaagcgaccggcggcggcccggccgttggagcagcagccgccgccgctgctcctcccgcgcgggaggctgtaatcatcagccggcaccagcattcgcagccgtcggccgcggcgatggcggagagcaagcggctccccatccctccgtccgggccgtccactaagtggaactacgaggcgaatcacgagaagccgtcgtcgtcggagtcgggctcgggccgccgccgcctcgggtggtggtggtccccgtgacgcggccggtggcggtgggttcttgagagctgcagagatctcaaggctcagctagcgtcgtgtgtgtc

SEQ ID NO: 291941 - DNA, 393 bp, Zea mays
agcgcacttactcccaaacggagaactttacaccatgaaggagctgatcgatggacttgctctgatggcgctgcctggcagcgcacgctccagtacaagccgcggctggcgctgccagacacaaccgtttgatctaccgcctcaaggctatatgccgtctccgctctatctgccgccggagcaacatccagaacgacggcaatacccaactcaagcaccgcagctaaccccgtgccatcagctccgatcctgatgcgtcagcagcgtcggccgcccgttcctgcgccagtgcgtcgaaggactgaggcaccactgcaatccggcggcgacactgtaccgctcgacacagtgccaggcgctgcatcagcagtgctgtcaccagatcacgcatgt

SEQ ID NO: 291942 - DNA, 271 bp, Zea mays
ctcacgcgctacgtgcctatcaagagtgcgaatgatacatactgtgatactcaagggctggggctcaattgtacgcacattcagtagagccgtattggagctctatggaacattataaatggcactgtgtccagagagcctaatgtacgcagcttccttacacgaccatgccaaggatggactaagcccatgtgcatcgtaaggcatacctactgtgatcaataccacactaccgatgcagttatgaccgtgcctgtcaagctcgatacta

SEQ ID NO: 291943 - DNA, 347 bp, Zea mays
ttcccgtgctctacccactcttcctcccactcgtcctataaataataaagtccatttctaggaagccacaaacatcatacgaatagctttattatttctgtgacgccacaattctgatctcgatcttcctctcactatctatgttcaccctcttacaacttctacaatttcttccattcaaccaacttgcttttacaaacccatcatctttctaccaacaacccatcattgctggtgccctcttttagatttcttatcacttatagctcaatactaaagcttcttgtcttatatttactgcttcctatatattatccattccatttctaatcaacttttctctcaca

SEQ ID NO: 291944 - DNA, 327 bp, Zea mays
agcttgcgcactaacaccctgtgggtcaacctcaaagctatctatacactcgtaggggctgccgcacttaagagggaaagcttatcaaaccccagtgaaggtgatggtgtgaaagtcgctcgactcctaaccgaaactggttcagctctacgattgttcgacataacgactggaactaatgttactcgatcaaggcttctcccagtgacagctacatgtgatctgtagctcgtgcagcctgatctttacaccttgacagaaggcttcgtcattcgctgcccattctgagcgatcttcagctaacgcttctattgagctaggacctga

SEQ ID NO: 291945 - DNA, 294 bp, Zea mays
ggcaccgtcgccaccgtcgccacgcgtcgctgctgctgtcagaacgaatgaagagatggagaccccacgagtggcccccacgtgacagagcacacggctggtgtgtggcatggtgctacacgaacacgacacactaacgagacagattaaagctaaccgatcgaaggggccactcgtggggtctcctgctgctgtcagaacgaataagagaagatggaattgtgatgaaacaataaaaatgcatggttttaaaaaaaataaaataaatttataatataaaaaaataagtgggag

SEQ ID NO: 291946 - DNA, 200 bp, Zea mays
cgtcaaagcatgttggctaaatggcagcaattgttgttgttgtaagaaggcaacatgctgggacgaatcctaccaccttattgcaaccgcccaccatcggtggtgccatcttctagatttattattacagtataaatcataaagttctcatgctgatatgtgtgacctctcagtaataaagtattagagatctatatttt

SEQ ID NO: 291947 - DNA, 380 bp, Zea mays
gggttggcttctcctccccctccggttcgggttcgggttcgtgaggttctccgggggtcggtttcgtgggtgagcggatcgagatggcggcgtcggatgttgagtaccgctgcttcgtcggcggcctcgcctgggccacggacgaccactccctccacaacgccttcagcacctacggcgaggtcctcgagtccaaggtccgttcccgtcccagatccgtccatggcttcgtccagatctgacctgtcctgacacaccctcgcccggatctgtccctccttcccttctcccctgcagatcatcctcgatcgggagacgcagaggtcccgcggcttcggcttcgtcaccttctccacggaggaagcgatgcggaacgccat

SEQ ID NO: 291948 - DNA, 380 bp, Zea mays
ctcacgctgtgcctggctctgtgagttgctatcgcatctgcaatgcacatgccctgccactgcgcgtggctgtacgccttgctcggcgctttctccggcctgaccaccatgatggccaccatcatgctgtacccctacccggagtacctgacgcagccgctgtgcaacccgctgtccgcggcgctctactacgcccggtgctaccagccgagcgccatgttgcacgcgatgcggcaacagttctggcagcagcacatgaagatgatggacatgcagaccgacgcgcagcagctgcagatgatgatgcagattgagcgtgccgttgaccgcagcagtagcctgtacgagccagctctgatgcaacatctgctgcagctgct

SEQ ID NO: 291949 - DNA, 296 bp, Zea mays
cggacgcgtgttctggacccgttggcctgaccccttggccccaatttgccccaaaagggccttcaaaaggccctcaccggggaaataaatgccttcttcttttaccacaaccaccgccgcctaatcctcgaaccgccgtcctgtctccgtgctcgcggctgccagcgccagcgccggtaccttctgcgtgccggggtgggccatcccgcacaacccgctcccgagctgccgctggtacgtgaccagccggacctgcggcatcgggccgcgccttccgtggccggagctgaagagga

SEQ ID NO: 291950 - DNA, 366 bp, Zea mays
gagccacctatccgtggtgaaccctgtcacctacttgcaacagcagctgcttgcagtcaagccaattgctctggcgaacgtaactgcataccaacaacaacaacagctgcaacagtttatgccaatgctcaatcaactagccatggtgaaccctggcgtctaactaacaataccttcatttaaccccgctccggtgggcaatgcaactaactacctaccacaacagttgctgcaacaaattgtaccaactctgactcagctagctgtggcaaaccctgctgcctacttacaacagttgcttccattcaaccaactggctgtgtcaaactctgctgcgtacctacaacagcgacaacagttacttaa

SEQ ID NO: 291951 - DNA, 360 bp, Zea mays
  unsure (1)..(360): unsure at all n locations
cccacgcgtccgccttgttcctccaacaagggtgataattattacatcanttaggtgagttccatttggttgcacaaaacatcacttcacaacaactacaacaacttatgctatcaaaccttgctgcatactctcaacaacatcaatttctttcattcaaccaactggctgcattgaactctactgcttatttgtaacaacaattaccattcatccatctagttgttgactacccacagcaatttcttacattcaaccaactatcaacattgaactctgctgcttatttacagcagcatcaactactaccattcatccatctagctgatgttagccctgcttccttcttgacacaacaac

SEQ ID NO: 291952 - DNA, 245 bp, Zea mays
cccacgcgtccgcccacgcgtccgcccacgcgtccgatgaaaagaaaaaagtatgagtcattcaggtcattgctcacactgacactgccacccatggtgatgcgtgacacattattactcaatcatcgccgctaaatgactcaactagctagctagccagcggctatactacagcacccctatcctgggccattgcttcaagttcctgaggcatcactgcagcctgactgcaactccctactgct

SEQ ID NO: 291953 - DNA, 417 bp, Zea mays
gcgcgcacgcgtccgcttaaacatgtgattacgaaaatgattgatgatatagcctgacagactcattcacatcctgcagactaccaccattaccgatggtgtttgaacaatcgtcagccctatctttggtgcagtcattggtacaaaccatcatggcacaacagctgcagcaactcgtgctacctctgatcaaccaagtagctctggcataccttactccctactctcagcaacaacaatttcttccattcaaccaactgtctacactgaaccctgcttgcttatttgcagcatcaactattaccatttagccagctagctactgcctactctcatcaacaacaacttcttccatttaaccaattggccgcactgaaccccgctgcttatttgcagcagcaaatactactaccattt

SEQ ID NO: 291954 - DNA, 391 bp, Zea mays
cggacgcgtgggcggacgcgtttgcttacgcgtgggggacttcaaaactgatggggttttccagagccatgcggtgcttgccctccaggaggctgctgaggcataccttgttggcctgtttgaggacaccaacctgtgcgccatccatgctaagcgtgtgaccatcatgccaaaggacattcagctggcaaggaggatccgcggcgagagggcctaatcgccacctcaaacatcgtgacaaaaacatgaagtcctggggttattgttaatctggtgccattgtaaggacatatgagtagggtttgttttgttgatcgcaagtttctcttttgctactgttgctgctacctttgctgatgttattgctaggttcttattcctaagttaacta

SEQ ID NO: 291955 - DNA, 313 bp, Zea mays
ctcgactccacgcatccgagctgatacatatcatctttgagaatgtcgatctcatgcttatcaaatttgaacaagaatgatcgtctggatcatttggtgatctataccatgtgacgtactgtactcaaaatgtacctatcaaagtactcaagccttagcgtattagcgttgatattctacgtgagtatccacagcaagattatataatgacacaattttttaacactacagtattccactttatttcaccattcacatcacatccttattactctattatcaccaacaataatcattccaattacatcaatta

SEQ ID NO: 291956 - DNA, 356 bp, Zea mays
cttataggcaacatcaacaactacttttcatccagctacctgttgcctaccagcgctttttcttccattcaaccaactaacatcattgaactctcctgcttatttacagcatcaacaactactaccattcatccagctatctgctgtgagccctgctaccttcttgacacaaccacatttgttgcctttctaccatcacgctgcgcctaacgctgtcaccctcttacaactgcaacaattgctgccattcaaccaacttgctttgacaaacctatcatttttctaccaacaacccatcattgtttttgccctcttttatatttcttattatttatatttcattattaaagtttttt

SEQ ID NO: 291957 - DNA, 237 bp, Zea mays
ataaggagttacatttccagattctttttttccacatacatcatccaaaaaacttgattgtttaattacaacttataagcaatctaaaatagggcaccaccaatgatgtgttgttggtaggatgctgctttgtttttcaaattcaatatttacaaatttcttcaattgttattttttttaattttttttttatatatttcaatttcttttaattttttttttttcatttttttttat

SEQ ID NO: 291958 - DNA, 237 bp, Zea mays
caaaatattttgcttcctgaccgttctttttcaatcttcaattcttctacctcaaccattttcccacaattctcacaatctcctatagcttcctttcttcccccatacctctcaccatctatttcttcagtattttaaaacccaattcttcaaccctacattatccaacattcaatctcatcatacatcttacctttatcaccctttttcctccaacatccatcatccctattacat

SEQ ID NO: 291959 - DNA, 287 bp, Zea mays
cggtccggaatccggaaggagtactttgatggcaaattgacgccgttcaagaagtttgagcctattcctgaggtcaacaatgatgctggttatgtagttgtggctgacaacatccacgatgtggtcttcaagtctggcaaaaatgttcttattgaattctatgccccctggtgtgggcactgcaagaagctggcgcccatcttggaagaggcagccaccactctcctgagtgacgacgaagtacatggttgctgactaccacccataccttatgaaattctttctaa

SEQ ID NO: 291960 - DNA, 344 bp, Zea mays
tactcggtctcggaattccgcgctcgactccacgcgtgcgcacaacaacaattgcaacagtttctaccagcgcttagtcaactagccatgggtaagcctgccgcctacctacaacagcaacaactgctttcatctagccctctcgctatggttaatgcacctacatacctgcaacaacagttgttgcaacagattgtaccagctctgactcagctagctgtggcaaaccctgctgcctacttgcaacagctgcttccattcaaccaactgactgtgtcgaactctgctgcgtacctacatcagcgacaaccattacttaatccactgtcagtggctaatccatt

SEQ ID NO: 291961 - DNA, 414 bp, Zea mays
ggattttgatgtcgctgcactgatgtattttattgatgctagcaccatccctatagttgtttctttagacaagaaccctgacaaccacccatacctcatgaaattcttccaaagctcatcccccaaggctatgctgtttttgaacttctccaccggaccttttgattctttcaagtctgcctactctgcttcctcgtaggaattcaaggacaaggaaatcaagttccttattggtttacatctaatccatccagttttcctttccattacttttgccttaaagattatctgagcgcgccttattctctttctctatttttacttcatattattctttttatttttactttttttctttccttttttttctttatttttatatattctttttttatttatttttatttttatttt

SEQ ID NO: 291962 - DNA, 425 bp, Zea mays
gaggcatcagtgcagcccgacggcttcgccctactgctcgcctcagtgccagtcggtgcgttagcagtgttgccagcagctcatgcaggtggagccgcagcaccggtaccaggcgatcttcggcttggtccttcagtccatcctgcatcatcagcctcaaagcggccagttctcgtagcttttgtcattttcaattattttaacatctttatttttattttctttcctttttttttttcttattttttattattttttttattttttttttttttaaatttctattattttttttttggttgggtttttaatattaatattattattttttttttatttattatttttatatttttttttatttatatttttttttatattttttttttatattatattattttattttattatttttttatttt

SEQ ID NO: 291963 - DNA, 331 bp, Zea mays
gtttcactgtttagatactgtacgttttaacctgcacaataatgtcccaagcttgtctactataaatattttgcttccttatcctcctaactctttctccacatgtttctactgcaaccattttaccacaatgctcacaagctcctataacttcccttcttcccccatacctctcaccatcattgtcttcaatttctaaaatcccaattcttcaaccctacatgatccaacaatcaattccaacattcatctttaccattatcacccttaatccttcaacaaccttcatccctattacttcaattacttttttttcattttttttctcatt

SEQ ID NO: 291964 - DNA, 367 bp, Zea mays
agcaagctaagcgcactagcaacgatctatcaccaatggctaccaagatattatgcctgctttctcttcttgcccgtttagtgagcgcaacaaatgcgttcattattccacagtgctcacttgctcctagtgccagtattccacagttcctcccaccagttacttcaatgggcttcgaacatccagccgtgcaagcctacatgctacaactagcgcttgctgcgagcgccttacaacaaccaattgcccaattgcaacaacaatccttggcacatctaaccctacaaaccattgcaacgcatcaacaacatcatcagtttctgccatcactgagccacctagccgttgtgaaccctttttacctact

SEQ ID NO: 291965 - DNA, 412 bp, Zea mays
tgcgccagacttcgtagccgaggctttgttctaccaggagttcatcaacgtgaaggtctgttattacattgggaagaagtacgtcattctgttcttctaccccttggatttcaccttcgtctgcccgaccgagattactgcgtttagtgacagatacgaggaatttgagaagttgaacactgaggttcttggtgtttccattgacagtgtgttctcccaccttgcatgggtgctgacagacatgatgtctatttttctcttctttcttattttcttatttttttttgttgtgtctttatttttttcttttttcttttttttttttttcttttcttatttttttttattattttttttttttattttcttcatttcatttttttttattctttttttttttatttttttcttt

SEQ ID NO: 291966 - DNA, 400 bp, Zea mays
gccacgcgtccggcaccgtctaggtctggaaccttaccaactgcaagcttgtctgcactctggatgggcacggtggctatgttaacgccgtcgctgtgagccccgacgggtcgctgtgcgcctcctgctggaaggacggtgttactctgttttgttatttgtctgtaattttaatttcttttttttttttttttttttttttcatcttttttttttgtttctatttctttttttattttttttgtttttatattttatttttttttatttttcttcttctttttgtggggggggttttttattttttctttttattatattttttttatttatttatttatttatttttttatttatttttttatatttttttttttttattatttaattttatttattt

SEQ ID NO: 291967 - DNA, 221 bp, Zea mays
aaagtatatgaagggttgtactgctttgcaactagaaacttcaagaaagcgtctgttttattcttggattgaatgtcaactttcacgacatatgagctattcacatatgatacattcatcttctacacagtcctcacgagtgttatatctcttgaccgtgtatctctgaaacaaaaagttgtagatactcctgatatcttatccataattttcaaatttcc

SEQ ID NO: 291968 - DNA, 403 bp, Zea mays
  unsure (1)..(403): unsure at all n locations
attcccggtgcggccacgcgtccggcacgcgtccggccttctacagccttatgagcaaatttagaacttctacctctttgaataagaataaagcgtgtactctcaaagactctaaaatatgaaacattgggcttgtaaggaaaatggaccccgggccatttggctaattgagttttggtgtttgatgaacaacacaatccatgagctaataagttttctagtgtttatgtntgtaagtttatatttttcaatgatttttttgactttatgaatttatgtatgtttttttttttttttatatctttttattggggggggggtttttttttttttttatttattttttttttttctttattatttttttttttattatttttttattatttttgttttttttttt

SEQ ID NO: 291969 - DNA, 376 bp, Zea mays
cggacgcgtgggtgctgcatactcttatcaacatcagtttcttccattcaaccaagttgctgcatagaactgtggtgcttatttgcaacaacaattaccattcagccagctagttgctgcctacccccagcaatttcttccattcaaccaactagcagcattgaactctgctgcttatttacagcagcaacaactactaccattcagccagctagctgatgtgagccctgctgccttcttgacacaacaacagttgttgccgttctacctgcacgctatgcctaacgctggcaccctcttacaactgcaacaattgctgccattcaaccaacttgctttgacaaactcatcagtgttctaccaacatcccatcatt

SEQ ID NO: 291970 - DNA, 409 bp, Zea mays
tgagctccgccatgttatgaccaacctcggcgagaagctgacttagtaggatgtcgacgagatgatccgtgaggccgatgttgacggcgactgccagatcaactactaggagttcgtcaaggtcatgatggccaagtgaggagcgatccccgttatctatgaatgaattgaagtgaaatatcaggcacacaagctgtactttgccatgttccttttgagtacacattattatcatgcatgatgtcttgtctagtaatttatcaacttactactttttttatggggggatttttttcttactgaactcttctttttattttgtatcttttattactattttctattttttctacttttctttatttttttttttttttcttttttttctcatcttttttttttttttttt

SEQ ID NO: 291971 - DNA, 279 bp, Zea mays
cgaagagccaactgcaacagatcgcatgaccaatgtacagcaacccacctggtcagtgtgcactggttgtttgtataatcctcagtgatccagaattgaagagtttgtggttaaaagaagtcaagggtatggctgatcgtatcattggaatgcgtaattcacttaaggataaatcttaatagctaggttcacctttgttatggtatcatatatttaattattattgtattgttctttttttgttttatttatttttttttttttttttttttttttttt

SEQ ID NO: 291972 - DNA, 375 bp, Zea mays
cggtcgcgtgggctgacgctttggtttcagcattcaaaaacacaccaacgtaagtctactatcatcgatctgaacaccaatggctaccaagatattagccctccttgctcttcttgcccttttagtgagcgcaacaaatgcgttcattattccacagtgctcacttgctcctagtgccattattccacagttcctcccaccagttacttcaatgggcttcgaacattcagccgtgcaagcctacaggctacaactagcgcttgctgctagcgccttacaacaaccaatggcccaatttcaacaacaatccatggcacatctaaccctacaaaccattgcatctcatcatcaactacaacattttcttccatcact

SEQ ID NO: 291973 - DNA, 289 bp, Zea mays
ggcggcgcacgcatccgagatacatttccactgcaaccaatatgtttgcatagatggcgctcctagctctttgtacatccgccactagtgcgacccatatcccagggcacttgtcaccactactgataccattggctaccatgaacccatcgatgcagtactgcatgcagcaacacgtggttgcccacttgctagcctagccgaccctgatgctgcatcaactgctggcctaaccgcttcagccatgccagatgccaatcatgatgccaggtatgatgccaccgatgac

SEQ ID NO: 291974 - DNA, 359 bp, Zea mays
ccgcgtgtttcaacaatcgccagccctatctttggtgcagtcattggtacaaaccataagaactcatcagcttcggcagctcgtgctacctgtgatcaaccaagtagctctggcaaacctttctccctactctcatcaacaacaatttcttccattcaaccaactgtctacattgaaccgtgctgcttatttgcagcaacaactattaccattcaaccagctagctactgcctactctcatcaacaacaacttctttcatttaaccaatttaccgcactgaacccctcttgcttagtgcatcttcaaatactactaccatttatcctgctagcttcatcaatctctttctttatttttt

SEQ ID NO: 291975 - DNA, 308 bp, Zea mays
acgactgaactcggcacaatctaacccattattatacccatcggcaaccgcaaccaaccaaccaaatgaccgtgatccaacctaaccgtgggtgaaccctatcgcctacttgcaacaacagctgcttgcatccaacccacttgctttggcaaacgtagctgcataccaacaacaacaacagttgcaacagtttctaccagcgctcagtcaactagccatggtgaaccctatcgcctacctacaacagcaacaacttctttcatctagcccgctcgcttttggcattgcacctacatacctgcaacaac

SEQ ID NO: 291976 - DNA, 206 bp, Zea mays
cattggatggatcgacagcttggcagaacttttttcatgctctgcaagatgagggctgttcaatttggtcagaaagacatcccctacctgaacacctacgacgactgcaccattcgctaccccgacctaagggtggtaatggattgtgatccatatggttcttcacaaaatgtcaaggacctaaataaattatagtttaaaaatga

SEQ ID NO: 291977 - DNA, 390 bp, Zea mays
ccaatccagatcagcaaagcggcagtgcgtagagaggatcgtcgaacagaacagcatgaagatggtcatcgttctcgtcgtgtgcctggctctgtcagctgccagcgcctctgcaatgcagatgccctgcccctgcgcggggctgcagggcttgtacggcgctggcgccggcctgacgacgatgatgggcgccggcgggctgtacccctacgcggagtacctgaagcagccgcagtgcatcccgctggcggcggcgccctactacgccgggtgtgggcagccgagcgccatgttccagccgctccggcaacagtgctgccagcagcagatgaggatgatggacgtgcagtccgtcgcgcatcagctgcagatgatgatgcagcttgagcg

SEQ ID NO: 291978 - DNA, 387 bp, Zea mays
aggaacacaccaagcgatgcttcctatttgcgaattaacaacaatggctaccaagataggagcacctacttgcgcttcttgcccttcatgtgagcgcgtcaaatgcgttcattattccacaatgctcacttgctcctagtgccattatgccacagtttctccgaccagatacttcaatgggcttcgaacacctagctgtgcaagcctactggctacaacaagctcttgctgctagcgtcttacaacaaccatttaatcaattgcaacagcaatccttgtcacatctaaccatacaaaccatcttatcacaacagcaacaacagttcctaccagcactgagccaactagatgtggtgaaccctgtcttctacttgcaacagcaagtgc

SEQ ID NO: 291979 - DNA, 409 bp, Zea mays
aatatgagctctggagctctgtatcatctaaaacagatgtaagaaatgtttggtgctgctgaatacacaacagccattgatgttcggtctgctggctgtgtgctcaatgagctgcttctaggacagcctatgatcactggagaaagcggtgttgatcaccttgctgaaatcatcaaggttctgggcacacgcacacgtgaagaaattaagtgcatgaatccaaattatacccagtataaattcccgcaaatcaaagctcacccgtggcataagatattccataaaatgatgcctgctgaagcagtatatctcgtgtccaggcttctgcagtactcaccaaaacttcgatcgactgctatgaaagcatcggtccatccgttctttgatgaacttcgggatccaaacaccc

SEQ ID NO: 291980 - DNA, 329 bp, Zea mays
cccacgcgtccggaaactcatgctctttagcgcaaagacggctacctagcaggagagggtacacccatactctaacaaggatcgctatgacgtcaaggcaccgtcgctgcacatcgtgcgctacatcgacaagactctcttattcatgacacatggttccaagattgcttctgacgatctgattcacagagcctatgacgttcgcctagctaatctttaaggcgactaggatcacattgactgaacgatcaagctcagcgctgaagataagcacgacagcaatgtgctcacaaactaatgctgcatgaaatttaccagtgacaaactga

SEQ ID NO: 291981 - DNA, 418 bp, Zea mays
cccacgcgtccgggagaatttccccattcccttacagtattatctgctaaggcagcctctctgacgttcggtgtcattctagttatctcgctggtgatgggaatcgttctcaatttcactatgttttggtgcacaattgtgaactctgctctgactacaacaatagtaggagttctcaagggtgtcggatcaacgaccctcggtttcgttctgttgggaggtgtcgaagtacatgctctgaatgttactggactggtgatcaacacatttggcggcgtatggtactcttatgcgaagtataagcagaaaaggaaaacaccacggaagatccaacatgatgtagagtcgcatgcccacaagtagcgtcagattaactgtagttatacttcggtcttcgatctgattataactggatgca

SEQ ID NO: 291982 - DNA, 437 bp, Zea mays
ccggatcgacggacgcacccacgcgtccgcggacacgtgcgacgactattcggctgtcgctatggactccgagtctcagggcgttgagcgacttccgatgcgcacttagatgtctccgtccgagtaccactacgcctctctacaagcttacatgctcatgctgaaacttattcatctcaagctaagattctacgaccagcatagggggctgtcggcgctaggcccatacatgggtacatgcatctggcagtgcatctttggaagatttgatcctcaaactgatctagctacatcagactctatcgatactacgacgccatataggtatcgacttgtcacgccatgctgcagatcgagagcactctcgctactatgctgaactgctcatacgatcaggcgtagtatcgaattcagagctgcataatctgactagtcat

SEQ ID NO: 291983 - DNA, 379 bp, Zea mays
acgacattgaactctgctgcttatcttttacatttactagtactaccattcaaccatgcatcggatacctaacacctgcaatttcttccattcaacccactcacagcattgaactctcctgcctatgtacagcagcaacaactactaccattcatccagctagctactgagaaccctgctgccttcttgacacagcaacaattgttatcgtactacctgcacacttcgcctaacctaggcaccctcttacaactgcaacaattgctgacattcaaacaacttgctttgacaaacctcacatcttactacctacatctcatcaacagccgtaccctctattacaatgcatatgacttatctttcaatactcaagtttctt

SEQ ID NO: 291984 - DNA, 441 bp, Zea mays
cggacgcgtgggcggacgcgtgggcggacgcgtgggcggacgcgtgggtgaggatctggagagttgggatgccttgagagctgccttgcccgttggaacagtcagtggtgcaccaaaggtgaaggccatggagttgattgataagttggaagttacgaggcgaggaccatatagtggtggtctaggaggaatatcgtttgatggtgacatgcaaattgcactttctctccgcaccatcgtattctcaacagcgccgagccacaacacgatgtactcatacaaagacgcagataggcgtcgggagtgggtcgctcatcttcaagctggtgcaggcattgttgccgacagtagcccagatgacgaacaacgtgaatgcgagaataaggctgctgcactagctcgggccatcgatcttgcagagtcagcttttgtagacaaaga

SEQ ID NO: 291985 - DNA, 401 bp, Zea mays
gtgtcgaccaccatgagtggaaccccatggtggacgtgcacctgccgtcggacggctagaccaactacttgctcgagacactcgaggctggaaagcggcagagcacggaggccctgctatagcagctgttcctggaagtgcacgacgacgtgcgattgctccacttcatgaaacgtctggatggacagaatgtcgtgtacatcatgcgggacgcgatggcagtggatcgtggatgcaggacgtgcagatgatgatgctaggcacctgacgcgcagacatggaacgaatgctgcagcactcagagcgtgagcatactaacacgtgccgctgatagatcgggttctctgagcctatggtgcatcgtatcacagcagccgcagacgtgctgatgataccaactg

SEQ ID NO: 291986 - DNA, 382 bp, Zea mays
aggacgcgtgggcggacgcgtggctatatctggctcagggcatcctccagcgtgacccgtgctaggttctcgaccagagatgaatgggccagctggttaagcttgctacagacaggggctagcaaagctaggcctaacttgaacgtggacattggtggagaacatggtggagagcctcaatcggtagctttattcgccaagactgggctggattacgttgctcgctcccttatcagggtcccgatcgctatgctagctgcatatcatgtgccagtctgagggtgcctctgttaggtcgcagccggatcacctgctggtgctacatgtgatgaatcatgatactactatgacagagccatgctactgtgagagcatcagtagc

SEQ ID NO: 291987 - DNA, 356 bp, Zea mays
caacaagcaacatagcaagcggcatccagtggcaacaatagagcaacaatggagaccacgatggtgaccctgcttatgctccttgctatgcctacatgtgttgctaacgcgacagttaaccctacatgctcacatgctcgtatagctgcccttattgctccataccttccatcaatcatagcatcagtatgtgaaaacccagctgttcaaccatataggctacaacatgcaatcgcagcaggcaacataccttgatcgacctcgttgtgtcaacaatcgccagccctatcttcggtgcaatcattggtacaaaccatgatggcacaacagctgcaacaactcgtgctacctgtgat

SEQ ID NO: 291988 - DNA, 416 bp, Zea mays
cggacgcatgctcagactctttcgcattcgcgtgggtttatcaacctcggggctacaggaaccgtcactcctatcacaccaggctcctttcgtgcatgcgcaggcacaaaacatctacgcacaacaactacaacaacttgctctatgaaaccttgctgtctactctaagcagctgcactttcttgcattcaaccaacttgctgcataggactctgctgcttacttgcaacaacaactaccattcactcacatagctgctgcctaccggcaccaattcgttccattcaaccaactgacaccattgaactctgctgctcatttacaacagcaacagctaccaccattcacccagctagctgatctgagccctgttgcctacttgacacagcaacagttgatgccgatctacctgcacg

SEQ ID NO: 291989 - DNA, 344 bp, Zea mays
cggacgcgtgggtgagccaagagctactaggatctttcatgctgaacttctggtttggggttggccacatacatcatccaaaaaactttattattgaattacaactaataagcaatctaaaagagggcaccaccaatgatgtgttgttggtaggaggccgctggatctgtcaaagcaagttggacaaagggcaacaattgttgtagttgtaacagggttgcggggttagccgcaaactgctggtagaaaggccgcaactgttgctgtgtcaagaaggaaacacggtttgctgcaactagctggctaaatggtagtagtatttgctgctgcaaataaacagcggg

SEQ ID NO: 291990 - DNA, 323 bp, Zea mays
ggacatagacagtggaatccaatatcatcaatctatcaaccaaggcgaccgatataggccttcttcttatgctccttgctatttctatgtgtattactctcgcgacaatgtatcttcaatgcgctcaagctactatcactgtgctctgaactccatacacttcatcacttacagcacctttatgagaaaacccatctcttaaaccctatatgttctaacaatcacttgcacccagatgcttacgttaataaccctcggatcgacaatctgcagccctatatttcgtgcagtcattgttacactccaagactgcacagatatat

SEQ ID NO: 291991 - DNA, 389 bp, Zea mays
gggccattgacgaacccgcgacatatctaagatctatgggcttacgcggtcgaagtgctgcttatgtaaatcgtctaggtattaagagcctactggagcaacattggagggttctagactgacggagaagttgatgtcttagctgcacagcacatcccacatgatgcaaactgatttatagggtactgcatatgcttctaggcaatgcttggggctgatcgaagagcataatgtgatggaatttataatacttgctgtcgaacacctgtgccggacggactatgaaaaggtcatgcatgcacaccgtgtaacaaatgctgatattaccgtagctgatcttccgatggatgagaaactatctactgctttaggccttatgaaaattgatg

SEQ ID NO: 291992 - DNA, 316 bp, Zea mays
cagctaagcccgggccagcagttcagatcctgcggcgtaggcagcgtcagcagcccgttcctgagccagtgcgtcgagttcctgaggcaccagtgcagcccgacggcgactccctaccgctcgccacaatgccaggcgcttcaacaacattgctgccaccagatcaggcaggtggagccgttgcacctttaccagacgacatacggtgtggtcctgcagtacttcctgcaacatgaaccgtacggcgagctagcggcactgatggctgcccatgtagcggcaacagtgactgctatgtgcagcctgcaaatgcagc

SEQ ID NO: 291993 - DNA, 356 bp, Zea mays
agctcttgaaccatataggctttaacatgctgtcgcagcaagcaacatacctgtatcgcccttgttgagtcaacaatcgccagcgactatctatggcgcagtcattggtacaaaccatcagggcacaacaggtgcagcaactcatgctacctgctatcaaccaagtagctctggcgaacctttgtacctactctacgcaacatcaatttgttccattcaaccaactgtctacactgaaccctgctgcttatttgcagcagcaactattaccatagaaccagctagctactgcctactctgaagaactgcaactgcttacatttgaccaatgtgccgcactgaacctggctgcttat

SEQ ID NO: 291994 - DNA, 399 bp, Zea mays
  unsure (1)..(399): unsure at all n locations
ccacggtggagaacgcgcgcgccttcgtgtcgggcctcgtgtcccacctccgctccctgtccggcacgccgcgcgcgcccggcaagtcggtggagacgtacatcttcgccatgtacgacgaggacctcaagcccggcaaggcgtcggagcggtacttcgggctgttccagaccagcctcgccgagacgtacccgacggggttgctcaggaacggcacggccggaccgataccagccacggcgccggctccggcgccaaccacgtccgccgcgacgctgaagccaacgccagggcagcagacacaggtgactccagcgcagcagggctcgacggcngcagctgggccttcggcatctgcaggccgggccagggcggttacgtcgagagggaccactaccg

SEQ ID NO: 291995 - DNA, 309 bp, Zea mays
tgcagctgcaccatcaactcgggcatatggctgcttcctacccccagcaacatcttccatcccatctagtatcatcaatgaactctgctgctcatgtacagtagcaacaactactaccattcaggcagctagctgatgagagccctgctgccttcatgacacaacagcagtagctgcccttctacctacacgctatgcatagcgctttcaccctattaccactgcaacaattgctgccattcaaccaacttgctatgacgaacccagctgtgcactaccaacaacccatcattgagggtgccctctatt

SEQ ID NO: 291996 - DNA, 301 bp, Zea mays
ggcacgcgtccgcggactcgtgagctgacgcgcgggcagaattgccgaggtccgtgggaccaaggagcctaagaacctgtacaacatgcacttattgaaacacttgacttaggcgaacatgaagactgcgacgagccagtcagctgcaaaggactctgctgtggtcctctctactaccaagaccaataagcagaacgcacctgcgaagctcatccacaaggctgtgatgcacaaggagttccgcaagatggccaacgctgtcaaaaaccagtttactgactactactacaggcctgatctg

SEQ ID NO: 291997 - DNA, 307 bp, Zea mays
gggacgcgtggggtgtaaacccaattctttaaccctacaggatccaggtggcatgcgcatacctaagacaccgctggagagatgtactgagtaagaagggaagttattggagcttgtgagcattgagctcttggatctaacacgcgagcgaaccagagagccatgaacctatcaagcaagcgacatcctggcctataacagagacatatgctaacacactcatggagcagatgtgattctcgcatgaaggaaggtgtgcttcatgatcatcaaggcactagaaccttaagctttttttcaaagtggt

SEQ ID NO: 291998 - DNA, 366 bp, Zea mays
ggtggattctccttcccctccggttctggttcgggttcaagaggttctgcggaatgggagttcgtgggtgagcggatcgagatggcggcgtatgatggtgagtaccgctgcttcgtcagcggtctaatctgggccacggacgaccacttcctacacaacgccttcagcacctacggcgaggtcctcgagtccaagatcatacttgatcgggagacgcataggtcccgctgtttcagctccaacaacttgtacacggacgaggcgatgcagaacgccatcgagggcatgaacggctaggagctggacagccgtaacatcaccgttaacgaggaccagtcccgatacggtcgttgacgccgaaaccgt

SEQ ID NO: 291999 - DNA, 340 bp, Zea mays
cggacgcgtgggcggacgcgtgggttttttttttttttttttagttcccagcacgacgtcatatcacaaactcgtatttactgacgaacaaacgacacatcacacatcaaggccaacagcagcagatgataaaccacgggaagcacagataaaactagggcagggaaggtggtggaatagctcacatgccacgccccatggtctgctccatgggcggcatcatgacaaagacggagtgcccattgttgaatccagggtggggaaccctgcggcgcagctcgcgaccctcctggcagagggcgcacgggtggcagaggtagtgggttgcaaggtcacaggc

SEQ ID NO: 292000 - DNA, 296 bp, Zea mays
cgcacgcgtccgatcgatctcgctttaaatccatgcatactcgcttccggcgaacggcagcatctcaaccccatggcctagatcaagatcggaatcaatgggttcggcaggatcggaaagctgtatggacatggtggccctgcaaagtgtcgatgtatagctcattgccatgaactacgactttatcatcaccgactatatgagctacatgttcaattactagactgtgcactgacagagcaagcaccatgaaaataaacgtaaggacttcaaaacccttctattttatgagaatg

SEQ ID NO: 292001 - DNA, 179 bp, Zea mays
aattgctgtcattcaaccaacttgcttttacaaacccacggcgttctaccgacaacccatcattggtggtgccctcttttagatctcttatgagttatagttcaatattaaagttatttgtctgatgtctgtggcttaccagaaataataaagcccatttctaaaacatgaaaagtaaa

SEQ ID NO: 292002 - DNA, 289 bp, Zea mays
ctgccctaagaggtgttagtcccatttgcattacagaaaaaaaaagtagacatagtagtagtcggcatcaacacgggccacgttgtcaccaagcgcgagctgcctctgcgcccgtcctaccggatggggaacgcatctaacagggcgtccatggtcatgggcctcatcagagagggtgctggctttgctcctcatgagaagcgtatcaccgagcttctgaagggtggcaaggacaagcgcgctctgaagcttgcccagaaaaagcttggaactcacaagacgtgcctta

SEQ ID NO: 292003 - DNA, 437 bp, Zea mays
gccccaaaaacaacacacttgtgataactacatctaaaaatgaggtgtatgtatttgatgtggaagcaaaacaattaggcgaatggtccaagcgatatacacaccagttgcccagaagtttccaggaattccctggagaggtcattggcttatcatttcctccgcaaagctcatcgtcagttgttgtatacagtaccagggctatgtgcaacatcgatttcggattgccagtcgttgaggatgttggcttgccaaatggatcaggtggaccagcagagaaggcagacgcataaaagagtaaaaaaacaaggcagaagcgtaaggcccgtgatgaagagtctacagaggagaaaaggaacaacttcaacttctttgcgtttaaagaaccagtgctctttggtgggcatctacaggacagttcaattttaatggtagag

SEQ ID NO: 292004 - DNA, 411 bp, Zea mays
gtgatagatcgctatagagcattctagatgacgctcgcttacatgcgacttcatacgaggtctagggtgttatataaagtcaactaactggacttcactgtacaacgttttaaatcgtaataacttggaaatacccaacttaacccaactgaatcacattgcactatatccagctttcgtcatatggaataataccgaacagatcggcattgataacacttgcgcacactgaatcacgattaatacgcactgtgacgcgccccattaagcgccattaatctcgtcgttactcgcagttacacccatactgtatcctacactctacagcccgctactttcggttcctttccttactttctctacacttctggccactttccccgtctatccctaaatagctgtatatcttta

SEQ ID NO: 292005 - DNA, 376 bp, Zea mays
gcgaaccgcactatcaacgttctaaccttaatggctaccacgatattatccgtctttgggcttcttgccctttttgtgagcgcaacaaatgctttcattattacacaatgctcacttgctcctattgccattattccacacttcctccctccagttacttcaatatgcttgcaacacccagctgtgcaagcctacaggctacaacaatctcttgcagcgagcgtcattacaacaaccaattgtccaattacaacatcaatccttggcacatctaaccatacaaaccatcgcaacgcaacagcgacaacaatttctaccatcactgatccatctacctgtgctgaaccctgtcgtctacttgcacagcaattgcttg

SEQ ID NO: 292006 - DNA, 394 bp, Zea mays
cattaacatagatgacaagctagagcgatcgccagtgtgctatcgtttactggcagatgggtgagcctctgtgtgctcgtgctcgtgttgggtagcactgcattagagctgttcattgaacatacaacgcgaagttgatggacaagatgtgcttctgcatattgacaacatttttcgttctactgacgtaaactatgaagtgtctgatgttctcggacgtctacaatctgttgcgggataccagtcacaccttgcaactgatcttgtacgactgcaagagtgtattactacaaccatacaaaggatctattacatatgtgcacgacatttactagcctgactatgacttgtcggatcctggtactgttactacttttgccaatattgatgctac

SEQ ID NO: 292007 - DNA, 436 bp, Zea mays
  unsure (1)..(436): unsure at all n locations
cacgcgtccgccggactttccttctgcttgtggggttcgtcaaaaaagcattggcttgcgtataaggggactctattggatgtctgtatccaaggcactgagatgctgtcattagaatcatttaaaacaccaaccattctattgagtcgactttttgtgtatgacattttctgcttgtacttcactccacttatagacagtgtggctaaatcatttgatgctccgataaagcttctgtttcctactgcngatgatgcaaggccattctccatgcttgaccttggtgacattggaatacctgacattttagttgcacttgccttgaactgtgatgtctcaagaggcattaacatacgttacttcaacaacgcattttccgaatacgccgaagctatggcggagaccatcattgtaatgaactggtttcaaagctcac

SEQ ID NO: 292008 - DNA, 433 bp, Zea mays
  unsure (1)..(433): unsure at all n locations
cccacgcgtccgcccacgcgtccgcccacgcgtcctgccatctcccaatggatcccggggcgtctgccccagcagctctgatgtggaactacgatgaggtgatggctattgttcaccagtacaactgtgtcaaggcctgctttgccggtcatgaccacaagggtggccactctgtggactcacacggtgtgcaccaccgcacccttgaggctgccttggagtgtcctcctggtaccagcgcttttggtcacgtcgaagtgtatcctaacaggctgctgcttgtaggttttgacagaatggctgatacagaggtccgtttttgagccattaaacggctttaattcgtgccgacttctactacttctataatgttnttgtctatatagattacagctgcagcagtccaaacgctggctttaatccgatgcttaca

SEQ ID NO: 292009 - DNA, 409 bp, Zea mays
aacataaaaagtggaatacagtagacactaacagaggaccaacggtctacaagatccaagctctcggtatcctgcttgctatgtctgcatgtgttgataacgcgacctttattcattaaagctgacaagcttctataacttccctacttgcaaaataccttccataaccgactgattcagcatgcgaaaaatcagcttttcagcactatacgctacaacaagcagtcgcagaacgaaagatatctttatcacccttgcagcctgaacaatcaacaggactatctttggagcagtcatatgttacaaaccatcatggcacagtacctgcagcaactcctgctacactgtgatcaaccaataagctctgtcatacctatctccctactctcattatcaacaatttcttcca

SEQ ID NO: 292010 - DNA, 423 bp, Zea mays
atcagcagcttctgcttgctttgtgggggaaggagagagagagagagagagatctaggggagaggctagtaggtggtcctcgaacgaagatgttggcggtgttcagcgctcaggtggtggaggtgccggccgcactgctggcagctggcagccggacgccgtcgcccacgacgaaggtctctcatctggtggtcgcgcttcctggccgcctccgagcctgccgtgtccgtgcagttcggccaccacagtcacctcgcctacttccacaccaaccacgcgctcctacgccccaggtcgttcgcggcccaggaccaggtgttctgactgatcgagcgggtgctgcacaccctgagtcgtctgaaccatgcacacgggctgtcatgcaagggcgccaacgaggtgctcctagccatggatgcctac

SEQ ID NO: 292011 - DNA, 448 bp, Zea mays
cccacgcgtccgcccacgcgtccgcccacgcgtccgcggacgcgtgggcattacttggagcgaagggtttctttgctttcataggggaacactttgagagttctgaagagctgaaacatttgaaagaagtgctgcttgatcttttcagaggagaggtcgtagagaatctgaaccttgccggtgtggatcggatctatgtgtgcactgcaatctctcccaccactgtctacatgatgcactgtgctctccgtctaaaaaggtcaggtacatctattcctaggatggagctggtcgaagttggaccttcaatggatctggttgtaaggaggcacagacttccagctgaaagtttgaagaaagaagctatgaagaccgctgaacatgctaagaagatgaaaaatgtcaccaaggatccagtgcagggcaagctgggcaaggtctacatgcc

SEQ ID NO: 292012 - DNA, 345 bp, Zea mays
  unsure (1)..(345): unsure at all n locations
cccacgcgtacgtccacgcgtccgttcactcgtgcttgtagatctgccactacccttcgcaatctagaaaatatnactcctatacatagccacacctattcccgtatccactgatgcatccaagcccatgccagctgtacagaacccgcagtatatataatacctcaatactggcccacttcgtagatttcctcatgcattacagtagtctcaatgcatctccctactaatggggtaactaccagaatttcccataccagtgttttcaagccctcatgctggtgaaaccctagcttctctaccatgctaaaccctgctatgcattccactatatcctgctgtagc

SEQ ID NO: 292013 - DNA, 367 bp, Zea mays
acgactcgtccgaccacgcctcacgggtaccgtggtccaatgcgtatttcaaacgtttggcaatgagattcaagaaaaagccggcttgccagacagactaccaggccaggataaaggctgttaacccaagacaaaacaagtacaacacacccaaatacagatttggtgtgcgatttaccaacaaggacatcactgcccaaatcatatctgctagtatagcgggtgatatggttcttgcttctgcctactcgcatgagttgccacgatatggtcttgaagttggtctgaccaactatgcagctgcctactgcactggccttctgttggctcgccgtgtgctcaagatccgtggtttggatcaggagta

SEQ ID NO: 292014 - DNA, 428 bp, Zea mays
atggcaacgagctagcggcagaggaggtgcaccatggcaccatggatgtctggcgtgacgtgatgcacaatcacgctgctagctgttgatggcagtagctgctgcaggaagcatcgaacgtctgtgctcactcgctagtatggctacacttattcgtcaatcactatgaccatcaagatgttccgtgtgcgaagatgcaatgcgaattggatacatgatccaacaggtactggtagctactattggacatgtgtaactgttgctcgtacgacaatcatcatccatattacatacaatgcattagacgcttagattgtgacgacacataccgtcgcaacgactgccactgctcgtgctaacgctgcttgatgcatactgtgatgcacaactgactccggaggtgcatttggtggcacgaagcataccgg

SEQ ID NO: 292015 - DNA, 320 bp, Zea mays
gtgtggtatgaccaataatatatgcatgatcataataaagttttggttttaatgaaagggaaaaagaaaaaaaaaaaaaaaaaaaaaaaaaaaaaaaaaaaaaaaaaaaaaaaaaaaaaaaaaaaaggacaaaaaaaaagaaggactcaaaagaaaaaaacaacatattaaagagcaaaagactgcaataactgaacagaaaagtgaaaaaaacggaacctgtgaaaaaataggaagacctggaaaaaacgttagtgcatcaaactgagcacattgaagataaatcacgttttagaaagctggatgtgaacatattagac

SEQ ID NO: 292016 - DNA, 427 bp, Zea mays
gcgtgggcggacgcgtgggcggtcgcgtgggcggacgcgtgggatctcatttgctatgttgctcggtaacgtctctgatttgctatgcaaaaaaaaaaaaaaaaaaaaaaaaaaaaaaaaatataaataaaattattaccacgttcctttcaccagcggtgtcttcagtatgtagaaaacccaattcttcaaccctaatagatccaacaggcaatcgcaactggcatcttacctttaacacccttgttcctacaacaatcataagccctatcacaacagtgacctttggtgcatttattggcacaaaacatcaaggcacatcaactacgacaacttgtgctagcaaaccttgctgcctactctcagcaacagcagggaaaaccattcaaccaactagctgaattgaactgtgctgcttatttgcaac

SEQ ID NO: 292017 - DNA, 310 bp, Zea mays
cggacgcgtgggcggacgcgtgggcggtacgcgtgggcggacgcgtgggcggacatcggcgtgagcctggactgcgccgggttcagcaagaccatgtcgacggcgctggaggcgacgcggcccggcgggaaggtgtgcctggtcgggatgggccacaacgagatgacgctgcccctgacggcggcggcggcgcgggaggtggacgtggtgggcgtgttccggtacaaggacacctgggcgttgtgcatcgacttcctgcgcagcggcaaggtggacgtcaagccgctcattatccaccgatttcgttttt

SEQ ID NO: 292018 - DNA, 358 bp, Zea mays
cggacgcgtgggcggacgcgtggaggtttgttggcttctcctccccctccggttcgggttcgggttcatgaggttctaccgggttcgggttccttgggtaaccgaatcgagatgcaggcgtcagatgttgactaccgctgcttcgtcagcggcctcgcctgggccacggacgaccactccctgcacaacgcctttaacacctacggcgaggtccttcagtccaagatcatcctcgatcgggagacgcagaggtcccgcggcttcggcttcgtcaccttctccacggaggaggcgatgcggaacgccatcgagggcatgaacggcaaggagctggacggccgcaacatcaccgtcaacg

SEQ ID NO: 292019 - DNA, 419 bp, Zea mays
gcttcgagtatacataacacacgcttgataacccattaactgcaacctaacatcaggggtttaccagcatattataacctgccttccctttctgaacgctcaacggaccggaccaattgcttgattattgcacaaagcttaatttgttcaaggttcaagattacacaagttcttcgaacaagtacctcaattggcttagaacacccaagtatgcaatgctatatgctacaacaagcaattgcggcgagcgtgttacaacaaccaatttcccagttgcaacaacaatccttggcacatataacactacacaccatcgcaacgcaacagcaacaacaattcctaccagcactgagccacctagccatggtgaaccctgccgcctacttgcaacagcagttgcttgcatcaaacccacttgc

SEQ ID NO: 292020 - DNA, 449 bp, Zea mays
cgggcagacccactcgtccgcccacgcgtccgttctgatgttgatagcttcgtttgaaggaaaggtgagagcagaatcgtggggagaatctggtattgtgtcctggctgttgttttcgcgatcaaaacgatgtcgtcgccggacattgtctcgatattggataactcgaaggagctcgatcgggttaggaaagaacaggaggatattctgtcggagatcaacaagcttcacaagaagcttcaagcaactcctgaagtggttgagaagcctggggataactcattggcaaggctgaaatttttgtatactcaagcaaaagaactttcagaaagtgaagcaagtatttccaacttactgataaaccaaattgatgccctactgcctacgggtccacaagggcaaacacgaagaagaataggaaaaggtaatgagcagaaaaggaaacgagt

SEQ ID NO: 292021 - DNA, 444 bp, Zea mays
gcccaatggagccgcagtgcaacgtcggtatgttcacgcgcgccgagctgctggaggccagcgtggagcttcgtcatcacgccctcggctacgtcaagtccacggccctccggtgcgctgtcaagctcggcgtcgccaacgccatccagcgccgtggcggcagggcctccgtcgaggacctgctcaccgagctctctctggacgcaagcagactccgctgcctgcacagcgtcatgcgcgcgctcgccgcgttgggcgtcttcaaggaggggagcgacggcgagtacggcctcactgccgtttcctctctgctcgtggacgacgacagcagcgtccgagattgggcccttgctggtgtcgatggtagcgacgacgacaacaactgcagtgctcgaagaacggcgttcaagatgacgcacgggcaggacgtctgggatgtcctcg

SEQ ID NO: 292022 - DNA, 451 bp, Zea mays
gcgagctcccatatacgctcccctacctctccagcattctcccgtctccgtcgactagacggggctccgtacctctccagccatgggcaagatcaagatcggaatcaacggtttcggaaggatcggcaggctcgtggccagggtcgccctgcagagcgaggatgtcgagctcgtcgccgtcaacgaccccttcatcaccacggattacatgacgtacatgttcaagtacgacaccgtgcacggccaatggaagcacagcgacatcgccctcaaggactgcaagacgcttctcttcggctagaagccggtcaccgtctttggcatcaagaaccccgaagagaatcccatgtgtgaggctggagctgagtatgtcgtggagtccaccggtgtcttcactgacaatgacaatgctgctgcacatctgatgggtggtgccaagaaagtttttatt

SEQ ID NO: 292023 - DNA, 371 bp, Zea mays
gaggccacaaaacagaggtacccaaacgatcgatctgtgcatctccccaccgtccgtgccgcaaccatctgattcagaagcagacatcaatggctagcaacggctgcaacggcaacggcaacggcaaggcggcgccggcgggtgtggtggtgccggagatcaagttcaccaagctcttcatcaacggcgagttcgtcgacgccgcctccggcaagacattcgataccagggacccacggaccggcgacgtgctggcccacgtagcagaggcagacaaagctgatgtggacctggcggtgaagtccgcccgggacgccttcgagcacggcaagtggccccgcatgtcaggctacgagcgcgggcggatcatg

SEQ ID NO: 292024 - DNA, 371 bp, Zea mays
agggactgtgccattatttgaccttgctcttctcgtgcaggtttccgcaaggaagaccgaaatatacatggtgcttgagtacgtcaatggaggagagctgtttgacaagatcgcgttgaagggtaagctgacggagaaggaagggaggaaactgttccagcagctcatagatgccgtgggatactgccacgagaagggggtttatcacagggacctcaagccagagaatgtccttgttgatgcaaaaggaaacataaaagtttctgatttcggattaagtgcccttccacagaaccaacaaaaagatggtttgttgcataccacatgtggcagccctaactacatagcccctgaggtccttctgaacaaag

SEQ ID NO: 292025 - DNA, 326 bp, Zea mays
  unsure (1)..(326): unsure at all n locations
cgcgccatttccacctnccactgtcctttcgtccagtccccagccctgcagcccaaccgtggaggttctggaaggcggtgtatcccttctagaaccttctcgagatgcagagcgccgcggctttccggccgtgccccactcggctgctgccagcctcgcccgatcgggatggcaagtgccgccagcgacaggtgtcatgcagcgcggccggggatgctgtggcggccccgaaggcggaagaaggaggcgggctcatgaagacgctgtggctcggctcgctcttcggcctctggtacctgttcaacatctacttcaacatctataac

SEQ ID NO: 292026 - DNA, 416 bp, Zea mays
cccacgcgttccgagaattcttaagccatcacaatatatgaggctcttatgcgcacaaggctcacagactccaccttgagattctacccaagatgagcgagaagaattcatcaggactaaatacgagctgcaggaatttctgaagcctaccttgcacattgcttctcatcagcctactgactctgtaaaacatgccgcaaatgcttctcattctgatggttccaacagtcaagtctacatgatcgagtacattggaatatcgaatgtcaaggcgattgcaggcaccaacctagccatcaaggatatgtcaagcagtgacccttatgtacgcctgacactatgtcaacataaagcacaaacttcagtaatcaatggcaacctgaatcctgactggcatgaagaactgaagctctctg

SEQ ID NO: 292027 - DNA, 368 bp, Zea mays
cccggtggacgtatgcgtactagcatccactcacaaatgcctccgaactgccgaacagcaccatcgacctgggcttcgcggacttcgtcggcaaggccgtcaacgtcccctcatcgtccgccttccgctaggcccccgtcacgatgctcaagactgctctgaaggccaaaccagatcaagactgccaaaccctacggtactgcccctaccctgacctgcacctgggaccactgcccgacaagccgccaagctacctgactgtccaattcccgggccactaccggtgcgacaccgcacggctacaggccaacctacaaacgttatgactgaactggcagctgcaactgatccactcccgctaccacatg

SEQ ID NO: 292028 - DNA, 347 bp, Zea mays
aaggaaagtacgtggcggagcaggcatggcttcatcggtggccgacgctgcgagcagagtcctgggcgcccgtctggcgcaccaggcgccacagaacggtctcatcgtcgcccgcttagggtccgacttgagcggcaaggcgaagcctgctcctaagaaggtggcgaagacatcgacctgctttgaccggccgctgtggatccacggcgccgtgacacccgactacctggacggctcgctggtcggcgactacggtgtcgacccgttcagcctaggcaagcccgcagagtaccttgcagatcgagtacgactcgatggaccagaacctgtgcatgaatgacgccggc

SEQ ID NO: 292029 - DNA, 428 bp, Zea mays
cggcatcatgtttctcgccggttccgtcatcaacgccggggccgtcaacgttgccatgctcatcgtcggccggatcctgctcggcttcggtgtggggttcacagcgcaggcggctccgctgtatctggccgagatatcacccaccagatggcgcggcggcttcaccacggcctaccatttcttcctcgtcgccggcacgctcgccgccaacgtcgccaactacgtcacgaaccggattcccgactggggctggcgcgtctccctcggcctcgccgccgtgccgtccgccgtcatcgtcatgggcgcgctcctcgtctcggacacgcccagcagcctcgtgctgcgcggcgagccgtacgcagcccgcgcgtcgctgcagcgcgtccgcggggcgggcgccgacgtggaggccgagctcaaggacatca

SEQ ID NO: 292030 - DNA, 241 bp, Zea mays
ggcagattaaagctaccgtcatgcaactaatatctgttctagaacacatgcaaagggcgggtggtaggacaatggtgcttcttgatacagggcctggtcacaggctagctgctattgttgttgatagctttgagataggttgagacgaacagctatcgatgctggattcagttcacttgaatgtgatactctaaagggcatctgaacttgtagaccgacgcctgctgacgattcttgtagc

SEQ ID NO: 292031 - DNA, 438 bp, Zea mays
  unsure (1)..(438): unsure at all n locations
aaggttactcttatgggcattcttgctttcttcctcaactgcagcccaaagttcaagtccctctctctgtccaagtgcatcgagatcaaggacatatgctctgcacctgcacagcttccagaatgcaaatcgcttcagtccctggccatcaaggattgctcaggcttcaccgacaccagcctccctatgttggcatgttctgccctcagctggagaacatcaatatgagtggccttagtgtagtcaccgacaatggcttccttccactaatgaagagctcgaaaagtgggctggtcgacattgatttgaacagctgcgagaatctcacagacatggttgtttctgccttggttaaggccatgacgcttcccttgccacctcagtttcgagggatgcatcangatcactgatgcanacctgttcgccatctgtgagagc

SEQ ID NO: 292032 - DNA, 420 bp, Zea mays
atctccctgctcctgcgcctgcttcttgatccagccaagtctgggatcgccatgtcggactctgaggaggagcactttgaatcgaaggccgacgccggagcgtgcaagacctatcctgaacatgctgacaccgtccgtaagaacggcttcatcgtcattaagaacctgccctgcaaggatgtggaggtttctacctctaagactggtaagcatggacttgcgacatgctactttggcgccatatacatattgaacggcaaaaagctggaagatattgaatcttcatcacacaactgagatattcctcatgtgaaccgtactgagtactagctgattgatatatcataggatggatttgtgagcctacttactgcacatggcaacactaaaggatgatcttagacttctaactgattagac

SEQ ID NO: 292033 - DNA, 339 bp, Zea mays
tgccgcggcacccttggccttgggcatattgcaggccagccgtgcccgcttggtgggggcttgctgtgcgcggctaggccccaggtggaggcttcccggctcctggacgtgcccacgggtcgactcgacgatatgggcccggggctggacgcctgcggccgggggagcggcctggcagaggggctacagcgcagaggtgaagactgaggacgagctgcgggtgcggtacctggaggaggagaaccgaggaattgtggtgcttggaataaacagagcctatgccaaaaattcattaagtaaaaatcttataaaaatgctttcaaaagctgtggatgcttt

SEQ ID NO: 292034 - DNA, 435 bp, Zea mays
cactcgccagtcgccaccgctcgctgtccacgcgcatggcgtcctcgctcgtctcgcgcccgcacctcacccagcgcccggtccgtgccgccacgctcgcctccgctacccgaccccgcctagaggccggggccctcgacgggcgctgccatgcgcaagcggagtgggactaggacgacgcccactacatgcggcggtgcgtggagctggcgcgcaaggcagacggccacaccagccccaaccttatggagggctgcgtcatcgtccgagacggccgcgtcttccgagaaggattccaccgcaaggcctgacaacctcatgccgaggtatttgcactaagagatgcatgtaatctagctgaaaatgctacggcctatgttagcttggagccctgcaaccactacgggagaacccatccggtactgaagcgctcat

SEQ ID NO: 292035 - DNA, 406 bp, Zea mays
ctggtctgtcgcacagacttagagcaagatttgcctagctggttacaagccatgatcatgtggagcggtcgagggaaaatatatctggagagggaaacaatgtctggctaggacggtcttaaggtcctcggcctgcaggtgatccctgtcgtgctctgtagtggcttggcgctgaacatgaaaggagtgagttacgagtacgtgaaggacgacatatccaacgagagtgagcttctgctcaagttcaacccggagcacaagatggtgcccgtgctcatacacaacggtaagcccatctgcgagtcactcgacatcatgcagtacgtctacgagctgttcgccggtcggccgatcctagcaactgatcactacgagcgcacaagtggtcgattacgagctgcctacg

SEQ ID NO: 292036 - DNA, 282 bp, Zea mays
taccgtatcggaattacccggcgccgaaccagcgccagcccgctccgttgttataaggaggtttttcaccgcgcgcgcctctctccgcaagggcgcggtcaccgacgtcgtggcaatggctgccatcgccctgcttgccggctgtgccatggcccatgaggtgctgctgggcgcatgctacggcggtctcgtcttctagcccatccagttcaccttcaaggccggcgacaccatcatattcaagaacaacgccggctttccgcacaacgtctacttcgacta

SEQ ID NO: 292037 - DNA, 376 bp, Zea mays
gcgagggccgcccttttttttttttttttttttttttttttttttttttattttttgtttttttttttttttttttttttaattaatacaccccgagcaactttattatatgtattattacaagggacatacatacaggtgcaataacgtatacatgaacaccctttggctcgctcctgtttatctatgcaactgctggcatgcatgcaaaaaacgccttgggagataaaacccctgttattctgctagtacgtatgcatgcatgtgcacgatcgatgggcgccatggtcatattatccgttggttcaatagtagggctggatcttccagcgctggttgtcgcccttgcaccacttccagagcacgacattggtgc

SEQ ID NO: 292038 - DNA, 258 bp, Zea mays
tcccgctcccttccacgggactctagacaatggttggcgatcgccaacgactcgcactgtataaatgcatacgcctcagatccgccatggcgcgcccacgccaccagccgaccattcggctgccgaacgagcgctcgacaggcgactacgccgtactgacccagaggaccgtgctcatcagcggcttcaacggctactacaactaccggcaccaggcggacatatggcatgcataccagatcatgaagaagggcggac

SEQ ID NO: 292039 - DNA, 315 bp, Zea mays
atggcgcgggaggctgaggccgccacctgggttcagaagcgccacatgtacgcgccggcaggtccaaagacgacgacgacgacggacgccgacaggccgccgtgggtggtgccgacgaccatcgggtttccgtcgccgcgcttatgacgtccgctgcacgtgtggggccacccgacgtcgcacgccggcgtggctgaagcagcagcggcgactcccatgctgctcgtgtggccgcgtcacctggcgccgacccggcacctggcgccgagggcgcactcgacgcctgtggacccggcgttctggcaccagcagtac

SEQ ID NO: 292040 - DNA, 348 bp, Zea mays
tctaataatagcaagccttattcctattttggtattttggatttcaggacttttagccccggttagtgaaggaccagagaagctttctagttatgaatcgggtatagaacccatggggggggcttggttacaattccgaatacgctattacatgtttgcgctagtttttgttgtttttgatgtggaaacagtctttctttacccttgggcaatgagtttttgacgtattgtggtgttttcgttttaattgatacttttatttttgtgcttatcctatttgtatttttagtttatgcttgtctttttgtattttttgtattggttttatttgtatttttgtttattatt

SEQ ID NO: 292041 - DNA, 230 bp, Zea mays
gtcaaggtcatctcctggtactacaactagtggggctactcgcagagggtcgtcgacctcgctgacatctgcgccaaccagtggaagtgaagcgttgcattgtaatagcactttgtaactcctcacccttcacagggctttgggattcaccccgaaatgactcactttcggtgaaattcacccgttatcggcgagggcgttttatttttcttgtcaaatgatttcattgg

SEQ ID NO: 292042 - DNA, 241 bp, Zea mays
cggacgcgtgggcgagcggccgacctttttttttttcttttttattttttttttttttgtatttgttttttttttttttaaggatgtttggaaattttgtggattatatggaaaaagaagaagcttaagtatgctgtctttatgaacctaaaagggaaaattgccttgataaatttaaaaatcctggagaaaagttaatttaatcacatattttgagcagaaactatcatttactttaaat

SEQ ID NO: 292043 - DNA, 389 bp, Zea mays
agccaccatcgaccttcaagtctcgctacgtagcagtgcaataaaaaaagcagccgcaatggcgagcagcaccatggccctctcctccacggccttcgccggcaaggccgtgaacgtgccgtcgtcgtccgccttcggcgaggcccgcgtgacgatgcgcaagacggcggcgaaggccaagccagcgggtgcgtccgggagcccagggtacggccccgaccgcgtgctgtacctgggcccactgtgcggcgagccaccgagctacctgacgggcgagttcccgggcgactactgctgggacaccgcagggctgtcggctgacccgtggacgtgcggcaagaaccgggagctggaggtgatccactcccgctgggccatgctgggcgcgc

SEQ ID NO: 292044 - DNA, 356 bp, Zea mays
gtgggattaggtattggtgccacaccttttattagcatactgaaagacctgctcaataacatcatcaaaatgggggaagaggaagaagcttcaagcatacgaaacaaccaataaagcgttaccaaaacttttgattgacggaccatatggttcttctgcacaagactacagcgagtatgacgttttactacttgtgggattaggtattggtgccacaccttttattagcatactgaaagacctgctcaataacatcatcaaaatggaggaagaggaagaagctttatgcgatctttacccaccaattggtcgcagcaaggcacatgttaatcatgacacccttatgaggattacct

SEQ ID NO: 292045 - DNA, 225 bp, Zea mays
agaagctgtgtttccgtccctaccgtgagcttctgctagcggggtgcctgcggaggagagactgggatgccatagacagtggtggcattgtgaacacgggcggagtcaatgactaccccgggaagcttaccctcttcatggagatcacctgcatcgtcgacgacaccgggggtctcattttcggatatgacatcggtatcttaagcggtgtgacgtgcatgaacc

SEQ ID NO: 292046 - DNA, 366 bp, Zea mays
ggccaagaataacagaccaagagctgcaacaaatatctggagattcaaattccacaatcgttccattgttcgagaaggtcctgagtgcgagtgatgcatgccgcatagggcgccttgttcttccaaaagcttgtgccgaggcatattttcccccaatttctcaaccagaaggacgccccttgacaattcaagatgcaagaggaaaagaatggcattttcagtttaggttttggccaaataataacagcagaatgtatgtcttggagggtgttacaccatgcatacaatcattgcaattacaagctggcgatacagtgacctttagtcgtatagatcctggagggaaacttgttatgggctttcgga

SEQ ID NO: 292047 - DNA, 340 bp, Zea mays
ctgaacccaaactcataccgtaagcagagtacactagctgttcgtgatcagggcgtacgtgacagtcagccatggtgatggtgtacatgatggcgacggaggggatgaacgtgaatgatgagtgtcagcactggtttatggtgatgaagtgtaagaaggtgcaccggtctgtggtgtacaatatcgacgagcggtcgcacgcattgctggtggacacagtgggcggtcctggggatgggttcgaggagatcgtgatcacactgatctgcttcaactgcatgtacaccttctttgaattcaacttcgtaactgttgacaactgatacaagagcaagaaatt

SEQ ID NO: 292048 - DNA, 321 bp, Zea mays
gggcgatgcgcgagggccacaactacgtgccctgagacgaggaggtattggacgagaagcaggggacgctcggggccaccacggtgcggtacaggctgaacacgctggtggcggatctcagaccgctgcttattaacaagaaggatctgcgattacggcactttcacggcatagacgaactgtacagagacggcatcccggtggcggcgcagaccgggttcgacgccatatcgaccgtggaaccgggcatggccaagctggtggaggacaccaccgaccacgtcctacgcttcgaggtgccggaaatgatagagagggacc

SEQ ID NO: 292049 - DNA, 392 bp, Zea mays
  unsure (1)..(392): unsure at all n locations
ctcacgctggtgctcctgctctcgtgcgtcggccacctcctcatcgccttcggcgtgccgcagtcgctgtacgtggcctccgtggtgatcggcttctgcttcggcgcgcagtggccactgctgttcgccatcatctccgaggtgtttgggctcaagtactactcaacgctctacaacttcgggtccgtggccagccccatcggcgcctacgtgctcaacgtccgcgtcgcgggggcgctctacgacgtggaggccgccaagcagcacggcggctccctggcgggcggcgcagacaagacctgcatcggcgtgcagtgcttccgcaaggcgttcctcatcatcacggcccgncacggtcgccggcgcgctcgtgtcgctggtgctggtgtggc

SEQ ID NO: 292050 - DNA, 275 bp, Zea mays
tcgctgagctccaggttttcacacctgacgtttatttatcatacataaggcgcccgcggtgcccatggattcgtgtcaccgcgtgccgagagcgcatatcattccgagcgacgcataaacccttatgcaggcacccgaccctttcatgggaaccaccaccaaccaggcaaggctcctcctctcgaagcaggtaacagaacttgcgaagcaccccgtggatggggtctctgatgcgctggtcctctacagcaatgtcttcgagtggcaggtcacca

SEQ ID NO: 292051 - DNA, 422 bp, Zea mays
  unsure (1)..(422): unsure at all n locations
gcgttcgagaataagcagtgacaacaataatctagcctgcctgtccttagcgtagccatgccatggccggcgatgcgctcatcgtcatcgtcactagcttcctcctcgcgctgccgtcagcgacggcaataggcaaggtctgtggcaacgccggcaactacacgggcaacggcaggtaccggtccaacctcgactccctcgccgcggcactcccagccagcacgtcctcgtcccctcagctcttggccaacaccaccgccggcgaggcccccgacgccgtgtacgcgctcgcgctctgccgcggcgacctgaccggcaacctcaccgggtgcagcgcctgcgtgaacggctcgttgcagtacgcgcggagggcgtgcccctacgccaaggccgncagcgtctacgacgaccactgcctcgtc

SEQ ID NO: 292052 - DNA, 366 bp, Zea mays
agctttgccctcgtgcgagactctggttctcaatgtctgaaggtcgaggcgtgaaagaaaaactccggaggtcgaaatggctgcgggcgtgccgcgagcccaggagctggcggagagggagatgggcggccgacatggacttcacgacggcgcgcacgcactacatgtacggctgactcggcctttgctcgccgacccagagggccatgacgactccgcccatctcacgaccttcgactcggcgctcatcagacaaatttctgcactagcatccctcgatcgttggatagggacctaccatggtggagacggttgaccgagaagtaggattcgattacggccagatagcctgagtaacggctacca

SEQ ID NO: 292053 - DNA, 407 bp, Zea mays
ctcgaatctcgatcacctccctccggaatgtacggaagacatggcgccgccgctcgtcacagtcgccgatgaggacgggtacgacgcggcgtaggagtcgaagccctgattctgcatgatggccagcgcggtgaagctctggtacgacgccggcggctcgggcagcggcgcgtcgccgtcgaggtactgcaccacctgccgcatcgacggccgcgcggcgggcaccgggtgggagcacagcaggcccagcttcagcaccagctcggcctcgtctgcggggtactcgccgcagagccgcgcgttcgcggcgtcagcgagcgcgcccgtgtgccagagctccagcacccagtccaccagcacgaaccggccgtcgtcgtcgtctccgcggtgttcgcgctcgattggcc

SEQ ID NO: 292054 - DNA, 411 bp, Zea mays
tcgctgaccaagacattcgctgtcagataatgcctgctgcacgtgcctttcctttaggaaagctaatgaatgccctgcagtcctatcaaaatgagagcaagcagaccatcttcattgagtatattatgcttgatggagttaacgatcaggaggagcatgcacatcagcttggtaaactgcttgaaacgtttaaagcggttgtaaatctaataccattcaatccaattgggtcatcaagcaatttcaagacaagcagtgaccaaaatgtgaagaacttccaaaaggtcttaaaaggcatctaccgcatcagaactactattcgccagcagatgggtcaggacatagctggcgcttgtggccagttggtggttagcctcccagatgaaagatcagctggtggagcaactcttt

SEQ ID NO: 292055 - DNA, 369 bp, Zea mays
tcgcgcgtgaaccctcacaggaacaggtgacatggtgacgtgctccaaggagaaggacgccgacctcttcgacgccgtgctgggagggctggggcagttcggcatcataacgcgcgcgcggatcccgctggcgccggcgccggcgagggcgcgctggctgcggctcctctacaccggcgccgtcgacctcacgggcgaccaggagcggctcatcgtcgacgacgagcgccgcggcggcgcgctggccgggctcatggactacgtcgagggctccgtcgtcaccgaccttcagcagggcctcatcggcagctggcgctcgcagccgccgacgttcttcttcgtcttgtactcggagtcggtgaccgacgc

SEQ ID NO: 292056 - DNA, 153 bp, Zea mays
tttcggatgatttaacgggatttgaaatcacatatcttatagagttgacggagcctgtcagattcatgttcacatgggtcgccgcactgactttaatatttcgggtagcgcatgcgatcactaatgtcatagtgaaggactttctgatcttga

SEQ ID NO: 292057 - DNA, 444 bp, Zea mays
cacgctcaaacccggcacgacgcggccatggtgtccgtcctgctgaaacactcggaagccaaggtcttcctcgtggagtcgcagttccacgccgtggcccgcgacgcgctcaggctcctcgccgacgccaaagacaggcttcctctcgtcatcacggtctctgaccccagcagcagcagcagcaccggcgacggccgcggcagcaacgacggcagcgtcgcggtcgcggagtacgaagcgcttctgcggagcgcgccgcgcgacttcgaaatccggtggccggcagacgagcgcgacccgatatcgctgaactacacgtcgggcaccacgtcgaggcccaagggcgtcatctacagccaccgcggcgcgttcctcaacacgctggccacggtgctcgtcaacgagatggcgaccatgcccgtgtacctctggaccgtgcctatg

SEQ ID NO: 292058 - DNA, 401 bp, Zea mays
tcggctggcttctccttcccctcttaccaagtccttctcgggttagggttccttagggttttgtggaggggcgatggcggcggctgatgttgagtaccgttgcttcgtcggcgggcttgcctgggccaccagcaacgagtcgctggagaatgccttcgcctcctactgcgagatcctggactccaaggtcatcaccgaccggcagacggggaggtctcgcggcttcggctttgaatccttatcctgctagaacttgatgctcgacactatctagaacatgaacggcaagtacctcgacggccgtaacatcactggtaaccaggctcaatcccgttgctgtcgctgtggccgctgtggctacggcagctgtggctgctgttgcggctatggtggcagtcgcc

SEQ ID NO: 292059 - DNA, 372 bp, Zea mays
gcgaatatgaatcttgggattcaccctaaaatatcattacaaggtaataaaaaacacaattacaatacaacataaattacccccctcccgctcgccggttctactgcaacacgtgattcacccacatcacgttagcgaatgctatactgctgaggtcactaccaactccagcccaaccacgttgtcaaacttgcacattaggcttagtttgggtactctggtattgacctcaatccacttgcattgaggaggattgaggtgtaacttagactaatatacaccgcaatccaacttaacacatgaagataggggtcaatgctagagtacccaaacaaagtcttaagtggccattcaagtcacccaaaatacttt

SEQ ID NO: 292060 - DNA, 330 bp, Zea mays
cagccgtgttactgattacaagggaagtatgcatgtgccctcctgcatcactataaatggaacatcagcaagttgagtgatgaatggtttgcagatgaagaaaaagtccgccatactgttggcttacttttgaatggaaatcatgagcccggctctaggaagctaacctgtggaatatgttgtgaagggtattcttctgatacgatgagctctgctggttgcgctcatttttattgccatgaatgttgggaaggctacattagcgctgctataggtgtgggtccaagatgtttgtctttgcgatgtcctgatacatcatgtagtgctatt

SEQ ID NO: 292061 - DNA, 194 bp, Zea mays
gtgccgcgtcgttcgccttcggcgatgcccgttgacgatgcgcagaggcggcggagcgatgcagcggggggccgggagcccgtggtacggaccggaccgcttgctgacctggggccagtgtgcggaaagcgatcgagctacctgacgggcgagttactggtcgactactgctgggacaccggggggttgtgttt

SEQ ID NO: 292062 - DNA, 420 bp, Zea mays
aaaaatatccccaaaccctagctcccgatctcgatggcgaaccctcgcgtcgtcttcgacatgaccgtcggcggcgccccggcgggccggatcgtgatggagctgtacgccaacgaggtgcccaagaccgcggagaacttccgcgcgctgtgcacgggcgagaagggcgtgggcaagtccgggaagccgctccactacaagggctccaccttccaccgcgtcattcccgagttcatgtgccagggcggcgacttcacccgcggcaacggcaccggcggcgagtccatctacggcgagaagttccccgacgagaagttcgtgcgcaagcacaccgaccccggtgtgctctccatggccaacgccgggcccaacaccaacggcttccaattcttttatctgcaccgtcgcgaaccccttggt

SEQ ID NO: 292063 - DNA, 379 bp, Zea mays
gacgcgcgggcgataccgtatagtcgcttgaggacggccaaggaaggatctagcccaaggagccctccttggcggagagccgcttgaggaactcgtaggtggtcaccatggtggccgctgacagcgacatggacccccacctgggccccagcccacggtagcacgccgcccagccggcctacttgagcagcccgcgcacggtgctggccagcgtgggccgcgccgccgcgtcggcctccatcacctgcagccgcgtcttcacggtgtccagcggcatcgtcaccagcgccgcggtgcccccggccagggccgcgctcgcgccctgcacggtcatcaggcaagcgcagctctcggagcgctcggtccccacggcgcgcca

SEQ ID NO: 292064 - DNA, 148 bp, Zea mays
cgtggccatggcgtcgtccatgctctttgctaccaccgtgccactccagcaggggggcggcctgtccgagttctacgggctcatgagctccgcgtcgctacgtatgcgccagaatgccagttttgacgacttgatgttctacgttgca

SEQ ID NO: 292065 - DNA, 407 bp, Zea mays
gtccgtccatgccgtggcgaccatggttcaacaaccaggtaccgggccttcgacgagcaccggggcatggaggtggcgtggaaccaggtgcagctgcacgacttcctgcgcggcccggcggagctggagcgcctctacggcgagatccacctgctcaagtccctccgccaccgcgccgtcatgcggctccacgcgtcctgggccgacgccgccgcgccccgcctcgccgtcaacttcgtcaccgagctcttcacctccggcacgctgcgccagtaccgcctccggcacccgcgggccggcgccgtcgcggtccggcactggtgccggcagatcctcgacgggctcgcctacctacacgcgcgcggcgtcatccaccgggacctcaagtgcgacaacatttttgtcaa

SEQ ID NO: 292066 - DNA, 234 bp, Zea mays
agaagggaaccgataccaagcaacccaatccaaaccagacaagcaaggaatccctcgatggctcatcgagttctgctcctgctctctctcgcgtgtgtcgtcgcggttgccgatcttcgcgacgcggaggacccgctgatccggcatatggttcccggtggagatgacaacgatctggagctgaacgcggtgttccacttactgagcttcaggcagcggttcgtgaagttctac

SEQ ID NO: 292067 - DNA, 243 bp, Zea mays
aagggttcagcccatcgcaactcccgggctatccgcccacctcattaagaaggtgatgcccgtcgtctttattcgacagagcaagccgaggcgccttatggactgggtgtacatgttcttttaagataatgcttgagtgattgtgaatgccaagggtgagatgaaaggttccgctatcactggacctattgtctatgagtgtgctgatctttggcctaggattgctagcgcatcatacgccat

SEQ ID NO: 292068 - DNA, 255 bp, Zea mays
gccattcatgacagaaggttcttgtttacacttaatgaagatctcataccaagacggttgtgatgagccggtcattggctacattctaaaggaaactcttaaggctctggaataccttgaccggcagggtcaaatacatcatgatgttaaggctggtaatatccttattgatggtgctgaggtagtgaagcttggagactagggtgattgtgcgtggatgtttgatagaggtgacaggcatagatctaggaatac

SEQ ID NO: 292069 - DNA, 330 bp, Zea mays
  unsure (1)..(330): unsure at all n locations
cgacttgtttcattgattcttgaagagatcgagcttcttttgcaccacaaggtcaaggatgtcttgcaactgcggatcaagctgcggctgcgggtcaagctgcaagtgcggcaagaagtaccctgacctggaggagacgagcaccggcgcgcaggccaccgtcgtcctcggcgtggccccggagaagaaggccgctcccgagttcgtcgaggccgcggcggagtccggcgaggctcgccacggatgcagctgaggtggcaactgcaagtgcgacccctgcaactgctgatcacatcgatcgacgaccatggatatgantattatctatct

SEQ ID NO: 292070 - DNA, 168 bp, Zea mays
cccaatccaaaccagacaagcaaggaatcccccgatggctcatcgcgttctcctcctgctctctctcgtgtcagccgccgcggttgccgccgacgtcgacgcgtatgacccgctgatacggcgattaggtcccggtggagatgacatcgatctggagctgaacgcgga

SEQ ID NO: 292071 - DNA, 405 bp, Zea mays
caattggcgttggccgaagaagaggagaagcgaagcaagcaggcttcgagaacaagggggagggggaggaccaagcgaaagggggaactagagcaagatgggcggcgaactgctgcttgcgctcctcctcgtctctgctgctgcggcccttaaggtccttgaagttggcattggaaccattaccttggaattaatccagaaggccttaatggaaccagtaaccacccatccaatgcctggttgaacagcttacacttaatcctacactttacaatataccattgcgcaatttaagcacatacttggagtgaaaccagcaccacagaatgcactaagcaatgttcctgtcaaaacttattcaagatcactggaactttcaaaagagtttgacgctagatctgcatg

SEQ ID NO: 292072 - DNA, 430 bp, Zea mays
ggaaaaaaaatcacccccaaactccgaccgagcatcttccccggtaggccttatccggtttctgcttgcacctctccagtgagccagtcaccgccagtccacgccatggcttctcgcgccactctcctgccgctcttcctcttcctcctcgtggcgcccgcgcctgcgctcgccacatccggcaccatcgtcttcaccacgctgggccggagccgctacgcctttgacgtcttcgcgctcccgatcgccccgctctccgccgcctccgcggagctgcgcctcacggacggcgcctccgtcaactacaacggcaacttcgcgccctcctcctccggaccgccctccctcctcttcgtctccgagcgcaacggctcgctcaacctctacctcacccccgtccccacatccgcctccgcccgtcgccgcgacg

SEQ ID NO: 292073 - DNA, 388 bp, Zea mays
agcaatggctgactccaccatggcgatctactccacggcgatggccggtacccccatcaaggtgggctccttcggcgagggccgcatcaccatgcgcaagaccgtgggcaagcccaaggtggcggcgtccggcagcccctggtactgccccgaccgcgtcaagtacctcggtccctactccggcgagcccccgagctacctcaccggcgagatccccggcgactacggctgggacaccgtcggtctgtccgtcgaccccgagaccttcgccaagaaccgccagctggaggtgatccactcccgctgggccatgctcggcgcgctcggctgcgtgttgcccgagctgctctaccgcaacggcatgaagatcagcgaggacgtctggttc

SEQ ID NO: 292074 - DNA, 416 bp, Zea mays
gtgacgccgccatcgtcaagatggttccctccaagcccatgtgtgttgaggccttcactgactaccctcctctcggtcgtttcgccgtccgtgacatgagacagaccgtcgccgtcggtgtcatcaagtccgtcgtcaagtccgacaagcagggtgccggtaaggttaccaaggctgccgtctaggccggcaagaagtaaacggattgacacttttgttcccaaaagctcgtcttttctttgcttcggtgctcttctcaaggtcacatgagttgagcatttcactaacgataccacctttctgctgtcacgaccttgcatgaaacatgatggcgaggcagttgcttcgagggatctgggtttatggcttagattattagtttgcagcagcaattcaaaactcattgttgattgcac

SEQ ID NO: 292075 - DNA, 420 bp, Zea mays
gcgagagagggtcgtcgaggtcgtctctagctatagctagagctagctgcgagagagagagagagagagatcgagaggtatacgtaggcccgccggcaactaactaacatgtcgtcgtcgtccgggacgacgatgccgctggcgtaccagacgtcggcgtcgtctcccgagtggctgaacaagggcgacaacgcgtggcagctgacggcggcgacgctggtggggctgcagagcttcccgggtctggtggtcctgtacggcggcgtggtgaagaagaagtgggccgtgaactcggccttcatggcgctgtacgcgttcgcggcggtgtggatctgctgggtgacctgggcctacaacatgtccttcggcgacaggctgctgccgctgtggggcaaggcgcggccggcgctgagccagggc

SEQ ID NO: 292076 - DNA, 431 bp, Zea mays
ggacgtccgtcaaaaacctatacgatgaaatgacggagcggattgactccgctgctcggacgggcaatgttcctgaagaaactagagcgaaacacaaagggttttctgagtgggatacgggtattacctcaaaagaccaccacccgatcgttcagattctgatagatgggaaagacaaggctgtagctgacaacgaaggcaatgtgctgccgacgctggtgtacgtggcacgagagaagaggcctcagtaccaccacaacttcaaagccggggcgatgaacgctctgatccgagtatcgtccgtgataagcaacagccctatcatcctgaacgtggactgcgacatgtattccaacaacagcgacacgatcagagacgcgctgtgcttcttcctcgacgaagaaacgggccacaggatcgcgttcgtgcag

SEQ ID NO: 292077 - DNA, 429 bp, Zea mays
  unsure (1)..(429): unsure at all n locations
tcgcccacgcgtccgggggatattataaatattgatgtaaatgtgttcctgaatgtaagaaacctcttctaaaatgtggcagaatcatattggatgatgtttccgtttataactagtttggtatgttcctcaacagggataccatgggggtacctccagaacatttgcatgtggacaagttgatgattctatcaaacattttctcaatgcagctgaagaatgcttggagaaaggcatttctatctgcagggatggtgtgaactacagaaagattggcatgaaaataagcaagcttgcctatttttatggctattatgtggtggaacgctttgttggccatgggattggaactatgtatcattctgagccacttatcctacatcatgccaacgaaaactcanggcgtatggttgagggccaaacatttac

SEQ ID NO: 292078 - DNA, 427 bp, Zea mays
ggcgccatacgcaaatgccctgaagaaactcgagaaagatatcaaggacaaacaagcaagcgtgaacgagaagattggcgtcaaggaatccgacacgggtctcgcgcctccccatctttgggatgttgccgccgaccggcaacgaatggccgaagaacagccgctccaagtggctcgttgcacaaagattattcaggatgagaaagattccgacaagagcaaatatgtgatcaacgtgaaacagatcgccaagttcgtagtgaacctgggagagcgcgtcagcccaacggatatcgaagaaggcatgcgagttggtgtcgaccggaacaagtaccaaattatgctaccactcccgcccaaaatcgatcccagtgttacgatgatgacggtcgaggacaagcccgatgtcacttatggtgacgtgggt

SEQ ID NO: 292079 - DNA, 289 bp, Zea mays
aaaaaaaaaatttaaaaaaatataaccaaaaaccgagaactagatgaacctacgcaagactggttgtactcgccgaagtatccctaacagtcaccgcatgagcgtccaactcatgattaacagactcaaacccaatccgccctgttaccgaccgcgcggcctcagagctcgagtacacggtcttcgccgcgctagggcgcacccgcgacgcactacgctatgcacgcttaggtctgagatacggcaagagctataacagcccggaaaaggtccacacgctgctcaggat

SEQ ID NO: 292080 - DNA, 427 bp, Zea mays
  unsure (1)..(427): unsure at all n locations
caaccggtccaacactttcacgctcaggcgctcagctctagcaatggctgcctccaccatggcggtctcctccacggcgatggccggtacccccatcaaggtgggctccttcggcgagggccgcatcaccatgcgcaagaccgtgggcaagcccaaggtggcggcgtccggcagcccctggtacggccccgaccgcgtcaagtacctcggccccttctccggcgagcccccgagctacctcaccggcgagttccccggcgactacggctgggacaccggcgggctgtccgccgaccccgagaccttcgccaagaaccgcgagctggaagtgatccactcccgatgggccatgctcggcgcgctcggctgcgtcttncccgagctgctctcccgcaacggcgtcaagttctgcgaggccgtctggttc

SEQ ID NO: 292081 - DNA, 457 bp, Zea mays
ggtctcaccatctcatctcatcccaccaccaccaccaccaccaccaccaccaccatcggtaggataagatagcaaatatatggccatcatactcgtacgagcagcgtcgccggggctctccgccgccgacagcatcagccaccaggggactctccagtgctccaccctgctcaagacgaagaggccggcggcgcgccggtggatgccctgctcgctccttggcctccacccgtgggaggctggccgtccctcccccgccgtctactccagcctcgccgtcaacccggcgggagaggccgtcgtctcgtccgagcagaaggtctacgacgtcgtgctcaagcaagccgcattgctcaaacgccagctgcgcacgccggtcctcgacgccaggccccaggacatggacatgccacgcaacgggctcaaggaagcctacgaccgctgcggcgagatctgt

SEQ ID NO: 292082 - DNA, 363 bp, Zea mays
acgctccttcgtccctctatctagctagccttcccgttcctgcatcgcggcggagatgggcaccggcaccacgccgatcgcgtcagcggtggatctgcatctgctgctgctcgcgccgctagccgcggcgagtgacagcatgtccatcgtcatctacggcgagcggagctaggaggatgctctacggatgtactctcagtggatttctgcgcacggtcggacctacaacgctactaatgaagaagagctctattgcgaggagctcatgaacaaaatcgggtacttaaacacttaaaatgcattcgagaacgcggtagtacaaagctaatgataaaacatcaactggtttaatatcttaatttg

SEQ ID NO: 292083 - DNA, 422 bp, Zea mays
ggaattcgagccacgcgtacgcgtactgggtctcaaccgcttcttctccaaactctagacaagggacacgccagccgggtagtgaccactaccaaggaggcgctggtgcgctagaccaccacacgcgctcacccgaggacgtcttccgacgatttccgcgcgcgccgagccgacatcgtcaaggcgctcaccacggatgtggacaagttctatcagcagtgctatccagataaagagaacttgtgcctttatggattgccaaatgagacttgtgaggtcactcttacagctgaggaagtaccttctgagcttccataaccagcactgtagataaactttgcccgtgatggaatggtcgaataagactggttgtctctagttgcagttcatagtgatgcatggctcctgtctgttgcattcta

SEQ ID NO: 292084 - DNA, 345 bp, Zea mays
gagttccttgagccactttttctgatttacaaatcactgtgtgactgcggggacaagggcatcgttgacggcagccgtctggacctcctgttctaggtgttcacgtcctgattctccctggtgaatctttacatgcggtaggaatcggatcgacacaccaacatcttcgacaccatcagcacgcacctttgtttcggcacacatcgcaagtgactaccggtcaagagacaggtgtcgctgatcacttaccttcgaggtaatcgttcaatgatgacatcaaaccttccacaaatcctccatattattgacgtcatccaattgatttaactgctcacggaaattact

SEQ ID NO: 292085 - DNA, 291 bp, Zea mays
cggagcgtgggtctccttcccggtctcctacgttcgttgccttcgtcccctccatcgcctgctgggtcgcctgccagcccgacaccgcgaatcggatccgacgacaaggtgagagggaagagattgggctcactgttcaccaagctggtcagccggctgttcgccaagaaagtgatgcagctcctgatcgtgggactctacgccctcagatacgaccacactacctatagtccgacacttgccgagaactatatcaacaggcgtaacttcttctagcatgagataaccaag

SEQ ID NO: 292086 - DNA, 240 bp, Zea mays
aagattcggcggagtgaacctgtgcatttccggcttccttgtgccggagaaggttgccggcaagagcgtcgtgtgccaccgccgcgtcagcgcgcgcgttcagaatggccttgttgtgcgccacgcgggcggcgccggcatggtgctgtccaacacgggcggcaacggccaggaacttgttgccgactcgcaccttctgcccgttttcgttttcttttatagggaaggcaccgtaatcaa

SEQ ID NO: 292087 - DNA, 435 bp, Zea mays
  unsure (1)..(435): unsure at all n locations
ctttatttctctagtaaacctttcaacactgttcaaaacagaatttgttactgtccttgtgtctgcattttctctactatacctctgcaacacatttcaaaaagtataatgagccaactcctctacttgtaatgtcaaggaaagcaacacaggaaatgatgtgcatggtgtgcctaaagattcaacccgttggtccgttctgccaaaccccatcttgtaacagactatcgatggcaaagtactactgcaacatctgcaaatttttcgatgactaaaggactgtgtaccacttgccgttttgtaatttgtgtcgtcttgggaaaggtcttggtgttgatttctttcattgcatgaaatgcaactgctgtcttgnaatgaaattaactgagcacaaatgttcggaaaaagggctagagacanattgtccaatatgct

SEQ ID NO: 292088 - DNA, 224 bp, Zea mays
atagcaaccggtccaacactttcacgctcaggcgctcagctctagcaatggctgcctgcaccatggcgatctcctccacggcgatggccggtactctcatcaaggtgggctccttcggcgagggccgtatcactatgcgcaagaccgcgtgcaagccacaagtggcggacccattgcactttctgacactgtcccaacctgaaaggctaatgggacactctctc

SEQ ID NO: 292089 - DNA, 379 bp, Zea mays
cggacgcgtgggcgctccgtgacgctctggcctgcgtgtacgaggcgctgggcgtgcgcatgctcgaccgagtccgcttcttacggtcccagatgcataccatcattacccgcgcctgcagcaatcttggcgtgaaggccctgcccagctggcggttcataaccctgatagctgtggctatcaaagcgcgtcgagagtttctaaagagcacaatagtcaacaatagggacatatatagtgtctttgtttgacatgatgcctacaatgtcagaaggcatgggtgagtacaacatattaaggatttgtcctttagcggaagctctattgaccttgtttcgggtaaacatgacacttttattcatagctttcatggcaaagt

SEQ ID NO: 292090 - DNA, 414 bp, Zea mays
cctggcgggccactactccgtcaagggcgcgcgcgccgtggcgcagctggccgtgcagtgcaccgcgcagcaggggcgggacaggccgcgcatggtggctgtcgtcgacgcgctcgacaagctgcaggggctcaaggacatggccgtcaccgtcggcctctggcccgccaccgcgcccgtcgccgggcggaacgccatctccgccaagatccgcgcggaggtcaagggcgccgccggcgcagggtcgcgccggaggagcgcgtcctccaagctgccttagtaatcttgacggctggaccacctgcgtgccacgtcgtacatgtctcctagctagctcgtgtgtaccccgggtgtaggaatcgtcttgtgtgttttgtgccacgtcgtcggtgtgtgtatatagtacatactact

SEQ ID NO: 292091 - DNA, 430 bp, Zea mays
aacgcctccaactccaccgcggggaacctgtgcatgcccggcaccctcgtgccggagaaggtggccggcaagagcgtcgtgtgcgaccgcggcgtcagcgcgcgcgtccagaagggcctcgtcgtgcgcgacgcgggcggcgccggcatggtgctgtccaacacggccgccaacggccaggagctcgtcgccgacgcgcaccttctgcccgtcgccggcgtcggcgagagggaaggcacggcaatcaagtcgtacgtgacctccgctccgaaccccacggcgacggtcgtggtcgccgggacggaggtgggcgtgcgccccttggccgtggttggcgcggttctcgtcgcggcggcccaaacatggtgacgccggagatccttgagccggacatgatcgcgccgggggtgaacattctggcgtcgtggac

SEQ ID NO: 292092 - DNA, 420 bp, Zea mays
acaagcttgggcaaaggaggtttgacggcggctacgtgcacaatggcttgcttaagggcgccgagtgggtttttgatgctgagtgtgatgttctgaaggaccttctggagaggaatcctggctatacactcacatttgctgggcattctcttggctctggtgtggtgtcaatgctagctttgctggcagtgcacaacagggagctgctcggtggcatagacaggaagaggatacgatgttttgcaatggcaccagcccgatgtatgtcactgaatttggctgtccgttatgcagatgtcatcaatgcagttattcttcaggatgattttttgcctcgcacagacattcctttggaagacatcttcaagtcactattctgcttaccatgccttctatgtggaagatgcctaatagacacat

SEQ ID NO: 292093 - DNA, 374 bp, Zea mays
gactagttctagatcgcgagcggctgcccttttttttttttttttttttttttttttgtttggttttttttttttttttttttttttttttttttttttggctaaaaaaaggttatttccacacgggacaagggggaaatccaataaaaataaaagcgacatttatttcttgggcataaaatcacaaggcatttccccgcaggaaaaacaattaccggattattccctgcccacttgacaaaaaccccaaccgaaaccaccggaccggggataaaatgtccatggggacccccggcaacttgaaaaggtcggcctcccggttaaaccgctggtttagcatccacttttttaaaggggggaaaaagaatcccctt

SEQ ID NO: 292094 - DNA, 316 bp, Zea mays
cccacgcgtccggcttctcctccccctcttatcaagtcctcctcgggttagggttcggtatggttttgtggaggggcgatggcggcggctgatgtggagtaccgttgcttcgtcggcggacttgcctgggccaccagcaacgagtcgctggagaatgccttcgcctcctacggcgagatcctcgactgcaaggtcatcaccgaccgggagacggggaggtcccgcggcttcagcttcgttaccttctcctgcgagaactgcatgctcgacgctatcgagaacatgaacggctaggagctcgacggtcgtaacatca

SEQ ID NO: 292095 - DNA, 397 bp, Zea mays
gatccctgagaagtacctcgacgagaagaccatcttccacctcaacccgtccgggcgcttcgtcatcggcgggccccacggtgacgccggcctcaccggccgcaagatcatcatcgacacgtacggcggctggggagcccacggcggtggcgccttctccggcaaggaccccaccaaggtggaccgcagcggcgcctacgtggccaggcaggccgccaagagcatcgtggccagcggcctcgcccgccgctgcctcgtgcaggtgtcgtacgccatcggcgtgccggagcccctgtccgtgttcgtcaactcgtacggcaccggcacgatccccgacaaggagatcctcaagatcgtgaaggagaacttcgacttcaggcccgggatgatcagcatc

SEQ ID NO: 292096 - DNA, 428 bp, Zea mays
gattcccggtcgaccagcgtccgctgcatcaccaccaccacagccccgtgtcgggttccaggggccgtccacctcttcgcatcccggagcccaccggcttcttggctcgccgccgcgaccggacgcctcttcgctggcttcgtgcgcacgctctcggtcctgcgttgactacgcgccgcccaccagccctcgcccggaggtcggcgccagcgagctcgcgttcgagctcgacgagaacctcgcggaggctagccctgcctgcgagccatacgcccaagagctgctcgcgagtgcccaggatcgccaccgcatcttccacgaggagctggtcgtgaaggccttcttggaggccgagaaggctcaccgtggccagacgcgcgcgagtggtgacccctacttgcaacattgtgtggagactgctgtgctac

SEQ ID NO: 292097 - DNA, 395 bp, Zea mays
gcgcagaggattcagcacgccgcccgttggtaagggagcttcgaggcggcccgcgggggcgcgtcatccgggcggactgagccaatggcacgggcccttggcgcgcgaacgctctaacagttgtcgtcgcgggcggctagcaaactcgccgtatgctagcttgtattctgacttataggcattcagtcataatccggcacactgtagcttcgcgccactggcttttcaaccaagctcgatgaccaattgcgtgaatcaacgattcctctcgtactatgttgaattactatctcggagcagtcattactaccttaaaactaacctgtctgacgacagtatagacccatgtcacgttccctattggagggcgaacaatccaacactggacgaattct

SEQ ID NO: 292098 - DNA, 437 bp, Zea mays
ccgccgccgagctcaaggtgaaggagctcaagaacggccgccttgccatgttctccatgtacggctttgggcaggaggccatttgcaacgtacaaggctcgatggatatcctaatcgactacatatcacattctgtgagccacaacgccttgtacatactctaagaactttgtccgcggtaactaattcactgaccaaatccactcatgtgtactactatcacatccatcaattgtgtcctacctctgtaacatgaacattgacttatattctgtactttacttaatcatatcgatctatcctattaatatcaccatccagactttactcattaccaatctgctcttaacaattactggaatcctctaccttgtttaagaggtatatatgccataagctcatacgaatgtctcctgatcaacggataaatctactta

SEQ ID NO: 292099 - DNA, 324 bp, Zea mays
acgctcgccttttcactggactcactcgccatacacaccctctctccagctccgttcgagcgcctagcagcatcatgcgcggggcggtcacgtagtaagcaactctcggctccctctccccttgctccatatgatcgcgcaacccatcaagctacacgcgtggactgccttccctgcgtcggaacattacgggatcgcaaggatgcctgcgtcggtctacaaagccatctgcttacaaaaaccgcgctcaaaacgcaccaatgacagagaagcgacctccttcgcccgccgatcggactcaacgccgaggcccccacacgccaa

SEQ ID NO: 292100 - DNA, 388 bp, Zea mays
  unsure (1)..(388): unsure at all n locations
ctttacacgaccacgctagcacgccctctccgtctctccccttccggttccggttccagtggctgcatccgctgcgccaccccccgtctgctcacccaagtcccaatcccgcagcccggcggcatggcggtgagcaacaacatcacggcatgcatcaacttcctggtgcttctctgcaccatccccatcgccgcgacggngctgtggctggcctcgaggcacggcggcgaggactgcgccaggctggcccgctggcccatcgccgtgctgggcgcgctcctcctgctggtcgcgctggcgggtttcgcgggcgcctactggaaccgcaggggcctgctcgcctgctacctcttcgcgatggccgccctaatacgctcttcttggcctt

SEQ ID NO: 292101 - DNA, 430 bp, Zea mays
agataagtaccttcaatatgcttttgtcggtgtgtgctagttcactagattttgacggagcgctccaagttatggagctcctaaaggaagctgggctaaaacctgattgtaaactttacacaacgctgatatcaacttgtgcaaagtgtggaaaagttgatgccatgtttgaggtattttatgagatggtcagtgctggtatagagccaaatgttaacacatacagtgcattaattgatggctgtgctagagctgggcaagtggctaaagcatttggtgtttatgggattatgagttcaaagaaggtgaagccagatcgagttgtcttcaattctttgatcagtgcatgcggtgaatctggagctctggctcgggcatttgatgttttatcagaaatgacagcagaatcctctgaatctaaaggatggaa

SEQ ID NO: 292102 - DNA, 420 bp, Zea mays
  unsure (1)..(420): unsure at all n locations
ccgggttggcccaagccgtccggttcccccttccttgcctccttccccggcgccccgctcttcctccttccgctccgcggcggccggcacgccttcctctcccctccgccgccgagcctctgcggcgcctaccacaagacacaactcccagctcaaatgctccatcaagccctcgcagttcgagctgcggcaccgcgccgcgggtctcgctccggcgcgagctctgctccctgaccgcgtcacgccgttttccttcgacgcggacggcgacgaccatccccgagaggagtgcggcgtgttcggagtcattggcgacccagacgcgtcgtcgctctgctacctcggcctgcagaagctgcagcaccgcggngaggagggcgcgggcatcgttgcgtcggacgccgacggcaagctcaatgc

SEQ ID NO: 292103 - DNA, 416 bp, Zea mays
cgagcggcggcgctcaggcgatcgagatagtgttctcggcgctggctcgtccggacggcaacagcttgctcccgaggcccggctacaagctctacgaggcgcgcgccgtgttcagcgggatggaggcccggtacttcgaccttgtacccggcgaaggctgggaggtcgacaccgacggtgtccgagctctcgccgacaagaacacggttgccgtcgtcatcatcaaccccggaaacccgtgcggtaacgtctactcctacgagcacctggccaaggttgctgagactgcgcggaagctcggcgtgtttgtcgtagcggacgaggcttacgcgcacttgacgtttggagagaggaggttcgtgccgatgggcgtgtttggggccgtggctccggtcatcacgctggggtccatttcg

SEQ ID NO: 292104 - DNA, 376 bp, Zea mays
caccactccgcgctagctgatgacggttcagcggcacataggtgcgacgtacgacgacgacgacgtaggcgtcacacatggcatcctagttgtccgccggcgttccccggttccacgggctgcggggctacgccgcgcccaggtccgaggaggcagcgctgtcgtccgtgagggtgagcacgaagaggtcgacgtcgcagggcatgctgtgggactacatgggatccgccatcaacctgatcatggtgacgacgacgacgctgatgctgttcgcggagcggttcgggttggcgctgaccgggaaccgcaaggcgacggctgtgctgaagctggaggcgcgcgacttagggctgcacactggtgacgccgcctggtt

SEQ ID NO: 292105 - DNA, 435 bp, Zea mays
gtgtgtttgtgtgtgtgtgtgtgtgcgcgcgcgcgcgcgcgtaggtggtggcgctgtgccaggctccgttcctgctcgacgatccccacgtcggcctcatgttcccggcggacgccatcgctagggccaagcactatctcgccatggcgcccggcggtctaggtgcgtacagtgactcccgcggcatcccgggaatcaggaaggaagttgccgacttcatccacaagcgtgatggatatcccagtgatccggaactcatctacctcacagactgtgccagcaaaggtgtgatgcagatcctgaacaccatcattagaaacgagatggacgggatcttggtccctgttcctcagtacccactttattccgccaccatttccctctatggtggttctctggtcccgtactacttggaagaagaggctaactggagcc

SEQ ID NO: 292106 - DNA, 365 bp, Zea mays
tcgtagacgccctgactgctaatctcggggtctacggcgtctacatatcctgcctgctagctgcacgtcgtcagcattttgcgcatcgtgagggccaccatccagggccaccgtcggaaggtcccagtcaacctctgcgcctccgtcaaggtctcactatcacattaggtggcactacatcgatctggccttaacaatgcctggatatcatggatggacgaacacattgcggtcacaggcaaggctccacctgtgaacgttgcaagataccacacctgggttggcggtgccgcccaacggtccccagacctgcgtatgacgcctggactccacgtccagctgactgttacactggagcagctgat

SEQ ID NO: 292107 - DNA, 431 bp, Zea mays
atcaattgactctggttccctaaaaggatttcctagtgattgcaaagaagcttcaaagcttgttagtcaacatttctattttctgacttctgatgacggagaatatactatttgaaaactgctatgattcaaattatttctgcagaatcttgtgtgccgaaagaatctggtaattgataagagcatccacactgcatatgtccgagcaatcagatctgcacagcattacatttatattgagaaccagtacttccttggctcttcatatgcttggccatcctatgtgaattcacgtgctgataatctgataccattagaactggccctcataattgcaagtgaattcctatattgatggccaaaatttggcagaacaatttaaccaattgtgaggtcttctgagttctttctctctgcaaacattccatgtt

SEQ ID NO: 292108 - DNA, 293 bp, Zea mays
cgcgagtggccgccctttttttttttttttgcaatcgaactatgggttctattggtcaaaataagttactagcacaatctttttggacagagaacatgtaaagtaaaaaggaatattgggttggggcaatataaaactcaatattatgtaaagaaatttaaagatgtctgtgttacatgtttatcatattcactcaaagtgggcaaattgatgtgaacttgtgaagcatgcagagtgaatatggggccgtcaagtgtagctgcattcttcactagacaatttacattttcccc

SEQ ID NO: 292109 - DNA, 392 bp, Zea mays
gttcgagcggcccgaggagttcgtgccggaacgcttcctcggcgacgagggcgccaggctgctgcagcacctcttctggtccaacgggccggagacggcgcagcccgggcccgggaacaagcagtgcgccgccaaggaggtggtggtggacacggcgtgcatgctgctggccgagctgttccggcgctacgacgacttcgaggtggagggcaccttcttcaccaagctcgtcaagcgccaggcgtcgccgagcgtggcgcaggcagccgccgccgtcggagcgcatcagtgagtgcgctgtataggatcatcggtggcgtgcgacgtcgtcggcgccggccaagcaataaagtgaaatgagttcacatgctcgtctgtgttcgacttcgatc

SEQ ID NO: 292110 - DNA, 410 bp, Zea mays
gcgagactcttcgcctctaccctgccacgccgatgctgctgccgcacgaggcgtccaccgactgcaagatccacgggtacgacgtcccggcggggtcgatggtcctcgtcaatgcgtacgccattcaccgggacccggcgatgtgggaggacccggaggagttcaggccggagcggttcgagctcggcagggcagaggggaagttcatgatgccgtttgggatggggaggcgcaggtgccccggcgagaacctcgcgatgcgaaccatggggctggtcctgggggcgctgctccaatgcttcgattggaccagggttggggatagagaaattgacatggcaacagccactggcaccatcatgtctaaggctgtcccactcgaagctcagtgcaagccgcgagcgaacatg

SEQ ID NO: 292111 - DNA, 396 bp, Zea mays
caaaatgggggagtttttttgcatgcgtctgatccgatgcagccgtaccccgacgctcgcaatcgagaactagctcagtggattcgatcgatcgatgagcacaagcacacaggatgactgatgacacgacacacgtcgtggccggcagcatgcagatcataggccaagcgcgccgagcggcgtcttgccctgtccggcctcgaagtagaaaacgagcatggcaagcatggcgatgcgggcgtgcttgatctcggccagcttaagccgctcgagcttctcgacgtcggggacgtagacgccgtccttgacggtgccggcgaggccgagggggtcgaagaacttgccgcccgggtagccctggtcgccggtgaagttggcgaagttctcggcagtgcg

SEQ ID NO: 292112 - DNA, 426 bp, Zea mays
ctcacgccacatgagcagcacccgtagggagccgccacggtgaatgtctcctgccactggatcgtgacggctcatgaattacgtcagctaaagctgagacttacgaaggcagtgacattgggcacgaaggtccacgatgcaacctacggcgtcgaaaggcctacagtgactagactgtcgactacttgaagaagctgctcctaaatgtttacgcggctgtcgtacctttggcactattcttatatgtggatgacgtcacgggattcgaaatgacatatctatattgagatgacagagcctttcactatcatcttcacatggttcgtcatactgcctataatatacgggctcgcgcatgcgatcactactgtcatattgaacgacttactgaccttgaaggggccgagtacaaactgctggaatgaa

SEQ ID NO: 292113 - DNA, 427 bp, Zea mays
ggatcccaagaagcagcctcgcgctcatggcctcaaggtctacccgctcgtcggtacgcggtcccgcacttcgtcaagaaccagcgccgcttcctccactggtccaccgacgtcctcaagcgcgacccctcgcacaccctgtcgttcaaggcgctcggcctcaccggcggcgtcatcacggctaacccggccaacgtcgagcacatcctcaagaccaacttcgccaactaccccaagggcgagctgacggtgtctatgatcgaggacttcctcgggcacggcatcttcaactccgacggggagcagtggctgtggcagcgcaaggccgccagctacgagttcagcaagcgctcgctcaggagcttcgtggtcgacgccgtccggttcgaggtcgtggagcggctgctgccgctgctcgaccgggcgc

SEQ ID NO: 292114 - DNA, 389 bp, Zea mays
actgaccagagagtgctggtgctagatcgtagcctcaagcctgaatgaaccaatgcggcaacaggacaaagaaggagaagtgcgctacatggacagttaagaatgcgcattgacagcacgaaaggatcatcgttatccctatcgcaagcattacagccgaggagataccactgcccaggagaaggagcttgttcaggtcaagcgtgaggccctgttgaagggtgcgatatatgtgagcccagatgccaagcttacgttagtggttcgcatccgtggtatcaatgccattcaccccaagacccgcaagatcttgcagctactgcgattgaagcatatcttcaacggtgtcttcctcaacgctaacaaggcaaccattaacatgctgcgca

SEQ ID NO: 292115 - DNA, 419 bp, Zea mays
  unsure (1)..(419): unsure at all n locations
ctctggagacccgcacccggccggctcagctagtcagcatggcgggggagacggtgctggtcaccggcgccagcggcttcatcggctcgaccctcgtccgcctcctcctcggccgcggctacaacgtccacgccggcgtcctcaaccccgatgacggggcggagacggagcacctgctcgccatggccgctggcgctggcgctggcgagggccgcctccgcatcttccgtggcgacctccttgacggcgccgcgctgaccgacgccgcgcggggctgctcgggcgtcttccacctcgcgtcgccctgcaccgtcgaccccgtcagcgacccccagaagcaactgatagtgccggcagtggaagggacgctgaacgtgctgcgcgccgncaaggaggccggtagcgtgcggcgggtggtg

SEQ ID NO: 292116 - DNA, 332 bp, Zea mays
aggagcatgtgtctatacttggggtacgctgttcataatttggtatatatgcgattctgttattgggtactatttgtcatacataccataattaaaatggcagtgatgggctttcaaaagaaaggacttaccatgccgaccctatacatggacgccgaccatgagaaggtaacctgatgaactgataaccaaataggcgaccgttataggagctccaaggatagggtccctacattcatagctgatgattggcccacaagggcttgtaaatccatttcaatgcctgtggctgtcaaggagcttgactgtaaaaaacattcttgaaccgaact

SEQ ID NO: 292117 - DNA, 423 bp, Zea mays
ggcgtgtgcgaggcgccagcagccgattgctacgccggccgctcgccgtcagcatccggcgacggggacacggtgaaacggtcgctcgtccggacatggcgacggcatccgactagatccagcccgtcgatctatagtcaccatatgagctaccaaagctggttcggactgcggtccgcatcaagagcttgaccaagtaccatgtcgcctgcaagcaacaaacttctgatctacaaagtctcttgatgtggcctcaagccggtgtgctctctccagggcaccgcatcgtagcagcatctggcaagctcggagagcatcaccagaacaacgataagccgtttgacaagtgcaaggttaaggataacattgtaagcctgaaagccaaaggacctgagcagtacgaatctgaactgaatgaaaagc

SEQ ID NO: 292118 - DNA, 334 bp, Zea mays
acggacgcatccactcgttccatgcctgacgttcgttttcaactcgattactatactaccgtcgcgcactggatgagctcaagacgaatccactaaacggtgcagcatacgatgtaggtactagacgggccgaaggcattggttaaaagggtccccatcttgatcaacggactcctgagcgtcaagctgtagaaggtattgcaagacatgcacagccgaaaggtcaaagaacaggcccttcattgctaaacctagctctcatgggaggtttaacaagctatacgactggctgcggcactaacgcttgtatttgcgaacccttttgtttaatcct

SEQ ID NO: 292119 - DNA, 403 bp, Zea mays
tcgatgccttgacgttcgttttcaactcgattactatactaccgtcttggacaggaggagcgtcaagacgaatccactaaacggtgcagcatacgatgttggtagtggatgggccgaagggattggttaaaagggtcccgaacttgaccaacggactgctgcacaacaagctgtagaagggattgcaagacacgcacaaccggatggtcaaagaacaggcccttcattgctaaacgtagctttcatggaaggtttaacaagttaaggactggttgcggcactaacgcttgtatttgcaaacccttttgtttaatcctaaaaacgaaaatgagtccgttagattagatactaccaagtttgtttagcacattggcattggcttaagcaattctaagtatatcaa

SEQ ID NO: 292120 - DNA, 359 bp, Zea mays
tcgcgccggcaggccgtgacgtgccgtcttcgtccgccttcggcgaggcccgcgtgacgatgcgcatgacggcggggaaggccaagccggcggcggcgtccgggagcccgtggtacggccccgaccgcgtgctgtacctgggcccactgtccggcgagccgtcgagctacctgacgggcgagttcccgggcgactacggctgggacaccgcggggctgtcggcggacccggagacgttcgccaagaaccgggagctggaggtgatccactcccgctgggccatgctgggcgcgctcggctgcgtcttcccggagctgctcgcccgcaacggcgtcaagttcggcgaggccgtgtggttc

SEQ ID NO: 292121 - DNA, 312 bp, Zea mays
ggatgaacgctgacagcgcagcatccgaagagatgggtatagacctagtaggaggcgggaggaacacgaggaccaagcgcactgcgccgaagtgcgacgatgtctatgtcaagctggttgcgaagctctaccgtttgttggtgaggaggtccaagaccaactggaatgctgtaattctcaagaggctcttgatgagcaataccaatacgtcacctatgtcaatgcgctgacttgtgaagctaatggaacgataggacaagaacattggtgtgattgtcggcacagtcacagatgacaggaggatacaagagg

SEQ ID NO: 292122 - DNA, 435 bp, Zea mays
agcgatgcatacatggctattaaggcagcggtaagacgggcgttaccacgcaaggcttcctatcgccttggcgaagaagcaaggcgacggaacatggcgctgcctgagctctcacatggagccgtgccaacgcgcatgcatctgtcacgaccttctgcagaatcacacgaatagttatacgaccaccgagacctgtgcagagtaaaatagctggtggacgtactagccctggcaagttcccgagcccttcaccgtagtatgacacttgcttgggagacctgcatagtgttgcttggatggaagacagtgatttccacaatctgcgaactgaatctctcaagcagcaatacaacttggtcaaggataggacagcggttcaggatacattcagctatggctcccatgtgatgcaatatggctcattggagctgaatg

SEQ ID NO: 292123 - DNA, 355 bp, Zea mays
ggcaaaagccaaaaggcatcaccgccgcgacgacgatggcagcctcgctccaagccgcggccaccctgatgcagccggccaagatcggcggccgggcgccctttgcctcgctgccgtcccgcccgtcgtcgcaactcgcctgcagggcgttcggcgtcgactccggcgccgcctggatcacgtgctgcctgcatgacgtcgccagcaggtgcgtcgacgccgcgaagctcgccggcttcgcgctcgccacctcggcgctcctggtgtcgtgcgccagcgcggaaggcacgcgcaagaggctgacctacgacgagatccatagcaagacgtacatggaggggaagggcacgggcac

SEQ ID NO: 292124 - DNA, 426 bp, Zea mays
acgtgtgcttgcccgatctccacaccccattccacctcacccattgatgaccccaacaatggacgggtgcctgttcgtacactggcacccgctacccctacccgctaacgctcgtccacgcaaaccctaatcagctcggctatgatactataacagctgcagcaaccgacgaggagaggagaataaagctcaaatcttgtatgcacacgaaccgatggcgacacctgccgtagagaagcctgaagacgtacagatccgtgatgctcggacagacaacctagagacagagatcgccgtgatccgcgacatcgtctacgactatccgtatgtggctatgcacactgagtttccgatcgttgtgagtcgtccgctcggcactcacaagtcagtgatcgactttaactacgccactcttaaagctaacgt

SEQ ID NO: 292125 - DNA, 424 bp, Zea mays
  unsure (1)..(424): unsure at all n locations
gagccctctcttccattccagccttcccaggccagctgcaactactggctcatcaccagaaaccagaacgtacgccggcaacccatctccctgaaatggccgctgtggagccccggcagttcgggcgtctggagccgggctcctcgccagtgcgcgtggccacgaacggcgccaaggcgtaccctcctccggcaagccacctcccgcggcgcgctgactcccctgtccgcggctgcagcttccctcccctcgtctccccgccgcgcaggctggacgacgcgtcggacgacgaggacgaggagcaggaggactggcgagagctgtacggctcgcacctgcagctggaggtggagcccgcggtgcaggacgcgcgcgacgaatgcaccgnggacgcgtggatcgagcggaacccgtgcctggtgag

SEQ ID NO: 292126 - DNA, 465 bp, Zea mays
  unsure (1)..(465): unsure at all n locations
acgacgacagcgtcggtcgccggtgccgcgcgccagaccatctgacgaagctgcacgtcgcgtgcgagcggaagcgagtcggcgcgccagcacgcctcaagcgtgtcggcgccccaccacgccgcatcaaggggcggtgtcccactcgcccttcgccagtcgcgatcatccgaggtaggagcgccacactgccagcagatgcagtcgcatcnagtgcgtccgttggcgtactctgacgcgtgagaaccgggaccgaaagtgcgtcaaggggcgaacccggccagcgaaggtgcgagtgccgtccgcgccagggcagccgccatcgacgaccgagggtcgcaccaggcagcactcnacaccgccgccgcccccgccatcgccgtcagcgacagctccctcaagttcactcatgtgctcaacaacctctcgcctgctgagctgtacgagcaggccatcaagtacgag

SEQ ID NO: 292127 - DNA, 462 bp, Zea mays
ccggattcccggtcgaccaagcgttcgggcgagaagagccgcccggcggttagtcattcgggaccccgaaaagggaaaggctaattgatggtccgtcaacggaactttccttccttatcttttacgacccggttaacttagcccggcccttctatagccccccttacggtcgccgaacgataagcacctttccggccgggtccgtcgccggatgagctccgcggcctattgcctccgacggccaggcctcgcgagcaacaggagacgttggtggatcacgagaggggtcgctttaaacgtggacccgttcctcgtagaggcgctcgacaacccttgccaacggctcatggttctacggatggaactggatatacgaaactttatgcagaaccctcagctgcaggagttcgaattccagaactttccgacttcttacctacgctgtgctgctcatcgtgttgc

SEQ ID NO: 292128 - DNA, 412 bp, Zea mays
  unsure (1)..(412): unsure at all n locations
ggaacttaaaagaagctntggaggtcaagctgctaatctagtgaagtctgctggaaactctgctgcgactcttattgaactgattactcgacattttcctggtttccgggaccattcactctacaaggggcaccacgttttcctgtacaagagagcccagatctttgttgctgatttgtggggcgccttcaagggacaaaactatggcgagttccacgatatcaattccatcaccatatttgctgactacattgttccagcggtcctgagggagcttggagtacttaaatatggctcgaatctatcttgctccatcgactcgaacagtgagatagtgcctggaagcgacgaggaagtggagatacgcgcgtgctccatctatgcagtggagaagatgacggacctgatcagc

SEQ ID NO: 292129 - DNA, 437 bp, Zea mays
ggattccgggtcgcccagcgtccgaaaaaaaacaaactacaaaagaaaaaattaaaaaataaagaaaagagaatacaaaaatggaaacgggcccagacctccactggggtgaaacccttgcatactgagcaggctgcagcagggcatgtcaaaacgggctccgatttagaccgcattgtccgttgcattgccacactctttgcacgacatctactggatctggatacatcttattctacctccaccagaaggatcactccaaattcaaaagaaagggttaagaccatctctatgaccccaccttgaatatgaccgaatcactatgtgggttcgaactggtccttacacattgggacaacaggcaactcctcatcaaatcacaccgtggtgaagttgctaaacctgaccaatccaaggcgattaatgatgaagggatg

SEQ ID NO: 292130 - DNA, 444 bp, Zea mays
atgggagggtctcatgacagcatggttacattggagaacagagtacgtggtcttgagagagttgttgagaaactgccccactgcatgtaggacttcatttgcaacctcatttgaaagttgatcaacaaccggtccagtttgctccatcaactttacaagtaattcagcatcaccagtcgaaagaagttcagcataagcagagtccatatcctcaagatgaacagcatccatcgcacgagtccaggcctcccaaagtgggcctctttcatccccttggttgtcatcattcaaagcttctccatccagttcaggaatagcaactcttgcagcggcccttgaatttccattatcttcaccagctactctaatagcttccagtgttgcttcatcttttgaggcccgccatgcacttcgggcagaaggaccctcaccgaacctaaaggg

SEQ ID NO: 292131 - DNA, 358 bp, Zea mays
gtgacagttgtcatatgctcgtctcaaagatttagccatgcatgtgcaagtatgaactaatttgatctgggaaactgcgaatggattattaaatcagttataggtcggttgatggctcgtgctactcgtataaccgtagtaatcatagagctaatacgtgcaacaagaccccgacttgcgggaagggcgcatttattagataaaaagcttacccgggctcttcccggcgatccgatgattcatgattacttgaccgatcgcacggccttaatgccggcgacgcattattcaaatttctggcctatcaactttccatgggaagatatgggcctaccatggtggtgaccggtgacagaga

SEQ ID NO: 292132 - DNA, 420 bp, Zea mays
gtcgatcgctgatcccaccggctgatagagttggcggccgtgggagtgagtcgtcagggatggcgtcggagcctgttgcgcggtcggtggctgaggatgtgggccgctggggcagcatgaagcagacgggggtgaccctgcggtacatgatggagttcggctcccggcccatccaagcgcaaccttgttctcttcgcgcaattgctgcacaaggggctccccattcggtttgggccgcctgccgctgaacctgaatcggttgcctttggccttttcaacaaggccggcattcttaaagttccggactggtacatggacttatttcgggacattaaattccttcctgaaatgaggagcctgaacgaccaactcgctttcacgcagatgatcaacatggtcaaagtgcggcatatcaatgtg

SEQ ID NO: 292133 - DNA, 199 bp, Zea mays
tgcatccctttacgtccgccacgctgcagcgcggcatgcaccctgcggtctctcccaagcccaagtcgcgcacgctcatggacgagatagcgatcgcagccacggaggagtaccactccttcgacttcaaggagccgcgcttcgtcgagatacttcacatcggctacaccgcagaccgagtaccgtaagatgaacatcg

SEQ ID NO: 292134 - DNA, 387 bp, Zea mays
cttccgctcgaccgagaaaatcaaggatcttcgcacctaggagatcaagaacggacgcctggacatgctgggcatcatgctcgcttggttgcaagccgaatacaccgtctccggccccatcgacaaccttttcagccacactatcgaccctggccaacccaccattttccaggccttcacccccaaatcatgagctctgatgaacttggcagttcgaagagtgctaccacacatgcatgcattgttaagtttgatagccgatatggaactttttctttatgttagcggcagactactgggtagactgtcaacgatgatgatgaatatgatgaaatgttcgttgtgcgatgcatggtgtacttgtactatgttgcaactaatgtaaaa

SEQ ID NO: 292135 - DNA, 449 bp, Zea mays
agcaactagcaacacctcttctccttttacttcgcctcgcctcgcctcgccataacgacacgcgcatctccctacctcgatacgattcttcgtcttctcttccccgcgatcgcgccagcgcccccgaaaaaccctaactacctggagcctcgacggcacctgccgcaggcgacggcgagcgaccccaggcggtggtagacggcgcagcgggttgccccttgtggaggcggacggcacggcgcaggtccttgccttcccggctatgcgaattgcggtatgaagctcaagcggcgacgcgcggtagaagtgcctccaagtataaaatctttcatcaacagtgttaccactgttcctcttgaggatgtagaattgccgctgaaggattttgcatgggaatttgacaagggggattttcatcactggttggaccttttcaatcattttgattc

SEQ ID NO: 292136 - DNA, 125 bp, Zea mays
  unsure (1)..(125): unsure at all n locations
ccagttctggctcggcggctcgtcggacaatctccagaacttccttaagatgatcggcggctggtacntgcctgccctcaaaggcgccggcatcaagtacgacgacccccgtgctctacctcgac

SEQ ID NO: 292137 - DNA, 419 bp, Zea mays
gcgggcagcagcaatgacacttccctgcgccggcggctgcgagatccaagccagcggcagtaactagcgcatcgccgtctccacccgacctctcaaggtctggagcagatcagacgacgacgtccattcccaagaccaccacagcgtcgtccgccaggtgctccgggacgtctactgccgcgcgcgccccggcgagctgctcgccatcgtcgggcccagcggcgccgggcagtcccacctgctcgagatactccccggggggcttttcccggacccggcggcccaacttgttcccattgaacgggcccgcggccaaaacggccaacttcggcgggtcttcggctaacttaaccaacaaggccgtctctttccggtggttaacctgccccaaaaccttgtttttaacgcgcggcttcggc

SEQ ID NO: 292138 - DNA, 380 bp, Zea mays
  unsure (1)..(380): unsure at all n locations
aaccccgggccgacccacgcgtgcgagctgcgctactcgcccgncgccttgggctttattaagatcggaatcaacggctcggggacggagccgcaggctcgtggccagggtcgccctccagagcgaggatgtcgagctcgtcgccgtcaacgaccccttcatcaccacggactacatgacctacatgttcaagtccgacaccgtccacggcccctggaagcacagcgcctcaccactaaaggcctccaagacccttgtcttcggagacaagccgtgcaccggctttggcaatcaggaaccctgaggaaatcccatggagtgaggctggcgctgcctatgccggggagcccaccggcgtctccactgacaaggacaaggct

SEQ ID NO: 292139 - DNA, 145 bp, Zea mays
cgactgcgcacggcgccgcgccatgccgctttagaggttctgctccccggccagcaagaagagggattaagctggttgcaagtccggcttgcggatatctcgatctatcttctgtgatcttcgacttgcacattacatggagtgc

SEQ ID NO: 292140 - DNA, 250 bp, Zea mays
cttctctccttttgctcggaacgcacacaccgaccgttcgcgatctccgatcccctcgtcgatggaaagaggcacatcttcgtcaagaccctcactggaaagactatcaccctcgaggtggagtcttctgacaccattgacaacgtcaaggccaagatccacgacaaggacggcatcctcccggaccagcaccggctcatctgtgctggcaagcagctacaggacggacgcacacttgccgactacaaca

SEQ ID NO: 292141 - DNA, 167 bp, Zea mays
  unsure (1)..(167): unsure at all n locations
gnaccggngangncncccnccgcaccagngaggaaggaancgcngaggccaaggccgcagcgggggacacccancgngggggngaggacagngacaacaggangggcaaccacagcggccaggagnncaagaggaagaacaagaagganaacacnggcaaccccagg

SEQ ID NO: 292142 - DNA, 200 bp, Zea mays
ggacctttctcagaccgatttgatctcctacgtcatctgctcgttcaacttcgtcacgggtctcacgcccgacagcttcagcccctacatcatctacatggcgactgctccctcggacgtgctcgccgttgagctcctgcaacgctattgctgcatgcgccattctctgcctctattgcctctgttctagaggctttcct

SEQ ID NO: 292143 - DNA, 310 bp, Zea mays
gagtccacgcatccgtccattcatctgttacgcggcccgtctcgacgcattttcctttctatctgagccaatttctctttccgggtgatgtcgaactccctaacgtggatcgtgaccaactatcgagcatatgctcctgttgctagcttggattctgacttataggcgttcaatcataatccggcacacggtagcttcgctccactgtcttttcaaccaagctcgatgaccaattgtgtgaatcaacagttcctctcttactatgttgaattactaatcgcgcacagtcatcaataaggtaaaactaacc

SEQ ID NO: 292144 - DNA, 356 bp, Zea mays
ggaacgcacacaccgcccgtccccgatctccgatcccctcgtcgatccaaagatgcagatctggtcaagaccctcactggaaagactatcaccctcgaggtggagtcttctgacaccattgacaacgtcaaggccaagatccaggacaaggagggcattccctcggaccagcagcggctcatctttgctggcaagcagctcgaggacggtcgcacacttgccgactacaacatccagaaggagagcaccctccaccttgttctccgactcacgggaggcatgcagatcttcgtcaagaccctgactggaaagactatcaccctagaggtggagtcttctgacaccatcgacaacgt

SEQ ID NO: 292145 - DNA, 354 bp, Zea mays
gtgacagccacctcagtctctgtctgtggaactctctctcgcgcgctgccatctcgcaggcggggagaggagatggacggggagcaggcggcgcggtgggcggcggcgcatgagggggttcccgtcggagcggaccttgtcgcggcggcgctgcggcagctgcgcttcctcgcggcggtggaccgctgccggtggctctactacgagggcccgctgctcgaccgggccatacgcaggtacaaagcatgctggcttccccttcttgacaagcacactaagggtgtggttgtagatggtccattggttgtccctcttgattgtgagtggatatggcactgccatcggcttaacccg

SEQ ID NO: 292146 - DNA, 347 bp, Zea mays
  unsure (1)..(347): unsure at all n locations
ctttaagccacacgcacttgagctccaccgtcactaccaccagtaccacaccactccgcgctagcgtgacgacggttcagcggcacagaggtgcgacgtacgacgacgacgacgcatgcgccacacatggcatnccagctctccgccgacgtgccccggttccacggcctncggggctacgccgcgcccaggtccgcggtggcagcgctgccgttcgtgagggtgggcaggaagaggtcgtcgtcgcagggcatccgctgcgactacatcggctccgncaccaacctgatcatggtgacgacgacgacgctgattgctgttgcggggcggttcgggctggcgccgtc

SEQ ID NO: 292147 - DNA, 339 bp, Zea mays
gttggctactcctacccctccggttcggattctgattcatgaggatctccgttactgggttaggtgggtcttcaaatcgagatagcaccgtccgatgttgagtaccgatgcttcgtcatctgcctcgcctgttccacggactaccactccatccacaactccttcagcacctactgcgaggtcctcgaatccaagatcatcctcgatcgggagactcataagtcccacggcttcggcttcgacaccttctccacggacgatgcgattctcaacgccatcgaaggcatgaaccgcaaggatcttgactgcctcaacatcaccgtcaacgaagcccaatcc

SEQ ID NO: 292148 - DNA, 344 bp, Zea mays
gaatccacgcatcgacccacttcttgcgccaatgacttccgctactatccattatacctttcaaccgtacctcagaacttctagcgcttcagttactcacacctgtaccactgccactcttccatgcttgcccaccccggcatccaggagcctgaagctctggcccttgtcaactccatgaaggcacatgactggacagtcgttcccggcggacaagccacgtacctatgcacacctgtgccgcgtatcactcttccgaccatactgctgatcgacttcgtgtccataaccttcccccagcaccaactcaccatggagaaagacccccataagaagaactaccc

SEQ ID NO: 292149 - DNA, 304 bp, Zea mays
tcgctcgccttcacccaggtccaaaaactgccgcatgagatggtggccctcatctagtaagggactaggtttcatctgccatccaagtgttctgtatgcacgccaatattattaatgttcttagatttgctcttataccttaatgcatacatcgtttgcaggctcgacaaccaaaaaaatataacgccccgtttggatcattgaaattgaatttcattctaataatagtaatttaggcatatatcaatcaagataattcagttttatacgaaagatatttgtatactattattagcaagatgtc

SEQ ID NO: 292150 - DNA, 422 bp, Zea mays
  unsure (1)..(422): unsure at all n locations
taagatcataagctagtgagatttccaacttcttgcactcgtacgccttcatatgggagtgtggttgttttacttaaattcaataatattaatctaatatgcccattggtgttccaaaagtaccttaccggattcccggagatgaagaagcgacttgggttgacttatacaatgttatgtatcgagaaaggacactttttttaggtcaagagattcgttgcgagatcacaaatgatattacaggtctgatggtatatctcagtatagaagatggaaatagcgatattttactgtttataaacttccctggcggctggctaatctcaggaatggcgatttttgatacgattcaaacggtgacacctgatatatatacaacatgcctcggaatagccgcgtccattgnctccttcattctgctt

SEQ ID NO: 292151 - DNA, 348 bp, Zea mays
  unsure (1)..(348): unsure at all n locations
cttccagaaggccaatgtcaaaggaacccggaaacttccggggcaactgcctggaatagcctaattgggggtgattgatcaagctacttgagctccgatcctcgctagctagttagtttaccgttttaccacaagtcttcttcacaagttaaggattgacagcaacaaaaaatctcaatggcctctgccaccgcgctcaagtcctccttccttcccaagaagtccgaatggggcgccaccaggcaggccgccgcgcccaggccgtccaccgtctccatggtcgtncgcgccttcggctacgccgatgagctcgtgaaaaccgcgaaaacgatcgcgttgccggggcgg

SEQ ID NO: 292152 - DNA, 299 bp, Zea mays
aagtcgtccgccaaggccggccccccgctcttcggcaagtacgagctcggccacctgctcggcggtggcaacttcgccaaggtataccacgcgcgctgcctcggcggaggcgaccccgtggccgtgaaggtgctggacaaggccgggctggccgtcacgggcatggcgtcgcggctcctgcgcgaggtgtcttttatgcgctgcctgatcaacccaaccttgttcggcttcaacaaggtcctgccaacttttttcaaaggggtacttgttaatgaacttgccccgggccgggaactttt

SEQ ID NO: 292153 - DNA, 321 bp, Zea mays
ctatgatgttgtaaaggctcacaactccaacagcaaaattattggttttcttggaggaaccgagggattatttgcacagaaaactattgaaatcactgatgaagctcttccatcctataaaaatcaaggtggttatgacatgcttggtcgtacaagggatcagatcaaaacaactgaaccggtaaagggcaccataaggtcatggtaagcattggaattggacccttctggtattaatggaagggttaaattcaacaacggttcctgttaacttggttaaacctttgcttaattgaaatggtcaaccaaaggtagtggtgg

SEQ ID NO: 292154 - DNA, 394 bp, Zea mays
ctgctgcagaatatattattccatacgctaagttcctgaagagcctcaatcatccggtctgtagtggagcaaggatcaactttcagtgccataatgaagatgttagtgaaaggcgatctggagtggttgttcgcattagtgaaatagatcccatgaaatggcctggctcgaagtggagaagcctgctggtaagatgggaggacggtgctgaatgtaatggccaaaatagagtatctccatgggagatcgagatagctggtggttctgtctctgtttctaattctctttctgcatctagttctaaaggacccaagttgggtcctaagggaaatttgaacgttcaaccattgtgaaatggtggtactgactcattggaacctggaaggttaccaag

SEQ ID NO: 292155 - DNA, 399 bp, Zea mays
ccgccgtgattatggaaaagcttttcattggttttctaaggctgttgagaaaggcgagacacgagcattggaacttctgggtgagatctatgctagaggtgctggagtggaaaggaactatactgaagcatacaagtggttggcacttgctgcaaagcagcaacattactcagcttacaatggattgggttatctatatgttaaaggctatggggtggagaagaaaaacctgacaaaagcaaaggaactttttgaacttgcagccgagaataaggaagctgggggacattataaccttgggtgtgtgtatcttaagggtattggtgtgaaaagggatgtaattagagcctgccatcttttggttcatgcaattaatgcttggcaaccaaaagctattta

SEQ ID NO: 292156 - DNA, 353 bp, Zea mays
  unsure (1)..(353): unsure at all n locations
gcgcgatggcagcggcgcaggaggaagcggcggcggcgccgccgagcacggagagcgatgctgccgagacggaggaggcaccaccaggcggcgcggagagcgatgctacggcgatggaagcggcggcggagtactcgtggctccagctccgcttcgaccgcccccctcgccggctctaccacttcgcccgccagttccgctccgccacttcctctggcagcaatagtagcggcgagaacttcctcaagggcgtaaagtggtccgccgacgggtcctncttccttaacaggctcgacgataactccctccggttggtttacttaccggaagaagcctacattgcggccgaaccc

SEQ ID NO: 292157 - DNA, 454 bp, Zea mays
gcaggcatcagcacatctcagccttcacccttctcacactctcttcactcagttcgagcatggggggcagcgagcgaagcggtaggtagcatcagtacgtgctgccgccaagctagttagtgccaatggcgagggctgtggcgatgctcgtggccctggccctggccctggctctgatcgtggctgcgagcgcagtcggcgcggcagcgcatcagtgcaacgctgctcagcttgctgcatgcgccccggcgatcatcagcggttctgcagccacggcttactgctgatataacctgcgcgctcacgaaccgtgcttttgccagttcgcgcgcaacccggcatatagcaactacgtcaacagccttaacgcccagcttacgcttacctgctgcggcatagccgtcccgagctgctatggctctagctcgtgccttgctgggtggatgaattaaaa

SEQ ID NO: 292158 - DNA, 359 bp, Zea mays
agcaacgggtccaggactttcacgctcagcttctagcattttctgcctccaccatggcgatctcggccacggggatatcttgcacccccatcaaggtgggctccttcggcgagggccgcatcaccatgcgcaagaccgtgggcaagcccaaggtggcggcgtccggcagcccctggtacggccccgaccgcgtcaagtacctcggccccttctccggcgagcccccgagctacctcaccggcgagttccccggcgactacggctgggacaccgtcgggctgtccgtcgaccccgagaccttctccaagaacctctagctggaagtgatccactccctctgggccatgcttggttcgctc

SEQ ID NO: 292159 - DNA, 366 bp, Zea mays
ggggagaagagctagagggatgggtggcggcacggtggtgtgtgtcaccggcggcagcggctacctcgggagctggctcgtccacgccaccctgcggagcctcgcggacgagaagaagacggggctgctccgggcgctccccggcgcggcggagcggctgcggctgttcgaggcggacatgtacgacgccgacaccttcgagcccgccatcgccggctgccacttcgtcttcctcgtcgccacgcccctgacgcacgaccccaccagcaccaagtacaaaaacacgacggaggcggcggtggacgcggcgcgcatcaatcctccgcagtgcgcgctgtccggcacggtgaagcgcgtcatccacac

SEQ ID NO: 292160 - DNA, 418 bp, Zea mays
gccggcggctctgtacaaggtgaaagaccccgcggtgaggcggttcatcgacaggggcctggcgccggcgtcgcggcggccgagcgcggccgagctgctcagcgacccgttcctgcagctggaagacggctgcggcctcggctacggagacgacgcggactacagcgccatgtacaactacctgcaccagcccgcgtgcctggaccaccaccaccatgccggcagcattggctccacggcgagcaacggggtggtgtccaatggcggcggcggcggcggcggcagatgggacgacgagtccgaggacgaggacgacgatggcagcatgttccaaggcatcgaccagctgttcaacgagcacgaagacgacgagctgcacgttgctggtgtcgacatcaccatcaagggcaagaggatg

SEQ ID NO: 292161 - DNA, 288 bp, Zea mays
gctctccgctaccacagctccgctccggtaaattggcagcctgtccgagttctccgctctcatgagctccgcctcgctgtccatgctccagaatgccaccttcgacgacttcatgtacgccgtctccttcatgacccaccccgtcggcacgagcatccgttcacctcgggcaccgacggatgccaatctaaatgtggccatcaacggattctgccacatctgactcaacttccttcggtgctgacacggtcactgcgacacctctcccctccacgtcatctccatcaa

SEQ ID NO: 292162 - DNA, 377 bp, Zea mays
tcggcggagcagacgcgcgggcgtgctgcgcctgctgcccattggcggcgagccggcgtctgcgtggtgtacgcgcagatatgacgctgttcaacaagcaggggcgcaccctggaccgccacatcggggacggccttgagctgcctccggcggcgctgcagacgctgggccccgcgagcatcctgctgttcgtgcctgtttacgaccgcgcggtggtgccggcgctgcggtgggcgacgggcaacccgtcggggctgagcatgctgcagcgcgtgggcgcgggcatggcggtgtcgctggcgggcgtggcggtggccgcgctggtggaggcgcggcggctggcgatggcgcgggagcacgggttggtggacgacccg

SEQ ID NO: 292163 - DNA, 418 bp, Zea mays
tcggcccttgcgagtccaaaccctaaacctaaacctctcacccggcgccgtcgccgtcaccggggtcgtcccgaggccccatcccagcgcaaccgacttccgcctcggattgaagcaatgtcgtcggacgacgaggtcagggaggagaatgagctcgacctcttctccaacgatgtcgtcaccaagtacaagactgccgaccaaatcctgaacaacgctctgaagctggttgtgtctgagtgcaagcccaaagccaagattgttgacctttgtgagaaaggtgactctttcataagagagcaaactgggaatgtctacaagaatgcaaagaggaagattgaaaggggcattgctttcccaacctgtgtttctgtgaacaacacagtctggcacttctccccgcttaccacagatgatg

SEQ ID NO: 292164 - DNA, 402 bp, Zea mays
gaggagcagccatagctacattggagtacatcgaggttagcacattcctgggcaccggccttgtgtacccagtgccacacaacgtgcgcatggtggtcaggctgcaattccggttggaaggacaggggaatgctggtgacaagaacgtgctcacaacatagagctgctctgaccgggcgctgtgagaacacggcgccgcggcacctgactacctgcacggctcactgctccgagactaccgactggagccgctcgggctgcaaatgcccgtgcgatacctgcaactggagatcacactcgatggaccacaaccttctcatgattgacgacgtaggtatcatcggcacccggaccgtgatctgcgaagtcaagttcacccccatgcatacctactgcgaggtg

SEQ ID NO: 292165 - DNA, 340 bp, Zea mays
ggcgcggctaggcgccgaggacctctggtgcatcaagcggctcgcggacggctacggcgccggcccgctcggcgactggaccaaggcgccggccagacgctccatattcatcgacccgagggagttttaggctgataagtagtaaatacacttaggcctagctttagggtttttttttggttctccccgggtcgtcgtccgttggatcccgtatccgacggctcctagtagctagctctagagaaggtcccacccttttgggtttcgtttcaaaacatgtggtaacgcgcgcttgcttaggcgtaatttctgctagagaaccggaataggtaaccttttc

SEQ ID NO: 292166 - DNA, 398 bp, Zea mays
gttgctagggcataataggctatcaggaagcatcccgacaaaaattgtgaaccagagttccctacaaattctgggcttggaagcgaattttctacgtatggcgttgccatctaatattggcaatacccttcctaacctcctcgcactttccttgtacagtaacatgttccacggtccaatcccagcatcgctaggaaacgcttcaatcctcgtggtattagacttcacatctaacagtttcactggaaatgtacctagttccttgggaaatctaacctacctgaacttcctaaaactagaacagaacaaccttgaagcaaaaaacaatgaaggctgggaattcatagatgcattggccaaatgtacgtatctacaatacattttattatctgacaatc

SEQ ID NO: 292167 - DNA, 402 bp, Zea mays
ggcttcctcctcctcctcctcccccttcccgagctcctctctcttgccgtccacgctcgactgcgcgagacactggtcaacgcccgggtggcaggcggctctggtggtgtgttgtgtgtgtggtggtggggtcgggtgagtctagctccgtcgcttgcgccggaagaacttgtcgggagctgtctctagccctcgggttccatggggaggaacggtagcgtgaagcgctcggcgtcttcgagcgctgcgggtgctgctgcggggccgccgtccttctctgtgaatcccgccgactaccgggtgatggaggaggtggggtacggtgcgcacgccgtcgtgtaccgcgcgatcttcctgccgaccgaggatgttgtggctgtcaagtgcctggatctcgatcag

SEQ ID NO: 292168 - DNA, 431 bp, Zea mays
cgttgataaaaaatcatatcttctagtggataatccgaaaaggattgcagcaagatgtatctcctcttggttcatttttgacgtttgctcaacaattccatatcaagcgtttggtctactatttaaaaagcatgcaaatggcctcgcttacagaattcttaacatgctacggttatggcgccttcgtcgcctcagtgatctatttgccagactagaaaaggatattaggttggactactactggataaggtgcatcaaactaatatctgttactctttttacagtacattgttcaggatgtttcaattacctgatagctgatagataccccaatccagcaagaacctggataggagcagcaagaccagactacagatcagagagcctatgggttcgatatgttacatcgatttattggtctattacaacac

SEQ ID NO: 292169 - DNA, 411 bp, Zea mays
ccaaaagatgttattttttgatcgttacaaggttggtgaattgaccggtttgttgagatctgatttgggttccttgaagagtgttgtaagtgataacatatccagagatcgtggactgagggcactctctgagatcattggtacactttgtatacttttcacactatcaactgagctagctccagttcttgggctccttatggtgtccgtctccgtgctagttgctattttcaagaggtcaactgttcccacttttaaatcttatggaatcgtgcaagcacgcatatcagactgtgcatcaaagacattttcagctattcgtactgttcgatcatttggtggtgaaaaacgacaaatttctttgtttgacaatttggcacatgcttaccaaaataatggcacaaaacttgg

SEQ ID NO: 292170 - DNA, 390 bp, Zea mays
gtctcaatcttccaccgtgatgtcaagtcctcgaatatacttttggatggaaactacactgcaaaagtttcagattttggtgcgtcaaggttggttcctattgaccaaacccatgttgttacgaatattcaaggcacttttggctacttagatcctgagtactatcacactgggcaactaaatgagaaaagtgatgtgtatagctttggagtggtacttgtggagctactccttcgaaagaagccggtttttacaaatgagactgggacaaaagcaaaatctgtccaactatttcctttgggaaaagaagatgaaacctgttacagagatagtggctgctcaagttcttgaggaagcaacataagaagaaattaacattattgccttcct

SEQ ID NO: 292171 - DNA, 440 bp, Zea mays
ccgagctacttgttcttgcgagtgactgtctttggaaggtgatgaacaatcaagaggttgttttgtttcaaatatgccaggagatgttccccgagtatgtggtcagttggctgtctccagagcttttggagacaggaatctaaaatcactattgagatcagagcctgatataaaagtcgaagacatagatcacactgccgagctacttgttcttgcgagtgacggtctttggaaggtgatgaacaatcaagaggttgtcgatttggccaaaaggtacaaggatccctatgctgctgccaagcaattaaccgtcgaagcacaaaaaagagatagtaaggatgatatatcatgcatcgttgttcggttcaaggtgtaaatcggtctcgaaagattttcatcgagagcaaaaaccagtgaataggctgcctgacgatggtagt

SEQ ID NO: 292172 - DNA, 426 bp, Zea mays
acgcactcggcatcttatcccccgcctactccggtcctcttgccgctgttgctcacttctgagtccgtacgcgcgagctcccaagagctagccatggcgtccaccaccctctcctccgacttcaccctcctatcccgcccctccacctccccgtgccccggcgcctagctcccgaggtcctaccacgccgcgccccacattcgccggggccgtcgcgccgtctccgtcacgtgcaccgccaccgagtcccccaagatcctgaacctcgagaaccccatccccggcctaaccctcaaggaggcccgcaacctcctcgaccacctccagaaccggttcggagtcaccgccgtggacttcggcccggccgcccttgaaggggcccccgggtcgaacgcctggcccgcgtccaagaaggagccccccttc

SEQ ID NO: 292173 - DNA, 388 bp, Zea mays
  unsure (1)..(388): unsure at all n locations
tcgcggacgcctgggcacgcttaccgacgccacaacttgggccccccccatgggaccttggggtcgggccttccttggtccttcaacaaccggccgtcgcggggcttccccagaaatgggcagcagcgggcgtcgtcgtcgttggtctccttctnctnctcttnctccttcctcgtcggcaagacgctgctgaggcaggccgaggcagcccggccgtcgttcgccgtgcgcgccgcggcggattccgacaggccgatctggttccccggcagcacccctccgccgtggctcgacggcagccttcccggcgacttcggctttgatccctggggcctcggatctgacccggagagcctgcggtggaacgtgcaggcngagctggtgcact

SEQ ID NO: 292174 - DNA, 358 bp, Zea mays
gcgatcgcgagcgcaagcacgtacgttgtcgttagctttagttagaacaagcaccagtgcctgaggcgatgggcgcccaggctctcctgtccggcctgcaactgctgtgccgccccgtgcagtcggccgtctctaggtcgtcagctaggaaggcgcccttcgtcgtcagggccagctccagccctccagccaagcaaggtgccgacaggcagctgtggttcgcgtccaagcagtccctctcctacctcgatggcacactgcccggcgactatggcttcgacccgctgggcctctctgacccggacggcacctatggcttcatctagcccatgtgactggcctatggctaggtgatcaa

SEQ ID NO: 292175 - DNA, 391 bp, Zea mays
agctacaagagggacgatgtcgtcccgtctgagacccccttggctgcgtacacgactggtgaggtgaaggccgacgagatcatgcgggctctgaagcaagtcttcaagacttccagcggcatgtgaatttgatgcttcttttacattttgtccttttcttcactgctatataaaataagttgtgaacagtaccgcgggtgtgtatatatatattgcagtgacaaataaaacaggacactgctaactatactggtgaatatacgactgtcaagattgtatgctaagtactccatttctcaatgtatcaatgtatatagaagttaacgtgcttgaggagataaaaaaaaaaaaataaagactgaaaaaaagggggggccgttttaaaggatcc

SEQ ID NO: 292176 - DNA, 406 bp, Zea mays
attcctgtaagctcctgcgcctcctcctcgttgcttcactccaaatccaccgaggccaccgcgcgggcggggtggaacccctagcgccgtcgccggctcggtcgccctctcgcgcgcgcgtgcgtcgctccgacagcagctgcagccatggcgcagccgctcgtcgtgaagaaggacgacgacctcgacgaggaagagtactactcgccattcctgggcatagagaagggcgccgtgctgcaggaggcccgcgtcttccacgaccctcagcttgacgctcgtcgatgctgccaggttatcaccaaactcctgtacctgctcaaccagggtgacacctttaccaaggttgaagctacagaagtcttctttgcaacaaccaagctggtccagtctaaagatgtgggcc

SEQ ID NO: 292177 - DNA, 338 bp, Zea mays
caaatacaccgaggccaccaccggggccgagatgaacccctagcgccgccgccatctcaatcatcctctcgcgcgcgcgtgcgtcaatccgacagcagctacagtcatggcgcagccgctcgtcgtgaataaggacgactacctcgacgaggaagagtactactcgccattcctgagcatagataagggcgccgtgctgcaagaggcccgcgtcttccacgaccctcagcttgacactcgtcgatgctgccatgttatcaccaaactcctgtacctgctcaaccagggtgccacctttaccaaggttgaggctacagaggtcttctttgcaacaacca

SEQ ID NO: 292178 - DNA, 375 bp, Zea mays
  unsure (1)..(375): unsure at all n locations
ataaaaccagtgcaagcagaagcagcgcaatggcgagcagcaccatggccctctccggcacaggcttcgccggcaaggcagtgaacgtgccgtcgtctctcttcggcgaggcccgcgtgacgatgcgcaagacggcggcgaaggcaaagccggcggcgagctccggcagcccgtggtacggccccgaccgcgtgctctacctgngcccgctgtccggcgcgcccncgagctacctgacgggcgagttcccgggcgactacggctgngataccgcggggctgtcggcggacccggagacgttcgccaagaaccgggagctggaagtcatccactcccgctgggccatgctgggcgcgttgggctgcgtgttcccgg

SEQ ID NO: 292179 - DNA, 415 bp, Zea mays
  unsure (1)..(415): unsure at all n locations
cgtgttccttgtcaagttctcataaactcataatccacaagtgcatcatatatacatagcttgctttgtgtgccgtcggaatcgcgaaatggcaagctctagttctgcacaaggcgcacactagacagaccctgagaaggtgaagctcgtcaccgtcctgagcatcgacggtggcggcgtcagagggatcatgcccgccaccatcctcgccttactagaagagaagctgcaagaactggatggaccggacgctaggatcgacgactactttgacgtcgttgccggcacgagcaccggtggtctcctggcggcgatgctcacagccactggcctgcatgaccatgacngacgtcgacagccgctcttcgacgccaaggatctggcgcagttctacatcgaccactcgcccaaaatc

SEQ ID NO: 292180 - DNA, 410 bp, Zea mays
  unsure (1)..(410): unsure at all n locations
cgcctactggcgcatggcgcgcaagctctgcgccaccgagctcttctccgcgcgccgcgtggactcgttcgagcgcgtccgcgcccaggagatgcgcgcgctcgcgcgcggcctgttcgagtgcgccggccgcggcgccgtcgcggtcagggagcacgtggcgggcgccacgctgcggaacatcctccgcatggcggtcggggagaagtggtcgggctgctacggtagccccgagggcgaggcgttccggcgcacgctggacgaggcgttcgcggtcaccggcgcggtcagcaacgtcggcgagtgggtcccgtggctgggctggctcgacctgcagggctgcgtccgccggatgaagcgcctncgcgcgcagtacgaccgcttcttcgagcagatcctcgacgaccacg

SEQ ID NO: 292181 - DNA, 345 bp, Zea mays
cggatacaaactggattgatttagatttcagcacttacgctggacgatcgggtcaggtacgctcaagacgtggtcatcgctgctgctacggcagctgatgaatatgcctacggttctgcagccatgatagctactggatgtgtcatcgcacgcattcgtcacacaaatcattgtccagtcggagcggctagtcacagagaacagcttcgtgcaaggttttctggagcacctggtcatcttcataactacttgctccttgcaacctaagaagatcaagctccattagcccaggtgggttctgacaaggcgggctacatcagtggacgaacagatttgcctaaacca

SEQ ID NO: 292182 - DNA, 310 bp, Zea mays
cacgcgtccaggatggtgctcaacattattcacttcaacactttgacatatcaggctgctgagcggccaacttgtactgtgtgccatattataacagtacagtctcataaaacatcagttggtggatctatactatctcctagtatccaaaaagttcgagaatcctgcacaatgcgaacaagctttggtcggcaagtttaagatactgtattacgaccttaccactgcgttccttaacctataagatgagtcacggtcaactgctgcacattttatctaagacattacctggctgccaaatgtcttataa

SEQ ID NO: 292183 - DNA, 371 bp, Zea mays
  unsure (1)..(371): unsure at all n locations
cccacccgtcacgcatagggacttggtatacaaccacctactttcacgcttctccaacatcaacactgacgactcgaanactgtcaaaatccaacaattgcttcactctcctcaatgtccactgatatcaaccccatccagtccgactcattcttcaacccggtcctaactagcactcctcatcccaaccttattatcctacaccacagtgtcaaaagaaatgcatacagcacaaccaagtttttcagtaaaacaagcatctcagcattcatgcgtacacaataaatccacatccacatcacataatgccatacatctacaaacatcgacctgtctaattttcttacacactttactacgattttcaacac

SEQ ID NO: 292184 - DNA, 418 bp, Zea mays
cacttgccacagctaaaactggtgctaattaatttcagctcatcgcacgctgatcaccaccgcttcaccacagcgaaccaccatggaaagattctactacgtcgccgtggccaccttcgtgctcgtcttcctgctccaccacctcttgacgaggaagaagcagcaacgtctgccacccggcccgcggttcgcgtaccccatcctcggccacctccccttgctcaagaagccgctccagacctcgttcgccgacctcgtgtcgcgccacggcccaattattcacctgcgcctcggccgccgccacgccgtcgtcgtcggctcggcggcggtggcgaaggagtgcttctccggagagctcgacgtcgcgatcgccaaaccgccgcacttcccgtccgcgcgcgaggtcaccttcgactac

SEQ ID NO: 292185 - DNA, 318 bp, Zea mays
ggtgagagccccgtccggtccggaccctgtcgcaccacgaggcgccgtcggggaagcgggagtttgggatgatcgaagacagcaaggcccgtacactggacgagaggatcaagaagcagaggcgtgcactgatgaacctacatcttcgtcgccacgacctgaccaaggaagtgaccaggacgctcatggacctggctgagtgatgcagtggactgagctgagtatcatctaagaattctattttatggtatttaagtgcactgatgatcgattaccagcaaatgttgtatgacctactcaagcatggtaggtgaatct

SEQ ID NO: 292186 - DNA, 430 bp, Zea mays
cccacctcttccacttccaccccgcccgtcgtctctcgcgaagcacccctatcgtacgttttccgtagctcgacggggacggcgagccgctcctgctgctgccgccgccggaggaggaggaacaggattagcgggaggaggagcagggcaccggtcgcttggggctgtgccacatgccgctctgggggaccgccgcgtccgcgcagccggcagccgagggcgacgccgcccgcgcgccctcagggtccggcggcggcggcgtcaaggtgatccggtcgctgctccccacccggcgccgcctccgcctcgacccgcccgctaagctttattttccatatgaacccggtaagcaagtccggagcgctgtcaggatcaagaacatcagcaagtctcatgtggctttcaagttccaaacgacagcaccaaagag

SEQ ID NO: 292187 - DNA, 368 bp, Zea mays
  unsure (1)..(368): unsure at all n locations
ggccctttcctccacagccttggccggcaaggcagtgaacgtgccgtcgtctctcttcggctaggcccgcgtgactatgcgcaagacggctgctaaggcaaagccggcggcgagctccggcagcccgtggtacgggcccgaccgcgtgctctacctgggcccgctgtccggcgcgctctcgagctacctgacggtcgagttcccgggcgactacggctgggacaccgcggngctgtcggcggacccggagacgttcgccaagaaccgggagctggaggtcatccactcccgctgggccatgctgggcgcgttgggctgcgtgttcccggagctgctcgcccgcaacggcgtcaagttcggcgaggccg

SEQ ID NO: 292188 - DNA, 386 bp, Zea mays
ctgttaagctagctatccttgcttactcccttcactttcttattgagagctctctggcgtgctgtaccggacgacaggggttggtaggtcgtaggtgtagctagctcggctagcgagcaatccggccaacagcacacgcgtcgatcgccatgccgagcggctgcggcaatggcgttggcagtagtcgcagtagagtgatgcccaacctgccggccggattgcgcttacaccagactgacgaggagctcatggtgcactacctcatgaggcaagccgacttcttgccgtgcccagtcctcatcatcgccgaggtcaacatctaccattgcaacccctgagatctccctgccaaggcattgatcggcgacaaggagtggttattcttc

SEQ ID NO: 292189 - DNA, 317 bp, Zea mays
gactagttgtaagaacccttatcctatctttctaatatatatcgatgcctcgttcctcggactggtccaagaaaaaaccgggcatgtaaaaacctcttaccggcctaggacgtccttcatgttacttggggacttcaacgatgcatggaatgattttgagaagatgattaccattgacaaatcatcagaacaggacgctacatccggactccctaaacttaagcagaaagaacacgaagccgaaaagaaagcgaggaagcaattcaaaggactctttgacaagaagccatgagagatatccgaagttggtgtagaat

SEQ ID NO: 292190 - DNA, 386 bp, Zea mays
atggccggcacccccatcaaggtgggctccttcggcgagggccgtatcaccatgcgcaagaccgtgggcaagcccaaggtggcggcgtccggcagcccctggtacggtcccgaccgcgtcaagtacctcggccccttctccggcgagcccccgagctacctcaccggcgagttccccggcgactacggctgggacaccgccgggctgtccgccgaccccgagaccttcgccaagaaccgcgagctggaggtgatccactcccgctgggccatgctcggcgcgctcggctgcgtcttccccgagctgctcttccgcaacggcgtcaagttcggcgaggccgtctggttcaaggccggctcccagatcttcagcgagggcgggctgga

SEQ ID NO: 292191 - DNA, 380 bp, Zea mays
cggtcgcccacgcgtccggcaactacggccagcacggccggatctccattgtcaacgacctgtggtacggcccgggccagttcaagtacctgggccccttctccgcccagacgccctcgtacctgaccggcgagttccccggcgactacggctgggacaccgccgggctgtccgcggacccggaggcgttcgcgcggaacagggcgctggaggtgatccacgggcggtgggcgatgctgggtgcgctgggctgcatcaccccggtagtgctggagaagtgggtgctcgtggacttcaaggagcccgtgtggttcaaggccgtctctcagatcttctcggatggcggtctggactacctgtgcaaccccaaccctgtgcac

SEQ ID NO: 292192 - DNA, 395 bp, Zea mays
ccgtaggaccgtaccctcagctagtcagctttctccatccaccagaccagaccatacgagaccggaccagaccaatggccctgcgcctaccaatctcatcgtcccacgggctggcctccacgccggcgccaatctccacgacgacgtgccggccggccgtcttggcgacggccgcggcccagaagaggagcctgctgctggcgacggcctccgagacgaggggagtcgcgccggtgaggtccagcgggatcgagacgagcacggtgggtctgggatgtgaggccgtcaccgggcaggtcacggaggtcaacatggacaccttctggcccatcgtcgaggccgtcggcgacaaggtcgtcgttctcgacatgtacaccgaatggtgcgggccttgc

SEQ ID NO: 292193 - DNA, 379 bp, Zea mays
caaatcgaaccgcgggcagcgcgcacgcgcattgactgccggcgatggcgagcctcaccctgccgccggcgccccccaacccacgccaggacgccatcgacctccacaaggccttcaaggggtttggatgtgacagtacaacagtggataacatacctactcatcgcgatccgtgccacgtggacctcatcaaccaggataccaggcctatggattaatgagaacctttccaaccgaattcaatttgacctaatggaaaccaccagaaaacctatgcccttgggaatcctgaaccctgctgaacttaatccaccggtttgaaaagagcctttaatggggacccttttgaacttaaaaccaccccctgaaataatttgtc

SEQ ID NO: 292194 - DNA, 257 bp, Zea mays
gcgtttgtgtgtatgtatgagagtctttgtgcatttcgcgagcgcgaagggcacgcccggtaagctgtcctatgacgagagccagatcaaaacgtacatgtatgtaaagggcactgactcggctaaccagtgctggaccatcgacagttgcttcttgtcgttatcgatcaaggccggtaagaaccatatgaagaagctttgactgtaaccgacgtccatgaccgccaaggcaaagggcatctccaagtactcgtctt

SEQ ID NO: 292195 - DNA, 326 bp, Zea mays
ctatagcaaccggtccaacactttcacgctctggcgctcagctctagcaatggctgcctgcacgatggcgatctcctccacggcgatggccggtacccccatcaaggtgggctccttcggcgagggccgcatcaccatgcgcaagaccgtgggcaagcccaaagtggccgcgtccggcagcccctggtacgggcccgaccgggtcaagtaccttggccccttcttcggcgagcccccgagctaccttaccggcgagttccccggcgactaccgctgggacaccggcgggcttgccggcgaccccgagaccttcggcaagaaccgcg

SEQ ID NO: 292196 - DNA, 364 bp, Zea mays
gctagttctagatcgcgagcggccccctttttttttttttttttttttttttttttggttttggatcaaaaaggctgactccattgcaaagcgaaatcctgctgtaaaaatacatacatcaggatcagggcatcgtccaccttcaccggataggacgacggccgatccatatactatacacagttttcgatccaatcgaaccctaacatcggtggatccatcatcatcacagctcacaacaacatgtacttaattaacaacaacggttggacgcttgttggttgcttaatcctgctaattaacacgctactagcaaaaacacgagaagatgatgatgaacaggagcagaagctcggtatcatca

SEQ ID NO: 292197 - DNA, 315 bp, Zea mays
tacgaccaccgcgtcaaatgcatatgactttagctggaggacgtactgccatggcgagttcgcgagcccttcaccgcagtatgacacttgcttgggagacctgtatagtgttgcttggatggaagacagtgatttccacaatctgcgaactgaatctttcagccaccaatccacctggtccaaggttagaaaagtgttcaaggttccatcaacttttggttccaatttaatccattatggttaattgaattggaatgtaaaccttttgtttcgtaccattgccccaaaccttgttaccgttaccaccccttcatt

SEQ ID NO: 292198 - DNA, 330 bp, Zea mays
ctcgccatcacataaaaccagtgcaagcagaatcagcgcaatggcgagcagcaccatggccctgtgctccacagccttcgccggcaaggcagtgaacgtgccgtcgtctctcttcggcgaggcccgcgtgacgatgcgcaagacggcggcaaaggcaaagccggcggcgagctccggcagcccgtggtacggccccgaccgcgtgctctacctgggcccgctgtccggcgcgcccccgagctacctgacgggcgagttcccgggcgactacggctgggataccgcggggctgtcggcggacccggagacgttcgccaagaaccgggagct

SEQ ID NO: 292199 - DNA, 444 bp, Zea mays
  unsure (1)..(444): unsure at all n locations
gttcaagtacctcggcagcgcgctggcgtttcggagctggggcagcaaggacctggtgttccgcgtctgcctcgtgtccgccgtggccagcgcgctcttcaccaacgacacctgctgcgtggtgctcaccgagttcatcctcaagctggcgcggcagaacaacctgcccccgcagccgttcctgctggccctcgcctccagctccaacatcggctcctccgccacgcccatcggcaacccgcagaacctcgtcatcgccgtgcagagcggcatcaccttcggccagttcctcgtcggcgtcttcccggccatgatcgtcggcgtcgccgccaacacctgcatcctgctctgctacttctggaggtgcctctccgcgccggagaaggaccaggagggcggcgccgncgncgcggggcccgacgtcgccgtcgtggccgacgagga

SEQ ID NO: 292200 - DNA, 358 bp, Zea mays
gcggaggccgaggtaggtccggcggaactctgccggcgtgaggtcggagaacttagtggccgcccgcaacacgagggcatgttcccgggccctacctcgcagccttcgcccgacgtcgccgttgcgagcagcggcgtccagtcgagctgggccggcgacatctgctcgaccttctgcggcagcaaccaggtgcccaggacgccggcagggatcagggggaaggacgcggcattgcagccggaggtgccgagccgtgccggcgcgcacggacgcacatcgtcatcccgtgggtccggaagcaactatgggggatccgggctgcccaatgacagcgtccatggtcccaagaggaagggga

SEQ ID NO: 292201 - DNA, 318 bp, Zea mays
cccacgcctacccaggcatcctgtatcgcctcacgcctattactgcactctcattgcacaatggcgggacaagggcaactctactacacggacatgcacggcaccctcatcacaagagcttcttcggcgatggcccacatcaccattcgcatgaccgtcggcaaaccacaagtagccccatgcggcaatccctgatacgacctccaccgtgtcaagtaccatcgccacttatccagccagccccccaactaccttaccgaacagtttcccgacgactacggctgcgacacccacgggctgcacgactacccccatacc

SEQ ID NO: 292202 - DNA, 440 bp, Zea mays
caacttggtggtgacgtgccatttcagaaggtttatttacatcctatgattcggcatgcacatggccgaaagatgtcaaaatcacttggtaacgttgttgaccctcttgaggtgataaatggcatgtcactggatggtcttctgaaacgtttggaagaaggcaatctggatccaaatgaattaaacattgcaagagatgggaagacgaaggattttcctgatggcatagcagaatgtggtaccgatgcgctccgcttcgcactgatatcgtacacctcccaggttcttatggcacccagttgagttttttcatgtttaatgtagcatacatggctttatgcaatccccccctcttcagtctgacaggataaatcttgatatcaagagggtggttggatatagacaatggtgcaacaaattatggaatgccattcgttttg

SEQ ID NO: 292203 - DNA, 333 bp, Zea mays
atgtcttgcaactcgggtcaactgcagctgcagctgaagctgcaagtgcggcaagaagtaccctgacctggaggagacgagcaccgccgttcatgccaccgtcgtcctcgtcctgaccccagataagaacgcctcacccgagttcgtcgaggccgttgcggagtcctgcgaggccgcccacggctgcaactgcagtggcaactgcaagtgcaacccctgcaactgctgatcacatcgatcgacgaccatggatatgattattatctatctagcttgtggtggtggttgaacaataataagcgaggccgaactggctgccatacataggtattg

SEQ ID NO: 292204 - DNA, 243 bp, Zea mays
ccgggatttggttgtattgtttgctcctgtcctagtgaatgcctatggttcaagttaccattttgtggtaattgtgttgtaaaaactatatgtatcgaattatattagtactgtagctttacacagttagttctttacggaagatttatgaggtgtttggtttgatgaatcactctatccaaaatgaagtggtgcatcatgggtccattcctcaaatttggggggatgacttcattccacata

SEQ ID NO: 292205 - DNA, 422 bp, Zea mays
aatggaaggaggtgctattaagttatttgattcccggtcatatgacaagggtgcattggacactttcttggttggtggagatacagctgaagtttctgacatcaaatttagcaacgatggcaagtctatgcttttgacaacaactaacaaccatatatatgttctggatgcatatggaggggataagaggtgtggctttagtttagagccatctcccaatgtaacaaatgaagctgctttcactccagatggtcaatatgtaatttcaggatcaggtgatggaaccctgcacgcttggaacatcaatacagtacaagagcattgaagtgggcccctcgtcgagcgatgtttgcaactgcatcaactgccctaactttctggattcccaaccaatcgaattaggatcaggtgcatggagaaag

SEQ ID NO: 292206 - DNA, 424 bp, Zea mays
  unsure (1)..(424): unsure at all n locations
gaaaattctaccattctgattctttttcttttgctacaatacaatacacttttacattgtcattttccaacaataacactataatatttttgaaacaagaaatttggtcatgggacatagttgtttgtcctaatgcagctagctcatttgttttcctttgattcagctacaacatcagtagccacattcgttgttctggtagtcactgcactctatctttcactgaagaaaagatataatgaagcaatacatctcanagtagaaatgtttctcaaaacatatggcacatcaaaacccacaaggtacactttctccgaagttaagaagatagctaggcggttcaaggaaaaagtaagccaaggtggattcggaactgtttacaaagggcagctaccaaatggtgttccagtggcggtcaaaatgc

SEQ ID NO: 292207 - DNA, 358 bp, Zea mays
gcaaccggtccaacactttcacgctcaggcgctcagctctagcaatggctgcctccagcatggcgatctcctccacggcgatggccggtacccccatcaaggtgggctccttcggcgagggccgcatcaccatgcgcaagaccgtgggcaagccccaaggggcgggcgtccggcagcccctggtacggccccgaccgcgtcaagtacctcggccccttctccggcgagcccccgagctacctcaccggcaagttccccggcgactacggctgggacaccgccgggctgtccgccgaccccgagaccttcgccaagaaccgcaagctgaaggtgatccattcccgttgggccatgctcg

SEQ ID NO: 292208 - DNA, 367 bp, Zea mays
ctgctcgcccagatcaactgtttctactcctgccatctacttctacacgtccaccaactcgctgcgtctcacaatgccacccctagggcaaagcgccgctcttatgggagatcaccggcgacagctgccatgtcatctaccaccacatagacatcctcaaaggcttatgcccgaagtcgttttcgccggtctggctggggtgcttctactccaacgtcattgcacggcttacgagatacaagaaccgaacatacactgtcaccgttgtaccggcagacaatgaacagatctggccagtcacactgaaggtggtgcaaggagctactgcgctgacagcactgcactgatcgatcattatgacgccgat

SEQ ID NO: 292209 - DNA, 402 bp, Zea mays
atttgccgatggactcttggtggtgagcagcgagagatagagagggtgaaactacatgtgcatatacaaatacatgtagctagcggcgtagtactggatactgtgccatacggagtatagtatatatactcgctgtattagcagtagaggcggccgtgcagcgatcggtcgacgatggttgttgccgccatgagagacgagggagaggagggacgacgacgggcggtggtggcgatacgggactacgatcccaagacggaccgcgacggcacggaggccgtcgagcgggagtgcgaggtcggcccggccgccgccgccggcgggatgtcgctgcacgccgacctgctcggcgaccccgtcgcgcgcatccgccactcgccgcactacctcatgctggtagct

SEQ ID NO: 292210 - DNA, 421 bp, Zea mays
  unsure (1)..(421): unsure at all n locations
gcgcgcgctagctcttggtctagctttaggtgcaccagcagcgcgcgaacgggtgatggatcagcttcgtctttcaattcttctccacatcatcatttgcgccacgtacgtaaatcggctgctgcgggagagacgaccggccgccggcgacgccgccatgaccaagcaaaaggcagtgatcaggcttggcgtaacgaacgaccagaaccggtctaaggccatgcagctggcgtcccgatttcacggagtgaccttggtgtcgatcaccggcgcaggcaaggaccagctggaggtggtaggagaagacatcgacatcccctgcctcgtcaattcgctgcgcaagaaggtctgccgctccgccggcatcgtcgtggtggaggaagtcaaggacaaggcgaaggtggaagangagaagaagaag

SEQ ID NO: 292211 - DNA, 429 bp, Zea mays
  unsure (1)..(429): unsure at all n locations
caaagtccaggtcttctacctcaagatgaagggtgattactacaggatattggtttggaggagttggcccccttatcctattaggctttggctgatgcttaacctctcaactctcctgatcttgctcgtggtctccccaaacaggtttggtttctagatccattacatggagtgtgtagtgtttttcctcttttttgcaatcctcatgatgtgccaccaggtctggtctaatcgttcccctaaaattgtggcctataatcagcttcttggcctatgatccttttgtatgtaggcaaagccaacgaatgaaagggactcactcgcagcaacaaccaanaagctgatcacgcattctccttttcacatttgttgcatttaattaattcatccaatagcatanattggcactccttttgtgttattgctctt

SEQ ID NO: 292212 - DNA, 402 bp, Zea mays
gtcttcacactcctcgccatcacataaaaccagtgcaagcagaagcagcgcagtggcgagcagcaccatggccgtctcctccacagccttcgccggcaaggcagtgaacgtgccgtcgtctctcttcggcgaggcccgcgtgacgatgcgcaagacggcggcgaaggcaaagccggcggcgagctccggcagcccgtggtacggccccgaccgcgtgctctacctgggcccgctgtccggcgcgcccccgagctacctgacgggcgagttcccgggcgactacggctgggacaccgcggggctgtcggcggacccggagacgttcgccaagaaccgggagctggaggtcatccactcccgctgggccatgctgggcgcgttgggctgcgtgttcccggagct

SEQ ID NO: 292213 - DNA, 392 bp, Zea mays
cgctctacaacgccacagcttgcgcccgcaatggcgctcgtctccgcctgctggtcctgcaccaccgacgccacggcgctccccaggaatgggcagcactcgtcgtactgcttcctcggcggcatgacgctgctgagacaggccgaggcggcccggccgtaccacgtcgtgcgcgccacggcagacccgaacaggccgatctgcttccccggcagcaccctttcggcgtggatcgactgcaggctgaccggcgacttcgagctctatccctgtggcactggatctgacccggagagcctgccgacgatacgtgcacgcggagctggtgcactgtcagttaccgatgctcatctcggcgggcatgttcatacccgagttcctgaccaagatcg

SEQ ID NO: 292214 - DNA, 379 bp, Zea mays
gattgactctgaactctatcatgctcagtccccaatcgctactgatctctgccgcgaggatttcgacttatatcacctttctgagtcaagcttgcatatctatcctctgaatattgtcatcaagacctgtggcactcccgacctcctgctcaccattccaagaatccttcagcttgctgaagacctgtctatgccacttgctgatgtgaagtacttctgcgggacgctcatgttttatgtcacacacccattcccctacaagtacttctgtgacgaagtcgctgtacttaaccgctactatagctgcctgaaataccgtgatcatgctgatatcaactgagattcagccatacttggaccgatatggtacgtcttctac

SEQ ID NO: 292215 - DNA, 430 bp, Zea mays
aacatataaagcacaatcatataccttcaatttcaaccaaaatattttgcttccttgtctcgttaaactttatgcaagtgctgctaccgcaaccattttcccacaatgctcacaagctcctatagcttcctttcttcccccatacctctcaccagctgtgtcttcactatgtgaaaacccaattcttcaaccctacaagatccaacatgcaatcgcagcatgcatcttacctttatcacccttgttcctccaacaaccgtcagccctattacagcacttacctttcgtgcattttttggcacaaaacatcaatgcacaacaactacaacaactttttctatgaaaccttgctacctactctcatcaacagcactttcttccattcaaccaacttgcttcatttaactctactgcttattttcaacaacaa

SEQ ID NO: 292216 - DNA, 401 bp, Zea mays
gacaactacgcatctgcggggcgccctccaccgggccccgcggcctcttcccccgggcggcccttctcggccggccgcttggcgttccgcacctccgaacgtcgccacgtaacccgggaactggccgcctacgacgtcgtcttcctggcggcgctcgtgggcatggccgccgaggagaaggcgcgcgtcgtcgagcacctagggaggcacatggcgcccggcgccgcgctggtggtgcggagcgcgcacggcgcgcgcggcttcctgtaccccgtggttgaccccgaggagatccgccgcggcggcttccacgtgctcgccgtgcaccacccgtgaggggaggtgatcaactccgtcatcatcgcgcgcatgccactgccggtcgtcgacgagcacgcccg

SEQ ID NO: 292217 - DNA, 392 bp, Zea mays
agaggactaggcgcttcggggctccgcgcgcggggatggacatggacctggccaggggcgccgtcgaggtgatcaacgacctgggcttcgacacgctcaccttcctcggcgtcacggtcctcgtcgtccccgccttccgcgtcgtcaatgccagcccaattctcggcttcttctgcgccggcgtcgtgctcaaccagttcggcctcatcaggaacctcaccgacgttaagctgctctccgagtggggaatccttttcctgctgtttgagatggggctggagctctccctctctcgcctcaaggctcttgcgaggtacgcctttgggatgggcttgcctcaggttcttttgtcaacccttgctttcacggcgttcgagctttcttctaatgat

SEQ ID NO: 292218 - DNA, 419 bp, Zea mays
  unsure (1)..(419): unsure at all n locations
atcctatgctgccacatcgaaggaagatgatgacttcctcaaatcttgcccatcggatcgatgccacaagcatggaccagagatccggttcccctttcggcttccaagccaccctccatcctgtggcacacctgggatgcaattatcatgctctgggcatgacaccatccttgatcatccagttcttggctcctgcagagtgacagcaatatattacaggcatcgtgtcatgaatgtcatcccgccagaggactcatcgtcacactgccaacttcagaagcttgttaaaagaaatcaatcaactgatgtgtacacacctgtagcacatcctgtctcagtagttgtaggatgctcaagagaagcaacaaaccaagatgatattgcangcccaagctcttngccgagcctcattaacaatg

SEQ ID NO: 292219 - DNA, 381 bp, Zea mays
tcgtatcaatgcaataaaaaaatcattcgcaatggcgagcagcaccatggccagaaggcttcacaaacttcgcgggcgaggccgtgaacgtgccgtcgtcgtccgccttcggcgaggcccgcgtgacgatgcgcaagacggcggcgaaggccaagccagcggcggcgtccgggagcccgtggtacggcccctaccgcgtgctgtacctgggcccactgtccggcgagccaccgagctacctgacgggcgagttcccgggcgactacggctgggacaccgcggggctgtcggcggaccctgagacgttcgccaagaaccgtgagctggaggtgatccactcccgctgggccatgctggtctcgctcggctgcgtctttcccg

SEQ ID NO: 292220 - DNA, 413 bp, Zea mays
ctgtttctgtgctctgcttccctgtgaatttgaaacagctgctcccttttacacactgcagttcgccaaagaaaatgctcttgagcttgaccttccagcgatcaagctcggtgagcacgaagacgtaaccgaggaagccgtgtctactactttgagaagggcaatcagccgtctttctactctccaggcacatgatggacactggcctggggattatggtggccctatgttccttatgccaggcttgatcataacattgtatgtgactggagcactaaacactgtcttgtcatcagaacaccagaaggagatccgtcggtatctttataatcatcagaatgaagatggtggctggggcttgcacattgagggtccaagcaccatgtttggctcagcactgacctacgttactt

SEQ ID NO: 292221 - DNA, 309 bp, Zea mays
cggttcgggttcgggttcgtgaggttctcctttgttcggtttcgtgggtgggcggggcgagatggctgcgtcggatggtgagtaccgctgcttcgtcggcagcctcacctgagccacggacgaccactccctgcacaacgccttcagcacctacggcgaggtcctcgagtccaagatcatcctcgatcggtagacgcagaggtcccgcgtgcttctgcttcatcaccttctccacggaggacgcgatactgaacgccatcgacggcatgaaccgcaaggaactgtacctacgcaacatcaccgttaacg

SEQ ID NO: 292222 - DNA, 375 bp, Zea mays
aagaggatcaataaccttcatctgcagatgcagctgcagtgcagtcataagcgtactacttagtgtcatgtcatctcatcaggactctgattgatcaaatcaccgtacatgcacccggcccgcagtgggcgtgcaccacgagcgtggacttctcgctggcgcatctgatccaggtgatcatcctgctgagcaccgtcggggccaacggcggcggctacctcgcctccaagtacgtcgtgcttgccatctacaccgccatcctcgtcgtgcacggcctcatcaacagcctgcacatccagtggctctcctggttcggacagctcggagccttgtggaacgtcgcgggcgtgttcgtgctcgtcatcctggtcccgt

SEQ ID NO: 292223 - DNA, 398 bp, Zea mays
tccatcctcaagccattctctttctccttcagctctgccgctctcgaggcggccttctacaacgtcctgggctctcagctcgtcgccaatgccaccggtgagaactccattaagtcgcccgcacacgcaaagctaaacgtggcgatcaacggcttcagccgcatcggccggaacttcctccgatgctggcacggccgctaggactcaccgatcgacatcgtcgtcgtgaacgacatccgatgcgtcatgaactcgtcccaccttctcaagtactactcgatgctcgtcaccttcaatgccgacgtcaagatcgttgacgacactaccatcatcgtcgacggcaatcccatcacggtcgtcttcatcatggaccccctcaagcttccatggtgtgatct

SEQ ID NO: 292224 - DNA, 410 bp, Zea mays
aattcccggctggactccacttcttcctccagtttttcttggtccctaaacttaattccttttttctcttttttgttccttggctgtattaaaattacatgtggttgaagtcatcaatagaaccccacaattttttgggtcctacttattttcattgtcttcggaatagtataataatttaatttggaatatctgccaatatcttgggaaaatctaagttaatgattaataagataaagaatttatgaaggatattctcatattgactcaatacaaagataagtatattcaaaatctatccctttttagttaaaggatatctacatctgagcatcccataatatctaataaatacaaaatcgaatatctgataatcccttatgaaagaaactgaatacattcttttaata

SEQ ID NO: 292225 - DNA, 427 bp, Zea mays
tcttcctgaggaaaagggtccgttgtgtctacgttttatagggtcgtcggctgcccttactagaggaggatcacctctttctcgacgggccctatcgtgcctgtgttccgatccttgctgtctcggctctctctgctcctagtcctcatacctctgtactctctcttgctttgtcttctgctactatcacgtctcctcttcacactccggtcaatcttacaatctctctcaaactgtccaaaaagaaagcgaccatatcccgcatctcgatgatgcctattggtactccacgtgttccttaccgaacacctgttgaaagaacctgtcaatggcttgacatatggaacgctctgtaccgtgagcggattatcttcattggggacaatatagatgaagaattcagcaaccaaatgttggcaagcattct

SEQ ID NO: 292226 - DNA, 384 bp, Zea mays
ggaagaaaaaaaaaataactccaccattcccttccctctcgcgagctcagatcgctgtaagcatggaaaaaagaaaaatggcgcagctggtggagacgtacgcgtgctcgccggccacggaacgcggccgtggaatcctcctggccggggaccccaagacagacacgatcgcctactgcaccggccgcagcgttatcatccgccgcctcgatgcgcctctcgacgcttgggcctaccccgaccacgcctaccccacgaccgtcgcccgcttctcccccaacggcgagtgggtcgcctccgccgacgcctcctgctgcgtccgcgtctggggccgctacggtgaccgcgctctcaaggccgagtttcggcccctctcgggacgcg

SEQ ID NO: 292227 - DNA, 265 bp, Zea mays
acttctacagcccctctgctgcagcaagaaggaaagaagctagcgcttatagcttcgcagccatggccaccggcgccgcgtctagcctcctcaagtcctccttcgcgggctcccagctcccggccgccacgcggaccacaccggcgtccctcgaggtggccaccggcccgcgcggcgccggcgcggggcccatctgcgcgtccatgtccatgtcctcctacaacccagcctacgacctgacgatcttacagttcatccccatcaa

SEQ ID NO: 292228 - DNA, 339 bp, Zea mays
gtcgccatgtacgaccagaacacgcagcgcagacgtggcttcggattcatcacctgtgactgctaggacgctcttgaccacgtgctgcacaagaccttacatgatctcggaggcaagctggttgaggtgaagcgcgcattgccccgtgaggcgaaccactgaggctctggtagtgaccgtatcagagcgagtggcagtaaccagaacagcaatggccgttacaccagctcagatagctacgatggaagaagcgatcgaggctggtaccgacatgctcagcaagttattgaactcgcatcatgactacagtgctgaggcagactcatatggatatgatgc

SEQ ID NO: 292229 - DNA, 411 bp, Zea mays
aaatatgaaaggtgtcacatttatgacgattttgcattggtcttaatgacaaattttgacttttcatcactaaagtcaatcatcccctacgaaacgtcataagtaggagaggcttatgacattttgatctattgtcacaaggtattcgtcatagaaggctatatgtgttgtagtgagagtttatacacatggttagggtactcactatcttcaaagccgggaggttgctcaacatagacctcttccttgattggtccattgaggaaggcacttttcacgtccatttgataaagcttaaagccatggtaagtagcataggccaataatatgcgaattgactcaagcctagctacgggtgcataggtttcaccgaaatccaaacctttgacttgggagtatcctttggccaca

SEQ ID NO: 292230 - DNA, 277 bp, Zea mays
cacgcgtccggcagcttctgcttgctctggggggaaggagagagagagagcgagtagagagacacgcatctactagagaggctagtaggtggtcctcgaacgaagatgttggccgtgttcaccggccaggtggtggaggtgccggcctacctgctggcggcgggcagccggacgccgtcgcccaagacgaatgcgtcgcagctcgtggggcgcttcctggccgcgtccgatccggccgtgttcgtgcagctcgtctaccacggcctcctcgcctact

SEQ ID NO: 292231 - DNA, 426 bp, Zea mays
  unsure (1)..(426): unsure at all n locations
cactcttcctcgacttctttcattgattcttgaagatatctatcttcttttgcaccacaatgtctacagtntctttcaacttcggatcaagcttccgctgctgctcaagctgcaagttctcttcaatccattttctctctgtccttttcagcaagaagtaccctgacctttatgagactagcaccgcctctcattccaccttcatcctcttcgtttcccctgataatatattccctcccttattctttttattcctctttattattttttttatctttttattctacttttatttttttttcttgttttctactcttttaacttcttttcttatttatcttcttttttatatttttttattattttttatttttttttatttattttttttttttttatatctttataattttaattatttttttt

SEQ ID NO: 292232 - DNA, 394 bp, Zea mays
gttcgctgttgctctctccagtagtcccgttgagtgacctcccctgctcgacaactagttcgaccgccgccgccccacgcctgctggccaggtcttcggcggaccctttgccgtcgacgggcatccaccacaccagggttttgcacattaatgaagacttaaaagttccagaacaaagcactaagggtgctcgaaggaaaaatgctttaggttagatcaaaccatggtttttaaagcggtaaggcggtccaaggcgttggagcaccgtctggacgcctaggcgaggtaggtgggcaaggcgcctaggcgttagaccaccgcccagactcctaggctactccttaagaacagtggatcaaactgtagatcttgccactgccttcaagcatcctat

SEQ ID NO: 292233 - DNA, 136 bp, Zea mays
tcccggtctgctccgtggccatggcgtcgtccattctctccgctaccacctttccactccatcaaggtgtcttcctgtcgtaggtctccttgctcatgagctcctcgtcactgcccatgctcctgaatgccacctt

SEQ ID NO: 292234 - DNA, 367 bp, Zea mays
gctagccttcccgttcctgcatcgcgtcctagatgggcgcctacaccccgacgactcagacgttcactcattgcggctggtactcaaccgattctccgacctcaccaactactagtaccgcgccaactacctcggcgtcaagagcaggccacagaggcagagtacgctccatgacatgtacctaccccgcaacaactagcacatgccacaatccgtcgacttgcggtccaagggctccttccacgaaatccaagaccaatccatccacgttagacgctagcctgactgaactatagcggaccacgaacgcatcactacaacatggactatcgaccaaatctcctaaactcatcaccaacttactcac

SEQ ID NO: 292235 - DNA, 423 bp, Zea mays
tcggtctgggacaccgcggtgctgtcggcttaccctgagactttcgccaagaacctttatcgttttgtcatccactctcgctgggccatgctgttctcgttggtctgcgtgttcccggagctgctcgcccgcatctgcttcaagttcggctagtccctattttttatgtctcatttctcttatttttcatctttttttttcctttttcttctattttcttctttctttttcatcttttttatcttttttcttttcttaatttttacttctttcttttttcttcttacttttttattttttttttcttttgttttatttatttttttttttattctatattttatctttttttctttatcattattattctattttttttattctttttactttatattttttttatattttatttaatttttt

SEQ ID NO: 292236 - DNA, 373 bp, Zea mays
tatgataaacttcggattctatctctctcttccattcttacgtttccatattacactggaggctttctactcaaatctactaatactactctaatatgcccattggtgttccaaaagtaccttaccgcattccggagatgaataatcaacttcgattgacttatacaatgttatctatctagaaatgacactttttttaggtcaagagattcccttctagatcactactcatattacacgtctgatactatatctcaatacacaagatggacatacccacatgaatttgtacattaactcccctaacgggttgctaatctcaagtatcacacttatagatacgattcatacgtctacacttgatatatattca

SEQ ID NO: 292237 - DNA, 334 bp, Zea mays
gttcaagcccaacccgcggtctcacgtgcaggagtactgtctcgtggtcagctttctttctcacctggccgagagcctgcacaccttcttcttcctcttcgactacttggtcgtgccgtccgactaccgccacatggaagggttcggcgtgaacacgtacacgttcgtgagctctgctgtgaaggctcattacttcaagttccactggaatctctacttctgtattcggttcatcctgactttctatttttcttttcttttttcttattcttttctctcttttttttttctcttttattttttctatttttatttatctttttatttttttttt

SEQ ID NO: 292238 - DNA, 193 bp, Zea mays
gagatctatgctacagacattatgcattgggttctaattgtaatgtgggggcgggcaatatcttctgggctatgcacaagaccgacttcttctcggacaaattcggagttaggtctatcagggacagcgagcatgatatgatgtccgccctgtacctacaagtcagtatcgtgagccatgctctaatctttat

SEQ ID NO: 292239 - DNA, 336 bp, Zea mays
gctgcgccattctcagccgccgccaatcccttcccgtgctccgcaacctctgagttagaagaagagatgtccggcaagggcgatgggccggctatcaggcatcgagctcggcacgacgtactcttgcgtcggcgtgtggcagcaccaccgtttctagatcattgccaactaccagcataaccgaatctcgctttcgtactaccctgagaattactactagcgtgcattcggatattcatgcggaagacctatagatgttacttgaagcctacttcatgcagatgcatggcatttgattcacaattgggtcagtttggctctatatggatgacacat

SEQ ID NO: 292240 - DNA, 384 bp, Zea mays
tcgccagcactgaacacttgattgattcattaggtagctagctagctgaatcacaatgggtcctgccaagttccatgcgtggcagtagccacgacacgactgtgacgactactaacgctggcgctcctgtgtggaacgacaacgaggctctgactgtgggtcctctcggtcccattctgcttgaggactaccaccttatctagtaggttgctctacttttgctttagtctcatttatatctgctttgtttatatttcttttttaattttttattatttatttttttattattttacattgtgtttgttgtttttatttttatattttattttattttaattattattatttttttatattttattattattttttttatttttt

SEQ ID NO: 292241 - DNA, 385 bp, Zea mays
aaagaactatgagcacatacgtttgcatttactgccatatataatgatggcgatggatagggtaaaaatcttccccaggcctttaaattcactgtttcaaacccattttttattcttacaatcgttagatcttttattgacagcacctattctaaagcttcaatacataaccacacagaatctaaccctcacatgaatccacttgatattgatccagaccaacaacggaccactacaagactggaagcagatcaacatccattaacactgaattctgacatatggaatctctataaacaacctattcatatcagaacatattgaagaatatacaattaccttaatcatctactaacatcatcttatgaaactggacaaacaaaat

SEQ ID NO: 292242 - DNA, 220 bp, Zea mays
  unsure (1)..(220): unsure at all n locations
gagatccttgttgatggccctcatgtcattgatcgctgcgcttacgtcacgganagcgtccttgctgcgtgctacaaggcgctcaacgagcaccatgtcctcctggagggtaccctcctgaagcccaacatggtgactccaggctccgactccaataatgttacccctgatgtgattgctgagttacaccttccgtaccctccataggaccgttcatgct

SEQ ID NO: 292243 - DNA, 230 bp, Zea mays
acggctgcctccatccacgcctaaacatacccttttccatctacctctcgctccaatcgatttgatgtaccgcgtcaatatcttcctcagctctttaacttctctgtttcaaacccattatctgttatgacaaatgttcgcaccatcaatgacatcacatatcttgaagcctgcatatataaccatacaaaatctaatctttacatgcatcaagttgattttgaaccttc

SEQ ID NO: 292244 - DNA, 452 bp, Zea mays
tcggcaagcaagcaagcagcgtgtatttacatactaggcagccaggcagccagggcgcccaccttgatggtggcctcgtctgccaccgccgtcgctcctgtccagggtctcaagtccaccttcagccttcccatctcccgccgctccttcagaatcctttgcttcttcttcatctgcatattttatccttttcattcattttttttctttttttctttaatttttatttatttataatttcattttttattatttttttatttttttttatttattttatttattttatttattttatttttgttgtgattttatttatttttttattttattattatattattttattctatttatttattttatttttatattatttatttatattttttattttctattctattttttataattttttttattatcttttttattttatttttttttat

SEQ ID NO: 292245 - DNA, 272 bp, Zea mays
  unsure (1)..(272): unsure at all n locations
acgcggacgcgtgggcgtcgacagcatgttcgttctctccgcgaagctcgccggcttcgcgctncgacctcaacgcaactgggggggggcgctagcacagatgacacgcccaagaggctgacctacgacgagatccagagcaaaacgaacatggaagtgaacgtcacaatcacgtgtaaccagtgcccgaccatatacaactgagtgcactcagtgcctgtcaaggacctcaagtaccatatgaacaacatgcacctgtaccccaactcctt

SEQ ID NO: 292246 - DNA, 351 bp, Zea mays
agtgcacgtacgcacgcactgggacactagcaacccataacagcgccactggccagggcgcgcgtcaagcttgcttagctagccgccatggccttcctctacgtcgtctgcgtgaagcccgtggtcatcaagggtctcgcctgctgctccatcttcggaaggaagctcgacgtcgccaggccgtagggccgcttcatgctcaagccacacacatccgtagtattggacaagtactgcgacaagagcgtctactttgacctcgaccacatcggcaacaccaacggacagtgcgacctctacggctttgacgcgctctagccctacgatccactacagagcaagttcttcgag

SEQ ID NO: 292247 - DNA, 430 bp, Zea mays
gactagttctagatcgcgagcgccgccctttttttttttttttattgccaaggtatgtgctcctatacggtattaaaacctcagcaactcgtccatgatttctgttcatagttggaaggattttctcagtgcaacaaaagcaactaaaaatatcggcgaaacaagaaagatgatgtacgggacgatctgctcgattcccacctccggctcttctaagctcgcgtagtaattcttcttgctgccaaatttggtgaagtacgtctcgtagcctgtgcttttgggcactggaatgctgctcaccttcatgaaatccattgcctgaaagctgaacacgaacatgtttgctttcttgctgatctcactattcgggtggtttttaagtttgctatacatgctcattgcttccttggacctgcaaagtgaatcaaga

SEQ ID NO: 292248 - DNA, 378 bp, Zea mays
tggtccgtggccatggcgtcgtccatgctctccgctaccaccgtgccactccagcaggggggcggcctgtccgagttgtccgggctcaggagctccgcgtcgctgcccatgcgccggaatgccacctccgacgacttcatgtccgccgtctccttcaggacccacgcggtcggcacgagcggcgggccgcggcgggcgccgacggaggcgaagctgaaggtggccatcaatgggttcggccgcatcgggcgcaacttcctgcggtgcttgcacgggcgccgggaccccttggcccttgaagtcattggcattaaccacccccgaagccttaagcaagccgtccaactggttaagttccaattcaagcttggcattttt

SEQ ID NO: 292249 - DNA, 217 bp, Zea mays
acgcaagacctgcccttgaatttacaggataccccttcctcctctccatgggtataacattccgaggtatggtgaacaaaatccatgcataaagacgcactcgaagccaatatccccgcatttattgctacaccattgctcattctatatcctactcactttttacttattatccatgtataaacagcccagtctaaaccattcattacccatccaa

SEQ ID NO: 292250 - DNA, 261 bp, Zea mays
cataatgttcaaggactggtctgggcagagtttaagcagtattgcctctgatatttgtgggtgggttactgtgcttactggtactgatgtactgcattctacaacagaacatgatccaacccttacttcagatttgtatgctcatatgtctccaatatataggcatatgcattgtaacagtttatcagtaggaaggcgtgtacaggatgattcactctctcgcactcctatatatgaggtgctacatgactacttagtgta

SEQ ID NO: 292251 - DNA, 377 bp, Zea mays
aaaagatttatgctggacagaaacagataggcgtattccagcactccagctttttggcaggaggtgcaactatagctgctgggagatttactgcagaaaatggagtgatcaagtccatctgggcatacagcggccactacaaacctagtgcagagaacctcctcaacttcatgaacttccttgaagggaatggagtcgatctcaaagaagtcgaggtacgctcatcgaccagagaagactacaacgaagatccagtgcctaatgactcgcagaagttcgcttcagctaccatggaaccaacaaatcttccacagctggtcccccctctaaacaccacgcaaggcaatgaaagcgacaatgctcctaagatcaagcta

SEQ ID NO: 292252 - DNA, 365 bp, Zea mays
  unsure (1)..(365): unsure at all n locations
caaggagtcatctggctgctgcgccttcatttagctctcaggccgtcgcacgttcagcgtcacctgcacccacgtgaccagtgacacgccacatcagcatcgcgagcgatcgtacatgtctactctcgcacgtcgaccaccacacgacacctgatatacagagctcggacgcatagacatgcatgtcgatctacaggtcacagaaggatgctgctgatatgtataaaccgaacttcaagtacgcatgggtgctatacacgctcaatgctgaactagagagaagtactaccattgatactgctatgaggaagtttgaaaccaccagattctactgcacggacattgatgtcantggacacagtgac

SEQ ID NO: 292253 - DNA, 260 bp, Zea mays
cctgcgcgacggcatcttcgcctcccatccgtttccagcttcccctcccactccggcccgcgcgcaaattgcccctctgcttgtcctactctatacacgctgccgaccacggctgccgccaaccacccgccccacccgtccaccgctgccgagtgctagccatttggagctgccgcgccatggcctccgtggccgccaccaccacgctggcaccggcactcgcgccccggcgccaggcgcggccagggactgggctgctg

SEQ ID NO: 292254 - DNA, 289 bp, Zea mays
  unsure (1)..(289): unsure at all n locations
taccaccntaccactccagcgaggtttcaattcaaagtagttctcctcactcacaatctcctcctcaatacccattcaccttaatgccacctccgacgacttcatatccgccatctccttcattacccactcagtcgtcactaacaacttttcatcacatacaccaactgacgctaagctgaatgtgtccatcaacttattctgccacattcatcacaacttcctactgtacttacactttctcagcaactcctctcccctcaacttcatcgccatcaactacaccttc

SEQ ID NO: 292255 - DNA, 402 bp, Zea mays
agcaaggaagaattaacaataaaaaattgtaacaaaataaaaaatattagaaaagttacggcagggaaagaagaggaagatccgaagatccgcacaaaattagattagatcgtggtttggtgacttgataagaggggtggggtgaagcgtctatgtcctgcgtgttctgcagggtgttcgggaagttcaatgatcagagtcaggcgaccgcgctggcctcgctcgacaagctcaacgagacacttgaaatgttgtaaaagaaggataacttgctagtgaaaaaggccaatcttgatgttgagaaggctaagaattttaccaaagccaagaataaaagagccgcagtacagtgcttgaagaggaaaagactatacgagcaacatattgagcagtttggaaatt

SEQ ID NO: 292256 - DNA, 259 bp, Zea mays
cgccagcttcaccgttgaaatttctttccccaaggtcttaaaatgtgactatgcgatgggtttttaaattgtggtggatgctcagcgcctgcagcaacaactacaaacacaaccagagtctcttccttttgatgaaatcctctattgcaatattgggaatccccaatctcttggtcagcaacctgttacattcttcaaggaagttcttgctctttgtgattatccgtgcctcttggaaaaagaagaaaccaaatcattt

SEQ ID NO: 292257 - DNA, 270 bp, Zea mays
cgtcattatagccgtgtatgatgtaactgaccatgatagctttaacaatgtcaagcactggctgggtgaaattgatagctatgccagtggaaatgtaaacaagctttaggcggagaacaagtgtaacctgactgacaacaggaatcccatcttacgaggcatggcaagaagcctaggagatgacatccgaataccattacttgatactactgccaaggatgctgcacacgcgcaaaaagcatttataaacatcctacggcatataaataa

SEQ ID NO: 292258 - DNA, 253 bp, Zea mays
gatcacaatcttccagcaccgcttgatttgcctcctctctatcttcagctcctgacgttcattctccatggtggccggcccttgaaccattttcaaactttgggccctttttcacacgttggtcttcttcatagacgagacaatatcaccaactccatatttgatcggatcaaacatgatcacacggatgctgtcaacgtatcatctcacatacttcacgtcaagaagcttaaggcgcgattgcctctcgact

SEQ ID NO: 292259 - DNA, 296 bp, Zea mays
tccggaattgaatgttcggctcgagccacgcgtgcgcagaggaaaagggcaaaagccaaaaggcattaccgacgcgacgacaatggcagcctaggtccagagccgcggtcaccctgatgcagccggccaagatcggcggccgggcgccctttgcctcgctgccgtcccgcccgtagtcgcaactcgcctgcagggcgttcggcgtcgacgccggcgccgccaggatcacgtgctccctgcaggacgtcgccagcaggtgcgtcgacgccgcgaagctcgccggcttcgcgctcgcc

SEQ ID NO: 292260 - DNA, 408 bp, Zea mays
  unsure (1)..(408): unsure at all n locations
atgtgatggagaaaaggaagctgcgctcactgagtttcaggctctggactttccctgttcttgtagacggcccctttggagttgtctctgcagttgagttcatcggaattgtcttgtttatagtttttgttgtctactcaatgacctattatgccgtggaagctgtgagccttgtctcgaaatttgacatcccatcaatgactgagagtgaattgatactggatgtcattggcctccgtttaggggcggttgggttgttctgcatgctcttcctcttcctgccagtcgcccgaggctcggttctcttacggcttatcgatattccatttgagcatgctacaagataccacgtctggttggggcatctcacgatggctctctntacattgcatggcttggtctatgtga

SEQ ID NO: 292261 - DNA, 260 bp, Zea mays
ctgacgcgtgggggcttgcggtggatacctatgcacccagagacgaggaagggcgtagcaagcgacggaatgctacggggagttgaaaataagcatatatccggagattcccaaataggtcaaccttttgaactgcctgctgaatccatgaacaggcaagagacaacctgtcgaactgaaacatattagtagccagaggaaaagaaaaggcatatcgagagactgagcgtgatgagaacgagaagaagaaagagatagag

SEQ ID NO: 292262 - DNA, 340 bp, Zea mays
ggcctgcaatcccaccaacatccacggccggccacccttttcctatatgccgtaccgcccgtcatcacaactgtcctgtaaaaagttcggggtggacgcccgcacctccagaatcacgtgctccctacaggacgtcaccatcaggtacatcgacgccactaatctcgccgacttctcgctctctacctattcactcctcgtataggacgcgagcgcatatagcactcccaataggctgacctacgacgagatccacagcaaaacgtacatctacgtgaaaggcacacgcactgtgaaccagttcccgaccatctactgactcctaaaatctttcccgttc

SEQ ID NO: 292263 - DNA, 437 bp, Zea mays
  unsure (1)..(437): unsure at all n locations
tgcaactcgtctcttcccaatcatttttctgtacagcgagtcatcatgcctcactctacatctgagtcgttcaagctgcgtcagcaggaacctctcgcagatcgcgtcccagtcgggtcgcgcaactgtgagagtgcccacctatgaccgttcgtcggtcaaggagggtgttgttcacattggtgtcggtggcttccacagagctcacttggccgtgtacctccacaacctgatggagaagcatggtgtgcgcgacttcgccattgctggtgtcggtcttcagcctttcgacgcttctatgcgcgacatcctgaagaagcaagaccacctctacactgtcattgagcgtggtgccgacggcagctctgccaacgtcaatggtgccatcacctcgttcctctttgcgcccgacaaccgncaggctgtcattgataaga

SEQ ID NO: 292264 - DNA, 379 bp, Zea mays
ttccaccaaggcttccgccaagccttcccttgctttttcttccccttttaacaaattcttcttcggttgggggttccttaaggtttgggggagggccaatggcggcggttgatgtggagtaccgttgcttcgtcggcgggcttgcctgggccaccagcaacgagtcgctggagaatgccttcgcctcctacggcgagatcctcgactccaaggtcatcaccgaccgggagacggggaggtctcgcggcttcggcttcgttaccttctcctccgagaactccatgctcgacgctatcgagaacatgaacggcaaggagctcgaccgcccgtacattacccgtaaccaagcccaatccccttgccgttgccgttgccgccg

SEQ ID NO: 292265 - DNA, 427 bp, Zea mays
ccaggacgtacgtacgtacgtagatcgatccatcgatcgctagctagctgacgaccatggcgtccctcggctgtgccgccagcgtgctgcttgccggcggcggcgccatggcccaggaggtgctgctgggcgcaggcgacggcgggctcgtcttcgagcccagccagttcaccgtcaaggccggcgacaccatcaccttcaagaacaacgccggcttcccgcacaacgtcgtgttcgacgaagacgaggtgccgagcggcgtcgacgcctccaagatctcgcaggaggagtacctcaacgcgccaggcgagacctactccgtcaccctcaccgtgccgggcacctacggcttctactgcgagccgcaccaaggagcaggaatggtcggcaagatcacagtcaactaaagctagctatccattccatg

SEQ ID NO: 292266 - DNA, 314 bp, Zea mays
gcgtgctcgttcgctttccaaagcccgggcacgcacgttggtcgtcgcgagcacgacctcgatcggaggagatggtgacgccggacgggcttgcgcggatcgagacgatcgggaagaagaagcatgacaacggtgtgtggtacgactacagctcggcgccggtgcgcgcgcagatcatcgacgagctgcactcgctgcagcggaagctgtcggcgcccatgacgcccaaacggtcggggcccaccactcccattaagggcggtgcccacttgtccttctccggcgcgatctccgaggaagatcgccacacgcag

SEQ ID NO: 292267 - DNA, 460 bp, Zea mays
ggggcgtccgcacaaacagacaagcatacaacaccgttgccatttagctgttcttgctaggcagttgcgcgctgacagggagccgcagctagctgtctactacggcacaactatctcctgcgcgcgtgctcgatcgatctgaaggccagacctgtgcctgtccaattttgccttgttctacccaccacaccagtagtcgagaaggttccatataagcgcaagcagacagcagcaaaagagctaaggagagtctgagacaaggttcgaacagatggaggatgtggtgaagttcgtctttggagtttccggaaatgtcatcgctctcttcctcttcctttccccagtgcctacgttctggaggatcatcaggaggaagtcgacggaggatttctcgggggtgccgtacagcatgacactcctcaactgcctcttgtcagcttggtacgggctgccgtcgtgt

SEQ ID NO: 292268 - DNA, 442 bp, Zea mays
  unsure (1)..(442): unsure at all n locations
ctcggggtctcccgacgtcgactcgtcctcggtttccctccatgccctcaatggatgctcgggctgtccgctgtccccttcccgcgtcgaaaccctagctcgtcacctcgccgccgtgctgtccgctgtcctagtccgcggctccgcgccccatctctcttgccgtcgcatctgatgttcttctcccgcaacgcattccgcgacctggaccccatcgactcgccggcctccatggcgtcctcgaagaaggttgcgacccgtgacgagtgggagcggaagcttcgcgacgtcaagatacgcaaggaggacatgaaccgcctcgtcatgaacttcctcgtcactgagggcttcgtcgacgccgncgacaagttccgcatcgagtccggcacccagccggagattgacctagcgatcatcgcggatcgaatggagggtaagagag

SEQ ID NO: 292269 - DNA, 400 bp, Zea mays
acgtaactaatttccagccacacaaaatactgattctaaatcctaaatcaggcaacagcacgcctacacagctggtcacacacaccttatatcaagaattcatttccaaagcaataactttgcctggtcaacgcgagattatggatatgatggaagttgcaaatcctgatgcagttcatgctgtccgtaactttattaacaacgaccttgccatgcaacttaaagatgatcttcttgccactgttaaaagcaacacgagttctgaggcttacacatttaaccatcatactatggctcggcgcacattcaaaaatacatgcctctcataccttgcatcattgaatgacccacattctcgttagcttgcactgcatgactacaagtctgccactaacatgac

SEQ ID NO: 292270 - DNA, 346 bp, Zea mays
cagctgaagctaacacagatcttttcgccgtgtaacgccatcatcaacagcaggcatattcggcatgtcacacacacaacacactcacatcttatatcaccaccatggattctctcagcatcgcccctcatcatcatcagcaaccgcactccatgtgcctgccatacccatcgcaagaccacatcacccctatactcaacgtgtcgaatctgctacacacccggagcttccacgtcaccttcgtcaacaccgactacaactcaggcacgcctcgtccggacccgctatactgctgccttggccaacctacctgacttccgcttcgccaccatccccgacgtcctgc

SEQ ID NO: 292271 - DNA, 343 bp, Zea mays
caggacctgtcactccgtctgtccatcgacggtgagaagagctcgctgaacactaaggatgcactgtggttcgacccccaggatcaagtgcagaagatcatgaacaacatcaagcagtcgtcagcgcttcctccgtccatgtcctcagtcgcagccgagggcacaggcagcaccatgaacaaatacccactcctgcgccggcgccggcgcttgttcgtcatagctgtggactgctaccaggacgatggccgtgctagcaagaagatgctgcaggtgatccaagaagttttcagagcagtccgatcggacttccagatgttcaagatctcaggggtcacgctgt

SEQ ID NO: 292272 - DNA, 404 bp, Zea mays
  unsure (1)..(404): unsure at all n locations
ccacgcatccgctatatatanataatctaaatcgataagaactgtcttttctatatactttcccccgtctgtttctaccacaggtcttatgcaatcaatctgatcatatacatatcccttcaacacaacataactcatccaaagtatctcagacgactcaccaaatcacgaaacccaattataaaatgcattcctatatgaacagtgcctaaccgcatagataatctcacattaacccgtcaattttggatccaattcagcatttttcttcccaagtttctgcaagaaattgcaataatatcgattcatacatatgaaaaaattctctatttatacaaacgctttacctacacgataatcatacacgaatactgaaaaatcaaaatgaaataaataaaaaataa

SEQ ID NO: 292273 - DNA, 444 bp, Zea mays
tccggattccggtcgcgccagcgtccgctcctcaagactcgttgcttctcccccagctcggaggagctcctcgcatcggagcagccgccgatcaacctgcgctcgggctcagcgctggaaggtgttggaagagaatagcctgaaggttcacagtaaccttcatctgttggaagatgtatcgggctaagagggctgcattgtcaccgaaggtgaagcgccgcgtcggcaagtacgagctcgggcgcaccattggggaagggacctttgccaaggtccggtttgctaagaacaccgaaaacggggaacctgttgctatcaaaatccttgacaaggagaaggttaagaggcacagattggttgagcagattaagcgtgaaatttgcatcatgaaattagtaaggcaccctattgtagatcgactgtttgaggtgatgggaaagtaaa

SEQ ID NO: 292274 - DNA, 284 bp, Zea mays
cgaccttcaagtctcgctacgtagcagtgcaataaaaaaagcagccgcaatggcgagcagcaccatggccctctcctccacggccttcgccggcaaggccgtgaacgtgccgtcgtcgtccgccttcggcgaggcctgcgtgacgattcgcaagacttcggctaaggccatgccggccgcagcattcttcactatttaccgtgttttccttgtttattgtataagatcggagcttgtcgtcatcgctttcccgaacgcacttgatgctgttactgtctgttatc

SEQ ID NO: 292275 - DNA, 373 bp, Zea mays
cggacgcgtgggcggacgcgtgggcggacgcgtgggcggacgcgtgggcagcgactgagcgagcgagagcagcacacacgcagctagctaggagcagcagcagagcagcggcgatggcggcctccatgatctcctcgtcagctctggcggtggcgcctcagggcctgccgcccctcggccgccgcgcctcctccttcgccgtcgtctgctccaagaagaagatcaagaccgacaagccctacgggattgggggtggcctgaccgtcgacgtcgacaccaacgggagaaagggcaagggcaagggcgtgtaccaagttcgcgacaagtacagcgcgaacgtctaccgatacaggccaatctacaacgaggatga

SEQ ID NO: 292276 - DNA, 428 bp, Zea mays
  unsure (1)..(428): unsure at all n locations
ttgaagcaacccttccgcggcaaccgtccccgcccgcggcggttccagcgcttgctgccccgccgttccttggggaaggtaaccaggaagggccccgtcccgtgcccgctgcaacccgcgctgctggcgcccccgctcgtgcccggcttcctcgggccgncggccgagcccacggttgagccggcatcgactccgacgtccgtgcccgactccggcctgggggtcctcggtctcgaacctgaaaggattgctgaaggttccatcgataacacagtagttgtggcaagtgagcaagattctgacattgtggttggaaaggaacaagctcgagctaaagtaacacaaaacattgtctttgtaactggcgaagcttctccttatgcaaagtctgggggtctaggagaatgttgtggttcattgccatttgc

SEQ ID NO: 292277 - DNA, 400 bp, Zea mays
tcggagcgcacaccacacacaatcagatctcccccaaaaccaacccgtgggaacctccgcttgaagaggcaaaccttggggaaaaccctgacctggcaaggactatcaccctcgaggggggagtcgtctgacaccattgacaacgtttaggccaagatccatgacaaggagggcattcgcccagaccagcagcggctcatctttgctggcaaacagcttgaggacgggcgcacgcttgctgactacaacatccagaatgagagcaccctacaccttgtgctccgtctcaagggaggcatgcagatctttgtgaaaaccctgaccggcaagactatcaccctcgaggtggaatactctgacaccattgacaacgtcaaggccaagatccaggacaaggaag

SEQ ID NO: 292278 - DNA, 238 bp, Zea mays
ctatcaccctccaagttcagtcatctgacaccattgactacgtttatgccaatatccattactaggactgcatccatacagactagtagcagctcatattacctttcaaacagcttaacgacagtctcacgcttgctcactacatcatccacaatcagagcaccctccaccttgtgctccgtctcattttaggcatgcagatctttgtgaaaaccctgacctgctagactatcaccct

SEQ ID NO: 292279 - DNA, 345 bp, Zea mays
ggattcccggtcggcccaagccgtccggcataacccagtttaataacccgatccggtggaaaaggcacctttttttgaacatggcgggggagggagccccggtgctggtgaggcatgctggcggcgtggaggagctgcggcagctcccgccggggttccggttccgccccacggacgaggagctcgtggtgcagtacctccggcgcaaggccttgggcgcgccgctccccgccgccgtcatccccgtcgtccgcgacctctacagcctcgacccctgggacgccgtcgacgtggccggccgccctgatgcgagcagccaaagcgagagatacttcttcgcggtgc

SEQ ID NO: 292280 - DNA, 399 bp, Zea mays
  unsure (1)..(399): unsure at all n locations
gcagctcaggtgcttgtctgaaccctgaaaggggagcaggaaacgtattccagcccggcctgggcgaagaaggccacagaggaaggctctccaccgtgttctccacaaatgcccaccttcaagttaggcctagctttgcggcccctttctgtagcaaacttaaccagctcgcccactcccctctgttcaggacctcgaaggggtcatgttgagatgccctgcgcgaattgaaaagcttcaaaggtaaacccgatgcttggcttacgtgggtgcangcttggtatatcgtaccctgaattgacaganatgcaagccctggccatttttgaagctgctatagcaatgaccaaccagggtgttcaagtgttcccagagataatggctcctcttgttggaaca

SEQ ID NO: 292281 - DNA, 372 bp, Zea mays
ctagcgtccggtaaacgggggcgacgacgcgcgcgaacccggagccgacgctggtgacgaagcgcgccgccgtgagcgcggcgaagctggtgccgagcgacatggcgagcgcgccggccatgaggaaggcgttggcgagcacgagggtgcggcggcggcccaggtggtcggccacccagccggcggcgaggatggacgcgagcatgaacacgttcatggatcccgccagcacctcgacctcgccgtcggtgagccccacgtcctcccgcatgaacagctccgcgccgctcatcagcgtcaggtctgcagggcacgtatatgggtcggtcgtaagcccatgtagcatggtggtgacggaggcgagcgtggcgc

SEQ ID NO: 292282 - DNA, 378 bp, Zea mays
aaactggctgtgtcacgtacttacgagagctatcgatacatttctccgagggtacagctcatgtcaagcgacaagggctacagatgaaaatgcacatgaatcgccatgcaaagcaggactactcagaaacatgctgaatctgtatgaaactgttaaaaaggcccacatggttgttcaagttgaggctgtccggatgcacaacgagcttgcagcgtatgcatttatatcattaatttatctatctcttgtcgatgcaaaatagccagcctgtgcgatttttttctcctattttttaggactgacattgattgttattgtgaaagttaactaatcaaggttacactttctggaaaccaacaacctattagagttgaaatc

SEQ ID NO: 292283 - DNA, 426 bp, Zea mays
agcaacttattgaactagacatttcctcaaataaacttgaaggggaaataccttacgagtttgagtgaatgtcgtcagttgaatgtactccaaatggactccaattttatcacagggaacatttcgcctctacgtagtctaacaagcttgaacatgatcaacctctcacacaatatgttgtcagggatcatccctgcagaactgggtggtatgtcctctcttacccagctggatctatcttataatgatctacaaggcaaaattccaatggatggagtatttagaaatgcttcagctatctcacttgttggcaactcgagactctgtggtggtctgtcagatttgcacatgcccccctgccctgttgccttaaaggaaaaggcagcacaatactacatcattagagtgttgatcccaatatttggc

SEQ ID NO: 292284 - DNA, 301 bp, Zea mays
aacttcccttcatactctccatcttcccctccccagctctaatcaagcctacgacagaatcaacatgggtgtcattgagaagctcagccgcaaggccggtgtcatcgtcggtgacgatgtcctccgcctcttcgagtacgctcaggagaagcagttcgccattcccgccattaacgtcacctcttcctccaccgtcgtggctgccctcgaggccgctcgcgaccaaaagtcccccattgccctccaggtctcccagggtggtgccgctttcttcgccggtaaaggtgtcagcaacgatggc

SEQ ID NO: 292285 - DNA, 323 bp, Zea mays
tcccttacctaatttaatttcatcctcctttaaatacatatctctaatcttcccatactttcctatattactcaactattttcccattttcctaattcctattttatttcaactatattactatcatatacattatctaaatctatccactttaaataaaatataaaaaatctaatcacaaaaaaaaacaaatactcaataataaaacaacatattctctttcataattcttaaataaaactctttcttttattattactcctcattatcatgtatatattaatcatcctattttaatatatattaatcattctattttaatt

SEQ ID NO: 292286 - DNA, 416 bp, Zea mays
gcggctcgcaagtggcctgcgttcctcttccacgctccgcccacccgtcccggggcgggccgcaacccgatccctccccgcgcccaacgatgccggccggccagccgcacgcgcacgaagccgctgccgccgcctgcgtcggcagcggcgcgaaccactccaaccaccgagtgccggcgcactcgccaccgccgctccccgcggaggtggtgccggcgtacccgcccccggagtcggaggacgacgagacctgggtgtggacgcagatcaaggcggaggcccgccgcgacgcggacgcggagccggcgctcgccttcttcctctacgccaccgtgttgtcccacccgtccctgccccgctccctctccttccacctcgccaacaagctctgctcctccacgctcctctccacgctc

SEQ ID NO: 292287 - DNA, 253 bp, Zea mays
cggacgcgtgggttgcattgcattctcaggagtgggtactccatctcaaggagggggtccatggcgtcgctgatggcgcccatggcgggcgccttcttcctgctgatgaactcgagcgacttcttcctgtacctgagcacggccgtgatcggcacgtgcacgggcgccatcgcgtcagtggccgtgtcggcgacgagcgagctgttcggggccgagaacttcggcgtgaaccacaacgtggtggtgagcaaca

SEQ ID NO: 292288 - DNA, 435 bp, Zea mays
  unsure (1)..(435): unsure at all n locations
agccttccggccaggccaggaattaaggctttgcaggcccaaaaagcggtgggaaaagcagcgaccatggcctaggcgggtttgagatccgagggaacagatggattactagggagtgacagctaggagcaatctgtggagatactatgtaaatgtcacaggagttggcctgtggtgatgtgcgataaccgggccagtgggttctgagcgtaagacgaggtctctagcaatgatatgttgtagcgtgactaaatcgagatgagcaatcaggttgttgtctgttgattctttcggctgaccatttcggctgctgaggccttgatcctgtatttgagatgtcaggcctacttagagcaaatgctggaaggaagcaatgtgcctgttctgaggtcccttcagcatcacttgtaattngtaaagtactcaagtacagac

SEQ ID NO: 292289 - DNA, 411 bp, Zea mays
gctcttccagcacattataggttccacctagttgtggatcaacgaagctctgtgctagagccatcaactcaattgtatactgaactatgtcacgaggcagggatcctttggcatcgagccagctaatcggtgatgcgttggatcctttcatagaggcagctacgatgaggaccaattatagtgacaaggagatcacaaatggcactgtactactagcatctgatgtgctcaatgcaccacatgtagagatagaacgccacgtgcaagcaaatctatacacactggttatggtggatcctgactcaccaagtgcacgcttaccagagtacagggaacatctgcatagttgagctgatagcatctgatatacaagccaattttgagttgaatattacctaaactctggatagc

SEQ ID NO: 292290 - DNA, 440 bp, Zea mays
agccttcggtcaaattcctttcgggccttttctttttggccccttttcttccaaaactgcgattggggcaggaacccttgaccacaatcgcaaccgcaggcacttccttttccggaagctcaagttagaaaaaccaccagtgctgatcgatggcggccaaggctctcctttccggccggcagctgctgggccgccccgtgcagtcggccgtctctaggtcgtcggcgaggaaggcgcccttcgtcgtcagggccagctccagccctccagccaagcaaggtgcctacaggcagctgtggttcgcgtccaagcagtccctctcctacctcgatggcacgctgcccggcgactatggcttcgacccgctgggcctctcggacccggagggcaccgtgggcttcatcgagcccaatggctggcctatggcgaggtgatcaacg

SEQ ID NO: 292291 - DNA, 422 bp, Zea mays
cttcgcggacatgagctgggacgagttccgtgcgacccggctcggcgcagcccagaactgctccgtcacgcggaccggcaaccaccggatgcgcgccgccgtcgttgcgctgccggagacgaaagactggagggaggatgggattgtgagcccagtgaaaaaccagggccactgtggatcatgctggaccttcagatatgcctcacaaacaaagaggcaaaagggtaaacctgcaggagagctttcatggaatgttgaggtgcagaaacttactccctccggtttcctattagttgtcgttttggataagcactactggtgcacttgaggctgcatatacccatgcaactggcaagcccatctctctctctgagcaacagcttgttgactgtggttatgcattcaacaatttcggatgcaac

SEQ ID NO: 292292 - DNA, 413 bp, Zea mays
  unsure (1)..(413): unsure at all n locations
agccttccgatctcctcaacggcgatggccggtacccccatcaaggtgggctccttcggcaaggggggcgtgaccatgcgcaagaccgtgggcaagcccaaggtggcggcgtacgtcagcccctgatacggtcactaccgaatcaggttcctataaaacgttctcggcgagcccccgagctacctcaccggcgagttccccggcgactacggctgggacaccgncgggctgtccgccgaccccgagaccttcgccaagaaccgcgagctggaggtgatccactcccgctgggccatgctcggcgcgctcggctgcgtcttccccgagctgctctcccgcaacggcgtcaagttcggcgaagccgtctggttcaaggccggctcccagatcttcagcgaaggcgggctggacta

SEQ ID NO: 292293 - DNA, 310 bp, Zea mays
caacctcgtcttaccatgacactgatcccgtacaacacttcccttaccaacctcaatttcatcgcattacatccgactcttaccacgaagcctaccatcaacatatactatcacaccaaccccatctactccattatccttctcaacttgaaaatgacactgccaccgacgaaccccaattactactaccatcactggatcaaggacattcactaaatcactatcatcaatgaccagcaaggtcacccagcgttctcactgatgaacaagacaaccatcaatgccatcaatcactcgctactgcaattcc

SEQ ID NO: 292294 - DNA, 426 bp, Zea mays
gcaatgtgtaaaatgtactctgttacccccaactgtattggttgtccaatttgtcaggatccagaattggatagaggacttgttatggaaacaacttgatctcgactaccctggcatgcctgaagcaatggttcaccgagggttttattctgcatatcacatcacgacactacgtgatggagtagtcagtggtattcagagaactaggaaagcttactgagacattccaatcatgatcacgggtcattcaatgggtggagctatggcttcattctgtgcgctcgatcttgttgttaactacggactggatggcgtaaacctgatgacgtttgggcagcctcgtattggcaatgctgcatttgcttcttatttcaagacatacttgcctcaagcgatccgagttactcatgcccactatatcgtgcc

SEQ ID NO: 292295 - DNA, 422 bp, Zea mays
gtggcctattcttccccctccggttcgggttcgggttcgagaggttctccggggttcggtttcgtggatgaggggagggagatggcggcgtcggatgctgagtacacgatgctttgtcggcggactaaactgggccacggactaccacttcttacactacgccttgatcacctacgtgcaggtactcgagtacaagatcatactgaatcgggagacgcataggttcacgagcttgtgctgtcgtaacttctacacagatgaggcaatgcggaacgccatctagggcatgaactgctaggagctggactgccgcaacattaccgtctacgaggccacatccctgtgcagacgtggatgcgcaagcagcagcagatacggtggtggccgtggacgctgcagctacagctgtggctggcgccgtg

SEQ ID NO: 292296 - DNA, 442 bp, Zea mays
  unsure (1)..(442): unsure at all n locations
cgggagggggcctgctggtaccctggaccgaaccatggcgaccccaagatcaatcccagggacgtgaagggtgncaacatcctgctagacgactgctgcgaggccattgtcggtgacttcgggctcgctaaactcctcgaccatcgggactcccatgtcaccactgcggtgcggggcactgtcggccacatcgcgcccgagtacctctccactggccagtcgtcggagaagaccgacgtcttcgggttcggcatcctgctgctggagctcgtcaccggtcagacggcgctggagtttgggaagacggcaaaccagaaaggagccatgctggactgggtgaagaagacgcaccaggagaagaagctggacgtgctggtggaccaggggctgaggggcggctacgacaagatggagctagaggagatggtgcgagtagcgctgc

SEQ ID NO: 292297 - DNA, 320 bp, Zea mays
aacaagagtactcacactagttggatgtatatggccccaaaggacgatcatgatggggatcttcacaaggaggaggaggtggtccaaggagatgtgcgagtcgtcgtccatcaggagacgtctgccgactaggaggccgagtcggcactggtgcgcaagatctccggcctggccgcctacatcgacatgctaccgtcattgagcccgtctacggaggttaactcgctcttcacctacctcttcacgggctgcataccgtgcagtaccgtggacgtatagcgtctgggcccggagctgcagcacatgcgcgcgggcctcat

SEQ ID NO: 292298 - DNA, 111 bp, Zea mays
gactaggttcaatgatgaatcgatcgaattcgcttgggttagctttattattgttgcggctattattaattcgactcgctatagtgtgtaaaaaatgatacagaaccaact

SEQ ID NO: 292299 - DNA, 374 bp, Zea mays
agaccaacgggcaacatagaaagtggtatccattatcaacaatagagcaacaatggggaccgggatattttccctccttatgctccttgctctttctacatgtgttgctaacgcgacaattttccctcaatgctcacaagctcctatagcttcccttcttcccccataccttccatcaattatagcttcaatatgtgaaaacccagctcttcaaccatataggcttcaacaagcaatcgcagcaagcaacatacctttatcgcccttgttgtttcaacaatcgccagtcctaactttggtgcagtcattggtacaaccatcagggcacaacagctgcagcaactcgtgctacctctgatcaaccaagtagctct

SEQ ID NO: 292300 - DNA, 366 bp, Zea mays
ggggatcggaagcactaggctgtgacctctaacttcagcctcaatattgcgcctcctggatctggttgctctttttacacgcgctgctacggcctaccaattttgtccacaagtgctgcacacagctcctactcctctctttcttgacgccgtaccttttaccacctgtcagctcagtatgcgaaaacccactctttcaaccctatatgctccaacacggaatcctacttggcatcctagctttatcacccttgggtcttgaacattcattatccctacaacagccattaccttagacgcatttattggcgcagaacataagggctcaacagctgccacaactcgtgctagcacaccttgctgcct

SEQ ID NO: 292301 - DNA, 158 bp, Zea mays
cgtccggcaaaggattcagcacgccgcccgttgggaagggagcttcgaggccggccggtttggggggtccgcccggccggcttaaccggttgccccggcccttggggccccaaacccctaaccttggtcggggccggccggtagccaaagcccccggt

SEQ ID NO: 292302 - DNA, 328 bp, Zea mays
aacaatagagcaacaatggggaccaggatatttgccatcgttatgggccttgccacttgcacatgcgtcgctaacgcgacaatgttcccacactgctcacagactgctatagcgtctccttctttgcacataccatccatcaattatagctacacaatgagaaaacccagatcttcaaccatataggctacaacaagcaatcgcagcaagcaacatacctgtatcgcccttgtagtatcaacaatcacacaccatatctactgggcacgcattggtacaaaccatcacggcacaacagctcgcacaactcatgctacctgcgatcaac

SEQ ID NO: 292303 - DNA, 170 bp, Zea mays
gaggcataggaagttcactgaaactgtttaactttagattggtctgaacaactatgggccacagaatgtcatgcgtccttatgcttcttgctatttgtacatatattgctaacgcaacaataatgcctgcatgctcacaagctcctatcacttccattattcccccatac

SEQ ID NO: 292304 - DNA, 416 bp, Zea mays
catacaatcaccttactggaacaataccatcctggattaacaggctggaactcctctgctttctggacatatcaagcaacaggcttacaggggatatcccacctgaattgatggagatgccaatgctacaatctgagaagaattctgccaagttggacccgaagttccttgagttacctgtattttggacacaatcacgtcaataccgtttgctcaatgctttccccaatgtattgaatctatgcaacaacagcttgacaggcataattccccaagggattggtcagttgaaagtgctcaatgtcctcaactttagcaccaacagcttatctggagaaataccacaacaaatttgcaaccttacaaacctgcaaactctagacgtatcaaataaccagctcacaggtgaactccca

SEQ ID NO: 292305 - DNA, 330 bp, Zea mays
gcgcctgttcagacacaggtggcgacggttgttgcgagaatgaagacgaagtagggaagaggatgcacctacatgcctgcgacaacaatggctgcaacagattgtgccagctctgactcatctagctatggcataccctgcttgctactttcaacagctgcttgcatttaaccaactgactgggtcgcactgtgatgggtgcctgcaactgtgacttccgagacttattacactagctgtgcctaacccatgggacactgaatttctacagcagcaacatattgctaccatacagacagttctctttgatgaaccctggcttgccgtggc

SEQ ID NO: 292306 - DNA, 432 bp, Zea mays
gcatctcggcatgtggaagctgtgaagaggagaagacgcggggaggagatgctgcaagagaagccgaaccgaacgaaaggaaggagagagagagagagagagagaaaaaaaaaggacggctccgcccaagggtcggaagggagggagttgccgcgccgcggccggttcgatcctttgcgcgagatcgagcttctccggttggtgttggggctggcgacatctgggatccgtcgtctctcctcgtgttcttgagcagttttccacttgcctggcaaaagaacatttgacttggaagagcaaacactggaagctttgtggtttgtcctaagtgatcctatcaagttctcataggctgcatactggtacagcattttctcctgtgttttgggccacagaagaggggggagccaaggatttttctatctcgtaagc

SEQ ID NO: 292307 - DNA, 408 bp, Zea mays
gtacgtgcgtgactacagttgcatgctatggccatggccacgacttcgccggcaactgggcagccatcatcatacaagcacacgagccgcggcgcggcgcggtgctgccctcctcctctgctgtcctggaagacacgaagctttgggcagcaggtgacgacaagggccacggcggcgagctcccgtgggcagcccgccggcgtggcactggcagggggagaagagggcgacagtatcaggcggctgcagaacgggtcggacgtgcggggcgtcgcgctggagggcgagaaaggccgggccgtggacctcacgccgctggcggtcgaggccatcgccgagagcttcggggagtggctgcgagaggaggagctccggctccggggccaggagcccgagcagctgcgtgtg

SEQ ID NO: 292308 - DNA, 396 bp, Zea mays
caacgaggtgcccaagaccgcggagaacttccgcgcgctgtgcactggcgagaagggcgggggcaagtccggggagccgctccactacaagggctgcaccttccaccgcgtcatccccgagttcatgtgccagggcggcgacttcacccgcggcaacggcaccggcggcgagtccatctaccgcgagaagttccccgacgagaagttcgtgcccaagcaacaacggcccccgtgtgctctccatggccaacgccgggccaaacaccaacggctcccagtccttcatctgcaaccgtcgcaaccccttgcttcgacggcaagcacgtcgtcttcggccaggtcgtcgagggcatggacgtcgtcaaggccatcgagaaggtgggcacccgcaacggc

SEQ ID NO: 292309 - DNA, 437 bp, Zea mays
gggagaaggatcctactccaatacttgacacaattgatgcggccattcatttgaaaaagctatctagtaaggagctcaagcagttagccgatgaagttcgttcagaaatagctttcataatgtccagaaaatgccaaccgtgtggtgctgatcgctcagttgtggagctgacaattgctatacattatgtgttcaatgccccaatggataagatactatgggatgctggtcaacatgcatatgcgcacaagattctcacaggaaggcgctctctcttccatactattacacagaaaaatggcctttctgggttcacgtcgcgttttgagagcgagtatgatccctttggtgctggacatggatgcaatagtctatccgctggccttgggatggcggttgcaagggatataaatgggagaaaaaatcgaatagtgaca

SEQ ID NO: 292310 - DNA, 340 bp, Zea mays
cgtctgtgttcttgttcgtacgcgtacttagcccctatcctaattgtcctcctttcagtcctttccgatccctcactcgccttccctcgcttcaagatgcatatctttgtgaagaccctcaccggcaagactatcaccctcgaggtggagtcttctgacaccattgacaatgtcaaggctaagatccaggacaaggagggcatccttcctgaccagcatcgccttatcttctccttctagcatcttgaggacagtcgtacacttgctttactactacatcctgatcgattcatcccttcattttttgcttttccttatagtttgcattcatatctttttt

SEQ ID NO: 292311 - DNA, 433 bp, Zea mays
gaagacactattctgtcactcagatgctacctattcaggttacacgtgctacactgggattttttattttgtgccgcctgatatcgatacggttgggtaccgggtatttctgggccacaaacagtacttcgtctcttcggatgtcggtgccggtaaaatgcaatggtattctttttacaaggaagaggctggtggcactgaccttgagaacggcttatagaaaatgtttgcttgagttatttgatgggtggtgtgttaatttcattttatttttttatgtcatcttatttttttcttttttttttttttattttttttctttttttcttttattaatttatttttttttatgtttttttttttatttcttttatttatcttttttttttatttattattattttttatttgtaatatatttttttattactat

SEQ ID NO: 292312 - DNA, 423 bp, Zea mays
cgagcgagcttgaccgcggggtgaacgtttaccagcacagcaagataaccaaggaccaggtcgagaatagggtttatgtcatgaccgtccagcaggcctttgacgacgcctttctcgatgcgaaggatcacaggtgatcggcgcgaggcttcggacctgccgattttgacgtttttattgcggcggagcgatgacactggcatctatagcggcgcgtcgtttggatgctgacgatctgcgatgtgtcaaaagcgcaccggctgtgctcttctgtgctgcctacaaggcaatgcttatgccgtccctgctaccaaaaagtacacatgtgtaacaagcttgctagtcggcatgtgagagttgtacttgcagaccctaatatacttgttctttttgatatatgtgataattcacccgttttttttt

SEQ ID NO: 292313 - DNA, 429 bp, Zea mays
gtgtcacctctttttcagctgttgtttttggaaaattgaatatccgtgccgataaagggcttggcctggcaaaattcttccttggtattgggctcccaggtagcgcaaaggattgctttaatcagattgagtctttgtcattcttggagaacaatagggtcttcgttccgttgatactatcactttcttccaaagtattttcattgacttctaaagatcagctcaaggtttaagttacttcagtttttggatcttcttttcttttacttatatttattttttttcattttttggtatctttctttatattcttttatttatatttttctttatatttttttttattttttattacttttattttttacttttttttttttcttattttttatttttttttttttttttattttttttatttttttttat

SEQ ID NO: 292314 - DNA, 419 bp, Zea mays
agatgctgttaacattcatgttgattttttgaaggagtacaagcaggattttgaactggatctttacccagatagcgcgactacttttcctgcaacccttgctgaacttacggagagattgaaacactggaagaacattcttcagagtaatgtataggatcgtttcccagcaatatttatactgtttgatgattgtttatctctttttgacttataatttttcttattttttattatttatttattttttaatatttaattttttttttttattatttttttttattttttatttttatttttatttatttttatttatttttttatttttttatttattatttttttttttttttttttttattttatttttttttttttttttattatattttatcattttttttttatatattatt

SEQ ID NO: 292315 - DNA, 447 bp, Zea mays
ctctggagtttatgaatgagcaaaaccgtggtgccacgtgctacaaaaccaaagatacaagaggcagagaactcgtgagatgagaaaagcgagaaaactgttcttctaattgatagtgaactgtacaatcgctctgattttatcactgagtacaaggatgccaaattctttgtaataaagtcctacaccgaggaccatgtacataggagcattaagtataatgtttgggctagcacagccagcggaaacaggaagctggattctgcttaccgtgcggccagagagaaagaagagcattgccctattttcttgtttttttcggttaatgtaagtggccaattttgttgcttttttttatatttattgtttttgtttatttttttttgatttttttatatttttgttatttatgttttttttgtttttttatttctttttttttatttt

SEQ ID NO: 292316 - DNA, 192 bp, Zea mays
  unsure (1)..(192): unsure at all n locations
ggaggctattcagttgttttggctggttttggagccggtgagaggggcacactacgggggtattcggacgatatatgggcntctgatgttgagtaccgctgcttcatcggcggcctcacctgggccacggacgaccactccctccacaacgccttcagcacctactgcgaggtcctcgagtccaagatcatc

SEQ ID NO: 292317 - DNA, 423 bp, Zea mays
ctctcctcctccagagctcgtcgccactttccaccgccaccctcggtcacgccgtccgtggaggttaggtcagcatggtgagggtcagtgtgctcaacgatgcgctcaagtccatgtacaacgctgagaagattggcaagaggcaggtcatgatcaggccgtcatccaaggtcatcatcaagttcctgacggtcatgcatcgccatggctacattggagagttcgagtacttttatttccatcgtttcttcaatattgttgttttactcatttttatgttgtatattttcttttgttttaagttctatctttttttattttttttattattttatatatttttttttgtctttatcttttttctttttcttttattttttatttcttttttttttttttttattttttttttttttttttttt

SEQ ID NO: 292318 - DNA, 407 bp, Zea mays
cacctctcttcatctccctgtgccttcgcctacttcttgatccagccaatgcagggatcttcatgtcatagggggatgaacaccacttctaatcgaaggccgactccggagcgtccaagacctacccacatcatgctgccaccgctcgtaagaacggtttcatcgccatcaataaccgaccctgcatggttgtgaaggtttctacctcaaagactgctaatcatgctcataccaaatgccactttgtggccatatacatatccatcggtaataatcttgaagataatgattctttatcacacatctgtgatattccgcatgtgaacctttctgcataccatcttattgatatatcttaagattgatttatgagccttcttacttcaaatggcaacactaatgatgat

SEQ ID NO: 292319 - DNA, 319 bp, Zea mays
cgctagcgaggaggtctgcagatctttgtgatgaccctgactggcaggaccataacccgcgaggttcagagctgctacaccatcgacaacgtgaatgcgagcacgcacgacatagagggcatccccgcagaccagcagcatatgatcttcgctgtcaagcagatggaggatgaccggaccctagcagtctacaacatccagaaagagagcactctccacctggtgctccgactgcgatgagcccattaagccatgagtcatttaatctgctgctgtacctgagtatatgcgtcgtctggtgccctctggtgtacctcta

SEQ ID NO: 292320 - DNA, 295 bp, Zea mays
ggtccggctctgaaaaaaactcttgaaaacaattacttcatcatctttcgtcgttggggtggtggtggcggctacggcggcggcggcggcggctggagggactgatgtgtggccccatcctggcttctgccgagttatcttatctatctatagtatcgtgttaccgttcgcttctgtcaccgtgttagtgtccgttctacctttggattaggtgttggtaccccttttgttcgctttgggtgctcccgctatgaaacgagacgagagaagaatgagcaaggtttttgttcgcatc

SEQ ID NO: 292321 - DNA, 324 bp, Zea mays
ggcaccaacccagctcggcgccatcgtcgacccttaccccgtttgcctgagagcgatggtgacggagctgaccgcggcgcaactgctcgcgtacaagggcaccgacccgtacaagcccatctacatcttcttatggagcaaggtctacgacgtgacctgcggccgtggcttctacggccccggcggcgcctacgccgtcttctcgtgccgcgaggccagccgtgcactaagcaagatgatcaaggacgaggtcgacgtgtcctgtgatatgtccgagctcacacaacaggagctggtcgttctcgtcgactgggagaccaagtt

SEQ ID NO: 292322 - DNA, 423 bp, Zea mays
cctgaactgatccttgggttcaacgctttattgcctaagggctatgcgatcaggctgggagaagagaataaacgtggcgattttgcgcaagctatcaatttcctgaacatgatatccaatcggcttcagcatgatgaacaagttcacaaggcattcttggacattctgaacatgtaccgcacggataataagtgtatccaagacgtttaccatgacgatgctatgctgttcaaagaccataaagatctgcttgaacagttccagcacttactgcctgatactccagtgggtccacaagcagttgtctcaatgggtggtttggttcaacaggaggacacgagcgttatagagcctcctgcagctaagctccttcacagtgataacaaggacatagtttacctgtcacatgctgaccgcgatttt

SEQ ID NO: 292323 - DNA, 409 bp, Zea mays
cgggtcaccacggtgggagtgtgagtggaggtgggtgctgcgtggaaaggcacatcgagcccggagagttgacagcgcgggcacaggcatgagagccggatcgattgcgggagagcagcagggaagacatgaagtactgccttcttagttacttgcagcttatctggcacccgctgcacatagctttgtacagctccttgtagaagcagtctgggtcttgctttggaggtgaccgtgcgctggtcctttgctccaagaattcctttagtctgtagattgtttatcttcttaagctgattgggaatctaaccagtgaaatcgttgttcgcaacattcctagaggcaagcaggttatgagctatggtactggacatgcaaatgaagcaccaaaaatacccatcatcatctc

SEQ ID NO: 292324 - DNA, 398 bp, Zea mays
gtcaaagatataatttcagatctaaaagatggccaggcttccttagtttgtgatggtgtggggtttcatgtaagatgtgcatgtcatatactaaatttagttgctagagatgggctggctgtaattttctaaacaattgacacgatcaaagttctcgtactagctgagaatgtatcaccattgcagtggaaggaacttatgaagggtgctaacgagtcagaactagatacatggaggggcatctcactagatggttaccctgatggagttcaactgatttaatgctggacgatgccttgtactacaaggatgcttttgcagagcttaagtattcacatcgtgatatgtatgtcgaaactgatcgatcttcagattagtgggacatggcacttgaaatc

SEQ ID NO: 292325 - DNA, 386 bp, Zea mays
cacgcgtccgaagtaatcgtcacagtggtagatttgcgctgttacacatcactgcactgcacaggcgcagatccacatgggctccatcgttgccgacgccgatcgccggccacacgccgtgtgcgtgccgttcccagcgcagggccacgtgacgccgatgctgaagctagccaaggttctccacagccgaggcttccacatcaccttcgtcaactcggagttcaaccaccgccgcttgctccgctcccgcggcgccagcgcgcttgacggcctcccggacttacgcttcgtcgccatcccggagggtctgcccccgtgcgacgccgacgccacccaggacgtgccgtcgctctgccgcgccaccatggagaactgcctcccgcatt

SEQ ID NO: 292326 - DNA, 412 bp, Zea mays
ggcacggcacggacggcacgaccgagctccagtctgcccccgcccccatccgcacgtccgccttgatccggcaaatggcgtcgccggcgcggcggctcctgcagaccaactccgtgcagtacccgacgctccccgcggccgacccgccgagcccgctggccgtcgactccgacgtggtggtcatcctcgccgcgctcctatgcgcgctcatctgcgtcgtggggctggcctccgtggcccggtgcgcgcgctcccgcgccgcgcccgccgtcgccaggagggggctcaggaagaaggcgctcagggcgctgccgagcctcgcgtacgaggacgccgtggcggcccgggccgcggacggggcggcggaggtcctggcggagtgcgccatctgcctctcggagttcgcgccacg

SEQ ID NO: 292327 - DNA, 440 bp, Zea mays
gcttcagcatcctatggtgaacttgcagctgcagggatggaaagagcttcacatacaacagtagtatcaacattgctatagcagtggccatagatggtgggttgattacatcggttcttcactggtgggctaggggttatctagagatgacaaggccctcaagttggctttccagcactggatcgaagcgatgagtacaaacgggcagtggggattgactccaactgacaaagttaaaagcaaagatgaagcttcaccttaaagagacaggtgacgactctttcagttcatggaatcagcatggcacaaagaagttttcggcctgtcattgtcaatatcattttgagacccagcttcttcagatgctatcaatgagctaagatcagcaactgcacatgccttaccctcagcaactccaggagataccgcactctcttctg

SEQ ID NO: 292328 - DNA, 357 bp, Zea mays
taatgttatacgttacttttctactcacgctctgaactttgcatttaagggctagttcaatacgttcttcagctccaagaaggacttggatggctatagcaagcggtctgctggcaacctggcctatggtcggagctgctcggtgctctctctctgcttgttgcatactccctggactacccaagagcacagttggctaatgacgcaaaggctgctcatggatgaacgtgaaaggcaagccaatggacttgtcgatgtctaccgcacgacactcaagtctgatagtcttgctgggctctaccacggatttaacatcttctgcgttggcatcattggctatcgtggtctgtactttgg

SEQ ID NO: 292329 - DNA, 206 bp, Zea mays
ccatactatagattgcttaattcgctggttactatacatgcctgggcgcttagtttacatcgaccgcttacagcagccagccatatacattgattgatgagcacacatcgatcatgaacatactccggctgctgcaactactacacgcctacgatctataacaagctaagtacataaaagaccactctgaccactccacgtacaga

SEQ ID NO: 292330 - DNA, 348 bp, Zea mays
acgacagcattcatatcccgggagctctctctttctcgcacctaactctgccttcaagggcgaccctacctcaccagctgcataaccgaaggccagataccgctctcgccagccacctgctggcaaagtcgcctacataaaccactaatcgaccacttctctgaccaaaccacacaccctggaatacccaatagcatgcaagcttcattacgccaaggctgaacactactacgtgaaaggcacctgaatgggcttgcctatgtctaccgcaagacactcaaagctcaccgtatctgcgggctttaccgtcgatttaacatctgctgtgttcgaatcattggttatcgc

SEQ ID NO: 292331 - DNA, 343 bp, Zea mays
tgatatcttttaatcacttgttgtacagtaccaagaaaattgattcgggggggcaattctatgacaagcttcttgtcaatcaacagaatgagaactacctgatattcgatgatcgatcacataatctaaaagacaactgtgtctacaatactatgaccccttctggacgaatctaacaggatgagatcaacctattgacagcattcacaatcattaccaagtctgcatggatcttcaccagtaagcttgtgacttcatttgaagaccattcgctctggcataattattgctgcaccaccgatagttacatcatgagcgatcagtatctcagtatctagtactg

SEQ ID NO: 292332 - DNA, 365 bp, Zea mays
caacgactcccggctccactgtcgctctcgctcccttccctcccacgcaatggtggcgcgatcgcctccgcctcgcgctgctgctctacgcgtgcctctgctccgcgtgggcgcgcccacgcctagagccgaccatccgcctgccgtccgagcgcgcggcggccgacgaaacggacgacgactccgtcgggacccggtgggccgtgctcatcgacagctccaacggctactacaactaccgacaccaggcagacatgtgacatgcatacaagaccatgaataacggcggacgtaaggactagatcacagaatggaactattacaactacatgcctaccaagagggacaaatgctaggtggaaacc

SEQ ID NO: 292333 - DNA, 419 bp, Zea mays
ccgaatattgtcaagttcattggtgcgtgcaggaagccattggtttggtgtattgtgacggagtatgcgaagggtggatctctcaagaatttcttgagcaagaggcagaacaggtctgtcccgctgaagttggcagtcaagcaggcattggatgttgcacgtggcatggcctatgtccatggccttgggttcattcatagagatcttaagtcggacaacctcctgatttctggtgataagtccattaagattgctgactttggagtggctaggattgaagtcaagactgaggggatgacacctgaaactggaacataccgctggatggctccttgagaagtggcagttaagaagaggtggagcaatatgggacgaaggaagctttggtctcatttggttccatgaactagacccaacaa

SEQ ID NO: 292334 - DNA, 239 bp, Zea mays
ggccagctctggtatcagggaaatctttttcttgcccttcaaccctgctgatacgaggactgctttgacgtacattgataccgatggcaactggcactgcttcagcaagggctctcctgaacagatctttgacctgtgccactgcaaggatgatctgaggcccatggtgcactctaccatgcgctagtataccaagcctggtagtccttcgcttactgctgccagaccggaattaccta

SEQ ID NO: 292335 - DNA, 349 bp, Zea mays
gcggcggaaaatgtagttttgagcttttagtttccactcatagcgtatcttaactgggcaaggttatataaaccactgcctaggcaccaagctggactatagtacagtgaggcagatgcccattcactatgggtcgtaccgtctgaactatttcacagtctcttcacctatcacaacacaagtcacacatgctagtagaacttgctactcattgaagattgacaagaatgacgcgtgttccatcacatactttggtgacggtggtacaagttgatgtagacttccatgcatcgctcaacttctcgactgttattgatgcaccggtgatcttcttctgcctgaacaatgg

SEQ ID NO: 292336 - DNA, 398 bp, Zea mays
cggggcaacactttcacgctctatcgcttagctctagcaacggctgcctccaccatggggatctcatgcactgcatatcggcggtaccgaccatcaaggtgggctccttcagtgagggccgtatcaccatgcgcaagaccgtgggcaagcccaaggtggcggcgtgcggcagtccctgttacagtcccgaccgcgtgaagtacctcgaaccattgtgcggcgagcccccgagctacctaaccagcgagttccccggcgactacagatgggacacctccggactgtcctcctaccccgagaccttagccaagaaccgcgagctggaagtgacccactgccgctgagccattctccgggcgctcagctgattcttcccctagctgatctcacgcaactgt

SEQ ID NO: 292337 - DNA, 382 bp, Zea mays
tcgcgcactcgtgctacgtgcttatgtctatctacaccgccgtcaccgttaagcgcggtgcgataacatggcgtccgtgaccgtccgcgctgcttgcgcgggcctgcacccgtcggcgtgtatgaagtggtcctcgccatctgcggcggccttcacttgtccactctagccgcctcggtcgcactgctaccgcgttggcgacgaggcgcatcctaacacgctaggcacaaggcgagtggctgacgggccttccatcagccgcctacctcagactgcagactgccgagagacaatggcttagacccgttgtgcctggcggaggacccgtagaacctgacgtggtacgtgcatgcggagctggtgaacggtcggtcggcgatgc

SEQ ID NO: 292338 - DNA, 357 bp, Zea mays
tcacgcgttcgcccgacccgatccgcttgccaacgacttccggctccactgtcgctcgcgctcccttcaatcccacgcacgacaatggtggccgatcgcctccgcctcgcgctgatgctcttcgcgtgcctctgctccacgtgggcagcgcacacgactggagccgaccatccgcctgacgttagagcgcgcggctgtcgacgacgccgacgggacccggtggtccgtgctgatcgcgctatccaacgggtactacatgtaccgtcacgagtcggacatctgccatgcataccagatcatgatgatgggcgcacttaaggacgtgaacatactcgtctgcatgtaccatgacatctc

SEQ ID NO: 292339 - DNA, 161 bp, Zea mays
cgccagtccatcctgcagcagcagccgtagaagccgccaggtcgcggggctgttgccgacgcttataaagcagcaagggaccgcgatatgcgggctgcagcaaccgactccatgccccgacgctgctgccggcggagtcccccactgaacaaactatgtgc

SEQ ID NO: 292340 - DNA, 214 bp, Zea mays
  unsure (1)..(214): unsure at all n locations
ggagcacagaaagcacaagagtggacctacaaacgcagacaaaagagagagccnccagacgctccaaggacanccagcaacngctgatacggcgaccatgatcccgcaaagcgcgcaagcaccaatagcgaccctgcagcccccgaacctcacaccagcgagggctacagcaagcgaaaacccaatacgacaaccctacaggaaccaacaggca

SEQ ID NO: 292341 - DNA, 222 bp, Zea mays
  unsure (1)..(222): unsure at all n locations
gtccgagttggagcatacttaatcacaccaagtgaagccaccgagcaacgactgaacaacaaganctttcaagagattagggctccttgctcttcgtgggctttttgtgagcgcaacaaatgcgtgcattattccacaatgctcacttgctcctagagccagttataccacagttgttgcgaccagatactaggatgggcttaagagctcctagctgtgcaa

SEQ ID NO: 292342 - DNA, 158 bp, Zea mays
  unsure (1)..(158): unsure at all n locations
gcggcagtgcgtatagaggatcgncaatcagaacagcatgaagatgggcatcgnncgcngcttgtaacaggctctgacagctgccaacgcctgtgcaatgcagatgccctgcccctgcacggggctgcaaggcatgtacagcactggcgccggcctga

SEQ ID NO: 292343 - DNA, 215 bp, Zea mays
gcgacatagaaagctcattactggaaatacaacgccagccaaaatatttagcttcctgatgcttctaaaactttctacaagtgctactaccgcaaccattttcccacaatgctcacaagctcctatagcttcctttcttcccccatacctcttaccagcggtgtcttcagtatgttaaaacccaattctacaaccctactagatccaacaagcaa

SEQ ID NO: 292344 - DNA, 237 bp, Zea mays
tggaaagtggaatctagtaccaacaaataagcaacaatggcgaccaacatactgaccgaccttatgcgaaatgctcggactgcatgtgttgcggacgcgacaatcggccctcactgctcacaagctcccatagcttcccttcttcccccataccttccatcaatgatagctacaggatgtgaaaacccagctcttcaacccgataggctccaacaagcaaacgcagctagcaacata

SEQ ID NO: 292345 - DNA, 339 bp, Zea mays
catatagcggaaatactacagcacataggcagtcaaaatctaacgattacgtgtgctcattggtcttgctgtaagtgctgctactgcaaccattagcacacaatgctaacacgctcatatagctaactatcttatactatacctgtcactagcggtatcttcagcatgagaaaacgcaattctacaactctacaggatccaaaaggcaatcgcagcaggcattttacctttatcaccatcattcttgcaacatccgcaagcattattacagcaactacctttagcgcatgtgcaggcacagaacatcaaggtacaacaactacaactactagagctagg

SEQ ID NO: 292346 - DNA, 289 bp, Zea mays
attgagactaactagcagcatagaaagcacactagtgtaccaacattggcagccaaaatattttgcctcctaatgctcctgggccttccggcaggggctgttacggcgaccattttcctgcatggttagaaggttctaatagcttccttttttccccagaacttctatccatcatagctttagtgttgtgaaacccaaatctttaaacctatcaggttccaccaggcattgacagctggcatataactttataaaccttggttcatccatcgatagtcatatctatgac

SEQ ID NO: 292347 - DNA, 393 bp, Zea mays
  unsure (1)..(393): unsure at all n locations
gaagggcggtgcatgggatggtgctccggcgtgattccgaatacgatgtcttcgttggaacatccatcgttaacatgtatgtgaaatgtggtcagatgggcgctgccatgaatgagttctggaggatgccaatccggaatgtggtttcttggacaactgcgattgctggttttgtgcaacaggaggacccagtaaatgcaatgctgctgcttacagaaatgttgcggagtggtgtggcaattaacaagtacacggctacgagcatattgctcgcctgctctcaaacgtccatgatacgggaggctaatcangtgcacggcatgattataaagagcgagctgtacttggatcatgtngtcaaggangctttgatttncacatatgccaatgctg

SEQ ID NO: 292348 - DNA, 395 bp, Zea mays
  unsure (1)..(395): unsure at all n locations
ggcacgtggagccgtagcaccggtcccaggcgatcttcatgtcgatcctccagtgcatgctgcagtagcggccgtaaagcgggctggtcgaggtgctgttggtggcgcagattgcgcatcagctgacggcgatctgcggactgcagtatgcgtgtacatgccgctacactgttgtcgacgttgtgctatactagaagaaactatgtgctgtagaatgagacgctggctatctaagctagatgagtaattgatgcgangaatattgatgaatagtgtgtacacgcatgaccatggttgcgcagcagtagcttgagcagtgtcaccaatgaacaactgcgctggcacaatcatcacatggaagtgcagccgatgtaaacgatgcatgcttacgtact

SEQ ID NO: 292349 - DNA, 299 bp, Zea mays
gcggcagtgcgtagagaggatcgtcgaacagaacagcatgaagatggtcatcgttctcgtcgtgtgcctggctctgtcagctgccagcgcctctgcaatgcagatgccctgcccctgcgcggcgctgcatggcttgtacggcgctggcgccggcctgacgacgatgatgggcgccggcggtctgtacccctacgcggagtacctgaggcagccgcagtgcagcccgctggcggcagcgccctactacgccgggtgtgggcagactagcgccatgtaccagtcgctccggcaacagtgct

SEQ ID NO: 292350 - DNA, 301 bp, Zea mays
cgacccagcgtacccggcagtgcgtatagaggatcgtcgatcagaacagcatgaagatggtcatcgttctcggcgggtgcctggctctgtcagctgccagcacctctgcaatgcagatgccctgcccctgcgcggggctgcatggcttgtaccgcgctggcgccggcctgacgacgatgatgggcgcctgcggtctgtacccctacgcggagtacctgaggcagccgcagagcaccccgctggcggcagcgccctactacgcctgatgttggcagacgagcgccatgtaccattcgttccg

SEQ ID NO: 292351 - DNA, 196 bp, Zea mays
cttacctcctttccacatacctttcaccaacggactcttctctatgttaaaagccaggttttcaaccctacaggatccaacaagcaatttcaattgacatcttacctttatcaccctaattcctacaacatatcattaaccctattacaacaaacacctttggttcatatatttacacaaaacattcattgcccaa

SEQ ID NO: 292352 - DNA, 312 bp, Zea mays
caacaatggcttccaagacattatccctccttgcgcttcttgccctttttgcgagtgcaacacatgcgtgcatgattccacaatgctcacttgctccgagtgccattattccacagttcctacctcgagcaacttcactgggctctgaacacctagctgtgcaagcctatatgctacatccttcgctcgctgaagcgtcctgattgcgccatctcggcacttacaccatccatgcttgacccagctatctttacaagccatttacctgcatcacccgcgtgctctgatcaactctatgcctttgatccgttg

SEQ ID NO: 292353 - DNA, 341 bp, Zea mays
gtctctgctactcacctagccgccagtcatgggcatgatcaagatcggaatcaacgggttcggaaggatcggctggctcgtggtcagggtcgtcctgcagagcgaggatgtcgagctcgtctgcgtcaacgaccgcttcatcaccacggattacatgacctacatgttcaagtacgacaccgtgcacggtcaatggaagcacatgcgacattaccctcaaggactccaagacgcttcttgttggcgagaagccggtcaccgtctttggcatcaagaacctccgagagattccgtgatgtgaggctggtgctgtatatgtcgtgcagtccatcggtgtcttc

SEQ ID NO: 292354 - DNA, 375 bp, Zea mays
attcagaaacacacctagcgaaacgcactagccacgacctaactgcagtggctaccaagatattagcatcttcttgcgctacttgccctttttgtgagcgcaacaaatgcgtacattattccacaatgctcacttgctactagtgccattattccacagttcctccgaccagatacttcaatgggcttcgaacacctagctgtgcaagccaacatgcaacaacgagcacttgcggcgagcgtcttacaacaaccaattgcccaattgcaacaacaatccttgccacatctaacattacaagccatcacaactcaacagcaacaacagttcctaccagcactgagccacctagacatggtgaaccatgtcgactac

SEQ ID NO: 292355 - DNA, 196 bp, Zea mays
gacccactcgtacctagcaacatacatagataagcacactatcaacatcttagcaccactgtatacctacatggctaaggctccttgccctccttgctatttcatcaagcgctactaccttgactcttattccacaatgctcacaacaatacctctttccagcgtcactctcatcatttcaatactcaactataca

SEQ ID NO: 292356 - DNA, 284 bp, Zea mays
  unsure (1)..(284): unsure at all n locations
gaccaactagcaactatagaaagcataaagtgtaccaacaatggcagccaaaagtntttcctacaatgctcattggcctttcttcaagtgctgctactgcgaccattttcccgcaatgctcgcaagctcctataacttcccttcttccaccgaacctctcaccagcaatgtcttcagtatgttaaaacccaattcttcaaccctacaggatccaactagcaattacaacttgaatataacctttatcaccctagatcctactacatatatcatccctataacaa

SEQ ID NO: 292357 - DNA, 126 bp, Zea mays
gcgtggccggcgatgcggctgtgatcacggtggcgaaccagtgcccgttcaccggatgttctttaaacgtgccggagcgcggcattcggcggctgaaccgcggctagagctggcggatcacggccc

SEQ ID NO: 292358 - DNA, 282 bp, Zea mays
ttgagaccaactatcaacatagaataaacaataccgtaccaacaatggcaggcagaatattttgcaaacttatgctccttggtctttctgcaagtgttgctaccgcaaccattttcccacaatgctcacaagctcctatagcttcccttcttcccccatacctctcaccagcggtgtctgcaatgtgtgaaaccccaatagttcaaccctacaagatccatacatgcaatcgcaacaagcattttaccattatcacccttgaacctataacaactcattgcc

SEQ ID NO: 292359 - DNA, 229 bp, Zea mays
  unsure (1)..(229): unsure at all n locations
tcagcattcaaaaacacgccaagcgaatctcactagcaacgtactaacaccaatggctaccaagatatnagcccttcttacaaaagcttgccctcctagttatcgcagcagatgcgttcattataccacagtgctcacttgctcctaatgccattattccacacttcctcccaccagtcactacaatgggctacaaacatcctaccatgcaaacctacaagctacaact

SEQ ID NO: 292360 - DNA, 287 bp, Zea mays
cgactatcaacattataaagccacaataagtacccacaatggcagccaaaataggggctttcttatactccttggtaactctgcaattgttgctaccgcaaccattttcccacaatgctcacaagctcctatagcttcccttcttcccccatacctctcaccaacagtgtcttcaatgagtgaaaacccaactgtccaaccctacaggatccaataagcaattactaccagcttattaccattattacacttaatacttcatacaaccaacatacctattacaacaa

SEQ ID NO: 292361 - DNA, 233 bp, Zea mays
  unsure (1)..(233): unsure at all n locations
cgacaagcaacatataaagcggaaataagtacncccaatagagcaacaatggcnagccattatataaaaccctccttatgccccatactctggctacatgtgttgctaacgcgacaattatccctcaatgctcacaagctcctatagcttccctacttaccccataccttccatcaattatagcttcaatatgagaaaacccatcacttcaaccatataggccacaacaagca

SEQ ID NO: 292362 - DNA, 336 bp, Zea mays
accaagccttccggaaccttaaaaggtggattccggtaccaaaattagaccaccattggcggccaaaatgttttccatccttatgctcgttgctctttcggaatgagttgctaacgcgaccatttatcctcaatactcacaagctactatagctgcccttcttactccataccttacatcaatgaccgctttagtatgtgaaaacccagcccttcaaccctacaggatccatctagcaatcgcaacaagcatcttacctttatcacacctgttcttttaacaatcgccagccctatctttggtgcacacattggtacaaaccatcacggcataaca

SEQ ID NO: 292363 - DNA, 246 bp, Zea mays
tgctcaaaaactctctactacgctcctttctttccccatacttttcaatacctgtgaacaccgactgctataacccatgtattcaatgctacatgacccaacatgcaatatcaactagcatcttacctttatcatccttgatcatacaacaaccgtcaaccctattacagcatttaccttatgcgcatttgctggcacaaaatatattcgtacaacaactacaacatcttgcgctctgaaaccttg

SEQ ID NO: 292364 - DNA, 296 bp, Zea mays
agcctcgcaacatcgagagcacactgccgtatcaacgatggcaccaactgtatggagcttgcttatgctgcttggtctttatgctggtgctgctaccgcagccattgaggcacaatggtaacaagatggtatagctctattgcttgcctcatacctatcaccagcggtgtcttcagtatgagaaaacccagctgttgaagcctacaggatccaacaagccaatgcatcaggcatctcaccagtataacccttggtactagaacgaccgtgagccctattacaggacttacctttgg

SEQ ID NO: 292365 - DNA, 294 bp, Zea mays
cctcgggttcggattcggtttcgtgaggttctccggggttcggtttcgttggtgagcggatcgagatggcagcgtctgatgttgagctccgctgcttcgtcagcggcctcgactgggccacggacgaccactccctgcacaacgccttcagcacctacggctaggtcctcgagtccaagatcatcctcgatcgggagacgcagaggttccgcggcttcagcttcgtcaccttctgcacggacgaggcgatgcggaacgccatcgatggcatgaacggcaaggagctggacggtc

SEQ ID NO: 292366 - DNA, 161 bp, Zea mays
gaacaacccatcatcggtggtgccctcttttacattgctgatgagttatagttcaatagtcaagttactaagacacgcactcaatgatttctgcaacgcgagagcaatcatgcagacagtcagcacagtacatctctcgagtcggtagtccgaatggtcaa

SEQ ID NO: 292367 - DNA, 168 bp, Zea mays
cgcgagagcaactaatgcgttcattattccacacagctcactagctccgagtgccattattccaccgctcctgcgtatacatgctttcatgcgcttgcaagagacatctgagcaagcctatagggtacgacaagctcttgcagtgagcgtcttatatacaaccaattg

SEQ ID NO: 292368 - DNA, 365 bp, Zea mays
gttggcttctcctgccccttcggttcgggttcgggttcgtgaggttctccggggttcggtttcgtgggtgggcggatcgagatggcggcgtcagatgttgagtaccgctgcttcgtcggcggcctcgcctgcgccacggacgaccactcgctccacaacgccttcagcacctacagctaggtcctcgagtccaagatcatcctcgatcgtaagacgcataagtcccgcggcttctgctacgtcaccttctacacggaagaggcgatgcggaacgccatcgagggcatgaacggctaggagctggacggtcgcaacatcaccgtgaacgatgcccattcccgcagtggacgtcgaagctgtggcgg

SEQ ID NO: 292369 - DNA, 357 bp, Zea mays
tcggacactcttgcgttatccacggaaccctattacaactacaacggctgtcgccctatgtggaacgcgcattgtcagagcgagcggtctactagcagctacacatcataggtggtgacactgcttagatggctcaatagctgtaattcaataataaagcctcttggatgatgtatgttgacagccagaaatccgaagtgacatatccagcaggatccatcaggcaatcgcaacaggcatcttaccattatcacccttgttccttcaacaaccgtcagccctattacagcagttacctttggtccatttggtggcacataacatcatggcacaacaactacaacaacttgtgctagc

SEQ ID NO: 292370 - DNA, 399 bp, Zea mays
  unsure (1)..(399): unsure at all n locations
agaaagtagaatccattagcaacaatagagcaccaatggcgaccaagatattttccctccttatgctccttgctctttctacatgtgttgctaacgcgacaattttccctcaatgctcacaagctcctatagcttcccttcttcccccataccttccatcaattatagcttcagtatgtgaaaacccagctcttcaaccatataggcttcaacaagcaatcgcagcaagcaacatacctttatcgcccttgttgtttcaacaatcaccagccctatctttggtgcagtcattggtacanaccatcanggcacaacagctgcagcaactcgtgcttactgggaaccaaccaataacttttgccaacccttcttccttattttaagcaccaccaattcttt

SEQ ID NO: 292371 - DNA, 244 bp, Zea mays
gcattcagaaacacaccgagcgaagcggactaacaacgacctaacaacaatgggtaccagagatataacccttcttgcacctgttgcccttgatgcgagcgcaacacatgcgttcattattccacaatgctcacttgctcctagtgccattatcacacagttcctgccaccagttacttcaatgggcatcgaacacctatctgtgcaagccaacatgcaacaactagcgctagccgcgagcgtc

SEQ ID NO: 292372 - DNA, 166 bp, Zea mays
gtgcgatttcgatctcgcagccaccttttttttgttctgttgtgtatctagtagttggaggagatatgccgtttggacttgcattggacacgaacctaaggccttaacagattagaacctgggaaggtgaatggaatggccaggtggaaaaattaagtattggggg

SEQ ID NO: 292373 - DNA, 293 bp, Zea mays
attgagaccaacatgcaacatagcaagtggaatccagtagcaacattcgagcagcaacggcgaccaagatactttcactacttatgctcctggctctgtcagcatgtcatgctaacgcgacacttctgcttcaatgcttacaagctcctatagctaaccttgttactccataccttccatcaatgatagcttcagtatgtgaaaacctagcttttcaaccatataggctacagcaagctattgcagctagcaacatacctctatcacccttgattcaactatctacagcccta

SEQ ID NO: 292374 - DNA, 424 bp, Zea mays
cccacgcgtccgcggacgcgtgggtctcaccagcggtgtcttcggtatgtgaaaacccgattgttaaaacttacaggatccaacaggcaatagcaactggcatgttacctttatcacccttgttcctgcaacaatcatgagccctattacaacagttacctttggtgcatttattggcacagaacataaggggcacaacaactacaacaacttgcggtaacgaaccttggtggcctatcttaagcaccggcggttcttacattcaacccactacggtcattggactctgcttcttattcgcaacaacaacaactaccattcagccacctacctgctgcctacccccagcaatttcttccattcaaccaactagcagcattgaactgtcctgcttatttacagcagcaacaactactaccattca

SEQ ID NO: 292375 - DNA, 360 bp, Zea mays
caactagcaacatagaaagcacaatagtgtaccaacaatggcagccaaaatattttgctgccttatgctccttggtctttctgcaagtgttgctaccgcaaccattttcccacaatgctcacaagctcctatagcttcccttcttcccccatacctctcaccagcggtgtcttcaatgtgtgaaaacccaattgttcaaccctacaggatccaacaggcaatcgcaacaagccatttaccattattaaccttggtccttccaccacccgtaagcctaataccagcagtaaccttgggtcaattggttgccccaaaccttaaggccccaccacctccaccacctggggctaccaaaccttg

SEQ ID NO: 292376 - DNA, 349 bp, Zea mays
attcccggccagcaagcaacatagaaagtagaatccattatcaacaatttatcttcaatggcgaccaagatattttcccgccttgtgctccttgctctttctacatgtgttgctaacgcgacaattttccctcaatgctcacaagctcctatagcttcccttcttcccccataccttccatcaattatagcttcagtatgtcaaaacccagctcttcaaccatataggcttcaacaagcaatcgcaacaagcaacatacctttaatccccttgttgtttcaacaatcaccaaccctatttttggtgccgtccttggtacaaaccaataaggcacaacaacttcaacaac

SEQ ID NO: 292377 - DNA, 252 bp, Zea mays
gcaacaacccatcattggtggtgccctcttttagatttattattgaactataactcataagaaagctaaaagagggcaccaacaacgcatgattggtgcggacgcgttgttcgactcgaggcttacggactggttcatgcagacgtactagctatctatagtgtgagttatatatgacgacttggttgtatctgtagaagcatcagactgcgaaaacatggcaataccccactttaataccgtagctaaaca

SEQ ID NO: 292378 - DNA, 398 bp, Zea mays
gttccttaactttttgaagtgcatcaaaggcataagcccgaaccacgttctggagccgctgtgcgctttcgcgagtcccaagccgaagctaataagttcaggtgcacgggagatgctccagctcccagtcccagtgcacactgaggaggaggaggaggagcttcgcttgtctgagatctcgctgcagtgcagaacggcaggatacatgatgtccaacatgtgggcgaacgatgccttcgtaccaaaagctcttggtattcacaagggaacaggttcttcgtggtcaaagtgcaacttccacataccttacacgaacgatatttcgagtgcactgaagtaccatctggatgtgaccaccaaaagctacaggagtctagtttacaacggtgaccatgata

SEQ ID NO: 292379 - DNA, 354 bp, Zea mays
cgacccactcctactcacgaactagccatatacatacacaattttctttcaatcataacaagcaacttacctttatcacttataatctttcgacggtctccaaccctatctttcctacactcattgctacaaaccatcacaaccacaacatattcagcaactcttgctaccacttatcatccaattagccttcacaaacctttacccctactcttaaaaacaacaatttcttccattcaaccaactcactatacttaacccttctacttatttgcaccaacaacaactactaccattcaaccatctatctacttcctacatttaacatcaacaattttttccatttaaaccaat

SEQ ID NO: 292380 - DNA, 408 bp, Zea mays
  unsure (1)..(408): unsure at all n locations
gaactctgctgcttatttgcaacaacaattaccattcagccagctagttgctgcctacgcccagcaatttcttccattcaaccaactagcagcattgaactctgctgcttatttacagcagcaacaactactaccattcagccagctagctgatgtgagccctgctgccttcttgacacaacaacagttgttgccgttctacctgcacgctatgcctaacgctggcaccctcttacaactgcaacaattgctgccattcaaccaacttgctttgacaaacccaacagtgttctaccaacaacccatcattggtggtgccctcttttagattgcttatgagttatagttcaataatgaaagtttttggatgatgnttgtggcgtcccagaaataagaaagtacatttct

SEQ ID NO: 292381 - DNA, 280 bp, Zea mays
gtgagagccgtcgccgctgcagtgtccatagccaccgcaggagactgagatggggggttgtgtcaagacccacaagaccaatgcgtacttcaagcgtttccaggtgaagtttcaagaaaaggtcccttggcagaacgacttacaggtcacgattaggctgattaaccaagacaaaaacaagtacaatacacccaaattcagatttggtgggcgatttaccaaccaggaccttacaggacaaattatttttggtaggttagccggggaattgggtcttggt

SEQ ID NO: 292382 - DNA, 288 bp, Zea mays
agcagagtgcctgtatgcaaaccttctttgttgatttctgattgcctgttcgcgcgctgctgcaaggatggagctccgatgcttaaacagaaaggacctgatcgaggcactggccaaggacatccctgcaggcgcgatccgattcggctgccgcgtcgctgccgtcgctgcggaccccggcggcggtcacggcgccgtcctgacaatggcggacggtactgccatgaaggccaaggtcctgatcgggtgcgagggcacatactccgcggtggccaggtaccttgggct

SEQ ID NO: 292383 - DNA, 420 bp, Zea mays
cccacgcgtccgtgcgtagagaggatcgtcgaacagaacagcatgaagatgggcatcggtctcgtcgtgtgcctggctctgtcagctgccagcgcctctgcaatgcagatgccctgcccctgcgcggggctgcagggcttgtacggcgctggcgccggcctgacgacgatgatgggcgccggcgggctgtacccctacgcggagtacctgaggcagccgcagtgcagcccgctggcggcggcgccctactacgccgggtgtgggcagccgagcgccatgttccagccgctccggcaacagtgctgccagcagcagatgaggatgatggacgtgcagtccgtcgcgcagcagctgcagatgatgatgcagcttgagcgtgccgctgccgtcagcagcagcctgtacgagccagctctgatg

SEQ ID NO: 292384 - DNA, 399 bp, Zea mays
caccaagcgaagcacattagcaacaacctaacaacaatggctaccaagatattatcccgccttgcgcttcttgcgctttttgcgagcgcaacaaatgcgttcattattccacaatgctcacttgctccaagttccattattacacagttcctcccaccagttacttcaatgggcttcgaacacccagctgtgcaagcctataggctacaacaagcaattgcggcgagcgtcttacaacaaccaatttcccagttgcaacaacaatccttggcacatctaacaatacaaaccatcgcaacgcaacagcaccaccatttcctaccagaattgacccacttacccttggggaaccttgccgctaactggcacaagaagtggctggcttaaacccaattggtt

SEQ ID NO: 292385 - DNA, 408 bp, Zea mays
  unsure (1)..(408): unsure at all n locations
atttgcagcaacaactattaccattcagccagctagctactgcctactctcatcaacagcaacgtcttccatttaaccaattggccgcactgaacctcgctgcttatttgcagcagcaaatattactaccatttagccagctagctgcagcaagccgtgcttccttcttgacacagcaacagttgctgcctttctaccagcagtttgcggctaaccccgcaaccctcttacaactacaacaattgttgccctttgtccaacttgctttgacanacccagcagncttctaccaacacacatcattggggggggcctcttttaaaatggttaataagtggaaatcaataataaaagtttttggatgatgtatgtggccaaccagaaattagagttacatttccagattct

SEQ ID NO: 292386 - DNA, 328 bp, Zea mays
  unsure (1)..(328): unsure at all n locations
atcgggatgtcaagccagaaaatctactgcttacttctgatgggcacatcaagattgctgactttggtagtgtgaagcctacaagggatactcctatcaaagttctcccaaattcaactactgaaagggcctgtacatttgttggaaccgctgcatatgtaccacctgaggtcctgaactctgccccagcaacctttggaaatgatttatgggcattgggatgcacactgtaccaaatgctntctggctcttcgccatttaaagatgctagtgaggtggtaaatttccagagaatcattgcaagggacctcaaatttccagagtattt

SEQ ID NO: 292387 - DNA, 433 bp, Zea mays
  unsure (1)..(433): unsure at all n locations
gcaccataaaaggtggattccatagccaaaattggaccaccatgggcggccaaaaagttggcaatcctaaggctcctggtttttctgatggtttgctaacggcaacatttttcctcaatactcacaagctcctatagctgcccttcttcccccataccttccatcaatgaccgctttagtatgtgaaaacccagcccttcaaccctacaggatccagcaagcaatcgcaacaagcaacttacctttatcacacctgttctttcaacaatcgccagccctatctttggtgcagtcattggtacaaaccatcagggcagaacagttgcagcaactcgtgctaccagtgatcagccaagtagctcttgcaaacctttcnccctactctcagcaacaacaatttcttccattcaaccaactgtctatactgaaccct

SEQ ID NO: 292388 - DNA, 376 bp, Zea mays
aattcccgctggacccacgcatccgcgccaataagctgcagaaccgttttgttcaccgagtcgagatcgtccacatggaccgcttatcaccgctttcaccaggtgaatccgtctccgtcatcgtcgtctttttcgttcccatcgtcacaagtccattaccaaacttgccaccgcgacctctacatgcacaacctctgcaccatgtaagtgaggcacagtttcaaactgctggaccaagccgacgtctacagccctgagcctaccatgatcacacgcctcaccagccacaacttccccgttctcaacctcgtacagatgagcacagtgcatgtagacctgtaccatgacgccatcatgtctccgttctagaacttca

SEQ ID NO: 292389 - DNA, 370 bp, Zea mays
tcgaggcacgcatcacgcgacacacgacgcgaagctacctagcaacgacttaacaacattgggtaccaagatcgtatctggtcttgcgctaagtgccctatgtctacatgcacacagtgccttcatgattccacaatgctcacttgctcgtagtgccattctaccagagcttgtccgactagatacttaaatgggcttctaacacctagctgtgcaagactacaggctacaacaagcgcttgccgcgagcgtgttacaacaaccagttaagcaattgctgcgaccattattggcacatttaaccatagaagccatcgcagcacaacagcaacaacagttcctaccagtactgagccaactagatgtggtg

SEQ ID NO: 292390 - DNA, 364 bp, Zea mays
  unsure (1)..(364): unsure at all n locations
cggacgcgtgggatattttcagcattcaaaaacacaccaagcgaagcgcactagcagcgacctaacaccaatggctaccaagatattagccctncttgcgcttcttgcccttttagtgagcgcaacaaaatgcgtcattattccacagtgctcacttgctcctaatggcattattccacaattccttccaacaggtacttcaaagggcttcgaacattcaaccgtgcaagcctacaggctacaactagcgcttgcggcgaacgccttacaacaaccaattgcccaattgcaacaacaattcttggcacatataaccctacaaaccattgcaacgcaacaaccaccacaacaacaggttctggca

SEQ ID NO: 292391 - DNA, 403 bp, Zea mays
gcactttctatgagacaaaagtttgataaatattgggaaataaataatgtagctttggcagtgagagcatttcttgatcctagatacaaacataggatgattgagctatatatatctaagatgtatgacattgataaagctgagttagagaagttggtattcatgaatgttatcaacgaattatttacatattattcatcagtcatcactgcaaaatcaaccacaaaaacctcaaaaggtgctagttcaaaagagagcgagtttgttccacataaaaatactttggtggatgaggatgatgatgaggttgatcttgatgagttgtatgcaacaacaagcaaaatagatttgtacatgagtgaggatctagtgaaggtcaatgacaatgaagcaacatttgatg

SEQ ID NO: 292392 - DNA, 367 bp, Zea mays
catcatagaatgcggaatccagtagcgacaatctagctacaatggcgaccacaacagtgggtatcaatatgctagttgttcttgctacatgtgccgttaacgcgaccgcaacacatgcgtgcatacatgcacatagctcacttgttcttactgcaaacataccataaattatagcaccaatatctgaaatcggatctcaacaactatataggctagaatacgcgatagaaccaggcatcatacctagagcgttacagcagccacatcaatcatcggcactacaatccttgcaacaattgacactacccatcatggcaccacagctgcagcaactggtgctaccagcaatgaaccaaatagatgtggc

SEQ ID NO: 292393 - DNA, 295 bp, Zea mays
ctccaacaagcaatcgcagcaggcatcataccttaatcacccttgttgttggagcagtcgccagccctatctttggggcagtcatgggtccaaaccatcagggcacagcagttgcagcaactcgggctacctgtgatcaaccaagtacttttggcaaacctttttccttactttaagaacacacacaatttcttccattcaaccaactgtatacactgaacccgtgggcatattggcagcaacacctattaccattcagccagctagctactgcatactctgagcaacaacaact

SEQ ID NO: 292394 - DNA, 420 bp, Zea mays
actggctgcattgaactctgctgcttatttgcaacaacaactaccattcagtcagctagctgctgcctacccccagcaatttcttccattcaaccaactggcagcattgaactctgctgcttatttacaacagcaacagctaccaccattcagccagctagctgatgtgagccctggtgccttcttgacacaacaacagttgttgccgttctacctgcacgctgcgcctaacgctggcaccctcttacaactgcaacaattgctgccattcaaccaacttgctttgacaaacccaacagcgttctaccaacaacccatcattggtggtgccctcttttagattgcttattagttgtaattcaataatgaagttttttggctgatgtatgtggcctcctagaaataagaaggtatattttc

SEQ ID NO: 292395 - DNA, 365 bp, Zea mays
acaacgactacaacaacttgtgctagcaaaccttgctgcctactctcagcaacagcagtatcttccattcaaccaagtagctgcattgaactctgcgtgttatttgcaacaacaacaactaccattgagccagctacctgctgcctaccctcagcaatttcttccattcaaccaactggcagcattgaactgtcctgcttatttacagcagctacaactactaccatgcagccagctagctggtgtgagccctgctaccttcgtgatacaaccacaggtgatgccgatctaccagcacgctgcgcctaacgctggcacgctattacaactggcacaattgctggcattcaaccaacttgctttga

SEQ ID NO: 292396 - DNA, 374 bp, Zea mays
gtgctgatggtcgtgctggtcatgttcatcctgaccgccacggcgcagatcgccggcatcaaggtcgacctgcccaaggccagttcgtccatcgccctgtcgcagcccaagaccaaggccatttccgtcaacgacgccggccaggtgttcctggacgcctacccggtgaccctgcccgagctggaagaccggctgcgcacggagaaggcactgaatcccgactttccggtgatcgtgcgcggcgactccgccgtgcagtaccagaaggtggtggaagtgctggacctgctgcgccggctggaactggcccaggtcgggctggtcaccggcaagccgaaataaggggccgaggcgactgtcatgccgcaccacgc

SEQ ID NO: 292397 - DNA, 319 bp, Zea mays
gcaccgtcgactgcactaaagccatatgtccacatggcggcaaatttgctctagctctggctttggagtgtgtacggacatttccgaatggtgcagtctatagttcctcttccccgtacctgtaacagcgggtgtctttcgtatgtgaaaacccaattctttaaaccctaccagatcccacaaggcaatacagctgcatctaccttatcacccttgttcctccaacaatcatcagccctattacatcagttacctttgtgcattaattggcacaaaacatcagggcacaacacttacaacaacttgggttagcaaacct

SEQ ID NO: 292398 - DNA, 229 bp, Zea mays
cacacggagcgaagctacctagcatcgacttaacaacaatggctaccaagataggatccggccttgcgctaattgccctttgggtgagcgcaacagaggcgttcatgaatcgacatggctcacgtgttcggagcgccgatccgcccggacgtggtccgcttcacccacaagctgctgtcctgcaacaagcgccagccttacgcagtcttccgacgagctggccaccaga

SEQ ID NO: 292399 - DNA, 323 bp, Zea mays
acgcgtccgctcgcccaccgatgtggtagtgcataaacgcgacctaccacgaggggcgagtaagttattagaccattaatgcacgtgtatgtcctagtagcgagcgcgacgagtgcaaccattatgacacagtgatcactagctactgacgccatgattgcagagcaacgtataccagttacttcaatgggcttatgacatacaatctcgcgagcctacgtgctacatatagctggtgcggacagcgtgatgaatcggacaagtgccgaattgctacaacaatcatggtcgcatatgaccctacgcaccatatgatcgcaaca

SEQ ID NO: 292400 - DNA, 385 bp, Zea mays
acgcaactagcaacatagaaagcacaatattgtaccaacaatggcagccaaaatagggcggcttcttatgctacttggtctttctgcaagtgctgctacggcgaccattttaccgcaatgctcgcacgctactatagcttcccttcttccaccgtacctatcaccagcggagcattcagtatgtgaaaacccaattcttcaaacttacacgatccaacagggcattacagcatccattttacctttatcaccctcgatccttcaaccatcataagctctattacatcagttaccttcggcgcatttattggcacaaaacatcatggcacaacaactacaacaacttgagctatgcaaaccttgctgcctactctcagcaacagca

SEQ ID NO: 292401 - DNA, 432 bp, Zea mays
atttgccaggcaggagtgttcgttggtatcgctttagcacttcttctgtttgtgtcttttggtagacttgcagaaatattctccaaagaccccatggttatacaaattgtgaggagtggtgttttgttcgttagtgctagtcagcctatcaatgccctcgcttttatctttgacggactccattttggtgtctcagacttctcgtactcagcttcctccatgatggtagttggagcaatatcctctttgtttttgctgtgtgctccaccatttttcgggcttcttggtgtttgggctggcctggctcttttcatgagtttgcgcatgactgctggatttatgagattgggatggagagcagggccttggtggtttttgcacagaaaagaacccaaatacaggctgcaatgaacaaaatgtggatctatggag

SEQ ID NO: 292402 - DNA, 382 bp, Zea mays
acgagcgacatagcacgtggaatccagtagccacgacagagcaacaatggcgaccaagatagttaccctccttatgctcgttgctctatctgcatgtgttgctaacgcgacaattttccctcaatgctcacaagctcctatagcttaccttattaccccataccttacatcaacgatagcttcagtatgtgaaaactcagctcttgagccctataggcttcaacaagctatctcagcaagccacctacctttatcagccttcgctgtttcaccatcggcaggctctatgttgggtgcagtcattggtacataccatcaaggcacatgagctgcatcaactcgggctacctgtgatcaacccagtagctctggcaaacctttc

SEQ ID NO: 292403 - DNA, 446 bp, Zea mays
cccacgcatgcagggcaatagaacactcacaaccttactttaaaaacaggcctacatatgctccgcgggctctcttcaaacgctgctacggcgaccatactcccgcaatgctcccaagctcctataactcccctacatcccccttacctctcaccaacatcgcattcgctatgtcaaaacccaattctacaaccctacatgatccatcaagcaatcacaactcacatctatacctttatcacccttgttcctccaacaatcatcaaccctattacatcactaacctttgatgcatctattgtcacaaaacatcaacacacaacaactacaacaactcgacctaacaaaccttgctgcctactctcagcatcagcagattctcacaatcaaccaactatctaccattaactttgattctaatttgcaacaacaacaactaccatcaa

SEQ ID NO: 292404 - DNA, 229 bp, Zea mays
cccacgcgtccgcccacgcgtccgcccacgcgtccgctcgtttgttgttgcccatctgggtgtttgattgcaaggtcgctctgtgtcagttgttagtgctgtgttcatcctcggctccagcagacccatgcatcaaccagcatggactgtggatcgatggatgctgttactcctgtcaggatttgttctaagttaatcctaaggaaaaaatggtgcttcttggtgctgc

SEQ ID NO: 292405 - DNA, 411 bp, Zea mays
cactaaaagctagacccatttttcaacagcaatatggtgtagaattgaagaaaaacttaactcggaaggtgaatttatgatgtttggtggcttctctttttggagaaatgggttggaaattgttcttaaaaaatgagttgtgaccttaatttcataatggactacagaagccattaattcaaacgccacatacttgggcctcaaatatcaaaccgatgggaagtattaaaaaaacaaaacataaaatgttttaaaaacaaaattggacagaacattcattatggaacaaaataaattttgttaagtacaagaaaatgatattaacttttgaaatatactaactgactagcatttggccctgctatgcagggacaacattgttttaaattatatctgctacaactcttaact

SEQ ID NO: 292406 - DNA, 438 bp, Zea mays
accgtccgaattcccggtcgacgaccggattgcccaattacaacaacaatccttggcacatctaaccatacaaaccatcgcagcgcaggagcaacaagcactgagccagctagccgtggtgaaccctatcgcctacttgcaacaacagatgttcgggtgctacttgcacacagacgggcggctgcagctgtggtcaacaacacagccatgagcagcaacataattcacaacaacatcatacacaaaaacaacagcataaaccacgaccacaacataaccagcagcagcaacacctacaacaacaagttcacatgcaaccacaaaaacatgagcaacaacatgaagttcatgttcaacatcaacatcaacaaccgcagcaccaccaccaacaacaacagcaacagcaccaacaacaacatctatgggaaaggcaacaac

SEQ ID NO: 292407 - DNA, 390 bp, Zea mays
  unsure (1)..(390): unsure at all n locations
gttcgcaggccattaggtttatctactccagttctcagtcctacccgatcgacaccatgagggtgttgctggnngccctcgctctcctggctctcgctgcgagcgccaccttcacgcatacaagcggcggctgcggctgccagccaccgtcgtcggttcatctaccgtcgncggtgcatctgccacctncggttcacctgccacctncggttgcatctccaccgncggtccacctgccgncgncggtccaacctgcaccgncggtccatgtgccgncgccggttcatctgccgncgncaccatgccactaccctactcaaccgtcccggcctcagcctcatccccagccacacccatgcccgtgccaacagccgcattcaagcccgtgcc

SEQ ID NO: 292408 - DNA, 422 bp, Zea mays
gtggcctactgtcagtcaacagcagtataatccattttaccaactagctgcattgaacgctgcttgttatttgcaacaacaacaactaccattcagccagctacctgctgcctacccccagcaatttcttccattcaaccaactggcagcattgaactctcctgcttatttacagcagcaacaactactaccattcagccagctagctggtgtgagccctgctaccttcttgatacaaccacagttgttgccgttctaccagcacgctgcgcctaacgctggcaccctcttacaactgcaacaattgctgccattcaaccaacttgctttgacaaacccagcagcgttctaccaacaacccatcattggtggtgccctcttttagatttcttatgagttatagttcaataataaaagttttt

SEQ ID NO: 292409 - DNA, 438 bp, Zea mays
tggatcctgtagggttgaacatgcgatcttaacaggcattactcatgtccacccttgttcctccaacaaccgtcagccctattacagcagttacctttggtccatttggtggcacaaaacatcagggcacaacaactacaacaacttgtgctagcaaaccttgctgcatactctcagcaacatcagtttcttccattcaaccaactggctgcattgaactctgctgcttatttgcaacaacaattaccattcagccagctagttgctgcctacccccagcaatttcttccattcaaccaactagcagcattgaactctgctgcttatttacagcagcaacaactactaccattcagccagctaacttatgtgaacccttgttgctttttgacacaacaaccagtggtggccgtcttacctgcacgctatgcctaacgc

SEQ ID NO: 292410 - DNA, 391 bp, Zea mays
gacccactcgtccgttggaacatcgatccttggcacatcttcactctatttaccattgcaacgcaacaacaacgacaacagcagtttctgccatcactgagccacctagccgtggtgaaccctgtcacctacttgcaacagcagctgcttgcatccaacccacttgctctggcgaacgtagctgcataccagcaacaacaacagctgcaacagtttatgccagtgctcagtcaactagccatggtgaaccctgccgtctacctacaactactttcatctagcccgctcgcggtgggcaatgcacctacgtacctacaacaacagttgctgcaacaaattgtaccagctctgactcagctagctgtggcaaaccctgctgcctacttacaac

SEQ ID NO: 292411 - DNA, 439 bp, Zea mays
gcgaggaagcacaatattgtaccattaatctcagccaaaatatacagcttccttatgctcgttggactatctgcaagtgttgctaccgcaaccattgtcccacaatgctcacaagctcctatagctacccttcttaccccatacctctcaccagcggtgtcttcaatgtgtgaaaccccaattgctcaaccctacaggatccaacaggcaatcgcaacaggcatcttaccattatcacccttgatccttcaacaaccgtaagccctattacagcagttacctttggtccatttggtggcacaaaacatcagggcacaacaactacaacaacttgtgctagcaaaccttgctgcatactctcagcaacatcagttacttccattcaaccaactggctgcattgaactctgctgcttatttgcaacaacaattaccattca

SEQ ID NO: 292412 - DNA, 313 bp, Zea mays
caatagagcaacattggcgacgaagatattagccctccttatgctccttgctctttctacatgtgttgctaacgcgacaattgtccctcaatgctcacaagctcctatagctttcctacttcccccataccttccatcaattatagcttcagtatgtgaaaacccagctcttcaaccatataggcttcaacaagcaatcgcagcacgcaacatacctctatcgcccttgttgctacaacattcaccagccctatctcaggtgcagtcactggtacaaaccatccaggcactacagctgcagcagctagcgcta

SEQ ID NO: 292413 - DNA, 438 bp, Zea mays
ccggctcgacccactggtcctccgcattgtcagtctctacagctctgacctttggtccatttggtggcacaaaacgatcagggcacaacaactacaacaacttgtgctagcaaaccttgctgcatactctcagcaacatcagtttcttccattcaaccaactggctgcattgaactctgctgcttatttgcaacaacaattaccattcagccagctagttgctgcctacccccagcaatttcttccattcaaccaactagcagcattgaactctgctgcttatttacagcagcaacaactactaccattcagccagctagctgatgtgagccctgctgccttcttgacacaacaacagttgttgccgttctacctgcacgctatgcctaacgctggcaccctcttacaactgcaacaattgctgccattcaaccaact

SEQ ID NO: 292414 - DNA, 419 bp, Zea mays
ctggaatctctccccggtttctctctcctatagagtataaaacctgaaccctgcacccttgaagcgcccaacccgccatattcaagagccctcatcgaaagcatgaaggagatctgactgatggcttggggtcgcggtggtccgctacacctgaatcacaccatcgaagtcgttcgaacccggcatgtgctcgagtaggggtcgtcgggtacactgagtgtgtccaggacctcttcgtgcaagctcgatgatcggagagctcgtcgccatgaaaactgagatggatcgccgccgtgaatctatgcctggcgtggtcaagaacaggtaccacaagatgaggcgcatggaggatgttgtgacatgttcgtgcgaggtctaagccgtcgtctcccaatcaactttgggttgctggatcattg

SEQ ID NO: 292415 - DNA, 413 bp, Zea mays
cagcaactgttgcatcagttacttgactgggtatgcagctacgtttgccaaagcaagtgggttggatgcaagcagctgttgttgcaggtaggcgatagggctcaccgaaggtaggtgggtcattacatgctgttacatcacagagatggttggcatggttagatatgatatggattgagaatgtgacagtaaataatttgaatgagtcgatggctcatgatctacggtatagcgcaagtccgtgatcggtcgcttcaatcatgataagacacgttttgtttcgttgctgtctacacgatcatgcggacttggtattaatttcacaactgcaaatactgtgatcatatatgatatagattataacccacatgctgatatacaggcgatgaacaaggcacacaaaattggacaat

SEQ ID NO: 292416 - DNA, 416 bp, Zea mays
tggaactgaacctgaatctttttcatactaatttttgcatgagatgcgcataaaggcgtcagcgaagctaactttgttgcactctatgctaaaaatattacacaaggaaggccaccgtgtccttatattctctcagatgacaaaacttcttgacatccttgaagattatctgactttagaatttggccctaaaacatttgaaagagttgatggctcagtatctgtggcagagcgccaagcggcgattgctcgctttaatcaggataagacacgttttggtttcttgctgtctacacgatcatgtggacttggtattaatttggcaacttgcggatactggtatcatatatgattcagatttcaacccacatgctgatatacaggcgatgaacagggcacacagaattggacaatcg

SEQ ID NO: 292417 - DNA, 437 bp, Zea mays
  unsure (1)..(437): unsure at all n locations
cggaattaccggccccagctgtgcaagcctagangctacgaacatgcgcttgcgggtgcgtcttagaacaaccaattgcccaattacgaacaacgatccttggcacatctaaccatacaaaccatcgcaacgcagcagcaacaagcactgagccacctagccgtggtgaaccctatcgcctacttgcaacaacagctgcttgcatccaacccacttgctttggcaaacgtagctgcataccaacaacaacaacagttgcaacagtttctaccagcgctcagtcaactagccatggtgaaccctatcgcctacctacaacagcaacaacttctttcatctagcccgctcgctatgggcaatgcacctacatacctgcaacaacagttgttgcaacaacagttgctgcaacaaattgtaccagctcttactcagctagc

SEQ ID NO: 292418 - DNA, 390 bp, Zea mays
aaaacaacccgatcgacaccattaagggggttgttcgttgcccttggttctcttggctctagcttggaacgccaacttcaagcatacaaaccgcggcttccgcttgcaaccaacggcggcggttcatttaccggcggcggtgcattttccaacttcggttcaactggcaacttcggtgcattttccaacggcggtccaacttgcggcggcggttcaacttccaacggcggtccatgttccggcgtcggttcatctgccggcggcaccatgccactaccctatttaaccgccccgggctcagactcatacccagacacacccatgcccgtgccaacagacgcattcaaacccgtgccagatgcagggaacctgcggcgttggcagcacccc

SEQ ID NO: 292419 - DNA, 373 bp, Zea mays
gaaccccgctgcttatttgcagcagcaaatactactgccatttagcgagctagctggggcaagtcgtgcttccttcttgacacagcaacagttgctgcctttgtacaagcagtttgcggctaaccccgcaaccctcttacaactacaacaattggtgccctttgtgcaacttgctttgacaaacccagtagactactaccaacaacacatcattggtggtgccctcttttagattgatgattagtcgtcattcaataataaagttacttggatgatgtatgtggccaaccagaaataagaagttacatttccaacaactacaacaacttgtgctagcaaaccttgctgcatactctcagcaacatcagtttct

SEQ ID NO: 292420 - DNA, 201 bp, Zea mays
gctttgacaaacccaacagcgttctaccaacaacccatcattggtggtgccctgtttgagattgcttatgagttatacttcaataatgaagtcttttggatgatgtctgtggcttcccagaaataagaaagtacatttctaaaaataccgactacgatctatatgccagctaacgcctatctgaacgacgaaacacaaggc

SEQ ID NO: 292421 - DNA, 262 bp, Zea mays
tctgcacaaactcatacgacaaccattaccacgaaatgctcgcaaactcctatagcttccctacttacaccgtacctctcaccatcgatgccttccatattataaaacccaattattcaaccctacaagatccaactggcaatctcagctatcatcttacctatatcaccctcgctcctgcaacaatcatcaaccatactacatcagctacctttggtacatatattaacacacaacattaaggcacaaccactaccacaac

SEQ ID NO: 292422 - DNA, 297 bp, Zea mays
aagcaacatataaagcacaatagtgtaccaacaatggcagtcaaaatattttgcgcgtggtatgctccttggactttctgcaagcgctgatacagcgaccattctcccgcaatgctcgcaagctcctataactgaccttcttccaccgtacctctcaccagcggtgtcttcggtatgtgaaaacccaattcttcaaccctacaggatccaacatgcaatcacagctggcatcttacctttatcacccttgctcctacaacaatcatcagccctattacatcatatacctaaggagca

SEQ ID NO: 292423 - DNA, 384 bp, Zea mays
tgcatcgaccaactcacatacccctactcctctaccaacgacctaccacccttaactgctaggttctatcctatcttccccttctagctctctaattgagccattcaactgcgatcattatttcataatgcttacttcattactaatgcctggcattccacagtttcaccaaccatctacttcaacaatctatatacattcaacctatctaacctacaagctacaactaacgcttgcatttagcgccttacaacaaccaattgcccaatccctacaacaatacttgtcacatctaaccctacaaaccatttcaactcaacaacaacaacaacagtctctcccatcaatcaaccacctatccacggtcaaccctctcacctactt

SEQ ID NO: 292424 - DNA, 423 bp, Zea mays
aactagcaacatacaaagcacaatactgtaccaacaatggcagccaaaatattgtgcgtacttatgctccttggtctttctgcatgtgttgctaccgcaactcattttcctacaatgctcacaagctcatatagcttcccttcttcccccatacctctcaccagcgccgtcttcaatgtctcaaaccccaattgttcaaccttacaagatccaacaggcaatcgcaacacgcatcttaccattatcacccttgttcctccaacaactcgcacccctattacagcagctacctctggtccatttgatggcacaaaacatcagggcacagcaactacaacaactcgtgctagcaaaccttgttgcatactctcatgaacatcagtgtcttccattcaaccaaatggctgcattgaactctgctgc

SEQ ID NO: 292425 - DNA, 369 bp, Zea mays
gcagcaggtagctggctacccccagcaatttcttccattcaaccaactggcagcatggaactctcctgcttatttacagcagcaacaactactaccattcagccagctagctggtgtgagccctgctaccttcttgatacaaccacagttgttgccgttctaccagcacgctgcgcctaacgctggcaccctcttacaactgcaacaattgctgccattcaaccaacttgctttgacaaacccagcagcgttctaccaacaacccatcattggtggtgccctcttttagatttcttatgagttataggtcaataataaagttttttgtctgatgtttgtggcttcccagaaataagaaagtacatttct

SEQ ID NO: 292426 - DNA, 404 bp, Zea mays
ccggcaatcgcactggcatcttacctttattacccttgttcctccaacaatgatgggcggtattacacagttacctttggtgcatttattgcacaaaacataggcacacaactacaacaacttgagctatcaaaccttgctgctacttcacacagcacattcttccattcaaccaatactgtatgaactctgctcttatttgcaacacaacaactaccattagcagctatctgctgcctaccccagcaattattccattaagcactgacacattgaactatctgcttattacagctgcacagctactaccattcaccagctaactggtgtgagcacctgctaccttatgacacaaccacagttgacgacgttctaccaacacgctgtgcttaacgctggcaccc

SEQ ID NO: 292427 - DNA, 311 bp, Zea mays
attattgagaccaactagcaacatagaaagcacaatagagcaccaacaatggcggacggaatattccgcctcctgatgctccttggtctttctgccagtgctgctacggcgaccattttaccgcgatgctcgcaagctcctatcgcttaccttcttcccccgtacctctcaccagcggtgtcttcggtatgtgaaaacccaatactctaaccgtacaggatccaacaggcaatcacaggtggcattttacctctatcacccttgttcctacgacaattatcagccctattacatcagttacctttggtgca

SEQ ID NO: 292428 - DNA, 384 bp, Zea mays
atcgactccagattggagaactcgacaccatgaaggtgctgatcgttgcccttgctgtgctggcgctcgctgcgagcgccgtctccagtacaagcggccgctgtggctgccagacaccacctgttcatctaccgcctccgttctatatgccgcctgcgttctatctgccgccgcagcagcagccgcagccatggcaataccccactcaaccaccgcagctaagcccgtgccagcagatctgatcctgcggcggtcgcagcgtccgcagcccgttcctgggccagtgcgtctaggtcctgaagcaccaatgcagcccggcaggcacgccctacggcttggcaaaatgtcaggcgctgcatcagcaatgctggcaccatatcatgc

SEQ ID NO: 292429 - DNA, 389 bp, Zea mays
gcgcattcaaccaactggctgcattgaactctgctgcttatttgcaacaacaattgccaggcagccagctagttgctgcctacccccagcaatttcttccattcaaccaactagcagcattgaactctgctgcttatttacagcagcaacaactactaccattcagccagctagctgatgtgagccctgctgccttcttgacacaacaacagttgttgccgttctacctgcacgctatgcctaacgctggcactctcttacaactgcacaaattgctgccattcaaccaacttgctttgacaacccaaccagggttctcccaccacccaataatggtgggggccttttttaaaatggttaatgagtaatagttcattattgaagttttt

SEQ ID NO: 292430 - DNA, 235 bp, Zea mays
gcggcagcccgacggcgacgccctactgctcgcctcagtgccagtcgttgctgcagcagggttgccagcagctcaggcaggtggagccgcagcaccggtgccaggcgatttttagctcggtccttcagtccatgctgcatgagcaggcggaaagtggccagtgcgcgaagctgatggctgagcagatcgcgcagcaactgacggcgatgtgcggcctgcaacagtcgtctccatg

SEQ ID NO: 292431 - DNA, 395 bp, Zea mays
attctcagcattcacaaacacaccaatctaagcgcactatcaacgacctaacaccaaggggtgccaagatattagccctccttgcgcttcttgcccttttagtgagcgcagcacatgcgatcattattccacagatgctcactagctcctagtgccattattccacagttcctcacaccagttacttcaatgggcttccaacatacagccgtgcaagcctacacgctacaactagcgcttgcgactagcgccttacaacaaccaattgcccaattgcaacaacaatccttggcacatgtaaccctacaaaccattgcgacgcaacaacatcgacaacaacaggttatgccatcactgaaccaactaaccgttgtgaaccctgacacctacttgca

SEQ ID NO: 292432 - DNA, 389 bp, Zea mays
gcccgtgccagcagttcggatcctgcggcgtcggcagcgtcggcagcccgttcctgggccagtgcgtcgagttcctgaggcaccagtgcagcccggcggcgacgccctacggctcgccacagtgccaggcgctgcagcagcagtgctgccaccagatcaggcaggtggagccgctgcaccggtaccaggcgacatacggtgtggtcctgcagtccttcctgcagcagcagccgcagggcgagctcgcggcgctgatggcggcccacgtagcgcagcagctgacggcgatgtgcggactgcagctgcagcagccaggtccctgcccttgcaacgcagctgccggctgtgtctactactgaggaaactatgtactgtagtaataatgtaat

SEQ ID NO: 292433 - DNA, 379 bp, Zea mays
atcaggcgtccggaactagcaacatagaaagcacaatcgtgtaccaacaatggcagccaaaatatttagcctacttatgctccttggtctttctgcaagtgctgctacggagaccattttcccacaatgctgacaagctcctatagctgtccttcttacaccgtacctctaaccagcggtgtcttcggtatgtgaaaacccaatacttcaaccctatgcgatccaacaggcaatcgcagctggcatcttacctttatcacccttgttcctccaacaatcatcagacctcttacagcagctaccttgggtgcatttattggcacaatacatgagggcacaacatctacaacaactggagctagcaaaccttgctgcctac

SEQ ID NO: 292434 - DNA, 383 bp, Zea mays
attttgagcattcagaaacacaccaagcgaagcgcactagcaacaacctaacaacaggggctaccaagatattatacgtgcttgcgcttcttgcgctttttgcgagcgcatcaaatgcgttcattattccacaatgctcacttgctcctagttacattattccacagtttctcccaccagatacttcaatggccttcgaacacccagctgagcaagcctatacgctacaacatgcgattgctgcgagcgtcttacaacaaccaattgatcaattgcagcaacaatgcttggcacatctaacactacacaccatcgcaacgcagcagccacatcagttcctaccagcactgaggcacctagccatggtgaaccctgacgactac

SEQ ID NO: 292435 - DNA, 262 bp, Zea mays
ccaactccatccacgcctcacgcgtcccgagccatataaagcacaattttctactttacaatcgcagtcaaaatattatccttcctgatgctccttgctctttctgtaaatgctgctaccctaaccattcttccacaatgctcacaaactcctatagcatcctttcttcctccatacctctcaacaacggtgactccactatgttcaaaaccaattctttaaccctacagcatccaacactcaataccagcaagcattttaa

SEQ ID NO: 292436 - DNA, 281 bp, Zea mays
catgcccgcgcacctcatgcacgacggccgcgacatggacctgttcgagcacttcggcgtcgtggcccagcgcctcggcgtgtacaccgcccgggactacgcggacatcgtacagtgccttgtcaagcggaggaagctggagacactggaaagcgtgctactcagggagggccgaaatgtcaaagactaagtctgcagacttacacggaccatacggcaatccgaggagggatcttacgtctatcaccctatggactacaacaaccgggagacctattaca

SEQ ID NO: 292437 - DNA, 414 bp, Zea mays
cattagctttatctactccagagcgcagaagaacccgatcgacaccatgagggtgttgctcgttgccctcgctctcctggctctcgctgcgagcgccacctccacgcatacaagcggcggctgcggctgccagccaccgccgccggttcatctaccgccgccggtgcatctgccacctccggttcacctgccaactccggtgcatcttccaccggcggtccacctgccgccgccggccaactggcaacggcgggccatgggccggcgccgggtcatctggcggcggcaacatgccaataccctactcaacccgcccggcctcagcctcatccccaggcacacccatgcccgtgccaacagccgcatccaagcccgtgccagctgcaaggaacctgcagcgttggcagcaccccg

SEQ ID NO: 292438 - DNA, 403 bp, Zea mays
tagacccacgcgtccgcaactagcaacatagaaagcacaatagtgtaccaacaatggcagccaaaatattttgcctccttatgctccttggtctttctgcaagtgctgctacggcgaccattttcccacaatgctcacaagctcctatagcttcccttcttcccccgtacctctcaccagcggtgtcttcggtatgtgaaaacccaattcttcaaccctataggatccaacaagcaatcccaacttgcattctaactttattaaccttggttcctccaccattcataagccttataccagcagtacccttgggtgcattaatggccccaaacattaagggcccaccacctccaccacctgggctaaccaaccttggttgcttattttaagaaccagaagttct

SEQ ID NO: 292439 - DNA, 425 bp, Zea mays
gcacaatcacgtaccgcgcatggcaggcaacatatcatgactgctcatgctcctcgggcattgggcctgtgctgcctcggtgagcattctgaggcactgctgacaacctcctatagcttactttgttcattgatccctactaccaatgatgcacaccgtctgctaacattcagtcatcttaccgtagagtacccaacgggctatcgcaagaggcatcatcccgctatcacgctcggtgctgcaacaatactgagtcctctcacactaccatccttcggggcatctattgtcacacaacatatcggcacgacacctccaccaacgctggctagccaaccttgcgttctacctttcgcagcagcagttacccatgtggcacaattcggcacattacatcagggcactgcagctacatcagctcgggc

SEQ ID NO: 292440 - DNA, 427 bp, Zea mays
gccgatgtggaaaacgcagccattcgctatctcatcagtgcatcgactctacatatgacaagaggtccttgggagatcatcggtactcatatgctgaggaagaccttgtgcacgacatcgccactgatgggccgcacttaccagaagcatctacgtacctcatgcccttcaagctcaagtatccggagacgaagctggatatgaacaggaaaccctacaaggctggcggcgactctggctaacgcggcaacaagatcaacgaactaatcgagaagctgcactagaagcgcctacattgccttctacggctgacgatacgcatcggagcgatggatctgatattaccttgtcaggtttgtaatatcattagctgggtgtaccttcagctttgaaaccttacctgcgcttgggcgatcaagtcatgaaa

SEQ ID NO: 292441 - DNA, 456 bp, Zea mays
tccgcattccggattcgagccacgcgtcaggcgtatgaataagcgcattcagaagcacacctatcgaagcgcactagcaacgacctatcaacagtggcttccaagacattatccctccttgcgcttcttgccctttttgtgagtgcaacaaatgcgttcattattccacaatgctcacttgctccgagtgccattattccacagttcctccctccagttacttcaatgggcttcgaacacccagctgtgcaagcctataggctacaacaagcgcttgcggcgagcgtcttagaacaaccaattgcccaattacaacaacaatccttggcacatctaaccatacaaaccatcgcaacgcagcagcaacaagcactgagccacctagccgtggtgaaccctatcgcctacttgcaacaacagctgcttgcatccaacccacttgctttggcaaacgta

SEQ ID NO: 292442 - DNA, 157 bp, Zea mays
ccatggaatgacacccacggctgccaagatattagccctccttgcgcttcttgcccttttagtgagcgcaacaaatgcgtgcattacttcacagggttgactttctcctagtgccataatgccaccgtagcttacactatttgcttgaaactgttac

SEQ ID NO: 292443 - DNA, 192 bp, Zea mays
agggagaccaacaagcaacatagaatgtggaattcagcagcatcaatagaacaacggtgactgccaagatattatccctacttatgctccttgctctttctacatgcgttgctaacgcgacaattctacctcaatgctcacaagctgctatagcttcccttattcacccatacctttcaataattatagctt

SEQ ID NO: 292444 - DNA, 434 bp, Zea mays
ctgggtcttcagaccattagctctatctactccagagcgcagaagaacccgatcgacaccatgagggtgttggtcggtgccctcgctctcctggctctcgctgcgagcgccacctacacgcatacaagcggcggctgcggctgccagccaccggcgacggttcatctaccgccgccggcgcatctgccacctgcggctcacctgccacctccggtgcatctgccaccgccggtccacctgccgccgccggtccacctgccaccgtcggtccatgtgccgccgtcggttcatctgccgacgacaccatgccactaccctactcaaccgacccggcctcagcctcatccccagccacacccatgcccgtgccaacagccgcatgcaagcccgtgccagctgcaaggaacctgcggcgatggcagcaccccgatcct

SEQ ID NO: 292445 - DNA, 427 bp, Zea mays
acgcgttcataactagcaacatagaacgcacaatattgtaccaacaatggcagccaaaatggtttggctccttatgctccttggtctttctgcaagtgctgctacagccaccattataccgccatgctcgcatgctcctatagcttctcttctttccccgcacctcttaccagcggggcacttcagcatgtgaaaacccaattacttaaccactacaggatccaacaggcaatctcagatggcatcttaactttatgaccctcgatcatccaacaatcatcaaccctattacaacagatacctttggtgcatttattggcacaaaacatcagagcacaactactacaacaacttgtgctagcaaaccttgctgcctactctcaacaacagcagtttcttccattcaaccaactaagttcattgaact

SEQ ID NO: 292446 - DNA, 392 bp, Zea mays
cagaaacacacctagcgaagcgcactatcaacgacctaacaacaatggctaccaagatattgtgcctctttgcgcttcttgccctttttgtgagcgcaacagatgcgtgcattattccacaatgctcacttgctcctagtgccattattccacagttcctccctccagttacttcaatgggcttcgaacacccagctgtgcaagcctacaggctacaacaagcgcttgcggtgagcgtcttacaacaaccaattgcccaattacaacagctatccttggcacatctaaccatacaaaccatcgcaacgcaacagcaacagcaattgctaccagcactgagccaactagctgtggagaaccctgtcgactacttgcaacagcagctgcttgca

SEQ ID NO: 292447 - DNA, 447 bp, Zea mays
ccgaaccgagccacgcatgcgcagcaacatttacgcacatattgcaccaacaatggcacctaaaacattttgccgcgttatgctaattggcctctctgcaagtgctgctacagcgaccattttaccacaatgctcacaagctcctatagcttcccttcttcccccgtacctctcaccaaccagcgtcttcggtatgtgaaaacccaattcttcaaccctacaggatccaacaggcaatcgcagctggcatcttacctttatcacccttgttgcttcaacaatcatcagccctattacagcagatacctttggtgcatttattggcacataacatcatgacacaacaactacaacaacttgtgctagcaaaccttgctgcctactctcagcaacagcagtttcttccattcaaccaactagctgcattgaactctgcttcttatttgc

SEQ ID NO: 292448 - DNA, 386 bp, Zea mays
ttcgacctcaaccacccgtgcaactgacctatccatgtgaactaccgtctatctagcatctgtaaacccaatgagacagccctatatgatccaacatgcaatcgcagctagcatattacctgcatcacatcttgttcctacaacactcatgatccctattacagcagttacctttggcgcatttattgtaacaaaacatgatggcacaacaactacgacaacttgtgctagcaaaccttgctgcctactctcagcaacaacagtttattacattcaaccaactagctgcattgaactgtgcttcttattagcaacaccatcaactaccattcagccagctatctgctgcctaccctcagcaatctctttcatgcaaccaactgaca

SEQ ID NO: 292449 - DNA, 415 bp, Zea mays
ctcgacccaagcgacgcattcacagcagcatcaaaagcagactcatgtcataacggcggcagcatcaaacatcagcgggggctatcctacctggccgccctgtaagagctgctacagcgaccattattcaaccatgctgacaagctgctataggtttcctatttgcaacagccatatcaacaacggagtctgctgcatgtgaaataccaatagttaaaccctacatgatacaacatgccatcatagatcgcatctgaccattatcagcatcagcaattacacacttataagcagtatgacagcatgaaccttggtagcatctatagacacacacaatcagggcacatctactacaacactttgcgttacgaaagcttgctgttaatctgagaaacaggatgtcattcaatcaaac

SEQ ID NO: 292450 - DNA, 445 bp, Zea mays
gcgttgccatacaaccaactgggacagctatagatactatgaccgacgaattgtacatacatcgagcgagcgtacgcacctatctcgagcgcagctatgctgatctcgagcctctgattgccatgcttgacactgcagctgccggagacgatctacctatacactgcgtctaacgcatacaccgtcttacaactgtatgacgtggtagcattaaaccaactcgttgcgacacaccactcagcgacctaacatcaacccatgacagcaggtgccatcctgcagagtgctcatcagctatactccgataatgaaccagtgcgtataatgcctgaggcaccacagcaatccggaagtgaatccctacggctcgccacagtgccaggcgctgcagcagcagtgctgccaccagatcaggcaggtggagccgctgcagcggtaccaggcg

SEQ ID NO: 292451 - DNA, 290 bp, Zea mays
ctactaccatctagctcgctccaggcgtccaatgcaactacctacctacaagagcaggtgctgcaacaaataggaccagctctgactcaactagctgtagcaaaccctgatccctacttacaacagttgcttccattcaaccaactgtctgcagtcaaactctgctgcgtacctacaacagctacatcagttacttaatacattgccagtggctaacccattggtcgctaccttactgcagcagctgcaacaattgctgacatacaaccagctctctctgatgaaccatg

SEQ ID NO: 292452 - DNA, 411 bp, Zea mays
gcaaggaacaaaaactgtgccaaactacaatcaaaaactcaacaacaataagcacgggcagattttccatacttatgctccttgctctttctgcatctgttgctaacaccaccatttttcctcaatactcacaagctcctataactgcccttcttcccccataccttccatcaatgaccgctttagtatgtgacaacccaacccttcaaccctacaggatccaacaagcaatcgcaacaagcaacttacctttatcacacctgttctttcaacaatcgccagccctatctttggagcagtcattggtacaaaccatcaccgcagaacagatgcagcaactcgtgctaccaatgatcagccaaatagctctcgcaaacctttccccctactatgagcaacaacaatttcttc

SEQ ID NO: 292453 - DNA, 416 bp, Zea mays
ccacaagcagcatagaaagtggaatacagtggcaacaatagagcaacaatggcgggggcgatatggtccatcctgtatgctccttgctctttctgcatgtgttgataacgcgaccatgcttccttaatactcacaagctcctatagctgcccttcttcccccatacctgccatcaatgaccgcttcagtttgcgaaaacccatcccttcaaccctacaagctccaacatgcaatcgcaacaagcagcttatctttatcacccctgttctatcaacaatcgccagtcctatgtatggagcagtcattggtacaaaccatcagggcacaacagctgcaacaactggtgctaccagtgatcagtctagtagctatcgcaaacctttattcatactattagctacatcgatctcttccat

SEQ ID NO: 292454 - DNA, 402 bp, Zea mays
gtgcgagcattcagaaacacacgcagctaatctcactagcaacaacctagcaacaagggcggtaatatatcatacatccttgctcttcttgcgctaattgcgagcgcaacagatgcgtacattctaccacaatgctcactcgctcctatgtctattataccatatattatcccactagcatcttcaatgtccttacaacacacatctgcactagcctatacgctacaacatgcgattgtggcgagcgtcatacaacaactaatttcccaatagcaacatcaaatgttggcacatttaacactacaaaccatctgaacgcaacagcaatagcatggattaccatcactctaccaactagtcatcgtgaaccctgttgactacttgcaacatcagctgcttgca

SEQ ID NO: 292455 - DNA, 389 bp, Zea mays
actcgaaagccgcggctatggattccagccaggcagataagccactgactacgtatggcggcgtcaatcgaggagctcgtcgtcgaacacaagcagcatcccgcggagcccatggacgctggggcctcatagcgcgcctgctccaacatctccgtcctcttcagctgtctcggcatcgatatcaagttcgcggcgatggactacttcgtgaaggttgatgatctgacggaggcgatcaagtcaatttcaacattgccttctatggctgagcgacacattcacaccgacactgtcaagacaccaaggacccgtacatggcatctgcttaaagtgaagcgcgtgattgatctggctaaagtcctgtctgagcacattcttgtcacataggg

SEQ ID NO: 292456 - DNA, 288 bp, Zea mays
atcacattgatgcgctcgtgagtctgatcgtgattactgcatagggccaaggtgtggaggttgaatcgccagcagttgcttcatccccaactccagatgatgctgaatcacacgccttatgtgctgaagaggactacatctattctgttgacctattactttaggagaccgcttatgtctataacgctgcttcagagcgtcctacaactgccaatgctattgactctaatatcgtatctgtgtactcatctactgtactcgtactggatcaatgagacgattatactg

SEQ ID NO: 292457 - DNA, 358 bp, Zea mays
ccggaatggaatgctcgacccaagcgacgcggttcgatgaaaacgcactacgctagaagtctacctctcaataatgagacacatttaacccagggagagataacaactgttgcgctaatttacagacattacaacttctaacatacaaggagataactggaatcagccgtgctacatttgagacacagccacagagattgacgcactacctgcacgctggatctaacgctgtctccttattacaactgtaacaatcgctgccattcaaccaaagagctgtgacaaacctgagcaggatgtaccatcagcccattcattggtagagcccatgcttaggagtctatatcagatatagctg

SEQ ID NO: 292458 - DNA, 372 bp, Zea mays
tatcaacacacgctaccaacaatcaattaagctgctgcagcgaaccttgctgcgtacgtgcagcaacatctgttgcttccattcaatctactatctggcgtgaaccttgatatctacttgcaggcacaactgctactaccatataactaactcgactagagccctcatgccttcttactgctacaacagctgatgccatttcatctgcaaactgtggcacacattgacgcttacttgagacatcaacattcattgacctttcaccaacaagtagtgttaaacatttatgccttcatgcaacagctgcaattgctactattctacccactaaaatgtgacatacattgtaccactgcttacaacagctgccat

SEQ ID NO: 292459 - DNA, 421 bp, Zea mays
tcgctacaaacctatgcaacgcaactccaacaccagcacccgccgctgctaacagggagggctctatcctctgtgaacgccgccagatactggcatcggcagataccatgtaccgaaccaccggcagccacctacgttgcctcatacataatgcagcttctacgctagccagtacaaccgttgctaagcaaacctgacgtggtcagctcagctggctacttacaggaacatcaatcgaactcgctcgccttgatgttcgactccaaggcattagcattccctcacctgtaccagattgtgtacagccatataagacaaaggtcactactcttccaaatggcattaagatcgcctcggagacatcatcgagcccagcagcatctgtcggtctgtacattgactgcggttccatttacgaaac

SEQ ID NO: 292460 - DNA, 372 bp, Zea mays
cagctagcatcatataaagcacaatcttgtaccaacaatggctgccaaaatattttgcctccttatgctccttggtatttctgcaagtgctgctacggcgaccattttcccgcaatgctcacaagctcctatagcttctcttcttaccccgtacctatcaccagcagtgtgttcagcatgctaaaacccaattcgttaaccatacaggatccaacatgcaatcgcacctggcatactacctttatcaccctagttcctgcaacaatcatcagcccttatacagcagttcacctatggtgcatttattgtcacaatacatcatggcacaacaactacaacaacttgtgctagcaaacctagctgtctactctc

SEQ ID NO: 292461 - DNA, 465 bp, Zea mays
ccggatttgaattctcgactcaagccacccgttcgtgacaaggcctagcatacactgttgtctactcttaacaccaacatcaatttgcgttgaatcaactactctggacttgaacgtctgctaactatatttaacataacaccgactaccatacaaccagaaacctgctgcctacccccagcaattacttccattcaaccaactggcaacattgaactctactgcttatttacagcagcagcaactactaccattcagccagctagctgaagtaagccctgctaccttgttgatacaaccacagttgatgccgttctaccaacacgctgcgcctaacgctgtcaccatcttacaactgcaacaattgctgccattcaaccaactagctttgacaaacacagcagcgatctaccaacaacccatcattggtggtgccctctttgagatgtctcacgagttatagtt

SEQ ID NO: 292462 - DNA, 275 bp, Zea mays
gtgagccctgctaccttcttgatacaaccacagttgttgccgttctaccagcgggcggggcctaacgctgtcacggctgttacaactgcaacaattgctgccattcaaccaacttgctttgacaaacccagcagcgttctaccaacatcccatcattgttggtgcccttttttagattacttatgagtaatagtacaataatatagttgcttgtctgatgtatgaggctttccagaaatatgaaagtacatttgtagataatgctgaaataagga

SEQ ID NO: 292463 - DNA, 310 bp, Zea mays
gacacgacgcctgacatttagcgagtctcttgacgcaagtcgagcttccttcttgacacgtcaacagttgctgcctttgtacaagcagcttgctgctaaccccgcaaccgtcttacaactacaacaatgcttgcactctgctcaacttgctttgacaaacccatccgtctcataccaacaacacatcattggtggtgccctattttatatcgaatattagctgtaattcactattaaagctttcaggatgatgtatgcggccaaccagaaatacaaagctacattctcagattctaacgtgatattggtc

SEQ ID NO: 292464 - DNA, 408 bp, Zea mays
cgaactgttcaaccctacaggatccaataggctttcgcagcaggcatcttaccttaggacggttgttcctacaacatccgtctgccctatcacagtacgcaccttgggagcatttgatgggacaaaacattagggcacagctactacaacaacttgtgctagcaaaccttgctgcatactctgagcaacatcagttccttccattcaaccaactggctagcattgaactctgctgcttatttgcaacaacaatgaccattcagccagctagttgctgtctaccaccagcaattgcttccattcaacctactagcagcattgaactctgctgctcatttacagctgcaacaactactaccattcagcctgctagctgatgtgagccctgctgacttcttgacacaacaa

SEQ ID NO: 292465 - DNA, 383 bp, Zea mays
cggacgcgtgggtgagaccagcaggcatcatagagagtagaatccattagcggcaagggatcatcaatggcgaccaagatattgcccctacttatgctccttgctctttctacatgtgttgctaacgcgacaattttccctcaatgctcacaagctcctatagcttcccttctttccgcataccttccatcaattatagcttcagtatgtgaaaacccagctgttcaaccatataggctataacaagcaatcgtagcacgctacatacctctatcgcccttgttgtctcaacagtcaccagcgctatctttggtgcagtcattgctactaaccatcatggcacaacagctgcaggatctcgagctacctgtgatcaaccaagt

SEQ ID NO: 292466 - DNA, 404 bp, Zea mays
attttgagcattcagaaacacaccaagcgaagcgcactagcaacaacctaacgacagtggctaccaagatattatccgtacttgcgcttcttgcgctttttgcgagcgcaacacatgcgtccattattccacaatgctcacttgctcctagttccattattccacagttactaccaccagttacttcaatggccttagaacacccagctgtgcaagcctataggctacaacatgcgattgccgccagcgtcttacaacaaccaattgcccaattgcaacaacaatccttggcacatctaacaatacagaccattgtaacgcatcagcaacaacaggtcctaccagcactgagccacctagccatggtgaaccctgtcgcctacttgcaacagcagctgcttgca

SEQ ID NO: 292467 - DNA, 426 bp, Zea mays
catacaaagcacaataatataccaacaattgcttccaaaacattctgcttccttatgcgactggatctttctgcaagtgtatgctacctgatccatgtacatacattgctcacacgctactatagcttccattcttacaccatacctttgaccacctgtgtcttcaatgcgtgaaaccccaattgagcaaccttacaggatccaacactctataacaacaggcattttaccatgatcacccttgttcctacaacaaccgatagccctattacatcaaacacttctgatccatatgtttgcacaaaacatcatggcacaacatctacaacaacatgctctagcaaatcttgctacatactctcatcaacatcattctcgtgcatgcaactaactactttcattgcactcagctgcttattttcaaca

SEQ ID NO: 292468 - DNA, 313 bp, Zea mays
gatctacccacgcgtacgggctgaccagatcgtctcttgtttgaatgagtactttgacggcaaattgagtgcgtggacgatagttgatcctattcctgacgtcaacaatgagcctgttaaggtgcaatggctgctgaccacttccactatttcgtgtctcaaatctggctaagatgtccttactgtactctattacccgttacgcgaacacttcacgaagctcatgccactgttggacgaatcaaccaccactctaccaaacgacctatagactcagccttccttaatggacccaaatgtccatggacattcc

SEQ ID NO: 292469 - DNA, 399 bp, Zea mays
catagaaagcacaatagtgtaccaacaatggctgccaaaatattttgcttccttatggtccgggatctttatgcaagtgttgctaccgcaaccattttcccacaatgctcacaagctcctatagcttcccttctttcctcatacctctcaccatccgcgtcttcaatgtgtgataccaccattctccaaccctacacgatccaatatgcaatcacaacatgcatattaccattatcacccttgatcctgcaacatccgtcaatcctattacagtaactacctctgctccatttatgtggcacaaaacatcaggtgcacaacatctacaacaacttgtgctagcacacctagctgcatactcataccaacatctacatcttccattcaaccaactggctg

SEQ ID NO: 292470 - DNA, 385 bp, Zea mays
cttgctcctagtgccattattcgacagttcctaccaacagttacttaaatggggttggtacacctacatatgcaggccaacatgcaccatcaagcgctcgctgctagcgtcttacatcaaccaattgcccaatctcatcatcaatcgcttccacatctaacatatacaagccatcacaacgcagcagcatcaacaattcgcactagcactgaaccacctagccatagtgaaccctgaacgatacttgcaagagcatctgcttgcattcgatccacttgctgtggccaacgtagttgcataaccacacagcaacatctacttacaacagtgcatgccaacgatcagtctactagccatggtgaaccatgtctactacgtacaacaa

SEQ ID NO: 292471 - DNA, 375 bp, Zea mays
caccaagcgaagcacattagcatcagcctagctacaatggctaccacgatattatgcgtgcttgcgcttcttgcgctttttgcgagcgcaacaaatgcgttcattattccacaatgctcacttgctccaagttccattattacacagattctcccaccagttacttcaatgggcttcgaacacccagctgtgcaagcctataggctacaacaagcaattgctgcgagcgtattacaacaaccaattttccaggtgcaacaacaatccttggcacatgtaacaatacaaaccatcgcatcgcatcagcatcaacaattcctaccagcactgagccacctagccatggtgaaccctgccggctacttgcaacagcag

SEQ ID NO: 292472 - DNA, 280 bp, Zea mays
gcgtacaaatgaacacgaaccttggtagaacgaagctgaagcatttcgtggtgaggctagtatggcaaacgcgcacaggatcctggccctaaggctgctgttagcgctgctgtgcgctgccgcacggaaccggtcgagcgcagaactgccgatgccagcctaacttctgctgcagcacgttcggctactgcggcacgaccgacgactactgctgctgactggtgccagtcgggcccgtgctgctcgggcggcggaggaggccgctgcggtggctgatgca

SEQ ID NO: 292473 - DNA, 415 bp, Zea mays
ggcaaacaggcccctggtcatctccggtttcctcgtttcctttcctcttcgtcccagggacgtcagtacgtcacccatcggcacccgcgccgctgacccccgccaccgtgtcacgatcccgtccccgctcgcacgcctagcgcgatggcgcacccgatgtacggctccggaccgctccgatccaggaacgcggcgagctcggacgaaatccagctgcggatcgacccggtgcacggggacctcgacgaggagatcgacgggctgcactccagggtccgcatgctcaaaggggtggcccaggagataaattctgaagccaagttccagaatgattttcttcatgaactgcaaatgacccttgcaaaagctcaggctggagtgaagaacatcatgcggagatggaacaagagcatca

SEQ ID NO: 292474 - DNA, 370 bp, Zea mays
gattacttctatcctctaggaaccaggcccaccgctggctgccaataggttgattgtcgcttactactcttaggcaagctccactagtgcgacccatattacaggcacttgcaccaatcagccattgggttccatgaaccctgcatgcaatactgatgatgcacacgtgcttgcagcttgatggcctgttcacgcctgatgctgcacaactgacgccttaccggttagagatgccagcgatgatgccacagatgatgactcctaacatgatgtaccatagatatgccgatcatgatgtgccatagtcttgcccacatgatgtcacaactgatgatgcccactgtcactggactccgctcgcaatcatgct

SEQ ID NO: 292475 - DNA, 243 bp, Zea mays
atggacgtcgccaaggccatcgagaaggtgggcacccgcaacggctccacctccaaggtggtcaaggtcggtgactgcggacagctctcctagatctctctgatctggtctgttcggccgccctccctccgtcatcgtcgactccccctgcgtccgttcctttggatctgaataagacggtggtgatctgagtggtggtcttaacaaaaacagcttgatgggctgttcatccctaaaactaaa

SEQ ID NO: 292476 - DNA, 336 bp, Zea mays
tgaaggtgctgatcgcagcccttgctctcctggcgctcgctagcagcgccggctggcaatcaagcgtgcggttgtggctgccacacaccaccgtcccatctaccgtctgcgcactatatgccgccatccggtctatctgtcgccgcggcaccatcacgcaccatggcaataccccactcaaccaccgcagctaagcccgtgccgatagttcagatcctgcggtgtagcaagcagaccgcagccacgatcctgggccagagcgtccaggtcctgaggcacaacagcaaccctagctgcgacgccctacggctcgccacaaagccagggcgctgcagc

SEQ ID NO: 292477 - DNA, 402 bp, Zea mays
cggtttcccgctcgacccacgctccgacgcagagctgccatgaagcctcacattggcatgctatatatgttgcctaggtatgctcattgaactttctgcaagtgctgctactgcgaccattttcctccaacgctcgcaagctcctataactctcattaatgccccgtacctctcaccaacactagtcttaaatctgtgaaaacccacttcttgaaccatacatgatccatcacgcacacgcagacagcattttacttttaccacccttattcatacaacaatcatctgccctattacaacaaccacttctatatcatttattggaacaatacatcaaggctcaacatctacaacgactcctgcttgcaaaacgtgctgacgactctcatcaacagctatcac

SEQ ID NO: 292478 - DNA, 413 bp, Zea mays
gttccggacccggggcagtcccatttcttgaatggagcttgcaagttttaacctattatgtggggtgggccttggttgtggaggatcccaaacctcctaaactacgcatggccaaactccagaagcggcatgactgttcagcgagaacaagcgggagtacaaccgctcaggacgggagatcgtggagcagagctggacagccgactagtgcataacgatgctcgtcgtgcccgatctgggcacaatatgaaagcgtgaaatgaagacctcacccactccttgagtttctgggtcgccaggcttgtcgaagcattgaagaaccacagtgattgcattgtagtctgacggcaccaatgtgaccccattgagagcacccgctgctcatgggagcagctggcgaaatggaacgggtg

SEQ ID NO: 292479 - DNA, 300 bp, Zea mays
cagcctagcaattagctcatcgactccagattggagaactcgacaccatgaaggtgctgatcgttgcccttgctctcctggcgctcgctgcgagcgccgcctccagtacaagcggcggctgtggctgccagacaccaccgtatcatctaccgcctgcgttctatatgccgcctccgttctatctgccgccgcagcagcagccgcagccatggcaataccccactcaaccaccgcagctaagcccgtgccagcagttcggatcctgcggcgtcggcagcgtcggcagaccgttcctgggcc

SEQ ID NO: 292480 - DNA, 226 bp, Zea mays
tcgggtaaaaaggtcagaccggatctttttcagggggctaccacattacttcactgtgggcggacagccgcaattggttgagtcctttagacctatgaagggatttcatgttaggacagaatcacaaactggcaactctaaaggatatgccttatgggtgtaccaagatcttaatgttaccgacattgccagcgctgctattaatggcatgcctatgggagacaag

SEQ ID NO: 292481 - DNA, 304 bp, Zea mays
agataaacccgactcaacaccatgatttctactagaaccctcctcaggtgggttctctgccagcgccacctccataaaacaacgaggctgcagctgccaccaacccatcttcactaccagcatcgccattaccacctaccttcacctccactcgtacatcaccacccatccactcctcaccggacacctgcaccgacgtccatgtcccgcagccgcttcatctgccgctcccaccatgccactaccctactcaaccgcccacaactcagcctcatgcccatccacacccatacccgcgccaaca

SEQ ID NO: 292482 - DNA, 166 bp, Zea mays
tcggacctaccttcctgcgacaaccggtgctgcaacagaatggacccactttgaaccaggttggtttggctaaccctgctggctacttgcaacagatgcgtccattccaccaaatgactgggtcaaagcttgctgggtacctacgacagcgaccaccggtaattaa

SEQ ID NO: 292483 - DNA, 393 bp, Zea mays
gaaagcacaacagtgtaccaccatggtgcaccaaaatatttggcctcctaatgctcctggggctttctgcaagtcctgttacggcaaccattttcccacaaggctcacaacctgcaatagctgcccttcttccacagtacctgtcaccagcggtgtcttgggtatgtgaaaacccaattcttcaaccctatgcgatccaacaggcaatcgcagctggcatcttacctttatcacccttgttcctgcaacaatcatcagccctattacagcagttacctttggtgcatttattggcacaaaacatcagggcacaacatctacaacaacttgtgctagcaaaccttgctgcctactctcagcaacaacagtttcttccattcaaccaactgacag

SEQ ID NO: 292484 - DNA, 223 bp, Zea mays
caatcatcaaccctaatacatcaagtacctttggggcatttaatggcaccaaacaggctgggacaacaacctccacaacttgggctagcaaaacttggttgctacttttagaacaagcggttctttcatttcaaccactaactgcattggactctggttcttaattgcaacaacaacaactaccaattcagcagctacctgctgcctacccccagcaatttct

SEQ ID NO: 292485 - DNA, 350 bp, Zea mays
  unsure (1)..(350): unsure at all n locations
gtctgtggcatgatacaagcaatcacttgtttcaacatacctttatcgaccttggtgaccgaancatcaccagccctatctttggtgcagccattggtacataccatcacgtcacaacagctgcagcatctcgtgctacctgtgatcaaccaagtagctctggcaaacctttctcactactatcagcaacaacaatttcttccattcaaccaactgtctacactgaaccctgctgcttatttgcagcaacaactattaccatttagccagctagctactgcctactttcagcaacaacaacttcttacatttaaccaattggccgtactgaaccccgctgcttatttgca

SEQ ID NO: 292486 - DNA, 408 bp, Zea mays
acccagcctacgcgtccgatagaaagcacaatagtgtaccaacaatggcagccaaaatattttgcctccttatgctccttggtctttctgcaagtgctgctacggcgaccattttcccgcaatgctcgcaagctcctatagcttcccttcttcccccgtacctctcaccagcggtgtcttcggtatgtgaaaacccaattcttgaaccctacaggatccaacaggcaatcgcagctggcatcttacctttatcacccttgttactccaacaatcatcagccctattacaacagatacctatgctgcatccatcggcacaatacatgcccgtacaagctgtacggaacctggtgcgatcgcagcaccctgatccctgtccagtgcgtcgagttcctgaggcatcaatgc

SEQ ID NO: 292487 - DNA, 430 bp, Zea mays
  unsure (1)..(430): unsure at all n locations
ggcgagctcaagtgattaacagaacatatctcccactacacgcatacaagcggcggctgcggctgccagccaccgccgccggttcatctaccgcgcctgaggtggtgggcatgtccatcaaggaggcaagagagatcattcttaaagacatgcccaacgctaacattcaagttctaccggttggctcgcttgtgacccaagactttcgccctgatcgtgttcgcatcttcgttgatattgttgcccagactccaacagttggctgacaaggatatgccttatctataggccaaataaacaaagcctacttttatgtatcatggctaataaatcctacatctcttggntatccttgatcggtttagcttattagctatatcgccatcaaaggggcccccaagaaattacctgtatgtctatcataaaaatc

SEQ ID NO: 292488 - DNA, 423 bp, Zea mays
  unsure (1)..(423): unsure at all n locations
cctnccggcctctggcttttgcgccttcattttcggctttggtccttgcaaggtcaattttggcttccaacattggttaagaggaattccaacttaaccatgggggtaatggtcaatgtcaactttgccaagtcgaccacaacaggacacctaatctacaaccttgaaggcattgacaagcgtgtgatcaagaggttcaagaaggaggctgctgaaatgaacaagcggtccttcaagtacgcgtgggtgctcgacaagctcaaggctgagcgtgagagaggtatcaccattgatatcgctctgtggaagtttgagaccaccaagtactactgcacggtcattgatgcccctggacaccgtgacttcatcaagaacatgatcactggtacctnccaggctgactgtgctgtccttatcattgac

SEQ ID NO: 292489 - DNA, 410 bp, Zea mays
ggagaagcacggtacctgcgcagccgacgtcttggacgagcacgggtacttccaggcggcgctgcgcctgcgggaccagctgggagtgctaggcgcgctcacctccgccggcgtcaagcccgacggcgggtactacacgctgagccagatcaagggcgccatgcgtcagggcaccggcttcgagccctacgcggagtgcaaccgcgacgaggccggcaacagccagctctaccagctctacttctgcgtcgacgccgccggcgacagcttcgtcgactgccccgtgctgctcagcggcaggcccttgcattctatgcaagaggataatggaatgctcattccccattcttcatgttgtctggcacataagcggagggcgatcggtgttccatacttaacaatcttcggct

SEQ ID NO: 292490 - DNA, 429 bp, Zea mays
  unsure (1)..(429): unsure at all n locations
cttcgtactcgcctacctccgcggctcaaacctttcccccttctcccaattccctgcgggggccgccgctccatcccgtacgacgacaccatgagggagtgcatttcgatccacatcggccaggccggtatccaggtcggaaacgcgtgctgggagctgtactgccttgagcatggcattcaggctgacggtcagatgcccggtgacaagaccattgggggaggtgatgatgctttcaacaccttcttcagtgagactggtgctgggaagcacgtgccccgtgctgtttttgttgaccttgaacccactgtcatcgatgaggtgaggactggcacctaccgtcagctcttccaccctgagcagctcatcagtgggaaggaggatgccgncaacaactttgcccgtggtcactacaccattggcaaggag

SEQ ID NO: 292491 - DNA, 390 bp, Zea mays
gtggtcatttagactttgtcattggaaaagatggtgcaaaggtatgcactactggggcttgacttcttttatatgaaagtcttcttctggtattgcaaaatataagttaatcactctattaagtagtaagtttattttcctttatctaaaaaagaagtaatttattctaagatggctgtggtgttatttatgcttgatcatggataaaggactcttttgcttaagcaacatcctagttttaaattaaccactgggaccttgaataatggtccctacgataactttagtaagtgatagatgataaagagatatttatcagtttaacggagttgtgccaatcggtgaaggatattaaagtgtacttaatgtatatctcaagttcctgtatca

SEQ ID NO: 292492 - DNA, 404 bp, Zea mays
ggacgtcagcctagcaattagctcatcgactccagattggagaactcgacaccatggaggtgctgatcgttgcccttgctctcctggcgctcgctgcgagcgccgcctccagtacaagcggcggctgtggctgccagacaccaccgtttcatctaccgcctccgttctatatgccgcctccgttctatctgccgccgcagcagcagccgcagccatggcaataccccactcaaccaccgcagctaagcccgtgccagcagttcggatcctgcggcgtcggcagcgtcggcagcccgttcctgggccagtgcgtcgagttcctgaggcaccagtgcagcccggcggcgacgccctacggctcgccacagtgccaggcgctgcagcagcagtgctgccaccagatc

SEQ ID NO: 292493 - DNA, 444 bp, Zea mays
tccgcccaagccttccgaggaaggcaccttgaaaggagaattcatttaccaccattgaaccaccattgccagccaggatattttccttcctaatgctcctggctctttctacaggtgttgcttaacgcgacaattttccttcaatgctcacaagctcctatagcttcccttcttcccccataccttccatcaattatagcttcagtatgtgaaaacccagctcttcaaccatataggcttcaacaagcaatcgcagcaagcaacatacctttatcgcccttgttgtttcaacaatcaccagccctatctttggtgcagtcattggtacaaaccatcagggcacaacagctgcagcaactcgtgctacctgtgatcaaccaagtagctctggcaaacctttctccctactctcagcaacaacaatttcttccattcaaccaactg

SEQ ID NO: 292494 - DNA, 452 bp, Zea mays
gtccggattccgggctagatgtggcgaccccggtcgcttacttgcacctgccggtgctggcttccaacccatttgctctgccaaaggtggctgcataccaacagcatcaacaattgcaacagtttatgccagagctcagactactagccatggtgaaccttgccgactacctacaacagcgacaactgctgtcatctagccctctcgtcgtggctaatgcacatacttacctgcgacatcaattgctgcagcagatagcaccagctctgactcagctagctgcggcaaacgctgctgcctactatgcacagctgcttacattcaaccaactgactgtttcgaactctgctgcgtacgtacaacagcgactacaggtacttaatccagtatcagtgcctaacccattgttcactgccttactacagctacaacaattgctaccatacagtcag

SEQ ID NO: 292495 - DNA, 417 bp, Zea mays
gaactctgcttctaattggcaccacctccacctaccattaacccagctacctgttgggtacccccaacaatttcttccattcaaccaactggcagcattgaactctcctgcttatttacagcagcaacaactactaccattcagccagctagctggtgtgagccctgctaccttcttgacacaaccacagttgttgccgttctaccagcacgctgcgcctaacgctggcaccctcttacaactgcaacaattgctgccattcaaccaacttgctttgacaaacctagcagtgttctaccaacaacccatcattggtggtgccctcttttagatttcttatgagttatagttcaataataaagttttttgtctgatgtttgtggcttcccagaaataagaaagtacatttctagattc

SEQ ID NO: 292496 - DNA, 409 bp, Zea mays
  unsure (1)..(409): unsure at all n locations
agaccattagcatttatctaactccagagtcgcagaagaactccgatcgacgaccatgaggggtgtctgctcgttgcacctcgctctcctggcatctcgctgctgagcgtccacctccacgcatacatagcgtgcggctgcggcttgccagtccaccgtcgtccggttcatcgtaccgtcgtcggtgcatctgccaccgtncggttcacctgccacctccggtgcatctcccaccgccggtccacctgccgccgccggtacacctgccaccgccggtccatgtgccgtcgtcggttcatctgccgccgccaccatgccactaccctactcaaccgtcccggcctcagcctcatccacagccacacccatgcccgtgccaacagccgcatccaagcccgtgccagctgca

SEQ ID NO: 292497 - DNA, 371 bp, Zea mays
atagaaagcacaatagtgtaccaacaatggcagccaaaatattttgcttccttatgctccttggtctttctgcaagtgttgctaccgcaaccattttcccacaatgctcacaagctcctatagcttcccttcttcccccatacctctcaccagcggtgtcttcaatgtgtgaaaccccaattgttcaaccctacaggatccaacaggcaatcgcaacaagcatcttaccattatcacccttgttactgcaacaaccgtcagccctattacaacaggtacctttggtccattcggtggcacaaaacattaaggcaccacaactaccacaacctgggcttgcaaaccttgctggatacttttaacaacattaa

SEQ ID NO: 292498 - DNA, 344 bp, Zea mays
gacagacaaagatttgtgaaggtgatccgcgctgacaagagatggataagatggacgaggcggcggcggcatcgctgtgcttagcggccctgatggccgtggtcgtctggcaaggccaggtcgagctgcagaggctcagggacctgcagtgctgtcaggaggtccaagagagcccgctcgacgcgtgccgccaggtgctcgaccggcagctaaccggcggcggctgccgacgacgcgttggcccgttacggtagcgcaccgttctacggatgctgtgctgccagcagctacaggacgtgagcctcgaatgccactgagacgtcatccggagcatggtcaaggga

SEQ ID NO: 292499 - DNA, 307 bp, Zea mays
tcttttagacgggcttccattagaatatatctatcagcaatgaccttcaatatattttccatccttatgctccttgctctttctgcatgtgttgctaacgcgaccatttttcctcaatactcacaagctcctatagctgccctttttgacccataccttccatcaatgaccgatctagtatgtgaaaaccgcaccctttaaccctacaggatccatcaagcaactctaacatgcaacttacctttatcacacctgttatttcaacaatcgccagtcctatctttggtgcaatcatctgtacaaacca

SEQ ID NO: 292500 - DNA, 447 bp, Zea mays
cttacctactcgccccataccttacatcaatgatagcttcattatgagaaaacccagctcttcagcgcctaggggctacaacaagcaatctcattatgcaacatacctttatcacccttgttgtttcaacaatcgccagccctatatttggtgcagccattgttacttaccatcatggcacataagttgcatcaactatagctacctgtgatcaaccaagtagctttggcaaacctttcttcctactctcagcaacaacaatctatttcattcaaccaactgtctacactgaaccctgctgattattagcagcaacaactattaccattcagacagctagctactgcctactctcagcaacaacaacttctttcatttaaccaattggcctcactgaaccccgctgcttatttgcagcagcacatactactaccatttagccagcta

SEQ ID NO: 292501 - DNA, 429 bp, Zea mays
aaggcccattatggtcccaccatggccacctaaaaattttggcctcctaatgctcctgggtcttcctgcaagtgctgctacggctaccattttccaacaatggctcacaagctcctatagcttcccttcttcccccgtacctctcaccaacggtgtcttcggtatgtgaaaacccaattcttcaaccctacaggatccaacaggcaatcgcagctggcatcttacctttatcacccttgttcctccaacaatcatcagccctattacagcagttacctttggtgcatttattggcacaaaacatcagggcacaacaactacaacaacttgtgctagcaaaccttgctgcctactctcagcaacagcagtttcttccattcaaccaactagctgcattgaactctgcttcttatctgcaacaacaacaac

SEQ ID NO: 292502 - DNA, 346 bp, Zea mays
ctttctacaagcagattgcggctaactacgcaccccttttacaacttcaacgatgggagccctgtgatcatcttgctttgacatacccaacggcctgctactaacaacactttattggcggagcgctcacttaaattgctcattagtgggactgcaatgataaaggaatacggatgaagtctgtggtacacgctacatgagaacatacatttacagatcttaatgtcgatagcattgaccgtacaacaaccatatgccctattgcaacaaccatgctcaatgaatgtatatcttcaaagaatcgcagcacatcaactaccatcacagttgcttccaacaatcaatc

SEQ ID NO: 292503 - DNA, 393 bp, Zea mays
ggaatccagctcgagcacgcgtacggagttacctttggtgcatttattggcacaaaacatcagggcacaacaacgacaagaacttgtgctagcaaaccttgctgcctactctgagcaacagcagagtgcttacattcaaccaactacctgcattgaactctgctgcttatgtgcaacatcaacaactaccattcagacagctatctgctgcctacccccagcagtgacttgcattcgaccaactgacagcattgaactctactgcttatttacagcagcaacgactactaccattcagccagctagctgaagtgagccctgctaccttgtagacacagccacacaagctgtcgaactaccagcacgctgcgcctaacgctgacactatattac

SEQ ID NO: 292504 - DNA, 401 bp, Zea mays
gcacgcaggcttttccggcaacggttcgactttccaatagctggcgttcttcaggcgtacgtgtcaccatcggtgtcttcgctatgtgaaaacccaattcttcaaccctacacgatccaacaggcaatctcatctgtcattttacctttatcacccttgttcctccaacaatcatcagccctattacagcagcaacctttggtgcatttattgtcacataacataatagcacatcaactacaacatcttgagctagcatacctttatacctactctcagcaacatcaattttttacatttaaccaactatctgcatataactcttgttcttatttgcaacaactactactaccattcaatcagcttcctgttgcctacactcaacaattttttccattaac

SEQ ID NO: 292505 - DNA, 434 bp, Zea mays
cggacgcgtgggttttttttttttttttttttttttttttttaaacggtctgctgtatgagataactttattgacacctgccacatatttcatagatgtcttgtcggagaaaacaaaaacacaactgatccatcaaacacaaaattcttcaatagtgcacattccgcaccgatagcaaatcagagtcatccaccatcaaggcattattaaccaatcacgctaagatttattgcgactggccttctcctcgataccagactgcgaaaatctcttcctcaggacctcaaggacttgttccatctttacatccttgactctgagcagcaccataacggggtacagcagatcagccatctccgaagctgcacgagattggtcctcgttctcaagcagcgtttgaattagctcaccagcttcttcacgtattttcgagc

SEQ ID NO: 292506 - DNA, 379 bp, Zea mays
gaactctcctgcttatttacagcagcaacaactactaccattcagccagctagctggtgtgagccctgctaccttcttgacacaaccacagttgttgccgttctaccagcacgctgcgcctaacgctggcaccctcttacaactgcaacaattgctgccattcaaccaacttgctttgacaaacctagcagtgttctaccaacaacccatcattggtggtgccctcttttagatttcttatgagttatagttcaataataaagttttttgtctgaaaaaaaagccataccctactaaaccgacccggactaaaactcatacacagacacacccatgcttatgccaacaaaaaaactccaacaaaaaaaaaagggggggc

SEQ ID NO: 292507 - DNA, 360 bp, Zea mays
aacaggcaacatagaaagttgaatccagcagcaactgcagagcaacagtggcgaccaagatatgcttcctccttatgctcgttgctcttgctgcatgtgctgctgacaccacaattgcgcatcgatgctaacatgctattatagctctccttcttcccgcatacctaccatcaatgatagcttcaggatgtgaaaacccagttcttcagtactatatgctccaacaagccatcgctgccagcatcataccattatcaccgttggtgcttcaacaatcggcagtactatattaggtgccgtcattgctacaaacgatccaggcacagcagctgcagcaactacagctacctgtgatcaacc

SEQ ID NO: 292508 - DNA, 391 bp, Zea mays
  unsure (1)..(391): unsure at all n locations
ctcccgaatcaccaaaccggcattccgtttaagagggatcgtcgaccagaccagcttgaagatggtcatcgttctcgtcgtgtgcctggctctgtcagctgccagcgcctctgcaatgcagatgccctgcccctgcgcggtgctgcagggcttgtacggcgctggcgccggcctgacgacgatgatgggcgccggcgggctgtacccctacgcggagtacctgaggcagccgcagtgcagcccgctggcggcggcgccctactacgcncggtgtgggcagtcgagcgccatgttccagccgctccggcaacagtgctgccagcagcagatgaggatgatggacgtgcattccgtcgcgcatcaactgcagatgatgatgcagcttgagcgt

SEQ ID NO: 292509 - DNA, 419 bp, Zea mays
tcgcaggaagccacataaaaaggtgaatccattatccaccattgaaccaccatggccacccagagtttttccttcctaagcctcctggttctttctacatgggtgctaacgcgccatttttccctcaatgctcacaagctcctatagcttcccttcttcccccataccttccatcaattatagcttcagtatgtgaaaacccagctcttcaaccatataggcttcaacaagcaatcgcagcaagcaacatacctttatcgcccttgttgtttcaacaatcaccagccctatctttggtgcagtcattggtacaaaccatcagggcacaacagctgcagcaactcgtgctacctgtgatcaaccaagtagctctggcaaacctttctccctactctcagcaacaacaatttcttccattc

SEQ ID NO: 292510 - DNA, 261 bp, Zea mays
agtctgagcatcgaaactcgctcccagcgacgcgcactagtgacgaactagctgcaatggctaagaagactttagctgttgaagcgcgtcttgtacttacagcgagtgcaatataggcggttattagtgcacaatgctcacacgctcctagtgccattattgcagaggtacttcgaaccggtacttcaatgggctgctgacacctagctgggcgagtcaatatgccacaacctgcgcttgcagcgagcgtcttacaacaac

SEQ ID NO: 292511 - DNA, 428 bp, Zea mays
tcgcaggccacttaaaaggtagaatccattttcaccaatatagcaccaatggcgaccaaggtatgttccctccttatgctccttgctctttctacatgtgttgctaacgcgacaattttccctcaatgctcacaagctcctatagctttccttcttcccccataccttccatcaattatagcttcagtatgtgaaaacccagctcttcaaccatataggcttcaacaagcaatcgcagcaagcaacatacctttatcgcccttgctgtttcaacaatcaccagccctatctttggtgcagtcattggtacaaaccatcagggcacaacatctgcagcaactcgtgcttcctgtgatcaaccaaattgctctagcaataccttttccctactcttagcaacaacaatttctttcattcaaccaactgtc

SEQ ID NO: 292512 - DNA, 370 bp, Zea mays
tcggaacaattaaggcattgcaaaaggccgtgaagccttccttccccaactccaagaagggctggcccccttgcttcaacgccgccaagacatggatggcgattcctgctccaaagcgaggagagatcgttaggcaaatcggtgatgcactgagagcaaagctccatcaccttggcaggcttgtgtcacttgagatggggaaaattcttcctgaagggatcggtgaggttcaggaaatcatcgacatgtgtgattatgctgtggggctaagtcgccaactaaatggatccattataccatctgaacgaccaaaccatatgatgatggaagtgtggaatccccttggagttgtgggtggtataacggcatt

SEQ ID NO: 292513 - DNA, 322 bp, Zea mays
cttgcgaccgtccctcgaccgtgtcgcgttgcattgtacgatccaaagctctgtatgctagcaggtcgcagccatggcgaagaactacccgaccgtgagcgcctagtacagcgaggctgtggacaaggccaggcgcatgctccgagccctcatagccgagaagagctgcgccccgctcatgctccgactcgcgtggcactccgcggggacgttcgacgtgtaagcgaggaccggcggtgcattcggtacgatgaatgatcagacggaattggctcacggcgctaacgcggagctggacatcgaggtgcgtgtgctcgagccc

SEQ ID NO: 292514 - DNA, 377 bp, Zea mays
gagacacagaaagtgaagagcactatctgcgaactgacaccaatgactaccaagatgttaatgctgcttgcactgattgcactatgtgtgagcgcaacaaatgcgctcattattgcacaatgctcacttgctactagtgtcattatatcacagattgctgcaccagttacttcgatgggctacgaacacctagatgtgcaggccaacatgcagcaacgagcgattgcggcgagcgtgttacaacaactgatagtgcaattgcaacaagaattcttgccgcatctaacaatacaagccatgacaacgcaacagatcagcagttgctaccagcactgatccagctagccatggtgaaccctgtctgctacttgcaagag

SEQ ID NO: 292515 - DNA, 396 bp, Zea mays
gacaaccgtagccctattacagcagtacctttgggcatttgttggcacagagcatcaaggcacatcaactacaacaacttgtgctaggaaaccttgctgcctactctcagcaacagcagtttcttccattcaaccaactggctgcattgaactctgctgcttatttgcaacaacaactaccattcagtcagctagctgctgcctacccccagcaattgcttccattcaaccaactggcagcattgaactctgctgcttatttacaacagcaacagctaccaccattcagccagctagctgatgtgagcccttgtgccttcttgacacaacaacagctgttgccgctctacctgcacgctgcgcctaacgctggcaccctgttacaactgcaacaat

SEQ ID NO: 292516 - DNA, 354 bp, Zea mays
gcaggctgctttaaccgcacacggtactcatgcgctgagacatgcaaaactccgtgacacgtggtcttactcgattctatagcggagaccagcgttcacccggtgtctgcgggacgattcacacaagtacagtaccaatgcttctgatagtcgcctacgactaagagcacacagataaggaggagcgtgatgcacttattactgatcgggacattctgatcacgcttcactctatataacatggcctgaacatgatgctggaaaacacccgcgttgtcgaccaggacaagtatccccacatgctgtcagtgcggaactgcttcatccggggctcggtggtgcagtacgtgctgc

SEQ ID NO: 292517 - DNA, 426 bp, Zea mays
agattgcccaattgcaacatcaatccttggcacatctaaccctacaaacgattgcaacgcaacaacaacaacaacaacagtttctgccatcactgagccatctagtcgtggtgaaccctgtcacctacttgcaacagtagctgcttgcatccaacccacttgctctggcgaacgtatctgcataccagcaacaacatcagctgtaacagcttatgccagtgcttagtcaactagccatggtgaaccctgctcgtgacctacaactactttcatatagcccgctatgtggtgcgcaatgcacatacgtacctacaacaacagttgatgcaacaaattgtaccagctctgaatcagctagctgtggctaacgctgctgcctacttacaacagttgcattcattgaaccaactggctgtggcaaactct

SEQ ID NO: 292518 - DNA, 379 bp, Zea mays
  unsure (1)..(379): unsure at all n locations
caaaagttgttctttgacctgacgaatgcggaacgctgcatctgactctaatggaatgcgtatgtgatgcaggtggagtcggaggacgaggcggaggcggcgtgcgcggtcgtgctgacgccgncgctgtcgctggagggcggccttgcggcggagctccgcccggccaatctcgcccagcgggtgctcagcctcttcctcaacgtccgcccgggctctgacctctcccacttccagctgccggcgacgttcaacctgcccaagtcgcagctgcagctgtacggcgagggcgtgtactgcgccggcgaggacctgctggggcggtgcgcgcgggggcgcgacagcctggagcgcctggcgtgcgtggtggcgtggagca

SEQ ID NO: 292519 - DNA, 353 bp, Zea mays
gctactagtgcgtcaattattgcttcagactgttaaactgcgacgctttaaccatgtgagcttccacgtgtaatagcatacaggatcctacctgtattggccttgtggatttaacatttatcagccttatttttggagcaatcattggtactaatactgcaggtacatcaggtgcattaactggcgctaaatgtgatggaacaactacttctggaacacgtgcttgcatactttgatgaataatattagcttccattgatacaactggcgacactgaaggctgatgataatttggcgcaacaactattaccatttaggctagtagatactgccgactactatcagcaacaact

SEQ ID NO: 292520 - DNA, 242 bp, Zea mays
gcaacatcttagcaccaatggcagccaagatttttgcgctccttgccctccttgctctttcagcaagtgttgctaccgcgactattattccacaatgctcacaacaatacctctctccagtgatagccgcgagatttgaatacccatctatacaatcctacaggctacaagaggccatcacagcaagcatcttacggtcgctagcattgaccgtgcaacaaccatatgccctattgcaacaa

SEQ ID NO: 292521 - DNA, 276 bp, Zea mays
gaactctgctacttatctgcaacaacttcaacttccattcaggcatctaactgctagctaccgtgatcatgtaattgcattcaaccatatgacagcattgaactctgctgcatatgtacagacacaacatctactaacattcactccgatagcttgtgctagcaaagctaccttcttaatacaaccacaatcattgccgttctaccaacacactgctcctaacgcattgcaccttttaacaactgcaacaactgctgtcattcaaccaacttgctt

SEQ ID NO: 292522 - DNA, 295 bp, Zea mays
tgcaacaacgtcctagtcctattacaacaaataccattaatacatctgttcgcaaacaacatctacgcacatcaactacaacaactcctacatcgaaaccttgatgcatactctcagcaacatcagccactcaccaataaacaacctccttcatctgaacttaactatttattaccaacaacaactaccatacaatcagctagcatattcctacccccatcaattgcatacattcaaccaactatcatcatagaactttacttcttaattacaacatcaacatctaccaccattc

SEQ ID NO: 292523 - DNA, 325 bp, Zea mays
caaggtgtggcgcgtgtccgactcccggtgcctcgagtccgtggtgcgcgcccacggggacgccgtcaacgccgtcgccgccgcgggcttcgacgcgctcgtgctcacgggctccgccgacggcacggtcaaggcgtggcggcggcgcgcggccgagggcaagggccgggccacgcggcacgccatggagcgcgtgctgcgggagggcgaccgagccgataccgccatcatagtgtgagctcaagtcaatgtagtgtacgccggcttacaacacggtgactgggacactgctgtcgttcgccaagtgaatcgcctagcagcacat

SEQ ID NO: 292524 - DNA, 250 bp, Zea mays
gaacacgtaccacgatcagcagtaaaaaccttttgcattactacagcaacaatgacgaacaggatatatgcaatcattaagcggcttgctatttctacatctgtcgctaacgcgacactcttacctcaatgctcacaagctcctatagctaccctacttcacccataccttccatcaattatagcttcagtatgtgaaaacccagctcttcaaccatataggcttcaacaagcaatcgcagcaagcaaca

SEQ ID NO: 292525 - DNA, 419 bp, Zea mays
  unsure (1)..(419): unsure at all n locations
cggacgcgtgggcggacgcgtgggcggacgcgtgggtcgcgttgtcgtgcgcgcgaaattgctcgctccccactatcgtcgtttcctcgtgcccgctggtcgtgcgcccctgcagctccctattcggcaaaatgtgtggaccagtgctcatcgcgtgttgggaagatcggcaccgatgttcttgccaaatattgattgtttgattntggggagatcgacgcacgcatggtgttcgatgaatggctcaaaccggatagccttgtcgaaatcatagctccgagtcgattcggacatggtacgtgaattaaccacgcgatgcggagaaccagaactgatcgaccacaagatggtgctgatgaacggaactggagatggacagacgaagcaagtatcgggacaaaggatggtcttcaagtgat

SEQ ID NO: 292526 - DNA, 411 bp, Zea mays
ctgcgaatgacacacaagaaaagaagaggtctgatgaaccaccaaaatatccaggattggttcttcagacgaaaaggaataaacaatctaaactccgttcaacatccctttcgttggatggcctcctagattatactgccaaggatatagaggagtctgtatttgacgtctgtgccttgcaattactttatgttagtatatatcaaaagggactactacttgtgcacctttatatgttctgctgctacctagttggcaaacttgagcataccacaccacgtaactgaagtatcttttcattgccatctgtgtttgagagctcatgcccatggacactgatctgatgttctattcctttgtcaacttctctttgcttgctgagtcattcagtgaaatgcttcaacacagaat

SEQ ID NO: 292527 - DNA, 444 bp, Zea mays
gagcattcagaaacacaccaagcgaagcgcactagcaacgacctaaccaccattggctgaccaaggttttacccctccttgcgcttcttgccttttttgtgagcgcaccaaatgcgttaattattcaacattgctaacttgttcttagggccataattcaacagttcttccaaccagttacttaaatgggcttgaaacactatattgtgcaggccaacatgcaacaacaagcgtttgcggagagcgttttacaacaaccaattgcccaattgcaacaacaatccttgccacatctaacaatacaagccatcacaacgcaacagcaacaacagttcctaccagcactgagccacctagccatggtgaaccctgccgtctacttgcaagagcagctgcttgcatccaacccacttgctctggcgaacgtaattgcaaaccaacaac

SEQ ID NO: 292528 - DNA, 367 bp, Zea mays
agctagcaacatcacaagcagagtagtgtactaacaatgacataccaaatatggcggttacggatgctccttggtttgtgtgtatgggctgttaacggagcgattttcatacaatgattataagatagtattgatttgtttctagtgccataattctaaacagcgttgtattaagtatgtgaaaacgctattattatacagtacaggatgcatcagggattcacataacgcatgttaccagtatcatacttgatcctataacacaagtgagacatattacagcagttaatttaagcgcatatactatcacaaagcatcaacgcccaccacctccgacaacgtgagctatgaaacctttatgcgtagt

SEQ ID NO: 292529 - DNA, 334 bp, Zea mays
cagctagcaacataaaagttcatttttcaaccaacaatgacagctaagaggtttggattacttatgatccttggtcgaattgcaagtactgttacctgaaccattttcccacaatgctcacatgctcctataccttcctatcttaccctatatcaatcaacagcagagtattcagaatgtgaaaacccaattacttaaaccctaccagatccaacacgcaataacaatacgcatcttacctatatcacgcttgttaatgcaacaaccgataaacctattacaactattacctttggtgcattaattgacacaaaacattaaggcacaacaacta

SEQ ID NO: 292530 - DNA, 429 bp, Zea mays
  unsure (1)..(429): unsure at all n locations
attctttcaagcaaaagagaagaggagttccattgcaactacagttgcaagtgtagcgtctccttcagttacatgttattcaggacagtctaatgattctgatactggggagaattgtaacatggatgctgaaaaggcaagtcgagttgtccaatctctttttggagcattgtcttcacgatatgaaaatagcaaaggtggcaagctgatgagtaacgcagcaccagaaaaaatgcctactgagaatgagcaaatagtcaatgagatactacatgatatacatggttcttttgctgacatctctgatggtgctggtaccgttgaaggtgacttcaaagtaaaagtcaaggaaacaatggagaaggctttctgggatgtggttgctgattcaatgagaggagacctgccagactactgntatctggtcag

SEQ ID NO: 292531 - DNA, 438 bp, Zea mays
gcaacatagaaagcacaatactatactttacaatgtccagccaaaatatattgcttccgtatgctgcttactctttatgcaagtgctgctaccgcaaccattttcccacaatgctcacaagctcctatagcttcctttcttaccccatacctctcaccagctcagtcttcagtatgtgaaaacccaattcttcaaccctacaggatccaacaggcaatcgcagcaggcatattacctttatcacccttgatcctacaacaaccgtcagccctattacagcaactacctttagtgcatttgttggcacataacattaaggcacaacaactacaacaacttgtgctaggaaaccttgctgtctactctcaacaacagcagattttttcattcaaccaactggctgcattgaactctgctacttatgttgaacaacaacta

SEQ ID NO: 292532 - DNA, 371 bp, Zea mays
cgttcggtgagaacccaattgttcaaccctacatgatccaacaggcgatcgcaacatgcatattgccattatcacccgtgtgcgtgggacaaccgtcagccctattacagcagttacctttggtccatttggtggcacaaaacatcagggcacaacaactactacatcttgtgctagcaaaccttgctgcatactctcagcaacatcagtttcttccattcaaccaactggctgcattgaactctgctgcttatttgcaacaacaattaccattcagccaactagttgctgcctacccccagcgattggggtgctttcaaccaacttgcaacatttgactctgctggttatttacagggagcaacaacttc

SEQ ID NO: 292533 - DNA, 414 bp, Zea mays
cagcaacaatccttggcacatctaacttctcaaaccatcgcaacgcaacagcttcatagatttctaccagcgctgaggcgactagctgtggtgaaccctgtcgcctacttgcaacagcagttgcttgcatccaacccacttgctctggcaaacatagttgcataccaacaacaacaacaattgcaacagtttctaccatcgctcagtcaactagccatggtgaaccctgccggctacctacaacagcatcaactgatttcatctagccctctcgctgtggttaatgcacctacatacctgcagcaacaattgctgcaacagattgtaccagctctgactcacctagctgtggcaaaccctgctggctacttgcaacaactgcttccattcaaccaactgactgtgtcgaactct

SEQ ID NO: 292534 - DNA, 376 bp, Zea mays
aacatacctttatcaacctttttacaacaatcgccagccctatctcttagtcaattcttaatgcaaaccagcataccacagcagctgcatcaactcgttctacctctgatcaaccaaataactatcccaaacctttctccctactatcatcaacaacaatttcttccattcaacctactatctacactaaaccctactccttattttcatcatcaactattaccattcatcctactatctactgcctactcttatcaacaacatcttcttccatttaaccaattatccatactaaacctcgctacttattttcaacatcatatattactaccatttatccttctatcttcatcaaatccttccttcttcttgactc

SEQ ID NO: 292535 - DNA, 478 bp, Zea mays
ccgtccgacatgaaaacagccactaatgagtagtcactcatacgaatagtgcgagctcataatgtatgtattgcactgcctctatggcgtcctatggtactattctagcatagtgcatgctacctgcgaccattttgaccgcaatgctcgcaagctcctatagctacccttcttcccgcgtacctctcaccagcggtgtcttcaggatgagaaaacccaaatcttcaaccctacaggatccaacatgcaatcgcagctggcatcttacctttatcacccttgctcctacaacaatcatcacccctattacaacagttacctttggtgcatttataggcacagaacatcagggcacaacatctacaacaacttgtgctagcaaacctcgctgcctactctcagcaacagcagtttcttccattcaaccaactaggttcattgaactctgctacttattcgcaacaacaacaactaccat

SEQ ID NO: 292536 - DNA, 195 bp, Zea mays
cggctgcttttagtggcggttcagattcatgctatgatgaattagtcaaacatacggatccccgtgacgttagatcaggaatggctaatgatgcataccttggtccagtgatcaacccacaggcataggatcgtatctgtaaattacttcaaagtggtgttaacagtgatgctcgtatattgcttgatggaagaa

SEQ ID NO: 292537 - DNA, 384 bp, Zea mays
cccgtacctctcaccagcggtgtcttctgtatgtgcaaacccaattcttggaccctggaggatccaacaggcaagcgcagctggcatcttacctttatcacccatgttcctccaacaattatcatccttattacaacagtcacctttggtgcatctattggcacaaaacatcatggcacatcaactaccacaacttgtactagcataccttgctgcctactatcagcatcagcagcatatttcattcaaccaactaggttcattgaactctggttcttatttgcaacaactgcaactaccattcaatcagctacctgcttgcctacgcttagcaatctactccattcaaccaactagcatcattcaactcttttgcttatttac

SEQ ID NO: 292538 - DNA, 293 bp, Zea mays
aataagtaccaacaatgtcaagcgaaatattttgcttcttatgcttcttggtctatcttcaagtgttgctaccgaaaccattttaccacaatgctcacaagctcctatagcttaccgtttttccccatacctgtcaccaacagtgactatcaatgtgtgaaaccccaattgttcaaccctacatgatccaacacgcaatctcaacatgcatttaaccattatcactcttgtgtctttaacaaccatcaaacctattacagtagttacccttttattcatttttttggacaaaa

SEQ ID NO: 292539 - DNA, 177 bp, Zea mays
ccggtccggattgccggacacccgctcgttcaagatcgcctacgtgccgaacggcaaggtctacgccgagatcgtgtgcccagaccgtcagtcgcagggcggcgagagcgagcgcgagcccgacaaggccatgaggagcgaacaagaagaagaagaatcgtctgaggagcagaagga

SEQ ID NO: 292540 - DNA, 453 bp, Zea mays
  unsure (1)..(453): unsure at all n locations
gcgactatcaccatangaaggactcaatacatgtaccttacaagtcggcagccaaatacatatcggcgctcctgtatgctcacatggtgatctctgtatgcgctgctacatgtgaccattttcgcgcagtgctcacaatgctcctagtagctttcgattctgtgctacgtgacctgtcaccatggacagtgcttcggtatgtgaaaacgcatttcttcaaccgatacgggatccaacatgcaatcgcacttggcatgttacctttatcacgcttgttcctccaacagtcatcaggcctattacagctattacgtttgatgcattgattgggacaaaacattacggcacatcgactacaacaacttgtgctagcataccttgctggctactgttatcaacatcagtttattccatgcaaccaactagctgcattgaactctgcttcttatttgc

SEQ ID NO: 292541 - DNA, 327 bp, Zea mays
aactatccatggtgaaccctaccgcctacctacaacatcaactactgctttcatctagcccactctctatgtccaattcacctacatacctgcaacaagaattgttgcaacagattgtaccatctctaactcatctagctattacaaaccctgtttcctacttgcaacatctgctttcattctaccaactaactatttctaactctagagcgtacctacttcagcgacaacatttacttaatccattggcaatttctaacccattgttcactaccttcctacatcatcatcaattgctgccatacaaccgattctctttgatgaatc

SEQ ID NO: 292542 - DNA, 371 bp, Zea mays
  unsure (1)..(371): unsure at all n locations
cctaccaacaatagcagccaaaaagatnttcttaaatattctgcgtactctttctacaagttctactacctcaaccattttcccacaatgctcacaatctcctatatcttcctttcttcccccatacctctcaccatctttatcttcagtatgtcaaaacccaattcttcaaccctacattatccaacatgcaatcacatcatccatcttacctttatcacccttattcctccaacaaccgtcatccctattacatcatttacctttggtgcatttatttgcacataacatcatatcacaacaactactacaactttttctataaaacctttcttcctactctcatcaacaacaatatccttcattcaacc

SEQ ID NO: 292543 - DNA, 211 bp, Zea mays
tcatattccacaatatcactaactcctactccattattacacaaattctcccaccatatacttcaataaacttcaaacacctaacttttcattccaacattcatcaacaatctcttgcacctaccatcttacaacaaccaattacccaattacaacaacaatactttcctcatctaacaatacaaagccatcacatctcatcatcaacaac

SEQ ID NO: 292544 - DNA, 278 bp, Zea mays
cagaaacacaccaagcgaagcgcactagttacgacctaacaacaatggctaccaagatattagcgcttcttgggcttattggcctttttgggaacgccaaaaaaggggttaatatttcccaaaggctaatttgttccaagggcctttattccaaagttcctccaaccagttacttaaaggggctttgaacacctagttgtgcaagccaacttgcaacaacaagcgcttgcggcaagcgttttacaccaaccaattgccaaattggaacaacaatcctt

SEQ ID NO: 292545 - DNA, 247 bp, Zea mays
caacgcgtgccccgtgttcaacaaggacttggactgctgcgtcggctctgcatccaacgactgacacccgaccaactactccacgtactttacggggcagcgccccgacgcgtacagctaccccaaggatgacgccaccagcaccttgacatgcctcgtcgtaaccaactacgaggttgttttttgaccatcaggccgctgaactagcattaccgtgcgcgcctataccatgaacaacatctaaact

SEQ ID NO: 292546 - DNA, 298 bp, Zea mays
ccgacccacacgtacgcattggctgcaaaccattagctctaggtttaccttatcgcacaacaacccgatcgacacggtcagggtgtagctcgatgcaacccgtctactggctctcactgcgagcacgaccttcacgcatacaagctgcggctgcagctgccagccaccgacgccggatcatctaccaacgccggcgcatctgccacctacggtgcaccagccacctgctgcgcgtatcacaccgccagtacacctgttgccgccagtgcacctgctatagccggtgcatgtgctcgcg

SEQ ID NO: 292547 - DNA, 407 bp, Zea mays
tcggattcccggtcgaccacgcgtacgaaacccaccaagcgaacgcactaccatcacctaccaccacggcttccaagatattgggccctcctgggcctctttgccctttaaatgggcgcaaccaaatgcgggcattattactaagggctcacttgctcctagagccagatttccacagttactaccaccagttacttcaatgggctcagatcatccaaccgtgctagcctacaggctacaactagcgcttgcggcgagcgccttacatcaaccaattgtccaattgcaacaacaatccttggcacatctaaccctacaaaccattgcaacgcaacatccacaacaacaacagtttatgccatcactgagccacctagccgaggtgaaccctgtcacctacttgcaac

SEQ ID NO: 292548 - DNA, 322 bp, Zea mays
cggcccgacccacgcgtgctaaggtcgagaggttctccgggttccggtttcgagggtgagcggatcgagatgggggcggcggatgttgagtaccgctgcttcgtcggcggcctcgcctgggccacagacgaccactccctccacaacgccttcagcacctacggcgaggtcctcgagtccaagatcatcctcgatcgggagacgcagatgtcccgcggcttcagcttcgtcaccttttccacggaggaggcgatgcggaacgccatcgatggcatgaacggcaaggagctggacggccgctacatcaccgtcaacgaagccc

SEQ ID NO: 292549 - DNA, 314 bp, Zea mays
tcagtaacacattctattttatctacctagcaacaacttaacaagaaaggctaccaagatattaaccctgcttgcgcttattgccctttatgagatcgcaacaaatgcgttcattattccacaatgctcacttgctcctagtgccattataccacagttcctccgaccagttacttcaatgagcttcgaacaccttactgagcaagcctacaggctacaacaagcgcttgcggctaacgtcttacaacaaccaattaaccaattgcaacaacaattcttggcacatttaaccatacaaaccattgcaactcaac

SEQ ID NO: 292550 - DNA, 383 bp, Zea mays
acggcaaagcggcagtgcgtagagaaggatcgtcgaccagaccagcttgaaaatggtcatcgtgctcgtcgtgtccctggctctgtcagctgccagcgcctctgcaatgcagatgccctgcccctgcgcggagctgcagggcttgtacggcgctggcgccggcctgacgacgatgatgggcgccggcgggctgtacccctacgcggagtacctgaggcagccgcagtgcagcccgctggcggcggcgccctactacgccgggtgtgggcagacgagcgccatgtaccagccgctccggcaacagtgctgccagcagcagatgaggatgatggacgtgcagtccgtcgcgcagcagctgcagatgatgatgcagcttgagcgtg

SEQ ID NO: 292551 - DNA, 426 bp, Zea mays
caacaactcgagctagcaaaccttgctgtctactctcagcaacagcagttacctttggtgcatttgttggcacaaaacatcagggcacaacaactacaacaactcgtgctagcaaaccttgctgcctactctcagcaacaacagtttctgccattcaaccaactagctgcattgaactctgctgcttatttgcagcaacaacaactactaccattcagccagctagctgctgcctacccccggcaatttcttccattcaaccaactggcagcattgaactctcatgcttatgtacaacaacaacaactactaccattcagccagctagctgctgcgagccctgctgccttattgacacagcaacattcgttgccagtttacctgcacactgcgcctaacgttggcaccctcttacaacttgcacaa

SEQ ID NO: 292552 - DNA, 421 bp, Zea mays
caccatctaacgcacaataaagtaccatcaatggccgacaaagtattctgcttgcttatgcttcctgatccttctgcaagtgttggtacctgatccatcttccaacattgctcacaagctcctatagcttcccttatttccccatacctctcaccaccggtgacttgaatgtgtgaaaacccaattgttcaaccctacaggatccaacaggctatagcaacaggcatcttaccataatcacccttgatcatccatcatccgtcagccctattacagcagatacctgcggtccattgggtggcacataacatcacggcacatcaactaccacaacctgcgctagctaaccttactgcatactgtcagctacatcaagcaattgcattcaaccaactggctgcattgaactctgctgcttatt

SEQ ID NO: 292553 - DNA, 324 bp, Zea mays
tatgctcgttgctctttctgcatgtgttgctaacacgaccatttctgatgagtactcacatgctcctatagacgcccttattgcgatataccattgatcactcaccgctttagattgtgaaatcccaggccttctaaccctacgagatccaattatcaatctaaccaggcacctaacctttatcacatctgttctttgaacaatcgccagccctatctttgatgcagccattggtacaaaccattaggttgcaacagactcggcaactcgtgctaccagagatcattcaagtagctttggcaaacctttgctgctactattatc

SEQ ID NO: 292554 - DNA, 409 bp, Zea mays
  unsure (1)..(409): unsure at all n locations
atgaaccaactagcacatataaagctcatattgtaccaataatggcagccaaaatatttgactcatagctccttgtctttctgcaagtgctgctcgggagcatttaccgcaatgctcacaagctgctatagcttcccttcttcccccgatacctctcccaacgagtcttcagtatgagaaaatccaattcttctaccctacaggatccaacaggcaatcgcagcaggcatcttacctttatcacccttgttcctacaacaatcatcagccctattacagcagttacctatggtgcattgattggcacaaaacatcagggcacaacaactacaacaactcgtgctagtgcaccttgctgcctactctcagcatcagcttttacctatggtgcatttggaagcacanaaca

SEQ ID NO: 292555 - DNA, 415 bp, Zea mays
acgcatctagcagacatcagtaaagcacaatattgtaccaacaatggcagccaaaatattatgcctgcttatgctccttggtctatctgcaagtgctgctaccgcgaccattttgccgcaatgctcgcaagctcctatagcttatcttcttacaacgtacatttgatcagcggtgtattatgactgtgaaaacccaattattcaaccctacaggatccaacaagcaatctcagctggcatattagctatatcacgcatttgcctccaacaattatcagccctattacatcaagtacctacggcgcatctattggcacataacattacggcacatcaactacaacaacttgtgctagcaaaacttgctgtgtactatcatcaacagcagaatcttgcattctaccaactaactgca

SEQ ID NO: 292556 - DNA, 435 bp, Zea mays
atccaatccagatcagcaaagcggcagtgcgtagagaggatcgtcgaacagaacagcatgaagatggtcatcgttctcgtcgtgtgcctggctctgtcagctgccagcgcctctgcaatgcagatgccctgcccctgcgcggggctgcagggcttgtacggcgctggcgccggcctgacgacgatgatgggcgccggcgggctgtacccctacgcggagtacctgaggcagccgcagtgcagcccgctggcggcggcgccctactacgccgggtgtgggcagacgagcgccatgtaccagccgctccggcacagtgctgccagcagcagatgaggatgatggacgtgcagtccgtcgcgcagcagctgcagatgatgatgcagcttgagcgtgccgctgccgccagcagcagcctgtacgagccagctctgatgc

SEQ ID NO: 292557 - DNA, 333 bp, Zea mays
caagtagcagcatagatagcacaatagtttaccaactaaggcagccaaaaaattagccggaccatgcaccaagggctatcagcatatgctgctaccgtgagcatcttgcgctaatggtcagcggatcatatacgttcattatttcacaatgatcacttactacaagtgtcattattacacagataactcccaccagttactccaacgggattcaaacagccagcatagcaagcctataagctacatcaagcaattgctgccaagcgtcttacaacacccaatattccagttgcaacaacgatcctttggacatctaacaatacagaccatcgc

SEQ ID NO: 292558 - DNA, 430 bp, Zea mays
tcggaaagtagaatccattagcaactatagatcaacaatggcgaccaagatattttggctgcttatgctccttgctcttactacatgcgtcgctaacgcgacaatcatctctcaaggctctcaagctcagtatagctttccatttaaccaaataccatccatcgaactctgctgctgattgacagcaccaacaactactaccattcaggctgctagctgctgtgagccctggtgacttattgacacaacaacagttgttgccgctctaactggacgctatgcctaacgctggcacgctactacaactgcaacaactgctgccagttaaccaacttgctttgacaaaccccacagtggtctaccaacaacccatcattggaggtgccctctattagattgcttatgaggtatagctcaataatgaaagttt

SEQ ID NO: 292559 - DNA, 380 bp, Zea mays
catcaagcaacatagaaagtggcatactttagcatcaatagagcaacaatggcggccatggaatattccatccttacgttcagagctctttctgcatgtgttgctaacgcgaccatcatatctcattacttacaagctactatagctgccctttttgcggcatccttacattaatgaccgcttcagtttgcgagatcccatgcatttaaccgtacaggctccaacacgtctatctagcacgccatgttacctgtatgacctgtgtggtttcaatcaatggcagccttatatctggtgcatgtcattgatacagaccatcacggcacaccagctgcatcaactcgtgctaccagtgatcagccaagtagctctggcaaacc

SEQ ID NO: 292560 - DNA, 353 bp, Zea mays
aatagcaacacatatagcacagtcagacatcaacattggcgcccaaaatattgtgcctctgtatgctcttcgatatgcttgcaagtgatgctactgcgaccatgatgacgaaatgctcacaagctactatagctacaattcttgccaaggacctctgacgagcgatgacttcggtaggcgaaaacgcaattcttgaatgctacaggatacaacaggcgatcgcaacaggcatcttagatttatcacgctcgatgctgcaacaatcatcagccatatcacagcagatgcactatcgagcatatattgacgcaaaacatcaggacacaacaactacaacaacttatgctagcaaa

SEQ ID NO: 292561 - DNA, 434 bp, Zea mays
gctgtggtgaaccctgtcgcctacttgcaacagcagttgcttgcatccaacccacttgctctggcaaacatagttgcataccaacaacaacaacaattgcaacagtttctaccagcgctcagtcaactagccatggtgaaccctgccgcctacctacaacagcaacaactgatttcatctagccctctcgctgtggttaatgcacctacatacctgcaacaacagttgctgcaacagattgtaccagctctgactcagctagctgtggcaaaccctgctgcctacttgcaacagctgcttccattcaaccaactgactgtgtcgaactctgctgcgtacctacaacagcgacaacagttacttaatccactagcggtggctaacccattggtcgctgccttcctacagcagcaacaattgctgccatacaacca

SEQ ID NO: 292562 - DNA, 209 bp, Zea mays
gagagagatggatagaggagatttcccatatatcatgaatcagtagtagggcggaatggcagcggagacgccacacattatcatgtgtggtatgaccaataatatatgcatggtcataataaagttttggttttaatgaatcaaaaaaaaaaaaaaaaaaaaaagaaaaataaaaaaaaataaaaaacaaaaaaaaaaacatacaagaa

SEQ ID NO: 292563 - DNA, 310 bp, Zea mays
caactagcaacatagaaagcacaatagtgtaccaacaatggcagccaaaatattttgcctgcttatgctccttggtcctttttgcaggtgctgttacgggaacaattttcccgcattgctcgcaggctctaatagcttcccttcttcccccgtacctttaaccagcggtgtcttcggtatgtgaaaacccaattcttcaaccctacaggatccaacaggcaatcacagttggcatcttacctttatcaccctggttcctccaacaatcatcagccctattacatcagttaccttgggcgcatatattggc

SEQ ID NO: 292564 - DNA, 413 bp, Zea mays
cgtaaattatctaccaaaaaaatttcaagattttttattgattgtctccgctctctgtataatatttttttttgatttggctaactgatgttattgtttacaccatgcaatatgtcttggtacaacacggctaatgaagtgagcgattagaagagagttcacaacgactgactgaacgaacaaagattataaaatgacataattccaccataaagagaccaaataagagaaagtttgtgagctcaagtttctaaaataagtcacatgaactcaaacttataaaaagatagatcaaaatatgaagtgattgctaaagtcatgcatcaataaaaactggatgcgctctttgtagcaattattaacatttaaaaccaacaaataactttttattttactgttagtgtgataaatca

SEQ ID NO: 292565 - DNA, 416 bp, Zea mays
catcaagcaacatacaaagtggaatccagtatcaacaacagagcaacaatggcgaccaagatatgctccatccttatgctccttgctctttctgcatgtgttgctaacgcgacaattttccctcaatgctcacaagctactatagcttatcttattcacacataccttccatcaatgatagcttcagtatgtgaaaacccagctcttcagccctataggctgcaacaagcaatcgcagcaagcaacatacctttatcacccttgttggttcaacaatcgacagccctatatgcggtgcactcattggttcaaaccatcatggcacagtatctgcagcaactcgtgctacctgtgatcaaccaagtagctatggcaaacctttctacctactctcagcaacaaacaatttcttccat

SEQ ID NO: 292566 - DNA, 465 bp, Zea mays
  unsure (1)..(465): unsure at all n locations
ggaattcccgggacggccaacacgtaccgccacatagagcgcactatagtgcccctactgtggcacacaatatattgcgttatcatacgctccgtgctctctgtgcgtgctgctccagcgagcatattaccgcaatgctcacacactcctatagcgcacctgctatccccatacctctcaccaacgatgtcttcagtatgtgaaaatccaattcttctaccctacacgatccaacaggcaatcgcagcaggcatcttacctttatcacccttgtgcctccaacaatcatcagccctattacagcagttacctttggtgcatatatcgncacataacatcacggcacaacaactacaacaactcgtgctagcgaacacttgctgtctactctcagcaacagcagttacactttgggcacttgttggcacacaacataaggcacaaaaactacaacaactcgtgcta

SEQ ID NO: 292567 - DNA, 246 bp, Zea mays
gctcgctatggccaatgcacctacatacctgacacaacagctgctgcaccaacaggcgcctctacatatcgtactacctcagactcacctagctgtggcgacacctgcatcctactacccacaactactaccattcaaccaacagcatgcaaccaactctgctatatacctacaacaacgacaacagctacttcatccacaatcagtattataacaaatgctctctgtcaactacagcacaacaaa

SEQ ID NO: 292568 - DNA, 303 bp, Zea mays
atccaatccagatcagcaaagcggcagtgcgtagagaggatcgtcgaacagaacagcatgaagatggtcatcgttctcgtcgtgtgcctggctctgtcagctgccagcgcctctgcaatgcagatgccctgcccctgcgcggggctgcagggcttgtacggcgctggcgccggcctgacgacgatgatgggcgccggcgggctgtacccctacgcggagtacctgaggcagccgcagtgcaacctgttggctgctgtgccctactacgccgtgtgtgggctgtcgagcgccatgttccagtcg

SEQ ID NO: 292569 - DNA, 418 bp, Zea mays
gcgcgggcaagactattaccttggttgattagagctctgacaccattgacaatgtgaagggcaagatccaggacaaggagggcattcccccagaccagcagcgtctgatctttgcgggcaagcagctggaggatggccgcactctcgcggactacaacatccagaaggagagcacccttcaccttgttctccgactcaagggtggtatgcagatctttgtgaagaccctgactggaaaaaccataaccctggaggttgagagctcggacaccatcgacaatgtgaaggcgaagatccaggacaaggagggcatccacacggaccagcagcgtctgatcttcgccggcaaacagctggaagatggccgcaccctaacagactacaacattcataaagagagcacccttcaccttgtgct

SEQ ID NO: 292570 - DNA, 298 bp, Zea mays
acggagaccaactagcaacatagaaagcacaatagcgtaccaacaatggcagccaaaagatcttgctgccttatgctcctgggcctctctgcaagtgatgctaccgcaacgattattcgacaatgctcacatgctcatatagcttctcttattacccaatacctctcaccagcagcgtctacaatgtctgaaacctcaattgctcaacgctacaggatccagcatgcaatagcaacaggcatcttaccagcatcacccttgctcgtccaacatccgacagccctattacagcacttac

SEQ ID NO: 292571 - DNA, 299 bp, Zea mays
cagaaacacacgaagcgaagcgcactatctacgacctaacaacatgggctacacaagatattacacctactagcgcttattgcgctagctgcgagcgcatcaaatgcgcacattattccacaatgctcactagctcctagagcgatacattccacgattatctgccaccagttactatcaatgagcatttaaacacgctagctgcgcaaggcaacacgcaacatcaagcgcatgcagagagcgtgttacaactaccaatagccgaatggcaacaacaatccttgccacatctaacaata

SEQ ID NO: 292572 - DNA, 286 bp, Zea mays
gcgggcacctagctgtgttgaaccttgattcctactcgcaacagcaactgcttgcggccgacccatttgctctggcgaacgtcgctgcataccagcaacaacaacagctgcaacagcttatgccaatgctcagacaactagccatggtgaaccctgccgtctacctacaactactatcatctaacccgctcgcggagttcaatgcacctacatacctacaacaacaatcgctgcaacaaattgtaccagctctgactcacctagctctgacaaaccatgcttccta

SEQ ID NO: 292573 - DNA, 301 bp, Zea mays
gcgcgcacgcgtccggtcttctccttccataccggatcgggttcgggttcgtaagggtcggcagggttcggtttcgtgggtgagcggatcgagatggcggcgtcacgatgttgagtaccgctgcttcatcggcggactcgcctgagccacggacgaccactccatacacaacgcctacagcacctaaggtgaggacctcgagtccaagatcatccatgatcggcagacacataggtccctcagcttctgctatgtcaccttttccacggaagtagcgatgcggaacgccatctagggcatg

SEQ ID NO: 292574 - DNA, 439 bp, Zea mays
  unsure (1)..(439): unsure at all n locations
gtcagcctagcaattagctcatcgactccagattggagaactcgacaccatgaaagtgctgatcgttgcccttgctctcctggcgctcgctgcgagcgccgnctccagtacaagcggcggctgtggctgccagacaccaccgtttcatctaccgcctccgttctatatgccgcctccgttctatctgccgccgcagcagcagccgcagccatggcaatacccccactcaaccaccgcagctaagcccgtgccagcagttcggatcctgcggcgtcggcagcgtcggcagcccgttcctgggccagtgcgtcgagttcctgaggcaccagtgcagcccggcggcgacgccctacggctcgccacagtgccaggcgctgcagcagcagtgctgccaccagatcaggcaagtggagccgctgcaccggtaccaggcgacata

SEQ ID NO: 292575 - DNA, 384 bp, Zea mays
gcgcgcttgctcatccatcaacccttagctctatcacagcagttacctttgctccagcgggttgcacaaaacattagggcgcagcaactacaacaacttgtactaacaaaccttgctgcatactcttagcaacatcaattagttccattcaaccaactggctgcattgaactctgctgcttattcgcagcaccaattaccattcatacagatagttgatgcctaccaccagcaatttcttacattcaaccaactatcagcattcaactctgctgcttatttacagcagcaacaactactaccattcagtcagctagctaatgtgaaccctgatgccttcttgacacaacaacatttgttacagttctacctgcacgctatgcct

SEQ ID NO: 292576 - DNA, 226 bp, Zea mays
gcgccaactgatgctatttggcctgcttgctagtgccgatgcagctaccttcctgccacaaggctcgcaggctcctatagctccagttctaactcagctcgtttcaccaaaccctgctgcctactgggaacacctgattctataccactatctgactctgcaggcctttgcagctgacatactacatctatcaccgttgcttattccacagtcattagctctatta

SEQ ID NO: 292577 - DNA, 403 bp, Zea mays
  unsure (1)..(403): unsure at all n locations
agccctatcttgggtgccatcatgggtccaaaccatcagggcccaccagctgcagcacctcgtgctacctgtgatcaaccaagtagctctggcaaacctttctccctactctcagcaacaacaatttcttccattcaaccaactgtctacactgaaccctgctgcttatttgcagcaacaactattaccatttagccagctagctactgcctactctcagcaacaacaacttcttccatttaaccaattggccgcactgaaccccgctgcttatttgcagcagcaaatactactgccatttaacgagctagctgcagcaagtcgtgcttncttcttgacacagcaacagttgctgcctttctacaagcagtttgcgggtaaccccgcaaccctcttacaacta

SEQ ID NO: 292578 - DNA, 405 bp, Zea mays
acggggtcttcagaccattagctttatctactccagagcgcacaagaacccgagcgacagcatgagggtgttgctcgttgccctcgctctactggctctcgctgatagcgccaccttcacgcatacaagctgcggctgcagatgccagccaccgtcgacggttcatctaccgccagaacggagcatctgccacctacgaggaacctgccacctacggcacatctcacatcgccggtccaactgacgacgtcggtccacctgacaccgccggtccatgtgctgccgacggttcatctgccgacgccacgatgccactaccctactcaaccgccccggcctcagcctcatacgcagccacacctatgcccgtgccaacagccgcattcaagcccgtgccagctgcat

SEQ ID NO: 292579 - DNA, 212 bp, Zea mays
gtcttacaactgcagcaattgcagccattcaaccaacttgctttgacaaagccatcggcattctaccaactacccatcattggtggtgccctcttttagatatgttatgagttatcgttcaatactatagtgtctcggcgtgatagcgacagtctgtcgcagttcatggcgcgttagtgtctgatggtcgtccggtctacaggatccatgct

SEQ ID NO: 292580 - DNA, 338 bp, Zea mays
aagacagtgaatgctacactgacaacatgctgcagtctgaacttggatggttaggggatcattgcacgtgtgacctccaattcagatgctgcacaagtcgcggagaccctcatttagaatatctgtaggaccaacgttgatggagtgccaggttgattgaatggtgacctcaacatctaggttgtggaaacaacatttgagacttgatcagtatgtaaggctaattcacagctagtaagccatgcttgacttgatgcgatctcagctggaaagtactatcattgcgatcggctgatggcacgaagagcatctcaagatgacttgtaatgagctcttta

SEQ ID NO: 292581 - DNA, 282 bp, Zea mays
acgtacaactgcaacaattgctgccattcaaccaactgggttacaaggtttaggaaaggggctgatactattgctaaaatgattcattttagctatacccttctatttcacccagcttgcacgttcgctattaggaaaaacacatttatggactcaaacaaagagtgatacagaaagtcattttacttccaccttaagaaccaatccacgaaaacagatatcaactgtgacgccacactcaaaaacttgttttgtgacaggcataacgttgcgatgcttgag

SEQ ID NO: 292582 - DNA, 377 bp, Zea mays
acgcgtccggagaaaggtttgccagagctacgcggctgatcactggtagcaccagttgtggcattgaaccaatcgtccgcactgaaccccgctgcttatttgcagcagcaaatactactgccatttagcgagctagctgcaacaagtcgtgcttacttcttgacacagcaacagttgctgcctttctacaagcagattgcggctaaccccgtaaccctattacaactacaacaagtgttgccctttgtgcaacttgctttgacaaacccagcagcctgctaccaacaacacatcattggtggtgccctcttttagattgattattagttgtaattcaataataaagttttttggatgatgtatgtggccaaccagaa

SEQ ID NO: 292583 - DNA, 225 bp, Zea mays
cgaaagcgtgcggacgatgatctttatctactctatagtgcatatgaacgcgatcgagaccatgaagcagatgatcggtgtcttcggtttcctggctctcgctacgagcgatatatagacgcatacaagtggaagatgtagctgtcagctaccacctccggttcatctaccagcgtcggtgcatctgacacctacggttcacctgccaactccggtgcatgttcc

SEQ ID NO: 292584 - DNA, 430 bp, Zea mays
tggctagcatcaatgtccgtttcagtttgcgaaaacccagtcctacaacgctacggctccaacaagctgtcgcatcaagcaacgtacctttatcacccctgttatttcaacaatcgccagccctatctttggtgcagccattgttacaaaccatcatggcacaacagctgcaacaactcgtgctaccagtgatcagccaagtagctctggcaaacctttctgcctactctcagcaacaacaattgcttccattcaaccaactgtctacactgaaccctgctgcttatttacaacaacaacaactactaccattcagccagctagctactgactactctcagcagcaacaatttcttgcatttaaccaattggccgcactgaacccctatgcttatttccagcagcaaatactactaccatttggccagct

SEQ ID NO: 292585 - DNA, 395 bp, Zea mays
gcgcttcttgccctttatgtgagcgcttcaaatgccgtcattaatccaaaatgcttggttgctgccaagggccatatttcaacagttcttccaaccatttacttcaatgggcttcgaacacctagctgtgcaagccaacatgcaacaacaagcgcttgcggcgagcgtcttacaacaaccaattgcccaattgcaacaacaatccttgccacatctaacaatacaagccatcacaacgcatcagcaacaacagttcctaccagcactgagccacctagccatggtgaaccctgccgtctacttgcaagagcagctgcttgcattcaacccacttgctctggcgaacgtagttgcaaaccagcaacaacaacagctacaacagtttttgccaacgc

SEQ ID NO: 292586 - DNA, 374 bp, Zea mays
acccacgcatcacgcgtccgggacacgcaacataaaatgttgaatttttaatcaacaatagagcaacaagggctaggaagatactttccctccttatgctccttgctctttctgcatgtgttgctaacgcgacaattttccctcaatgctcacaagctcctatagcttcccttcttcccccataccttccatcaatgatagcttcagtatgtgaaaacccagctcttcaaccctataggctccaacaagcaatcgcagcaagcaacatacctttatcacccttgtttcaacaatcgccagccctatcttttgtgcagtcattggtaccaaccatcaaagcacaacaactgcatcaactcgtgctacctgtgatc

SEQ ID NO: 292587 - DNA, 398 bp, Zea mays
aaacattcatgagcaatatctcctacgtcacctgctgtgcaaccattgtggctactgtgagcaacagcagttacctttggtgcatttgtaggcacaaaacatcacggcacaacaactacaacaactcgtgctagcaaaccttgatgactactctaatcagcaacagattctgtcattcaaccaactagctgcattgaactctgctgcttattcgcatcaacaacaactactaccattcagccagctagctgctgcctacccgcggcaattccttacattcaactaactggcagcattgaactctcatgcttatgtacaacatacaacaactactaccattcagccagctagctgctgcgagcactgttgccttcttgacacagcaacatttgatgtcg

SEQ ID NO: 292588 - DNA, 393 bp, Zea mays
  unsure (1)..(393): unsure at all n locations
tcgtaccggttccgtgaattcccggcgagaaagcaccaatatgtgtacgcaacaataggcagcccaaaatatcttttcctccttatgcctccttggtatttgctgcaagtgctagctacgtgcgaccattttcnccgcaatgctcacaagnctcctatagcttcccttcttcccccgtacctctcaccagcggtgtcttcggtatgtgaaaacccaattcttcaaccctacaggatccaacaggcaatcgcagctggcatcttacctttatcacccttgttcctccaacaatcatcagccctattacagcagttacctttggtgcatttattggcacaaaacatcagggcacaacaactacaacaacttgtgctagcaaaccttgctgcctac

SEQ ID NO: 292589 - DNA, 402 bp, Zea mays
acggggccacataccacatagattgaagtttacactatcaaacatcgatcaccgagtctgggccaaaatatatcccattctgatcctccttgccttttttggaactcaacataagcctacattattccacaatgctcacttgctcctagtgccattattccacagttcctaccttcagttacttcaatgggcttcgaacacccagctgtgcaagcctacaggctacaacaagcgcttgctgcgagcgtcttacaacaaccaattgcccaattacaacaacaatccttggcacatctaaccatacaaaccatcgcaacgcaacatcaacaacaatttctaccagcactgagccaactagctgtggtgaaccctgtcgcctacttgcaacagcagttgcttgca

SEQ ID NO: 292590 - DNA, 434 bp, Zea mays
gaatttgcatcctcatcctgcggctgtcagtgtcaagcagccaggctcagggggttccggtgggatcggcagtgggtggtggtgaacgccaaagggcgagcatacacccagagggtggagcccaagcttgctctggtccaggtggagttgccgacggaggccttcgctgagaactggcagcccacgcccgactaccacctggttatcacagcacccggaatggacacactgaagatacctataataacggaacacaccacaatcgatgatgtctctgtctgggagtggtctggctctgcgtatgatgaacgggctgaagcgtctgaatggttcttcacttactttgggaagccaagtctactagtgcgctctaaagaagcatcggaaactaggccaaccgatccagattatgcccaaggttatcagatcatgtt

SEQ ID NO: 292591 - DNA, 337 bp, Zea mays
agccttccgtaaccattacaaaacacaccacgctacgcacattagccacactctcagcgctgtggtctccgatataatacctccttgtgctctttgtgctctttgtgagcagcagcacatgcgctcattattccacaacactgactagttcctagtaccattattacacagcagctcctaccacctacttcaatggtgttcgaacacccagctgttcaagcctatatgctacatcaagcaattactgccagcgacctacatcaaccaatttaccagctacaacaacaatcattggcacatctcactatacaaaccatcgcatcgcaacagaaacgac

SEQ ID NO: 292592 - DNA, 369 bp, Zea mays
tccgggcacgcgtacgcccgactttctgtttgtcctggacgcattcacgttccgcgccggggccattcatggcctgaagggggccccgtcgtcggccgctgaggacacgctcacaatgcctaccagcgcgcgcgctgggcccacgcaccagcatcaggcgcgcctagggggcaggttcacgtagctcgctcatgtgcaccagcgcctgcatgaacgtcgtcttagtcggcgccgcgattgagccatgtaccaagaccggaggcctaagcgacgttctcagtggcctgactgcggtcattggcctcaactggctccgtgtcatggcagcctctaccacctacgaccagtacaaggactcctgggacacca

SEQ ID NO: 292593 - DNA, 407 bp, Zea mays
gttccgggcttgacggatgcatccaggctatcgaagtaggaacatagagaggacatgaacgctactgcctttaccagtaagatagatggccaacttttcttgaagcctaacaggccagcacttgttgtgagcagcacaagctggactccagatgaacatttaaggatacttttggaagcaggactaatgtacgacagacgcgtcgctgcagctttaggtgaagatgattcaatggatgaagggcaactgtggattgatatcaataacgggaagcagattgtctacccaagattactgatcattattacaggtgaaggacctgataggacgaaatatgaggatcaaattaaaaggtcgaagtcgacacgtgctggcttgcggacaatgtggcttgcatcagaggacta

SEQ ID NO: 292594 - DNA, 465 bp, Zea mays
ggaattcccgggcaacaagcaacatacaaagtggaatccagtagcaacaatagatcaacaatggcgaccaagatactttccctggttatgctccttgctctttctgcatgtgttgctaacgcgacaattttccctcaatgctcacaagctcctatagcttcccttcttcccccataccttccatcaatgatagcttcagtatgtgaaaacccagctcttcaaccctataggctccaacaagcaatcgcagcaagcaacatacctttatcacccttgtttcaacaatcgccagccctatctttggtgcagtcattggtacaaaccatcaaggcacagcatctgcagcaactcgtgctacctgtgatcaaccaagtagctctggcaaacctatctgcctactatcatcaacaacaatatctgccattcaaccaactatctacactgaaccctgctgctcatttgcag

SEQ ID NO: 292595 - DNA, 324 bp, Zea mays
gacggatgcatccactcgtacgagcaatcgcagaagcattatacctttataggcttcgtggtctcaacaggggccaggcctatcttaggtgcagccatgggtgctaaacaagttaggtgatacatcagcctgcagcaactattgctacctttgatcatccatgtagctttggcaaacctatctctctactcttatcagcaacaatatgttacattcaaccgactgattacactgtaccctgctgcgtattagcagtaaccactattaccatttatgcagctagcgtctgactactttaagcaacaacagctgcatccatttaac

SEQ ID NO: 292596 - DNA, 447 bp, Zea mays
acccacgcgtacaggacagacccatgacactattaccagttgaccagcaactgcgaccaaaaggcaaccggtccttaaccacctagctctctctacatgtcctgctaacgcgacaatattgcctcaatgctcacaagctcctatagcttcactacttgcaccataccttccatcaattatagcttcaatatatgaaaacccagctcttcaaccatatacgcttcaacaagcaatcgcagcaagcaacatacctttatcgcccttgatgattcaacaatcagcagccctatctatgctgcaatcattggtacaaaccatcagggcacaacagctgcagcaactcgtgctacctctgatcaaccaagtatctcttgcaaaccttactccctactctcagcaacaacaatttcttccattcaaccaactgtctacactgaaccctgctgc

SEQ ID NO: 292597 - DNA, 279 bp, Zea mays
gcaacatagaaagcacattagtgtaccaacaatggcagccaaaatattttgcctgcttatgctccttggtctttgtgcaagtgctgctacggcgaccattttcccgcaatgctcgcaagcttgtatagcttaccttcttccctcgtacctatcaccaacggtgtcttcggtatgtgaaaacccatttcttcaaccctacaggatccaacaggcaatcacagctgccatttaaccttaataaccctggttcttccaccaataataagccctataacatca

SEQ ID NO: 292598 - DNA, 307 bp, Zea mays
tgtcttgagacaacaacatttgttgccattttacccacaagttgtgggaaacattagtgccttcttgcaacagcaacaattgctaccattctacccacagaatgtggcaaacattgttgccttcttacaacaacaacaattgctaccatttagccaacatgctttgacgaatcctaccaccttattgcaaccgcccaccattggtggtgccatcttctagattttttatgatttatactgtaataataaagttctcatgctgatatgtgcgacctctcagtaataaagtattagagatctatatttt

SEQ ID NO: 292599 - DNA, 179 bp, Zea mays
gcatcatagaaagcacagtagtgttccaacaatggcaggcaaaatattgtgccgtgctaatccatgtagtccttgatgaaagtgctgttacggcgaccattttcatacatggctaacaggctccaactgctacggttcttcttctgaacttttaactagcggaactttcgtattttgaa

SEQ ID NO: 292600 - DNA, 262 bp, Zea mays
ggtaatcgtgatgtcttgtgctccccactagctgaagcaaacaagaatgggagagatgtggtggaaacatttgctagttacttgaaagattattacattggaaaatttggggcgttagttgcatgatatgatcagcaatattcgaagaacacaactcctgctgaatcctgatatagactatggtggtaccaagtttgcagtgaggttgcatatttgcaggtggcaccaaagaaccatagtgttcgttccccagagatcgaca

SEQ ID NO: 292601 - DNA, 260 bp, Zea mays
ggtgcattgaactctgctccttatctgcaacaacaacaactaccattcatccgggtgcctgctgcctacgccgagcaatttcttccattcaacgcaactggcagcattgaactctcctgcttatttacagcagcaacaactactaccattcatccagatagctggtgtgagccctgctaccttcttgatacatccacagttgttgccgttctaccatcacgctgcgcctaacgctggcaccctcttacaactgcaacaat

SEQ ID NO: 292602 - DNA, 263 bp, Zea mays
atacagtggaatccagacccagcaattgagcatcaatggcgaccaagatattttcgcggcggtgctccttgctcttgctacatgtgttgctaacgcgacaatgttccctcaatgctcacaagctcctatagcttaccttcttgcgctataccttccatgaattatagctctaatatgtgcaaaccgagctcttcaaccatataggcttcaacaagcaatcgcagcaggcaacatacctttatcgcccttgacgaattcaacaa

SEQ ID NO: 292603 - DNA, 157 bp, Zea mays
cgctacgcacaaacccagcagcgtactaccaacaacccatcattggtggtgcccattttgacatctcatacgagtgggacttcaataatgaagtgctacggctgacgtttgccgctaacgataaatagcaacgatcatttctaaaataacaacatac

SEQ ID NO: 292604 - DNA, 258 bp, Zea mays
agcggcagtgcgtagagaggatcgtcgaacagaacagcatgaagatggtcatggttgtggtcgtgtgcctggctctgtcagctgccagcgcctctgcaatgcagatgccctgcccctgcgcggggctgcagggcttgtacggcgctggcgccagcctgacgacgatgatgggcgcctgctggctgcacccatacgcggagtacctgatgcagccgcagagcagcccgctggctgcggcgccctactacaccaggtgtg

SEQ ID NO: 292605 - DNA, 425 bp, Zea mays
cgatgttcagcattcaaaaacacaccaagtttaatcgcactagcaacgacctaacaccaaggggtgccaagatattagccggccttgcgcttcttgcccttttagtgagcgcaacaaatgcgttcattattccacagtgctcacttgctcctagtgccattattccacaggtcctcccaccagttacttcaatgggcttcgaacattcagccgtgcatgcctacaggctacaactagcgcttgcggcgagcgccttacaacaaccaattgcccaattgcaacaacaatccttggcacatctaaccctacagaccattgcaacgcaacaacaacaacagcaacagtttctgccatcactgagccatctagccgtggtgaaccctgtcacctacttgcaacagcagctgcttgcatccaacccactt

SEQ ID NO: 292606 - DNA, 263 bp, Zea mays
aaaaaaggatcaaggtgggagaaacaaaacacaaggcggcgtccgcagcttccccactccaggttgggtgtttccgactccggtgactccaccaccagcaacccgtgcagcgagcgcactccgaccatcgccatgtcgaggcgcggcgactgggtctacgagaacaacggcgggacctgcgtggccatcgccggcgctgattactgtgtcgtcgctgcggacacccgcctctctgtaggatacagtatcctcacgccgtgatc

SEQ ID NO: 292607 - DNA, 246 bp, Zea mays
agctccgaggaaccaatgcacatacaagcgcactagcgacacatgacgggggtaaatagttacctatcttgactcttgccctagtgctatgcacaaagctttcattttgctagtaggcacttacatcctagtgccattattccacagtttctcccaccagttacttcaatgggcttcgcacacctatctgagcatgccaacatgcaccagcaagcgcttgtggcgagcgacttacaacaaccaatt

SEQ ID NO: 292608 - DNA, 426 bp, Zea mays
ccagtactccgcagtccgcacggccgcatccgtcaagatccgcgaaaaacaagtgagggagagagagagagagaggagggaaaatgctgcgccacgccgcccgccgcctcgtttcccgcgccgtcgctccgcccaccgcgcgccgggcgctcgccacggcggaggtgcccgcggaggccgtcgaggactccacgttcgtcgaggcctggaaaaaggtcgcccccaacatcgagcccccagcgacgcccctctccctcatgcagccgcgcccgcccacgccagctaccatccctaccaagctcaccgtcaacttcgtcctcccctacaagtccgagatcgccaacaaggaggttgacatggtaattgtaccagctacaactggtcagatgggtgttttgccaggccatgttgccacaattgcagagc

SEQ ID NO: 292609 - DNA, 439 bp, Zea mays
tcgacccacgcgtacggggtcttcgactcccgtctctcccccgtcgtcttctgatgattcagacgactcccgggagagtgcctcggaagtctggacgtacatccgggccgtcgagcgctccgggctcgagggctcggatgagtcggagtactcctcggatgaggaggactcggacggcggtgaggacgaggatgacgacgacgacggcgacgacgacgacgacggtggcgacggcgacagtgacggcagcagcagctgcggcggcagcatcggcagctactggagcaagggcagcaccagaggccgcagcaacatgggcagcaccaagcgctgcggcggcagcagaagcagcacggccagtggctaaacgccactggtctctagatattagtgtaatgtaattagaataatgtagtagtaatgtaaactagtatagtgt

SEQ ID NO: 292610 - DNA, 267 bp, Zea mays
attgagaccaacatgcaacatagaaagtggaatacagtagcaacaatagagcaacaggggcggccaagatattctccatccttatgctccttgctctttctgcatgtgttgctaacgcgaccatttttcctcaatactcacacgctcctatagcttcccttcttcccgcataccttccatcaatgaccgcttcagtttgcgaaaacccaacccttcaaccgtacatgctccaacaagcaatctcaacatgcaacattacgctttatc

SEQ ID NO: 292611 - DNA, 253 bp, Zea mays
cccacgcgtccgatttgagcattcatatacacaccacgcgaagcacattagcaacgggctaggtacaatggctacgatgatattatccctccttgcgcttcttgcgctttttgctagcgcaacacatgcgatcattattccacattgctcactagcttcaatttacggtattccgcagacggtttgactatgcacagtcacggtcgacctatagcatgataggcgagccgattgtctacggcgagcactcgtt

SEQ ID NO: 292612 - DNA, 229 bp, Zea mays
tctttgacaaatgcaaggcagatccgtgctactggtacaagatctcacagggcggcgtgcacagaatctatgagacgtacacctggaagctctacttcgagaggctgatgaccctgaccggcgtgtacggcttctggaagtacgtgagcatactgtagaggcacgagaccctccgctacatcgagatgtactacgccctgaagcaccggatcctggcaagccaggttcc

SEQ ID NO: 292613 - DNA, 420 bp, Zea mays
tcgcgctcatcccacatcagtagtcgaccaagcacaagcagcagagccggccggaatatgtggacgatcaggaaggtggcggcgccgttggcggaggcgcgcgtgtgccggcgccggagcgcgggcttcaagggggtctgcatgtccgaccacaactgcgcgcaggtgtgcttgcaggagggctacggcggcggcaactgcgacggcatcatgcgccagtgcaagtgcatcagggagtgctagctagctaggctctaggatctagcaagctagctatatcggcctttaattaaattaataaggatcgacgtcgtggccggtcgctaaatatgtactactatacgtctacactacatgcaataatgcaccacatgtacgcgtacgcgcgccgagctgtgtggacgccgcatctagcatgca

SEQ ID NO: 292614 - DNA, 150 bp, Zea mays
gtacgcgtgacttagcgctacctgtgatcaacttattagctgtgacacacattcctgcgtactcggacgagcaacaatttctgccagtcaaccaactagctacactgaaccctgctgcttatttgtaggaccaactattaccattcagac

SEQ ID NO: 292615 - DNA, 379 bp, Zea mays
tcggggaatttttgggctgcttgttgccgcactctttttataaagtcgacccaccctgacctaattttaatgtcaaaagaacccgcagcaggggagactgggagatacagagaggagagggagggtttcctcaaagagacccaaacccaagcagagaacactagcgttccctcaccagggcgtccatcccagcagccatggcgatggcgtacaagatggcgacggaggggatgaacgtgaaagaggagtgccagcgctggttcatggagatgaagtggaagaaggtgcaccgcttcgtggtgtacacgatcgacgagcggtcgcgcgccgtgctggtggacaaggtgggcggccccggcgaagggtacgaggagctcgt

SEQ ID NO: 292616 - DNA, 360 bp, Zea mays
acgctgggtcttcagaccattagctttatctactccatagcgcagaagaacccgatcgacacgatcagggtgttgctcgtagcgctcgctctcatggctctaactgccagcgccaaattctcgcatacaatcacaggctgcacaatgtactacaattcacgcagatcatttacgtgagccctggtaccttcttgacacagccacagttgttagccgttctaccagcacgctgcgcctaacgcttgcaccctcttacaactgcaacaattgctgtcattgaaccaacttgctttgacaaacctagcagtgttctaccaacaacccatcattggtggtgccctcttttagatttcttatgag

SEQ ID NO: 292617 - DNA, 381 bp, Zea mays
agagagcacaatagtgtaccaactttggcaaccaaaatatttcgctcccttatgctccgggatctttctccaagtgctgctaccgtgaccattttaccgctgtgctcacatgctcctatatcttaccagcttctcctatacttctaaccagttgcgtcttcaatctgtgataacccccatcttcaacactacatgctccaacatgcgctcacactcagcatattacccatatcacactctgccgtctaactaccgcaacacctattactgtaatctactccggtgcatgtgttcactccaaatacatacgtgcaacaactattgctgctagagcttgcaccacctgtgactcaactatcatgagcaaaccctgttgcatac

SEQ ID NO: 292618 - DNA, 345 bp, Zea mays
gttgtaattcaataataaagttttttggatgatgtatgtggccaaccagaaataaggggttacatttccagattttaaaaaaaaaaaaaaataattaaactaaaaaataaatataaataaaaaaaaaaaaaaaaaaatataaaataaaaaaataaaaaaactaatataaataaaaataaaaaaaaacataaataaaataaaatgggagcttctttatgagaaaacaaattttttcaatcatatatgcttcaacaagcttttttatcaggcaccataaatttatcgcccttgctgttttaacaatagccatccctagaaaaaccgctggcattgctacatataatc

SEQ ID NO: 292619 - DNA, 405 bp, Zea mays
  unsure (1)..(405): unsure at all n locations
ataaagcacaatagtgtaccaacagtggcagccaaactattttgcttccttatgctcgttgggctttctgcaagtgctgctaccgcatccattttcccacaatgctcacaagctcctatagcttccttctgtcccccatacctgtcaccagcgctgtcttcaatatgtgaaatcccaattcttcaaccctacaggatccaacatgctatcccagcatgcatcttaccttcatcacccttgttcctgcaacatccgtcagccctattacagcagttacctttggtgcatttgttgtcacatagcattacggcacaacatctacatcaactcgtgctaggaaaccttgctgcctactctcagcaacagcagcttcttncatgcaaccaactggctgcattgaactct

SEQ ID NO: 292620 - DNA, 302 bp, Zea mays
ctcagatcgcggtcttcactacttttacactggtgctaagcacaccatcatccaccatggtgtggagaccacaaacatccttctggatgagaactgggatgccaaggtttcagatttccgtgtgtccaagactggcctatttatggtccatacttatgtgagcacaggtggcacaggcagcatcagcttcctctatcctgactactttgagatgctgccgctcacagatcaggctgatgtatactctttcggtgttgagctgattgaggacctctgcgcaccggctgtgcttgaaccctact

SEQ ID NO: 292621 - DNA, 355 bp, Zea mays
attcactataaccttgatacctggtagatagccatgctttatgcatatcgtattgcagatgagctcatcaagaatgctgactacattggcacccctgacaagggtatccttgctgctgatgagtccactggcaccattggcaagcgcctttccagcatcaatgtctagaacgttgacgagaaccgccgtgccctccgtgagctcctattctgctgccctggtgctctccagtacatcagcggtgtgatcctcttcgaggagaccctgtaccagaagaccaaggatggctagccttctgtcgatgtcctgaacgagggaggcgttctccatagcatcaaggttgacaagggcacca

SEQ ID NO: 292622 - DNA, 389 bp, Zea mays
gcgcttgctcctagtgccattattccacagttcctcgcactcagactacttcaacggggtgagagcgtccagccgtgcaagcctacaggctacaactagcgcttgcggcaagcgccttacaacaaccaattgcccaattgcaacaacaatccttggtacatctaaccctacaaaccattgcaacgcaacagcatcaacaacaacagtttctgccatcactgatccacctagccgtggacgaaccctgtcacctacttgcagcagtaactgcttgcatgcaacccacttgctctcgctaacgtcactgcataccagcgacaacagcagactgcatcatggaatgccagagctcagtcaactagccatggtgaaccatgccgtctacctac

SEQ ID NO: 292623 - DNA, 356 bp, Zea mays
acggtagaccgtgcttccttcatgacacagctacagctgctgactacctaccagcagtttggggctaaacccgagcccgtcttgcaactacaacaattgttgccctcggaccaactggctttgacagacccaacggcctactagcaactacagataattggtggcgccctcttttagatggctcattagtgggaattcaacaatcaagcgtgctagatgacgtacgtagactagcgcatgtcagaagcgacttacaacaaccattaggtgaattgcaacaacaatgggtggcacatctagcggtacaaagcataggtacgcatccacgacagcgtctacctcttctgtcatgactg

SEQ ID NO: 292624 - DNA, 238 bp, Zea mays
acgaagcacaatactataccaacaatgtcgattcaaaatatttagcctccttatgctcctcgtgctgtgtgcaattgctgctatggctaccattttctcgctatgctcgcaagctcctataatacaaccttttcctccgtatctcacacaagcgctgcctttcatataccaaaacccatacatctaacacctccggttcacctaccacctcccatgcatctaccacacccggatcacc

SEQ ID NO: 292625 - DNA, 439 bp, Zea mays
acgctttctggcataccagaaaccagcagggtcatgtatagatgcaaatgcacttgttaaacgctacgggatccaacaaacgatcgcaacaagcatcttaccattatcacccttgttcctccaacaaccgtcagccctattacagcagttacctttggtccatttggtggcacaaaacatcagggcacaacaactacaacaacttgtgctagcaaaccttgctgcatactctcagcaacatcagtttcttccattcaaccaactggctgcattgaactctgctgcttatttgcaacaacaattaccattcagccagctagttgctgcctacccccagcaatttcttccattcaaccaactagcagcattgaactctgctgcttatttacagcagcaacaactactaccattcagccagctagctgatgtgagccctgct

SEQ ID NO: 292626 - DNA, 301 bp, Zea mays
acgattgagaccaacaagcaccatataaagtgtaatccagtagcaacattacagcagcaatggcgaccaagatacttttccttcttatgctccttgctctttctgcatgtgttgctaacgcgacaattttacctcaatgctcacaagcttctatagcttcccttcttcccccataccttgcatcaatgatagctctagtatgagaaaacccagctattcaaccctatacgcttcaacatgcaatcgtattacgcaacatacctttatgacccttggtgtaacaattgctaggcatatctta

SEQ ID NO: 292627 - DNA, 325 bp, Zea mays
ggaaagtgaagcttgctgatttcggactcgctgcacgggtcactaatggtgagaaagtgtttggtgttgctgggagccctgcatatgtggcacctgaagttctttctggaagctattcggagaaggttgatatatggcgtgcctgtgtgctactacatgtacttctatgtgcgtcactttcatttcaagggggctctttgtacgcttcttgctagtccatgcagtcgcaataaggatcttacctttatcacacctggtctttaaacaatcttcatgcatatttttggtgctgccattggtccaaatcataatggcggatcagttt

SEQ ID NO: 292628 - DNA, 423 bp, Zea mays
ctcacgcagtccggccacgcgtgcgatgaagtctgtgaaaacccagatcttcaggcgtaggggctccaacacgcaatccgaacaggcaccatacctttatcacccttgctgttcgaacaatcgtcagccctatctctggtgcattgattggcacacaccatcagggcacagtagttgtagaaactgatgctacctgtgatcaaccaagcaactgtgccaaacctttctccctactgttagctacaacaataccttgcattcaaccaactgtatacactgaaccctgctgcttatgtgcagcagcaactattaccattcagtcagctagctactgcctactctcagcaacatcaacttatgacatttaaccaatgggaccgactgaacgccgctgcctatttgcagcagcatatactactacca

SEQ ID NO: 292629 - DNA, 427 bp, Zea mays
attgacatacacaccatgcgaatcgctctaacaacgacctaacaacattggctaccaggatattagccctacttgcgcttcttgccctatttgcgagcgcaacagatgcgttcattattccacaatgctcacttgctcctagtgccattattgcacagttacttgcaccagttacttcaatgggcttcgaacacctatctgtgcaagccaacatgcatcaacaagcgcttgcggcgagcgtcttacaacaaccaattgcccaattgcaacaacaatccttgccacatctaacactacaagccatctcaacgcaacagcaacatcagttgctaccagcactgagccacctagccatggcgaaccctgccggctacttgcaagagcagctgcttgcatccaacccacttgctctggcgaacgtaattgc

SEQ ID NO: 292630 - DNA, 378 bp, Zea mays
ccgatcagctagcagcataaatcgcgcaatagtgtaccaacaatgtccctctaaactattctgtctacttatgctccttgagctctgggtaaatactgatactgcgaccattttcccacaatgctcacaagctaccataacttcccttcttcatccgtacctgttaccaacattctattgcctatattaaacaccaactctttaaacctacatgatccaacttgcaacaccaacctggcatattactctttatcaccctcattcgctacaacaataatgagtcatatcacagcatttacctttgctacatctattggcacataacataacgatacaacacctacaacaacttgtgctagcaaaccttgctgactactc

SEQ ID NO: 292631 - DNA, 423 bp, Zea mays
agcgcttgcggcgagcgtcttacaacaaccaattgcccaattgcaacaacaatccttggcacatctaacaatacaagccatcacaacgcaacagcaacaacagttcctaccagcactgagccacctagccatggtgaaccctgccgcctacttgcaagagcagctgcttgcatccaacccacttgctctggcgaacgtagttgcaaaccagcaacaacaacagctacaacagtttctgccaacgctcagtcaactagccatggtgaaccctgccgcctacgtacaacaacaacaactgctttcatctagcccgctcgctgtgggcaatgcacctacatacctgcaacaacaattgttgcaacagattgtaccagctctgactcaactagctgtggcaaaccctgttgcctacttgcaacagct

SEQ ID NO: 292632 - DNA, 429 bp, Zea mays
attgtgagcattcagaaacacacctagcgaagcgcactagcaacgacctaacaacaatggcttccaagacattatccctacttgcgcttattgccctttttgtgagtgcaacaaatgcgttcattattccacaatgctcacttgctccgagtgccattattccacagttcctccctccagttacttcaatgggcttcgaacacccagctgtgcaagcctataggctacaacaagcgcttgcggctagcgtcttagaacatccaattgcccaattactacaacaatccttggcacatgtaaccatacaaaccatcgcaacgcagcagcaacaagcactgagccacctagccgtggtgaaccctatcggctacttgcaacaacagctgcttgcatgcaacccacttgctttggcaaacgtagctgcatacc

SEQ ID NO: 292633 - DNA, 390 bp, Zea mays
gcaacatacaaagcacaatattgtaccaacaatggcagccaaaatattgcgcctggttatgctactaggacttactgcaagtagctgctacagcaaccattttcccgcaatagctagcaagctcctatagctttccatcttcacccggacctttcaccagcagcgtcttcagaatgacaaaacccaattctttaaccctacatgatccaacaagcaatagcagcttgcatcttacctctatcacccgtggtcctcctacaatcataagccctattacaacagttacctaaggagcatttattggcacagaacatcagggcacaacaactacgacaaccagtgctagcataccatgctgactactctcagcaacagcagtttcttccattc

SEQ ID NO: 292634 - DNA, 456 bp, Zea mays
cggcccgacccactcgtgcgccggcgcgtccgcagaaacactctctagttaagcgcactagcaacgacctaacggcaagggctaccaagatattatccctgtttgcgcttcttgccctttttgtgagcgcaacaaatgcgttcattattccacaatgctcacttgctcctagtgccattattccacagttcctccctccagttacttcaatgggcttcgaacacccagctgtgcaagcctacaggctacaacaagcgcttgcggcgagcgtcttacaacaaccaattgcccaattacaacaacaatccttggcacatctaaccatacaaaccatcgcaacgcaacagcaacaacaatttctaccagcactgagccaactagctgtggtgaaccctgtcgcctacttgcaacagcagttgcttgcatccaacccacttgctctggcaaacatagttg

SEQ ID NO: 292635 - DNA, 395 bp, Zea mays
cccactcgtccgcttcccttcttcccctataccttccatcaattatagcttcagtatgtgaaaacccagctcttcaaccatataggcttcaacaagcaatcgcagctagcaacatacctttatcgaccttgttgtttcaacaatcaccagccctatctttggtgcagtcattggtacaatccatcatggctcaacagctgcagtaactcttgctacctgtgatcaaccatgtaactctggcaaacctttctccttactctaagcaacatcattgacttccattcaacctactgactacactgaactctgatgctaattggtagctgctactatcaccatttaaccagctagctactgcctactatcagcatcaacatcttcttccatttaaccaa

SEQ ID NO: 292636 - DNA, 386 bp, Zea mays
gggggtggctttcctgcccttcgttcgggttcgggttcgtgaggttctcaggggtgggttcggggtgagcggatcgagatggcggcgtcggatgttgagtaccgctgtttcgtctgcgggctcgcctgggccactgacgaccactctttccacatcgccttcatcacctacggcgaggtcctggagtccaagatcattctcgatcggtagactcagaggtgccgcggcttcgggttcgtcaccttcttcacggaggaggcgacgctgaacgccattgagggcatgaacggcatggagctggacggtcgcagcatcaccgttaacgaggcccagtcccgctgcggtcgtggaagcggctgcggcggcgggtactgtggtggtcgtgg

SEQ ID NO: 292637 - DNA, 238 bp, Zea mays
ttaccaacaatggcaaccataataggggaagtttatattctacttgatctttctaataatattgctacctcaaccattttcccacaattctcacaatctcctatatctttcctttcttcccccatacctcttaccatctgtatcttcaatctgttaaaccccaatttttcaaccctatcttatccaacattcaatttcaacaaacatcttaacattttcacccttttatccttcaaca

SEQ ID NO: 292638 - DNA, 420 bp, Zea mays
attcagatcacccctgccgaacggaattccacggcctaacaaccatgggctcccaagatttttgcccctcctgggccttctggccctttctgtgagcgcaacatatgcgttcattattccacaatgctcactagctcctagtgccattattccacagttcctgccaccagttacttcaatggtcttcgaacacctagctgtgcaagccaacatgcaacaacaagcgcttgcggcgagcgtattacaactaccaattgcccaattgcaacatcaatccttgccacatctaacaatacaagccatcacaacgcaacagcaacaacagttcctaccagcactgagccacctagccatggtgaaccctgccgtctacttgcacgagcagctgcttgcatgcaacccacttgctctggcgaacgt

SEQ ID NO: 292639 - DNA, 435 bp, Zea mays
gttggcaccttgatctcttttactgtaatatcccttggcgctctaggactaatatcaaggcttaatatcggcgcacttgaactgggagactatcttgcacttggggcaatattctcggccacagactcggtttgcaccttgcagaactttgatcctggaaatatcagcagtgccaaattactgaacttcattggcagtttcctttatctgttcggctccagcaccattcttggagtagcttctggacttcttagtgcttataccattaagaagttgtacttcggcaggcattcaaccgatcgtgaagtttccattatgatgctaatggcttatttatcttacatgctagctgaattgctcgatttgagtggcattctcactgtgtttttctgcggtatcgtaatgtcacactatacttggcacaatgtaacagaa

SEQ ID NO: 292640 - DNA, 278 bp, Zea mays
gagcattcaaaaacacggcaagcgaagcgcactatcaacttcttaacatcaatggctaccaatatattatccgttctttttctaattgcccttgatgttagctctacaaattcattcattattccacaatgctcacttgctcctagtaccattattccacagttccttccaccatttacttcaatgagcttcgaacacctatctatacaagccaacattcatcaacaatctctttcatctaacttcttacaacaaccaattatccaattgtaacaaca

SEQ ID NO: 292641 - DNA, 304 bp, Zea mays
tcgcgacaagcagggagttcacctcgctcttgtgcagtgagctcgactagatgggtgactgcataacaaaacccatcgttgtcggatcggagatgatgagttccgtcgtcgtggatgctgctgctaccagcatcgctcctgaagaagacgcttcttccctgaggccgtccagccagcggagtctggcggtatgcgcagacccttgtcttggaccttactctattctacgtgccatcgcagctggcatctcacctttatcacccttgtttcgtcaacaatcatgaggcctattacaacagatacc

SEQ ID NO: 292642 - DNA, 314 bp, Zea mays
aatggaagaaactgctgttgctgagagtaggcagcaaggtttcctagcacaagttgtggtagttgttgtgcctgcacgctgcgcctaacgctggcaccctcttacaactgcaacaattgctgccattcaaccaacttgctttgacaaacccaacagcgttctaccaacaacccatcattggtggtgccctcttttagattgcttatgagttatacttcaataatgaagttttttggatgatgtttgtggcttaccagaaataagaaagttcatttctagattcttaaaaaaaacaaacccaacagcgttttaac

SEQ ID NO: 292643 - DNA, 404 bp, Zea mays
attgagaccaactagcaacatagaaagtcacaatagtgtaccaacaatggcaggcaagatattttgcctacttatgctcataggtactttctgcaagtgctgctacggcgaccattctcccgcaatgctcgcaagctcctatagcttcccttcttgcctcgtacctctcaccatcggtgtcttcggtatgtgaaaacccaattcttcaaccctacaggatccaacaggcaatcgcagctggcatctcacctttatcacccttgttcattcaacaatcatcagccctattacaacagttacctatggtgcattgattgtcacaaaacatcacggcacaacaactacgacaacttgtgctagcaaaccttgctgcctactctcatcatcagcagtttcttgcattc

SEQ ID NO: 292644 - DNA, 306 bp, Zea mays
agcgtgatacatactcacaatacattgtacgtatcgcgttcggcatgcatgtttacgggctatcgagaagacgttggcacaatcagatgattgctcgatgcacacttgtcgctcactgagcagccttccaagttggatacttatgatccaagatcacctttcttcactgataccactatgctaggctacgacgcaattgtaaaagagcaagatgaaagacgcatagatctcaaatggcagcttactgagagaatgcaacatctatcattctgtgatagcagtctgctcacgtgtcatctctgcatg

SEQ ID NO: 292645 - DNA, 430 bp, Zea mays
gccaaatggtagtagtatttggccagctagctacaacaagccccgcttccttcttgacacaacaacaagtgcttccgttctaccagcagtctgtggctaaccccgcaaccctcttacaactgcaacagttgctgccctttgtccaacttgctttgacaaacccagcagacttctaccaacaacacatcattggcggtgccctctcttagattgcttattactagcaattcaataatgaacttttacggctgatgtatgtggcctgctagaaataagaagtcatatttccaaaagatgtacagactcatcgacgagtacaagttgaagggccatatacggtggatctcggcgcagatgaaccgcgtccgcaacggggagctgtaccgatacatttgcgatacgaagggcgcattcgtgcagcctgcgttct

SEQ ID NO: 292646 - DNA, 385 bp, Zea mays
cacgtagcggcgcgctctagcacgactctaacacaacggctccagcagataccggtcttgcgcatctagcgttctagcgagctcaacagatgcctccatatgcacagtgctcactagctgctagtgccgttactccacagttcctataaccagtatctacaacgggctcagaacatgcaaccgtgcaagcctacacgctacagctagcgcttgcggccagcgccttacaacaacctattgcacaattgcaacatcaatacttggcacatctaaccctgcaaaccattgtaacgcaacagctacagcaacaacagctgctgccattactgatccacctagccgaggcgaaccctgtgacctacttgcaacagcagctgtttgcata

SEQ ID NO: 292647 - DNA, 415 bp, Zea mays
aattcgggattcgaggctacgacgtcacgcgtccgcatcaagctacatataatgtttaagctaatcgcgacaatagagcaacactggctaccgatatacaatatctgcatacgcttcgtgctctatctgcatgtgttgctaacgcgacataattccgtcaatgctcacaagctcgtatagctatgcttgatgcagcatacctataatcaatgatagcttctgaatgtgaatacccatctctttgaccctataggcttcaaccagctatcacagctagctacataccgctatcaccattgtgcaaacaatcgccaggcgaatctgtagtgcagtcattggtacaaactataaaggcacatcagctgcaataactactgctaccagggatcaatcaagcaggtctggcaaacctttc

SEQ ID NO: 292648 - DNA, 419 bp, Zea mays
gcttcatataaagcacaatagtgtaccgacaatggcagccaaaacatcttgcttccttatgctccttggactttctgcatgtgtagctaccgcaaccattttgcaacaatgctcacagcctcctatagcttacattgttcacacatacctataaccagcggtgtattcaatgtgtgaaaccccaagagttcaaccctacaggatacaacaggcaatcgcaacaggcatcttaccattatcacccttgctcctacaacaaccgtcagacctattacagcacatacctctggtccattaggtggcacaaaacatcagggcacaacaactacgacaactcgtgctagcaaaccttggtgcatactctcagcaacatcagtttcttccattcgaccaactgtctgcattgaactctgctgctt

SEQ ID NO: 292649 - DNA, 251 bp, Zea mays
agcacgttgcgcctaacgctggcactctcttacaactgcaacaattgctgccattcaaccaacttgctttgacaaacccagcagtgttctaccaacaacccatcattggtggtgccctcttttagatttcttatgagttatagttcaataataaagttctttatctgatgtttgtggcttcccagaaataagaaagtacatttctagattcttatgtgcttctaaaaaattaccattatcaccctagaaaa

SEQ ID NO: 292650 - DNA, 391 bp, Zea mays
agtaagcttagcaactagattatggtctacagattggagtactcgacaccgtgaaggtgctgatcgttgcccttgctcttctggcgctcgctgtgagcgccgccttcagtacaagcgtaggctgtggctgccagacaccaccgtttcatctaccgactgcgttctatatgccgcctccgttctatctgccgccgcagcatcagccgcaaccatggcaataccccactcaaccaccgcaactaatcccgtgccagcagttcggatcctgaggcgtcggcagcgtcagcagtccgtacctgggcacaatgcgtcgagcacctgaagcaccaatgcatgctggcaaagacgcgctactgctcgccacagtgccaggcgctgcaacagcagtgct

SEQ ID NO: 292651 - DNA, 290 bp, Zea mays
gcggggggaggcatcgtcctctccgtgctttctcagaggtgggttggcttctcctggcgcaccggttcgtgttcaggttctggttcctgggcgagagggaagagatggcggcatgcgacgtttagtaccgttgctctcttggcggcctcgtctgggccaccgacgaccactcgctcaacaactccttcagcacctacggcgaggtcctcgagtcgaagatcatcctgcatcgggagacgcagaggtcccgcggctactgcttacgcaccttctccacagacgacgcgatg

SEQ ID NO: 292652 - DNA, 380 bp, Zea mays
aactactaccattcagccagctagcttatgtgagccctgctgccttcttgacacaacaacaggtgctgccggtctacctgcacgctatgcctaacgctggcaccctcttacaactgcaacaattgctgccattcaaccaactcgctttgacaaacccaacagtgttctaccaacaacccatcattggtggcgccctcttttagattgcttatgagttatagttcaataatgaagttctttggatgatgttcgtggcgtcccagaaataacaaagttaaataaaagcgtcagcataccgtacctgggtcaatgcgtcgagttcctgaagcaccaatgcaacccggcggcgacaccctacggctcgccacaatgccaggcgc

SEQ ID NO: 292653 - DNA, 420 bp, Zea mays
acgagttactaccagcactgatccacgtagttttggtgaaccctgacgtctacttgcaagagcagctgcttgcatccaacccacttgatgtggcgaacgtagctgcaaaccagctacaacaacagctacaacagtttcagccaacgctcagtcaactagccatggtgaaccctgacgtctacgtacaacaacaacaactgctttcatctaacccgctcgctgcgggcaatgcacactacatacctgcaacaacaattgctgcaacagattgtaccagctctgactcaactagctggggcaaacccatgtgcctacttgcaacagctgcttacatgcgaccaactgactctggcgaactctgctgacgacctacaacagcgacaacagttacttaatccattgttagtggctaacccattg

SEQ ID NO: 292654 - DNA, 438 bp, Zea mays
  unsure (1)..(438): unsure at all n locations
ggggttcgagccacgcgtcacgcgctagcgccagctcttcaaccatatatttgnctatacaagcaatcgcagcaagcaacatgacctgtgtcgcccttgttgtttcaacaatcaccagccctatctttggtgcagtcattggtacaaaccatcagggcacaacagctgcagcaactcgtgctacctgtgatcaaccaagtagctctggcaaacctttctccctactctaagcaactacaatgtcttccattcaaccaactgtctacactgaactctgctgcttatttgcagcaacaactatgtccatttagccagctagctactgcctactctcagcaacaacaacttcttccatttaaccaattggccgcactgaacctcgctgcttatttgcagcagcaaatactactgtcatttagcgagctagctgcagcaagt

SEQ ID NO: 292655 - DNA, 438 bp, Zea mays
gcgcttcttgcccttttagtgagcgcatctaaatgcgttcattattccacagtgctcactggcactaggagcaagtgagcactgtggaataatgaacgcattccacagtctctcccaccagttacttcaatgggcttccaacatccagccgtgcaagcctacacgctacaactagcgcttgctgcgagcgccttacaacaaccaattgcccaattgcaacaacaatccttggcacatctaaccctacaaaccattgcaacgcaacaacaacttcaacagtttctgccatcactgagccacctagccgtggtgaaccctgtcacctacttgcaacagcagctgcttgcatccaacccacttgctctggcgaacgtatctgcataccagcaacaacatcagcttgaacagtttatgccagtgctcagtcaactagccatg

SEQ ID NO: 292656 - DNA, 384 bp, Zea mays
accaagcgaagcacattagcttcaacttaacagcaatggctaccaagatctgatccgtacttgcgctgattgcgctatttgcgagcgcaacacatgcggttattattacataatgctcacttgctacaagttccattattacacagataccgttcaccaggcacttcaatgggcttcgaacacccaactgtgcaagcctataggctacaacaagcaatctctgcaagcgtattacatcaaccaagcttccagttgcagcaacaatccttggtacatcttacagtacaaaccatcgcaacgcatcagcaacaaccattcctaccagcactgaatcacctagccatagcgaaccctgccggctacttgcaacagcagatgcttgca

SEQ ID NO: 292657 - DNA, 442 bp, Zea mays
accatataggcttcaacaagcaatcgcagtaagcaacattaccttattggcccttggtggttgcaacaattaaccaacccctatctttgggtgccattcattggtacaaaccaatcaggcacaacagctgcagcaactcgtgctacctgtgatcaaccaagtagctctggcaaacctttctccctactctcagcaacaacaatttcttccattcaaccaactgtctacactgaaccctgctgcttatttgcagcaacaactattaccatttagccagctagctactgcctactctcagcaacaacaacttcttccatttaaccaattggccgcactgaaccccgctgcttatttgcagcagcaaatactactgccatttagcgagctagctgcagcaagtcgtgcttccttcttgacacagcaacagttgctgcctttctac

SEQ ID NO: 292658 - DNA, 300 bp, Zea mays
acgcacaccatctagctggtgtgttcccttctaccttcttgacacaaccacaggggttggcgttctaccagctcgttgcgcctaactgctggcgcctgttatacaactgcatcaactgctgtgattcaaccaactctgtttgacaaattcatcaacgatcgatcaacaacccatcattggtggtgccctattttacattcttatgcgtatagtcataatgagtttgatatgatcttatggctatccagatatagaaagtacatttctaaaaaatattacacagttacattaaaggccttt

SEQ ID NO: 292659 - DNA, 254 bp, Zea mays
atcattcagaaacatttatatttaagctcactagccacaacctaacgacaagggcttctaagacatcattcctccttgcgctttttggccactatgtgagtgcaacgcttcacgtgcattattagacaatgcttcactcgctccgagtgccattattccacagtttcgtgcttgtgaaaactcaaatgtgcatctatcaccgatctagccgagtttataagctagaatattacgcttgatgacagtgttttata

SEQ ID NO: 292660 - DNA, 319 bp, Zea mays
accatttagccagctagctgcagcataccgtgcttccttcttgacacagcaacagttgctgcctttctaccagcagtttgcggctaaccccgcaaccctcttacaactacaacaattgttgccctttgtccaacttgctttgacagaccgagcggcctcctaccaacaacacatcattggtggtgccctcttttagattgcttattagttgtaattcaataataaagttttttggatgatgtatgtggccaaccagaaataagaagttacatttccagattttaaaaagtgcaattaaaggcacaaaacattaagagac

SEQ ID NO: 292661 - DNA, 384 bp, Zea mays
gggctagcgacattcaacgcacaattttgaattaacaatggcagccaaaatatcagggccaggtatgctctttggactatctgcaagagctgctacagcgaccattattacacaatgctcacaagctcctatagctcaacttgttgcgacggacctatcaccatcggtgtctacactctacgaaaacgcaagtcttcaaccctataggaaccaacaggcattcgcagctggcatcttaccgttataacccttgcccatcagcaatcataagacctattacagcaatttacctttggtgcattcattggcacataacatcagggcacaacaactacaacaacttgtgctataaaacctagctgcctactctaagaacaacagatt

SEQ ID NO: 292662 - DNA, 355 bp, Zea mays
acgcggatcaactggcgctgcaatacatataaaggagttcattgtaatttctcatctatagttagtggtgccataatcagtgctccactggcgttcggcaataatgtcggagagcgagttagcactcattgaaccagaggcgttaaagacttatatctgccttcagtgctatgatggatccattcagcatgtggaggacgaggttgcaatgttctgccccatgatatgtcgtgaaattgagaagaatggcacagggtcgtccaaaaatgatgctattgcgctccctgaatgagttaatccagccagtttgagtgtgattcttgactactgccggattcatcatgttactgggcgc

SEQ ID NO: 292663 - DNA, 280 bp, Zea mays
cgcccaagacgaaggcgtcgcacattgtggggcgcttactggccgcgtccaagccggccgagtgccggcagatcggtgaccacagtgacctcggctactaatacaccaacgaggcgctcctgcgatccaggtcgatcgcggtcaaagacgaagtgttctgcctggctgaaggggtgctggacaacctgtgtcggatgaggcagcagcactgtctgtcatgctagggcgccaacaaggtgctcctggtaatcgaggcctacaagacgatgcgcgagcgctc

SEQ ID NO: 292664 - DNA, 416 bp, Zea mays
ctcgaggccacgcgtcacgcggttcggcgagacacaccaatcgaatttcactatcaacaacctatcaacaatgtctagcaagatgtttatacttccttgcgcttcttgcgctttttgcgagcgcatcaaatgcgtacattattccagaatgctcacttgctgctagttacattattacacagttactgctaccagttacttaaatggccttcgaacactcagctgtgcaagcctatacgctacatcaagcgattgctgcgagcgtcttacaccaaccaattgcccaattgcaacaacaatccttagtacatataacaatacagaccatcgcagcgtaacagcaacaacagttactaccatcactgatccacctagccatggtgaacactgtacgctacttgcaacagcagctgctt

SEQ ID NO: 292665 - DNA, 329 bp, Zea mays
cggacacgtgggcggactcttggggctgcattgaactctgcttcttatttgcaacgacaacaactaccattcagccagctatctgctgcctacccccagcaatgtcttccattcaaccaactgacagctttgaactctcctgcttatttacaggagcatcaactactaccattcagtcagctagctggtgtgagctctgctaccttcttgacacaaccacaattgttgccgtgctaccagcacgctgcgcctaacgctggcaccctattacaactgccacaattgctgccattcaaccaacttgctttgacagacccaacagcatttta

SEQ ID NO: 292666 - DNA, 301 bp, Zea mays
tcggcgccgccgcgctgctgcaagcgccagttcgacggcgtgcgaatagtacactctaacgccgtcatggggcggatgcacaggcccgggaagggtattttggccttagggcctgccggacaaaaggacgcctcctacctggctgaagaccgccgcttcgaacttgaagaggatatccccaaaggaacccaaaaaggcccagatgccgggacatatgggggtcttgctccgagaccatcacggtttcccccttgtaaagagtgcaaccgagagcaaaattctccgaatcctaagggcccat

SEQ ID NO: 292667 - DNA, 268 bp, Zea mays
atcgagaccaacaagcaacatacaaagtggaatccagtagcaacaatagagcatcaatggcgaccaagatactttccctccttatgctccttgctctttctgcatgtgttgctaacgcgacaattttacctcattgctaacaagctcctatagcttcccttgttcccccataccttccatcaatgatagctcaagaatgtgaaaccccagcttttcaaccttttaggctccaacagcgcattggcagcaggcaccatacctttatcac

SEQ ID NO: 292668 - DNA, 455 bp, Zea mays
gacggatgcatccacgcgtccatccactcgtgcggctgctacttcgctgctaccgccgctagctggttcaagtgcctcagagcgtgagccacgagaccggttacaggaaattaacaggcgtctaccggtcatggcgtacgtcaacaagtgcgggtgctcattgccatgccccggctgctaagactagctgtgcacgtagatagcgtcatgcagcgggagcacactacttgcggctgccgctagcacatgcagtgcaacgtgctcacgtgtggtcgggccacaatgccatccagccgctagaacaggatggctaactgctcctgcggtgcgttctgcaactgcgcatcctgcgcctactcctgatacgtgcgcctacgtctcgtgctaccgcgctgactaatggaaggagctgtctaatgaagatggacacgaagcatctatcactacttttaata

SEQ ID NO: 292669 - DNA, 322 bp, Zea mays
atagctacatacaaagcacattcgtggtccaacactgtctgaccaaatattcagccttggtatgctcctatggtcgttatgcaagcgctgctaccgctaccattatgccgcaatgctggcacgcttatataactatgcttataacaatgtacctctcaccagacgtgtgttagatatgtgtaaacccctttactatactacacgcgatacaacaggctatcacagatggtatcacagctgtatgaaccgtgctgctaccacacttatgagctatagtacatgagatacctaaggagcatatatcggcacagaacatcagggc

SEQ ID NO: 292670 - DNA, 436 bp, Zea mays
catcaagcttcattgaaagtgtaatccattagctacaatagagcaacaatggcgaccaagatatttaccctgcttatgctcctgtgctctgtctacatgtgttgctaacgcgacaattttccctcaatgctcacaagctcctatagctttcatatttgccccataccttccatcaattatagctgcaatatgagaaaacccagctattcaaccatataggcttaaacaagcaatctcagcaagctacatacctttatcgtccttgttgtttcaacaatcgccagccctatctttgatgcagtcattggtacaaaccatcagggctcaacagctgctgcaactggtgctacctctgatcaaccaagtagctctggctaacctttctccctactcttagcaacaacaatttcttacattcaaccaactgtctacactg

SEQ ID NO: 292671 - DNA, 330 bp, Zea mays
caactagccatggtgaaccctgtcttcctacgtacaacaacatcaactgctttcatctagcccgctcgctgcgggcaatgcacctacatacctgctacaacaattgttgcaacacattgtaccatctctgactcaactagctgtggcaaaccctgtctcctacttgcaacagctgcttgcattcaaccaactgactttgtcgaagtctgctgcgtacttacaacagctacatcagtcacttaatccattgttagtggctataccactgattggctgaataccactgcgtcaactattgctgccatacaagcagttctctatgatgaattc

SEQ ID NO: 292672 - DNA, 440 bp, Zea mays
ggaggaacaagggtgataaaggtaagatgccagctgtgattgcctgttggatcctgtagggttgaagaatcatcagccctattacatcagttacctttggtgcatttattggcacaaaacatcagggcacaacaactacaacaacttgtgctagcaaaccttgctgcctactctcagcaacagcagtttcttccattcaaccaactagctgcattgaactctgcttcttatttgcaacaacaacaactaccattcagccagctacctgctgcctacccccagcaatttcttccattcaaccaactggcagcattgaactctcctgcttatttacagcagcaacaactactaccattcagccagctagctggtgtgagccctgctaccttcttgatacaaccacagttgttgccgttctaccagcacgctgcgcctaacgc

SEQ ID NO: 292673 - DNA, 301 bp, Zea mays
ttatgaaccttggtgttccaactacggtcttcactatcacaggagtgaccatgggtgcatttgttggctcaaaacatgatcgctgcaactacatcaacttgtgctaggaaacctcgatgcctactctgatgaacagcggcatcttccattcagcgaactggctgcatcgaaatctggtgcttatttgctacaagaactaccatgcagtcacctatgtgatggctactggaagaaatgtcttccattaaaacaactgagacctttgaactctgatggctatttaccacatcttgagatacta

SEQ ID NO: 292674 - DNA, 414 bp, Zea mays
gtgaaaccccaagtgttcaaccctacaggatccaacaggcaatcgcatcaggcatcttaccattatcacccttgttcctccaacaactcgtagccctattacagcagttacctttggtacatttggcggcacaaaacatcagggctcatcaactactacaacttgtgctagcaaaccttgctgcatactctcagcaacatcagattatttcattcaaccaactggctgcattgaactctgatgcttatttgcaacatcaattaccattcagccagctagttgctgcctacgcacagcaatttactacattcaaccaactagcagcattgaactctgctgcttatttacagcagccacatctactaccattcagccagctagctgatgtgagccctgctgcctttttgacacaac

SEQ ID NO: 292675 - DNA, 445 bp, Zea mays
tctcttcccaactgccatgtaactcttttatcgccaattgcctccccttccaaaccgtgtcataatgaatttcacatttatatttttcttccaaccttttctgcagctccttcggacccatgttagactccttgaggagatggataacctttgatgctacccaagcgctagtaggggtcgtggttttccttctagcactggaagtacaagtgtgttcctcaattaagacaattacctgcaataataaacctcagttagtaacaacatagatggcaagggcacaacatagattagtaataacaagtctataccataacactattcccagattattgcctacgtcccacaatatgccaagggcaaccttctccattgcaattaccaataaatcgacttggatcatttttatatatttctagctcaaactcttcattgatcgcaaact

SEQ ID NO: 292676 - DNA, 454 bp, Zea mays
  unsure (1)..(454): unsure at all n locations
ctttatcgcccttgttgtttcaacaatcaccagccctatctttggtgcagtcattggtacaaaccatcagggcacaacagctgcagcaactcgtgctacctgtgatcaaccaagtagctctggcaaacctttctccctactctcagcaacaacaatttcttccattcaaccaactgtctacactgaaccctgctgcttatttgcagcaacaactattaccatttagccagctagctactgcctactctcagcaacaacaacttcttccatttaaccaattggccgcactgaaccccgctgcttatttgcagcagcaaatactactgccatttaacgagctagctgcagcaagtcgtgcttncttcttgacacagcaacagttgctgcctttctacaagcagtttgcggctaaccccgcaacccttttacaactaccacaattggtggcctttgg

SEQ ID NO: 292677 - DNA, 426 bp, Zea mays
cgggcgtcgtccccccggacgcgcccgtgctcttcgcttcgagggcgcctagaccatcgctcaagtacctggagctgctcctcccagcggaaatcggctccgaccacatcgaactaccgaccgctgccgccgcggggcacatcgtcgcccaagtcaccggcaacaacatggtgtccgtggcatagggccaactccggtgcgccctcgtcctcacgcataacttcctgtcaggccaccactaggccgtcagcaaggagtgggacgtggtcgccttcgcgcacccagtgtgcaacctggaggaaaagacggtggacaccatctacactggatagatcgagcacctgctgcagcagtacctcaagccttcacctaccttgattggtgccaagctgtttgtggggctgcagcactgccatgagcagggca

SEQ ID NO: 292678 - DNA, 331 bp, Zea mays
  unsure (1)..(331): unsure at all n locations
gttcgcagccctaggatttgggggtctgtaggggtttgatcgtttctcgccgtgaatctgctntggtgtaaaccaacggatctcggatcgtagtcttcagaagatcccggattttgcgcttctgcataagaacaacaaatcaaaagcgtgatcagctcggtgccaacaaaacctcaacaaccaagtttcatgtctgatctcgacgtccagcttccatctgcctttgatccgtttgctgaggcaaatgctgaggactctggtgctggtcctgtaacgaaggattatgtgcatgtgcgcatncagcagcgcaacggcagaaagagtctgacta

SEQ ID NO: 292679 - DNA, 451 bp, Zea mays
  unsure (1)..(451): unsure at all n locations
cccttgttcttccaccacccgcaagccttataccagcagtaaccttgggtccattggggggcccaaaccatcagggcccaccactacaacaacttgtgctagcanaccttgctgcatactctcagcaacatcagtttcttccattcaaccaactggctgcattgaactctgctgcttatttgcaacaacaattaccattcagccagctagttgctgcctacccccagcaatttcttccattcaaccaactagcagcattgaactctgctgcttatttacagcagcaacaactactaccattcagccagctagctgatgtgagccctgctgccttcttgacacaacaacagttgttgccgttctacctgcacgctatgcctaacgctggcaccctcttacaactgcaacaattgctgccattcaaccaacttgctttgacaaacccaacagt

SEQ ID NO: 292680 - DNA, 491 bp, Zea mays
  unsure (1)..(491): unsure at all n locations
cccgggtgtgagaccaactagcnaacatangaaagcacccaatagtgtacccaacaattgtgcagccaaaatanttttgcttcgcttatgccctccttggtctttctgcaagntgttgcttaccgcaaccattnttcccacaatgggctcacaagctcctatagncttcccttcttccncccataccctctcacnncagcggtgtcttcaatggtgtgaaanccccaatnntgttcaaccctacagngatccaacaggcnaatcgcaaccaggcattcttacncattatcancccttgtntcctccaaccaaccgtcagnccctattacagcagntntacctttggtccatttnggtggcaccaaaacatcaagggcacaacaactacaacaacttgtgctagcanaaccttgctgcatacctctcagcaacatcagtttcttccattcaaccaactggctgcattgaactctgctgcttatttgcaacaa

SEQ ID NO: 292681 - DNA, 368 bp, Zea mays
acatcctaccccgttggtttcgtgccgctcttatggtggatcagcgcgtacaaatgcatcgtctgctgcgacgacatctacatgctcaaaggctcatgctgcaagtcgctcgccccgttcccgcaaggctgcttctactccaacgccctactagggctcaagtgctacgagaaccccaagcacaaagtcaccgctgttcccgccgacgaagaatagatctgcggtgccactattaaggtggtggaagggtctactgttctgactgcgcttcactgatctatcatcatcaggcggaagcgattctatgataatgcaaaactttgtacatgctttgatcgaaggtagtgtaacatattggtaggcaacaa

SEQ ID NO: 292682 - DNA, 403 bp, Zea mays
attttcagcattcaaaaacacaccaagcgaagcgcactagcaacgacctaacagcagtggctaccaagatattagccctccttgcgcttcttgcccttttagtgagcgcaacaaatgcgttcattattccacagtgctcacttgctcctagtgccattattccacagttccttccaccagttacttcaatgggcttcgaacatgcagccgtgcaagcctacaggctacaactagcgcttgcggctagcgccttacaacaaccaattgtccaattgcaacaacaatccttgacacatctaaccctacaaaccattgcaacgcagcatcatcgacaacaacagtttctgccatcactgagccacctagccgtggtgaaccctgtcacctacttgcaacagcagct

SEQ ID NO: 292683 - DNA, 389 bp, Zea mays
cccacgcgtccgatcaaagatgagaagcgcgtgctgaccggagaggagctgttcgtgaacaagacccacgggccgtacaagagcgcgaccgaggtgtgggaccacgaggactgagcggagctgccgtgccgccggatccctccactccacctgatgaaaccagaataaaggataccgacgcacctgtcagtcacctccctcccgtgccttgcgagagcggcagcctctcgcacagggaagatgctctgtgtctgagagcatgcagcctcgcacgagaaagatgcagaaggagtgtgtgtggcgcgcaatacactcctgtactgtacgatagactgaataataataaagaagaaaacgcagcagtttgccgttgcgttttcctttgtgct

SEQ ID NO: 292684 - DNA, 410 bp, Zea mays
  unsure (1)..(410): unsure at all n locations
gtttatgccagtgctcagtcaactagccatggtgaaccctgccgtctacctagaacggctttcatctagcccgctcgcggtgggcaatgcacctacgtacctacaacaacagttgctgcaacaaattgtaccagctctgactcagctagctgcggcaaaccctgctgcctacttacaacagttgctaccattcaaccaactggctgtgtcaaactctgctgcgtacctacaacagcgacaacagttacttaatccattgccagtggctaacccattggtcgctacctatctgcatcatcaacaacaattgctgccatacaaccaggtctntttgatgaaccctgccttagcacaacccatcgttggacgtgacatctactagatccatatgacatgtactcgacaatggt

SEQ ID NO: 292685 - DNA, 425 bp, Zea mays
attgagaccaactagcaacatataaagcacaatagtgtaccaacaatggcaggcaagatattttgcttccttatgctccttggtctttctgcaagtgttgctaccgcaaccattttcccacaattctcacaagctcctatagcttaccttctacccgcatacctatcaccaacggagacttcaatgtgtgaaacctcaactgttcaaccctacaggatccaacaggcattctcatcatgcatcttaccattatcacccttgttccttcaacaaccgtcagccctattacagcagttacctttggtccatttggtggcacaaaacatcatgctacaacgactacaacaacttgtgctagcaaaccatgctgcatactctcatcaacatcaatttcttccattcaaccaactggctgcattgaactc

SEQ ID NO: 292686 - DNA, 264 bp, Zea mays
ctctcaccagcgtatgggggaagaattgaagctataggagcttgtgagcattgtgggaagatggttgcggtatcagcgcttccagaatgaccaacgagcatcagctagtatagcttcatttatcagccgatccatctccgagcacaggtcaccaccgtgcagcctagccaccgtctaacaccgagtcttctctgttcttctgcggcgaacaaagtcaatccatagccgtgttgctggtgctgattttttttttccaacaagatt

SEQ ID NO: 292687 - DNA, 429 bp, Zea mays
gtggcaggcacaggcgatggctagaggatccttgacaccatcaatgcagattgtatgagtatcctctagccattgagaggtggcaggcacaggcgatggaggctgataaagaattctacagtcggatacgcatacctgatgaagatgattcaagtagtcagaagcacacatgccgtagttctgcttcacagggtgccgatagcaaacctgcatctgagcggcaatcaagaggtgtggagcatataaaacagggtctcgtgaactttatagcctcgctgctgatgccattatatagaggaaaaaagatcgaccgagaggggtacaaaacaatcatgcgcaaatctgttaacaagatcattgatacatgctcagaaggagagaaatcaatgactactcttgagtttcttgatgataaaaggaaaattaaga

SEQ ID NO: 292688 - DNA, 141 bp, Zea mays
gagcacctccgtccaatgtccgtactcttgcgtgcccgtacaacgacgggctgggcttctttcgccacgagtgggataagcacgtcacctgctcagcctacttcttcgacgagcacggctacttacatgcctcgctatgcc

SEQ ID NO: 292689 - DNA, 344 bp, Zea mays
gccacgcgtacgttcacacgtccggatttgtgagggtgatccgcgctgagaaaagatggctaagatcaggcatgtcactgcggcggcactgtgcttaacgaccctggtggccagctccatctgtcaagtctaggtctagctgcagaagcatcatgtacctgcagctgctccagtagactcaagagaatctcgtatgaaatttatgccagcagctatatctgaaacatatcctgagcctaataggcggctgctacagacaattttgaaaatgatgcataccgctgcttctgatactgccgagaatagaatgactccatcagcagttgctgcatgtatggccccac

SEQ ID NO: 292690 - DNA, 470 bp, Zea mays
cggttcggaatcccgctcgagccacgcagtccgaacatagaagcacaatagtgtaccatcaatggcagccaaaatattttgcttgcttaggctccttggtctgtctgcaagtgctgctaccgcaaccattttcccacaatgctcacaagctcctatagcttcctttcttcccccatacctctcaccagcggtgtcttcagtatgtgaaaacccaattcttcaaccctacaggatccaacaggcaatcgcagcatgcatcttacctttatcacccttgttcctccaacaaccgtcagacctattacagcagttacctttgatgcatttgctggcacaaaacatcaacgcacaacaactacaacaactcgtgctaagaaaccttgctgcctactctcagcaacagcagtttcttccattcaaccaactggctgcatcgaactctgctgcttatttgcaacaacaactaccat

SEQ ID NO: 292691 - DNA, 365 bp, Zea mays
ttatactcctatacctttctgcgaccggctttacaggaaccatgtccccgcaatgctcgcaagctactatagcttcccttcttcccccctacctctcaccacctgagtcttcggtatgttaaaacccaattcttcaaccctacaagatccaacaggcaatcacagctggcatcttacctttatcaccctttatccctacaacaatcatcaaccctattacatcacttaccttctatgcattaattgtcacaaaacattagcccacaacaactacaacaactttgtctaacataccttgctacctactctcagcaacaacactttctttcattcaaccaactagcttcatttaactctgcttctta

SEQ ID NO: 292692 - DNA, 363 bp, Zea mays
aagaccatcaagcagcatatagagtgcaacccagtagctgcaatatagcaacaatggggacgaacatattttctctccttatgctccttgctattactacatgtgccgctaacgcaacaattgtccctcaatgctcacacgctcctattgctacccttcttgctccatacctttcatgaataatagcttcaacatgtgaaaacccaactcttcaaccatattggcttgaacaatcaatctcatcaggcaacatacctctatcgcactagctgatctaacaattaccagccctatctttggtgcagacatcgctacaaaccatcgagtctcaacagctagctcaactcgtgctacctctgatca

SEQ ID NO: 292693 - DNA, 439 bp, Zea mays
gccacataaaaagtgtaattaagtgcctacaacagagctactacgactaacacggtaggctccatcataatgctccttgctctttacgcatgtgctgctaacgccacaatactacctcaatgctcacaagctcctatagctttcataattacaacataccttgcatcaatgatagcttgattatgcgaaaacagagctcttcaaccatatacgcttcaacaagcaatcgcagcatgcaacataccattatcacccttgcagtttcaacaatcgccagccctatctttggtgcagtcattggtacaaaccatcatggcacagcagctgcagcaactcgtgctacctgtgatcaaccaagtagctctggcaaacctttctccctactctcagcaacatcaatttcttccattcaaccaactgtctacactgaaccctgctg

SEQ ID NO: 292694 - DNA, 376 bp, Zea mays
aactacacatagaaatcacatagtgtgaccccaatggcagccaagtatttttgcttccttatgctcgttgtctttctgcaagtgctgctaccgcaaccattttcccacaatgctcacaagctcctatagcttcctttcttcccccatacctctcaccagcggtgtcttcagtatgtgaaaacccaattcttcaaccctacaggatccaacaggcaatcgcagcaggcatcttacctttatcacccttgttcctccaacaaccgtcagccctattacagcagttacctttggtgcatttgttggcacacaacatcatggcgcaacaactacaacaacttctgctactaaaacccgttgcttactactatcaacaaca

SEQ ID NO: 292695 - DNA, 373 bp, Zea mays
gagagcgccatacatgatcaaccttacagcaccaatggccactaatagattgtacgggcttatgattcttgatgaagctgaatgtgccgataacgcaaccattgatcttcaatactgacaacgtggtattggtgctcttcttggcccatatcttccatcaccgaccgctacaggtcgagataaacgacgcctacaaccgtacaggctccaacaagtactcggaacacgacacttacgtgtactaccgctgatgttacaacaatcggcagcacctatcactggcacactaattggtacagaccatgagaccacaacagctggcacgactgacgctacctgctatcagccgactgacactgtcaaacttatctac

SEQ ID NO: 292696 - DNA, 368 bp, Zea mays
acttaaaccactctaagtgacatacattactcacggcctcacagcaatgtgtgccgcgataccatatatttattgcgctccttgcgctgcactgcgatcgcatcaaatcgtccttcattatctcacacagctaactctatcgaaggctcattattacactagacctttgcatcgaatccattcaatgggcatcttaacacccatgtagcacatcatataagctacagcaagcctttgccgctagcgtcagactgcaaccaatctagcagctgaaccacaatccttgcaacctctaacaatccacatcatcgtaacgcatcagctacaccaatctgtaccagcactgagccacctagccatggtcaacc

SEQ ID NO: 292697 - DNA, 416 bp, Zea mays
actaattaccatgcacctatcaccatggtggttaccggtatgtgaaaacccaattctgcaaccttacaggatccaactggcaagcttatctacaatcttaccttcatcaaccatgcagctagatcaatgatgagacctatgacaacagttacgatacagcgcatgtattggcacatatcataacgggacagcaactacgacaactcgcgctaacaaacgttgctgtctactctaagcaaccgcattgccttgcattcaaccaactaggttcatcgaactctgattattatttgcagccatctcaactaccattcagacagctacctgatgactacccccagcagtctgatgcattcaaccaactagcagcattgaactctactgcttatttacaggcacaacaactactgccattc

SEQ ID NO: 292698 - DNA, 284 bp, Zea mays
cggacgcgtgggctagcaacatagaatgcacaatagtgtaccaacaatggcagccagaatattttgcctccttatgctccttggtatttctgcaagtgctgctacggcgaccagtactagctaccagggttaaaaaaaaaagagtgagtcggcgcgacgtgcaaggcgcagcatgtgtactgtgcgcgtgcaaatccagaatgacgtagctctgacgtgggctcgcaatattctcgcgtgttcgttacaataatgataataactatgaggaataaaaaaaagaa

SEQ ID NO: 292699 - DNA, 408 bp, Zea mays
aactatcaccatttaacctgatagcttctgcctactctaactagccaccacggatgggattaaaccaattgttcgtactgtacccctctgtttattcgcagcatccaatactactgccatttagcgagctacctgcagcacgtcgtacttacttcttgacacatctacacctgctgcctttcaactagcagtttgcggctaaccgcgcaactctcttacaactactacaattgctgacctttgcccaacttgctttgacaaaccctgcagcctcctaccaacaacacatcattggcggtgccctctcttagattgactattagacgtaattcaataataaagtacttcgtatgatgtatgacaccaaccagaactaagacgttacatctgcagattcttcaagcaggt

SEQ ID NO: 292700 - DNA, 250 bp, Zea mays
ctgtccctccttatactccttgctatttctgcataacttgctaacgctacaattttccctcaatgctcacaagctcctatagcttcccttcttcccccataccttccatcaattatagcttcaatatttgaaaacccacctctttaaccctataagctccaacaagcaatctcatcaagcaacatacctttattacccttgtttcaacaatctccaaccctatctttatttcaatcatttgtacaaacca

SEQ ID NO: 292701 - DNA, 436 bp, Zea mays
ccggttcggattcgacccacgcgtacgcaacaagcgacatagaaagtggaatacagaagcaacaatagagcaacaatggcggtcgagaagttaccatccttatgctgcttgctctatatgcatagtgttgctaacgccaccatttttactgattactgacaagctattatagctgtccttattcaccaaaacgttgcatgaatgaccgctgcagttcagatgaaaacccagaccttcaaccctacaggcttcatcaagcactcgcaacaagcaacttacctgtatcaccactgtacattcaacaattatcagccatatctttgcagcaaacattgctacaaacgatgactacactgcagttggatcaacttgtgctagcactgatcagacgcatatgtttggcacagcttaatgcctactatcagcagcaacggtc

SEQ ID NO: 292702 - DNA, 399 bp, Zea mays
taccgactcggaatcccgacccacacgtacccatacgctcgatacgaaacgcactatcgacgacctaacaccaaggcttaccaagatagtaggggttcttgcacttgctgcccttgtaacgatcgcaacaaatgccttcattattccacaatgctcacttgctcctagtgccattataccacaggtgcttccaccaggtacttcactgggctttgaacattcaaccatgcaagcctacatgctacatctagcgctagctgtaagcgccttacaactaccacttgcccaattgctacaacaatacttgccacatctaaccctactgaccattgccacgcagcaacaacaactacaacagcttctgccatcactgatccaccgtatactgtgagaaccctg

SEQ ID NO: 292703 - DNA, 359 bp, Zea mays
acgaagcaacatagaaagtagaatccattatcaacaatagagcaacaatggcgaccaagatgtttgccctccttatgctccttgctgttcctacatgtgttgctaacgcgacaattttgcctcaatgctcacaagctgctatagctttccttcttcccccataccttacatcaattatagcttcagtatgtgaaaacccagctattcaaccatataagcttcaacacgcaatctcaggatgcaacatacctttatagaccttgctgttgcaacaatgaccagccctatctttggtgcagtcattggtacaaaccatgagggcacaccagctgcagcaactcgtgctacctgtgatcaac

SEQ ID NO: 292704 - DNA, 366 bp, Zea mays
ttctagatcgcgagccgcccttcttttttctttcttttttttctttattccatcttggatccgtgtttctctcttgttttttcttttttgaaaaaacgaggagggcgtcgtcagcggccctcctgctagccttgttggcggtggccctggtctccctggccggcccagccacggccgcggggaacaagaccgggcaggtgaccgtgttctggggccggaacaaggccgagggcacgctgcgcgaggcctgcgactcgggcctctacaccatggtgatcatgtccttcctcgacgtctacggcccgcagcgcggcggctaccaccagtaccacctggacctgtcggggcactccgacggcccggcat

SEQ ID NO: 292705 - DNA, 333 bp, Zea mays
atttgagcattcagaaacacatcaagtgaagctacctagcaacgacttaacgacaggggctaccaagatattagtccttcttgctcttcttgccctttttgcgagcgcaacaaatgcgtgcattattccacaatgctcacttgctcctagtgccattataccacagctcctacgaccagttacttcaatgggctttgaacacttagctgtgcaagcctacacgctacaacaagcgctcgcggctagcgcctgacaactaccaattcaccaactgctactacaatgcttggcacatttcaccctacaaaccatcgcaacacagcagcaacaaca

SEQ ID NO: 292706 - DNA, 413 bp, Zea mays
agctactgactactctcatcaacaacaacttcttccatttaaccaattggccgcactgaacctcgctgcttatttgcagcagcaaatattactaccatttagccagctagctgcagcaagccgtgcttccttcttgacacagcaacagttgctgcctttctaccagcagtttgcggctaaccccgcaaccctcttacaactacaacaattgttgccctttgtccaacttgctttgacaaacccagcagcctgctaccaacaacacatcattggtggtgccctcttttagatagcttattagttgtaattcaataataaagttttttggatgatgtatgtggccaaccagaaataagaagttacattttcaaaaaaaaagtgctgtcccattcaagcaagggtacctcactcac

SEQ ID NO: 292707 - DNA, 308 bp, Zea mays
agccaagcggcagtgtgtatagaggatcgtcgaacagaacagcatgaacatggtcatggctgctcgcgtgtgcctgggtctggcagctggcagcgcctgtgcaatgcatatgccctgcccctgcacgaggctgcagggcttgcacagcgctggcaccggcctgacgacgatgatgggcgccgccgggctgtacccatacacacagtacctgaggcagccgcaatgcagtccactagcagcggcgcgctactacgccgagtgtgggcagacgagcgccatgtaccagacgatcctgcaacactgctgcc

SEQ ID NO: 292708 - DNA, 280 bp, Zea mays
ggcagatgaaccggcggcggcacatgttccgtgtggtggcaggtggaccggcagcgggtggtgtatcgtccgtgggagatgcacctgacgttgcagttgtcgatgtcgaatcacttttatatatgaccttactatttcattgatttggtggcacatactctgttatcgtcaaatccatttttattctccttgttacaactattatgattgctgttgactcttcgtgatactataacaggtcaatatacattgatccttattacattatatcacactttat

SEQ ID NO: 292709 - DNA, 397 bp, Zea mays
acgctgggtcttcagaccattagctatatctactccagagcgcagaagaacccgatcgacgccatgagggtgctgctcgatgccctcgctctcctggctctcgctgcgagcgccacctccacgcatacaagcggcggctgcgggtgccagccaccgtcgccggttcatctaccgccgccggtgcatctgccacctacgggtcacctgccacctacggtgcatctcccaccgccggtccacctgccgtcgccggtccacctgccaccgacggtccatgtgccggcgacggctcatctgccgccgtcaccatgccactaccctactcaaccgacccggcctcaggctcatccccagccacacccatgcacgtgccaacagccgtatccaagcccgtgcc

SEQ ID NO: 292710 - DNA, 212 bp, Zea mays
caaaatattctgcttccttatgcgccttggtctttctgcaagtgttgctaccgcaaccattttcccacaatgctaacaagctcctatagcttccctttttcccccatacctttcaccagcggtgccttcaatgtgagaaaccccaattgttcaaccctacaggatccaacaggcaattgcaacaggcttcttaccattataacccttgtttc

SEQ ID NO: 292711 - DNA, 204 bp, Zea mays
agaaagtggaatacagtagccattatagagcaacaatggccgccaagatattggtacgggcttatgctccttgctctttctgcatgtgttgctaacgcgaccattgttcctcaatactcacaagctactatagctgaccttcttcccccataccttccatcaatgatcgatttagtatgggagaacccagcccttctaccctac

SEQ ID NO: 292712 - DNA, 392 bp, Zea mays
acctacgagtgagaccaactgtcaacatcaaaagcaccattatggacccacagtggcccctaagagatggcgtcctcatacgctccgtgctctttatgcacgttctgataccgacaccattttctcacagctctcacaagctcctatagcttccctttttcccatacacctcataaaagctgtctacaccatatgtgaacacccatttcttaacacatacacgatccaacacgctctcgcacctggcatcacacctatatcactcgtggtcctaccactatcatgacccatattacaggaattacctgatgcgcaccaattggcacaaaccattacggcacatcatctacaacaacatgtgctagcaaaccttggtgactactcgtagctac

SEQ ID NO: 292713 - DNA, 319 bp, Zea mays
caactagcaacatacaaagcacaatactgtaccaacaatggcagacacactatgggggttccttatgctccttggcctttctgaaagtgttgctacggtaaccatttactctcaatgctcacatgctcctatacctttaatcattgctccattacctcttaccaacaactgtacttcaatgaagcgatacacgcaccagctaacattaccagatgcaatatgacctattaaaggtatcttacatcatcactcttgtccattaaaactgacctccttgcacagattgaccttaacatcatgggacagcaactacaataac

SEQ ID NO: 292714 - DNA, 412 bp, Zea mays
agctgatgaacgctcactgccgaattgtgtactagcagaggactatgctagtaccaattagggtgctaacctcacctatgcaagctagcttgttgacccaatggcacttgcagagtcattaccagctgttggaccttaagaatgcggcgctgttactgctgcaaatgctgaccgcctcaggacaactggctaaagaatatccgtgacactattagactctgcagacattatatcgtgcactgctgtacaatgaatatcttacgtagctaatggcctgaagggagtggacaggagcatgcccacatcagatagtccaagatgcagttgcaaagaatatgaatctcaagttctttgaggtgcctactgggtggaaatcctttgcgaatttgatggatgctggaatgtgctcaat

SEQ ID NO: 292715 - DNA, 354 bp, Zea mays
acgacggaatcgtacctgtcgagcttcagcacgagcatccagagagctgcatacaggaccgcgagcgactcgttaggagaggctgctctttatgcatgtgcaggtacacgcggatcatcgcgctcactgactgacgagcagatctcgcagctgttgttccacgcttccgtagatgaacactggctcgactgtctcctgacgccgttcggcgagtctatcggctcctacaggctattggaccaggcaacatacatttacaaccattactgccagatttacgaggcctatgctcgcagctatcattagctcttaccatccaaggtcagcgactgttcgacatctctacctgtgatc

SEQ ID NO: 292716 - DNA, 361 bp, Zea mays
gtagaagttcccaggcaaggtgcgcgccgtggtcaagttcaacgcggcgctggcgcaccacggcatggccggcgccgacgtgctcgccgtcaccagccgctttgagccctgcggcctcatccatctgcaggggatgcgatacggaacgccatgcgcatgtgcgtgcatcggatgactgatcgataccataatcggagacaagaccgggtttcacattggcctcctacgcgtatactgtcacgacgatgaaccgttgtgacactagaaggtggacaccacattgctgtgttccgtgcaggggttgggaccgaccatgtacgcacagaagctgcagcaactcatgatacctgagctctaccaa

SEQ ID NO: 292717 - DNA, 338 bp, Zea mays
cgctggctactcctccccctcttatcaagtcctcctcgggttagggttccttagggttttgtggaggggcgatggcggcggctgatgtggagtaccgttgcttagtcggcggacttgcctgggccaccagcaacgagtcgctggagaatgccttcgccttctacggcgagatcctcgactccaaggtcatcaccgaccgggagacggggaggtcccgcggcttccgcttcgttaccttctacttcgagaactccatgctcgacgctatcgagaacatgaacggcaaggagctcgacggccgtaacatcaccgataaccaggcccattcccgtggcggc

SEQ ID NO: 292718 - DNA, 293 bp, Zea mays
cagcaagcaacatagaaagtagaatccattagcaacaatagagcaacaatggcgaccgggatattttccctccttatgctccttgctctttctacatgtgttgctaacgcgacaattttccctcaatgctcacaagctcctatagcttcccttcttcccccataccttccatcaattatagcttcagaatgtgaaaacccagctcttcaaccatataggcttcaacatgcaatcgcagcacgcaacataccttaatcgcccttggtgtttcaacaatcaccagccctatcttt

SEQ ID NO: 292719 - DNA, 435 bp, Zea mays
ggcgatggatcctgtagggttgaacaggcaatctcaacacttatcttaccattatcacccttgatcctccagcaacggtcagccctattacaggagatacctttggtccatttggtggcacaaaacatcagggcacaacaactacaacaacttgtgctagcaaaccttgctgcatactctcagcaacatcagtttcttccattcaaccaactgtctgcattgaactctgctgcttatttgcaacaacaattaccattcagccagctagctgctgtctacccccagcaatttctaccattcaaccaactatcaccattgaactctgctgcttatttacagcaacatcaactactaccattcagccaactagctgatgtgagccctgctgccttcttgacacaacaacagttgttgacgatatacctgcacgctatg

SEQ ID NO: 292720 - DNA, 394 bp, Zea mays
attgagaccaactagcaacatagaaagcacaatactgcaccaacaatggcagccaaaggattgtgcttccttatgctccttggtctttctgcaagtgctgctaccgcaaccattttcccacaatgctgacaagctcatatagcttgctttcttcccccatacctctcaccagcggagtcttcaggatgcgaaaacccaattcttcaaccctacaggatccatcaggctatcgcatccggcattttacctttatcacccttgatcctccaacaacgcgtagacctattccagacattacctttggtgcactacttcggccagagcatgcaggcacagctgcttcctctacttgcgctaagaaaccttgatgcctactactagctgcagcggactc

SEQ ID NO: 292721 - DNA, 305 bp, Zea mays
gcgcagcatgtcaaaaacatcaccaagtcgaagctgcactagcaacgactctaacatccaatggctggccaagatattagccgctccttgcgcttcttgcccttttagtgagcgcaacacatgcgttcattattccacagtgctcacttgctcctagtgccattattccacagttcctcccaccagttacttcaatgggcttcgaacatccagccgtgcaagcctacaggctacaactagcgcttgcggcgagcgccttacaacaaccaattgcccaattgcaacaacaatccttggcacatcta

SEQ ID NO: 292722 - DNA, 314 bp, Zea mays
cacgtctcgtcggaccggcccccgggcgtcaccaggggccggtactggctgggcttgtcggggacgctctgcgccgcggcgctttacggcctcgtcctgccgctggtggagctcgcgtacaggcgcgccgcgggcggtggccgcgccgtgacgtacgcgctggtggtggagatgcagctggtgatggggttcttcgccaccggcttctgcacggtaggcatggtcgtgaacaaagacttgcaggcgatcccgagggaggcgaggcagtacgagcatgcgtaggcccggtactacatggtgctgtcgtgggcggc

SEQ ID NO: 292723 - DNA, 325 bp, Zea mays
  unsure (1)..(325): unsure at all n locations
cccacgcggccgacagagcgcacaagaacccgatcgacaccatgagggtgatgctcggggtcctcgctctcctggctctcgctgcgagcgccacctacacgcatacaagcggcggctgcggctgccagccaccgacgtcggctcatctaccgacgncggtgcatctgccaccttcggttcacctgccacctacggcgcatatcccaccggcggtacaactgacgccgacggtgcacctgacaccgacggtccatgtgccgtcgacagttaatatgccgacgtcagcatgccactacgctactcaaccgcaccggactnaagctga

SEQ ID NO: 292724 - DNA, 434 bp, Zea mays
ccaccgagacccacccatgcatcgcaacccaacaatcgatcatcaatttcaaccaagatactttacctcctggggctgcgtgctctttatgcatgcggggctaactcgacaattttccctcaatgctcacaagctcctatagcttcccttcttcccccataccttccatcaatgatagcttcactatgtgaaaacccacctcttcaaccctatacgctccaacacgcaatctcagcaagcaacatacctttatcacccttgtttcaacaatcgccagccctatctttggtgcagtccttgctacaaaccatcaaagcacagcagctgcagcaactcctactacctgtgatcaaccaactagctctggcaaacctttcttcatactatcagcaacaacaatctcttccattcaaccaactatatacactgaaccc

SEQ ID NO: 292725 - DNA, 362 bp, Zea mays
gcgtaggatattagaccctccttgcgcttcttgcccttattgtgatcgcaacaaatgcgttgattattccacaatgctgacttgctcctactgccattattccacagtgcctaccaccagctacttcaatggtctttgaacacctagctgcataagccatcattcaacaacaagcgcttgcagctagcgaattacatcaaccaattccccaattgcaacaacgctccttgccacatttaacaatgcatgccatcacaacgcaacatcatcaacagctgctaccagcactgacccacctagccatggtgaaccctgccgtctacttgcctgagcatctgctagcatccaacccactagctctg

SEQ ID NO: 292726 - DNA, 371 bp, Zea mays
tcgttttacccacaggttgcgctaaacattaacgccttcttgcaacagaaacaggggctaggattctacccacaggatgtggcaaacaatgtctgcttcttacaacaacaacaattgctgccatttaaccaactcgctttcacgaatcctaccaccttattgcagcagcccaccattcgtggtgccatcttgtacaatctttatgaactatactgtaataataaagttctaatgctgctaaaaccaagccgggagcgggtgcgagggcaagaacttctacacccggagcgcgttcctgatcgccgacaacaagtacccggacttaacggatggccgttctgaagaatccagctttcgtcagattgctggct

SEQ ID NO: 292727 - DNA, 321 bp, Zea mays
ttcccgggatttcgagcatgcacaaacacaccaagcgaagctacctagcatctacttaacaacaatggctaccaagggtggtccctacttgcgcttgtcgccctctttgagagcgcatcatatgcgtgcattattcctcattgctgactggctcctagtgctattataccacactgtctccatctagatactctactggacttcgtccaccgttctcatcatgccagctatttgctacgagcccttgcgccttgcgttcgtcaaccccgctatggatgtttaaatctactgctcacttgtcgactatataaactctgcact

SEQ ID NO: 292728 - DNA, 245 bp, Zea mays
atcgctcacatagctcctataccttgcattcttcacctatacctctcaccagcggctgcttgcatgtgtgaaaacccaatcgatcagacgtaccggatccaacaggcaatcgcatccaggatcctaccatcattaatcttgctcctccaacatgcgtcaaccctattacagcagctaactttgggccatttggagggacaaaaccatgcgggtccacaacgtccaaaacctgggcctgccaaact

SEQ ID NO: 292729 - DNA, 266 bp, Zea mays
gctggtgtgagccctgctaccttcttgacacaaccacagttgttgtcgttctaccagggcgctgcgcctaacgctggcaccctcttacaactgcaacacttgctgacattcaaccaacttgctttgacaaacccagcagcattctaccaacaacccattactggtggtgccctcttttagatttattatgagttatagtacaataataaagacttctgcctgatgttcgcgtattaccagaaataagaaagtacatttgtaagcac

SEQ ID NO: 292730 - DNA, 347 bp, Zea mays
  unsure (1)..(347): unsure at all n locations
gaactgtgtaataatggaacttggagcacccagctgtgcaagcctatatgctgcaaggagcaattgcggcgagcgtcttacaacaaccaatttcccagttgcaacaacaatccttggcacatctaacaatacaaaccatcgcaacgcaacagcaacaacaattcctaccagcactgagccacctagccatggtgaaccctgccgnctacttgcaacagcagtttgcttgcataaaacccacttgctctggcaaacgtagttgcaaaccagccacaacaacagctgcaacagtttctgccagcgctcagtcaactagccatggtgaaccctgccgcctacctacaaca

SEQ ID NO: 292731 - DNA, 441 bp, Zea mays
gcacaagttgttgtagttgttgtgccctgatgttttgtgccaccaaatggaccaaaggtaactgctgtaatagggctgacggttgttggaggaacaattaccattcagccagctagttgctgcctacccccagcaatttcttccattcaaccaactagcagcattgaactctgctgcttatttacagcagcaacaactactaccattcagccagctagctgatgtgagccctgctgccttcttgacacaacaacagttgttgccgttctacctgcacgctatgcctaacgctggcaccctcttacaactgcaacaattgctgccattcaaccaacttgctttgacaaacccaacagtgttctaccaacaacccatcattggtggtgccctcttttagattgcttatgagttatagttcaataatgaagttttttggatgat

SEQ ID NO: 292732 - DNA, 387 bp, Zea mays
cttgttgctggctctggggggaaggatatagagagagcgagagagagagagagatctggtggagaggctagtaggtggtcctcgaacgaagatgttggcggtgttcagcgggcaggtggtggaggtgccggcggagctggtggcggcgggcagccggacgccgtcgcccaagacgaaggcgtcgcagctcgtggggcgcttcctggccgcgtccgagccggacgtgtccgtgcagctcggcgaccacggccacctcgcctactcccacaccaaccaggcgctcctccgccccaggaccccgagggcagggtgccgctcttctgggggatcaccgccgacggctgcgtcgccttctccgacgacatcgacatgctcaaaggctcatgc

SEQ ID NO: 292733 - DNA, 440 bp, Zea mays
gacgaactagcaacatagaaagcacaattttgtaccaacaatggcagccaaaatatttgggtgccttatgctccttgggctttctgcaagtggtgctaccggaaccatttttccacaatggttacaagcttctatagctttccttctttccccataccttttaacaacgggggcttcaatgggggaaaacccaattggtcaacccttacaggtcccaccaggcatcggaaccaggcattctaccattataacccttgttcctccaacaaccgtcagccctattacagcagttacctttggtccatttggtggcacaaaacatcagggcacaacaactacaacaacttgtgctagcaaaccttgctgcatactctcagcaacatcagtttcttccattcaaccaactggctgcattgaactctgctgcttatttgcaacaa

SEQ ID NO: 292734 - DNA, 380 bp, Zea mays
cagctagcagcatacaaagcacactagtgtaccagcactggctgccgggccatattgcctgcatatgctcctcggtctaatctgcaagtgctgctacagcgaccatgttcccgcagtgcatcgcaagctcctatagctgcccttcgtgccccgtacctctcaccagcggagtcgttatctatgtgaaaacccagttgttgaaccctacaggatccatcacgcggtcacagctgtgcatattacctttatcacccttgttgctccgacaatcatcagtcctattacatcagttgcctttggtgcattgattggctcatatcatcaaggcacagcaactacgacatcttgtgctagcaaaccttgctgcctactgtcaagaa

SEQ ID NO: 292735 - DNA, 380 bp, Zea mays
agaaagcacaatagtgtaccaacaatggctgccaaaatattttgccttcttatgcttcgtgggatttctgcaagtgctggtaccgggaacatttttccgcaatggttacaagcttctattgctttccttttttccccggaccttttaacaacggggtcttcgggatgtgaaaacccaattcttcaaacctacagggtcccacaggcaatcgcagctggcatcttaactttatcacccttggtccttccacaatcatcagccctattacagcagttacctttggtgcatttattggcacaaaacatcagggcacaacaactacaacaacttgtgctagcaaaccttgctgcctactctcagcaacagcagtttcttccatt

SEQ ID NO: 292736 - DNA, 434 bp, Zea mays
ggggcattgaactctgctacttatttgtaacaacaactgctaccattcaaccaggtagctgtagtctaccagcagcaattgcttccattaaagcaactagcaatattgaactatcctgcttatctacaggagctacaactactaccattcaaccagctagctcgatgtgagccctgcttcctatctgacacaaccacagtagttggcgttctaccagcacgttgcgcctatacgctgcaccctcttacaagtggaacaattgctgccattcaaccaactcgctctgtcacacccattcaacgttttaccatcatcccatcattggtcggcgcactactattacattcagctatgatgtatagagcaatgctacagtcttgaatctgatgcatgtggcttcccagtaatagcacggtgcatttatagatggtaaa

SEQ ID NO: 292737 - DNA, 375 bp, Zea mays
gcgttcggagaactgaaaagtgaaggtcttgctttgtttaggcccaccagcctcatctttttgggtgcggttacccttcctgaagaggccaatccttccttctataagcaagtatggcgcatgcacaccatactgatcttcagagactatatgattaatgtcccacagaaccttgaagcttgccagaagatagtctatttcagcaatccattgtttatgaacataccaacgtcaacccaggttgacaagatgatgacttccagtgtcacgactccttaatactatgatgaggtgttttacactacggaccatctctataaagagaatgcagctggcatctcaatattatactatctaaaacatatttacccagat

SEQ ID NO: 292738 - DNA, 425 bp, Zea mays
  unsure (1)..(425): unsure at all n locations
ccaactagcaacataaaaaggcccaatattgtcccaccattgccggttaaaaaatttggcctgctaatcctcctgggcctttctgcaagtcctgttacggcaaccattttccaacaatgctaacaagctcctatagcttcccttcttcccccgtacctttcaccaacggtgtcttcggatgtgaaacccattcttaacctcagaccacaggcatccactgcatctaccttatcacccttgttcctccaacaatcatcagccctattacagcagttacctttgtgcatttattggcacaaaacatcanggcacaacaactacaacaacttgtgctagcaaaccttgctgcctactctcagcaacagcaagttcttccattcaaccaactagctgcatngaactctgctttctatttgcaacaacaa

SEQ ID NO: 292739 - DNA, 438 bp, Zea mays
gacagcacaatagtgttccaacaatggccgccaaaatatttcgcttacttatgcggctggacctatctgcaagtgctgctaccgcaaccatttatccacaatgctcacaagctcctatagctacctttattaccacatacctctcaccagcagcgtattcagcatgcgaaaacccagtgcttcaaccctacaggatccaacaggcacacgcagcaagcatcttacctttatcacccttgttcctccagacaacacgaacgcctattacagcagtacacctcaggtgcatgctgaggcacaaaacatcatggcacaacaactacagcagcttgtgctacgaaaccttgcagcctactatcagcaacagtagcatctcacattcaaccaactggctgcattgaacactgctgactatttgcaacaacaactaccattcag

SEQ ID NO: 292740 - DNA, 421 bp, Zea mays
aaaaagacaagcatagaacatctagagcaatttggttctgctggctagcgtactctatgggtggcctatcgggatcttagcaggagcaatacgaaagcttgaatgaaaagtttgtacaagcatagtcatctttacgagatcgtgataagaagctcgtgaggtgctgattgattgaaaaagaccttatattaattgggtgcacagctatagaggacaaactgcaagaaggcgtgccaacctgcattgaaactctctctgcagctggcataaaaatttgggtgttaacgggagataagatggaaacagcaattaacattgcatatgcatgcagcttggtaaacaatgacaccaaacagttcatcattagttcagagacagacactattagggaggctgaagaaccggttacaagtttagttag

SEQ ID NO: 292741 - DNA, 428 bp, Zea mays
ggcatattaactttaataaccttggtccttcaacaaccggcaagcctaataccagagtggccgtttggggcattggtgggccaaaaacatcaagggccaacactacaacacttgtgctaagaaaccttgctgcctactctcagcaacagcagtttcttccattcaaccaactggctgcattgaactctgctgcttatttgcaacaacaactaccattcagtcagctagctgctgcctacccccagcaatttcttccattcaaccaactggcagcattgaactctgctgcttatttacaacagcaacagctaccaccattcagccagctagctgatgtgagccctgttgccttcttgacacaacaacagttgttgccgttctacctgcacgctgcgcctaacgctggcaccctcttacaactgcaacaa

SEQ ID NO: 292742 - DNA, 434 bp, Zea mays
  unsure (1)..(434): unsure at all n locations
gttgctncgaccagttacctcaatgggcttcgaaaaactaacttggccaggcttccgggttccaccaggcccttgcggcaaccgtttaacaccacccaataacccaatggaaccaccattcctggccccatttaccattccaaacatcggaaccccaccacaacaacaggtcctacagcactggaccaactagatgtggtgaaccctgtcggctacttgcaacagcaggtgcttgcatccaacccacttgctctggcaaacgtagctgcataccaacaacaacaacaattgcaacagtttctgccagcgctcagtcaactagccatggtgaaccctgccgcctacctacaacagcaacaactgctttcatctagccctctcgatgtgggtaatgcacctacatacctgcaacaacaactgctgcaacagattgt

SEQ ID NO: 292743 - DNA, 364 bp, Zea mays
tctcccccttctcccttcccttctcttttcccgaaaccctatctccacctatgtatctttatacacccattcgacataatacatttccttcaatacacctttcttacttcatttaacatcaacacttaatacctttctaccatcaccttttctcctaacacctcatccctcttacaactacaacaattgataacctttgtccaacttacttttacataccaaaccccctcctaccaacaacacatcactttataaaccctcttttacattccttattacttataattcaataataaagtttttctgaccatctatctcaccaaccacaaataataaattacatttccatattttaatgttaata

SEQ ID NO: 292744 - DNA, 485 bp, Zea mays
  unsure (1)..(485): unsure at all n locations
cggaattacccgggtgcgatcccacgtccgtccggtgtggctttctttcctccccctttccggttcggtgttcgtggttcgtggagggttcnttccggggttcggggtttgcgtgggtgtggcccggatcgagaatggcngtngcgtcggatggttgagtacccgcnntgcttcgtcggcggccctcgccttgggtccacggacgaccacttccctcctacaacgccttcagcacctacggcgaggtcctcgagtccaagatcatcctcgatcgggagacgcagaggtcccgcggcttcggcttcgtcaccttctccacggaggaggcgatgcggaacgccatcgagggcatgaacggcaaggagctggacggccgcaacatcaccgtcaacgaggcccagtcccgcggcggccgtggaggcggcggcggcggctacggtggtggccgtggaggcggcggctacggcggtggcgggcgccgtgat

SEQ ID NO: 292745 - DNA, 443 bp, Zea mays
caaggattgttgttgcaattgggcacatctaaccctacaaaccattgcaacgcaacagcgacaacaacaacagtttctgccatcactgagccacctagccgtggtgaaccctgtcacctacttgcaacagcagctgcttgcatccaacccacttgctctggcgaacgtagctgcataccagcaacaacaacagctgcaacagtttatgccagtgctcagtcaactagccatggtgaaccctgccgtctacctacaactactttcatctagcccgctcgcggtgggcaatgcacctacgtacctacaacaacagttgctgcaacaaattgtaccagctctgactcagctagctgtggcaaaccctgctgcctacttacaacagttgcttccattcaaccaactggctgtgtcaaactctgctgcgtacctacaacagcgacaac

SEQ ID NO: 292746 - DNA, 403 bp, Zea mays
  unsure (1)..(403): unsure at all n locations
ggatcgtcgaaccgaacaacatggagaaggtcaatggtcttggccggggccctggtttgggaagttgcaacggcttttgcaaggcaaatgccttgcccttgcccggggctgaagggttggaacggggctggccccggcctgacaacaataatggcccccggcggctgtaccctaacccgagtacctgaggagccggagtgcacccgctggcggggcccctactacgccggtgtggcagccgagcgccatgtccagccgctccgggcacagtgctgccagcagcagatgaagatgatggacgtgcagtccgtcgcgcagcagctgcagatgatgatgcagcttgagcgtgccgctgccgncagcagcagcctgtacgagccagctctgatgcagcagcagcagc

SEQ ID NO: 292747 - DNA, 460 bp, Zea mays
  unsure (1)..(460): unsure at all n locations
cccggcgtgcaagttcgaagagatccaggacgtcaggcacttgagagccctgatggacatcaacttctggggccacgtgtacccaacccggctcgccatccctcacctcaggagaagccgtggccggatcgtgggcgtcacctccaactcgtcctacatattcatcgggaggaacaccttctacaatgccagcaaggcggcggcgctcagcttctacgacaccctgaggatggagctgggcagcgacatccgcatcaccgaggtggtgcccggcgtggtggagtctgagatcaccaaggggaagatgctcaccaagggaggcgagatgaaggtggaccaggacgaaagagacgccatcctggggccgacgccggccgagcccgtgggcgacttcgccaggaccgtggtgcgcgacgtgtgccggngtgcgaggtacgtgttcgagcccaggtggtacatg

SEQ ID NO: 292748 - DNA, 416 bp, Zea mays
ccgacccactcgacccacacaagtgatcgtactttatgtgcccttttattttgtgccaccaaatggaccaaacgtgacgactctatataatctgacagatgctgaaggaacaattaccattcagccatctagctcctgactacccccattaattacttccattcaaccaactagcaacattgaactctgctgattatttacagcagcaacatctactaccattcactcaactatctgatgtgagccctgctgccttcttgacacaacaacactatttgccgttctacctgcacactatgcctaacgctgacaccctcttacaactgcaacaatttcttccattcaacccactttctattacaaacccaacagtcatctactcaacaacccatcattgctggagcactctcttacat

SEQ ID NO: 292749 - DNA, 308 bp, Zea mays
ttcataatcacaccatttatttcacactatcaacgacctaacaacaagaagttttaatatattatcccttcttgcactactagccctttttgtgagctcaacaaatgcgttcattattccacaatgctcacttgctcctaattccattattccacaattcctaccaccaattactttaatgatcttaaaacacctaactgtacaagccaacattcatcatcaatcacttgcttatagcatattacaacaactatattaccaattgcaacaactattctttatcaatctaacaatacaatccatcacaa

SEQ ID NO: 292750 - DNA, 436 bp, Zea mays
gtagctgggaggatcatcttgcactggcagagtttgcttataacaatagctaccaggctagcatcaagatggcaccatttgaggctctgtatggcaggcggtgtatctctcctctatgctgggagactttgggagagagatccctggttggtcctgattgggttcagcaaacttttgaaaaggttcgggaaattcgtcagaatattttggcagctcagagtcgtcagaagagttatgctgatgtgaggaggcgggatctggaatttgttgttggtgaccaagtccttctcagggtatcacccactaagggagtggttcgtttcggtgtctctgggaagctcagcccgaggtacattggaccgttcactatcttggcccgagtgggcagcctagcttatcgcttgctactgccggattccatggcaggggtacaccc

SEQ ID NO: 292751 - DNA, 387 bp, Zea mays
tgggtcttcagaccattagctttatcttttccatatcgcacaacaacccgatccacacgatggggctgctgatcgttgctgttgctcatctgtctctcgctgacagcgccaccttcactcatacattccgcgcttgtatctgtcagcctacttccccatctctatcaccgtcatcgcttcatctatccacaaaacccacatcttccaccctataggcttcaacaagcactcgcacctcgcaacatacctttatcaactttgattcaacaatcaccagccctatcttttgagcagtcattggtacacatccctctatgcacatcatctgcaacaacttgtgctacctgtgatcaaccacatatctctggctaaactttcttactacta

SEQ ID NO: 292752 - DNA, 427 bp, Zea mays
gcgcgctatgcctaacgctggcacccttttacaactgcaacaattgctgccattcaacgaacgtgctttgacaaacccaacagtgttctaccaacaacccatcattggtggtgccctcttttagattgcttatgagttatagttcaataatgaagttttttggatgatgtttgtggcgtcccaaaactaagaaagtacatttctagaacaaaaaggcctagcgacatggcatcttacctttatcaaacttgttcatccaacaatgatcaatcctattacagaagttacctttggtgcatttcttggcccacaacatcatgtcacatcacctaccacaacttgcgctaacaaaccttgctgcctactctaagaaacagcagttgcttccattcaaccagctatctgcattgaactctgcttcttattt

SEQ ID NO: 292753 - DNA, 428 bp, Zea mays
ggtttgagctgcgtacgtacgtacgttcaggttcttgaacaaggcgtgcttgctccgtgcgaccaaggacgacgcgccctgcaacggctcggacgcggcggcggcggcctccgagcggcacggccacgacgggacgaggctgtgcacggtggaccaggtggagcagctcaagtcggcgatccgcgtcctgccgatctggtcctccaccatcttcctcgcccttgccatgaaccagagcttcgccgttaagcaggccgatgctatggaccggcgcgtcggcgcgggcgggttccgcgttcccagcggctccttggccgtcttcaacatggccaccatgtcgctgtggtcggcctgctacgacaggtgggtcgcgccggcactgcagcggtacacgggcaacccgcacgggctcaccatgaagcagcgca

SEQ ID NO: 292754 - DNA, 359 bp, Zea mays
agtgagaccaactagcaacatagaatgcacaatagtgtaccaacaatggcagccaggatattttgcctccttatgctccttggtctttctgcaagtgctgctacggcgaccattttcccgcatgctcgcaggctccaatagcttccctttttcccccgtacttttaacaagcgggtcttcggtatgtgaaaacccaattcttcaacccttccagattccaccaggcattaccagttggaatttaactttaataaccttggtccttcaacaattattaagcctattacattagttacctttggtgcatttattggcacaaaacattagggcacaacaactacaacaacttgtgctagcaa

SEQ ID NO: 292755 - DNA, 437 bp, Zea mays
caactagcaacatagaaagcacaatagtgtaccaacaatggcagccaaaatatgcggcctccttatgctccttggtctttctgcatgtgctgctacagcgaccattttcccgcaatgctcgcaagctcctatagcttcccttcttgctgcgtacctctcaccagcggtgtcttcgcgtatgtgaaaacccaattcttcaaccctacaggatccaacaggctatcgcaactgacatcttacctttatcacccttgctcattcaacaatcatcagacctattacaacagttacctttggcgcattgattggctcacaacatcatggcacatcaactactacaacttgcgctagcataccttgctgcctactctcagcaacagcagtttcttgcattcaaccaactaggctcattgaactctgctccttatatgcaacaa

SEQ ID NO: 292756 - DNA, 469 bp, Zea mays
tcggattgaaggctcgacccaagcgacccgtgaaacgcactgcacacgacctaacaccaatggctaccaagatattaggcctccttgggctgcttgccctttcagcgagcgctgcaaatgcgaccattattccacagtgctcacttgctcctatagccattattctacagttgctcctatcaccaacttcaatgggcttatgacataacgccgtgcaagaactactagatgaaactacgggcttgcgcagagcggcattacacaaccataacgctcaattgctacaacaaatactaggcacattacaacatacacactcattggcactcatcagacacaaacaacaacaggcacatgccactactagaaccacgtactacgcggacgaacgctgtctactattagcaacagcagctgcttgcattcaaacaactagctcaggcgaacgtagctgcataccagcaacaac

SEQ ID NO: 292757 - DNA, 439 bp, Zea mays
gcttgcgacatcctggagaagaagaaattcgcgacacccgacaaggtggcagagatgtacatagaggtatcctcactgtttgagacggtgaatgagttggaaaaggcaatatctttgctgaagaagagcctgggaatgcttgagaggatgcctcaggcacagcacctggagggcaatgtcgcagcgaggattgggtggctgttgcttttgactggtaaggtctctgaagctgtcccgtacttggaggatgcagtggagaggatgaaggacagcttcggtccgaagcattatggagtagggtatgtgtataacaacttgggtgctgcttacatggagatggaccgtccgcagtctgctgcacagatgtttgcgctcgctaaagaagtcatggatgtctccttagggcctcaccattcggataccatcgaggcttgtcaga

SEQ ID NO: 292758 - DNA, 410 bp, Zea mays
acctaactaccaacatattgctcacaataatgtaccaacaatctcacgtagatattttgcctacttatgctcctctatctttctgcaattgctcctacagcaaccattttcccacaatactcacaagcttctatagctttccttcttcctacctacctctaaccaactgtgtcttctgtatgttaaaacccaattcttcaaccctacaccatccaacaatcaatcacagcttgcatcctacctttatcacccttgttcctccaacaatcatcatacctattacaacagttaccttttgtgcatttattggcacaaaacatcaaggcacaacaactacaacaacttttgctaaccaaccttgctacctactcttagcaacatcaatttctttcattcaaccaactaacttc

SEQ ID NO: 292759 - DNA, 480 bp, Zea mays
accggaattgaagtgtcgacccgagcgaggcataccaactggcgtcatacatagcacattattgtcccaacaacggcagccgacatattacgtgtgcggatgctctaaggctggtatgctagtgctgctgcagcaaccattgtcatgcaatgattcgagctacaaaccctacagtgttttaccagcacctcataatagcgggtgctctgttttagaaagcccaagagttatactcctacagtgaccatctgcgatggcagttgcattctaaccttaataaccttggttcttccaacattaataagccttattacaacagttacctttggtgcattaattggcacaaaacatcagggcacaacaactacaacaacttgtgctagcaaaccttgctgctactctcagcaacagcagtttcttccattcaaccaactaggttcattgaactctgcttcttatttgcaacaacaacaactacca

SEQ ID NO: 292760 - DNA, 418 bp, Zea mays
atgcagcccaaatcgggcggtaaactccgtccaaggctaaatacaggcgagagaccgagagcgagcaagtaccgcgtgcgtatcttcgctgacaccgtcgccatgactccgacagttgtgtgatacataccacatgcaatatacataccctacttgttattttatgtttccagttaataataaaccaggccttagcttcttggttggccttccttgggtggtgttagcttctaagctactagtacaccattaaaaaaaggaggacctcatgtatggctaccgtgaaaaatgtgatcttgatggaataatatatcataaattagcaattaatgaaaaaaaaacataaaacaaaaaatgcaaaaaaaaaaatcaacttgagccttcccctttcgacagcaacaaactgtaccaaccaaat

SEQ ID NO: 292761 - DNA, 253 bp, Zea mays
aacctacaacatccaacatacaatcaaaactaacatcttacctttatcacacttattactccaacaatcattatccctattacatcaataacctttactccatttatttacacaaaacatcataacacaacaactacaacaacttatactatcaaaccttaacttcctactttcataaacaataattacttccatacaaccaactatcttcaattaaactctacttattaattacaacaacaacaactaccat

SEQ ID NO: 292762 - DNA, 429 bp, Zea mays
tcaacgcctaccaaattgcttcaacaaatggtcccacctctgcctcacctgccttcgccaaacgggggggcctattaacatcaggtgcttcattctaaccaactgcctggaccaaactttgtttcgaacttacaccaccaccaccagtgcctaatcccattgcaaactgttaacccatggttcgatacctttctgcaacagcaacaacaattgcttgcatacaacccgttttttttgatgaacccttcctttcaacaacccattgttgaagggcccaacttttaaattacctttgacatttacttcacaatggggccctttttccgaccttgtgttcctaaaaaaaatcaattatttgattggaattaattctcattaaaaaaaaaaataatttcaattccattccattcatttgtattggttattaac

SEQ ID NO: 292763 - DNA, 222 bp, Zea mays
gcgacccgttacaactaccacaaaaggcgcactagggcaccatcactggcgaacacaacccatcacgcttctgtatgctccacatcattggtgcaaccgttgctacacaagccatttacccacaatgctcacatgctgctatagcgtacattcatgcgccatacctataaccagcagtgtctttaatgagtgaaaccccaattgttcaaccctacaggatcc

SEQ ID NO: 292764 - DNA, 407 bp, Zea mays
cccacgcgtccgagttgctgcaacaaatggtaccagctctgactcagctagctgtggcaaaccgtgctgcctacttacaacagttgcttccattcaaccaactggctgtgtcaaactctgctgcgtacctacaacagcgacaacagttacttaatccattggcagtggctaacccattggtcgctaccttcctgcagcagcaacaacaattgctgccatacaaccagttctctttgatgaaccctgccttgcaacaacccatccttggaagtgccatcttttaaattacatatgagatgtactcgaccatggtgcccttataacgacatggggttcctaaaaattatcaatatattgattgaaaattatctcgattaaaaaaaaataacctataataaatggaaaaa

SEQ ID NO: 292765 - DNA, 292 bp, Zea mays
ttcaaacatgggctccaaccacatgctcctcgtcatccaggcctacaatactctgctctaccactctccctacccacccagcttcatgctcacccatctcaccttctcctactccttcttcctcttccacaagtccaccaactccctgctcgtctcatcctacccccaactcaggttgccgctcttctggaggatcacctcctacggctgcgtcgccttcttctacgacatcgacatgctcaaaggctcatgcagcaaatctctttctccgttccctcaaagcttcttctac

SEQ ID NO: 292766 - DNA, 258 bp, Zea mays
attgagaccaactagcaacatagaaagcacattagtttaccaacaatggcagccaaaatattgtgctgccttatgctccttggtctttctgcaagtgttgctaccgaaaccattttcccacaatcctaacaacctcctataccttcctttcttcccccatacctttaaccaccggtgtcttcaatgcttgaaaccccatttgttcaaccttacaggatccaacagccattcgcaccaggcatctaaccataataaccc

SEQ ID NO: 292767 - DNA, 393 bp, Zea mays
cccacgcgtccgtagcaacatagaaagcacaatagtgtaccaacaatggcagccaaaatatttggctgccttatgctccttggtctttctgcaagtgttgctaccgcaaccattttcccacaatgctcacaagctcctatagcttcccttcttcccccatacctctcaccagcggtgtcttcaatgtgtgaaaccccaattgttcaaccctacaggatccaacaggcaatcgcaacaggcattttaccataataacccttgttcttcaaccacccgtaagccttataacagcagttaccttgggtcaattgggggccccaaaccttcaggccccaccacctccaccacctgggcctaccaaacttggttgattcctttaagaaccttaagttc

SEQ ID NO: 292768 - DNA, 393 bp, Zea mays
  unsure (1)..(393): unsure at all n locations
cttgctcctagttccattattccacagtggttaacaccagttacttcaatggccttcgaacagccatctgtacaagcctatatgctacaacatgcgattgcggcgagcgtcttacaacaactaattgcccaactgcaacatcaatccttngcacatctaacaatacataccatcctaacgcaacagcaacaacagtttctaccagcactgaaccacctaaccatggtgaaccctgtcgcctacttgcaacaacaactgcttgcatacaacccacttgctctagcaaacgtacttgcaaaccagcaacaactacaactgcaacagtttctgccaccgcttaatcaactagccatggtgaaccctgccgcctacctacaacagcaacaactgctt

SEQ ID NO: 292769 - DNA, 415 bp, Zea mays
agaccagcaagcaacatagaaagtagaatccattagcaacaatagagcaacaatggcgaccaagatagtttccctccttatgctccttgctctttctacatgtgttgctaacgcgacaattttccctcaatgctcacaagctcctatagcttcccttcttcccccataccttccatcaattatagcttcagtatgtgaaaacccagctcttcaaccatataggcttcaacaagcaatcgcagcaggcaccataccttaatcgcccttgttgtttcaccattcacaagccttatctttggtccagccattgttccaacccatcaggccccaccagttgcagcacctgggcctacttggaaccaaccaattacttttgccaaactttcttcctaactttaagcaccaccatttcttt

SEQ ID NO: 292770 - DNA, 423 bp, Zea mays
ttggcgattccatttctaccccgagactctccagccgtgcgcccctgaaccctcaggcgtggccgtcccgcctcggcactcgacggccgccggcacacaccgcgcagtctcgagacagatcccgatctcgttctgccaaccgccgagggagggttgcgctcgccggatcccgtccgagtcacgtgcggctttgattcgctgcacctgtcgtgcaggaaccggaggaacgaggatggaggatgactctccgctgacgaagacgatgaacggtgcggtgacagtactcgcctcagtgaccatctggggcaccgtcgtcgtcacctggtacgacgtgccccgtgtggagcgccacgtctcgctccatggccttatccggactctcaagatgtgcggcacctacggcgccaccttcgccaccatcgg

SEQ ID NO: 292771 - DNA, 380 bp, Zea mays
gctgcttggcttcagcaacaacaatttcttccattcaatcaactagctggggtgaaccctgctgcttacttgcaggcagaacagctactaccgttcaaccaactggctttgacaaactcaacagtgttctaccaacaacccatcattggtggtgccctctttaagattgcttatgagttatagttcaataatgaagttttttgaatgatgtttggggcgtccaaaaattaagaaggtccatttctaaaaaaaaaatgtaagataatataaataaaaaatattaaaaaaaaaaaaaaagggcgccccttttaagggtcccaagtttacattcccggttatgcaaattaaaaacttttttataggtaccccaaatttaaatt

SEQ ID NO: 292772 - DNA, 327 bp, Zea mays
  unsure (1)..(327): unsure at all n locations
gngaaaatggtcgccgtagcagcacttgcagaaataccaaggagcataaggaggcaatcgcagctggcgatcttacctttatcacccttgttcctccaacaatcatcagccctattacagcagttacctttggtgcatttattggcacaaaacatcagggcacaacaactacaacaacttgtgctagcaaaccttgctgcctactctcagcaacagcagtttcttccattcaaccaactagctgcattgaactcctggctctaattggcaccaccaccacctccaatcaacccgcttacttgtggcttacccccaccaattctttca

SEQ ID NO: 292773 - DNA, 273 bp, Zea mays
tgcttaggttgagcaacaacaattgcttccattcaatcaactagcttgggttaaccctgctgcttacttgcaagcacgacaggtactaccattcaaccaacttgctttgacaaactcaacagtgttctaccaacaacccatcattggtagagccctctatagattgcttatgagttatagaccaataatgaatgatagctggatgatgtgagaaccgtgctataaatccatatgtgcatttctcaagcaatcgcatcaagcaacataccttta

SEQ ID NO: 292774 - DNA, 479 bp, Zea mays
caacaagcaacataaaaagtggaatccagtcacaacaatagagcatccatggcgaccaagatattcaccctccggatgcgccttgctcttactacatgtgttgctaacgcgacaattttccctaaatgctcacatgctcctatagcttccattgttacaccataccttgcatcaactatagcttcaatatgtgaaaacccacctcttcaaccatatatgcttcaacaagcaatcgcagcacgcaacatacctctatcgcccttgtggtttcaacaatcgacagccttatctttggtgcagtcattggtccaaaccataagggcacaacagctgcagcaactcgtgctacctatgatcaaccaattatctctggcaaaccttcctccatactctaagcatcaacaattttttccattcaaccaactgtttacactgaaccctgctgcttatttgcaggaccaactattaccatttaccca

SEQ ID NO: 292775 - DNA, 404 bp, Zea mays
cgcttgcggcgagcgtcttacaacagctaattaaccaattgcaacaacaatccttggggcatctaaccatacataccaactggcagcattgaactctcatgcttatgtacaacaacaacaactactaccattcagccagctagctgctgtgagccctgctgccttcttgacacagcaacatttgttgccgttctacctgcacactgcgcctaacgttggcaccctcttacaactgcaacaattgctgccattcgaccaacttgctttgacaaacccagcagtgttctaccaacaacccatcattggtggtgccctctattagattgcttatgagttatagttcaataataaagttctttatctgatgtatgtggctttccagatataagactgtacatttctaa

SEQ ID NO: 292776 - DNA, 269 bp, Zea mays
catcaatgcagcccgacggcgacgccctactgctcgcctaaatgcccatcggtgccgcagcaacgttgacagcagctcaagcatgtggagcctcataaaccgtaccaagcgatcttcagcttggcccttcagtccatcctgcagcagcagcctcaaagcggccacgttgcggggctgttcgctgcgcaaatagcgcaacaactgacagcgatatgcggcctgcatcaatcgactgcatgcccctacgctgatgtcggaagtgtccccca

SEQ ID NO: 292777 - DNA, 416 bp, Zea mays
gaccagcaagcaacatagaaagtagaatccattagcaacaatagagcaacaatggcgacgaagagattttccctccttatgctccttgctctttctacatgtgttgctaacgcgacaattttccctcaatgctcacaagctcctatagcttcccttcttcccccataccttccatcaattatagcttcagtatgtgaaaacccagctcttcaaccatataggcttcaacaagcaatcgcagcaagcaacataccttaatcgcccttgttgtttaaccaatcacaacccttatcttggtgccatcattgggtccaaccaataaggcacaaccacttccaccacctcggcctacctgtatccaaccaattacttttgccaaaccttcttcctaatcttaacaaccaccatttctttca

SEQ ID NO: 292778 - DNA, 427 bp, Zea mays
cccacgcgtccggcgagcgtcttacaacaaccaattgcccaattgcaacaacaatccgtggcacatctaacaatacagaccatcgcaacgcaacagcaacaacagttcctaccagcactgagccacctagccatggtgaaccctgtcgcctacttgcaacagcagctgcttgcatccaacccacttgctctagcaaacgtagttgcaaaccagcatcaacaacaactgcaacagtttctgccagcgcttagtcaactagccatggtgaaccctgccgtctacctacaacagcaacaactgctttcatctagcccgctcgctgtggccaatgcacctacatacctgcaacacgaattgttgcaacagattgtaccagctctaactcagctagctgtggcaaaccctgttgcctacattcaacagctgc

SEQ ID NO: 292779 - DNA, 337 bp, Zea mays
cggaaaccttccgcaaccgggtctttcgtattggaaaacccaattttttaacccttccagatccaaccgggcagtccaacttgcattttaaccttaataaccttggttcttccaccatcattaaccctattacagcaagtacctttggtgcatttattggcacaaaacatcagggcacaacaactacaacaacttgtgctagcaaaccttgctgcctactctcagcaacagcagtttcttccattcaaccaactagctgcattgaactctgcttcttatttgcaacaacaacaactaccattcaaccagctaccttgtgcctacccccaacaatttc

SEQ ID NO: 292780 - DNA, 296 bp, Zea mays
aattcccgctcgacggcgcgtccagctagtcataatctcaccagagaactatgtctagacacctgactccatatttctaggcgcgagtagctatgtcttagagatgacaccctttgccatacatcacataaccgctgtatattgctaacgctgaacttggaatctccaatagggtcatgcgcaacctcttattcattgaccggctataaatcattaccactgtctccagaattgcatctggcctaaaacctggcctccatggatttcatgtgcatgcgcttggtgacaccaccaat

SEQ ID NO: 292781 - DNA, 363 bp, Zea mays
gaccaccaagcaacatagaaagtggaatgcattaccaacaatagagcaacaatggcggccaggggattttccatccttatgctccttgctctttctgcatgtgttgctaacgcaaccatttttcctcaatactcacaagctcctatagctgcccttcttcccccataccttccatcaatgaccgcttcaatttgtaaaaacccaacccttaaaccttacaggctccaaccagccattcgaaccaggcactttacctttatcacccctgttttttaaacaatcgccacccctatctttggtgcagtcattggcacaaaccatcggggcacaacagttgcaacaacttgcgctaccagttatcac

SEQ ID NO: 292782 - DNA, 356 bp, Zea mays
cggtaagacgacacacattatcattgtgtggtatagaccaataatatatagcatcataataagagttctggttgttaaagagaaaaaaaagaaaaaaaaaagaaaaaaaaagaaaacaaaaaataaaaaaacaaaaaataaaataaaaataaattaaaaaataacataaacaacagaggagaaaatcaatgaagaaaaaaaacaatagatcaatccatacaggatccaacaggcaataagcaacaagcatcttaccattatcacccttgttcctacaacaaccgtaacaccttattacagcagttacattaggtacatgggatgagacaaaacatcatggcacaacatctacaaca

SEQ ID NO: 292783 - DNA, 388 bp, Zea mays
tcccgaatcgaccgaaccgactccaccaaccgatactacataacctccactttacataactcgacaccatgaaattactcctgcttgccctatatcacctgtcgctcacctcaacaaatgcctccattacaccacaatgctcactctctcatacaccaattatacctcaactgcttccaccatatactctcaactaccttctatcacctagctcagcaaccctacaaaccataacaagcgcttactgaacaacttcatacaacaaccaactcaccaattccaacaccaatccttggcacatctaaccataccaacactatcaccacaccagcaacaactgatgctaccatcaactgaccaactaaatgtctacaaccctgtacactac

SEQ ID NO: 292784 - DNA, 355 bp, Zea mays
agaatgcacaataatgaaccatctatggcgaccataatatcaatgcctacttatgctccgtcctctaccagactaggctgttaccacaaccatgcttgcacattgcttacactctcctatagattccctgctacccacatacctctgatcacagacatcaataccttgagaaaacccaacacttcaacactacaggatccaacaagcattcacagatggcatcttacgtacatcaccctagttcctccaacaatcatcatccgtattacatcagttacctcaggtgcatttattgtcacagaacatcatgacacagctactactacaacttgtgctagcaaacatcgctgcctac

SEQ ID NO: 292785 - DNA, 426 bp, Zea mays
tagttcaataataaatctaaaagaggtcaccaccaaagattgcctgcttatgctaggcggtttttctgcgtgggctgctactgccaccatgatccagcaatgcatttaagctgctataactacccttcttcctccgtacctcttatcagcgatgtcttcattatgataaaacctaattattcaaccctacaggatccaacaggcagtcacagctggcatcttaccttcatcacccttgttcctcctacaaccatcatcagtattacatcaattacctctggtgcatttattgtcacagcacatcatgacacaactactactacaacttgtgctagcaaacctcgctgcctactatcatcaacagcagcatattacattcaaccaactagctgcattgaactctgcttcttattagcaacaacaaca

SEQ ID NO: 292786 - DNA, 438 bp, Zea mays
ccggaatctcaattcccgacctacacctcccgcaacaacaacttcttccatttaaccaattgcccgcactgaacctcgctgcttatttgggggaggccatcctactgacatccagagatctctctacagaaaattgatcaagcgaccacacatacagtcctttgctgacattatacaatcacatagcagccagaacaagtgcgcacaatctattactatgagatgggggcatatattcgacttggactacccaacatctgctgcccacacagatgatgaatcatctgagcgagctgcatcaacatccagtactactgcaaacctagcacaactgcgcatttcatacactgatgaagaacttccaggtttataacgtttccggtgcatactttcaagaggaaatccatcatcagactgaagcgacacagaaaccggtat

SEQ ID NO: 292787 - DNA, 363 bp, Zea mays
agcattcagaaacacacctagcgtagcgcactagcaacgacctaacaacaatggctacgagagatattatccctctttgcgcttcttgccctttttgtgagcgcaacaaatgcgttcattattccacaatgctcacttgctcctagtgccattattccacagttcctccctccagttacttcaatgggcttcgaacacccagctgtgcaagcctacaggctacaacaagcgcttgcggcgagcgtcttacaacaaccaattgcccaattacaacaacaatccttggcacatctaacccttccaaacattggaacggaaccggcaccaccatttctaccagcactttgcccaatatatttgggg

SEQ ID NO: 292788 - DNA, 338 bp, Zea mays
  unsure (1)..(338): unsure at all n locations
tgcgctctcttgcaccctttttagtgagcgccaacaaatgcccgttcattaatctccacaatggctcactatgcttcctagttgccattattctcacaagttcctcctctccagttaccttcaatgggncttgcgaacactccatgctgtgcaaagcctacanggctatcaacatagcgcttgcgagcgagccgtcttacaacaactcaatttgcccaattacaacaacaatnccttggcacatctaaccatacaaaccatcgcaacgcaacagcaacaacaatttctaccagcactgagccaactagctgtggtgaaccctgtcgcctacttgcaac

SEQ ID NO: 292789 - DNA, 421 bp, Zea mays
gccagccaagattcaggttggagtcttctttgctaccatgccccctgatgccctcgaggtgtaggcgcaagttcatgatcgagccagtgagaattcttgtgaagagagatgagctgactctagagggtatgaagcagatctatgtgaatgagtatatggaagactgcaagctgcacacactgtgtgacctgttcgagactcttgtcataacccacagtgtgatgtatgctaacaccaggagtaaggtggactggctcactgacaagatgaagagcagggaccatactgtttctgacagtcatggagacatggaccagaccactacagacatcatcatgagggaattccggtctggcttcctccgagtgctcatcaccaacgaactggttgcttgtggtattgatggtcaacaaggggtccc

SEQ ID NO: 292790 - DNA, 362 bp, Zea mays
attggcgccaactctcctaccatgccatcataactccacgccgttagcttaaaattcatgctcgcgcccgtcacatttcttctcaagccagatcaactcactctagagcgtttgaaccccaactactccaaccattatctcaaactctccaagctacacacactgtctgacctgctcgaaactcttttcataaccgacagtgtcctcaatcctaacaccaccacttaggacgactcgctcacttacaagatgcagagcagccaccatactactattcactctcatccagacatgcaccacaccactacatacatcatcatgaaggaattcctttctggctcctcccgagtgctcatcaccac

SEQ ID NO: 292791 - DNA, 419 bp, Zea mays
gtttagtcctatacgctccaacatgctatcacaggaagcaacatacctcaattaccgtggttgattcaacactcgacaaccctatctacgttgcagctcattgttacaaaccatctagtcacaacgcctgcaccaactcgtgctacctgtgaacaaccaagtagatcttgctaacctttctgcttactctgagcagcaacaatctcttctattcaaccaactgtctacactgaaccctgctgcttatttgcatcatcaactattaccattgaatcatctagctactgtatactctcagcaactacaacttcttccatgtaaccaattggtcacactgaaccccactgcttatttgcagcatcaaatactactaccatgtagccagctagctgcagcaaaccgtgcttccttctttacac

SEQ ID NO: 292792 - DNA, 278 bp, Zea mays
cgcagggcgagctcgcggcgctgatggcggcccaggtagcgcagcagctgacggcgatgtgcggcctgcagctgcagcagccaggtccctgcccttgcaacgcagctgccggcggtgtctactactgaggaaactatgactgataataatgtaatggagccgtgactagctactactcgctagttactatacggcagatacgatgtaccatacatggtgcaggtagcatgactgatgaccatgaatgaaaggaatattataggaaaaaagatgaatgg

SEQ ID NO: 292793 - DNA, 391 bp, Zea mays
gacgatgccagtgatgatgccacagatgatgacgcctaacatgatgtcaccattgatgaggcggagcatgatgtcaccaatggtcttgccgagcatgatgtcgcaaatgatgatgccacaatgtcactgcgacgccgtctcgcagattatgctgcaacagcagttaccattcatgttcaacccaatggccatgacgattccacccatgttcttacagcaaccctttgttggtgctgcattctagatagaaatatttgtgttgtatcgaataatgagttgacatgccaaaacaaaaacctgatgcctaccaccaacaataacttccattcaaccaactggcagcaattgaactatcctgcttatttacagcagcaacaaactactaccattc

SEQ ID NO: 292794 - DNA, 410 bp, Zea mays
catatttgagtgcaaagtttacagagaaaactggcggctcaacttatgaaagcaaaaggagactcatgggggcgtacttcagcaagaaaaggcttgtcaacagaggaggctggctgttgcagtgataatgacgaggctcatattgcgaagcttgaaaacaagaagacccatctccaatctaaacttacggaggaggtaaaagaaaacacagtcctccaggcaaatttagaaaggcgaaaagcagcactacatgagcgtcgtgtagcacttgaaaaagaagtggaaaatttacgagaccagttgcagaaagagagaaatttgaaggcttcattggagtctgggttaatgaatatgcgaagaggacaagtgtccttcccatcaacgatagacaccaagactaaagctgatct

SEQ ID NO: 292795 - DNA, 404 bp, Zea mays
  unsure (1)..(404): unsure at all n locations
attagctcatcgactccagattggagaactcgacaccatgaaggtgctgatcgttgccgttgctctcctggcgctcgctgcgagcgccgnctncagtacaagcggcggctgtggctgccagacaccaccgtttcatctaccgccttcgttctatatgccgcctccgttctatctgccgccgcagcagcagccgcagccatggcaataccccactcaaccaccgcagctaagcccgtgccagcagttcggatcctgcggcgtcggcagcgtcggcagcccgttccttgggccagtgcgtcgagttcctgaggcaccagtgcagcccggcggcgacgccccaacggttggccacagtgccaggcgctgcagcagcagtgctggcaccagatcaggcaggtggagcc

SEQ ID NO: 292796 - DNA, 429 bp, Zea mays
  unsure (1)..(429): unsure at all n locations
acagtttctgccatcactgagccacctagccgtggtgaaccctgtcacctacttgcacggcagctgcttgcatccaacccacttgctctggcgaacgtagctgcataccagcaacaacaacagctgcaacaggttatgccagtgctcagtcaactagccatggtgaaccctgacggctacctacaactactgtcatctagcccgctcgcggtgggcaatgcacctacgtacctactacaacagttgctgcaacaaattgtaccagctctgactcagctagctgtggcaaaccctgctgcctacttacaacagttgcttccattcaaccaactggctgtgtcaaactctgctgcgtacctacaacagcgacaacagttacttaatccattggcagtggctaacccattggtcgctaccttnctgcagcag

SEQ ID NO: 292797 - DNA, 425 bp, Zea mays
  unsure (1)..(425): unsure at all n locations
atctcctcgcatttcttcccatccgatccccccttcgcaaccaaaaccccaactcgcccgccgggaagaagccgaaggcggagaagcgggtccccgctggcaagtccgctgccaaggaaggcggcgagggcaagaggggcaagaagaagggcaagaagagcgtggagacctacaagatctacatcttcaaggtgctgaagcaggtgcacccggacattggcatctcctccaaggccatgtccatcatgaactccttcattaacgatatcttcgagaagctcgctgctgaggccgccaagctcgcgcgctataacaagaagcctaccatcnacctccgtgagatccagacctccgtgcgcctcgtccttcccggggagctcgccaagcacgccgtctccgagggcaccaaggccgtcaccaagttc

SEQ ID NO: 292798 - DNA, 432 bp, Zea mays
acccacgcgtccgcttaccaagcaggtgatctgcaagtgagccaagtgccatgtactcataaaccaggagccgttgatctccatctgcacaatagcccaccaaattgactaagtttggatggtgcaataagctgagcatcaggacctcaactaggaactctctgttgccttgatacccattcaggtctagttgcttgacagcaacaagctgttcacgcaaaccggaaacaagtcagccactaatgactgtagatgaattagcaagcttgtgtatacgtagaacgtttgaatgttttttttctgtgtggtgtgtacctgtccgttttcaagcctgcccttgtataccctgccgaatcccccttctccgagaaggcagtcagagcggaagtttttcgtggccgtggctagctcacggaacgtgaatgcttttgc

SEQ ID NO: 292799 - DNA, 360 bp, Zea mays
cccacgcgtccgcccacgcgtccttaatcacacctagcgaagcgcactagcaacgacgtaacaacaatggcttccaagacattatccctccttgcgcttcttgccctttttgtgagtgcaacaaatgcgttcattattgcactttgctcacttgctccgagtgccattattccacagttcctccctccagttacttcaatgggcttcgaacacctagctgtgcaagcctataggctactacatgcgcttgcggcaagcgtcttataacttccaattgtccagttacaacaacaattcttggcactatgtatctatacataccatcgcaacgcagcagcaacaagcactttgcctcctatt

SEQ ID NO: 292800 - DNA, 434 bp, Zea mays
  unsure (1)..(434): unsure at all n locations
aacatcttattaccttgacactgcaaacattgactgaagattcaaatccctcagctgacctagttgctgctgttaaacaattatataataccaagctgaaggatgcatctattctgattcccttactgccttcatttccaaaggaggaggtattgcctatatttcctaggctagttgatctcccgcttgagagattccaagacgtacttgctcggatattgcagggaactgctcatactggtccagcattgactcctgctgaagttctcattgcaattcatgatattaaccctgaaaaagataaagttgccctaaaaaaggtcacggatgcttgcacggcttgctttgagcaacgcacggtatttactcagcangttttggagaagtcacttaatcaattggttgacagaataccaattcctcttctttttatg

SEQ ID NO: 292801 - DNA, 233 bp, Zea mays
gcagcaactgctccaggacttcttcaactgctaggagctgtgcaagaacatcaaccccgatgaggctgtctccttatggtgctgttgtccatgctgccattctgagcggtgaggtctattagaaggtgctggacctgcttgctgtgtacattaatcctctgttcatgtgtatacagacttattcaatagtactggctgcaataagccatcagaacaagcattttaccatcatt

SEQ ID NO: 292802 - DNA, 166 bp, Zea mays
tgagcattcatatacacaccaagttattttcactatcaacaacctaacaacaatggctgccaatatattatctctgcttgctcttctttcgcttatcgcgagctcaataaatgcgctcattatttcacaatctacactaactcttagtttcattattccatatttc

SEQ ID NO: 292803 - DNA, 466 bp, Zea mays
tcggaacggaattcccgacccaagccacgcgtgcaacgcactgacactacgtaccaacaatggctaccaagatattaggcctccttaggctgcttggcctttcagcgagcgctgctactgcgaccattattccacaatgctcactagctcctatagccattattctacagttgcacctatcaccaactgtaacgtgcttatgacataacccaattcatgaactactacatgatccaacaggcaagcgcagatggcatactacctctataacgctagttgctacaacaatcattaggcactattacaacatacaaactatggcgcatgcacagccacaacacatccaggcacatcaactactgcaacatgtactagcagacaacgctgtctactattagcaacagcagctgcttgcattcaaccaactatgctcatcgaactgtgcttcataccagcaacaacaaca

SEQ ID NO: 292804 - DNA, 331 bp, Zea mays
atatgttggcacaaaacatgaggggggcaacatctacaacaacttgtgctacgaaacctcgctaactactgtcagcaacaacagtttcttacattcaaccaactaactatattgaactctgctgcttatttgcaacaacaactaccatttaatcagatagctgctgactacccccatcaattactagcattcaaacaactggcagacactgaactctgctgcttatttacaacagccacatctaccaccatttaaccatctaactgatgtgagccctagtgccttcttgacacatcaacagttgttgccagtctaccttcacgcttctcct

SEQ ID NO: 292805 - DNA, 233 bp, Zea mays
ggagccgatgactagctacctatctcgctagtttactcatttagcggcaattagtaacggaatgtcacccatcaacatgcatggcagtgtgagcaatgacctgaacgaaccattgaaatggatcggaataatatatgaagctaacagatgattggaaaataaggtcaacaacaaatccaagagcagcaacataatacactacaacataatccacaataacaacaacatcaacc

SEQ ID NO: 292806 - DNA, 233 bp, Zea mays
acaaactcatccaacatattttgggtacgtatactcataaatctctctgcaaccgctactacgccaaccatttttccacaatgctcacaagctcctataactacccttcttcccccgatcctctcaccatcttcgtcttccatatgtcaaaacccaattcttcaaccctatagcatccatcaaccaatcgcaactcacatcttacctttatcacccttgctccttcaacaatc

SEQ ID NO: 292807 - DNA, 468 bp, Zea mays
ctacaacaacttgtgctagcaaaccttgctgcctactctcagcaacagcagtttcttccattcaaccaactagctgcattgaactctgcttcttatttgcaacaacaacaactaccattcagccagctacctgctgcctacccccagcaatttcttccattcaaccaactggcagcattgaactctcctgcttatttacagcagcaacaactactaccattcagccagctagctggtgtgagccctgctaccttcttgatacaaccacagttgttgccgttctaccagcacgctgcgcctaacgctggcaccctcttacaactgcaacaattgctgccattcaaccaacttgctttgacaaacccagcagcgttctaccaacaacccatcattggtggtgccctcttttagatttcttatgaggtatagttcaataataaaagtttttggctgaagttggggccttcc

SEQ ID NO: 292808 - DNA, 417 bp, Zea mays
gaatcctcgctctgccgagcgcttaacagcacatgaagttctatgccatccatggattcgtgaccatggagtagcttctgaccgtccactggatccagctgtcttatctcgcattaagcaattctctgcaatgaataagttgaagaaaatggctttgagagtaatagctgagagcctatcagaagaggaaattgcggggttgaaggaaatgttccaaccatggacactgacaacaggggcgcaattacctacaatgaactaaagaaaggatggaaaaaatttggttccacactgaagacacttaaaatcgtgaacttaatggatccacttgatttcaccaccatgggaccattggcctccttggaatcaatggttgcaactttgattttaattagcctgaaccccaaaaacattttg

SEQ ID NO: 292809 - DNA, 304 bp, Zea mays
ccatggccgacgtccgcgcgcagaacgcgctcgcggagatccaggagttcacctccttcctcagggtgctcgggagctaccccatggacatgacgccgtgggacgccgcgctctgctctcgcgccagccagtactagtgattgggcgaacaatggtcaagccgccaaaggataacggcaattcattggtttttaatcagtccggcattaccagaaaccgtgctttgggtctttttatccattctcttttctggatggcttttcttaaaaaaaaaaacggagaggagcgagggtcgattgggggg

SEQ ID NO: 292810 - DNA, 343 bp, Zea mays
cgacccacgcgtacgcaagggcgaggcaatcaggtttaaaattttgcttttaaaaccctgtaccgagcccagcgggtgggtgacacgtgaacaggactggaccaacaaatctcatacattgcatacaaacccatcctaaccgatctacacgacctgcataacgatccatccacaccttacatcgcacgtactgttgactaatataagctctactaagatgcgacaattatctgtccatcatatagtccatacacttgatgcgtattcttggacactactcactttacaccggactacccattctaaccagctacagacgcattcaaaaccaaggtttaccata

SEQ ID NO: 292811 - DNA, 357 bp, Zea mays
gacgatcagccaacaagggatatatcgtacgcacttttagctcccatgtactgcttccagctatctggatacgtcagcattaaaaagcagtacatgcgtacgtctccaccatctcagttgctcagacacatacatatcagtgacaatcaataactcaacaatcatcctatatcattaacttcttatcccataccttccatcaattataacttcattatgtgaaaacccagctcttcaaccatatatgcttcaacaagcaatctcatcaagcaacatacctttatcgcccttgttgtttcaacaatcaccagccctatctttggtgcaatcattgtttcaaaccatcatgtcacaaca

SEQ ID NO: 292812 - DNA, 323 bp, Zea mays
gtcagctagctgctgcctacccccagctttttctttcattcaaccaactggcagcattgaactcggctgcttatttacaacagcaacagctaccaccattcagccagctagctgatgtgagccctgttgccttcttgacacaacaacatttgttgccgttatacttgcacgctgatcctaacgctatcacactacttacgactgcaacaattgctgccattcaacctacttgctttgacagaccctacattgttctaccatcaactcataactggtggcacccttttttatattgctcatgatgcatacaccgattttgaatc

SEQ ID NO: 292813 - DNA, 388 bp, Zea mays
  unsure (1)..(388): unsure at all n locations
acttgcttgagtagcgaagcgcgagagcaatggcgtcgctgtcgtgcgcctncacgctgccctggacccccgcctcctacccgcggccctcggcggggcgctgcctcacggcctctcgccgggctccgtcgctggtcatcgtccgccaaggggagggtcagaaggtccggccgggcatattggccggccgcctaaaagaagggggggaaaaaggggagtccctggaagggccaaccggattctaccggaactttcttctttccaagggccagggttcccttctgacccccgaagtccttaagggaatgccactggagccggagagaattgaagctgtgaaaaagccggttaaagaagacgcttaacaacttgctcgagattttgaaac

SEQ ID NO: 292814 - DNA, 412 bp, Zea mays
gcttctttggtttgtacaaaacaagaaggtcgaagattggacagacccacgttttcccactgtgcaaggcatagtacgtcggggcttgaaggttgaagcattgatacagtttatactccaacagggtgcttcaaaaaatctgaatctcatggagtgggataaactctggacaatcaacaagaagataattgatccagtgtgcgcaaggcatactgctgtgctaaaagaccagcgtgtcatcttcacttttaccaaatggccaaaagaaccctttggtcgaaatttaaccaggccttagaaattttaaggtgcctgaaagaaaggttccacccttggcaaccgaatttggcttgaatattcctaagccggaactatttaccaaggtgaaggaattacccttatgggatggggg

SEQ ID NO: 292815 - DNA, 389 bp, Zea mays
  unsure (1)..(389): unsure at all n locations
caggcaccaccgtttcatctaccgccttcgttctatatgccgcctccgttctatctgcgcgccgcagcagcagccgcagccatggcaataccccactcaaccaccgcagctaagcccgtgccagcagttcggatcctgcggcgtcggcagcgtcggcagcccgttcctgggccagtgcgtcgagttcctgaggcaccagtgcagcccggcggcgacgccctacggctcgccacagtgccaggcgctgcagcagcagtgctgccaccagatcaggcaggtggagccgctgcaccggtaccaggcgacatacggtgtggtcctgcagtcctttctgcagcagcagccgcagggcgagctcgcggcgctgatggcggcccangtagcgcagc

SEQ ID NO: 292816 - DNA, 400 bp, Zea mays
attgaactctcctgcttatttacagcagtaacaactactaccattcagccagctagctggtgtgagccctgctaccttcttgatacaaccacagttgttgccgttctaccagcacgctgcgcctaacgctggcaccctcttacaactgcaacaattgctgccattcaaccaacttgctttgacaaacccagcagcgttctaccaacaacccatcattggtggagccctcttttagatatcttatgagttatagttcaataataaatcattcaaccaactggcagcattgaactctcctgcttatttacagcagcaacaactactaccattcagccagctagctggtgtgagccctgctaccttcttgattcaaccacagataaaaaaggggtggttcccc

SEQ ID NO: 292817 - DNA, 105 bp, Zea mays
gctagtcatcactactcacgttcgtccaccagagcagacaacaatggccatggagacgtgcttcagagcgtgggcgctgcacgcccccgctggcagcaaggacag

SEQ ID NO: 292818 - DNA, 287 bp, Zea mays
cccacgcgtccggggtgattgaagagatgaaacgggatggccgtgttgctcctgattggacaagatacagcaacctggcttccatatatgttgaggctggaatgtttgagaaggcagaggctgctcttaaggagcttgagaagcggaacaccagcaatgacatcgaagcctaccagttccttattacattgtatgggcgtacacagaacttagtggaagttcaccgtgtctggcgatcgctgaagcgggataaccctagaatggcaaacatgagctaccttaacatg

SEQ ID NO: 292819 - DNA, 322 bp, Zea mays
ggaacacccgcccgacccacgcgtacgcggcaatctcatcatacccaaattaattttcttgcttaaacaaactgcaatccgatctggtgatcatacattggtcctagccatacagtgctaacaagctcatatacttttgctacttctgatatacctattaccactggcgaatccaatgtgctaatatccaattcatcaaccgtacaagatccaacaggcaatcgaaacacgcatgttaccattataacccttgttcctacaacaaccggtatccctacaacagcagttaactctacaacatttgctggctcataacatgatg

SEQ ID NO: 292820 - DNA, 330 bp, Zea mays
gctgatttggcacgcggtgtactaggcctacacaccagggggatattgatcctaaatatgaaaccttgcaattttctcatagacgaaaatgattgtgctgtgctgggggattttgggattccatccctgctgtttggcctttcattacctaatccggaccttatccagaggcttggaactccaaattacatggctcctgaacaatggcaaccaaacatcagaggtccgattagttatgaaactgattcgtggggttttgcgtgcagcgtccttgagatgttgactggcattcagccatggcgtggaaagtcagcagatgagatatatcag

SEQ ID NO: 292821 - DNA, 338 bp, Zea mays
gcaccttagaagggggaatccataaccaccattgaaccaccattgccgaccaaaatagtggccttcctaatgctcctggctctttctacatgggtggctaacgcgacaattttccttcaatgctaacaagctcctatagcttcccttcttccccaataccttccatcaattatagcttcaatatgtgaaaacccagctcttcaaccatataggcttcaacaagcaatcgcagcaagcaacatacctttatcgcccttgctgtttcaacaatcgccagccctatctttggtgcagtcattggtacaaaccatcagggcacaacagctgcagcaaacttc

SEQ ID NO: 292822 - DNA, 419 bp, Zea mays
  unsure (1)..(419): unsure at all n locations
ttgagaccaacaagcaacatagaaagtggaatacagtagcaaaaatagagcaacgaatggcggccaagatattttccatccttatgctccttgctctttctgcatgtgttgctaacgcgaccatttttcctcaatactcacaagctcctatagctgcccttcttcccccataccttccatcaatgaccgctttagtatgtgaaaacccagcccttcaaccctacaggatccagcaagcaatcgcaacaagcaacttacctttatcacacctgttctttcaacaatcgccagccctatctttggtgcagtcattggtacaaaccatcagggcagaacagttgcagcaactcgtgctaccagtgatcagtcaagtagctctggccaacctttcccnctactcttcagccacacaatttctt

SEQ ID NO: 292823 - DNA, 383 bp, Zea mays
gcgcgagtcatcagctcgcgttgactacgtccctgccctttgtccaacttgctgtgacgagacccagcggcctcctaccaacaacacatcattggtggtgccctcttttagattgcttattagttgtaattcaataataaagttttttggatgatgtatgtggccaaccagaaataagaagttacatttacagattctaatgtgaaaaaaagatccaacacagcatcataaaattgaatcttacctttatcaaccttgatactctaacaataataaaaacatattacatcaattacctattggagccttaatagagataaaaaatatagtgtcaaaaaaatacattaacatagaacaaggggggccttctttataaaattcaa

SEQ ID NO: 292824 - DNA, 258 bp, Zea mays
cagctagcaacatagaaagcacaatattgttccaacaatggcagccaaaatattttggctgcttatgctccttggtagttctgcaagtgctgctacggcgaccatttttccgcaatgcttacaagcttctatagctttccttctttccccgtaccttttaccagcggtgtcttcggtatttgaaaacccaattttttaacccttccgggttcaaccggcaattgcaacttgcaatctacccttaataaccttggttct

SEQ ID NO: 292825 - DNA, 338 bp, Zea mays
ccacgcattcgtccagaagctgcaagcaacatagaaagtagtatccattagcaacaatagatcatcaagggggaacattaatatgcacgtgcggataacccgatactgttaccatattgccacaatgctcacatgctcctatagcttcccttcttcccccgtacctatcaccagcggtgtcttcggtatgtgaaaacccaattctttaaccctataagatccaacaggcaatcgcagcttgcatcttaccttcatcacccttgatccttcaacaatcatcagccctattacagcatttacctttggtgcatttattggcacaaaacattcaggcacaa

SEQ ID NO: 292826 - DNA, 346 bp, Zea mays
tcccgcgttcaggaggtccttaagttctgctgccatttctcattctacttgttcatgcgtcccattgcagcaccgggggaattcattctcatcacatgagattaggaatcatcagcccggatcacgctttcgtcctcctgccaccctccccggatcatctaccgccgcctgtgcatctgccacctccggttcacctgccacctccggtgcatctcccaccgccatagcttcaagggaaggaggcagaccaatgtcagagatccgcaatgtcttcgatcagattcgtcaagggagaaatgcacgattggaggatttgcttctcattgacccgtcacttattatgaca

SEQ ID NO: 292827 - DNA, 317 bp, Zea mays
caattacctcatctactttagtttggagaactcaacaccatgaatgggctgggctttgcccttgcgtctgctggcgctcgctgcgagcgccgtctacagtacaagcggcggatgtggctgccaaacatcactgcttcatctaccgccttcattctatatgccgtctccgaactatctgccgccgcagcatccaccacagacatggcaataccccactcaaccaccgcaactaaacccatgctagtagttcaaatcctggggcgattacagcgactacaacccgtaccttggccagtgcgaaaagttcctgaggcacc

SEQ ID NO: 292828 - DNA, 226 bp, Zea mays
cttcgatattttcgctgccgggagtgagacttcatcgacggtgctagcgtgggccatgtcagagctcgtcaggaacccacgggtgctgcacaaggcgcagtcagaggtgagggagacgttcaagggccaggaaaggctaaccgaaaacgacatgcccaggctgagctacctgaacctggtgatcaaggaggccctacggttgcacccgccggtgccactgttgttg

SEQ ID NO: 292829 - DNA, 431 bp, Zea mays
cgcgtgcggtattacatcagttacctttggtgcatttattggcacagaacatcagggcacaacaacgacaacaactggtgctagcaaacgttgctgcctactctcagcaacagcagtttcttccattcaaccaactagctgcattgaactctgcttcttatttgcaacaacaacaactaccattcagccagctacctgctgcctacccccagcaatttcttccattcaaccaaattggcagcattgaactctcctgcttatttacagcagcaacaactactaacaattaacccactaacttgtggtaaccctggtaacttcttgatacaaccaccagtggtggccgtctaacaacacccttggcctaacgcttgcacccttttacaactggaacaattggtggcattcaaccaacttgctttgacaaaccc

SEQ ID NO: 292830 - DNA, 210 bp, Zea mays
cttacaactacaacaattgttgccctttgtaagaggggctttgacaaacccagcaggcggctaccaacaacacatgattggtggtgccctcttttagattgattattagttgaaattcaataataaagttttatggatgatgtatgtggccaaccagaaataagaaggtacatttccagattctaatgtgaaacagcattatacacaaaa

SEQ ID NO: 292831 - DNA, 393 bp, Zea mays
caacatgcaacatagaatgtggaagacagtagcaacaatagagcaacggtggcggccgagatgttttccatgcttatgctccttgctctttctgcatgtgttgctaacgcgaccatttttcctcaatactcacaagctcctatagctgcccttcttcccccataccttgcatcaatgaccgcttcagtttgtgaaaacccagccgttcaaccctacaggctccaacaagcaatcgcagcaagcaacttacctttatcacccgtgcactttcaacaatcgccagtcctatctttggtgcagtcattgctacaaaccatcagggcacagcagctgtatcaactcgtgctaccagtgatcagtcaagtagctctggcaaaccttgctccctactct

SEQ ID NO: 292832 - DNA, 433 bp, Zea mays
gcgcccacgcgtccacggactcgcgggcataaacacacctgacgaagcgcagtatcaacgagctagcaacaatgggctgacgcgacattatgcgtccatgcgctcacagcgctcactgggagtgcagcacatgcattcatcagtccacaatgctaactacgttccaagtgctattatcacacagctgctcaatccaattacttacatgaggtgctaacacccagctgtgcaagcctatccgctgcaacaagcgctcgccgatagcgtgttagaacaaccattcgccccattacaacagcaatgcttggcacatctaaccatacaaaccatgggaacgcaatagcatcatgcgctgagccacctagccgatgcgaaccctatggcctacttgcaacaacagctgatcgcatacaacccacttgctttggcaaac

SEQ ID NO: 292833 - DNA, 300 bp, Zea mays
ggcggggggggcggcgctgtgctttgcgggcctgttggccccggccgtctgccaaagcgaggtctagcggcagaagctcatggacccgcagtgctgtcagcaggtccaccagagcccgctcgacgcgtgccgccagctcctcgaccggcagctaaccagcggcggcggcggcggcggcgttggcccgctcctgtggggcacccagctccctatgcagtgctgccagcagctccatgacgtgagccgccagtgccgctgcgccgccatccggagcatggtcaggggatacgaggaggccat

SEQ ID NO: 292834 - DNA, 432 bp, Zea mays
ccgggagccacgcgtccggctgcattgaactctgcttcttatttgcaacaacaacatctaccattcagccagctacgtgctgactgggcgcagcaatctgttgcattgaaccaactggcagcattgaactctcctgcttatttacagcagcaacaactactaccattcagccagctagctggtgtgagccctgctaccttcttgatacaaccacagttgttgccgttctaccagcacgctgcgcctaacgctggcaccctcttacaactgcaacaattgctgacattcaaccaacttgctttgacaaacccagcagcgtgctaccaacaacccatcattggtggtgccctctattagatatcttatgagttatagctcaataataaagttttcagtctgaaaaaaaaaatcgacgaaccaccctgaaacaaa

SEQ ID NO: 292835 - DNA, 456 bp, Zea mays
gtggaatccagtagcaacaatagagcaacaatggcgaccaagatactgcacctccttatgctcgctgctctctaggcatgtgttgctaacgcgtcaattcaccctcaatgctcacacgctcctattgcattccttctatcccccataccttacatcaatgatagctacagtatgtgaaaactgatctcttcaaccctataggctacaacatgcaatcgtagcaagcagcatacctttatcactcctagtttcatcaatcggcagccctatctttggtgcagacatagttacataccatcaaggcacagcagctgcagcaactcgagctacctgtgatcaaccaagtagctctggcaaaccttactccctactatcagcaacaacaatctcttccattcaaccaactatctacactgaaccctgctgcttatttgcagcaacaactattaccattca

SEQ ID NO: 292836 - DNA, 356 bp, Zea mays
ggcccgcggggccggatcgtgatggagctgtacgccaacgaggtgcccaagaccgcggagaacttccgcgcgctgtgcacgggcgagaagggcgtgtgcaagtacgggaagccgcttcctacaagggctccaccttcacggttatccagggcaatgtgcaaggccggcaacttaaccggcggaaccggacccgcgggcagtccatctacggcgagaagttccccgacgagaagttcgtgcgcaagcacaaccgccccggtgtgctctccatggccaacgccgggcccaacaccaacggcttccagttcttcatctgcaccgtcgcgaccccttggctcgacggcaagcacgtcgtc

SEQ ID NO: 292837 - DNA, 480 bp, Zea mays
ttcccgggctctgatctcgggttcaccgcagcgcacagagcaccctcgactcccgtcccgatccgcgctcttctctacgacgctgcactcatggcaggaatggcacacgcggcttctcagcctgatgctaaacactatgatactacataatgcatgatctgctataccactgatgagactgagctgcactatgctaaaaccgatctattcaaccatagaggctacaacatgcactttcagcaggctacatacctagatcaccctgcattcagcaatcgccagccctatctttggtgcagtcattggtacaaaccatcaaggcacagcacctgcagcaactcgtgctacctgtgatcaaccgagtagctctggcaaacctttctcggtactatcagcaacaacaatttcttccattcaaccaactatctacactgaaccctgctgcttatttgcagtagcaactattaccattcagccagc

SEQ ID NO: 292838 - DNA, 264 bp, Zea mays
attttgagcattcagaaacacacctagcgaagcgcactagcaacgagctaacatcagtgggtaccaagatattatccctctttgcgcttattgccctttttgtgagcgcaacatatgcgttcattattccacaatgctcacttgctcctagtgccattattccacagttcctccctgcaaatacttcaatgggcttcgaacacccaactgtgcaagcctacaggctacaacaagcgctagcagccagcgtgttacaacaaccaa

SEQ ID NO: 292839 - DNA, 143 bp, Zea mays
gatccgagctctccatctacgacgcgttcagtcatggcgggaatggcaccctaggtgtctcagcttgatgctaagcactatgatcctaaaatgcatgagctgctgagcactgctgagactgaggaagtcctcactttatatga

SEQ ID NO: 292840 - DNA, 240 bp, Zea mays
accaagccttccgccaatccttccgtagaaggcccattagttaaccaccaatgccagccaaaaaggtttgcttcctaatcctcttaggcctttctgcaagtgcctctacggcgaccattttcccgcaatgctcgcatgctcctatagcttcccttcttcccccgtacctcttaccagcggtgtattcggaatgtgaaaacccaattcttaaaccctacaggttccaacaggcaatcacag

SEQ ID NO: 292841 - DNA, 403 bp, Zea mays
cagacatactagccacaaaccaagtactatcacttgccaacaaagccacacaacgtgggatttttcaatatgcgcgacgatctctgttacagttctcattacgaatcatttctcctacactgctaacactctcctatagctcacttttttcccacatacctcttacaaacactgtcatcaccatgtcacaacccactacttcatccataccgcatccactatcaaatacaagtacacatcttacatgtatcacgattcaacatacaacatccgtcatctctattctatccttaatcaactgtacctttatattctgactacatctatacacaacgactacatttacttcagctactaaacctctcagattactctaactaacacaatttttttccattctaac

SEQ ID NO: 292842 - DNA, 363 bp, Zea mays
attgagaccaactagccacatagagagcacaatagtgtaccaacaatggcagccaagatgttttgcctacatatgcgccttggactttctgcaagtgctgctacagcgaccatttcaccgcaatgctcgcaagctcctatagcttccgttattccacctaacctctcaccagcggtgtcttcggtatgtgaaaacccaattctcaaacaatacacgatccaacaggcaatcacagctggaatctcacctttatcagcttagtccatccaacaatcatcatccttataacatcagttacctgtggtgcatatatcggcacaaaacatcggggcacaacatctacaacaacttgtgctagcaaac

SEQ ID NO: 292843 - DNA, 292 bp, Zea mays
caacaagcaacatagaaagtggaatacagtagcaaaaatagagcaacaatggcggccaggatattttccatcctgatgctccttgctctttctgcatgtgttgctaacgccaccatttttccttaatactcacaagcttctatagctgcccttcttcccccataccttccatcaatgaccgctttaatattgtgaaaccccagcctttaacccttccagatccaacaagccatcgcaaccagcaacttacctttattacaactggtcttttaacaattgccaggccctatct

SEQ ID NO: 292844 - DNA, 342 bp, Zea mays
ctcaagcctacgtagaccaacacgcaccttaatacgtggactccaatttcaacaaccagacggcactttataccggtgcgtattctatcctcatgctcctcactctttctgcatgtgttgctaactcgacaatatcctatcaatgctcacattcttctatagctcccattatctctgcataccttacatcaatgatagcttcactttatgcaaacccttctcttcatacctatagcatgcatcaagccatctctacaagcaacataccttcatcactcttgctgtttaaacaatctgcaaccctatctattattcagtcatttattcaaaccatcacgactc

SEQ ID NO: 292845 - DNA, 416 bp, Zea mays
cagccgtgcaagcctacaggctacaactagcgcttgcggcgagcgccttaacacgaccgaatgccccaattgaacggccatcccttgcaccatttaaccttccaaccaatggaacccaaccaccaccaccaccagttcttgcattaattaaccaacttacccttgtgaacccttgcaactaatttcaacaacaacttgttgcattcaacccaattgctcttgccaacctaactgtataccagcaacaacaacagctgcaacagtttatgccagtgctcagtcaactatccatggtgaaccctgccgtctacctacaactactttcatctagcccgctcgcggtgggcaatgcacctacgtacctacaacaacagttgctgcaacaaattgtaccagctctgactcaactagctgtg

SEQ ID NO: 292846 - DNA, 435 bp, Zea mays
caaatagcaacatagaaagcacaatagtgtaccaacaatgtctgtcatcatactggggttccttatgctccttgggctttctgcaagtgctgctaccgtaaccatttttccacaatgctcacaagctcctatagcttcctttcttatccccatacctctcaccaactgtgtcttcagtatgtgaaaacccaattcttcaaccctacatgatccaacatgcaatcgcagcaggcatcttacctttatcaccctcgttcctgcaacatccgtcagccctattacagcatttaccttcgatgcatatgttggcacaaaccatcaaggcacaacatctactacgacttgtgctaggaaaccttgcttcatactctcagcaacagcaggttctttcattcaaccaactcgctgcattgaactctgctgcttatttgcaac

SEQ ID NO: 292847 - DNA, 435 bp, Zea mays
caaacacacaccgagcgaagcgcactatcaacgacctaacaccaatggctaccaagatgattatccctgcttgcgctgcttgccctgttactgagcgcatcacatgcgttcattattacacagcgctcacttgctcctagtgccattattccacagttcctcccaccagttacttcaatgggctacgaacatccagccacgcaagcctacaggctacaactagcgcttgcggcgagcgacttacatcaaccaattgcccaatagcaacaacaatacttgacacatctaaccctacaaaccattgcaacgcaacaacaacaacagcaccagttcctgtcatcgactgagccacctagccgtggagaaccatgtcagctacttgcaacagcagctgcttgcatccaatccacttgctctggcgaacgtagctggcta

SEQ ID NO: 292848 - DNA, 403 bp, Zea mays
  unsure (1)..(403): unsure at all n locations
gagcattcagaaacacacctagcgaagcgcactatcaacgacctaacaacaatggcttggaanagattatccctccgtgcgcttcttgccctttttgtgagtgcaacaaatgcgttcattattccacaatgctcacttgctccgagtgccattattccacagttcctccctccagttacttcaatgggcttcgaacacccagctgtgcaagcctataggctacaacaagcgcttgcggcgagcgttttataacaaccaattgcccaattaacacaacaatcctttgcacatctaaccatacaaaccatcgcaacgcaacaacaacaagcacttgaccacctaaccgatgtgaaccctatcgactacttgcatcaacagctgcttgcatacaacccacttgctt

SEQ ID NO: 292849 - DNA, 380 bp, Zea mays
gcaacatataaagcacaatagtgaaccaacaatggcagccaaaatattatgcctggggatgctccttgatctgggtgcaagtgcttctactgcgaccattttatcacaatgctcacaagcttctatagcttcccttattccctcgtatatctcaccagcggtgtcttcggtatgtgaaaacccaattcttcaaccctatacgatccaacaggcaatcgcagctggcatcttacctttatcacccatgttcctacaacaatcatcagccctattacagcacttaccattggtgcatttattggcacaaaacatcacaccacatctactaccacaacttgtgctagcaaaccttgctacctactctcatcatcaacagtctc

SEQ ID NO: 292850 - DNA, 421 bp, Zea mays
cagaaataataaagcacatatatgggattccactccacatcaattctcaacaactacagcggcttgtgctatcagacctgtgctgactactctcagcaacagcaccatacttcacattcaaccaactagctgcatcaaactctgcttcttatttacaacatcaacatctaccattcagacatctacctgctgcctacccacagcaacttcttacattcaaccaactgacacatttgaactatgatctttatttacagcaagcaccacttactacaattcaccaagctacttgttgtaagccttgcaacctttttgatccacccacatttgttgccatcctacaataacactaagcctaacgctgccccccttttacaattcaaccaattgttgccatttacccaacttccttttacaaacc

SEQ ID NO: 292851 - DNA, 445 bp, Zea mays
gcagtttcttccattcaaccaactggctgcattgaactctgctgcttatttgcaacaacggctacgattcagtcagctagctgctgcctacccccagcaatttcttccattcaaccaactggcagcattgaactctgctgcttatttacaacagcaacagctaccaccattcagccagctagctgatgtgagccctgttgccttcttgacacaacaacagttgttgccgttctacctgcacgctgcgcctaacgctgggaccctcttacaactgcaacaattggctgcattcaaccaacttggtttgacaaacccaaccagggtctaaccacaacccatcattggtggtgccctcttttagattggttatgagttatacttcaataatgaattttttggaatgatgttggggctttccagaaataagaaagtacatttcttaaaa

SEQ ID NO: 292852 - DNA, 370 bp, Zea mays
gcggcggctgcggctgccagccaccgtcgccggttcatctaccgccgccggtgcatgggcgacctccggttcacgggcgacctccggtgcatctcccaccgccggtccacctgccgccgccggtccacctgccaccgccggtccatgtgccgccgccggttcatctgccgccgccaccatgccactaccctactcaaccgccccggcctgagtcttatccagagccacacatatgcccgtgccaacagccgtatccaagcccgtgccatctgcaggaaacctgcggcgttggcagcaccccgatcctgcgccagtgcgtcgagtttctgaggcatcagtgcaccccgacggcgacgccctactgctcgcc

SEQ ID NO: 292853 - DNA, 442 bp, Zea mays
gttctagatcgcgagcggtcgccctttttttttttttttttttttttttttttgggaggaaaagtgccatagcataatccaaaacttgacagtacagaacagcatccaggacaaaacagaacccaaaatcgactccggcagttcttagctataatatagataccgcatttagacaagcacccgacgagtagagctctccactcaaaccatcctaagcctttactgtctcagttggggcctcgagcacaaggcccttggtgggctttgccagcaggtcggtgtactgctggaacggggccatggagaacttggtctggctccagaattcaggagtgaggaagccgtaggtcttcatcaggcagtcgaaggttgccttgacgaagttgccaagggtcttagtggagccacgggacgaggtgaagacatcctcaatgccagcgaa

SEQ ID NO: 292854 - DNA, 350 bp, Zea mays
cttccgtttaaccaattggccgcactgaaccccgctgcttatttgcagcagcaaatactactaccatttagccggctagctgcagcaaaccgtgcttccttcttgacacagcaacagttgctgcctttctaccagcagtttgcggctaaccccgcaaccctcttacaactacaacaattgttgccctttgtccaacttgctttgaagaccgagcggcctcctaccaacaacacatcattggtggtgccctcttttagattgcttattagttgtaattcaataataaagttttttggatgatgtatgtggccaaccagaaataagaagttacatttccagattttaatgtg

SEQ ID NO: 292855 - DNA, 404 bp, Zea mays
tctgctgcttatttgcaacaacaattaccattcagccagctagttgctgcctacgccgagcaatttcttccatgcggccaactagcagcattgaactctgctgcttatttacagcagcaacaactactaccattcagccagctagctgatgtgagccctgctgccttcttgacacaacaacagttgttgccgttctacctgcacgctatgcctaacgctggcaccctcttacaactgcaacaattgctgccattcaaccaacttgctttgacaaacccaacagtgttctaccaacaacccatcattggtggtgccctcttttagattgcttatgagttatagctcaataatgaagttttttggatgatgtttgtggcgtcccagaaataagaaagtacatttct

SEQ ID NO: 292856 - DNA, 376 bp, Zea mays
agaaagcacaatagtgtaccaacaatggcagccaaaatattttgcctccttatgctcgttggtatttctgcaagggctgctacggcgaccattttcccgcattgctcacaagctcctatagcttcccttcttcccccgtacctctcaccagcggtgtcttcggtatgtgaaacccaattttttaacccctacggtgcccaacgggtattcgcaggtgtcttatcactattacccccgttgctcctacaatcatcatccccattatagcagttacccctggtgcacatattgtcgcaaaaaatcatggcgcaacaactactacaacttgtgctagcaaaccatgctgcctactcttatcaacaaccagtttttttca

SEQ ID NO: 292857 - DNA, 441 bp, Zea mays
  unsure (1)..(441): unsure at all n locations
cccacgcgtccggcgaagcgcactagcaacgacctaacaccaatggctaccaagaaatgagggcttcttgggcctcttggccttttaatgaacgccacaaatgccgtcattatttcacaatgcttaattggttctaatggcattatttcacagattcttccaccacatactctaatgggcttgaaacattcgnaccgcgcaagctatacaggttacatctagcgcttgcggagagcgctttacaacaaccaatggcccaattgcaacaacaatccttggcacatctaaccatacaaaccattgcaacgcaacaacaacaacaacaacagtttctgccatcactgagccacctagccgtggtgaaccctgtcacctacttgcaacagcagctgcttgcatccaacccacttgctctggcgaacgtagctgcataccagcaac

SEQ ID NO: 292858 - DNA, 272 bp, Zea mays
ctagcatcatttttctatcctgtttaaatacagcagcttcaacggctaccttggaaccttctaactcttgtgagccctactaccttcttgacacaaccacagctgttgccattctaccatcacgttccgcctaacgctgtcaccctattacaactgcaacaattgctgacattcaaccaacttgctttgacaaacccatcactgttctaccaacaacccatcattagtagtaccctcttttagatttcttatgagttataattcaataataa

SEQ ID NO: 292859 - DNA, 338 bp, Zea mays
cagctacctacatataaagcacaatagtgtaccaacaatggcagcccaaatatctagggttcttatgctccttggtatatctgcaagtgctgctaccgcgaccattttcccgcaatgctcacaagctcctatagcttcccttattcctcagtacctcttaccagcggtgtcttagatatgtgaaaacccaattcttcaaccctacaggatccaacaggcaatcgcagctgccatcttacctttatgacccttgttagtgcaacactcatcagacctattacagcacttacctttggtgcatttattgtcacaatacataagggcacaacaactacaac

SEQ ID NO: 292860 - DNA, 338 bp, Zea mays
atggagagcattcacaaccacagagcgccaatgtcgaccacgacactttacctacttaggctactagcacattatgcatgcgtggccaacgcgacatttttgcgtgcgcgctcactgcctccaatagctcacattgctcactcacacctagcatcaatgttcgatacagtatgtgaaaacctacttctataaccctataagatccaactagcaatggctacatgctacataccgcgatcaccgttggcgcaacaatcgatagacctatctaaggtgcactccttggcacagaccatctaggcacaccaactgtagcaactcatgctacacgagatcaa

SEQ ID NO: 292861 - DNA, 412 bp, Zea mays
tcggagaccaactagcaacatagaaagcacaatagtgtaccaacaatggctgccataatagtttgccttcttatgctccttggtctttctgcaagtgctgctactgcgaccattctactgtaatgctcgcaagctcctataacttaacttattgccccgtacctatcaccatcggtgtcttcagtatgtgaaaactacaattcttcaaccgatacaggatccaacaggcaatcgcagctggcatcttacctttatcaccctggttcctccaacaatcatcagccctattacaacagttacctttggtgcacttattgtcacaaaacatgatggcacagcatctacaacaacttgtgctagctaaccttgctgcctactctcagcaacagcagtttatttcattcatccaact

SEQ ID NO: 292862 - DNA, 399 bp, Zea mays
tatcaactacccacactaattttacaattttctccctacaatgactcctcgggcacatggcctacttatgctgcttgggggctctacacctgcttctactacagatcattttcccacaatgctcacaagctcctatagcttcccttcataacctcattcctctcacctaccgtatcttatatctatgaaaacccaattattcatctctataagacccatctctcaatcacagcatctatctaacctacataaccctttctcctcctacaatcatcctacctatcacagcacttacattacatgcacttattgtcacataccttcatgactaatcttctacaacaactcttgctacctcacaccgctgaactactctcagcctctgctgcttatttcatt

SEQ ID NO: 292863 - DNA, 409 bp, Zea mays
aatccattagcaacaatttagcatcaatgtcgaccaagatattttccggtgttatgcgccttgctctttctacatgagttgctaacgcgacatttttccctcaatgctcacacgctcctataactacccttgtttccccataccttacaccaattatagcttcagtatgtgaaaacccagctcttcaaccatataggctacaccaagcaatctcagcacgcaacatacctttatcgctcttgctgtttcaacattcaccagccctatcttcggagcactcattggcacaaaccatcagggcacaacagctgcaacaactcgtgctacctgtgaacaaccaagtatctctggcaaacctttctcactactctcagcaacaacaattttttacatacaaccaactgtctac

SEQ ID NO: 292864 - DNA, 400 bp, Zea mays
cgcacgtaaccagctggagacgtacgtgtacaacatgaagaacacgctgggcgacagggacaagctcgtggacaagctggaggccgaggataaggaaaaggtggaggaggccctcaaggatgctctggagtgtctggacgacaaccagtccgccgagaaggacgactaccaagagaagcttatggatgtggaggccgggtgcaaccacattgtgtctaccgtgtaccactggtctaacagtgcccctggccttgacactgacagcggtgttgacgacgaccactactagctgtagatggttgtagatggtactggtcacgtgaattgccatatgccgaaccacaattagtaacggggtttatcggatgacaatacttattactaatcttggtgctgctct

SEQ ID NO: 292865 - DNA, 413 bp, Zea mays
caactagcaacatacaaagctcaatagtttaccaacaatggcagacaaaagattctgagtccttatgctccttgggcttgctgcaagtgctcgtacagtgaccattctcccgcaatgctcgcaagctcctatagctctccttcttaccccgtacctatcaccaacagtgtctgcgatatgtgaaaacccaattcttcaaccctacaacatccaacaagcaattgcaacttgcatcttaaccttaataaccttggttcttcaacaataatcaagcctaatacaacaagtacctttagttcaattaatggcaccaaaccaccaggccccaccaactacaacacctgttcctagcaaaccttgctgcctactctaagaaccacaactttcttccattcaaccacttcggtcaattg

SEQ ID NO: 292866 - DNA, 416 bp, Zea mays
ctgatttcatctagccctctcgatgtggttaatgcacctacatacctgagacaacaggtgctgcaacagagtgtaccagctttgactcacctagctgtggcaaaccctgctacctacttgcaacagctgcttacattcaaccaactgactgtagtccaactctgctgcgtacctacaacagcgacaacagatacttaatccactagcggtggctaacccattgctcgctgcctttctacagcagcagcaattgctgtcatacaaccagttgtctttgatgaaccctgccttggtgaggcagcaccctatcgacggaggtgccatctcttcgactacatctgagatgtactcgattgtggcgccctcatagcgtcatgcgtgtcctagacttgctcaatatattgattgagatctat

SEQ ID NO: 292867 - DNA, 382 bp, Zea mays
ccggaatggacgcatgcatccacgcgtccagaactacaccaatcgaaagtacctaactgcgacttaactgcaatgcctaccgtgatgtcagcttatgctggcgcgttcttgctctatgtgctagcgcaacaaatgcgttcattatttgacaatgctcacttgctcctagtgtcattataccacacttcttacgaccagttacttcaatgtgctaaaaacacctagttgagcaagcctacatgctacaacaagcgcttgcggcgagcgtcttacatcaaccaagtaactaattgcatcatcaatcctagtaacatctaaccatacagaccatctgttcacaccagccacaacagtacctaccataactgagccaactatatgt

SEQ ID NO: 292868 - DNA, 278 bp, Zea mays
tttctaaggaagcgcatctcatctatcatcacctgatgtctgggatgcttctggcaggtcagttgacgtgtagcatggagttctcctttgactttgatgtatctatcagtggtactcaatttttgcgaaaaggtcctctaatgtaatggttaagacttccgagcagcacttataggtctcgggttcgatccctcttgagaacgaatttcgggcttagctaagcaaaattatcttacaacactagatctgattggccctgatgggaagacactgaaaca

SEQ ID NO: 292869 - DNA, 443 bp, Zea mays
caacaagcaacatagaaagtggaatccagtagcaacaacagagcaacaatggcgaccgggatatgttccctccttatgctccttgctctttctgcatgtgttgctaacgcgacaattttccctcaatgctcacaagctcctatagcttcccttcttcccccataccttccatcaatgatagcttcagtatgtgaaaacccagctcttcagccctataggctccaacaagcaatcgcagcaagcaacatacctttatcacccttggtggttcaacaatcggcagccctatctttggtgcaatcattggtaccaaccattagggcacagcaacttgaacaacttgggctacccggtgatcaaccaagtagcttctgccaaaccttcttccctactctcagcaacaacaatttcttccattcaacccactgtctacacttgaccct

SEQ ID NO: 292870 - DNA, 284 bp, Zea mays
acatagaaaggggaatccagtagcaacaacagagcaacaatggcgaccaagagattttcggttcttatgctccttgctctttctgcatgtgttgctaacgcgacaattttccctcaatgctcacaagctcctatagcttcccttctttccccatacctttcatcaatgatagcttcagtatgtgaaaacccaacttttcagccctataggcttcaaccagcaatcgcaacaagccacatacctttattaaccttggtggttcaaccatcggcaggcctattttt

SEQ ID NO: 292871 - DNA, 400 bp, Zea mays
cccacgcatcctagcaaacaataatccacactcaacaatttaccaacaatcactaccaatatgagaatgctacttatacaccttactctctcttcatatatttataactcaacaatcttccctcaatgctcacaaactcctatatcttcccttcttcccccataccttccatcaatcatatctacaatatgtgaaaacccacctcttcatccctatatactccaacaagcaatcactacaaacaacatacctctatcacccttactgattcaacaatcaccagccatatctttcttacattcattgctacaaaccatcaattcacatacactacaacaactgcacctacctacgatcaatcaattcactcctctcaacctacctctctactttcactaac

SEQ ID NO: 292872 - DNA, 242 bp, Zea mays
cccacacgtacgtccagcgacatatacagtagaatccattagccaccattgagcaacagtatccgccaacatatttttcctccttatgcttcttgctctttctacatgtgttgctaacgcgacaaatgttcatcaatgcttacaagctcctatagcttcccatatttccccatacctttcatcaattattggctaaatatgtgaaaaccccactttttaaccctataagctttaacaagcaa

SEQ ID NO: 292873 - DNA, 443 bp, Zea mays
ggaattcccgcagccagccacacatccgacaacatacaatgttgaattcagcattttcaatatagcaacaatgaccgcgaaaatgttctccatcctaatgctgctggctctttctacatctgttgctaacccgaccatttttcctcaatactcacattctcctatatctgtcctacttcccccataccttccatcaatgacctctacagatttcgaaaacccatccctacaaccctacattctccaacaatcaatcgcaacatgcatcttacctttatcacccctgatatctcaacatttcacaaccctatctttaatgcaatcattggtacaaaccatcacggcacatcagcttcaacaacttgatctaccattgatcagccaacttatctatacaaacctttctccctactctcaacaacatcaatttacttcattcaacc

SEQ ID NO: 292874 - DNA, 423 bp, Zea mays
atccctcctgcgcttctggccctttttgcaagcgcaacaaatgcgtccattattccgcaatgctcacttgctcctagttccattattccacagttcctcccaccagttacttcaatggccttcgaacacccagctgtgcaagcctataggctacaacaagcgattgcggcgagcgtcttacaacaaccaattgcccaattgcaacaacaatccttggcacatctaacaatacaaaccatcgcaacgcaacagcaacaacagttcctaccagcactgagccacctagccatggtgaaccctgtcgcctacttgcaacagcagctgcttgcatccaacccacttgctctaaccaacgtaagttgcaaccaagcaccacaacaactgcaacagtttctgccagcgcttagtcaactagccatggtg

SEQ ID NO: 292875 - DNA, 314 bp, Zea mays
  unsure (1)..(314): unsure at all n locations
tcggaacttgcaacctttaaagccccattgtttacccaccattgccggccaaattttttgcctccgatcctcctggccttcttcaattctgctacggcaccattttcccgaatgctcgcaagctcctatagccttccttcttcccccgtacctctcaccagcggtgtcttcggtatgtgaaaacccaattcttcaaccctacaggatccaacaggcaatcgcagctggcatcttacctttatcacccttgttcctacaacaatcatcagccctattacaacagntacctttggtgcatttattggcacaaaaca

SEQ ID NO: 292876 - DNA, 428 bp, Zea mays
gcagcatagagagcacaatagtgtaccatcaatggcagccaaaatatattgcttccttaggctccgtggtctttctgcaagtgttgctaccggaaccattttcccacaatgctcacaagctcctatagcttcccttctttccccatacctctcaccagcggtgccttcaatgtgtgaaaccccaattgttcaaccctacaggatccaacaggcaatcgcatcaggcatcttaccattatcacccttgttcctccaacaaccgtcagccctattacagcagctacctttggtccatttggtggcacaaaacatcacggcacagcagctacaacaacttgtgctagcaaaccttgctgcatactctcagcaacatcagttgcttacattcaaccaactggctgcattgaactctgctgcttatttgcaac

SEQ ID NO: 292877 - DNA, 403 bp, Zea mays
ttcaagggtcttgatgataggagctctgccccttcattacagatggataggattagtatctacgacacttcaggactagagctctatgatttgttggatgttgtacccactgtatgtacttagtcctgaaacagtggccaatctatattatactctctctgttctttcttttttatttgtcgcggtctagttcaaaaatgaactagcgggcgacaaatattcaagaacggaggtagtatatgacttagacgtaactttagtgcaccgaatgtagtcaacctttgtttgctttggacaatgaggatttgctgttctaaagacacaacaactacagctactgtggcatcctaaccttgctgcctactctgagtaacataaaaagggtggatgctttaaaggatcc

SEQ ID NO: 292878 - DNA, 412 bp, Zea mays
cgaccggccacctcttcccaattgcatcgcatccccaggacttgccggccggtccagagacgtacggcgataatgggggcttctgaggtgtggtcatcggtgccagcctggctggcgatcgccgtcggcttggcggccgtggtttcctcgtcggaggctcacgtattctacgccggtggccacgacggctgggtccttgaccccaccgagagctacaaccattgggccgggcgcagccggttccaagtgaacgacaccatcgtgttcacgcacgaggagggcgtcgactctgtgctgctggtgaccgagcaggacttcgacacgtgcaacacgcgcatacccggtccggcggctccaagccgtcggcagcagcggcagttcggagcgttcggtgttcaagctcgaccggtcc

SEQ ID NO: 292879 - DNA, 384 bp, Zea mays
gctggtgtgagccctgctacttcttgatacaaccacagctgttgccgttctaccagcaggctgcgcgctaacgctggcaccctcttacaactgcaacaattgctgccattcaaccaacttgcttcgacaaacccagcagcgttctaccaacaacccatcattggtggtgccctcttttagatctcttatgagccatagttcaatcatacagttttttgactgatgtttgtggcttcccagaaataagaaagtccatgcttaaaaaaaaaagataccactattaccattcatccagacaaatactgactactctaaggctcaacaaatctcgtgcattcaaccaattggtcgctactatcacaagctgcttatttgcagcattca

SEQ ID NO: 292880 - DNA, 254 bp, Zea mays
atagtgagcattcagaaacacacaaagctaaacgccctagaaacgacctaacgtcaatgggtaccactatatttgctctacttgagctaattaccctttattagagcgaatcatatacgttcattattccacaatgctcacttgatcctaatgccattattccacaaatgcatgaaccagctacttcaatggactatgaacacctaactatgcaagcacatcatgagacaacaagcgcttgctgcaagcaactt

SEQ ID NO: 292881 - DNA, 402 bp, Zea mays
gcaacatacaaagcacaatagtgtaccaacaatggcagccaaaatattttgcctacttatgctccttggtctatctgcaagtgctgctacggcgaccattttaccgcaacgctcgcaagctcctatagcttcccttctttccccgtacctctcaccagcggcgtcttcggtatgtgaaaacccaattcttcaaccctacaggatccaacaggcaataacagatggcatcttacatctatcacccttgatccttcaacaatcatcatccctattacatcagttacctttggtgcatttattggcacacaacatcagggcacaaccactacaacaactcgtgctagcaaaccttgctgcctactctcagcatcagcagtttcttccattcaaccaactagctgc

SEQ ID NO: 292882 - DNA, 477 bp, Zea mays
cagaaacacaccaagcgacgctacctagcgacgacttaacaacaatggctaccaagatattagccctgcgtgcgcttgttgccctttctgtgagcgcaacatatgcgtgcattattccacaatgctcacttgctcgtagtgccattataccacagttcctccgaccagttacttcaatgggcttcgaacacctagctgtgcaagcctacaggctacaacaagcgcttgcggcgagcgtcttacaacatccaattaaccaattgcaacaacaatccttggcacatctaaccatacaaaccatcgcaacacaacagcaacaacagttcctaccagcactgagccaactagatgtcgtgaaccctgtcgcctacttgcaacagcaggtgcttgcatgcaacccacttgctctggcaaacgtagctgcataccaacaacaacaacaattgcaacagtatctgccagcgctcagtcaactag

SEQ ID NO: 292883 - DNA, 285 bp, Zea mays
caacatagatagcacaatagcgtaccatcaaaggcaaccaacatattgtgcctcattatgctccttggtctctgcgccagcgctgataccgggaccattttccccgctatgctcggaagctccaatactttcctttattaccccgtacctttaacaaccaacgacttcgtgttgcgaaaacccaattcttaatccctccaggacccatcgggcaatttaaactggcatcttaccttgatcaccctagctcatccaacaatcacaacccttattgcaccatttacc

SEQ ID NO: 292884 - DNA, 205 bp, Zea mays
atccaatccagatcagcagaccgacactgcgtacagcggatcgctgaacagaacagcaggaagatggtcatcgttctcttcgtgtgcctggctctgtcagctgccagcgcctctgcaatgcagatgccctgcccctgtgcggcgctgcagggcttgcacggacctggcgccggcctgacgacgatgatgtgcgccggtgcgctgt

SEQ ID NO: 292885 - DNA, 436 bp, Zea mays
aatgaatccaaagatcacgttacaacaacgtacgacaacgcgtgctagcaatcatagatggctactcgtactagcagaggcccatgcattgaaccaactagttgcattgaacttatgatcatattggcaacagcaacaactaccatgaagacgactacctggtgcctacctgcagcgattgctttcatgcagccaagtgtacatgtataactgatctgcttattgacagcagcaacaactattaccatacagtcaggtagctgaagcgagccgtgctacctcattgatgcaagcacagctgttgccgcactaccagaacgctgggcctaacgctggaatcttattacaactgcaacaattgctgccattcaaccaacttgctttgacaaacccagcagcgttctaccaacaacccatcattggtggtgccctcttt

SEQ ID NO: 292886 - DNA, 272 bp, Zea mays
acgctcggcacgcaggcagaggcagcatagctgcagccaactccatccatcctcggtcccctcctcgctgcgcttgctcggcggattcctcctccctctaccgtccccgttcccgtgcacttgcggcgcgcgtgctcgcccgagatggcatacgccagatctggtgtcgctgtgaatgacgagagcatgctcaagttcgtcgagctgcactcgaagaggctgcaccggttcctaactttcaagattgacgacaagttcatggtgatcgttgt

SEQ ID NO: 292887 - DNA, 407 bp, Zea mays
gcgaaatgctcgcaagctagtatagcttctcttatttcaccgcacctgtcaccatcgggggcttgggcatgtgaatacttgagcttgtagcgctaccggatccagcaggcaataacacgcggcatcttatctgtatcaccgtcgttactccaacaatcatcagccctattacttcattgaccttaggtgcatttattggcacagcagatctgggcccaccaacgacatcagcttgtgctagaaaacgtcgctgcctactatcagcaacagaagccttttcaattctaccaattagctgcattgaactatgcttactatttgcgacagcaccaactatgattcagccagctatatgctggctacccccatcaatgactgacattcaaccaactgtcatcattgaactc

SEQ ID NO: 292888 - DNA, 404 bp, Zea mays
aacatagaaagcgcaatagtgtaccaacactggcagccaacatattttgcctgcttatgctccatggtatttctgcaagcgctgctacggcgaccattttaccgcaatgctcacaagctcctatagcttgccttcatccctcgtacctctcaccagcggtgtctatggtatgcgaaaacccaattcttcaaccctacaggatccaactggcaattgcagctggcatcttacctttatcaccctcgttcatccaacaatcatcagccctattacagcagttacctttggtgcatttattggcacaaaacattaaggcacaacaactacaacaacttgtgctagcaaaccttgatgcctactctcagcaacagcagtttcttccattcaaccaactagctgcattg

SEQ ID NO: 292889 - DNA, 414 bp, Zea mays
ctgctgcgtacctacaacagcgacaacagttacttaatccattggcagtggctaacccggtggtcgctaccttcctgcagcagcaacaacaattgctgccatacaaccagttctctttgatgaaccctgccttgcagcaacccatcgttggaggtgccatcttttagattacatatgagatgtactcgacaatggtgccctcataccgacatgtgtttcctagaaataatcaatatattgattgagattcatctcgaaaaactaatacagcaattaccttagaaggataaattggcacaaaacaataaggcacaacaactacaacaacttgtgctagcaaaccttgctgactactctcaagaaacagcaaattaataaatggggggcccttttaaggaatcaaactttacttcc

SEQ ID NO: 292890 - DNA, 408 bp, Zea mays
gatgtgagcaactgaacacaccaagcgaaacgaactagaaacgacttacatcattggataccagatttagcccttctggctaattgcactttatgcgagcccatcatagcgtacacttattgaacaatgctgaattgtcctaaagccagattgccaaatgcttgaccagggacttaaggatatgaagacctattgccaagccatcatgcagcaaaagcgcttgtgagagcgtcttacaacaacaattgcccaattgacacacaatgattgccacatataacaatacaaaggataacgacgtaacaataacaacctttcgtacatcattgagccacctaggcatggtgaaccctgatccctactcgcgagagctgctgctagcatgcaacgcacttgctctggagaacg

SEQ ID NO: 292891 - DNA, 321 bp, Zea mays
cggacgcgtgggcaactagcaacatagatagcacaatagtgtaccaacaatggcggccgagatattttgcctccttatgctccttggtctttctgaaagtgctgctacggtgaccattttcccacaatgctcacatgcttctatagcttcccttattaccccgttcctctcaccagcggtgtcttcggtatgtgaaatcccaattcttcaaccctataggatccaacatggtaactacacaagcattgaaccttattcaatcctgcaggctatcacatctggcatcttacctccataactcgtgttgctgcatcaatcgtc

SEQ ID NO: 292892 - DNA, 417 bp, Zea mays
gctcatatactacagcaccatctactaccactcagccagatagctactgcctagtctcaggagcaaccatgccttccattgaaccaatggggcgcactgtaccgatctgcttatttacagtagcagatactactaccatttggccagatagctacgtcatgcaccacttccactatgaaacaacaacattcgattacgttctaccatcagtctgtggctaacaccgcaacagtattacaactgctacaactgctgccctttgtccaacttgctttgacatagcccgcatgcttgtaccaacatcacatgatcgtcggcgtcatctttcaaatggattataacctggaattcaataatgaaggagctcggctgctgaatgtggcctacttaaaataacaactatcagatgcatatgct

SEQ ID NO: 292893 - DNA, 458 bp, Zea mays
ccggtttcggaatccgggccgacccactcgtaccgacgatacctagcactacttatcaaccttggctaccaagatattaaccctgcttgcgcgtgctgctttatcagtctgcgcgtcatatgcctccatcaatccacaatgaacacttgctcacagtgatattataccaaaattcctccgacctgttactacaacggtcttcgaacaccgagctgcccaagcttacaggctacaacatacgacatcgactagcatcttacatcatccaattatcccactgcaacatcaatctttgacacatcttactatacaaaccaactacacacaatatctagaaccaacactaccagccatgacacctctagatgtggtaaaccctgaatattacttgcaacatcaagtgctagcattcaaccaacagtgatctatctaacgtaactgcataccatcaactacat

SEQ ID NO: 292894 - DNA, 209 bp, Zea mays
gtcgacccactcgtcctgttgtaattcaataataagcaatctaaaagtaggcaccaccaatgatgtgttgttgatgggatggggctcgttctgtcaaagcaagttgtacaaagggcatcaattgttgtagttgtaagagggttgcggtgttagccataaactgcttttttaaaggcagcaactgttaatgtgttaacattgaagctctg

SEQ ID NO: 292895 - DNA, 391 bp, Zea mays
acccgatcgacaccatgagggcgttgctcgacgccctcggtctcctggctctcgctgcgagcgccgcctccacggcatacaagcgggggctgctgctgccagccaccgccgacggttcatataccgtcgtaggtgcatctgtcacctccggtacacctgcacacctgcggtgcatcttgcaccgacggtccaactgccgacgcctgcacgactgacaacgccggtgcatgtgccgtcgcacggatcatctgccgtcgtcaccatgccactaccatacttaacacggccggcctcagtctgatacccagccacacacatgctcatgccaacagacgtataccaacccgtgccagctgcacggaacctgcagtgtcagcagcaccccgatcct

SEQ ID NO: 292896 - DNA, 371 bp, Zea mays
cgcaggcaagtacaagtcgaacgcattagcaacgtacagccacaattgagggcaggatattctaactccttatgctggttgatatgactacatgcgttgctaacccgacaatcttccgtgaatgcgtcacaagctgctatcgcttacgttgttgccgcatactttggatacattataggttcagtatgtgaaaacccagatcttgaaccatatgggctgcaaccagcaatcgtaggaagcaacatacctttatcgctcttgttgcatgaacaatcaccagacctatttttgctgaagctattggtccaaaccatcagggcacaacatctgcaggaacccgtgctacctgggatcaaccaagtacttttgga

SEQ ID NO: 292897 - DNA, 280 bp, Zea mays
gtcactcataaacatgagtggcagtgtcagagtgagcaatgacctgaatgaacaatcgggatgaaaagaataaagaacataataaataaaaataaaaaaatagataaaacaaataaaataacataaaagataaaaaaactgactaaagcttacgtagttactaaatacctataataaaattatagattcaatatataaaaaaggcggaccattaaacatatatcaattatacgtgcgttcgcatgcaacttcatacgtctataattggtgaagcaaaatc

SEQ ID NO: 292898 - DNA, 331 bp, Zea mays
ccgacccactcgtacgaacaacaatcattggcacatgtaaccatataaaccatagcgacgcaacaacgggaacatgagttgctgatattactgagcgacctagccgagcataaccctgtcatatacttgaaacagtaagctgcttgcatatgacccacttgctctggcaaacgtacctgattactcgcgacaacaacaactgcaacatattatggccaagatgagtcaactagccatggtgaaccatgtcgtataactaccacttgtcgcatttattcagctatacgagggcaatgcaactacgcacgtacttcgacagtagctgcaacaa

SEQ ID NO: 292899 - DNA, 348 bp, Zea mays
aacatagaaagcacaatagtgtaccaacaatggcagccaaaatattttgcttccttatgctccggggtctttctgcacgtgttgctaccgaaaccattatgccacaatgctcacaagctcctataacttcccttcttcctccatacctttcaccagcggtgtctacaatgtgtgaaaccccaattgttcaatcctacagcatccatcaggcaatcacaacaggcattttaccattataaacttcgatcctgcaacaacagtgagtcctattacagcaatgacctttggtccattcgttggcacacagaatcaggacacaccaacttcagcacttggtcatatcaaact

SEQ ID NO: 292900 - DNA, 451 bp, Zea mays
gcaacatagaaagcacaatagtgtaccaacaatggcagccaaaatattttgcttccttatgcgccttggtctttctgcaagtgttgctaccgcaaccattttcccacaatgctcacaagctcctatagcttcccttcttcccccatacctctcaccagcggtgtcttcaatgtgtgaaaccccaattgttcaaccctacaggatccaacaagcaattgcaacaagcattttaaccatattaaccttggttcttccaacaaccgtaagccttattacagcagttaccttgggtccatttggtggcacaaaacatcagggcacaacaactacaacaacttgtgctagcaaaccttgctgcatactctcagcaacatcagtttcttccattcaaccaactggctgcattgaactctgctgcttatttgcaacaacaattaccattcagccagct

SEQ ID NO: 292901 - DNA, 419 bp, Zea mays
acctagcgaagcgcactagcaacgacctaacaacaatggcttccaagacattatccctccttgcgcttcttgccctttttgtgagtgcaacaaatgcgttcattattccacaatgctcacttgctccgagtgccattattccacagttcctccctccagttacttcaatgggcttcgaacacccagctgtgcaagcctataggctacaacaagcgcttggggcgagcgtcttaaaacaaccaattgcccaattacaacaacaatccttagcacatctaaccatacaaaccatcggaacgcaacagcaacaagcactgagccacctaacccgggtgaaccctatcggctacttggaacaaccggtggttgcattcaacccaattgctttggcaaacctaacttgataccaaccaccacca

SEQ ID NO: 292902 - DNA, 425 bp, Zea mays
gtcccctgctccattctcagccgccgccaatcccttcccgtgctccgcaaccgctgagggagaagaagagatggccggcaagggcgatggcccggctatcggcatcgatctcggcacgacgtactcttgcgtcggcgtgtggcagcacgaccgcgtcgagatcattgccaacgaccagggtaaccgcaatgagaaggtgcaggacctgcttctgctggacgtcacccctctgtccctgggtctggagactgctggaggagttatgacagtgctgatcccgaggaacaccaccatccccaccaagaaggagcaggtattctccacctactcggacaaccagcccggtgtcctgatccaggtctacgagggtgagaggacccggacacgcgacaacaacctgctgggcaagttcgagctctgcggca

SEQ ID NO: 292903 - DNA, 436 bp, Zea mays
tcgaacaggcaatcgcaacaggcatcttaccattatcacccttgttgctacaacaaccgtcagccctgggacggcagttacctttggtccatttggtggcacaaaacatcagggcacaacaactacaacaacttgtgctagcaaaccttgctgcatactctcagcaacatcagtttcttccattcaaccaactggctgcattgaactctgctgcttatttgcaacaacaattaccattcagccagctagttgctgcctacccccagcaatttcttccattcaaccaactagcagcattgaactctgctgcttatttacagcagcaacaactactaccattcagccagctagctgatgtgagccctgctgccttcttgacacaacaacagttgttgccgttctacctgcacgctatgcctaacgctggcaccctctt

SEQ ID NO: 292904 - DNA, 453 bp, Zea mays
agaagctgatcacaagatcccatcaacagaagtaaaacttgcctcagagtactacttctacatggaaacacagacagcactagcagttccagatgaagataacactttggtagtctacagttcgtcacagtaccctgaacttgcacaaagtgtcatagcaaggtgcttaggtattccattcagcaacgtgcgtgtcattacaagaagggttggaggaggctttcgtggaaaggcattcagatcattccaagttgcaacggcagctgcactttgtgcgtacaagttacggcgtcctgttcgaatgtaccttaatcgcaccaccgatatggtcatggttggtggtaggcacccagtgaaagctaattatactgtcggattcaagaacgatgggaacgttacggccttgcatctagatttattgattaacgctgggatatctccagatgcgagccc

SEQ ID NO: 292905 - DNA, 312 bp, Zea mays
caacagttatgacaactgtccatgaagatttgacctgtgcgatgcatactatcttaggtatcaggggatgcctgagtttgaccacgcaatgcaacattttgaccctaaatatgaatgcacgacatttgatcaccactatatctcccgctaccatgcagacgactacgtgattgctacccacagagggagacttgcattcagccgactaacttccactgcactatcatgtatattgactaccgcatcgctagctaaatgcctgcagtgtataaggtgtgatcgtactacgacgcttgactatccacaggattt

SEQ ID NO: 292906 - DNA, 444 bp, Zea mays
acatagaaagcacaatccattagcaacaatagagcaacaatggcgaccaagatggttggcgtgcttatgctccttgctctttctacatgtggtgctaacgcgacaatgttccctcaatgctcaccagctcctatcgctttccttctttccccataccttccattaattataggtttaatatgtcaaaacccaagtcttcaaccatataagcttcaacaagcaatcatattcagccacatacctttattgcccttggtggttcaacaatcaccaggcctatctttggtgcaaacattggtacaaaccatcagggcacaacagctgcagcaactcgtgctacctgtgatcaaccaagtaactctggcaaacctttctccctactctcagcgacaacaattttcttccattcaaccaactgtctacactgaaccctgctgcttattt

SEQ ID NO: 292907 - DNA, 347 bp, Zea mays
aagcttcctatagtcttcaccttcttcaccccgtatcctctcatccagcggtgtacttcggtatgtgaaaatcccatattcttcaactcctacaggtatccaacatggcatatcgcatgctggcatacttatcctttatcatcccttgttcctccaacatatcatcgagccctattacaatcagttactcttttggtgcatttaattggcacataaacatcatgggcacatacaactacatacaacttgtgctagcaaacgcttgctgcctactctcatcaacagcagtttcttccattcaaccaactaggttcattgaactctgcttcttatttgcaacaacaaca

SEQ ID NO: 292908 - DNA, 428 bp, Zea mays
gcaacatagaaagcacaacagtgtaccaacaatggcagccaaaatattttgcctccttatgctacgggggctttctgcaagtgctgctacggcgaccattttcccgcaatgctcgcaagctcctatagcttgccttcttccaccgtacctatcaccagcggagtcttacgtatgtgaaaacccaattcttcaaccctacaggatccaacaagcaatcgcagctggcatattacctttatcacccttgttacttcaacaatcatcaggcctattacaacagttacctttggtgcatttattggcaccaaacatcaaggctcaacaactaccacaacttgtgctaacaaaccttggtggctactgttagcaacagcaggttccttcattcgacccacttggctcattgaactccgcttcttaattgcaac

SEQ ID NO: 292909 - DNA, 352 bp, Zea mays
cccacgcgtccgccgcaaccctcttacaactgcaacagttgctgccctttgtccaacttgctttgacaaacccagcagccttctaccaacaacacatcattggcggtgccctcttttagattgcttattagttgtaattcaataatgaagttttttggctgatgtatgtggcctcctagaaataagaagttatatttccaaaaaacaaatacaaacgacagtacaactgacaacgacagaacaaactgacaacgacagtccatgtgccgacgacggttcatctgccggcgacaccatgccactaccctacttaaccgacccggcctaaaaaaaaaaggggggccctttttaa

SEQ ID NO: 292910 - DNA, 422 bp, Zea mays
cactgaaccccgctgcttatttgcagcagctaatactactaccatttagccagctagctgcagcaaaccgtgctttcttcttgacacagcaacagttgctgcctttctaccagcagtttgcggctaaccccgcaaccctcttacaactacaacaattgttgccctttgtccaacttgctttgacagacccagcggcctcctaccaacaacacatcattggtggtgccctcttttagattgcttattagttgtaattcaataataaagtattttggatgatgtatgtggccaaccagatataagatgttacatttccaaaagatattatgatttcaggaaacagcttcatcagcttaacattctcatagcactgtgtctgtactttgtatataagttccatttcgagtctagcactcgtgcaa

SEQ ID NO: 292911 - DNA, 233 bp, Zea mays
aaaaagcaacataaaaagagaaatacaaaattcaaaaatatagcaacaatggcggacccggaatgggggcattcttatgctccttgctcttgctacatgcgagggtaacacaaacattggccctcaattctcgcaagctaatgtagctaccctgaataccccataccttccatccatgatcgatttcctaagcgaaaacccaggccttgatctttacaggattcaccgtgcaa

SEQ ID NO: 292912 - DNA, 353 bp, Zea mays
caaaagcacaccaagcgaagcgcactagcatcgacctatcaccaatggctaccaagatattagggctccttgcgcttcttgcccttttagtgagcgcaacaaatgcgttcattattgcacagtgctcacttgctcctagtgccagtattccacagttcctccaaccagttacttcaatgggcttcgaacatccagccgtgcaagcctacaggctacaactagcgcttgcggcaagcgccttacaacaaccaattgcccaattgcaacaccaatccttggcacatttaaccttacaaaccattgcaacgcaccaccaacaacaccagtttttgccatcactgagccacctagcc

SEQ ID NO: 292913 - DNA, 306 bp, Zea mays
caactagcaacatacatagcacaatagtttaccaacaatggcagccaaaatatcctgcctggttaggctcctcggtctttctgcaagtcctactacctcgaccattttaccgcaatgctcgcaagctactataactaaccttcttcccccgtacctctcaccaactgtatcttcagtatatgaaaacccaattcttcaaccatacacgatccaacactcaatcgcaacttgcatcttacctttatcaccctagttcctccaacaatcatcaatcctattacaacatttacattcgtatcatttatt

SEQ ID NO: 292914 - DNA, 362 bp, Zea mays
acgcaactagcaacatagaaagcacaatagtgtaccaacaatggcagccaaaatattttgcctactgaggctggttggtctttctgcaagtgctgctaccgcgaccattttcccgcattgctcgcaagctcctatagcttcccttcttcccccgtacctgtaaccagcggtgtcttcggtatgtggaaaacccaatttttaaaccttccagaacccaacaggcattaccagctggcatttaaccttaataaccctggttcctccaccattattcacccttttaccttaattacccttagcgcctttaatggcaccaaacattaaggcacaaccacctccacaacctgggctatcaaaacttg

SEQ ID NO: 292915 - DNA, 420 bp, Zea mays
caaacgcgtacagtactccacagtgctcacttgctcctagtgccattattccacagttacgcccggcagttactccaatgggcttggaacacccagctgtgcaagcctacaggctacaacaagcgcttgcggcgagcgtcttacatcaaccaattgcccaattacaacaacgatccttggcacatctaaccatacataccatcgcaacgcagcagcaacaacaatttctaccagcactgagccaactagctgtggtgaaccctgtcgcctacttgcaacagcagctgcttgcattcaacccacttgctctggcaaacatagttgcataccaacaactacgacaattgcaacaggttctaccatcgctcagacaactagccatggagaaccctgccggctacctacgacagcaacaactga

SEQ ID NO: 292916 - DNA, 309 bp, Zea mays
caaacgcatacattactacacaatgctcactttctcctactgccattattacacagttacgctcgccagttactctaatggtcttagaacacccagctttacaagcctacattctacaacaatgcgctactctgctgatgctgtcttacatacaaccatattgcccaattactacaacattccttggcacatctaaccatacataccatatcatctcatcagcaacaacaatttctaccatcactgatccaactagctctgatgaaccatgaaccctacttccaacagcacttgctcgcattaaacgta

SEQ ID NO: 292917 - DNA, 429 bp, Zea mays
cagaaacacacctagcgaagcgcactatcatcgacctaacaacaatggcttccaagacattatcgctacttgcgcttcttgccctttatgtgagtgcaacaaatgcgttcattattacacaatgctcacttgctccgagtgccattattccacagttcctccatccagttacttcaatgggcttcgaacacccaactgtgcaagcctataggctacaacaagcgcttgcagcgaacgttttaaaacaaccaattggccaattacaacaacaattcttggcacatctaaccataccaaccatcgcaacgcagcagcaacaagcactgagccacctagccgtggtgaaccctatcggctacttgcaacaacagctgcttgcattcaacccacttgctttggcaaacgtaactgcataccaacaacaacaac

SEQ ID NO: 292918 - DNA, 462 bp, Zea mays
tcttactcatctagcaacatataaagcacaatagtgttctcaactatggctgccaaaatattatgcttccttgtgctggttggtctttctgcaagtattgctacctcaaccattttcccacaatgctcacaagctcctatagcttcccttcttccttcatacctctcaccaaacgtgtcttcaatttgttaaaccccaattgttcaaccctaccttatccaacaagcaattccaacaagcatcttaccattatcaaccttgttactccaacaacccgtaaccctattacaacaattacctttggtccattttgtggcacaaaacattaatgcacaacaactaccacaacttgtgctaacaaaccttacttcatactcttaacaacatcaatttctttcattcaaccaacttgcttcattgaactctactgcttattttcaacaacaattaccattcaatcat

SEQ ID NO: 292919 - DNA, 429 bp, Zea mays
cttacacacaccgagcgattcgctctatcctctacctaaccactgtggctaccaagatattatcgctctgtgctcttcgcgccctttacgtgagctcatcacatgcgttcattattccacagtgctcacttgctcctagtgccattattccacagttacttcctacagttacttcaatgagcttcgaacacccaactgttcaagccttctagctacaacaagctcttgccaccagcctctaacaacatccaattgcccaattacaacaacattccttggctcatctaaccatacaaactatcgcaactcatcaacgtcaacaatttctaccagcactgagccaactagcttaagcgaaccctgtctgctaattgcaacagcatattcttgcattcaacccactttctcttgcaaacataggtgcatacc

SEQ ID NO: 292920 - DNA, 400 bp, Zea mays
ctggcaaacctttgtacttactctgagcaacatcaatttcttccattcaaccaactgggtacagtgaaccctgctgcttattcgaagcaacaactattaccatttagccagctagctactgcctactatgagcaacaacaacttcttacatttaaccaattggacgcactgaacctcactgcttatttgcagcaccaaatactactggcatttaacgagctagctgcaacaagtcatgcttccttcttgacacaggaacagctgctggctttctacaagcagtttgcggataaccccgaaaccctcttacaactacaacaattgctggcctttgtccaacttgatttgacaaacccaacaaccttctaccaacaacacatcaatggtggtgccctatttt

SEQ ID NO: 292921 - DNA, 445 bp, Zea mays
agcaacgtaaaaagcacaatagtgtaccaactatggctgccaaaatattttgcctccttatactgcttggtctttctgcaagagctgctacagcgaccattttcccgcaatgctcgcatgctcctatcacttacatacttcccccgtacctatcaccatccgtgtcttaagtatactaaaacccaattcttcaaccctacaggatccaacatgcaatctcatctggcatcttacctttatcaccctcagtcctccaacaatcatcaaccctattacaacacttacctcttgagcatttattggcacaaaacatcagggcacaacaactacaacaacttgtgctaacaaaccttgatgcctactatcatcaacagcagcttcttccattcaaccaactaagttcattgaactctgcttgttatttgcaacatcaacgactaccatt

SEQ ID NO: 292922 - DNA, 462 bp, Zea mays
agctcagcgactccagattggagaactcgacaccatgaaggtgctgatcgttgcccttgctctgctggcgctcgctgctagcgccgcctccagtacaagcggcggctgtggctgccagacaccaccgtttcatctaccggctccgttctatatgccgtctccgttctatctgccgccgcaacagcagccgcagccatggcaataccccactcaaccaccgcagctaatcccgtgccatcagttcggatcctgctgggtcagcagcgtccgcagcccgttcctgggccagtgcgtcgagttcctgaggcaccagtgcagtccggcggcgacgccctacggctcgccacaatgccaggcgctgcagcagcagtgctgccaccagatcatgcaagtagagccgctgcaccggtaccaggccacataccgtgtggtcctgcagtcctttctgcagcatcatccgca

SEQ ID NO: 292923 - DNA, 449 bp, Zea mays
attgagaccagcaagcaacatccaacgtagaatccatcagcaacaatagagcaacaagggcgacgaagatattttccctcgttatgctccttgctctttctacatgtgctgctaacgcgacaattctccatcaatgctcacaagctcctatagcttcccttattccaccataccttgcatcaattatagcttcagtatgtgacaacccagctcttcaaccatatatgcttcaacaagcaatcgcagcaagcaacatacctttatcgcccttgttgcttcaacaatcaccagccctatctttggtgcagtcattggtacaaaccatgacggcacaacagctgcagcaactcgtgctacctgtgatcaactcaatccctctggcaaaccttctctcctactctcaacaacaacaatttctcccatttaaccaactgtctacactgaaccct

SEQ ID NO: 292924 - DNA, 312 bp, Zea mays
ctagcaacatataaagcacaatagtgttccaacaatggcagtcaaaatattttgcttcgttatggtccttggtctttctgcaaatgctgctaccgcaaccattttcccacaatgctcacaagcttctatagcttcctttattaccacatacctatcaccagcggtgtcttcagcatgtgaaaacccaattcttcaaccctacaagatccaacaggcaatcgcagcaggcatcttacctttatcacccttgatccttcaacaaccagtagccctattacagggagtacctttggtgcatttgttggcacaaaa

SEQ ID NO: 292925 - DNA, 410 bp, Zea mays
cggacgcgtgggcagctagctgcggtctaccctcagcaatttcttccattcaaccaacgggcaggattgaactctgctgcttatttacaacagcaacagctaccaccattcatccagctagctgatgtgagccctgttgccttattgacacatcaacagttgttgtcgttctacctgcacgctgcgcctaacgcttgcacccttttacaactggaacaattgctggcattcaacccaattggtttgacaaacccaacaacgttctacccacaacccatcattggtggtgccctcctttagattgcttatgaattatacttcaataatgaagttttttggatgaaggttgcggctttccagaaattagaaagttcatttctagaaaaaaacacagaaaaagggcggccgct

SEQ ID NO: 292926 - DNA, 394 bp, Zea mays
gcaattgcttccattcaaccaactggcagcattgaactctgctgcttatttacaacagcggcagcgaccaccattcagccagctagctgatgtgagccctgttgccttcttgacacaacaacagttgttgccgttctacctgcacgctgcgcctaacgctggcaccctcttacaactgcaacaattgctgccattcaaccaacttgctttgacaaacccaacaacgttttaccaacaaccaataattggcggggccctttttaaaatggctaataagtaatagttaaataaggaagtttttggaataaggttgggggtttcccaaaattagaaagggcctatttagaatcctaaagggctttaagcctccaaaaaaaaaaaaaaaggggggccc

SEQ ID NO: 292927 - DNA, 450 bp, Zea mays
atcagcatatacatctatcaaatccttcaaagggagcccttactggatggcaccagaggttattatgaatagcaatggtgcagcctttcagtagacatttggagccttggctgcaccattcttgagatggcaacagcaaagcctccttggagtcagtatgaaggggtggcagcaatattcaaaattggcaacagcaaagacataccagatatcccaaataatctttcttctgaggcaaaaagtttcctgaaactctgcttgcagcgtgatcctgctgcccgccctacagctgctcagctgatggatcacccttttgtcaaggaccaggctacagtcaggagttccaggtccagtatcacaagggatatgtttcctaattcaactgacggaaaaaacagcagggtgaaaattgaaacttcgtcatacagaagtttatctcctttaagagat

SEQ ID NO: 292928 - DNA, 269 bp, Zea mays
acgcagctagctgatgtgatccctgctgccttcttgacacttcaacagctgctgacgctctacctgggctctgcgcctaacgctggcactctcttacaactgcaacaattgctgccattcaacccacttgctttgacaaacccaacatcgttctaccaacaacccatcattggtggcgccctcttttaaatcgattatgagctatactataataatgaaggcttttggatgatgtctggggctttccaaaaattagaatgtacatttct

SEQ ID NO: 292929 - DNA, 454 bp, Zea mays
acgcatctagcaacatataaagcacaatagtgtttcaacattggcagccaaaatattctgcctcctcgtgctggttgtactttcaccacgtgctgctactgctaccattctcccgcaatgatcgcaagcttctatagcttacattcttcaccagtacctctcaccagaggtgtattccctatgtgaaaacccaactctttaaccctacaggatccaacacgcaatcacagctgacatcttacctttatcacactagcttctccaacaattataaaacctattacatcacatacctttgctgcatttattggcacaaaacatcaggtcacaacaactacaacaacttgtgctaacaaaccttactgtctactctcaataacaataaattatttcattcaaccaaataacttaatttaactctacttcttatttcaacaacaacacctaccattca

SEQ ID NO: 292930 - DNA, 405 bp, Zea mays
ggacgtgagactagcaatgagctcatcgactccagattggagaactcgacaccatgaaggtgctgatcgttgccattgctctcgtggcgctcgctgctagcgccgactccagtacaagcggcggctgctgctgccagacaccagcgtgtcatctaccgccttagttctatatgccgactccgttctatctgccgacgcagcagcatccgcagccatggcattaccacactcatccaccgcagctaatcccgtgccagcagttcggatcctgcggcgtcggcagcgtatgcagtccgctcctgggccagcgcgtcgagatgctgaggcaccatgtgcagaccggcggctactccgtacagctcgacacagtgccaggcgctgcagcagcaatgctgacaccagatc

SEQ ID NO: 292931 - DNA, 380 bp, Zea mays
attgagaccaactagcaacatagaaagcacaatagtgtaccaacaatggcagccaaaagattgggcctccttatgctccttggtctttctgcaagtgctgctacggcgaccattttcccgcaatgctcgcaagctcctatagcttcccttcttcccccgtacctctcaccagcggtgtcttcggtatgtgaaaacccaattcttcaaccctacaggatccaacaggcaatcacagctggcatcttaaccttaataaccttggttcttccaccattaatcagccttataccataagttaccttggggcaattaatggcaccaaaccttaaggcaccaccacctccaccacctggggctacaaaacttggtggcttacttta

SEQ ID NO: 292932 - DNA, 445 bp, Zea mays
gagcattcagaaacacacctagcgaagcgcactagcaacgacctaacaacaatggctggcaagagattatccctgcttgcgcttcttgccctttttgcgagtgcaacaaatgcgttcattattccacaatgctcacttgctccgagtgccattattccacagttcctacctccagttacttcaatgggcttcgaacacccagctgtgcaagcctataagctacaacaagcgcttgctgcgaagcgtctaaaaccacccatttgccaattacaacaacaatccctggcacatctaaccatacaaaccatcgcaacgcaacaacaacaagcactgaaccaactagccgtggtgaaacctatcgactacttgcaacaacagctgcttgcattcaacccaattgctttggcaaacgtagcttcataccaacaacaacaacagttgcaac

SEQ ID NO: 292933 - DNA, 331 bp, Zea mays
gctagctactgcctactctcagcaacaacaacttcttccatttaaccaactggccgcagtgaggcccgctgcttatttgcagcagcaaatactactaccatttagccagctagctgcagcaaaccgtgcttccttcttgacacagcaacagttgctgcctttctaccagcagtttgcggctaaccccgcaaccctcttacaactacaacaattgttgccctttgtccaacttgctttgacagacccagcggacttctaaccaccacacatcattggtggtgcgcctctttaaaatggttattaactggaatttcaatataaaagtttttgg

SEQ ID NO: 292934 - DNA, 421 bp, Zea mays
cccacgcgtacgcccactcgtccgattggcactaaacatcagggcacaacaactacaacgggctggtgctagcaaaccttgctgcctactctcagcaacagcagtttcttccattcaaccaactagctgcattgaactctgcttcttatttgcaacaacaacaactaccattcagccagctacctgctgcctacccccaacaatttctttcattcaaccaactggcagcattgaactctcctgcttatttacaacaacaacaactactaacattcaaccaactagcttgtgttaacccttcttacttctttatacaaccacaattggtgcccttctaacaacaaccttggcctaacgcttgcaaccttttaacacttcaaccattgcttgcattcaacccaattgctttgaccaaaccaac

SEQ ID NO: 292935 - DNA, 336 bp, Zea mays
gaacagcctagcggcattgcgtgcacaggatcgtaccaccgaacagcatgaagatggtgatcgtgctcatgctgcgcctggctctggcaactgccagtacctctaccatgcagatgccctgcccctgcgctgctctagcatggcttgcacggcgctgactcctgactgacgacgatgatgggcgccaacagcctgtacccctacgctgagtacctgaagcagccgtagtgcatcccgattcacgcttgatcactactactcctgcagcagtcatccgagctccatgttccagtcgctccggcaacagtgctgccagcagccgatgaggatgatcga

SEQ ID NO: 292936 - DNA, 254 bp, Zea mays
gcgggccaagatccaggacaaggatggcattcctccagaccagcagcgtctgatctctgcggacgagcagctggacgatggccgcgctgtctgggactacatcatacataatgcgagcaccctcaaccatgatatacgccttaggattggtatgcagatcattgcgaagaccctgactggaataaccatagccctggaggatgtcagctcggacactatctacaatgtgtaagctgatatccatgacaaggatg

SEQ ID NO: 292937 - DNA, 230 bp, Zea mays
accaacttgcttcggcaaactcaacagtgttctaccaacaacccatcattggtggtggcctcttttagattgcttatgagtcatagttcaatagtgaagttttcttggatgatgtttgcggcgtcccagaaataagatagtacatttctagattcttaacacataacatcaaagaccgatacactatgtgaaaacacatctcttaaaccatacgaagcttgaacgcgcta

SEQ ID NO: 292938 - DNA, 335 bp, Zea mays
  unsure (1)..(335): unsure at all n locations
gcaacatagaaagcacaatagagtaccaacaatggcaggcaaaatattatgcctccgtatgctccttggtctttctgcaagtgctgctacagcgaccattgacccgcaatgctcgcaagctcctatagctgcccttatatacccgtacctctcaccaccggtgtcttcagtatgtgaaaacccaattcttcaaccctacaggatccaacaggcactcgcagctggcatcttacctttatcacccttgttcctgcaacaatcatgagccctactacaacagttaccttcggtgcatgtattggcacacaacatganggcacaacaactaccacaac

SEQ ID NO: 292939 - DNA, 439 bp, Zea mays
cccacgcgtccgagttacttcaatgggcttcgaacatccagacgtgcaagcctacaggctacaactagcgcttgcggcgagcgccttacaacaaccaattgcccaattgcaacaacaatccttggcacatctaaccctacaaaccattgcaacgcatcaacaacaacaacaacagtttctgccatcactgacccacctagccgaggtgaaccctgtcacctacttgcaacagcagctgcttgcatccaacccacttgctctggcgaacgtagctgcataccatcaacaacaacagctgcaacagtttatgccagtgctcagtcaactagccatggtgaaccatgccgtctacctacaactactctgatctagcccgctcgcggcggtcaatgcacctacgtacctacaacaacagtagctgcaacacatagtaccagct

SEQ ID NO: 292940 - DNA, 409 bp, Zea mays
caactagcatcatagaaagcacaatcttgtaccaacaatggcaggcaaaatatgttggttccctatgctccttggtctgtctgcaagtgctgctaccgtaaccatcttcccacaatgctcacaagctcctatagctttctttcttgccagatacctgtcaccagcgctgtcttcagtatgtgaaaacccaactcttcaaccctacaggatccatcaggcaatcgcaacaggcatcttacctttatcacccttgttcattcaacaaccgatagccctattacagcaattacctatgaagcatttcatggcacctaacatcaaggcacatcacctacaacaactagggctatgaaaccttgctgcctactctcagtaaccgccgtctctttctttcaaccaactggctgca

SEQ ID NO: 292941 - DNA, 340 bp, Zea mays
gctgcatactctcagcaacatcagtttcttccattcaaccaactggctgcatcgaagggtgctgcttatctgcgacaacaattaccattcagccagctagttgctgcctacccccagcaatctcttccattcaaccaactagcagcattgaactctgctgcttatttacagcagcaacaactactaccattcagccagctagctgatgtgagccctgctgccttcttgacacatcatcagttgatgccgttctacctgcacgctatgcctaacgctggcaccctattacaactgcaacaattgctgccattcaaccaacttgctctgacaaacccaacag

SEQ ID NO: 292942 - DNA, 260 bp, Zea mays
aataacccaccgagcggatgctgccgcggccagccaccgccgccagttcatctatcgacaccggttcatctgccacctgcagggcaccttccaactgcggggcatctaccaccgacgatccacctgccatcgcctgtccacctgccaccttcagtccatgtgccgcctccagtacatctgccgtcatcaccatgccactaccctactcaaccgcccctacctcaacctcattcacagccacacccattcccatgccaaca

SEQ ID NO: 292943 - DNA, 400 bp, Zea mays
gttgtgatagcgaagaagaaagccataaggcacttgtggtagagggaattctggatgccatttcggctggtattctgatctacatggccttggtggacctcatcgcagctgattttctcagcaagaggatgagctgtaacttgaggcttcaagtcggctcatacattgccttgttccttggtgccatggccatggcatctctagccatctgggcttagcaagtagaatggaagtaaggcaaagatttgagagtgctgcctaattgcctttgatagcaggaggttctctccagcagctagttggttgcaattcttgatgagaatgggaggcattttttattttcttatattcttctggttgtctattggttctcttcatgttggtggtggacaagtagatt

SEQ ID NO: 292944 - DNA, 236 bp, Zea mays
cggacgcgtgggcggacgcgtgggcggacgcgtggggtagaacggcaacaactgtgggtgtgtcaagaaggcagcagggctcacatcagctagctggctttgacaaacccaacagtgttctaccaacaacccatcattggtggtgccctcttttagattgcttatgagttatagttcaataatgaagttttttggatgatgtttgtggcgtcccagaaataagaaagtacatttct

SEQ ID NO: 292945 - DNA, 417 bp, Zea mays
cggacgcgtgggtttaagcattcagcaacacaccatgcgaaccgcactaccaacgaggtaacaccaatggctaccatgatattactccttgttgcgctagttgccctttcagtgaccgcaacaaatgcatacattatactacagtgctcactcgctactagtgacattattccacagttccttccaccagtcacttaactgggcttcgaacatgcatacgtgctagcctacacgctacaactagcgcttgcagagagcgccttacaacaaccaattgaccaattgcaacaacaattcttggtacatataaccgtacagaccattgcaccgcaacaacagcaactgcaacagcttatgccattactgagccagctagccgtggtgaaccctgtcaactacttgcaacaatagctgctt

SEQ ID NO: 292946 - DNA, 415 bp, Zea mays
agaccattagctttatctactccagagcgcagaagaacccgatcgacaccatgagggggttgctcgttgccctcgctctcctggctctcgctgcgagcgccacctccacgcatacaaaccgcggcttccgcttgcaaccaacggccgccggtcatttaacggccgccgtgccttttgccacttccggttaacctgccacttccggggcatttccaaccgccggtccacctgccgccgccggtccacctgccaccgccggtccatgtgccgccgccggttcatctgccgccgccaccatgccactaccctactcaaccgccccggcctcagcctcatccccagccacacccatgcccgtgccaacagccgcatccaagcccgtgccagctgcaaggaacctgcggcgttggcagca

SEQ ID NO: 292947 - DNA, 357 bp, Zea mays
agcataccaactatcaaaatacatatccaattacactatcaacatcttatcaccagtgcattccaggatttttacccttcttgccctccttgctatctcaccaagctctcctacctctactattattccacaatactcacaacaacacctctctccattcacaacctcattatatcaacacccaactatactatcctacatactacattatatccatcttatcatgcatcttaccctcattaccattaaccctccaacagccatataccctattgcaacaaccatacttaatacacttgaatctccaacaaatctctacacatcaactactacaacacttgctaccaacaatcaatc

SEQ ID NO: 292948 - DNA, 439 bp, Zea mays
  unsure (1)..(439): unsure at all n locations
gcaaaccttgctgcctactctcagcaacagcagtttcttccattcaaccaactaggtgcattgaacgctgcttcttatttgcaacaacaacaactaccattcagccagctacctgctgcctacccccagcaatttcttccattcaaccaactggcagcattgaactctcctgcttatttacagcagcaacaactactaccattcagccagctagctggtgtgagccctgctaccttcttgatacaaccacagttgttgccgttctaccagcacgctgcgcctaacgctggcaccctcttacaactgcaacaattgctgccattcaaccaacttgctttgacanacccagcagcgttctaccaacacccatcattggtgttgccctctttagatnntctatgagttatagttcaaatataaagttttttgtctgatgttt

SEQ ID NO: 292949 - DNA, 306 bp, Zea mays
ctgatttgcagcagcaaatactactgccatttagcgagctagctgcagcaagtcgtggggccttcttgacacagcaacagttgctgcctttctacaagcagtttgcggctaaccccgcaaccctcttacaactacaacaattgttgccctttgtccaacttgctttgacaaacccagcagcctcctaccaacaacacatcattggtggtgccctcttttagattgattattagttgtaattcaataataaagttttttggatgatgtatgtggccaaccagaaataagaagttacatttccagatt

SEQ ID NO: 292950 - DNA, 253 bp, Zea mays
cggcaagcaacatagaaagtcgaatccattaccaccaattgcgctacaatggcgatcaggatacatatcgtccttatgctgattgctcttactacatgtgttgctaacgcgtcattgaaaactaaatgctcacaagctcctactactggccttgttactccatacttatcatcaattgtagcttccatgtgcgaaaacgaagctatacagccctatatgctagacctggccatcgctgacagcaacatactac

SEQ ID NO: 292951 - DNA, 415 bp, Zea mays
  unsure (1)..(415): unsure at all n locations
gtcgccgacccgcagtcgggcaaggcgctggcgacgctgcgcgggcacctggactggtgccttcgcgtcggcgtggcaccccgacagccgcgtcctggcgacggggaaccaggacgcgacgtgccggctgtgggacgcgcgcagcctgtcggagccgttcgccgtgctcggggcccggatcggcgccgtccggggcctccgcttctcccccgacggcaggttcctggccgcggccgaggccgccgacttcgtgcacgtgtacgacgccgcggccgggtacgccggcgccgcgcaggaggtggacgtgttcggngaggtcgccggcgccgcgttcagccccgacggcgaggcgctgttcgtgagcgtcgccgaccgtacctacggcggcctgctcgagttccggcgccggcgggcg

SEQ ID NO: 292952 - DNA, 282 bp, Zea mays
tgctgcgtacctacaacagcgacaacagctacttaatccactaccggtggctaacggataggtcgatgccttcctacagcagcaacaattgctgccatacaaccagttctcttagatgaaccctgccttgctgcgacagcaacccatcgttggaggtgccatctttgatatcacatatgagatgtactcgatgatggcgccctaatagcgcgatgtgcctactacaaatactcaatatcttgagtgacatttatctcgatacaaccaacttgctttgacgga

SEQ ID NO: 292953 - DNA, 450 bp, Zea mays
ggatttgctcacaacacaggaaaagaatatggccagatgcttaatgctgaggttcgagatcagataaataataatgggacaaaaaatgttttgcctagtcgaatcgaggatctttcaggaaaggtccagtttttgccatgttctcatgactgaaattggtcgcttcagcaaagatatgaaacaactattacaagagaaggtttttgtcattgctgtcttaggttatatctcctacaacttcgtcattggtgcttattcctactggggcccaaaggcaggtcaagagatctacaatatggcgagtgcggatcttatgtttggtggaattactatagtgtgtggaattgttggaacactagcatgaggtttcatccttgacaagatagggtctactattcctaatgctttcaagcttctttctggtgcgacattcgtaggggcaatattctg

SEQ ID NO: 292954 - DNA, 396 bp, Zea mays
gagaaaattgttcctctgattgatagcgaactgtacaatcgctctgattttatggcggagtacaaggatgccaaattctttgtaataaagtcctacaccgaggaccatgtacataggagcattaagtataaagtttgggccagcacagccagcgggaacaggaagctggattctgcttaccatgcagccaaagagaaagaagagcattgccctattttcttgtttttctcagtaagaacagctcatctcctttggttttttgctattttccttcgagggaaaaaaagagtaccataccatatgggggtttgaacctttaattagatgggctaaagggttttcgatttttgtaatttcttttatgaataattggtccttttatagggtaatggaaat

SEQ ID NO: 292955 - DNA, 416 bp, Zea mays
  unsure (1)..(416): unsure at all n locations
ggcaaacctttctccctactctcagcaacaacaatttcttccattcggccaactgtgtacactgaaccctgctgcttatttgcagcaacaactattaccattcagccagctagctactgcctactctcagcaacaacaacttcttccatttaaccaattggccgcactgaaccccgctgcttatttgcagcagcaaatactactaccatttagccagctagctgcagcaaaccgtgcttccttcttgacactgcaacaattgctgccattcaaccaacttgctttgacaaacccagcagcattctaccaacaacccatcattggtgtgccctcttttagatntcttatgagttaatagtcaataataaagtttttggctgatgttcgggctttccagaattaagaagtacatttct

SEQ ID NO: 292956 - DNA, 409 bp, Zea mays
ctcctggctctcgctgcgagcgccacctccacgcatacaagcggtagctgcggctgccagccaccgccgccggggcatctaccgccgccggtgcatctgccacctccggttcacctgccacctccggtgcatctcccaccgccagagcacctgtcgtcgccgatccacctgccaccggcgatccatgtgccgtcgacggctcatctgccagcaggcaccatgccactaccgctactcaaccagcccggcctcagagatcatccgcagtcacacccatgcccaggccaacagttcatttactataccgtgccaactgcatggaacctgcgaagttggcggcaccccgatcctgggccaatgcgtctagtctgtgaggcatcacggcagcccgacggcgacgccctactga

SEQ ID NO: 292957 - DNA, 387 bp, Zea mays
caacaacccatcattggtggtgccctcttttagatttcttatgaggtatagttcagtgaataaagttttatgtctgaaaaaaaaaaaaaaaaaaaataaaaaataaaaaataaaatacaaaaaaataaataaatactaaaaaaaataaaaaaacatcaaaatcaagaagtgatggccatgaatatacaacgatgcaatcatagatcaactcttacagacatgcccatcgctaacattgaaatactaccgactgtctcgttctggacccaatactaacacgctgatcctgatcgcatcttccttcatattgtcagccagactgcaacatgggacttacactgatatgccttatcaatagcccaaattgacaaaagttagtgctatgta

SEQ ID NO: 292958 - DNA, 337 bp, Zea mays
acgttgagaaacacagcaagcgaaacggacttacaacggccttaaaaccattggctcccatggggttacccggccttgcgctaagtgccctttatgtgaccgcatcacaggcgtgcataattccacattgctcacttgctcctagtgccataatttcacagtttgtgccaccagttacttcaatgcgcttcgaacaactagctgtgcatgccaacatgcatcaacatgcgcttgctgccagcgtcttactacaactaattgcctaattgcgacaactatacttggcacatctagcaatacaagctatcacaacgcatcaggaacaacagctactacc

SEQ ID NO: 292959 - DNA, 312 bp, Zea mays
caatagtgtaccaactatggcagccaaaatattttgcctacttatgctcctgggtctttctgcaagtgctgctacggcgaccatattgccacaatgctcacaagctcctatagcttaccttcttccatcgtacctgtcaccagctgtgtctaacgtatgtgaaaacccaatgcttcatctatataggatccaactggtattcgcagtttgcatcttacctttatcactctagttcctacagcaatcatcagctatattacagcacttacctatggtgcatagattgacccaaaacattaggtctcatcaact

SEQ ID NO: 292960 - DNA, 429 bp, Zea mays
  unsure (1)..(429): unsure at all n locations
gccacgcgttcggcttccccttccggttcggttccggttcctgaaggttttccggggtcgggttgtgtggttaaccggatcaagatggcggcttcggattgtgaataccgctgcttcgtcggcggcctcgcctgggccacggacgaccactcccttcacaacgccttcagcacctacggcgaggtcctcgagtccaagatcatcctcgatcgggagacgcagaggtcccgcggcttcggcttcgtcaccttctccacggaggaggcgatgcggaacgccatcgagggcatgaacggcaaggagctggacggccgcaacatcaccgtcaacgaggcccagtcccgcggcggccgtggaggcggcggcggcggcgggtacggtggtggccgtggaggcggcggctacggcngtggcgggcgccgtgatggc

SEQ ID NO: 292961 - DNA, 411 bp, Zea mays
  unsure (1)..(411): unsure at all n locations
ggcagccaaaatattttggcttcttaagcttcttgggctttctgcaagtgctggttccgggaccatttttccaccatggttaacaggttctaatggtttccttttttccccggaccttttaacaaccggggtttcgtatggggaaaccccattctttaaccctataggatccaacaagcaatcgcagctggcatcttacctttatcacccttgttcctccaacaatcatcagccctattacagcagttacctttggtgcatttattggcacanaacatcagggcacaacaactacaacaacttgtgctagcaaaccttgctgcctactctcagcaacaacagtttcttccattcaaccaactagctgcattgaactctgcttcttatttgcaacaacaacaactaccattc

SEQ ID NO: 292962 - DNA, 444 bp, Zea mays
attcaaaaacacacctaacgaaacgcactaaccaccgaccaaccaccatgggttcccagggtttagccctttttgggctttttggcctttttggtgagcgcaacaaaatgcgtttccattatttccaacaatggctcactttgcttcctagtgccctttattgcacagttccttccctccaggtacttcaatgggcttcgaacacccagctgtgcaagcctacaggctacaacaagcgcttgcggcgagcgtcttacaacaaccaattgcccaattacaacaacaatccttggcacatctaaccatacaaaccatcgcaacgcaacagcaacaacaatttctaccagcactgagccaactagctgtggtgaaccctgtcgcctacttgcaacagcagttgcttgcatccaacccacttgctctggcaaacatagttgcatacca

SEQ ID NO: 292963 - DNA, 316 bp, Zea mays
gaccaccggtgtcttcagtatgtgaaaacccaatttttaaaccctacaggatccaacaggcattggcagcatgctttttaccttaatcacccttggtcctccaacacccgtcatgccctattacagcagttacctttgcagcatttgttggcccaaaacttcaaggcccaacatctacatcaactcgggctaggaaaccttgctgcctactttagacaccagaagtttcttccattcaaccaactggctgattagaactctggtgcttattggcaacagaacttaccattaagtcagttagctgctgcctaccccc

SEQ ID NO: 292964 - DNA, 282 bp, Zea mays
aaggcaaccaatccatctggactcgtggggaagtttcgatctcgcccgggtcgacttacgaaggttctaggaacgttcctccgtccgtccggagaaggagcaagcaggaggcggtgatgatccaggttggtctcaacgaccgactggctataaaagggcagctcaagtgcaacgatgacgacaccatcggagacctcaagaaagctggcgttgtgcatacggtgacgcgccccgagaagatccgcatccagatgtgctacaacatctacacggaccacatta

SEQ ID NO: 292965 - DNA, 435 bp, Zea mays
ctagcaacatagaaagcacaatagtgtaccaaccatggcaggccaaatattttggcttcgtaagcttcttggtctttctggaaggggcttgttccgggaacatttttccggaatggttccaaggcttctaatagcttcctttcttcccccgtacttctcaccagcggtgtcttcggtatgtggaaaccccaatttttaaaccctacaggatccaacaggcaatcgcagctggcatcttacctgtatcacccttggttcttcaacaatcatcagccctattacaacagttacctttggtgcatttattggcacagaacatcagggcacaacaactacaacaacttgtgctagcaaaccttgctgcctactctcagcaacagcagtttcttccattcaaccaactaggttcattgaactctgcttcttatttgcaac

SEQ ID NO: 292966 - DNA, 410 bp, Zea mays
  unsure (1)..(410): unsure at all n locations
cccacgccttcgcgggcgccttggttcagaaacacaccaagcgaaacacatttgccaccggctaaccaccatgggttccaagaaattaatccttcctgggcctcttgggccttttggcaacgccaccaaaggcgtcaataattccacatggctaattggctccaagttcaataataccacagttcctccaacaagtaccttaaaggggcttcgaccaccaagtgggcaaagcctttaggctacaacaggcaatggcggcgaccgttttacaccaaccaatttcccagttgcaacaacaatcctgggcacatctaacattccaaaccatcgaaccgcaccagcaacaacaattcctaccagcactgagccacctagccatggtgaaccctgccgnctacttgcaacagcag

SEQ ID NO: 292967 - DNA, 231 bp, Zea mays
atcatggccgctgacaccctatatgaggatgctactaaagcatagtgccttcggcaaactagctaacagccgtcatgatagacttactttgaaatgggcatcgcatgtatatcccgaggacgtgacgcatgtctatccttatccagctggtgaagatcccaatggctatgagcttgcaagcgaacgatggacaccactgcacacgagcgaaagtatagctctgagcatcat

SEQ ID NO: 292968 - DNA, 410 bp, Zea mays
  unsure (1)..(410): unsure at all n locations
ccactctgctactctaactatttaccggatcccggatacaacgacgaacagcaatcttactcagagatcatatactgtagagtcccggagtgctacatctttccggcacgacaagctcccacaggccaaggccacctcagcgactgtctccctgaccatcgtggacctgtacctcaggcgcgaccaggtgccgcacgccatactcgaggccagcaaggagatcggcttatttcaggtggcgaaccacggcgtctccctagaggcgatgcatgacatggagaccgtgtgccaggagctcttccggctgccggcggatgacaaagccgggctgtactcggaggacacggggagggcgaccccgatctactccaacaccatgttcgacacggncggcccagaagtactggcgc

SEQ ID NO: 292969 - DNA, 429 bp, Zea mays
  unsure (1)..(429): unsure at all n locations
atctgggaggtaacgacctggttgtgaggcgagacgtgagggagaaaaacatatttacgctacgcgctgtcacgcttcgcgcgtgacgcacgacacacgaaactcgtgctttaaaggagtagagatatacagtttttgtgtataacataaaccaacatgagctgcagcggttagagactagtgctttgttcctagagaccatagttcgaatcccagtgggggtgcctttttgatatttcgtgatattttgctgagcgtgtgagaaactttggcaacgcgcgtggaggagggcgcgtggaggaggngagcggttgcatcgagcgggcgtaccaagggagatacttccgttntatattagtagagatgtttatgaagcaagcattggatttttccttcctgatcccagaataacttcagcttatgctctgc

SEQ ID NO: 292970 - DNA, 473 bp, Zea mays
taccgatctcggaattccgaggctacgacgtacgcacataagtgacgcgcagtgtcgaacgaactggaaactatggactaccttgacaacttagaggcggaggaacgtttcacagagcaaggcgatgctattgtttttgaatcagaagttgacaaagtttaccttgctgcaccctccaaaattgctatcattgatcatgagaagaaaagaacatttgtcgtgacaaaagaagggctttctgatgctgatgtttggaacccttgggacaagaaggcaaaagcaatgcaagattttggggatgcagaatacaagagcatgctgtgtgtggagcctgcatctgttgagaggcctattactctgaaacctggtgaagagtggaaaggaaggcttgtgctctcagctgttccctcgagttactgtagtggacagttagatccattgaaggtccttcacggctgaaaatccttactttc

SEQ ID NO: 292971 - DNA, 419 bp, Zea mays
cgctgcttatttgcagcaacaactattaccaattaacccggttggttccggctaattctcagcaccaacggcttgttccatttaaccaatgggccgaactgaaccccgctgctaattggcagcagcaaatactactaccattaagccagttagctgcagcaaaccgcgcttccttctggacacagcaacagttgctgcctttataccagcagtttgcggttaaccccgaaaccctcttacaactacaacaattgttgccctttgtccaacttgctttgacagacccagcggtcttataccaacaacacatcatgggtggtgccctctttaagattgcttattagttgaaattcaataataaagttttttggatgatgtatgtggccaaccagaattaagaagttacatttccagattct

SEQ ID NO: 292972 - DNA, 416 bp, Zea mays
  unsure (1)..(416): unsure at all n locations
cggacacgcacgccaacgcctcatccacctgtgctgtgacctcatatttgtcctctgtgcctgcgtctcatgatctctgcgcctctgcggctgtcggcgccgagggctgccgtcgggggatcgttcctgctcggcaagtccaagtccaagcccagcaggatccgctgcgccgcgggggtggggaggggcgccgncgccgncacactgtacgagatcctgggcctgcgcgccggcgcgacgggccgggagatcaaggccgcgtaccggcgcctggcgcgggagcggcacccggacgtggcgcccgcgcccggggccgctgccgagttcgtccgcttgcacgacgcctacgccacgctctccgacccggacagccgcgcgcgctacgaccgcagcgccgtaaccgcggtggccgtggc

SEQ ID NO: 292973 - DNA, 279 bp, Zea mays
acgacatagatagcgcactattgtaccattaattgccagccaaatggttttcgctaaggataggcatgcttctctctgggggtgactatacggcgagcatattacgtaaatgctcacaagctactacagcttcccttattagctcataattctcaccatcgatgtcttcagtatgtgaaaatccaatgcttctaccctacaggatccaacatgcaatcacagcatgcatcttacctttatcacgcttgttcctccaacagtcatggatcctattacagc

SEQ ID NO: 292974 - DNA, 314 bp, Zea mays
gaggcgctgacttatcctaccactcttatcaagtcctgatcgagttaggggggcttggggtattgctaaggtgcgatggcagctgctgatgtcgagtacctttgcttcgtacgcggacatgcctgggccaccagcaacgagtcgctgcagaatgccttcgcctcctacggctagatcctcgactacaagatcatcaccgaccgtaacactgcgaggttccgcggtttagtatgcgttaccttctcctacgagaactccatgctcgacgctatcgagaacatgaacagcaatgagctctacgcacgtatcattac

SEQ ID NO: 292975 - DNA, 319 bp, Zea mays
gagcatgcagtatcttttgaaaatacgtggttaagggtggcattaggactggtggtctgctgctgctgatttcaaactgtgcagacatttgttggaactgcctactggatggtacctgaggttattcaaaattctgaagggtacaatgagaaggcagatatctggtctttaggtatcactgccattgaaatggctaaaggtgaaccccctgtggcagatattcataccatgagagttcttttcatcatacctagtgaaaatactgcacagctcgatgagcatttgttgaaaccaatgcatgagtgtgtctcactatgtt

SEQ ID NO: 292976 - DNA, 423 bp, Zea mays
ctgcaaatgcatctgacgttatatgagctgcttcatataatttgaattgctgcattggtgccgacaatatattgcaaggtgtatctagtagttggaggagatatgcagtttgcacttgcattggacacgaactcaggtcctcaccagataagatcttgtgagggtgatgggattgacaggttggaaaaattaagtattgggggcagaaagcaggagaaagctttgagaaataggtgctttggtggtagagttgctgcaactacacaatgtattcttacctcagatgcttgtcctgaaactcttcattctcaaacacagtcctctaggaaaaattatgctgatgcaaaccgtgtatctgctatcattttgggcggaagcactggatctcagctctttcctctgacaagcacaagagctacgcct

SEQ ID NO: 292977 - DNA, 237 bp, Zea mays
atgcggaggaggaggatgaggactgatccgacttcggagaggatgacaggaaaaaggggtagtgatcaacgttcttgggcaagaaggtggcaatgtcgtgaagcgaacttgaactggaaacggatggacaagtatatttagagttcgatgtggtgttaacggatcgggtgtctgtcttagatgatataaaatacattatttttagtccaatttaatcattgtccaatttgcctaaaa

SEQ ID NO: 292978 - DNA, 408 bp, Zea mays
tccattcaaccaactaggttcattgaactctgctggttatgtgcaacaacaacaactaccattcagccagctacctgctgcctacccccagcaatttcttccattcaaccaactagcagcattgaactctcctgcttatttacagcagcaacaactactaccattcagccagctagctggtgtgagccctgctaccttcttgacacaaccacagttgttgccgttctaccagcacgttgcgcctaacgctggcaccctcttacaactgcaacaattgctgccattcaaccaacttgctttgacaaacccagcagtgttctaccaacaacccatcattggtggtgccctcttttagatttcttatgagttatagttcaataataaagttttttatctgatgtttgtggc

SEQ ID NO: 292979 - DNA, 421 bp, Zea mays
atcagcctggacggatcgcacccggcactactgttcggctacggcggcttcggcgtgagcgtgacgccgcagttcagcgtcgcccgcgtggtcctgatgaggaacctggggttcgtggcgtgcgtcgccaacctcaggggcggcggggagtacggcgagggctggcacagggccgggtcgctcgccaagaagcagaactgcttcgacgacttcgtcgccgccgccgagttcctcgtgtccgctggctacaccagccccgcgaggctgtgcgtcgagggcggcagcaacgggggcctcctggtagctgcctgcgtgaaccagcgccctgatctgtttggctgtgccctggcccatgtcggagtgatggacatgctacggttccacaagttcaccattggtcgtgcatggacatgcgacttcg

SEQ ID NO: 292980 - DNA, 360 bp, Zea mays
tatgctgggtgtggtcttaccacatatgctgctacctatacaattttccctcaatgctaacaagctcctatagcttcccttattcccccataccttctatcaatcatagcttaagtatgtgaaaacccaattcttaacccctataagatccaacctgaaatcaaagcaagcaccatacctttaacacctttgtactttaaaaaacctcgagccctataatttaagcacccttgggtacaatccatttccacacattatctacaaaaaatcatgctccctctgatcaaccattcacatctgtcaaccctctctacctactatgagcacccatctttttcttgcatccaaaaaactgtctac

SEQ ID NO: 292981 - DNA, 286 bp, Zea mays
cagcaagcatcatataatgtccagtccattttcaacactagagcagcagtggcgaccaagatagtggccgtgcttatgctccatgcggtctctacatgtgatgctcacgcgacaattctccactaatgctcacacgctcctatagctactgttattaccccataccttccatcattaatagcttcagtatgtgataacccatctcttcaaccatataggcgttaacatgcattctcagctagcaacatacctttatcgcccttgtaagctcaacaatcaccaaccc

SEQ ID NO: 292982 - DNA, 272 bp, Zea mays
caacaagcatcatataatgccgaatccattttcaacattagaacaacaatggcgaccaagatagggcccgtgcttatactccatgcggcttctacatgcgatgctcactcgacacttatccctcaatgctcacaagctcctatagcttctcttattcccccataccttacatcaatgatagcttcactatatgaaaaccctgctcttcatccctataggcttcaacacgcaatcgcagcaagcaacatacctttatcacacttgtcatatca

SEQ ID NO: 292983 - DNA, 355 bp, Zea mays
cagcaagcaacatagaaagaggtatccattcgcaacaatatagcaacaatggggaccgggatactttcccttcttatgctccttgctctttctgcatgtgttgctaacgcgactattgtccctcaatgctcacaagctactatagcttcccttctttccccataccttccatcaatgatagcttcagtatgtgaaaacccagctattcaaccctataggctacaacaagcaatcgcagcacgcaacataccatcatcacccttgttacaacaatcgacagccctatctctggtgcagtcattggtacaaaccatcaaggcacagccactgcatgcacttgtgctacctgagatca

SEQ ID NO: 292984 - DNA, 380 bp, Zea mays
acgcataaaatagctgcacttactatgagtagatctgatacgtccctttttaaagaagctttagggagcttggcacaagattctggtcttcatcctttagttccttacttttcctacttcattgcagacgaggttacccggagtttgggtgatcttcctgttttacttgctctaatgagagtcgtccaaagtcttctccgtaatccacatattcatattgcaccttatttgcaccagctgatgccatcaatgatcacttgcattgttgcgaaaaggctacggcataagctctcagataaccactgggaactttaggacttctctgacaatttggatgccttggtatgtcaaacgcttggtcatgtctatcacacctttaa

SEQ ID NO: 292985 - DNA, 350 bp, Zea mays
aggtggtctcatgggacactttgccgtctacaagacgtacgaggtgctggccgcacagttcttttggccccagatgcgccgtgatgtcgagcgccttgttgcacgctgcactacttgtcagaaagccaagtcacgattgagcaaccatggtttgtatatgcctttgcctatccctacgttcccttggcttgatatttctatggacttcgttttgggtttgcctagaactaagaaggggagagatagcattattgtggttgttgatagattctccaaaatggctcattttataccctgtcataaaactgatgatgctagcaaggttgctgaattgttctttcgagagaata

SEQ ID NO: 292986 - DNA, 361 bp, Zea mays
gcaacatctaaagtccaatccattaactacagcagaacaacaatggcgaccaggatcgtttcccttgatatgctacgcgctcttcctacatgtgttgctaacgcgacagattatcgtcaatgctcacaagctcctatagcgtcccttctttacctatactatttcatcaattatagctgcagtatgtgaacacccagcatcttcaaccatatacgcattaacaagcaatcacactaggcaacataccatgatcgtcctagaagtttcaacaatcaccagccctatctctggagcagtcactggtacaaaccatcatagtacagcagctgtagcaactcgtgctaactgagatcaaccaagt

SEQ ID NO: 292987 - DNA, 373 bp, Zea mays
  unsure (1)..(373): unsure at all n locations
cccacgcgtccgcgcccgtctacgaccacattatcgtcccgttcgcgcgccgcgtgacggggacgcgagacgggcatcacgcacctgcagcgcatcggcacggggctggtgatgtccgtcgtcgcgatggccgtggccgccgccgtcgaggtgaagcgcaaggacgtggcgtccagcagcgggatgctggaggactccgggaagccgctgcccatcaccttcttctggatcgcgttccagtacctgttcctggggtccgcggacctgttcacgctggcggggctgctcgagtttttcttcagcgaagcgccgncgcggatgaagtcgctggcgacgtcgctgtcgtgggcgtcgctggcgctggggtattacc

SEQ ID NO: 292988 - DNA, 439 bp, Zea mays
accacgcgtacgcaaaaacacaccaagcgaagcgcactagcaacgacctatcaccaagggcgaccaagatattagccctgcttgcgcttcttgcccttttagtgagcgcaacatatgcagttcattattccacagtgctcacttgctactagtgccattattccacagttgctaccaccagttacttcaatgggctttgaacatccagccgtgcaagcctacaggctacaactagcgcttgcggctagcgccttacaacaaccaattgcccaattgcaacaacaatccttggcacatataaccctacaaaccattgcaacgcaacaacaacaacatcaacagattctgccatcactgatccacctagccgtggtgaaccctgtcacctacttgcaacatcagctgcttgcattcaaccccacttgctctggcgaacgta

SEQ ID NO: 292989 - DNA, 348 bp, Zea mays
accacgcgtactcataaacacaccatgttaagctcactatcaaccatctatcaccaagtgctgctaacatattagcgcttgcctgtgcgctatctatgcccttcatagtgagtcacaacactatgcatttcattattccacactgctcacttgctactagtgccattattccacagttactaccaccagttacttcaatgatcttataacatccatccttgcaagcctatatgctactacttacgcttgctgctagcaccttacatcaaccaattacacaattgcaacaacaatccttggcacatataaccctacaaaccattgcaactcaccaacaacatcttcaac

SEQ ID NO: 292990 - DNA, 387 bp, Zea mays
aaacacatcacgcgaagcgcactatcaacaacctaacatcaatggctaccaagatattatccgtgcttgcgcttcttgcgctttttgcgagcgcaacaaatgcgttcattattccacaatgctcacttgctactagttccattattccacagttccttccaccagttacttcaatggccttcgaacacccagctgtgcaagcctataggctacaacaagcgattgcagcgtgcgtcttacaacaaccaattgcacaattgctacaacaatcctcggcacatctaacaatacagaccatagcaacgcaacagcaacaacagttgctaccagtactgagccacctagccatggtgaaacctgtccactacttgcaacatgaactgcttg

SEQ ID NO: 292991 - DNA, 357 bp, Zea mays
atattatcgagaccaactagcaacatagaatgtacattagtgtaccaacaatggcagccaaaatgttctggctacttatgctccttgggctttctgcaagtgctgctacagcgaccattttcccgcaatgctcacaagctcccatagctatccttttttccccgtacctctaaccagcggtgtctctccgcatgtgaaaacccaattctctaaccctacaggatccaacaggctatcacagctggcatcttacctttataaccctctggtcttccacatatcattatccctattacatcaggtacccttggggcatttattgacacacaacattagggcacaacaaactcaacaacc

SEQ ID NO: 292992 - DNA, 315 bp, Zea mays
caccgccaacggtacatgtaccgtcctcggtgcatctgccagctggggttcacctgccatcgtgggtgcatctcccaccgccgcaccagctgtcgcagccattactgctgccaccgtcggtgcatgtgccgccgccggatcatctgacgccgcagccatgccactaccgtacttagctggcccagcctcagactcatcccgagtcgcacccatgcccgtgccaacaggcgcatacaagcccatgccagctgcacggtacctgcggcgttggcagcaccctaatcctgggccagttcctcaagtttctgatgcgtc

SEQ ID NO: 292993 - DNA, 304 bp, Zea mays
acgacaccagcaagcaacatagaaagtggaatcctttagcatcaatagagcaacaatggcgaccaagatacttgccctccttatgctccgtgctctttactgcatgtagatgctaacgcgacaattttccctcaatgatcacaagctcctatagctatcctttttgccccataccttacataaatgatagcttcagtatgtgaaaacccagctcttcaaccctatctgctccaacaagcaatcgcattaagcatcatacctttataacacttgtttcaacaatcggcagccctatttttggggc

SEQ ID NO: 292994 - DNA, 399 bp, Zea mays
atcgcaacgcaacagcaacaacaatttctaccagcactgagccaactagctgtggtgagccgtgtcgcctacttgcaacagcagttgcttgcatccaacccacttgctctggcaaacatagttgcataccaacaacaacaacaattgcaacagtttctaccagcgctcagtcaactagccatggtgaaccctgccgcctacctacaacagcaacaactgatttcatctagccctctcgctgtggttaatgcacctacatacctgcaacaacagttgctgcaacagattgtaccagctctgactcagctagctgtggcaaaccctgctgcctacttgcaacagctgcttccattcaaccaactgactgtgtcgaactctgctgcgtacctacaacagcga

SEQ ID NO: 292995 - DNA, 316 bp, Zea mays
ggctatccaatagctcatcgactccagaatgcataacttgacaccatgatggcgctgatcggtgacctagctctcgtggagctagcttgaagcgccacctgacgtacacgctgcggatgtgactgccaaacaccaccgtgacatataacggcttcatcatatatgacgcctgcgttctatctgcagacgaaacagcagtcgcagccatggcaataccccactggatcaccgcaagtaactccgtgccagccgtacatatgctgcagggtcaagcgcttctatagtccatttatgggccaatacgatcagattctga

SEQ ID NO: 292996 - DNA, 345 bp, Zea mays
atagaacgcggaatccactagctacaatcgagcaacaatggcgaccaagatattctggctccttatgctccttgctctatctacatgtgttgctaacgcaacaatcatcgctcaatgcttacaagctccaatagctcaccttctttcccaatacctaccataaaggatagctaacatatgtgaaaacccagctattcaaccatataggctacagcaagcaatcgcagacagcaacatacctttatcgcccttgatgattcaacaatagacagacctatctttggtgcagtcattgatacacaccatcatggcacaacagctgcagcaacttatgctacctgagat

SEQ ID NO: 292997 - DNA, 294 bp, Zea mays
gctgtaaataaggtagcaaggctcacaccagctagctggctgaatggtactaacaattgtgggtctcactatatgtgcggctgcttcaaccactctccctcaatactcacactctcatatagctgcccttcttcctccataccaccaatcaatgacctattcacttcgtgaaatcttcaaccttcaacctaactgcctccaacacacaatcccaacacacaactttacttcactaaaccacctcatttaacacccgccaaccatatctgatcctcagtcattggcacaaaccat

SEQ ID NO: 292998 - DNA, 404 bp, Zea mays
ggacgtcagcctagcaattagctcatcgactccagattggagaactcgacaccatgagggtgctgatcgttgcccttgctctcctggcgctcgctgcgagcgccgcctccagtacaagcggcggctgtggctgccagacaccaccgtttcatctaccgcctccgttctatatgccgcctccgttctatctgccgccgcagcagcagccgcagccatggcaataccccactcaaccaccgcagctaagcccgtgccagcagttcggatcctgcggcgtcggcagcgtcggcagcccgttcctgggccagtgcgtcgagttcctgaggcaccagtgcagcccggcggcgacgccctacggctcgccacagtgccaggcgctgcagcagcagtgctgccaccagatc

SEQ ID NO: 292999 - DNA, 377 bp, Zea mays
gcaacatagaaagcacaatagcgtaccaacaatggcagccaaatattttgatctcttaaggctggttgtccttcctgaaggggctgctactgaaacaattttccagcattgttaaaaagctctaatggcttccattattccacataccctttaacaaacagggcttccatttcatgaacacccaatgcttaaaccttccggattcaacaagacatgtctacatggattataacattaataaccctgttaacttaaaaaccgatcaacctaataccaacactttcattaaatccatttataggcccaaactttaattcacaacaagcaacataaatttggccaaataaactttacttataatgttaaaaaaatccttt

SEQ ID NO: 293000 - DNA, 421 bp, Zea mays
ctcttggactattgtatgaagcagagatctttggatagctccaaaaccgacagctatgtgaagagcatgcagatggaaggcaggagcacgagattagcgcgttgatgtacttagtactgcgaaatcaaactggaggaggctgcaattctgcattacacctacaaaaaattctcaaacctaacctcaagaagggatagatgtggctgcaaaccaactaaagaagatgtgaagcaatgttttatcttggaatttgaccgtttggtaccgggaacatgttgcatggaccgatagagacaccaacttgaaacttttaaggaaggatgtattaacacatatatatgtgcccatggcattcatcggtggcctcaaggaatccgacgtctatcaatgcaataacatcagcgaatgcacaatttaaaac

SEQ ID NO: 293001 - DNA, 240 bp, Zea mays
aatcccatcataatcacacaatgctcactatctctcactggctctatttcacagaacctcactccaactactacaatgggcttcaaacacccagctatacaaacctatacgctacaacaagcgcttgcaagcaacgtcttaaaacaaccaatttcccaatttcaacaacaatccttggcacatctaaccatacataccatttcaaacgcatcatctacaaacaactgagccaccttttac

SEQ ID NO: 293002 - DNA, 447 bp, Zea mays
  unsure (1)..(447): unsure at all n locations
ttcggaattcccggtgagcatgagaaacacacctacgaacgcnatagcacgacctacatcaatggcttccaagacattatcccgccttgcgcttcttgccctttgtgtgagtgcaacaaatgcgttcattattccacaatgctcacttgctccgagtgccattattccacagttcctccctccagttacttcaatgggcttcgaacacccagctgtgcaagcctataggctacaacaagcgcttgcggcgagcgtcttagaacaaccaattgcccaattacaacaacaatccttggcacatctaaccatacaaaccatcgcaacgcagcagcaacaagcactgagccacctatccgtggtgaaccctatcgnctacttgcaacaacagctgcttgcatccaacccacttgctttggcaaacgtagctgcataccaacaacaacaaca

SEQ ID NO: 293003 - DNA, 410 bp, Zea mays
cccacgcgtccgtagcaacatagaatgcactttaatgtaccaacaatggcagccaaaaggtcagggctccttatgctccttggtctgtctgcaagtgctgctaccgcgaccattttcccgcaatgctcgcaagctactatagcttccattcttaccccgtacctctaaccagcggtgtattcggtatgtgaaaacccaattcttcaaccgtacaggatccaactggcaatcacagatggcatcttacctttatcacccttgttcctccaacaatcatcagccctattacatcagttacctcaggtgcatttattggcacaaaacatcatggcacatcaactgcaacaacttgtgctaacataccttgctgcctactctcagcaacatcattatgttgcattcaaccaact

SEQ ID NO: 293004 - DNA, 391 bp, Zea mays
attcagaatcacacctatcgaagcgcactatctacgacctaacaacaatggctaccaagatatgagccctctttgcgcttgttgcccttattgtgagcgcaacaaatgcgttcattattccacaatgctcacttgctcctagtgccattattccacagttcctacctacagttacttcaatgggcttcgaacacccagctgtgcaagcctacaagctacaacatgcgcttgcggcgagcgtcttacaacaaccaatcgcccaattacaacaacaatccttggcacatgtaaccatacaaaccatcggaacgcaacagcaacaacaatttctaccagcactgagccaactagctgtggtgaaacctgtggcctacttgcaacagcaattgct

SEQ ID NO: 293005 - DNA, 362 bp, Zea mays
cgggttgtcggaatcatcaacacaccaagcgaagctacctatcaacgtcttaacaacaatggctaccaagatattatgggtccgttctcttctttgcctggttgttatccccacaaatgcggtcattatttcacaatgactgacttgcttctaatgccattataccacaaattctccaaccaactacttcaatgggctgtccaaaaaatatctgtgccaacctacaagctacaacaagcgcttgctgcgaacgtcttacaacaaccaatttaccaattgcaacaacaatccttggcacatctaaccatacaaaccattgcaacacaacagctacaacaattcctaccagcactgatccaact

SEQ ID NO: 293006 - DNA, 359 bp, Zea mays
cagggctcacttgctcccagcgccagtattccacaggtgatcccaccagttacgtcaggatcctcgaacatccagccgcgcaagcctacaagctacaactagcgcttgcatgcagcgcctctacatctaccaattgcccaattgcaacaacaatcattggcacatgtaaccctacataccatcgcaacgcatcaacaacatcagctgtatctgccatcactgagccacctaaccgcggtgaaccctgtgacctactagcaacagcaggtgctagcatccaacccacttgctctggcgaacgtagctgcataccagcttcaacaacagctgcaacagtttatgccactgctcagtcaact

SEQ ID NO: 293007 - DNA, 434 bp, Zea mays
atcaaacgtacttgccaaccagcatcgccatcagccgcgacaggatcggcccaccctcggtcgggtagccatggtgagccgggccggatacatacatcatcgacggctgattaaatatacctcgttcgctgtgggctatgcacctacatacctgcaacaacaagacgatgcaacacattggacgatctctgactcaactaaatgttacaaaccctgttgtctacttgcaacagatgctcccattcaagcaactgactatgacgaactctgctgagtacgtacgactacgacatccattactgaatacaatggtagtggctaacccatcggtcgacgacttcctacagctagcacaatcgatgccatacaaacagttgcctttgactaatcctgtattgaagacgcatcaactaatacatggacgtgccatgttt

SEQ ID NO: 293008 - DNA, 399 bp, Zea mays
aacaacaacagttgcaacagtttctgccagcgctcagtcaactagccatggtgaaccgtatcgcctacctacaacagcaacaacttctttcatctagcccgctcgctatgggcaatgcacctacatacctgcaacaacagttgatgcaacaacagttgctgcaacaaattgtaccagctcttactcagctagctgtggcaaaccctgctggctacttgcaacaactacttgcattcaaccaactgactgtgtcgaactctgctgcgtacctacaacagcgacatcagttacttaatccactagcggcggctaacccattggtcgctgacttgctacagcagcaacaattgctgccatacaaccagttctctctgatgaaccctgccttgtcgtggcagc

SEQ ID NO: 293009 - DNA, 386 bp, Zea mays
atctacgggcacagcacatcagggcacaacatctacaacaacttgtgctagcaaacctgtgctgggtactctcagcatcagcgggttgttacattcaaccaactaggaccatggaactatgcttctaatgcgcaacttcttcaactacaattcagacaactacctgctgcataccgtgagcaatttcttgcattcaaccacctaacagcattgaactctgctgcttacatacagcaactacaactactaccattcaaacagctagctggcgtaagccctgctaccttcttgacacatccacagtcgctgccgatctaccatcacgttgtagcctaacgctggcacgctattacaagtgcaacaatcgctgccattcaaccaacttg

SEQ ID NO: 293010 - DNA, 308 bp, Zea mays
tcttcagatttagggtctcaaatcatcatggctcaacttctacaacaacttgttctatcaaacctggcttggatctctcatcaacagcgggtggttccattcaacctactaggttcattgaactctgcttcttatttgcaacaacaacaactaccattcacccagctacctgctgcctaccctcagcaatttcttccattcaaccaactatcagcattgaactctcctgcttatctacagcagcaacaactactaccattcagccatcttgctggtgtaaacccttctaccttctttacacaaccaca

SEQ ID NO: 293011 - DNA, 374 bp, Zea mays
attttgagcattcagaaacacaccatgcgattcgcactagcaacgacctaacatcaagagctagcaagatattagcgctccttgcgcttcttgccctttttgtgagcgcaacaaatgcgttcattattccacaatgctcacttgctcctagtgccattattccacagttgctcccaccagttacttcaatgggcttcaaacacctagctgtgcaagccaacatgcaacatcaagcgcttgcggctagcgtcttacaacatccaattgcccaattgcaacaacaatacttgccacatctaacaatacaagccatcacaacgcatcagcaacaacagttcctaccagcactgaaccacctagccatggtgaaccct

SEQ ID NO: 293012 - DNA, 351 bp, Zea mays
gaatttccgggtcggggctcgagtcacgcgtccgcgagtggccaacaatggacatggctttggcgtctaaagcctacccttcgtcatgcaatgacaccgacgtcgtgctgacaatttcaaagcgtgacaaatccgctgcaaatgattcaacatacctcaatcctcaagctcatgatagtgttcttggaatcattctgggaggtggtgctgggactagattgtaccccttgacaaagaagcgtgccaagcctgcagtgccattgggtgccaactatagactgattgatattcctgtcagcacttgtcttaacagcaacatatccacgatctatgtgctatacgcaatttaac

SEQ ID NO: 293013 - DNA, 428 bp, Zea mays
gcaacatacaaagcacaatattgtaccaataatggcagccaaaatattttgcctcatggtgctcgttgctctttctgcaagtgctgctactgcgagcattttcccgcaatgctcacaagctactatagcttaccttcttcccccatacctctcaccagcgatgtcttcagtatgtgaaaatccaattcttataccctacaggatccaacatgcaatcgcagcacgcatcttacctttatcacccttgatcctccaacaatcatcagccctattacagcagtcacctttgatgcatttatcgtcacaaaacatcagggctcaacaactacaacatctcgtgctatcaaaccttgctgcctactctcaacaacaacagttacctttggtgcatttgctggcacataacatcatggcacaacaactacaac

SEQ ID NO: 293014 - DNA, 439 bp, Zea mays
  unsure (1)..(439): unsure at all n locations
gtcagcctagcaattagctcatcgactccagattggagaactcgacaccatgaaggtggggatcgttgcccttgctctcctggcgctcgctgcgagcgccgcctccagtacaagcggcggctgtggctgccagacaccaccgtttcatctaccgcctccgttctatatgccgcctccgttctatctgccgccgcagcagcagccgcagccatggcaataccccactcaaccaccgcagctaagcccgtgccagcagttcggatcctgcggcgtcggcagcgtcggcagcccgttcctgggccagtgcgtcgagttcctgaggcaccagtgcagcccggcggcgacgccctacggctcgccacagtgccaggcgctgcagcagcagtgctgccaccagatcaagcangtggagccgctgcaccggtaccaggcgacatac

SEQ ID NO: 293015 - DNA, 405 bp, Zea mays
ggcgggaggagccagagccagagccagccagccagacacacaacctcggtcggcgcgggggctcaacccaatggctccttcctccctccgcccgccgcgccaccacccgtctcccctcgtcgtcctcgccatcgccgtcctcctcgtcttgcgcaccgacgatgggctgccggaggcgggaggaggaggaggaggcggcggtctgtaccgggagattctcagggacgagaccgtgcagaggctcaaggagctgggcaagatatctgatggggatggctaccttgaaaggacgtttctgagtccggcctttatcagagccactggtgtcatcgtcagctggatgaaagacgctgggcttacgacgtgggtcgatcagatggggaatattcatggtcgatatgagcc

SEQ ID NO: 293016 - DNA, 421 bp, Zea mays
cagacctattacatcaatcacctgcggtgcatttattgacccacaacatcagggcacagcaactacaacaacttgtgctagcaaaccttgctgcctactctcaccaacagcagtctcttccattcaaccaactatctgcattgaactctgcttcttatttgcaacaacaacaactaccattcagccagctacctgctgactacccccagcaacatcttccattcaaccaactggcatcatttaactctcctgcttatttacagcagcaacaactactaccattcagccaactagctggtgtgagccctgctaccttattgatacaaccacagttgttgccgttataacagcacgctgcacctaacgctggcaccctcttacaactgccacaattgctgccattcaaccaacttgctttgac

SEQ ID NO: 293017 - DNA, 418 bp, Zea mays
caatccagcacacatcaaaccatacagaccattacagcgcagcaacaacaacaacaggggctgccatcactgaaccacctaatcatcttgaaccctgtcacctacttgcaacagcagctgctatcatacaacccacttgctctgccgaacgtagctgcataccaccaacaacaacagctgcaacagcatatgccagtgatcactcaactagccatgctgaaccctgccgtctacctacaactactatcatctagaccgctcgcagtaggcaatgcacctacctacctacaacaacagttgctacaacaaatagtaccacctctgactcacctagctgtcgcaaacccttcagcctacttacaacaattgattccattcaaccaactgaatcagtcaaactctgatgcatacctacaac

SEQ ID NO: 293018 - DNA, 359 bp, Zea mays
attttgagcatgcagcaacacacgaagctaagctacctagcaacgacttaacaacaagggctgccaagatattagccctgcttgcgcttcttgccctttatgagagcgcaacaaatgcgttcattattccacaatgctaacttgctcctagtgccattataccacagttccttcgaccagttacttcaatgggctttgaacacctagctgtgcaagcctacaggctacaacaagcgcttgcaaaaaccgcttacaacaaccaattaaccaattgcaacaacaattcttggcaaatctaaccatacaaaccaatcgcacacaacaagcacaacaatttctaccagcactgaaccaactag

SEQ ID NO: 293019 - DNA, 336 bp, Zea mays
cagaccagcaagcaacaacacacgtagaacacaatagcaacaacaacgcaacaagggggaccaaaacacttgcggggcgtacgcaacctagctaacactacatgcgttgctaacgcgacacaaatcccacaatgctcacaagctgctataacttacctcataccaccataccttccatcaattatagcgtcaccatgtgaacacccaactatacaaccatatacgcttcaacaagccatcgaagcaagcaacataccccaatcgaccatgctattacaacaataaccaaccatataagcgatgcaatcatcgctacaaacaatgagggcacaaaca

SEQ ID NO: 293020 - DNA, 386 bp, Zea mays
gagaccaactagcaacataaaaagcacaatactgtaccaacaatggcagccaaaatagggtgcctactaatgctgctgggacttactgcaagagctgctacggcgaccattatgctgcaatgctcgcaagctcctatagcttccctacttctcccgtacctctgaccagcagtgtcttcggtatgtgaaaacccaattattaaaccctacagcatccaacaagcaatcacagctggagtcagacctgtatcacacttgttcctacaacaatcatcagccctattacatcaacaacctttggtgcatatattggcacaacacatcagggcacaacaactacaacaactagtgctagcagaccttgctgcctactcttagcaacagca

SEQ ID NO: 293021 - DNA, 379 bp, Zea mays
gaaaaggggcaggaagaaatcaagcctaacacgatccatcgcctagccgaagcacaggggaggccagcaacaccagggggatgaagctggacatatcctgactcgagaccaacttcgccaacctgacagaatactactgcgacgacacgtacttctccgcccaggcctccgacgtgccgtccatggtgctacccatctgcgactacttcaacggattacaaacggacaccaaggatatggagaagaataagaagggtacgaccacacttgccttcatattcaacaagggcatcatcgtcaccagtgattccaaagccaccatggacggatatatatcctcacaaaccgtgaagaaaattattgaaataaatccttacat

SEQ ID NO: 293022 - DNA, 376 bp, Zea mays
agaagctcaactgctgaactcactgatccactatgactatggcaaacgcaggcgcgcggattgtatcaccggccggagctgctactctcgcactatcacttctctgcgctgacgacggtccggacgacgctcagaactactgctgccaaccaaacgtatgctgaaacaagtttggctactgcacgacgaccgacaagtactgcaactacatagagccagtacaggcccgtgcaaggtagttcgtcaagagcaagcaaatacctgccgaggagcgaacgtggctagcgtagacacagcatccttattaaacagtatcaagagccatgccggtagcgtatactagggcaagcacttatacaatctgaacgcgttcctg

SEQ ID NO: 293023 - DNA, 416 bp, Zea mays
cagcatacaaaaacacaacaaacgaagcgcactatcaacgacctaacaccaatggcagcgaacatatcaaacctgctcgcactaatcgcccttaatagtgaacgcaacaaatgcgatcattaaatcacagtactcacttgctcctagagccattattgcacacctcctaccaccagttacttcaaagggcttccaacatccaacaaaacaagcctacaggctacaactagcgcatgcagccatcacattacaacaaccaatagcacaactgcaacaacaatccttagcacatctaaccctacaaaccatagcaacgcaacaacaacaacaacaacagcatctgccaccactgagccaactagccctggtgaaccaagtcacctacttgcaacaacaactgctagcatacaaaccac

SEQ ID NO: 293024 - DNA, 436 bp, Zea mays
caacatagaaagcacaatagtgtaccaacaatggcagccaaaatatttcgctggcttaggctccttggtctttctgcgaagtgctgctaccgcaaccattttcccacaatgctcacaagctcctatagcttcctttcttcccccatacctcttaccagcggtgtcttcagtatgtgaaaacccaattcttcaaccctacaggatccaacaggcaatcgcagcaagcatcttacctttatcacccttgtatcttcaacaaccggcagccctattacagcagatacctttcatgcatttgttggcacaaaacatcaatgcacaacaactacaacaacttgagctatgaaaccttgctgtctactctcaatcacaggcatttcttacattcaaccaactggctgcattgaactctgctgcttattttcaacaacaacta

SEQ ID NO: 293025 - DNA, 348 bp, Zea mays
gagcactagccagggcgaaccatatcgtctacctacaacagcaacaactcctttcagggagggctctccctatgggcaatgcacctacatacctgcaacaacacttgatgcaacaacagttgctgcaacaaactgcaccagctcttactcaactagctgtggcaaacactactgcctactcacaacaactactctcattcaaccaactaactgtgtcgaactctgctacgtacctacaacagcgataacacatacttaatacaatatcagcagctaacacattgatcgcagccttcctacagcagcaacaaacgctgccatacaaccagttctctttgatcaacccta

SEQ ID NO: 293026 - DNA, 432 bp, Zea mays
attagctcatcgactccagattggagaactcgacaccatgaaggtgctgatcgttgcggttgctctcctggcgctcgctgcgagcgccgcctccagtacaagcggcggctgtggctgccagacaccaccgtttcatctaccgcctccgttctatatgccgcctccgttctatctgccgccgcagcagcagccgcagccatggcaataccccactcaaccaccgcagctaagcccgtgccagcagttcggatcctgcggcgtcggcagcgtcggcagcccgttcctgggccagtgcgtcgagttcctgaggcaccagtgcagcccggcggcgacgccctacggctcgccacagtgccaggcgctgcagcagcagtgctgccaccagatcaggcaagtggagccgatgcaccggtaccaggcgacatacggtgt

SEQ ID NO: 293027 - DNA, 210 bp, Zea mays
ataaatcccctacttttcttcctccatatataggggccatcagatccagtaaggggaatgcaccaggggcttcgcgcccgttcacgatcccatgttcccgacgaattcttagagtgacctcttatcccttcagacaccttcaaggctcttggtgtagcttgccactctcaccaatcaagttctcatgtctgatctcgacattcagatccc

SEQ ID NO: 293028 - DNA, 358 bp, Zea mays
aacacaccaagcgaagcgcactagcaactacctatcaccaacggctaccaagatatgggccggccttgcgcttatgggcctttgactgagcgcaacaaatgcgtccattattacacagtgctcaattgatactagtgccaacattccacagctactccgatcagttacttcaatgggcttacaacattcagccgtgcaagcctacaggctacaactagcgcttgcagtgagctgcctacaacaaccaattgcccaaacgcaacaccaatgcttggcacatctaaacttactaaccattgcaacgcagcaaccacaccaacagtacctgccataactgatccatctagccgtggtgaac

SEQ ID NO: 293029 - DNA, 424 bp, Zea mays
gttggcttctcctccccctccggttcgggttccggttcgggagggtctcccgggttcggtttcctgggtgaaccgattcaaaatgccggcgtccgatgttgagtaccgctgcttcgtcagcggcctcgcctgtgccacggacgaccactccctccacaacgccttcagcacctacggcgaggtcctcgagtccaagatcatcctcgatcgggagacgcagaggtcccgcggcttcggcttcgtcaccttctccacggaggaggcgatgcggaacgccatcgagggcatgaacggcaaggagctggacggccgcaacatcaccgtcaacgaggcccagtcccgcggcggccgtggaggcggcggcggccgcaggtacggtggtggccgtggaggcggcggctacggcggtggcgggcgccgtgat

SEQ ID NO: 293030 - DNA, 442 bp, Zea mays
gcagtttctggtcatcacatttgccaagaactccttatgacatctcccttgatgatgagacacaaaaccgcaatgatcaggtgaacaccctgtgcaaatcatgttatgtaatagttgtaccttttgttagtattgccgaacaaatttgacattgatgcaggggtttgagaaaatggtctctgggatttatcttggggaaattgcaaggctggtgctgcatcgaatggctctagaatcagatttttttggtgacgctgctgataatctatgtacccccttcacattgagcacaccactcctcgctgcaattcgcaaggacgattcaccagatctgagcgaagtcaggaagatactgcaagaacatctgaaggtcagctttcctgaccttcatgaagtcaaacatgtgttttcctccaacctgtgaaggttctggtgattttgc

SEQ ID NO: 293031 - DNA, 423 bp, Zea mays
atcaggcgcttcttgtagtcctcgaagaagcgcctgatttcagccaagcggtgaggtgggagctccttgatatgattgtaatgcctgtactcgggatcatcagcgcacactgcaatgatcttgtcatctgcctctccctgatcaatcatcggcataaggccgatagccttcgcacgtaggaaacagcctgggataacaggctcctgcattataaccagtacatccaaaggatcactgtcttcacaaagagtgcgaggaatgagaacaaggaggttgctgtgaacgactttctaccagcgagcgccgcttatgaagccatacagcactctatggatctgtatgctacatacatcgttgagggcctgaggaggtaggattctgatggctaggaaagtggggaggatgttgacgaaaaactgggag

SEQ ID NO: 293032 - DNA, 423 bp, Zea mays
cgccgactgaaggtgaatcttcagacagccagattggttggtgtctagtgtgtgcgaagatggcgtagaaaagactgagagacagttggctcacacagacaattgacaactgactatagtatctgcctgcctggctgatgctgatagagatggggactcttgtcctgctgtctgttcttgtataaatctccgttgtcaaatatttatcgtccgattatttatttttaaactaaacaacgacaaataaaaaagaacgaggttgcaaaagatagatacaaaccaaaggatgtcgtcgctgtgcgctgatctgatcactgccactctgccaggtactacctcaaggacgcggtgcttgacggcggcatcccgttcaacaaggcgtacgggatgacggcgttcgagtaccacggcacggacgcgcgc

SEQ ID NO: 293033 - DNA, 347 bp, Zea mays
caccgaccgggagacggggaggtctcgcgggttcggcttcgttaccttctcctacgagagactccatgctcgacgctatggagaacatgaacggcaaggagctcaaccgccgtaacatcaccgttaaccaggcccagtcccgtggcagtgacggtggcacgctgtagctactgccgcagtcgctcgcgtgaggcagctatggtggcaatgcgccagtgacaagctggatatggcaagctgtcgtgcggctacggcaatgctgcaccaggtgtataggcatgaggatacatgatgctagtagccggctaaagcggtcttgctctaaaggtaagtgattgaagctttca

SEQ ID NO: 293034 - DNA, 404 bp, Zea mays
ggattggggacgcttccgtttcgggaagccgtgaagggatcggccacgacgatggtgcgggggaagacggagctgaagcggatagagaacgcgacgagccggcaggtgaccttctcgaagcgccgcaacgggctgctcaagaaggccttcgagctctccgtgctctgcgatgctgaggtcgggctcgtcgtcttctccccgcgcggcaagctctacgagttcgccagcgccgccagcctccagaaaacaattgaccgctacaggacatacacaagggaaaatgtcaataacaagactgttcaacaagatatacagcaagtcaaagcagatgccgtaagcttggcaagtagactcgaagcccttagaaagaccaaacgaatgtttctgggtgaaaatttaaaaga

SEQ ID NO: 293035 - DNA, 440 bp, Zea mays
  unsure (1)..(440): unsure at all n locations
cgcggagctcgctcgtgcggtcggatccacgggcatggcggccggtcagttcctcgatctggccggcgctaccgcccttggtgaggccgaggtcatgcaggtcctgacgaagaagttcggcgagatggccgagtgctccgccgcctgcggcgccatgctcggtggggccgggcccgacgaggaggccgcgttgcggcgctacggccgcaccatcggcgtcctgtacgagctcgtggacgacatccggagcgcatcgggaaacggcaagatgaggagcaacgccagcgtcctgcgctcgctggggatggaccgcgcgctcggcattgtggaagagctcaaggctcangccaagacagaggctgacagggttctcggataagtacggcgatcgggtgctgcctntatacagcttcgtggactacgcggtggagagagggttt

SEQ ID NO: 293036 - DNA, 393 bp, Zea mays
  unsure (1)..(393): unsure at all n locations
gcggttctgaagaccggcaacaggatgaatgttggcacaaaccgtggggacgcacacgcgttcaagctcgacactctgctgaaactggtggatgtcaaaggcaccgatgggcacacgacccttctgcacttcgtggtacaggagatgatccggacggagggcgcccgtgtgtccgccagcacccagacaactccaagaacccaggcaaaccctctacgagaggagctggagtgcaagaggctaggtctccgggtagtgggcggcctcgccggcgagctgggcaacgtgaagaaggcggcggccatggactcggacgtgctgagcagctacgtcgccaaactcgcgggagggatagagaaagtgaccgangtgctgcggctgaacgaggagctc

SEQ ID NO: 293037 - DNA, 352 bp, Zea mays
gtcgagctaaactaaataacaccatctagcaactctctctttcatcacactgatgtgggtatcttgttctactatgaggccatgttggacatgtgtggccgattcctggacattgagctcctaatgtacaccaacctcaacaggcttgtgtccaaagtcatgtaatcacttactgactacatgaagtgcgatggtgctcctaacgtggatgataacgaggatcacaccaacctagtaccgtactccaggatacatgtcatgctttctacgtacgctccagtcatatctgatgagaaggcctactacgagcagatcaatgacgttgatatcaccaacagtgccttcgagctat

SEQ ID NO: 293038 - DNA, 452 bp, Zea mays
atgcgttcgctagcagcatagacagcacaatactgtaccaacaatgacagccaaaatattgagcttcctgatgcgcctcggactatccgcaagtgatgctaccgcaaccattctcccacaatgctcacaagctactataacttcccttatttccccatacctcttaccaaccgagtcttcaatgtgtgaaaacccaattgttcaaccctacaggatccaacaggcaatcgcaacatgcatcttaccattatcacccttggtccttcaacaaccgttagccctattaaagccggtacctttggaccaattggtggcaccaaacaatctggcccaacaactaccaccacttgtgctatcaaaccttggtgcataccctcatccacaataaggtctttcatttgacccactggctgtaatgaactctgctgattatttgcaacaaccattaccct

SEQ ID NO: 293039 - DNA, 338 bp, Zea mays
accgtcttgattcccggacgagaccaactgcacatagaagcacaatagtgtaccaacaatggcagccaaaatattttgcctccttatgctccgtggtctttctgcaagtgctgctacggcgaccattttcccgcaatgctcgcaagctcctatagcttcccttcttcccccgtccctctcaccaccggtgtcttcggtatgtgaaaccccaattcttaaaccctccaggatcccacaagcaatcgcagcttgccatctaacctttataaccctggttcttcaaccattattaaccctattacaacagttaccttttgtgcatttattggcacaaaaca

SEQ ID NO: 293040 - DNA, 442 bp, Zea mays
  unsure (1)..(442): unsure at all n locations
catttaaccaattggaagaagttgttgttgctgagagtaggcagtagctagctggctgaatggtgatagttgttgctgcaaataagcagcaacaacttcttccatttaaccaattggccgcactgaaccccgctgcttatttgcagcagcaaatactactaccatttagccagctagctgcagcanaccgtgcttccttcttgacacagcaacagttgctgcctttctaccagcagtttgcggctaaccccgcaaccctcttacaactacaacaattgttgccctttgtccaacttgctttgacagaccgagcggtctcctaccaacaacacatcattggtggtgccctcttttagattgcttattagttgtaattcaataataaagttttttggatgatgtatgtggccaaccagaattaagaagttacatttccagattt

SEQ ID NO: 293041 - DNA, 375 bp, Zea mays
gcaacgtagaaagcacaatagtgtaccaacaatggcagccaaaatattttgcttccttatgctcgttggtctttctgcaagtgttggtaccgcaaccattttcccacaatgctcacaagctcctatagcttcccttctttccccataccttttaacaacggtgtctttaatgggtgaaaccccaattggttaacccttcaggatccaaccaggcattgcaaccagcattttaccattattacccttggtccttcaacaaccgtgagccctattacaggaattacctttgggccatttggggggacaaaacattagggcacaacaactacaacaacttgtgctagcaaaccttgctgcatactcttagcaacatca

SEQ ID NO: 293042 - DNA, 302 bp, Zea mays
gactagttctagatcgcaggcggtcacttgcgatctagaactagtgacagaaggacatacacattgctagatgatttaaaaaatgtactaaacttctgtaactaatacagatcggtatgtactgtaacagggtccaagctgaacaaaaatgaactggaaaatacttagtgacgggaatatgacattaagaaatgctttctgcaatacaggaaatatgatatctggttaaagactatttggctcaatactaatactctgactcttaaattatacgagtgcgactttatgaataggtattcctg

SEQ ID NO: 293043 - DNA, 267 bp, Zea mays
acatagaaagtggaatccagtagcaacaatagagcaacaatggcgaccaagatatgtggggtccttatgctccttgctctttctacatgtgttgctaacgcgacaattttccctcaatgctcacaagcttctatagcttcccttctttccccatacctttcatcaattatagcttcaataatggaaaaccccacttttcaaacacttagggcttaaccaggcatttgaacaaggcacataaccttaacggccttggtggtttaacca

SEQ ID NO: 293044 - DNA, 440 bp, Zea mays
gcaaccatactccttggtgctggtgcaactgtttgtcttcaggttgttgcagaacggagacgaggtactttggaagagttcctagagcagccttctatagatgctactactttactcctgagcatatttattccaaattggatttcagaattccggggcaaatttaagttggctatttgaaacttacagagcagcgcctggtcctcttggcaatgctgtttcttatgtaaatggtgttttcctgggacatgctcctttggatgaacattcagatactctggaattgagtaatctgcggttggcttttggtgcatatggaacagagcatgctattagagcaacgagggtggaggaattccttactggtaaatcactcactgcatcagtggtacttgtggcaattaaattactaagagaaacggttgtaccaatggagggaa

SEQ ID NO: 293045 - DNA, 366 bp, Zea mays
ctagcaccatagaatgcacactagtgtaccaacaatggcagcccagtagggcgcctacttatgctccttggtccttctgcaagtactgctacggcgaccattttcccgcactgcttgcatgctcctataccttcccttctttcaccgtacctgtcaccagcgtggtctaccgaatgtgaaaacccatttcttaacccctacaggatccaacaggcaatcacacctggcatattacctttattacccttgttcctacaccaatcataagccctattacatcagctacctttggcgcatatattgacacaaaacatcaggccacaacatctactacaactcgtgctagcaaaccttgatgactactct

SEQ ID NO: 293046 - DNA, 296 bp, Zea mays
gcaagactgctggcaagcccaagccagcagcagttcggtagcccctggtacagagcccaccgcgggctggatctgggcccactgtgcggacaacccccaagctacctgaccggcgagttaccctgctactacagctgggacaccggggggctgtccgctgacccggagactttcggcaagaaccgctagctggaggtgatccactgccgctgggccatgctgggcgcgctcgggtgcgtgttcccggaactggtcgcccgcaacggcggccagttccgcgaagccgtgtggttcaa

SEQ ID NO: 293047 - DNA, 417 bp, Zea mays
  unsure (1)..(417): unsure at all n locations
attctgtaattntagtctccatggtcaccggaataaatggcttttggtggtggtgatggttaatcttttcctttgcctgttaccctatggttgggggtttcctgtgaagttgtacgagtttccttgcctnaccctttcttcttaatatattgatacgcagctctcctgcgttttcgaaaaaatctagccggtaattacctattcgtcatcctaggagaagcttcacctaagttgatatttactgaacgatctctagtcattatgtatacatatgtgtgtgtgtgtgtgtgtattacattaactcttttccatgtatgcagcttcactgcttggaaaaaaatggcagacagacaacaaagaagatttcttactgtgctcaacatcggagccctaaccctgataatgntttgataattc

SEQ ID NO: 293048 - DNA, 383 bp, Zea mays
gaatctttgtgtgctcaagttcttcgtgcaaaatatttcccgatgaagaacattccgggggcaagacctaaaggaggaatatcatgttcctatacttggcgagtatcctaaatggattgcaacttttaagaaatgggctgatctggagagttggtaattgcaattctatcaatatttggaaggatccatggaccccacgtggagaaaccaggaagataattactccatccaaggggtcaatccgtcatccaaagagtttatgaactgataaatccatttaagggcttgttcgggtagctctcaatccatatggattgagtgagatttggtggggttaaaatcccagcatggacaaaaggcacacacgtggtccagctttctac

SEQ ID NO: 293049 - DNA, 288 bp, Zea mays
gtttcgcaggtgatgctgaagatgaagagccggcatgtggcggggacgatcacgaagaagaagaaaagtaagcggcgcgcatgatatggcctgagcagcgtgcgccacccgttgccagtacactgacactggctctcgctacgtgcaggcgtggtgatcgacgtgtgcagggacgtgccggcgtgggccgggcggcacctgctggaggacggcgagcaccggcggtacttcggcctgcggaccgcggagcaccgggtgatcgagttcgagtgcggcagccagcgggag

SEQ ID NO: 293050 - DNA, 245 bp, Zea mays
cgctgccagcaccaaggcggcctcttcggctgctcccgccgttacgacgacgaagccggctgcgtccgtgctgccagctgcccggccgcgggaccccaacaagcgggagttccgttcctacggcagcgcggcggctctgttcgttcagatgggcgcgtaccggggcggcccgcgtacgttcgccgtcattgggttggcctccaagccagcacacgtctatgacaccctctacttcaagtgcgagt

SEQ ID NO: 293051 - DNA, 380 bp, Zea mays
gagctcttgtcaaggagcggagtcactgttaaaggtaagcgggcagttgtggttggtcgcagcgacatcgtcgggctacctgtatccctgctccttctgaaggcagatgcgaccgtatctgttgtgcactcgcggacccctgatcctgaaagcattgtacgcgaagctgacatagtcatcgcggcagctgggcaggctatgatggtatgtatgcagctatgccgacagatcctcacagtaaggtgcagcatcctgcaacccgttcaacgctgctcactgagtccgtcgatgtgctcttttcttgctcgtcagatcaaaggtgactggatcaagccaggtgctgcggtcatcgatgtcgggacgaactccgtcgacgaccc

SEQ ID NO: 293052 - DNA, 345 bp, Zea mays
tcgtacccacacatgcacccagagcacgcgcacaggcactacatcacttaggaggtcactgccgccactagggtgcccggcgacagctacctattccacgagcaccacaagaagaagaaggaccacacggacaccgaggaggccagcggctagaagaagcaccaccacctcttcggctgaccgtagtaccatccggcgctttaccgagctaactagctccggcgcacacatttacacacactgtaaattctgtactgcatgcgtgtgtaatttgatggatcacaataatgagtccatctccggaccttggtagctgcatgcttgtgacgagtgagagtgtgagac

SEQ ID NO: 293053 - DNA, 304 bp, Zea mays
tcggactagttctagagatcatatcgcgcccaccggtcaagatatttatctacgatgggtgtagtcggcctaatacagctgcacagctgagactccactacttctaagatgacgactgcttgccagcaccaaatgatgaactctatgataagtggctcctgcaatttatcagcttcatgatcatccacaatcctggtcgactacgacatacatctactagttgaaaaccattagtgtactcatcatgtgtaattttgtgttacgactctgggaaaatcataacgacaacgtttataaaattaaa

SEQ ID NO: 293054 - DNA, 196 bp, Zea mays
ctaatactgacattttgctggtgcgtatggtactttgcttcgtggaacatgaatttcacgtgttctgacggtattacaatgccttatgtgacactcttctatcttttactaaacatccgaatctatccttcgagtatatttaatcgcattaattctatttgaaatgtatttcgcaacaatgtccaatttactcgaa

SEQ ID NO: 293055 - DNA, 466 bp, Zea mays
ttccgtgtcgacccactcgtgcggctaaagtcgcagaacttcttatggagggtgttcattacaccgttgaactaaagggcaataatgtagatcttgcagatgacggtgtagcacatgctgagattattcttgggacagatgatctatgggatgagaatgatccatgggcaaggtttgtgatgaatgctttgaaggcaaaagtgttctaccgaagggatgtccagtatattgtcagggatgggaaagctattataattaatgagttaaccggccgagttgaacccaagagaagatggtctgatggtatccaccaagcagtataagcaaaataaggcctaaaaatccatactcggtaattgtggctcaaatcacatatcagtcattgcttaagctttatcctaaactttctgggatgacaggaactgctaatacagaagaaaaggagttttcaaagatgttcaagatg

SEQ ID NO: 293056 - DNA, 386 bp, Zea mays
gtaaagccatccccattacctgacagctggaagttggctgaaattttcacaactggagttgtcgttggatatagtcatgatggtaccataatgactatatccaaggatcgtgtaaagccatccccattacctgacagctggaagttggctgaaattttcacaactggagttgtccttggtggatatcaggcaatgatgactgtcatcttcttttgggctgcatacaagacaaactttttcccaaaaatatttcatgtggaaagccttgagaagacagctcaagatgatttccaaaagcttgcatctgctgtttacctgcaagttagcaccatcagccaggccctcatcttcgtgacaaggtccctgaactggtcatttgtcgagcg

SEQ ID NO: 293057 - DNA, 355 bp, Zea mays
tcttgctcttcgcaacttgctctatctctcactctccacgggacttcatgtacactttcctaactccagtgtccaacgtcatcatatacacagatgtactcataaccttgctgctcatcactccactattcaagtacaccccgaactctatcctgtactctatcatcatctctgccgatataagcctcatccactactagacggcgatcctcatctggaaagtcgacaatatagactttatctcctgcatgttggcctccttttacgttattttcaactctatcgatataggcctcttgaatactccgtcaatcttgtttcccaaaatactttttcaaataacaaaaaccattac

SEQ ID NO: 293058 - DNA, 253 bp, Zea mays
tgattccaaacaacatatattctccttgccatttgttgtgattttcggtgccaaaaggttactgtttcctggaatcatatattctgcttgccatttgttgtgattttcggtgccaaaaggttactgtttcttgaacaagtactagcttcatattataattacaggaaacaataatgataatatgtatctagtactcgatcatgaaattgaacagctacaatgctacttgtctaatatagaaactccaaaaggt

SEQ ID NO: 293059 - DNA, 228 bp, Zea mays
ctgtccaacacatccagtgcatggcatctgtagctatctgcccgaaggctgccgcgatcgacgataacctcgtgcatgacgtgaaactcgctgctgactagactaggatccccatggttcactagctggtgctggacttcatgaacttccacgagctgtgcaagaacatcaacaccgatgaggccgacggctattctgccggtacccagcctgtcatcctgaacaccg

SEQ ID NO: 293060 - DNA, 247 bp, Zea mays
  unsure (1)..(247): unsure at all n locations
ggccgacggcaccacgatgggggagatcgtgatgcgcgggaacggcgtcatgaaggggtacctgaagaacccggaggcgagcgcggaggcgttcgagaacgggtggttccactcgggcgacctgngcgtgcggcacggcgacgggtacgtcgaggtgagggaccgcgccaaggacatcatcatctncggcggngagaacatcagcagcctggaggtggagaaggcngtgtacctgcacccggcggtg

SEQ ID NO: 293061 - DNA, 302 bp, Zea mays
agaaggaacgccttccgtccgctgaccgtgaaggaactaatgcgcgcgttcaacgatgccagaggtgatagttcgattggagtcatcattcttacagggaagggaaccaaggcgttctgcagtggcggtgaccaggcgttaagagattctgatggatatgtggacttcgatagctttggccgcctcaatgtcttagatctccaggtgcagattcgccgtcttccaaagcctgtcattgctatggttgctggttatgctgttggtggtggacatgttttgcacatggtgtgtgatataacaat

SEQ ID NO: 293062 - DNA, 265 bp, Zea mays
  unsure (1)..(265): unsure at all n locations
gcccattatgctactctgcctagcagggacgtggtccatccacatttccattgagccaaaaatattgtacntgtgttttcatgtttccacacaagaacagaaaggggctaaaatatttttcctttttgtcaggattgttgcttgatcccagaatcaccattctatttggaaggcgaaggcggactttttagatacatagaaaaacgtttgaaggacaatggtcatatggttatccgtgttgcttaaggtgctggaccgaaactta

SEQ ID NO: 293063 - DNA, 430 bp, Zea mays
  unsure (1)..(430): unsure at all n locations
cggggccagcaggtagatccagagctgccggtagttccccgccgccacggccggccccagcgtcctgaccgggttcatggacccgcccgtcgtcggcccggcgacgaggatgttcagcgttacggccgctcccaccgcgatcccggcgagttcacccactgcgcgggtgtcggtggcgacggcggtgacgacgaagaggaggttgaaggagatgatgaactcggtgaagaacgcctgggcggtggagacggtggcgtcgggcacggtgacgccgtcggagaggaacgggtggaagacgccgcgcacgcagcgcagcttccgncgctgacgacgcacactgcccgcnnggcgnaggacatggtccggcctggtaaggcacgccttggtcgtcctcttcttccgccgcgtaacgcacggccacgacgtgtcc

SEQ ID NO: 293064 - DNA, 379 bp, Zea mays
ttcccgggggaaatggaaccctctgaatctttgggctttggttggaatgggcaaatgtttaacacagggggggaagggcacacacacggggagttgggtgcggggttctgggtttgggcctaagtatatgatgatgatcacaatgatactagttgaatgtgtgacgtgagagacgatcgcaacaacgaccttaattttagttctagatgaaaaagtcaactgtggccttgatgacttaagttactatgactataaatgctgctgtgctgggctttgctactatcgtaaatgttctacggcttgctattaactagactgaactcttggtggtggtctgggaatctaccttcggtcttatgataaggtcttgtgtgctgtc

SEQ ID NO: 293065 - DNA, 347 bp, Zea mays
tcaactgaacagcaagcgcacctaccctacccgccgccgccgaaggcgaaggcctagctcccggtccggcgcgatggctgccgcggcccgccgcggccccggggcgctcctcctcgtggcgctcctcctgctggcgctggtcgtctccgggcactgcctggacgcgcaccaccgcgggctgaagcgccgccggcggaagcacgagattcactctccgatcaagacggtggtggtcgtggtgatggagaaccgcagcttcgaccacatcctcggctggctccgccgcacccgccccgacatcgacggcctcacgggccgcgagtccaaccgcctcaacgcctccgacc

SEQ ID NO: 293066 - DNA, 434 bp, Zea mays
tgcttggctctgtctgaatgcaccaaagagtccaatcattgcttcagcctggcttacagttgctggtggattggaatccttcggccactcaggtttcttagtaaatctacaggagattgccccacaatatgctggagtcctacatggaatgtcaaatacagctgggacatttgctgccattctaggaactattggagcagggttttttgttgataggatgggttctttccgtggatttttgatattgacgtcgctcttatacttcagcagtgctcttttctgggacatctttgctactggagagcgtgttgattttgatggcactggctagcaactcagaggaactctgcggttttctgtccttaaaacacataatgttgattcaagacaatgtttttaccggcaaccatcaagaagttatttgcacctgatga

SEQ ID NO: 293067 - DNA, 395 bp, Zea mays
ctcagaaggtttgcaactgagcacaagtttatgtcagcggacgtgatccggaaagcttggcaagcgactgaggagggctttctttctctagtcagcaaggaatggtctttgaagcctcagattgcttcagtgggctcctgctgccttgttggtgtaatctgggctgggactctctatgttgcaaacctgggtgaactaagtgccgttcttggaaaggctggtaaagcaacttgaaaagtcctgggccttccaattgtaattgggcccaaatgcctcctttggggaagttagacaagaactggaatcatcaaatccggccaatcccaattttggggttctaaaacccaatgtttggcaagtgaagggcctaatccaaatcttaagatctattggaa

SEQ ID NO: 293068 - DNA, 353 bp, Zea mays
ctcgactcctctgttaaaaagggttatgctaatgacaagtcaaacataaccctttttgacagaggagtcgaggacattaatacaacacaatgcggcacaaatatatccttctatagaaaaaaacctaatctatagttttcaggcaccatgtcactcatgtctccattcccaaggatggatctaagtaaaatggatcccgcgactctgaccctccttggggcagctggttgtgtaatgctgactatgcatttcactgtgcaattggtgtcacaacatctcttctattggaaaaaccccaaggagcagaaagctagactaattattgtgctaatggcctcactatatattatctc

SEQ ID NO: 293069 - DNA, 394 bp, Zea mays
  unsure (1)..(394): unsure at all n locations
cggacgcgtgggcggacgcgtgggcggacgcgtgggcggacgcgtgggcaaaatctgatctttagatggatcaagttgattttgagcctgcccaacaatggagtgctacaagactggaagctgatgaacatccctcaacagtgaagtctgcaataggggatctctgtaaacaaccgatcctcatcagagctgggggaggaatatacaattacctttatcagctaagatcatcatctgatgaagctggtcaaacaaagtctgagggaagcagtatacttggtaaatttcagataacatggcgtacgaacctgngtgaaccaggccgtttgcagactcagaacattcatagcactgttagtgacattcctgcttttgatttaagtatnctatgttc

SEQ ID NO: 293070 - DNA, 423 bp, Zea mays
agggattctaacaaaggttgccaaactatgaaattgcaaacctagggctctaaagtaggcaaatgatggtccaaagcatctatgagcctgtttgtttcagcttctggcagcttctggccactaaaagctgctacggactgccaaacgctcagcttttcagccagtttctataaaattcgttggggcaaaaaccatctaaaatcaacataaacacataatcggttcagtcgttgtaatagtaggaatccatcactttctagatcctgagccctatgaacaactttatcttcctccacacgtaatcgtaatgatactcagattctccccacagccagattttcaaaaaagctggttagaaaaaagctgaaccaaacaggccctcgtctgccgatgtaagggtgacactgctggaacgagctatgc

SEQ ID NO: 293071 - DNA, 420 bp, Zea mays
  unsure (1)..(420): unsure at all n locations
gctagccacctgctggaatccttcgtcgcgcatgccactgcacggtcatgtctgactcgtctcgtccgtcgtcgctaggctggctggaaaggtggcgctgatcacaggcggcgcgagcggcatcggcagggcaacggcggcggaattcgtccggcacggcgccaaggtcatcctcgcggacgtccaggatgacctgggacgccacgtcgccgcggagctgagcctgccggggggcccggcccggcggccgtccactacacccgctgcgacgtgaccgacgaggcgcaggtcgcggcggcggtggacctggccgtggagctgcacggccgcctcgacgtgatgctgagcaacgccggcatcagcggcagcctggcgccggcccncgtggcggcgctggacctggccgacttcgaccgcgtc

SEQ ID NO: 293072 - DNA, 303 bp, Zea mays
tggtgggcatgttcatattataacatgcaatgatgacttataccagatgataatagtagcatacacagatgtgaaaactattgtatctaatttcaaagcttcctgatgtgcaccatgccatgtcattgctcctgtctatgcttaaacgtcaactacttatcctaaactaatagacttgacaatacacattaatcacttgatattacttcaactcttcatatgacatccacgcaacaacgacattcttcttactcaacaacggacaactaatctacaagctagttgacgcaaacaaacctgagc

SEQ ID NO: 293073 - DNA, 188 bp, Zea mays
  unsure (1)..(188): unsure at all n locations
ccgacgcgtccgtctagcttgtgtgccttacttgctagagctnnncaccattanccttatgctttctaaaactagagcggctcaccaatacgccgtcgtatgcttagtaccgctgcttcgtcggcggcctcgcctgggactcctgtggacctcttcactgaaaatcccttgatcaactttctccttaa

SEQ ID NO: 293074 - DNA, 416 bp, Zea mays
  unsure (1)..(416): unsure at all n locations
ngggcttataattagcatttttaatgaccggtctttcattactattttttattattgaggttagccaatttcaatggcccatctgtggaaatctcaacgaggatctttgatcaggcatggcgcttgcaagctaccttgctctgatgactgccattttcttatgggctatgcacaatactcgatttcttatcggacaaattcgatgatgacgtcgatcatgtacagctatcatgaaatgatctccggcctatacctctaactgagtatcatgagccaggctgtgatcttagtcacctgataccgtaactagaccttcgtggaacgccctggtctggttcttgtcaccgagttcctgcttgataaacttgccgtcagcttgctctatgtctacgccaactggggctatgacaggatca

SEQ ID NO: 293075 - DNA, 344 bp, Zea mays
cacggaccagctgagcaagcccgtctcgcccgagaacattctctactaccacaggatcggcgagtaccagaccgaggagtgcatgtacaacgccgtgcgccgcttccgcaaggtgcgctacgacacgctgcgcctgccgaacaaggtcgtggcgcggtaggccgactgctccgtcaagttcggccagagctagggctcctcctacctcttatacccggacatctacacatacaggaggatctccgtgcaaggcatcatacaaccgtgctcggctgcgcccgacgacactatggccacgcatacagtctgaccttaacaggaagcttgccgccatggtaaatgac

SEQ ID NO: 293076 - DNA, 426 bp, Zea mays
  unsure (1)..(426): unsure at all n locations
tcggagggcagctcttgggttggataccaattacttcaacgagggccaacttgatgacctaaggatcattaaggagaccctacgagtgaaagattaaggattgcaacatttggcttaaggtattcggtcccgaaattcttccattaaaggaattaccggccaacctaccaaaacctgttaaggttgaaaaacttgttgcttttgcacttaatccaatggatgaacagaggcagcttttgtgtttggagaatgagcgactaaaacaagccttgggaagacaaatagaacaatcaatggttaaagcttaaacatcccaaaaggagggtatcagcctgagcaaagagaaggagccattgatgaaggaaagagatgcttgatttcaggaggctcatatgntgcgcattgaactagtaaaagccagggagc

SEQ ID NO: 293077 - DNA, 349 bp, Zea mays
acgcataacgcgttgcacgaaccactggcaagcaagcccgtccgtccaagtcctaggttgggcaaccaccattggcaacgggcctttctttaaccgccttgcaatgggccggcctcttgtccgtgtggtccgtcgtaacctaccgggctcgcgcccagcagcagcccagccacaacgcctccgagtcgtcgcaggacaggtccttgttgtcctacagcagtggctggctgcccgccaaggccacctggtacggcgcgcccaccggcgccggccccgacgacaacggtggtgcgtgcgggttcaagggcaccaaccagtacccgttctcgtccatgacgtcctgtggcaa

SEQ ID NO: 293078 - DNA, 420 bp, Zea mays
  unsure (1)..(420): unsure at all n locations
tcgcagaaactcagagaggagaaacccggaacaagcgccttcagtgatgtccgccaacttggggcacttcgcgggtttcccgggcgtgttccggcttgacttccaccaccccgggcttaaccttgggcttcccggcttcttccgccgccaagcccgccgccgacggaaggcgcgcccacgccgaccacgacaagccgncatccccaaaggcgcgggccgtgggctggccgccggtccgcgcgtaccggcgcaacgcgctgcgcgacgagggcgccaggctcgtgaaggtggccgtggacggcgcgccgtacctgcggaaggtggacctcgcggcgcacgacgggtacgccgncctgctccgcgcgcttcacggcatgttcgccttctgcctcggagccgacggnngcgggcggatcggca

SEQ ID NO: 293079 - DNA, 340 bp, Zea mays
gttctagatcgctgagcggccaaggtcgttaggatctgatccacgacggcaaggaggggcacaacacaaaggctcgcagggcggctaaagagagaaaggcgcgcatacaagagctccggaaacattaccatacccttcgacaacctgactgtactgcatcataactacgcggccgtgggccttcacaccgtggacctagtggccctctcggaggctcacactttcgagcgggtccagtgacagttcgtcacggagcggctgtacaacttcagcggtactaaccggccggaccccactctcaactacggctaccgggcgttcctggcccatatgtgccccc

SEQ ID NO: 293080 - DNA, 258 bp, Zea mays
tcccgtcccgacgcacgcgtccggagccaggacaaggagggcatcccaccttactagcagcgtttgatcttcgctggcaagcaggtttaggatggccgcacccttgcggattacaacatccagaaggagagcaccctacacctggtgctccgtctcaggggtggcatgcatatctttgtgaagacacttactggctagacaatcactcttgaagtggagacctcggataccatttacaaagtcaaggctaatatccag

SEQ ID NO: 293081 - DNA, 409 bp, Zea mays
cacgcagacaacagccatcttggaggtatctaattccaatattgtatgtctcggttgagcttgtgaaggcgttgcaagcacatatcattaactgggatattcatatgtttgatgaggagatcggcaataccactcagaatgaagatggtcaaaatcttgatgttttctttggttgcatccgcattctggactattcctgacagcatttaagtttttattacggttcaacggtcgtccagcgtaatccttttacaaccatgggtggcaagtttgaccatgcagatcgtttgttccaaagcattgagaacgcttacataaatagcttatcaaatacaagtgacgtcaaagagcttattccagaattcttttacatgcccgagtttcttggaaattcaaattcatatcatct

SEQ ID NO: 293082 - DNA, 406 bp, Zea mays
caacgccgcgggcgcggaggcgggcgtcggcgccgccgtcacccggcgcatcatggcggcgctcaagatccccggggacgagtacgccatggtgtgcacggccaacaggaccgcggcgttccgcctcctcgccgagtcctactcgttccagcccggcaagcagctgctccccgtgtacgactacgagagcgaggccgtgggcgccatggccgacagcgcgcgccgccggggcgccgaggtcgcctccgcgaccttcgcctggccgagcatgaggatccacggcgccgacctccgcaagaggctggccaggggccggcgccgcggcggcgggggacgcggcctcttcgtcttaccgctcgcgtcccgcatgacgggcgcccgggacccgtacctgtggatgagcgcg

SEQ ID NO: 293083 - DNA, 427 bp, Zea mays
  unsure (1)..(427): unsure at all n locations
ngctcttctacgtggcggcgttcacgcacgtgctgcacctggccgcgcatgccggggtggggtacaacatggaggcgccgcagacgtacgtggcgtccaacgtggccgggctcgtcagcgtcttggaggtggcggacaagcacgccgaacccgaaaccgctgtcctttgggcctctgactctgtcccgtaccggcttaacaccgagacgcgcccttctccgatgaccaccgcaccgaccgaccggcgtcgctgtacgcggtcaccaagaaggccggtgaggccatcgcgcacgcctacaaccacatctacgggctctccatcaccggcctccgcttcttcaccgtgtacgggccgtggggctcgtcccgacatggcctacttcttcttcgcccgcagcatcatgaccggcgagcccgttacgctgtt

SEQ ID NO: 293084 - DNA, 427 bp, Zea mays
gcacaagggccaggacgtagccgtcaaggtcatccccaaggccaagatgacaacagctgtcggcattgaagatgtgagaagagaagtgagaatattgagttctctgacaggccacagtaatttagtgcagttctacgatgctttcgaggatgaagataacgtgtatatagttatggaattatgtaaaggaggtgaactgctggacaggatattggctagaggtggaaagtactctgaagaggatgcgaaggtcgttatggtacaaattttgagtgttgtatcattttgccatcttcaaggtgttgttcaccgtgatctgaaaccagagaatttccttttctcttcaaaggatgaaaactctcccttgaaggtcatagattttggcttgtctgactttgtgaagccagatgaaagactaaacgacatt

SEQ ID NO: 293085 - DNA, 427 bp, Zea mays
gcaaccccgtcgtcttccgccatgatccggttcatcctgctgcagaaccggcaggggaggacacggctggccaagtactatgtcgctctcgaggactccgagaagcacaaggttgagtacgaggtgcatcggctcgtggtcaaccgggaccccaagttcaccaacttcgtcgagttccgtacgcacaaagttatctataggagatatgcaggactttttttctctatatgtgtggacatcaccgacaacgaattggcatacttggaatgtatccatctgtttgtcgagatattggaccatttcttcagcaatgtgtgtgaacttgatttagtatttaatttccacaaggtttacttgatattggatgagttcattcttgctggagagcttcaagaaacaagcaaaagggcaattatagagaggatgg

SEQ ID NO: 293086 - DNA, 425 bp, Zea mays
ggggaggtctcgcggcttcggcttcgttaccttctcctccgagaactccatgctcgacgctatcgagaacatgaacggcaaggagctcgacggccgtaacatcaccgttaaccaggcccagtcccgtggcggtggcggtggcggcggtggctacggcggcggtcgcggcggcggcggctatggtggcgggcgccgtgacggcggttatggcggcggtggcggctacggcggtcggcgcgagggtggtggcggcggctacggaggcggtggcggctacggcggtcggcgcgagggtggtggtggcggctacggcggcggcggcggcggctggagggactgatgtgtgggcccatcctggcttcggccgagttatcttatctatctatagtatcgtgttaccgttcgcttctgtcaccgtgttagtg

SEQ ID NO: 293087 - DNA, 422 bp, Zea mays
gttgtaagggtattgacacagattctattatattgagttggctgcattcttttgctaaggaggtttataaatcagggtcgaagtcatattacaccacaatgcgtcttggttttatcatgactcactgccctgtaaatccaaaatttgatttccatcgatacatggttagggtcttagatgcggattctaataaagtctacggcatcagctgctacttgtgggtcttcttagcgatatctctcgctcatgactgattatgcttgtcacacatacttttggattgctcaccttccccttattcttctgatagccattggcactaagcttgcgcatgtcatagctcacctagcccatgatgtatctgagaaccacactgctgtcgacagcgaattgatcgtaaaaccatcagatgaacactttct

SEQ ID NO: 293088 - DNA, 425 bp, Zea mays
caaaaaaaaaaacaaaaaaaaaaaaaaaaaaacaaaaaaaaaaaaaaaaactaaatggcgagctcaaacctacatgcacatataccatggacctcattccgcggagtctctcactcactgccatacgcgatcatcaatcgccatcggcaccgctcgacctctcttgtaccttcatcgacacgcaacgcctaagataatccacagaagcgtcaaggccaccaacgtgctgctggattcatacttctcggcgcacgctggcgatttcggtctgacaaggcttattcccgacgaccgaacggaccacgcaaagatagccagcagctatagccagctaagctaccttgctcccgagtacgcctacatgttctgcaaaccaactgcatgctgcgatgtatacagcttcaggatcatactgctggagcttg

SEQ ID NO: 293089 - DNA, 431 bp, Zea mays
cgcaaactttgtcgacgaggttggggcggaagtcgaggaggttctcgaggacagcgaggttgttgttgaacacgtcacgcgataccgccgaggcgtggtcagcgtcgcggagctcccggagcatcagcacgtgtgcgcagaacccgagcgagagcgcgccggtggccgtgcaggcgccgagcacgctctgcacggtgtaggcgtcgggcctgtcgcgcttgagtgcgtcgaggagcaccagcttccggaattgctttgtcgcttccatctggaccaccgtgtagaggctccatttccagagtactgcacggtcgggctccgattcggaaccagagtcggtaacggagccgacgcggaaagagtcggtggcggtgcagtcagacgagagcgcgatgatgcgctcgtcgtcgtcgcagggcgaggacgggacg

SEQ ID NO: 293090 - DNA, 432 bp, Zea mays
gagggatgatgctattaaagatcttaatagagctatggagattggggatgagaatgcggttgaaaaatttagtaaaaggactgtcaaggttacaggaaggcataatgatgactgcaagaggctgttaaggttgatgggtgtccctgtagttgaggcaccaggtgaggctgaagcacagtgtgcagcactttgtgaaaatcaccaggtttatgctgtagcttcagaggacatggacacactgacttttggtgcccgaaggtttcttcgtcacttaactgaccttggttataagaaatctcctgtgacagaatttgatgtgtcaaaggttttggaagaacttggactcacgatggatcagttcattgacttgtgtatccttagtggatgtgattactgtgagaatattagaggtatcggaggacaaagagcctt

SEQ ID NO: 293091 - DNA, 413 bp, Zea mays
  unsure (1)..(413): unsure at all n locations
ggtcttcggtacaagcgagcccgggcagcgtgtcgtgccgtacgtgctgtggaggcaaccggggtgcgcgaccccacaccggctagctacgacaacatgctgacgcccagatcgacgccgtgtacgccgncatgaaggccatggggcacacggacgtgggcgtccggatctcggagaccggngtggcgtccaggggcgacgaggacgagaccggggccacggtgcagaacgccgccgcgtacaacggcaacctcatgcacagggtcgccatgagccacgggacaccgctcaagcccaaagtgcgcgtgtacatgtacacgtgctcgctctttaaagcgagcacgtgaacccagcgcacacgtgagagcgcatctacggtctgctctaccacaacggctcgccggtgtacgctc

SEQ ID NO: 293092 - DNA, 460 bp, Zea mays
  unsure (1)..(460): unsure at all n locations
attttatcctctgttgtttcaattaaaaattcttttggtatttcaatgagtgttgagtccgaggaaaaattatcgttgttgttatataccccatttccaatggcaaggatccaattattgaatgataacaagtcttcatactcttcatttgatatattactttgtcgtagtcgcatgttttcagaaaggaatataatgttgacatggttccaaaggtatgaagcaatgatacaagcatttattatttgttcttttgttccattttctataacaggtaatatttgttttggatcgccacctagcacaaccactttaccaccaaaaggaatgtcaagagctttttcatatgtttctcctactatatctctaagggatctatcaaatgcttcaaagcattngttatttgtcattagagcttcatcccatataataagatctgtgtcaataagaagttttgcaa

SEQ ID NO: 293093 - DNA, 458 bp, Zea mays
  unsure (1)..(458): unsure at all n locations
cccacgcgtccgattcatgtcagcattaccaatttagcatgttttctctgtttcctgtggtgagacattctctaattgtacacagaaattacggctgaggatagaggatcctcctcggagaaagcacatggtgtatctgggaggtgcagtgcttgctgggatcatgaaggtaattcttgtatatgcgaatggcgtttacactgtgatggattgatagcaatatacttccccgcgtattgtttggaacgtgcaggatgcaccggagttctggataaccaggcaggagtaccaggaagaaggtgtagcgtgcctaaggaagtgcgggcagtcataagtcttgccacatatcatccacagaagaaatggaggttgcatgtgtaaagaagagctctgntgttggtgttgtgtattgtagtgagctatagctgtcctgaacatgcttggggataaaccatgtt

SEQ ID NO: 293094 - DNA, 356 bp, Zea mays
acccttctctttattaacatcaccaacgactacccttacataaggagttttaccttctatgtattgccatcaccaaaagtctcatacactgttgtgtaaccttacaatgctacactttctgttcaccaactcgttcataacgcttatcaatgtattgtgcttgacaactaatctctttatgacatatgctttctcactctaaagctcgccacccctacctttggctacctgaaccatctcatctctgccaccatgagttgctttacatgctaccttatgttccctgttcatctcaactcttaccttctcaagcttgccataaacctgatccttttccctctccttcacttcttcat

SEQ ID NO: 293095 - DNA, 454 bp, Zea mays
cccacgcgtccgcacagacaagtggtttccaaagccaagtgtgtgtactagcaaccagctagctggggcggcagcaggcagccatcatgtcggaggagaagcaccaccacttcttcaaccaccacaagaaggacgaggagcagcccgccggcgagtacgggtactccgagaccgaggtggtcaccgccaccggcgagggcgagtacgagaggtacaagaaggaggagaaggagcacaagcacaagcagcacctcggcgaggccggcgccatcgccgccggcgccttcgcactctacgagaagcacgaggcgaagaaggaccccgagcacgcgcacaggcacaagatcacggaagaggtcgctgccgcggcggccgtcggcgccggcggctacgtattccacgagcaccacgagaagaagaagaccacaaggacgccgaggaggccagcggcgag

SEQ ID NO: 293096 - DNA, 374 bp, Zea mays
caggcgtcttcgtactcgcctatctcctcgacccaaagcgttcccccttctcccgtcgtctctcatttctgaccaccggcgccgctaccccctttcgacaacaccatgagggagtgcatctcgatccacatcggccaggccggtatccaggtcggaaacgcgtgctgggagctgtactgcctcgagcatggcattcaggctgatggtcagatgcccggtgacaagaccattgggggaggtgataatactctcaacaccttctttagagagactctcgctctgaaacacgtgccccgtgctgtgtttgttgacctttagcccactgtcatcgatgaggtgaggactggcacctatcgccagctctctcatattct

SEQ ID NO: 293097 - DNA, 166 bp, Zea mays
cctcacataattaccttctcctaccttactagcaatccttaacccttcaagactccaccaccgatcttttctactactgctccttccacatgctctcattcgacgagctcaccctgcaacttgatacctcccatctacagttcctgatggagatcgccaaccccct

SEQ ID NO: 293098 - DNA, 409 bp, Zea mays
gtcctgcacctactactactatcttgtcaacgcaggtgttacgagatacgcggggtaatgactcggacgcaatctgccgtatcggtcgccgagtacccctgcttgctgctgctgccagcctgggccacgacctaccactccgtcatcacctcttcaaagctagctccgacatctgcactgcctgtcctactcccatcggacgacgtacaggccctgcgccttctgctgtatcaccttcaggaacctcaagatcatccgcaacaccattcgacgacaggaacgccaaactgcaactgcctcaagaacatcaccaggaacgtcagccatctcaacgccggcaacgccggcagcatccacttcaagtgcggcgtcagcatgcgatacaccatcatcaccttcacccactgct

SEQ ID NO: 293099 - DNA, 439 bp, Zea mays
ctgtccttccgcgggactagtgctttttctggaagaattccgccgaatggcggcgaagaatccaatgcgtgaaggcccgccgaaccttggccggcggggcaaacctacacaccaaggccaagtggtttgcgcacataggaaccttgcgagggcccagctgttcccagtggagcataaactggtgtatatgaagctctggagtagaggaatgggggctgtgactatttggaaaagggtgtctccaaggctgagaacagtgtgaattctgatattggacctgctctgattgacaaggaccctacagcacagactgagattgataacttcatggttcaacaacttgatggcaccaaatatgagtggatatggtgcacgcaaaaccttggtgctaatgcgattctgtctgtgacattagctgttcgcaaagctggggctagca

SEQ ID NO: 293100 - DNA, 392 bp, Zea mays
agccaccatcgatctgcaagtctcgctacgtagcagtgcaataaaaaaaagcagccggggtggcgggcagcaccatgggcctctcctccacggccttcgccggcaaggccgtgaacgtgccgtcgtcgtccgccttcggcgaggcccgcgtgacgatgcgcaagacggcggcgaaggccaagccggcggcggcgtccgggagcccgtggtacggccccgaccgcgtgctgtacctgggcccactgtccggcgagccgccgagctacctgacgggcgagttcccgggcgactacggctgggacaccgcggggctgtcggcggacccggagacgttcgccaagaaccgggagctggaggtgatccactcccgctgggccatgctgggcgcgctc

SEQ ID NO: 293101 - DNA, 417 bp, Zea mays
gtcggccatggggaggtacccagagaaggctctcaacgtccttaggagtgttagcctggggatcgaaaggtggtggagagaggagaagcgccaagaggcactggagcttcaaggtgtctcgtcttccttttctgacaagatatcagaggaaatatgcaattcagcagctaaaatggccaacaacttaggagtcgacgccgttttcgtttacacgaaggacggatacatggcctccctgctctcacgatgccgccccgactgcccgatcttcgccttcacgtcttcgacgtctgtcaggagacggctgaacctccagtggggcctcatcccgttccggctcagcgagtccgacgacatggagagcaacctcaaccgcaccttcttcctgctgaaggccaggggcatggtgcagtctgg

SEQ ID NO: 293102 - DNA, 358 bp, Zea mays
tcccacccgttgatggccttgattgtcaccaccttcgatcccttccagaagtctcaagtacaccgccaaccgtgcccatagcccaccactcctccagaatcctcggcaacatcatcaacggcagaacgatcccgctcatacatgtatagccggcctaccgcaacaagaagttcgagacactttcatacctgccaccgctttccaccgacgacctgctgaatcatagtcactacctgctgctcaacgactggatacaccttactctaactaaaacaggtcggattcgtgtaccgtgaaaactccacctacccttgctactacaaccgccagtactggaccatgtctgaatctgcccata

SEQ ID NO: 293103 - DNA, 400 bp, Zea mays
  unsure (1)..(400): unsure at all n locations
gagctcgcacgcttggggcccggcggccgtgccgctggaggcacctggcgcggcggtgctggacgcgaacgacttccgcaagtaccgcggcgtgcggcagcggccctggggcaagttcgcggcggagatccgcgaccccaagaagcgggggtcccgcgtgtggctcggcacctacgacaccgccatcgaggccgcgcgcgcctacgaccgcgccgcgttccgcatgcgcggcgccaaggccatcctgaacttccccaacgaggtgggcacccgcggcgcggacttcctcgcgccgccgccgccgccgccgcatgccgcggcaacgtcccagaacaaacggaagctgatgcacgacgccgaggccacggncacggccggggccggagccggagccgagcca

SEQ ID NO: 293104 - DNA, 337 bp, Zea mays
atcatctcaagcagaagtgctgacctgtagagtgaagaaggaatatcagcttcaatggccgcactttgttggaatgcagtagcttacaatagtgacgatgtcagcgaggctggagtaaagatatttcagcgaccagtctcaaatgaggtatatgatctgagagcaaaaaaggatcctccattttgcaaggaagagcagaacaaagctagtgcatggtatactaatatcaaacattgcctgcacaaagcacctgttggtatcgaagaaagaggcagtgactggcctgaggagtggcccaagaggctcgagagtttccctgagtggcttgaggaaacag

SEQ ID NO: 293105 - DNA, 206 bp, Zea mays
ccctgacctcccccctccccctaccagaaaagacccctcgaaaaacggccgagctgcggcatggctgagatcgagggtggagctactgcggacgacgctacagctgctgcggaagcgacgacgacccctgaggtggcagtgcccgaagccggagccgctactgaggctaaagccccgcacaagcttcaccgtcaacggaccttctg

SEQ ID NO: 293106 - DNA, 314 bp, Zea mays
tccggattcccgggcagatgtatgggcatgacacgcctccgatgtatgtctgcatgtatgcagcattgatgccgattgccaatggccggtgtttgatgaggtcagcctcaagccttgcgcctcactggcaccacaagctcctctgtggcgcgcggagtcggatgccgcggggggtggtgccggcgccggcgatgtcatgggcctcctcctccgggagcgcatagtcttcctcggcaacgagatcgaggacttcctcgcggacgccgtcgtaagccagctccttctacttgacgccatcgacccggactctgaca

SEQ ID NO: 293107 - DNA, 370 bp, Zea mays
gcacagtactaccagctgatcctccttgtctatgaaggttacaagaacatcgtggaaagctgacaatataacgcgaccgctctgaatcaaggtctggacaagacggacaagttcaacatcgagtccaaagacaacggcgtgccgctgctgggcttgtctctgaaggacagaagccggcacagcgagttcgagatcttagacttgctgcgccgattcggatggatcgtgccaggctacacgaagccccccgacgcgcatcacgtgaccgtgctccgactattcatccgcgaggacttcagccgcacactcacggagcgcctggtgctagacatcgagaaggtgctgcacgagctagacgcgctgcacgccc

SEQ ID NO: 293108 - DNA, 326 bp, Zea mays
taccctaaaaatcttaatctagcattgctttgagatctaatggtataacatgtagatatactaggacacccttgaatactaacatatatatgcacccatattacaacacactaacatgctctctgcatacttaccttaacccaaagacatacatacagatatattagtcaaattatattcacaactttccatgttcctaccatgtacgttgcaattcaagcatgtctttcactctatgccattggacttactactattattgttctcgactctggtgatagtgtgagtcacactgtacccatttattaaagatattccctttccca

SEQ ID NO: 293109 - DNA, 240 bp, Zea mays
aaaaatcttcaagatactattgctatcttgggtatggatgatctcaatgaagatgacaagttgaccagacgctcgtgctagaaagattcatcgtttcctgatccaaccttttcatgtcgcttaagatttcacaggtgctccagggaaatatgttgagctgaaagaaagtgtcaagagttttcaaggtgttttggatggcaagtatgatgacctccctgatcagtcattctacatggttgg

SEQ ID NO: 293110 - DNA, 323 bp, Zea mays
ctcgggcgtgtgcaggcagccatcatgctcggatggagaagcggccaccgggttcttgaaccaccacagcagggacgaggagcagcccgtcggcgagtacgggtactccgagaccgaggtggtcaccgccaccggcgagggcgagtacgagaggtacaagaaggaggagaaggagcacaagcacaagcagcacctcggcgaggccggcgccatcgccgccggcgccttcgcactctacgagaagtgaggtgcgcaccagatccggcatgttcctagagacgaagcatgatgaagtagtaacgatgatagaggagaggatatct

SEQ ID NO: 293111 - DNA, 365 bp, Zea mays
tccaacgcactcgaaggcagcgaagcccgagccttcccttacgttcaatcgatcacccgctccgatcctctagcgtacgtaacatcgcgatggcttgcctcaccgtgttcacgaagaccgcgacgcccgacggcaacaagcagcgcgagtactcggacgtcatcaccgtcacagacgcctgcttctctcactccaagcagatgctgcacgcgctgggcttcccgggcggcgtgatgccgctacggtggctggaggactgcaactggatgcgcgagaccgcattcgcgtggatgcggcataaggccctctacgagcactacttccgctgcacgggcacgcgggtgcgctacgactccgaagtcacc

SEQ ID NO: 293112 - DNA, 239 bp, Zea mays
aggaagctgaatcgacctattaagcggcgaatgtatccatttttgctgcaacatggggaatgctacgctggcatagatgggtacctgttaacttctgcttggcgatttgctagagtgatggtctagatatatagcgctactcgaatgtatgtggaatgctaccgtataacgcacatttgggtgcaatgactgttgcattgctgcatgaatgatatcgctggtacataatacagaaatac

SEQ ID NO: 293113 - DNA, 422 bp, Zea mays
  unsure (1)..(422): unsure at all n locations
cgcgtcgcccccgccgcctgccggggcgggaggaggtcctcgccggccgcgcgggaggccgccggggtccaagaacaagccgaagccgcccgtggtggtgacgcgggagagccccaacgcgatgcgctcccacgtgctggagatcgccagcggcgccgacatcgtcgacgccatcgcgggcttctcccgccgccgccagcgcggagtctccgtcctcagcggcacgggcgcggtcaccaacgtcacgctgcgggagcccgcgggggccggcggggcagcggccgtcgcgctgcgcggccggttcgagatactgtccatgtccggggctttcctcccggcgccggcgccgccgggggccacggngctcaccgtgtacctggcgngggggcaggggcaggtggtgggcgggagcgtcatggggg

SEQ ID NO: 293114 - DNA, 147 bp, Zea mays
aatctacccagttaactttggaaatgagatgttctagttgatgcacagggttcaaagtagtagatctgagaagggcacttctcaaaatctacacaccaaaaagatttaaacaaatcttccacggaatggtgagagaacgaagaacac

SEQ ID NO: 293115 - DNA, 312 bp, Zea mays
gtacatgtcttgatgttagtaattagtagagtatctgaaactgcccattcccgatgtcataacggaaaaaatccttatatgaatatgactgtaagctgaaatcgaataacaaaagtagctcaaatatacaaatggtgacctgtattttcatgttctgctaggtatgacgaattggctagcaagagcaatgttgaatacattgctggaggagccactcaaaactctatcagggttgcccaatggatgcttcaaattcctggtgcatcaagttacataggttgcatcgggaaggataagtttggtgaggagatg

SEQ ID NO: 293116 - DNA, 276 bp, Zea mays
cccaatccaaaccagacaagcaaggaatcccccgatggctcatcgcgttctcctcctcctctctctcgcgtcggccgccgaggttgccgccgccgtcgacgcggaggacccgctgatccggcaggtggttcccggtggagatgacaacgatctggagctgaacgcggagtcccacttcctgagcttcgtgcagcggttcggcaagtcctacaaggacgccgacgagcacgcgtaccggctgtccgttttcaaggccaacctgcgccgcgcgcgccg

SEQ ID NO: 293117 - DNA, 339 bp, Zea mays
cgaactactaaagcatgttttgcactgtctttatatagtgatgccatcaatgggccctgcatgttaggttatggttcagttttggacaggaacagttagtgcattctttgatggaacagcaggctaggtatgttagggaaaaaaatttggtgcagcactgctgcaaaccagagtggttgcagcccctcacaaaaagaaggatagaccccacccgtattttttccgtatgttagttacgcacgcggtagaccctagtgttgtttcatgcatggatcagtcttatggattcttgtattatatctgttcccccattaaccagtgctgtcaaagttttgggct

SEQ ID NO: 293118 - DNA, 301 bp, Zea mays
  unsure (1)..(301): unsure at all n locations
atcgtgtgcacatgcacaaataggtgataaaggcagatgatgttgttggaccagaagtgganaagttggtgtctgcattgccaaacggtaatgttgtgctccttgaaaatgttagattctacaaggaggaagagaagaatgacccagagtttgcaaagaagcttgcctctttagcagatctttatgtgaacgatgcctttggaactgctcacagagcacatgcgtcaactgagggagttaccaagttcttgaagccctcagtcgcagggttccttttgcaaaaggagcttgattaccttgt

SEQ ID NO: 293119 - DNA, 392 bp, Zea mays
atgcgtagcaaattttctgcttgtatctatcatcgaaactgttcattcagcaactaaagcggttcaccgggatttattaagttagatgaagacattttatcccctctagcagtaaagaatgaactgtacacataccaaacacttgatttctgggaacatatcacaaccccagagatgtcttaatgaactctggagtatatctctctcagtattcccatacctattctcatcttttagactcatgacatggcataaaaactagcactatttgtggcgatgtctatatgcattcatttgacaaagtgcatcctacttcaaagaatggtcccaatgtctctatatcagccaatgcacgctttgtatcttgtgccaggcttattaaattgcataat

SEQ ID NO: 293120 - DNA, 426 bp, Zea mays
cccacgcgtccgctcccataagaaaaatcgccaaatacgccattcatcttcttggcccgggtttcagaacgtgcggcagtttagccaggatggtggcgatcgagaaccagaaccagagccaggccgcggtggcggtggcggcggaggcggtgccggcgccggcgccgcggatccccaaggaggcgcggcgcctgctgcacgagctggcggcggcgtgggcggacgtggccgactgccgcgcgctggaggtcgtgccgctcaagggggccatgaccaacgaggtctaccaggcgcgctggctcactgcaggccctgccggccaggaggaggagcccagggcggagagggaggtgaggaaggtgctcgtgcggatttacggcgacggcgtcgacctcttcttcgaccgcgaggacgaggtgcgcacct

SEQ ID NO: 293121 - DNA, 436 bp, Zea mays
gcgcgctcgtcagcaagccggcgaccagcactagggacgtattcggcgatgggcgcgtgaccaggcgcaagactggtggcaagcccaagccagcggggtccggcagcccctcgtacggagccgaccgaatcctgtacctgtgcccgatgtgcggtcagccaccaagctacctgaccagcgagttccccaggggactacggctgggacaccaaggcgctgtccgccgacccggagactttcgccaagaaccgcgagattgaggccagccactgcctgtggaccatgctaagcgcgctcggttgcatgacaccggagctgctcgtactgaacgtcgtcatgatactctaggccaattggatcaaggccgggtgacagatctttagcgaaagccgacttgactacctaggtgatcctagcctgatccacgcgcatagca

SEQ ID NO: 293122 - DNA, 425 bp, Zea mays
tctccagatcaaccatggttacataacattattaaggctccacatgtcaattagctgtagaactgtggacgccagacttcaacaattctctctgatgaacaagtccaataagcatgcacttagggtcatagctgagcatctttcactagaatacgctgctgacatataggatatatttgccaagatggatcttaacaaggatcaaatgctcaatttctatgagctgaaccttggtctgcataaatctggtcaccaaatacctcatgcacatgttcaaatactaatggaagctgctgatgctgatggaaaccggtccttggattatggagaatttggtacactatctgtgcatctaacaaagattgtaaatgatcagcatcttcataaagcatatgcatactttgaccggaaccagagtgtgtata

SEQ ID NO: 293123 - DNA, 291 bp, Zea mays
gttaagaactttacttgcctgttcaagctttacgggcctatcacgctcatggaggagctgttgaacctagtggtcatctgaggccaccattgcaaccattccaaggacaaagattatctaaccgagttcaaaaagatgtttgacctcatcaaacaatacaacctgaacgggcacattcgctggatctccgaccagatcaatcccgtccgctactgcaagctgtaccgctacatctgcgacaccaacggcgccttcatgcaacctgctttctacgacgctttcaggctgacc

SEQ ID NO: 293124 - DNA, 428 bp, Zea mays
ctggtctttgagtcgtcaacctatgggaaagtccttgtgcttgatggtattgttcaattgactggtaatgaggaatgtgcgtaccacgaaatgattactcacctcccactctgtgcaattccatcccctaaaaaggttgtggttattgatggtggtgatggaggtgtacttctagagatttccagacacagttcaatggactctattgacatatgtgtaattgatcagctggatattgatatctgcaaggaatacttcccacattaggctgatggatttgaagatgctcgtggtcaacttcatgttggtgactctgtggagttcttgataaatgcttctgaagggacatatgatgctatcaatgctgatttatctgacccaataggtcctgctcatgaacatgtggagaatcctctttttgagaccat

SEQ ID NO: 293125 - DNA, 344 bp, Zea mays
cgcagagaatccccaagcaaacatacagggtctaaggagaggacaggagaggagaggagatgtggggtctttgacaccatggctaccgtgcaaatgttctgggtcgtgatgttataaaacgtgacgaggttcgcaacgacactggtagaggctggctacaactactagatcgtgcccatgaacttcggcaccgacaagcacaacatcaccctgcatctagatctcgacccggatcgtaatgttccagatatgcatgattatgactgggccctttttgaatcactatcaatttgaacggacgctgattgcataaacaagcccaagcttattatggaacgaaacct

SEQ ID NO: 293126 - DNA, 234 bp, Zea mays
tgataccaagagtgcctatccatatccactgaactatctataagtacacatatcacaaacaccagaaatgctaaagcatttgcactcttatcttacgaaggcattgccaaaagaattaagaggataacagccctgactgctggatgtgccacccaagctatggaattggcgtcatctatcgattctcatatcaataaaacatctcaattggagggaactttgattgaaaagaaa

SEQ ID NO: 293127 - DNA, 399 bp, Zea mays
gaccacgcgtacgctaggacaccccatattctggccggacgattctccgcgagacggcggcacgctcaagctggccgttcaactaacacaggaggacccagacaagccaccaactgatcgacgaccatctaacacgcatgatacaattatctattcttatgcaagcaacaggctgcataacctacagaaccagtgcagctctataaataagaccgctggactttgaacacttatccatgcactaccatattcaccaaacccaaacctaccagcgaccacgaccgctacaagacagtcatacgtgcacatacaggatcaccagccaagcgctctacctatccctgatcagcgacccacacccgacgactacataccgcagctcagccttcaagacaggca

SEQ ID NO: 293128 - DNA, 428 bp, Zea mays
gatgaatttgcctggagtttaccttcggtgggctcaggtttagatgaacctgagtggtgcaaactgaagtatattggtgggactgacatcagcttcttgaaggaagacccatccacagcatgtgccgcggtggtagtcctcaatgtcgatactttagaagttgtccatgaagagttcaatgttgtccgactgcaagtgccatatattcctggttttcttgcattcagagaggctccagttcttcttggactcttggaaaaggtgaagatcaatgcacctcatttctgccctcagttgctcatggttgatggaaatggattgctccatccgcgaggttttggtttagcttgtcatctcggcgttcttgcagacattcctactgttggagttggaaaaaatctacatcacgtagatggccttaaccaatc

SEQ ID NO: 293129 - DNA, 276 bp, Zea mays
catattcctgccgaatgattctctttgaaactctgtcacgttcactcttgctgggttttatacacaatatgaccccaactctccatcacctgctctactagtcactacaatgtactatccacatatatatgctcatacatacatctatccgcatatcctacacatccagtggagtcctatatatgatgttgctacacttctaacttctatccacaccctgctaagcgatccaaacccaaactccacttcaaactcataatcagccagactgttcat

SEQ ID NO: 293130 - DNA, 426 bp, Zea mays
  unsure (1)..(426): unsure at all n locations
aggaaattntcttgggcgttcttcggcttcattgtcacaggttcgaattcgtcaaccggttatggcaattggccaaggaaggaaaagccaagaaaaaattccaatcttcgggaagacccttaccgggaagaccattacccttgaagtggaaagcaacgacaccgtcgacaacgttaagggccaaattcaagaccagggaaggattcccccagattaaccgaggctggatatcgcttgccaagcagctggaggatggacgcacgctggctgactacaacatccaaaaggagtcaactcttcatttggtcctcaggcttaggggtggaaccatgatcaaggtcaaaactctcactgggaaagagatcgagatcgacattgaacccactgactcgattgacaggatcaaggagcgtgttgaagagaaag

SEQ ID NO: 293131 - DNA, 301 bp, Zea mays
gtcgggccttctgtcacatcaatagaagctcttctctagtcagtccctgaaacgagctacggggcgctgtcatacacgccccggggcgagatctgcttgatgggtcataccatgttctccgagtactacaagcgccctaccctaactgaagaagtgttttgagatatctggcttcatacaggtgatctccgggagtggcaatccaatggcacgatgaagatcatggactgatagactaacatcttcaagctgtcccagggagagtatgtcgcaggtgacgtactggcatgagcataccttc

SEQ ID NO: 293132 - DNA, 374 bp, Zea mays
acccacgcgtccgagcggttgcaggatcgaccctccatcatctgcgtgttcttgcacctaatctgccacatgcacgtgtatgtgagcgagttgagggtgggcaagcacagcctgccactgtacgagctgcccacccacgccacccgttgctactacctgggcatgttcctcagaggcgcctaccacgatgccctcagccggctgcacaacctattcggactgcccagcatggtgcgcgtttcccagtgcgactgaccccactgcttttccgtgacgctcgccgacaaaatcccgtcctgcgccaacatgctccaagcgattcagtacgagcccctggtcatgtactacgttctaaaacactatacctactgaaa

SEQ ID NO: 293133 - DNA, 319 bp, Zea mays
accatgccgacttgatcatcaccagtaccttccaagagatcgccggaaacaagtacaccgtcaggcggtggtatttacacatggggttgacgatgcctggcctgtaccgacttgcccactgcattgatgtcttccaccacaagctcaacatcgtgtctcctctcgcgcacctatccatctacttaccgtacacctactcgcacaatacactgacctgccttcacccggagattgaggagctcctgtacacacaatccgctaacactgagcacaacttcatacttaacgactggatcaaccccatcatattctacatggc

SEQ ID NO: 293134 - DNA, 399 bp, Zea mays
agcatacagacgaataatctcttcttcacctcactaacaccagctagcaactctttctctggtgcaataatggccgctcgctcctcctcctcccagccgcagctggtcgcggcggcggcggtcctggcagcggcgctgctgctgctggcggcgggggccgggacggcgtcggcggcggtgagctgcggcgaggtgacgtcgtcggtggcgccgtgcctcgggtacgcgatgggcagcgcggcgtcgccctccgcggcgtgctgcagcggggtgcgctcgctcaacagccgcgcgtcgtcggcggcggaccggcaggccacctgcaactgcctcaagagcatgaacggccggctcggcggcggcgtcagcatggccaacgccgccaacatccccggcaag

SEQ ID NO: 293135 - DNA, 338 bp, Zea mays
gaattcccggatcctccgaagcgctcaacccgtgcatacttcgttcatctagattcctctggcaacgctgacacgctcactcgtgcgtggcactctacacatgattacccacacaatccaccaactgttctatatgtctctaacatgattcatccaaatatatatacttttggaagcatcttcttagatatactacacaaccagtggagtcctatatatgacgtcgctgcaattttaactagtatccagtacctgctgagcgatccaaacccaaactcctctgcaaactcataaacagcacgactgttcatctagaacaagcacgagtacaaccgcaa

SEQ ID NO: 293136 - DNA, 447 bp, Zea mays
gttattgtcattaaaagtggctgggatgaatataacatcaccgccatttcttacatagcaatgattgatacacacatgcgtggaagaaatggcggtgatgttattgtcattaaaagtggctgggatgaatatggcatttcatttgctcaaccaagctccaatatcagcataagcgacatcacaggggagacaagaggtggttcagggattgcctttggaagtgagatgtcaggtggcatatcggaagtacgggctgtgggcctgcgcattgtcaactcccttcacgggatcagaatcaagacggccccggggcgcggagggtacgtggagaatgtgtacatagcagatgtgagcatggacaatgtttcgatggccatcaggatcactggaaactacggtgaacatcctgatgacaaatatgacagcactgctctccctgtgataagc

SEQ ID NO: 293137 - DNA, 422 bp, Zea mays
gcgtccggtgcaggggcaggggcagggctctagcgtctccaagattggactatggggtggacccgctagatcttcacaggacatcacgggagagcacacaccgcatcgtcttcacagcgtcaccgttcgtgctggcgttgccgtcaactccatctagtacacctatactgacagcgctgggcataggcgctccgctgggcgttggggtggacttggtggcaatgttcgaacgatcgaccttggcaacgcccatgatgtcatggaagtctttcgaacatacggcgcatttgtacgtgccactactctaacctggatcatgctcgttacctgcagcttactctgtggtcccttctgcgactataacctgacgcgcatattcataaccgggcccatagacatcatcatcttgggattctatgctc

SEQ ID NO: 293138 - DNA, 321 bp, Zea mays
  unsure (1)..(321): unsure at all n locations
ttggtccggaagtctcgagccacgcgtccgcgacctgctcgccaagaccggggtctccccgcgggacatcgacatcctggtggtgaactgcggcctgttcgcgccgacgccgtccttcgcggacatggtcacgcaccggtacaggctccgcggggacgtgcgcaacgtgcacctcgccgggatggggtgcagcgcggggctcgtctccgtggagctggcccggaacctgctgcangtggcgccgcggggcacgcgcgctctggtggtgtccacggagaccatcacccccaattactacatgggcgaggagcgcgcgatgct

SEQ ID NO: 293139 - DNA, 468 bp, Zea mays
agcatagtcgactatatcttttctgcttccagacattgtccacacgagctagtgcactggtgtcggtcgcaaccaaatgaaggacgtactgagccatggcatccaagggcgtcctcttcttggctctcaacctcctgttcttcacagtggccaacgcctgcggcagctgcccgaccccaacgtcgccggtcgtgccaccgccgccgacgtctgcctctgcacggtcatcaagggcaacgtcctcggcgtcgtcttcgatgtccctatcaagttcaatgccctcgtcaactactgtggcaagtgcgtgcccaagggctacatgtgtgcgtaagctccgcgcggttacacgctcgtagccgttcgcgtgcgtaattaagcatgcacctgcatggcacacatgtattgtgcgcctgctgatctctcctgtctcatttgtgcaccttaagttctacagtcctagaaccatat

SEQ ID NO: 293140 - DNA, 354 bp, Zea mays
acttttactctttctctgtaatactttcatgattatgcaactttcgctactgttgttggcactaaggctactcctgtaagggatctttgtgtgacagtatgttctcaaggagttgcattttgtgcaaaagctatgtatgacactgctacacgaaaatttaccaagtactctgcttcaattggtgtaaccaagtcagtctaccatgcttcattcattctagacgacaatggtgacaccattaaagtttcatgtgtttatcaccttgatgataaacataatgcctcagctgtatctgatctaactctgaagctctcaacaaatcagaacaaacttacattccttgtactttacaca

SEQ ID NO: 293141 - DNA, 477 bp, Zea mays
gctctgctagctagctcttgtcttgtcactgagtgagcatgcagcagggagctgtgtagctagcctagtacaggtggagtggagtgtgtggtggagtgcaaaccaaatcaaacgaagaaaaagaagcagcagcagaagaagaagacacccaccaccagcagcaagcagcaatcagcaaccagcataacgaaatgtcgatcaagtactgcgaccagcacaaggactgcgagcggcagcgtctgtaccgtcgcttctgcgccgtcctggtgggcgtcatcgtgctcgtcctcctcatcgtgctcatcgtctggctcgtcctccgccccaccaagcctcgcttcttcctcaacgacgtgagcatcgtgtgcatcaacgtcagctacgtcttctacctcaccgtcaccatgcaggccacgctggcgtcgcgcaacaccaacgaccgcgtcggcatctactacgaccgcgccgacgtgtacg

SEQ ID NO: 293142 - DNA, 363 bp, Zea mays
gtcacacacacacacacagacaagtggtttacaaagccaagtgtgtgtactagcagcgagctagctcgggcggcatcaggcagtcatcatgtcagaggagaagcaccaccacttcttcaaccaccacaagatggacgaggagcagcccgccggcgagtacgggtactccgagaccgatgtggtcaccgacaccggcgagggcgagtacgagaggtacaagaaggaggagaaggagcacaagcacaagcagcacctctgcgaggccggcgccatcgtcgacggcgccttcgcactttacgagaagcacgaagcgaataaagacccctagcacgctcacaggcacaagatcaccgaggaagtcgc

SEQ ID NO: 293143 - DNA, 263 bp, Zea mays
gccgaggcattcgtacgatcgggtggctcgtggtcagagtccatctgctgatcgaggatgccgagctctgatccgtcaaggaccacttggtcaccactgattacatgacctacatgttcaagtacatctccgtgcacggacaatggtagcacagcgacatatccctaacggtctccaatactcttctattctgcgagatgccagtcaactactttaggatcaggaactccgaagagatcccgtggcgtgaggctggtgctgag

SEQ ID NO: 293144 - DNA, 410 bp, Zea mays
ataacttatcaccgtctgtagaatgctcttatgtgacatgtgagaagattcgtccttcgggctctgatgctgtccaggatgcttgaacttatgatatcgaagatgcttagaactctactggtgtacagacctcatctgcttgtgaagctagtctcgatgaaatgcacaatgcttgtgcgaaattctcatacaatcacagatgattgctgaatgcattcatccgtaaaaaccctggattgctgctgaagtcattctcgctgatgttgaaaattcctcgcctgattgattttgacaatcaacgtgcatattttcggtctaaaatcaagcatcagtatgatcatcatcatcatagccctgctagaatctctgtgcatcgtccatatattcttgaggactcctacaatcagctt

SEQ ID NO: 293145 - DNA, 475 bp, Zea mays
cgactgtggccaccctcctcggccgcctgtacttcaactccggcggcaacagcaagtggatgggcacgctgacgcagtctggcggctcgccgcttctggtcgtcccgctcctcctgtcgccggcgcgctcggcggaggagcgccggccggcggcgctcaagatggttgccatctacgcgggcatcggggtcatgatcggcttcgacaacctcatgtactcgtacgcgctgcagtacctgccggtgtccaccttctcgctcgtggccgcgacgcagctgggcttcaacgccatcacctcgcgcctcatcaacgcgcagcggttcacggcgctgatcgccaactccgtggtcgtgctcaccttctccgtcgcgatcctcggcgtcagatcctcctgcgacgagacctacagcaacgtgccgcgcggcaagtacccactggggttcgtactcgtgctggccgactcgacggtgttcgc

SEQ ID NO: 293146 - DNA, 483 bp, Zea mays
  unsure (1)..(483): unsure at all n locations
tgagcctttgattagtaagcaatggtttgttacgatggagccattggctgaaaaggctctccatgctgttgaaaaggggcaattaaccattcttccggagagatttgagaagatttataatcattggctaacgaacataaaggattggtgtataagtagacaattgtggtggggtcatcgtataccagtttggtatattgttggaaagaaatgtgaagaagactatattgttgctagaaccgaagaggaggcacttgcagaagctcatgaaaaatatggaaaatcagttgaaatatatcaagaccctgatgttcttgatacttggttctcaagtgctctgtggcctttcagcacgcttggttggcctgatctttccaaggaggattataagcatttttatccttcaactgttctggagacaggccacgatattttgttcttctgggttgcacgaatggtcatgatgggaatngagttcacagg

SEQ ID NO: 293147 - DNA, 428 bp, Zea mays
gcaaccacagcttgagtcacagcttcaggagcctcctccatgcaagggagacgaagcgcggcctctgccaattgaggatcactctgtggttagtaccgggccacctgtgaaaaagaggcagcgaggccagcagcagagtcggcagcctaagtcaccaaagcctaagaagcctaagaaggttgctgttctgccagagggtggggcacttaatgggcatgcaccccgtaggaggggccctaagaaggctgtggggatggtgattaacggtattgagttggaccttgccaacttaccaacacctgtgtgctcatgcactggaactccccagcaatgctatcggtggggtgcaggtggctggcagtctgcatgctgcacgactgctatttcaacgtatccactgccaatgagcacaaagcgccgtggcgcac

SEQ ID NO: 293148 - DNA, 354 bp, Zea mays
cccccgcattccacctcgcggagatccagtccagccctagggtttcgccagcggcgagccaaactccacgagcgggggaagaggggaaagcagggacgacgagggggcagccatggggcagcagtcgctgatctacgcgttcgtggcccgtggcacggtcatactggccgagtacacggagttcaccggcaacttcaccaccatcgccttccaatgcctcatgaagcttcccggaaggcaccaccagttcaactaacactggcaacggcacaatttcaaataacttgtggaaaaacgaatcaaaaaacggggtggtggtggtgaatcggttgggccaccaattcctaatggttt

SEQ ID NO: 293149 - DNA, 369 bp, Zea mays
  unsure (1)..(369): unsure at all n locations
cgaggcccagtcccgcggcggccgtggaggcggcggcggcggcgggtacggtggtggccgtggaggcggcggctacggcggtggcgggcgccgtgatggcggcggcggctacggcggtggcggcggctacggtggtggcggcggcggctacggtggtggtggcggcggctacggcggtggcaaccgtggcggcggctacggcaactccgacgggaactggaggaactgagcggtggngcccgcgcggccaaagtatcctgttcgctaaccgggtggttaaccttaatccaaatggttaactttggtcggcttggggttggtggtggccatctggggttttgaatggaaggcgctttggggcaattggta

SEQ ID NO: 293150 - DNA, 160 bp, Zea mays
  unsure (1)..(160): unsure at all n locations
attgctgatctatactgtactagttcatactttgtgttttctagcctttgaaattggtgcatgtccagtggctggaccagaaatcttgganagcctgtacaaaaataatactcatattgtaaatatatagcttgtctttttccccccccctataattaac

SEQ ID NO: 293151 - DNA, 219 bp, Zea mays
attccgggtcgaccagcgtccgagaagttgaaagttggatttggttcatgtcccaattaaagaagctgttggggaacatggagtactcgctatttgttcagacgcttaaaaaggattaatgcatgcagtgacacattgtttcccttatgctgagaagagggagtgcttccgacatctcatgggcaactatgtcaaaagctactcaggttccgaacacat

SEQ ID NO: 293152 - DNA, 424 bp, Zea mays
cgcccgagcatgaaagtcctgtggggttcgttcgaggcggcggcggcagcggcggtggcgtgcgaggtgaccgacagcctgcgcgcgttcgagatgtcgatgaacacgtgggcggagtggctggagcgccacgtcgaccgcgcccgcaccgggctcttcttcacgagcatttcgccgacgcacctgcactccgacgagtgggaggaggcggccgggtccgggagcggcgccggctaccaccgatgctacggcgaaatggagccgatcacggcggatgggcaccgtgggcgggacacggacccggcgttcgcgcgcgcggtggatgcgcatgtggcgcggctgggcgcgcgcggcgtcgccgtgcgggtgctcaacgtgacgcagctgtctgagcaccgcaaggacgcgcacccgtacgtgcacc

SEQ ID NO: 293153 - DNA, 398 bp, Zea mays
  unsure (1)..(398): unsure at all n locations
ctggattgctcacagataccctgtgcattttttagtggttgaggttaatgttaaggtggagagtgcaggcacacgtaacgtgcacaataatgatttctatgctaaagagaagttgctcaaatcaatgcgtgattgtgatccttcgtctgtgcgccactggattgtaagagttgttttcttgttttaattttttttgttattcctaccattaaattgggcattcaatacctgttcattatccgaatgcttatgcaatccaataatgatggaaaataactgacttggctgctctcttgagttgtggcaacggaagttctaggccccgttgcagcactacactgcgctaatggaccttcagaaatgagaagctattntacaagctccagattgacaatgtc

SEQ ID NO: 293154 - DNA, 406 bp, Zea mays
ttgcctacagccttccatttcagggtctgaaagctgggaacaagaaacagggatatgttaagatcatcgagaggaaaggtgctacttcaattgaagctctcttccccggatattctacccaaattagttgctaatttcaatactttccgttaattacccttgaaaaatcccccaacttttaattccttaaaaaaatggtcaaaaacccttttatttcggaaaggtttcaatttgaatattgtttttaattgaccaattctaaattcccacattccccaattaaccacggttcggcaccttccattggctccaccagttgaccaaacttttggaatggttccttttggaaccaccatttgcatttaaggcccttataaggaaagaaaaacccccttgtcaaagtttt

SEQ ID NO: 293155 - DNA, 322 bp, Zea mays
actcactctgactatttctcaaagcctggttcttctgattggatggagaagtatgatactgtttcaatgacactgtctccaattttaacctaatctcatttcattaaatctaatctgaatcttactctcatcccatatcctaatcatatcaattcttaatctcacattaaatttatgatacgagcaaagccaggcatgaaataatatcaattataaagtatcttccttcaccatatttatatgtattgaatttacctacattactcttatacatgtatatgttctactctacataatagtactgttctacattatagacatt

SEQ ID NO: 293156 - DNA, 434 bp, Zea mays
  unsure (1)..(434): unsure at all n locations
gcacggctntcctcctgcctttggaaattcttaaaggccggttagtttgaaggggatggaaaatttggttcgggattaagggcccgtggttccaattttaaccgattgtcgggggattaaatctgacctggaccttgctctaatccggtttgctaatgatgtcagttctgaaagctcacattgaggttatgagacgagcaaagccaggcatgaaggaatatcaattagaaagtatcttccttcaccatgtttatatgtatggaggttgccgacattgctcttatacatgtatatgtgctactggagataatagtgctgntctacattatggacatgcngcagctccaaatgaccggactttgaatgatggagacatggcactaatggatatgggagctgaataccatttctatggatctgatttcacatgctca

SEQ ID NO: 293157 - DNA, 242 bp, Zea mays
ctcccgctccggcttccgcttccgttcctgttgctctcctgtgttcgggttcccgggtaagcggatcgtgatcgccgcataggagtgtgaggtaccgtgcttcctcgccgcctcaactgagccacggacgaccacttcctccacaacgccttcagcacctacggcgaggtcctcgagtccaacatcattctcgatcggtagacgcacaggttccgcaacttcagcttcctcaccttctccac

SEQ ID NO: 293158 - DNA, 336 bp, Zea mays
cgtcgaccgacctacgcgccacccacccacccactctttaggcttctcgcggcgtccaagcagggagagtgatccgctgggccggcgggctccggaccgcgactctttcgcgccccttcgcagaaggctacatccgtcaccacctactccgacctacaagatcggcgatacgtcgatgtaatgtgaacggcgccgtcacaaagggatgccgcacaagttctaccaccgacgcaccggtcgcgtctggaacgtcaccaagcgcgccatcggcgtcgaagtcaacaagcaattcaatgggcccattatcaggaaacctatccctgtccctattgaaca

SEQ ID NO: 293159 - DNA, 306 bp, Zea mays
gcgctctgcttcacctcactaacaccttctagctactctcactgtactgcaacaatgggcgctgggtcctcctgctcgcaggctcagatcgtcacggccgtggctgtactcgcagcggtgctgctgctgctggcggcgggggtcgagacggcgtttgcggcggtgagcagcggcgaggtgacgtcgtcagtagcgccgtgcctcgggtacgcgatggacatcgcggagacgccctccgcggcgtgctgcaccgaggagcgctcgctgaacagccgcgcgtcgtcaacggcggaccggcaggccacc

SEQ ID NO: 293160 - DNA, 136 bp, Zea mays
aagggcgtcccggcgctagggtggtgggggatgctagtcggctccctccgcctcgcctccagctggttcagcttcgtcgacatgtgcgcgctccgcgtcgccgtcttctcgcagactgagatgactgatgttcatg

SEQ ID NO: 293161 - DNA, 253 bp, Zea mays
gcgctacgcggtacgcgcacacagccaaaccattctccctttccggcgcttcgtcgccgcagtaggcaccgggcaagatgaagacgatcctggcgtctgagacgatggacatcccggagggcgtcacggtcacggtggccgccaagctggtcacggtggaggggccccgcggcaagctcacccgcaacttcaagcacctcaacctcgacttccagctgcaggaggccggccgcaagctcaaagtggacgcctg

SEQ ID NO: 293162 - DNA, 410 bp, Zea mays
cggagtggactactgggcagctccgggttctgcggctgtccccgcagcgcacggcaaagcgccagctggttcagctcgaggagaccaatgggaaaaatacatcctactcaccacagactgtgtttgtatcacgtgcaaattgttcaggatgaaagggagctcaagaagcagaagcggaagcaatccaacagagagtccgctcgcagatcccggctgcgcaaacaggctgagtgcgaggagcttgggcaacgtgctgaggctctgaggtcggagaactcctcgctcagggccgagctcgagcggatcagaaaggagtacgaacagctactttcacagaacgctttccctaagggaaaagcttgggggctgccagtagtgattcgctttctgatatgaacgaacagaacgac

SEQ ID NO: 293163 - DNA, 204 bp, Zea mays
tcgccgacgcatgggctggaaaatatgatcacattgatgatatgatacatacgacactttgcttggacgggggaactggtactcagattatgactggtggatttctaactgacaaacaggcatcttatggctggatgttcaatctcaactgatgggcacatttctacacgtatgatgtagggttgcactctggctctacagctt

SEQ ID NO: 293164 - DNA, 416 bp, Zea mays
gcgaccccttggctcgacggcaagcacgtcgtcttcggccaggtcgtccgagggcgtggacgtcgtcaaggccatcgagaaggttggcacccgcaacggctccacctgcaaggtggtacaaagttgcgctgactgcggacagttatgctagatctttcttatctggtttgttcggacgatctccctacatcatcttgcactccaaattgcgtccgatcctttggatctatttacgctccaattgatcttagagctcatcatagaatggtacctttcttttgaagccacaacaggcagcactggatgggatgacgatgatgcttttgttgcctggaaggacagtcctgaaaactacaaggggcatatccaaaagcttaaggctcaaaaagtgtctcattcgctctctgatctttgtg

SEQ ID NO: 293165 - DNA, 428 bp, Zea mays
tccgggggtcgccttcacctacctgacaccagctagcaactctttctcttctgcaataatggccgctcgctcctgctggtgccaaccgcagctggtcgcggccgcggcggtcctggcagcggcgctgctgctgctgggtctgagggggccgggacggcatcagcggccgcgagctgccgccaggcgacatcgtcggtggcgccgtgcctagggtacgcgatgggcagcgcggcgtagccctccgcggcgtgctgcatcgaagtgcgctcgctcaacagacgtgcgtcgtcggcggctgaccggcaggccacctgcaactggctcacgagcatgaccggacagttcggctgcggcatcagcatggacaactgatgcgacataacagggacgtgctgcgtctacatgtgcttgcccatcagcccaaccgg

SEQ ID NO: 293166 - DNA, 415 bp, Zea mays
acgcgtcttcatactcgcctacctgcgcagctcaaaccattcccccttctgccaatggccgggggcgctcaatcccgtaacgcgacaccatgacggagtgcattacaatccacatcagccaggccggtatccaggtcggaaacgcgtgctgggagctgcactgccttgagcatggcattcaagctgacggtcagatgcccggtgacaagaccattgggggaggtgatgatgctttcaacaccttcttcagtgagactggtgctcggaagcacgtgccccgtgctgtttatgctgaccttgaacccactgtcatcgatgaggtgagaactggcacctaccgccagctattacaccctgagcagctcatcagtgggaaggaggatgcagccaacaactttgcccgtggtcactacac

SEQ ID NO: 293167 - DNA, 284 bp, Zea mays
cgtgccgtcgtgctccctgacgacgcgtccattctcaagtacatccgcttctaccggggcttgctgctcgtactcaacaaggcgctcgccgacgacgaccgcgtcaagacctgcacatctccaatcgtcagcaactacatctccttctaaccacgcaaatcgctacacacatgatgagctcactcttgtcccaaaactaatagccgaggcacatctttcagaagtccagagccaactatagatgatccagactggccttaactatccaaaggctatcggacatg

SEQ ID NO: 293168 - DNA, 411 bp, Zea mays
gacgatacccctatacccaaagcgatagctttgaagatagcggaacggcagatctggatgagggactcgctctggcagctaactacacagcacgcaatggccaccacggcgaccgaagcggcccgctcgcgcttctcccctgttcgcgcagccaagttggaagctgtgctgtctattggtgctcatctaatcccacacccaagaaaggctgcaagtggcggagaagatgctttctttgccaatagcgatgctggcggagtatttgccattgcagatggtgtctcgggatgggcagaaaagaatgtcaatccagctctattctctcgagagctcatgagaaacagctctaatttcctcaatgatgaggcggtcagtcatgatcctcagattcttctcatgaaagctcatgct

SEQ ID NO: 293169 - DNA, 398 bp, Zea mays
gggcgtgcgctgctgggagtacaggtaccagccgtacatcgtccgcctaagggggggcactcgtaccgacaaggcgcgtcctctctgctacaaggccaagcacggatatgatgccttacccgcctccgtttgaacttttgtggcatgaacacgcctgtgctcaaaggtgttgtctatgttaagcctaatctccaaggtgtcacccatctcaagttccataggaacaataggtctgtctctgactatagagctggacgtaaactctgtcgactgagcgatcttaactcctactgactgaatgatgatcgcacctacaactacttagagatcatgctcgtggacaatacctactaagtcatcaaagctgacccgaggatcaactgactatacaaccctgt

SEQ ID NO: 293170 - DNA, 294 bp, Zea mays
ggcttctcctacctctcttaccaagttctcttcgggttagggttacttagggtttggtggaggtgcaatggcagctgctgatgtggagtaccagctgcttcgctcgacgggcttgcacttcagacaccagcaacgaagtcctcgagaatgcctacgtctgctactgctagatcctcgactccaatgtaataaaccgaccgcgagacggtgaggtcttacggcttcggcttcgttaccttctactacgagaactacatgctagacgctatcgagaacatgaacggcaacgatctc

SEQ ID NO: 293171 - DNA, 216 bp, Zea mays
gccaccagcaacgattcactaagaactgccttcggctcatacggctagaccctagactccaaagtcatcacctaccgaggaaccaaaagctattgcggattatgctgctttgcctgatccgactgaaactacatgctcgacgctatagagaacatgaacagcaaggacctagactgccgtagcattactcttaactatgacccaaccattggctgt

SEQ ID NO: 293172 - DNA, 384 bp, Zea mays
ctgcactcatctcttctcgtttagaacctctataatgtcccccactcgccagtctcaggatcggctgtagccatggacgccagcggagccggtagcatggggaagaagggtgcggccgggcgcatggcaggcattcccaggaagatgtcggtgacgctgtccgtcaaggccgagctgatgttccacgtcggccggatcgagcgctacctgaagaaggtccggttcgctcaacgcgtgatcactgtcacccgcgtttaccttgaccgcgtcctggagtacctagccgtcgaggttatagagttggcctgtatcgcggcgaatgacttcaagatgacgcgcatcatactgagcgacgtgctactggcgatccgcaacgacgaggag

SEQ ID NO: 293173 - DNA, 339 bp, Zea mays
tatagccacctcatgagactcacaggcgggttttcttaataccgaccagagcaatgcctactttaagccttttcacgttaatttcatatgacaacgctctcttccaagacttactacacggccacgataatgcttattaaccaagacaaaaactagtacaatacacccaaatacaaatttcttgtgccatttaccaacaacgacatcacaactcaaatcatctctactaatataacaagtcatattcttcttgcttctgcttactcgcattaatttccacgatattatctttaaacttgtcttaccaactatgcaacttactactacactggccttctc

SEQ ID NO: 293174 - DNA, 436 bp, Zea mays
  unsure (1)..(436): unsure at all n locations
caaaagcaacaaggcaggagcacaagcaagaaccacacctcctcccttcgactgtgatcatgtcgtcttgctgcggcggcaagtgcgggtgcggctccagctgctcctgcggcagcggatgcaacggctgcggtatggtgaacctgacgtggagaccgccgccaccagcagcgtcaagaccacggtcctcgacgcgccgaccaccaaggccagcgccggcggcttcgaggcggccaccgagggcggcggctgcgactgcaacacctgcaagtgcggcaccagctgcagctgctcctgctgcagctgcaactgagccggcccggctcggcgatggcgcacgagagtcgagaggacgacgacgaggaggcgtataataaatataatagcggcgttcagtanataagatcctgtcaactgcacccgtcattatccatgg

SEQ ID NO: 293175 - DNA, 430 bp, Zea mays
catctacattaacagctctccttcaacgatcattctaaactacttggacggcaatctcaactacaccgagcataggattagggtacgcaagcatcttgcatggtcatcagcctccaaatgctgggctggcttacctcaatggtccttcacttattggatctgctggactgccccaagttgaagcaaaatatcctgcttcgctattcaaacagcagctcgtggatctaattgaaaaggcttatggcatgataagtgacagcgtgaagaacgagctaaaccctctgctcgaatcgcgtatacaggatccacgaacttctgactcgagtatcgcagaacgcaatcttaatgccatgggtcatcagaaccaactgacatattgtctgggcatagtgaaaattctgactagctacttgcatgtactgagggcaaa

SEQ ID NO: 293176 - DNA, 424 bp, Zea mays
  unsure (1)..(424): unsure at all n locations
acaagcagagcagagcagagcagcgtcgtgcgtccgagaagaagacgactcacaagagcagaacgagcaccgatcgatggcagtgatggccggggcggcgtccatggaggtggagcagggacctcccgggcttccggttccatcccaccgaggaggagctcctcggcttctacctctcccgcgtggtccacggcaagcagctccacttcgacatcatcggcagcctcaacatctaccgctgcctcccaaggaggacatggtgatctgcaagatctacaggaaggccacgccactgaaggagctcgagcagagggcctctgccatggaggagatgcagacgcgcatcggcggggctagagcaacatccctggtccaggccgncggctccaccggcgacgactacctgtcgtccgacgacacaagc

SEQ ID NO: 293177 - DNA, 302 bp, Zea mays
tcgggttccaccttctcgtccactacgtgttgaaaccctatcgacccaccatggcttgggtcccagtcaccgctcggttgtccttcttttagacccagctggcgtactccgctgccgttgcttgacagtcgccttcctgatgttcccagcgccatacggggacgcctccgcaccggcgatgctgaatacagtcgacttcgtggtctctaacgtggacgacctcatgaactggccgcgtaaggtctcgatctggcccatgacctatcggctcgcctgcttcacgatgcagatgatgcacgccg

SEQ ID NO: 293178 - DNA, 363 bp, Zea mays
actaccggctatctacctcgggcggcatcaagcagggatgatctcatacgagaggcagcaccacttattcaaccaccacaagaaggactaggagcagcccgccggcgagtactggtactccgagaccgatgtggtcaccgccaccggcgagggcgagtactagaggtacaagaaggaagagaaggatcacaagcacaagcagcacctcgaccaggccgtcgccatcgccgccggcgccttcgcactctacgagaagcacgatgcgaaaaatgaccccgagcacgcgcacaggcacaagatcacggatgaggtcgcttccgcggctgccgtcggcgcctgcggctacgtattccacgagcacca

SEQ ID NO: 293179 - DNA, 325 bp, Zea mays
tcaacacgtaccacaattctacacgcattaatagttcatcagatgtcccttcctacactacttgatcaggttttatttacctgctgagccgctcatcaagtggtccaactccaactttaacaagttcatagcatcctaccacgtctacacaccctagctcacggccctgatctattcgaggtagttcgtgctcgccgcgttcttccacagctcaccctatcttttcacattcacgctaacgttctcctaaacgtctctcgccatgacaatacaacctggcttaagaacaatatcacaatcaccaacgacaatggccgtctctcca

SEQ ID NO: 293180 - DNA, 279 bp, Zea mays
atgtcacacacacacacacagacaagtgggttccaaagccaagtgtgtgtactatcaggcaggtatctcgggcgggaggaggcagccatcatgtcagaggagaagcaccaccacttcttcaaccaccacaagaaggacgaggagcatcccgccggcgagtacgggtactccgagaccgaggtggtcaccgtcaccagcgagggcgagtacgagaggtacaagacggaggagaaggagcacaagcacaagcagcacctcagcgaggccggcgccatcttc

SEQ ID NO: 293181 - DNA, 415 bp, Zea mays
agttaggggtacaatccagaattgagatgcccatggaaggatggggtgagatccgggtcatcaatgagcatgtccgtcagtctgttctggcaagtctgtacaaagctgcaaatgcatttgtgctgccaacccgtggtgagggctggggcagaccggtggttgaagcaatggccatggaactgcctgtgattgtgactaattggtcaggtccaacagagtacctgactgaggagaatgggtatccattggatgtagacaggctgactgaggtgacggaagggccattcaagggccacctatgtgctgagccatcagttgctcggctgagggatttaatgagacatgtcgttgatgatagagatgaggcaaggaataaggggaagaaggcaagggaggacatgataaagaggttctc

SEQ ID NO: 293182 - DNA, 338 bp, Zea mays
atcaataatcagattcttaacaaattctaaattattgatatatcactttttgaccacggtttttacatttggcaccgggttaccttttctattcttaaaacttattttttttgacctctggaaaactgtattttcaggacattctgccacgtctcttattccaaaggctctacattctttctgtcttttaaatatgactatacttctctaaaatgtggagctcatacaaatcagcaagataaaacagataatcccatcaaaaagtgggtgcagaacatgaatagacaattctcaaaagaagatacacaaaatataagtggtatacgttaactatgtct

SEQ ID NO: 293183 - DNA, 439 bp, Zea mays
gaatctgatgacagtactgatttggatcttctattggctgagggtgagggagcagggaatttgaagaagaaaagggggccaagaaggggggatgatttcacattccttgaagccctagtaaaggcggacttctggctactgtttgttgtttacttttgtggagttggcacaggggtcactgttctcaataacctggcgcagattggaatgtctgttggtgctaatgacacaactattttgttgtgcctctttggcttctgcaactttgctggtcgtatccttggtggatctgtctctgaatatttcgtaaggtcaaggatgctccctcgtcctttctggatgatgtgcacacaaataatcatggtggtaacgttcctgctcttcgcgactggtcttcatagcttgatttatgtttcaactactctcctggggatatgct

SEQ ID NO: 293184 - DNA, 214 bp, Zea mays
tcgaactgtatgaactcttctgcatgtacgattgttcattgctagatataaatcctctgtcggagactgttgacaacaatcttgaggctgctaatgcaaagttgaactttgatgataatgctgcatttatacagaaagatatattttcacttggtgatacaactcacgattaccctagtgaggccgctgctgtcaaagcaaatttgtactatat

SEQ ID NO: 293185 - DNA, 401 bp, Zea mays
caactcgagaaaccagccctactttcatcattgggaagtttgacggaattggtgctctgggatttcctgaaatttctggagtaggagcccctccaatttggcagagcatgaaacagcacatactggtctcaatggaagtgcactctatgggactcaatagagacccggaatcaatgacgcaatacatgcgtcaaagcgattttgtgatggcagtgcccctcggatgatccacggatgccttcgaacattcgtgaaggatcatgttgatgttgcaagcacgagccatgaagctaaatcaaaatcatgattttttgcaaatactcatacaacaaaatggtggctgaagtaaagaagtacggagagaaccttgctgtcttgagttcaagcgaataccttctgtc

SEQ ID NO: 293186 - DNA, 377 bp, Zea mays
acccaacctcatatctcatctcgtcctatatcgtccactagatcggtcggccgggcagctgtgactccggcaagctcggccgtcgaatcctgcgtcatcattcctcgaaacttaaggctactagaagagctagaacgtagatagaacggcattcggatatgggacgacattgctatggaataggagacgcacatcacatatacatgcaaccaaggtctgacagcacatatatgccactttatgcagtgcaaacattacgtaagctcgaacgttacctgctgcagaagatatcattgaatggctagcgaccaatactgtggatttctttaaccaagttaatatgctgcattgcacactcacataatattgcacacctg

SEQ ID NO: 293187 - DNA, 157 bp, Zea mays
caagcaagcaagcagcgagttcatacttactacgcagccaggcagccatggggccgagcgcgatgatggcctggtctgcgaccgccttcgctcccatacagtgtctcacgttcaccgtcagcctctccgtagccaggcgctcctccataagcctatg

SEQ ID NO: 293188 - DNA, 410 bp, Zea mays
ctctactaccacatgatcccctagtacctagacctaggagtccatgtacaacggcgtggtgcaattacacatggtccgcgactaaactctatgcctgcaaaacatgatggcattcttagactaggctttcacgaaatatctgttgggaatgcaacacctgtgtggtataacatggtaaaacaaggtctcatcagtgaccctgttttctctttctggtttaaccgacatgctgatgaaggagaaggtggtgaaattgtgtttggtggaatggattctagtcactacaagggtgatcacacctatgtcccagtcactcagaatggatactggcagtttaacatgggtgatgtccatgttgatggaaagtccacttgggtttgtgctagtggttgtgcaacaataacatattc

SEQ ID NO: 293189 - DNA, 393 bp, Zea mays
  unsure (1)..(393): unsure at all n locations
ccaaagccaagtgtgtgtactagcggccagctagctcgggcggcagcaggcagcgatggtgtcggaggagaagcggcagcacttcttcaaccaccacatgaaggacgaggagcagcccgccggcgagtacgggtactccgagaccgacgtggtcaccgccaccggcgagggcgagtacgagaggtacaaganggaggagaaggagcacaagcacaagcagcacctcggcgaggccggcgccatcgccgacggcgccttcgcactctacgagaagcacgaggcgaagaatgaccccgagcacgcgcacaggcacaagatcacggatgaggtcgctgccgctgcggccgtcggcgccggcggctacgtattccacgagcaccacgagaagaagaa

SEQ ID NO: 293190 - DNA, 381 bp, Zea mays
cgatctctgtggtgaagtctcatatgagtctgcttcgaagaaatgtatgtacatggaggtgggtgatctaggcaggtgggagatgctgcgttcactctccctctggttccctgcctgtgaggtactctccccactcatctctgctgggcttgatagctgccctgttctagaggagatctcaattaaagtggagggtgattgcctgacatgtgcacgccctggcccattattcggcctgagtgatcttgcaagtttcccagcgcttgccaagatgaattcgcgatctgagtgaagccagtagcctatcctctaactggacaagccgtccaaatggacctttttttggggaaccaatttaatttccaggtattggatcaacta

SEQ ID NO: 293191 - DNA, 179 bp, Zea mays
tcttcctcaaggcaaaaaagatctctgaggtaggattacttcactggcatcaaggatgaaagcaagattgtcgttaagggtcaagaagagcttgacattgatgtgcttgtgcatggcgagcctgatagaaacgatatggttgagtacttccgtgagcagctctccggttttgcgttcac

SEQ ID NO: 293192 - DNA, 221 bp, Zea mays
attcccggtcgacgcatcttcctatttatgactgatgcaacctcttctgtaatgagaagaatacttggctgttgtagattgattcatgtaggctgtgcatgctcgttagcctaaatcagctgtgcagtttgaatacttccaaattaaatggtcctctgagactcttcagaggtatcggatcctatttttcatgttcactgatgacttacaggttacatctt

SEQ ID NO: 293193 - DNA, 295 bp, Zea mays
  unsure (1)..(295): unsure at all n locations
atacagacgaataatctcttcttggcctcactaacaccagctagcaactcttgctctgctgcaataatggcgcggcgctcctcctcctcccagccgcagctggtcgcggcggcggcggtcctggcagcggcgctgctgctgctggcggcgggggccgggacggcgtcggcggcggtgagctgcggcgaggtgacgtcgtcggtggcgccgtgcctcgggtacgcgatgggcagcgcggcgtcgccctccgcggcgtgctgcagcggggtgcgctcgctcaacagccgngcgtcgt

SEQ ID NO: 293194 - DNA, 422 bp, Zea mays
gatcgctccacaaaaccctgctccccttcacacccttcgttcgtacgacgctggccccaaatgatgctccgtcgcctctgcaacaaccaaagaggagcaccatcgtccctgtccagagcgccatcgcctgcagtgacctcgccgcctatgagcgcttcttggaccgccccttccttcctcgagaataatgatcagttcgtggagcccaaaggagctacctatgaagaccctgagcactcatttgttgaaggttggcatctatgcaaccattgattaggagaaagagtcgaagcggatctccaggagttccatgacttcgacgaattcgaagactaggctagtggcctcctagtcagatgcatgtggaaggcccattttatttagtttacgttccgcttgagcactttaaactatgtgatctc

SEQ ID NO: 293195 - DNA, 297 bp, Zea mays
tcttcctactccacctacctcccttctcccggatccctcgatcgagaagattctccacggatccgtatcccacgtcaggctgccggagttcttcatcttccctgcctacaagctccctcagtccaaggccacctcatctactgtctccctgcccatcttctacctcttcctcggccgctactaggttcttctctccatcctcgattccgtcaaggagatcggcttcttccatttggtgaaccacagcgtctccctttatgctattcatgacatgtacactgtattccaccaattctt

SEQ ID NO: 293196 - DNA, 391 bp, Zea mays
gccttttcattatctttcccattgtgactgtgatggtgtaatatgcagcatgtgactgggttgtctgggagggaagactgggcttcggatcactggtaccatcctacaacctgggttcatacttgacctagatgtcaaaagtatttagttttaactattgtgtgctaaactatgtacgtggcatgaaagttaaggctgatcgtgatgagtcgtatccttatgctgctatgcttgctgctcaagatgttgcacagcgttgcaaggtatttgtagtgaagcctgcaatttcgtctgtgtatccaaagatgatgtttgcttaattaaattgaagcttacgattatgtaaggctgcttacgttgctgtgggcagataagtgacttggtcttgtgt

SEQ ID NO: 293197 - DNA, 353 bp, Zea mays
cgcgtgcgcgtacgtccagcggatggtaccatagttgtcgacgtcctgcgcagggctgaccatttgcatttgtgcagggcctgtcgtcgtccgttccaagcgcagacaccatgacggagtgcgttgcgatccatgtacgccatgccggaatccaggtctattacacgtgctgtgagctgtactgcattgagcatggcattgaggctgtcggtctgatgcccgggcacaagacccttgtttgacgtgatgatgctatgaacacctgcttcagtgagactggtgctggcaagcacgtgccatgcgctgcgttattgacattgaccccagtgtcatcgattaggtgagaactggct

SEQ ID NO: 293198 - DNA, 334 bp, Zea mays
gcatccctagtccaagtatatcaacttagcacgtttgcttaatcacattgatccgctcgtcacgcggaacgggattactgcatagggccaatgtgtgaacgttgaatcctcaacaattccttcatccccaactccaaatgttgctgaaacacataccccatctgctgatgacgaggactatgatcatgctcacctttttggttaggagacctaacattacaagaatgcttcttaacatcgtgctgcagcttccaatgcttcttacaacaataaacaatcttataagtcatcagttttactagatattaaaccatgtgactattatacttacatt

SEQ ID NO: 293199 - DNA, 334 bp, Zea mays
catacctgggcaccttgctcacttacacggggccacagaaccatctcatccatcccccattcttgttcggctatccctacaagtacaagacttctccgaacaacgtggctaacacatcgaacttctatgacctaacgctataattacacagctccctggcgccctactacctgtacggatccctgttccgcaactacatcttcgacccgttcggtctctcgaagcccgtcgagtacctgcacttcgagttggactccctggaccacaacctgtccaagaatgatgccagactcatcatcagcacccggttctaatcctccaaaatcaagtccac

SEQ ID NO: 293200 - DNA, 356 bp, Zea mays
acgccaaaagcaagagcaaaaaaagaaaggtctcgatgactatggggaactcaagcttctagtacagcgctgggcaccacctcaagttacataagcagaaaccgttaactagacacacacatggacaggatagttctcatgcctacctgacaccagttcaactgcatacatgactctcatactcatgatatggactcgctaaagaatgacgctcctgagaaatggacactagcgaaggctcatggaacaactctcaccctaccatctgatgatcacataggcatcagtgaagttggacacattgcacttgatgctggtcaaatactcgcccatagtgctaagcttgtcgaacaaac

SEQ ID NO: 293201 - DNA, 156 bp, Zea mays
aggagaataaggataattaaaaacgaactgcccttgtcaatgcttataacaagaagaaagaatctgggaaatcgtcagttttactagatgtgaagccatttaacgattacactgttatgtacaagctcatacaagctgttaggagtgtatagatgg

SEQ ID NO: 293202 - DNA, 170 bp, Zea mays
tatacacatgacagacagctgcacgaactgcatactgcctgcatgggattatttaaatataagcctccttgctaatgcgtactagtgaaagctcatggaacagctgtgggcctaccatctgatgatcacatcggctacaggatacaaggttacaatgcacttcatgctag

SEQ ID NO: 293203 - DNA, 440 bp, Zea mays
ccgtttcgggccaggcctacgctttcgcatagactcactgctgatgcttattagagttaccagtattggcctaatgctcactggggagcggtcagaatgcacttcacttacaactcatgtagctacctatggacagtcccgagatgccatcgagctatgaccatgatgatgtgccaccacaactggcacaaacactctataggataatagggctgctcaaaaacgtactgtgcctgctaatgcttctggcaagaataaagaatctgggaaatcgtcagttttacttgatgtgaagccattctacgatgacactgacatggccaagctcgaggaagctgttaggagtgtccagatggaacgactgctatagggcgcatccaagcttgtcccagttggatatggcattaacaagctgcaaatcatgatgaccattgtcgatg

SEQ ID NO: 293204 - DNA, 401 bp, Zea mays
gacagtgcgatagcttacaacactgtacgcttgttgctaagaacaccagcatacacagggatggctagctccatcagctgataagcagatatgtctgaggcaactgaagacctggcgtaagttgtgcaccgcgcaatatcattcgacttcgtttgctccactaagaagatcacgaccgacaactagtacggtaatgggggtggcctgaccataaacttttacatcaacagcctgaaaggtcatggacattggcttataccatatcgacgacaagtacggcgcgaacctcgacggatacaggacactctacaacgatgatgactgatctcacaccgtagacgtctacttcggtagaaccactgaacttatgatctgggccgttacaatcgctgggatcctaa

SEQ ID NO: 293205 - DNA, 359 bp, Zea mays
  unsure (1)..(359): unsure at all n locations
acaggcacacgtactaactaaactatacatggataatgagctgggggatccttttgggtctacgagaatcatcaggcgacgaangaccctttacacgcacacaggtacaagatcacagatgaagtacatgtcctggttgatgaaaccgcctgcgattacgtattccacgagcaccaccagaagaaaatataccacaaagacgccgatgaagccactgtctagaataagcaacaccacctattcgaatgaccgtaatactccgactgctcacgatccagctagctagctctggtgcacacaaccacacaacatgttaattctgtactgcatgcgtgacgtatttgatcgatcacaataat

SEQ ID NO: 293206 - DNA, 292 bp, Zea mays
  unsure (1)..(292): unsure at all n locations
accaccacaataacaactaatatcatcccttctaccaataccattactcctacacctatttcctcacctacaccttcaattactattaccataagtacaataatcatcataatgatcacaatcacaaacaacacctcttccaagccatcaccatctcctccagctccttctcactctacnagaagcactaagcgaataaagacccctagcacactcacaagcacaagatcactgaagatgtctctgccacggcggccgtcgactcctactgctacgtattccactagcacca

SEQ ID NO: 293207 - DNA, 444 bp, Zea mays
gacaggcctccgatccagcgcagcacaggtctcaacgcagggtgacgcgaaagaagacggcgcgggagatggcgaaggtgttcagccggctcttcatcaagatcgacatcctgatcctcatgcacatcctcaacgccggccacaaaaccaccattctatacaagctcatgcatcgccacatcgtcaccaccatccccaccatcatcttcaatgttgaaactgatgattacactaacattaacttcactgtctgctacgctgactgtcatgacaagatcagacctatgagcaggcattacttgcagcacacctagcgtctcatccatggtgtgaacagcaatgaccgcaaccatgaccatgaacccagagatgaactccacaatatgctgaacgaggatcagctacatgatgctgtacttgatgcttttgtcaacgagcaagatc

SEQ ID NO: 293208 - DNA, 289 bp, Zea mays
gcaaatcttcgtgaagacacttactttcattaccatcacccttgaggtataatcctcgcacacgattcataacgtcaatggcatgatccacaacaaggagagcattacaccaaaccaacagttgctgatctttatccacaatcatctgcaagatggtaataccttgactaactacaacatacataaagagagcacatctacatctacttctactcctcagagatatgtatcacatgttctgtgaatacatactacttcaacaccatcaccatcgatgtaatatcatacc

SEQ ID NO: 293209 - DNA, 413 bp, Zea mays
gcagatcttcgtgaagacacttactggcaagacgatcacccttgaggtggagtccttagacaggattgacaacgtcaaggccaagatccaggacaaggagggcattccaccggaccagcatcggctgatctttgacggcaagcaactggaggatggtcgcaccttgcctgactactacattcagaaggagagcaccctccacctggtgctcctactcacgggtgttatgcaaatttttgtgaagacattgactggcaagaccattaacttgcaggtggagtcgtctgacacaatcgataatgtcaaagcctagattcaggacatgcagggcattcacatcggaccagcagcgcctgatctttgctggcaagcatctggaggatagtcgtaccctattcgactacaacatccat

SEQ ID NO: 293210 - DNA, 277 bp, Zea mays
ctacaatgtctacatcgtgccaaattttatgatggcaaatatcacattgcttctaacccttatccacacttatctaacaaagtacttctcattcaaagctgtttattacaactatattttcatctaaagtaatatttacaatttccctctcccttatatttaggctctaaactcccctttaatagctctattacataaacacaaaacaagcaacttcttcatttatttccaatattacaatgaacctgatccatggacacatcaatgattaaacctt

SEQ ID NO: 293211 - DNA, 391 bp, Zea mays
acgtgttgacacatttatagctgcactaaagaagatcgaatcatggatattttctcgaattgttgagacccggtggtggcatacattcacaccacatatgcaatctgctgatataactggtggtttgagaagtactacaaatccagaaaaaggctatggaaggattcctgctgtgggcaaccagcatacaagcaaccatatcaatggacatatggaagaaagcctttaaggaagcgtcagaactgctttgcctagtaagggcagctggtcatgagtgtggatgtttgcctatgttaaccaagtttgtcatgtagcagtgcatagctaggttggatgtcgcaatgttcaatgctatctagcgcgtatcagatgatgcaattctaacagatcc

SEQ ID NO: 293212 - DNA, 359 bp, Zea mays
ggcgcaatcggtctgtacaccaaataattcgacatgcgtgtgatcatctagaccaacctcacgagacccgaggatcttacctgcggccctagacatcaagaacccccagttcaataggaagcttgacagcatgcttgacatcaaccagaagatcattgctgattcatactccgactaaataaccctattgacgaacctgaaaacgattccttttagcccctctatagtgtccaacatcatgatcttctaaatcatgcacaccatccagtctggatcaccataattacccgaatttgagccccggacttgatactgattctgtacaaagatatatcctctagttattcaccctgaatgac

SEQ ID NO: 293213 - DNA, 224 bp, Zea mays
tttcacgaggtgctcccctgggtaaggatatccaagacttcatgatagtgaccagctatgcatacttaatccagggctatagtttaacaaaaacaactagacctaacactgtcttatatatctactacatgaccctagtcagaatcactggcatacctgccacctacaccataaattctctgaaaaaattacccgagatgggctatgatccactcggaatccct

SEQ ID NO: 293214 - DNA, 371 bp, Zea mays
ctccagaattaggtatgttctcgtagttcttgagtagcagcaatgatggcatgcaaatcagccgagaaaggaagaacagatctagtatttcgtctgaattcataatatgttcttcctttcagctgagaaatttagtatgggcaacatcgaagcatgatgtctacctgttattgcattactctgtacttcactggtcggccttaaatggtgtggatacagaaattatggatgtacatggacatgttgcaccgagtgagaagcacccaggaagcttattagaaggttttgtgcatactcaaattagtaccatggcaatgaaagataatttgttagtagctggtgggtttcaaggagagctaatatgcaaacac

SEQ ID NO: 293215 - DNA, 364 bp, Zea mays
acggcaattggcttagacttggatcttgaggcacttgagtggtgccttgaaaacaacggaagcgagattggagctggtgggtattcaagaatgttgcttttccatggaaatgttctacaaccaatggaatcccgtcttgtcaagcaaaagtttactaatcttgtgcatggtctatatttgaacagcaacaatggcacaggaagtaacagttgcaagcagatgggtcttgctgactcgtagtgcttagccaatctgaccatgtcataagcagattttcctgcaagggatattatctgtgcattcaactacagctgctgttgccttcatagtataaaggacttggttctatatttcaagcatgtat

SEQ ID NO: 293216 - DNA, 431 bp, Zea mays
acggccctctcctgcttccacaggccctgcttctcgagcatcgcccaagtcatcgggcgcaagggcccgttctgcaaggcggacctattccacattgaatacagtctctccaaggactatcacctcccgggcttccgcgacggcatccactactgctacaactacgacatggtggcctgccctgcgcaagaagtccatcttccgactcgtctcgtcctacacgcagcacttactggcaaggatgctcatctaccctgaaatcatggtaccgttcctcgactagagcgcacagcggctgactgagcgccacgaccgcttcatcgctgacctacgcaaggtcggcatatcctgccatggcttcaacgcgtgcctcttaacctggatggacttgcctatcatgctactctagaagactcacgacacgacactcg

SEQ ID NO: 293217 - DNA, 239 bp, Zea mays
gacgagcaagggcaatgcatatgctgtattgtgtgagtccataggtgtacgtcagctccagagcgagagtgcttgcctgatcagcgtagcccaacatggcaatgctatacttgtgatcatgtacaaatatagagtcacagaatacagcaagggcaatgcatatgctcatgttgccattgtcaccaatgatgtgtacaagatcgccgagacgaatcatctgaccaccaaagaactaggtg

SEQ ID NO: 293218 - DNA, 248 bp, Zea mays
cggatgagttcaaggtgcgtttggatgcagctttgactaaaatccctgaacgctcagatgcagacagtgcagaggccaaggaaggtgtaaaggcaacctggatggcagacggaacacagtggccaggaacatggtttgaccctgctgaaaaccataagaaagggcaacatgctggaattgtaaaggttatgttgaatcacccgggcgatgaacctaggtttggtggaccagcaagtgctgaaacccct

SEQ ID NO: 293219 - DNA, 268 bp, Zea mays
ggacacggccgctgggcaatccacaaacagcttacgcgcataagccttatcctgaccgtactcagtccttggccatgtcatacccatatgggggatccatactactgtagcgctgtggcagcagcttatggtacgtatgctatcatgcacactcagctggttggcatggtctcgtactctcgagtgccaatgtagatcgagccatacgctgaagagcccatctatgtcaactcgaagcagtaccacgctattatccggaggagacatc

SEQ ID NO: 293220 - DNA, 253 bp, Zea mays
  unsure (1)..(253): unsure at all n locations
cactgacttgatgcnctgtagcttgcggtcttcatagatcaccagtaccttccaggggaggggcctaaacgagggcaccgttggccaatactagtcacacatggcgttcacaatgcctgacctgtaccgcgttgtccacagcattgatctgttctatacaaagttcaacatcttagattactgtcacggacctgtccatctacttcccgtacaccgagtcgcacaagacgctgtcatcccttcaccctgagat

SEQ ID NO: 293221 - DNA, 333 bp, Zea mays
  unsure (1)..(333): unsure at all n locations
gcgtcggacnctacctccctccctctcccctctctccggcacaggcaatttagccctcgattcgaccccgagtcttgcgcccactaccgggattgcctgcgccaagcgcggatctgaacgctgcgatccaagtagtcgctcgaatccgccatgaaagaggccaaatccaatggcgccgacaaggccgatgccaagctggcggcgaagagcaaggtggcagacaagcccgccaagggcaagaaggggaaggacggcaaggaccccaacaagcctaatagggctcccagcgctttcttcgagttcattgatgaatttcacaaggagttcaaggag

SEQ ID NO: 293222 - DNA, 400 bp, Zea mays
gacgaggatatccgactactcctggccaacggtatccgccagctggatactcccaaggcggagcggaccgttcaccctctcagggttacccacatggcgagcgatatcctacacctgctcaaggttactcccagggtcaaggcggtgcatatcctacccctggataattccctgcacaaggttgctacaccccagcagatggctcctacccagcacaaggttcctaccacccagcacagggctactacccagcacaaggttacgattgaccagcacagcgatcctacccagcacaacgttcatatcctacacccccagcacaagggtcagttcccccatcacagggcttgtacccatcacaaagattctaccccacacaggcttaccctggcaagttaag

SEQ ID NO: 293223 - DNA, 450 bp, Zea mays
acgcgagaaacacttggagtggcgtactgaagcgcctttttatacattgggtcctttgacaactgatatggcacctggttatgatcacatcacttaaaccatcggtgctgccaacattacagctcttggcactgaactttactgctatgtaacaccaaaggaccaccttggttagcccaatcgtgatgatgtcaagactggtgtaatatgctacaaaatttctactcatgctgactattatgcaaacgtgtatccatatgcacatgctctacatgatgctctttgcatggcaagggatgagtgaagaatgctcgaccaacttgcttcatctatggatccatgaactgctatagactttcatgatgaagcattgccctctcatggtgccaaagttgcacatttctgctcaatgtgtggacccaagttctgttcaatgaaaattactgagga

SEQ ID NO: 293224 - DNA, 436 bp, Zea mays
tgacggcgcctactgcggcggcggagacaacggtgaaagttagcacgacccgtatcttccccgagatcccacaaggccaggcgagaaaggacttccaagtgctggtgcgcgtcgaggcgccggcgcgtccagaggcgcgcatccccatcgacgtcgtcgccgtcctcgatgtcagcggcagcatgaacgacccggcggcagcgccgacggagagaacgagaacgacgtcgaggctggacctgctgaagacggccgccaagttcatggtcgcgaaactcgaggacggagaccgcctctccatcgtcgcgttcagcgatcggccagtcagagaactgagctccggcttgctgtacatgactgctgacggccggaggaacgccattaggagcttggaccagctggaggcccgcggcggcactgcgctcgtgccggcctt

SEQ ID NO: 293225 - DNA, 343 bp, Zea mays
tctgcctcctccggctgcatctctgcccatccgagcccaaacctcttaccacttctcagggctctggtaatccacacggcacacgccatcaacgcaggcaaggacaggttcgaactgcctgatgatccgcacacatgatccgcattacgcgtctgctgcaagagcctcacgaacctctagaaattctgcagcaatctggtgaagggccccaagggtacgcgtactcaacgtcaaaggcctccgtgccgtattcccttaccaatgtgccttcacatcaccaccaggaaatcttcctgtggccaaggtaccaacacctgggatcgctttgaaatgaggattcaca

SEQ ID NO: 293226 - DNA, 419 bp, Zea mays
aatattataaaagtaaatatttagaactccagctccaaactaacagagacaggtttgttcgcatcgacgaacttaaacaaaaatgcatgttgcacgactacaggtagcgataaatgccatagcacaaatactgatcgccgcataagacagactacagggccaggataaggctgattaaccaagacaaaaacaagtacaatacacccaaatacagatttgatgtgcgatttaccaacatggacatcacagcacaaatcatctctgctagtatagcaggtgatatggttcttgcttctgcttactcgcatgagttgccacgatatggtcttgaagttggtctgaccaactatgcagctgactactgcactggccttctagtggctcgccgtgtgctcaagacccgtggtttaaataaggaa

SEQ ID NO: 293227 - DNA, 447 bp, Zea mays
cgtcaaggatgctggtggaagcaaggttgcaacattgacggggaagtgggatggaagtgtgcattgtgtcatcaacaatgatgcctctaaggtgaactctcatggtccacatcagagttctggttccactttgctatgggagaaaaatgagcctccagtcaatcctacccgctacaacttgtccgcatttgcaataacactaaatgagttaacaccagagctcgaggtacacatggaacatacatatatcccataatctgagttctgttagctcttaacctaaaaggctacgacacatcttttacgctcttgttaaggagaagctgccaccgacggattcaaggctgagaccagatcaacggcacctggagaatggggagtacgagaaggccaatgctgaaaaactgcgcctcgagacacagcaacggatggttgtacacattttac

SEQ ID NO: 293228 - DNA, 376 bp, Zea mays
acggagaaaggaattaatggaacgtgaagaggagctgccttcatcttcttcttccttgggttacgtgatgcagtgcagggtctgccatgaggaagaggatcaagggcgtgcgaccatggagtctccttgtggatgctccggctctctcaagtacgctcacaggggatgtgtgcagagatggtgtgacgagaaggggagcaccctctgtgagatctgccttcagaatttcaagccaggctacacaatgcctgccaagaaaaccccggtggttgaaacggctgtcactatcagtgatcgtgcagtgaacacgaggacatgcaacatttggaaccttcggagggctaggttgacggtgcatattacaccaggtgcttct

SEQ ID NO: 293229 - DNA, 209 bp, Zea mays
acccactcgtcctaacaaaacctgtctttaacgtaacggttcttactttcatacacgtgctgcattgctggcgttgtctcgtttagagggatgatcgctcaagtcctataactagcgaaaccctctttttgagtttctgacacatgctcctaatgctaaatatccaattaaccgagttacataccaaatctactacttaattgagttcc

SEQ ID NO: 293230 - DNA, 339 bp, Zea mays
ctagagttttgcagcaacctagcactaaggctcctgctaaaaagggaaaacagcaagcattgacaagtgctgaagaaccagatgagcctcctctgtgaagaggagcctacaccggactgatcagtgcaaaacaactggtggacatcatctgtcaatggatgattcttggacactctgagcgtagacatattattggtgaaaatgatgagtttattggaaagaaggctgcatatgcatagagccaaaatgttaagggcattgcctgcataggagagctgcttgaagagagtgaagcatgcaaaactcttaatgtatgttgaatgcagatgaaggcttttg

SEQ ID NO: 293231 - DNA, 262 bp, Zea mays
acccataatcgtgatgcctactgccggaattatacaatccacatgtccgttacattgcagctctatctgtctgtatctcctgctcctgatcaggattaaacgaatccatctgcttactgaatcctctgacatcagacctcctagactttttacgacaggacgcactcatcttcatgacaattgtcatgatccataccaactagtcctacgatccacgcattggagcattcatgcaccagttggaaaatattatcctcttaca

SEQ ID NO: 293232 - DNA, 314 bp, Zea mays
gcgcagagcctgattcatctccattcgaaacaccctatcacccacactctcacttcgtccgcagcctgaatcctcgtaacgatggctcgcacgaagcatactgcgcgcaagtccacgggcggcaaggcccctatgaagcagctgtcgaccaaggcggcgcgcaagtcagcccctgcgaccgtcgtgctaaagaatcctgaccgtttccgtccgcgcaccgtggcgctgctctagatccgcaagtaccacaatagcactgagcttctcatccgcaagctgtcctttcagcgcctggtccgcgagatcgcgcagga

SEQ ID NO: 293233 - DNA, 383 bp, Zea mays
gtgttggtgcaaacaatgagatcgcagatgttgatcggttaccgttggccgtgagggagttgggaagctgtgacctttatccacaaagtttaaggcacaatccgaatgggagatttgtagttgtatgtagtgatggagaatacataatatacacagcacttagcatggataaacagatcatttgggtctgcacttgaattcgtttggtcaactgatggagaatatgccatcagagaaagcacctcgcggataaagatatacagtgaacatatccaggagaagaaaagtataaagccatcctttttcgctgaacggatatctggtggagtgttacttgctatgtgtacaaatgactacatctgcttctatgattgggctgaatg

SEQ ID NO: 293234 - DNA, 312 bp, Zea mays
aggcactgtcacaaaggggggttactctactcacattctagaccatgaaaggtatcgggtcaaagtacccgacggctaacctttgtcaaaagcagcacctcttctgcgtgctggaataaccgcgtatactccaatgatgcgactcaacattaaccaacctggatagtcactttcattcattgctattacacctctacttcatatgtcatggacaactggtcaagcattatctcttcaggtaacacctctcagtactagtgaatcacaaagcgatggatccaccaatctacgatgcgcacatagtattgacta

SEQ ID NO: 293235 - DNA, 460 bp, Zea mays
  unsure (1)..(460): unsure at all n locations
ggcaatttaaatcttgaacacttgccacaggattatagtggatccgcgttgacactggttgagtcagttatcaagtcttgttgtcttaggtaacctcacagagtttgagagaggagttctctggctttcagaaaatctgacatttgatgttgatgctcggattaatctttttgagtgtaacataagacttcttggggggcttatttctgctcatattcttgcaaaagactacagcagccagtttaagcatgggctgtatcaagatcaattactacgtcttgctgaaagtttaggcaatcgttttctaccggcatttgagacacctactggattgccgtattcatggattaatcttaagtatggggtgatggaaaatgaaacaactgaaacaagcacatcanggtgtggctcccttatacttgaaatgggtgtgttgtcacgnttgacttgtgattctaga

SEQ ID NO: 293236 - DNA, 288 bp, Zea mays
actattctcgtcaagctgggccacttaacgaagcattatagacagtacatccctttgctggtgctctaacataagttatattcattgatcccctcgactcatgctaagaaatgaaagcatcttaccctatcgagccctgatttccaaaaatctgcaacatgttcaaaggtggccatcaaactcctatactgagtcctggcgcactggaccatatacgccataaaataatatcctatccatgatatgtaattggtgtatacatgcgtgcaatgtaggatgctcttatag

SEQ ID NO: 293237 - DNA, 269 bp, Zea mays
catcacattatacaaccttcctaacaacatccttaacaacttaccacttctcactctatctcttaaccacacatccgtctcctagttccaatccctacaccattacctattcttcaacatctacattcaacttctcctatttcctttcaactcctccctcaccatcaccctctactacctttcatttcaattccacactcactactaaatctacttccaattccttatcaacatatccctctatccctacactcttcacaccaacattt

SEQ ID NO: 293238 - DNA, 402 bp, Zea mays
cctaatttccggtcgagccacgcgtgcgtgcaagtgacggccccgacccatcatgcgccattcgaatcaaaccactacctgatttgtttaggccccggaaatttgccgggtcgctcgtgtcgctcctctccctgcgcagcccccagatccggcaccgaccgctcctcgatccccgcaccccacgcccacacgcctggaccagcagtgtcgcgcgcctggtatgaggaagagaacacgaacggcggcatggcggctccgcccgcgaaggcccgggccgactaccactaccttatcaagctgctcctcattggagacactcctgttggcaagagttgcctcctgttgcggttctctgatggctccttcactacaagctttattaccacaatatggattgacttt

SEQ ID NO: 293239 - DNA, 272 bp, Zea mays
gcatggcatacttccagaccagccacggctaatatttgcagggaaaacatttgaggacgggggcagggtctacaactacgacgggcagaaggataacacgatcgacttacagcttggaactaggggcagcatgcagctatactttaaaacagctaccggaacacctatcaccgatgaagatgagcatatagaccacatctaccacacctatggcactattcatgacaaggagggcattcgcacaaaccagaaccatgtcatatatgctggaa

SEQ ID NO: 293240 - DNA, 331 bp, Zea mays
aattagtttatacttatatgaacgtttttataaatgaggacgcttaccaaacaaataaatttaattcaatctctcacttctttttctaccaaactattataacacttccttcaaatttttatttctattattcctaccttttgtttcatttattctaccacatcatatcttccctatttaacttttacattactaccttcacaaatcttaataatccaatcaacaaatctctatacttctccactcctattttctctatgatcactcttaaaccattatctcattacccttcatccacccaaattttaaaacccactgttcacataaatat

SEQ ID NO: 293241 - DNA, 173 bp, Zea mays
ggccgtgcgtaccgtcttcttagtactttccttgcaagtgtcgttccgtccctgtagtgaggcagtatactttcgaatgtcttcacttcatggtcgctccactcctgttagatctggactcttatcctgcattctgtacttgccctaagcatctatgatgcctgttttaaaaa

SEQ ID NO: 293242 - DNA, 454 bp, Zea mays
ctgttacaagcttggtggctaacatcaaaggggagaacaggtttgcagaggtcaaggcagggaaggccgatgttcaggcagaaattcacagaggaaagaagcatttctatggtgatgacttggatgcagaggaagggaggcgcagtaaacattcagcacccgctatcgacactgatcaccttgtgcgggagatgatggacaaggtcttgttgtgcaatggcgagacatgttcaaaaggcgtcaaggaactccgtgaagccctgcagcatgacgtggcaaagaattcacacggggttcatggaaaagggtccggacatggcaagggccgtggcaagaaacagccgaagaaggaggtggttgacttggagactctcctcgtccactgtgctcagtctgtggccaccgatgatcgacgtggtgcaactgagctcctgaagcagatcagacagcatgc

SEQ ID NO: 293243 - DNA, 447 bp, Zea mays
gtcccataatacatgtgggccggcatcatgaaggggacttgatcattcatcaagctagcacggagccctcatatagttatgtgccatcaatctttttaccacaatggtgtaatatatcttgttcttgagtacatggaccgtggatcgcttgcagacattgttaagcaagtgaagactattctggagccataccttgcagtactttgtaagcaggtcttggagggtttattgtatcttcatcatcaaaggcacgtgattcacagggacataaaaccatctaacttgttggtcaaccgtaaaggtgaagtcaagattaccgacttcggagtgagtgctgtgctagcaagctcaataggtcagcgagatacatttgttggaacctacaactatatggcgcctgagcggattagtggtagcacttatgactacaaaagtgacatatggagt

SEQ ID NO: 293244 - DNA, 298 bp, Zea mays
agtaaaggactcgcatcatcccatcaaccctttcatttcacctaatgccatgcgatattatctgagggtttacttcaagagcacaggggatacatacttttcacttctcaagttgtctcttaccaaggctaatctataccttcaagatcttattgctcacaaacatgctattcctttccctagatactgacctgctgttactcataccgttcaagctaataatcaccacttcaatgttcacctcctctagaccgttaaatcatccagttccattctactatagcttaaaaatgctcat

SEQ ID NO: 293245 - DNA, 433 bp, Zea mays
gaaatctaagccagcccaagcgcggaaggtctaaccgattgctgctcccccgccgaggcgtgacaaatctccaccagcagttgtgtagaaatggctgatggtgaggacatccagcctcttgtctgcgacaatggcaccggaatggtcaaggctggttttgctggggacgatgcaccaagggcggttttacctagcattgttggccgtcctcgccacactggtgtcatggtagggatgggacacaacgatgcatatgttggcgatgaggcacagtccaagagaggtattctcacgctcaagtacccgattgagcacggtattgtgagcaactgggatgacatggagaaaatctggcatcatactttctacaacgagcttcgtgttgcaccagaggagcaccctgtgttgctcactgaggctcctttgaacccaa

SEQ ID NO: 293246 - DNA, 283 bp, Zea mays
cgggtcggcccacgcgtacgctgggagatagagagaggagagggattgttttctcaaagagaaccttaacccaaacggcatgttcgcactgcagagcgaggatgtcaagctcgtcgccgtcaactaccccttcatcaccacggattacatgacctacatgttcaagtacgacaccgtgcactgccaatttaagcacatcgacatcaccctcaaagactccaagacgcttctcttctgctagaatccggtcaccgtctttggcatcatgaacccctaagagatc

SEQ ID NO: 293247 - DNA, 439 bp, Zea mays
gtctgtcttggtggctgattgcaacggtcatggcaaccacgtctcaccggatacccgtgcggctgctatgcctgggcagtgctggtgacctactccttcgaagcaggcagcttggaccacgagctggacatcacgtgctgcgactgacggtacaaggtccttgacaacagacagctgctgacgctgacgctagaccgcacatacggctccaggttccaatccctgcacgagtacctgttcagcaagatcgacatgcagctgcagctggtagccgatcaactacgacggcaccgtcaccgactactaccatgatgtgcaaagccagacgcacgacgagatcgacttcgagttcatgggcaacttgtccggcgaaccctacacgctgcacaccaacatattcacgcggggacatgggcatcatgagcagcagttccgactc

SEQ ID NO: 293248 - DNA, 199 bp, Zea mays
ctggaacacgcacatcaagcgcaagctccttttccgcggcatggacccgcagacgcaccgcgggctcgccagcgcgaccgcggggcagcagcattaccagcttcaggagccgaaaaaccaagcggccggcggcggtccatcaggccatcctgaccaggaccacttggaggtcgtcgtcattttgaattgcccgaccaag

SEQ ID NO: 293249 - DNA, 376 bp, Zea mays
gtgcgtattcacgcacaccaaccagttctgcttcatgtccatgggctactactgcagccagcgattgttcaaagacggcgggggcgtttactcctgctacaagattctattcaagaatgacccgtcctgcttcatgcatacagagaccgtgatcatcaccgacataaactactacccggtagtccaagtaccacttcgacctcagcatcacttgcattcgacttagctgtctcaaacgactgacctcaaccactagctccgccactccatcatcataaacatcaagttcaccacattgccaatcgagtttccgggcctgaagatcgttttccacgtgcaagagtactcgaacacgatatacctcgcgatactattc

SEQ ID NO: 293250 - DNA, 323 bp, Zea mays
aaaacggatccgtaacttcgggaaaaggattggctctgagggttgggctcgggggtggcgggcgcgaacccgtcggctgctggcggaatgctcgagctgctcgcgcggcgagagcgggccgccgcgtggcggccgggggacggaccgggaacggccccctcgggggccttccccgggcgtcgaacaaccgactcagaactagtacggacaagaggaaccccacctggatgtattatgaggaaaaagtgactgtgcacatgaggagtctgagaattactcgctcccgtcccaaactaactgtatttctacgatttgaaatatat

SEQ ID NO: 293251 - DNA, 423 bp, Zea mays
cggacgcgtgggcggacgcgtgggcggacgcgtgggtttttgtggatgaagaaccagttgaagaaaacactccaaaagtattactgtccaagagaaagattatgtcaccgacgtctcaggagaagctttgcagtgctctgactggcattgatttgtgtgatggagttcaaagatttaagagcaaaatcattattgaagatcatgaaaacactccaaaatcattgttgcttatgagctttttgtttctgcagcagtgtgctactaatggttggaaagcggaacgaaacaatcaaacatcaggacaaagctctaaatttgtattgtcctttatggattggagataaagagatagagttttacagtcagttccacataattgtccttggtctagattcaattggtatgggaatataaattatgcgg

SEQ ID NO: 293252 - DNA, 356 bp, Zea mays
acgcaacgaaccatctttacattgggacatagacacagtaaagatcttcttgaccggaataactctggagagatacttacgatgtgggggaaccaaacgcatattctgcaacacgaggatgccttatgatgaccgctttcttgaatgcctgtttggtctgatcaagaagaactttactgagtctatgacccaactaaccatgtttacattggccatatcttcatggcgaattcaaaagatgtcataaggccaaaacttttcccgcgtgaaggcatacaaatccgtgggtctcgaggtatgtcaatgccccagattatgttaaccctcgacccggaaatgatccttggctacagaac

SEQ ID NO: 293253 - DNA, 412 bp, Zea mays
ccggctcaaagggactgtgctggactctggatggagccaggctagcttcctgatgcaggcggccacgctcacgaagcgggcgttcgtcaacatgtccagggatttcgggtactactggctgaggctcatcatctatgtcgtcgtcacgatttgcatcgggactatatacttcaatgtcggcaccggctacagctctatcctggcccggggggcatgcgcttccttcatcttcggcttcgtcacgttcatgtcgatcggggggttcccgtcgttcgtggaggacatgaaggtgtttcagagggagaggctgaacgggcactacggcgtggtcgcgttcgtgatcagcaacacggtgtcggcgatgccgttccttgtcctcatcaccctggtgtcgggcacgctgtgctacttt

SEQ ID NO: 293254 - DNA, 353 bp, Zea mays
gtcccagttatactatagtcctaattattgttcatgacaagatcattgcgtacatgggaacgtggatcgaccacgcaggagaacagtgctaccacaagggtggtatgggacgcccttggctgactaattaggaaagctagtggaagacaaccttacccgaaaggagcacttgcagtacaggaacatgcgtatatagaggttctcgggtcaatcatgtaacgctggctttatggagagttttctcatttccaaagacatgtttcccataatgaatatatttgctcataaaagatcaaatgcaaacaacactaggtaaatcaagagcattcacatatggacctatacattgatag

SEQ ID NO: 293255 - DNA, 383 bp, Zea mays
  unsure (1)..(383): unsure at all n locations
accgcgtcttcgtactcgcctacctccgcggatcaaacctttcccccttctcccaattcccgacggcggtccatcccgtaacgcgagaccattagggagtgcatttcgatccacatcggccaagccggtatccaggtcggaaacgcgtgctgggagctgtactgccttgagcatggcattcaagctgacggtcagatgcccggtgacaagaccattgacggaggtgatgatgcttttaacaccttcttcagtgagactggtgctgggaagcacgtgccccgtgctgtttttgctgaccttgaacccactgtcatcgatgatgtgagaactggcacctaccgncagctcttccaccctgagcagctcatcaatgcgaaggagga

SEQ ID NO: 293256 - DNA, 378 bp, Zea mays
  unsure (1)..(378): unsure at all n locations
gtcgtcgtcgtagcagagatgacctagctacgtgtgtgtcatgcatcaaactggcgggtagggcagaagcagaagcggcgggagctgcagctgagccagatgcgccgggacatcgccaagctcctagaggccggccaggaggccactgcccggatcagggtggagcacatcatccgggaggagaacatgatggccgcgcaggagatcctcgagctcttctgcgagctcatcgcggttcgcctgcccatcatcgaggcccaaaaggagtgtcctattgatctcaaagaagcaatatcaagtgtctggtttgccgctccaagatgtgcagatctacctgaactgatgcangttcaaatgatgtttgcaactaaatatggg

SEQ ID NO: 293257 - DNA, 290 bp, Zea mays
acgctaggatggaggatgactcgccgctgacgattactattaagggtgcggtgacaggactcggctgggggaccatctggggcagggtcgacaccacctgatacgacttgccccgtgtggagcgcaacatgcggctccctggccttatcacaaccctaaaaatgtgcagcactatacggggccactttacccaccatcgggggcctatacatcggattttaccagttcgtacaaagccagcccaaaaagcgtcactttaaaaagggacccctgtgcgctttttttcccaa

SEQ ID NO: 293258 - DNA, 245 bp, Zea mays
acatctgcacttcatagagagttttctatgattttgttgacatcaacatctcgagttgtatttaatccacgggagcatcctcaaaccgatgcctactgtggcaatgttaacccaattggagtcacgagtttttatgatgaaggtaaacttctatcatatactcttatgttcgactatcacaggcatcatggcatttaaatcctcattgccaggattttcaacacctattgtccaaggatgaacat

SEQ ID NO: 293259 - DNA, 286 bp, Zea mays
cttttgcctttcgcacactttaacttactttcttttctcttatgtcaggtccctcaaaatgtgcacttgatcatatgaaatcatgaatctgctgacatcaatgccctttttggcttcctccttgaatgcatcgatagaatgattgaaagtgatggaatattatcttgtacaacattcaatcaactactcaattatcttccactcgctgccatgatagaaaagaaaataatcttcatgcatctaggcataataaggtcgataaacacaacttagcaaattgacaaac

SEQ ID NO: 293260 - DNA, 380 bp, Zea mays
gtaagcacctgtttctccatggaccatggctatgtttagcatcctccgtttggatttcgatgtgtgggtgtttgtgtctgcctaccttctctcccatttgggggtgcagttaccctgcaggcacagaaagattacccaccagacatgcaatgcaaggataaattcttgattcagagcacgaaggtggccaccggtaccgagatggatgagatccccctgatacgttcaacaaggaaggctgataaggtaatcgaggaaatgaagttcaaggttgtctacacattacctagctacggaggttcaaatgactctagcgtatcatttttaggaagccggagcttcaaagcagcgtctgacgatctgatgatgctgaagaatgc

SEQ ID NO: 293261 - DNA, 309 bp, Zea mays
acggggcgcgttagtgtctggtaattggaatgagtacaatctaaatcccttaacgaggatccagtgggatgtaagccgcagtggttggcatatattgcccaccttcacctgagagaagatatcgggcgcgcaataatgattagtgagcagtcctgtatggagcctgggtgcagcctctgccagtattaagtgatctacgtgttatacattttttatgttcatgaaacattgatccattgataaaatatatcgtcaggtggcaaggggtcgatttgggggaaaaaaataccttattaatatactcaacaa

SEQ ID NO: 293262 - DNA, 423 bp, Zea mays
cctagatgaggtggattcttttgctattgctcgagacagtgaaattcatgaagctacacgagagaatcttgtcagtaattctgcgacagatcgatgggtttgagcaggatagacgggtggtagtcattgctgcaacaaatagaaaggaggaccttgatccagctctcatcagccgttttgattcaatcatctgttttggcttaccagatcagcaaactcgtgtggaaatagctgcacagtatgccaagcatttgactagatcagaattggttcaattttcattggccactcaagatttttacagattggtctacccatattcttggttagccagtgaggatgcatagatacagttctagtttcacagattcgtctctatccataatccatatccggtgcaacctgtgactagagatgtgcaga

SEQ ID NO: 293263 - DNA, 429 bp, Zea mays
aggatctccaaactttgcatgttgtttcagccaataaagttttggtttcacagctggggaacttgaagttaatgagaagtttggctatcgcggaagtgcaacaaagctacattgcagaattatgcaactcgctgacaaagatgactaacctgaaaacactatttatttccacgtgcaatgtgaatgagactctcaacatagaaatgctaaagccgttgccaaatctgacatcatttctcctatcaggaaagttggagagaggcttgcccccgtcgatattctctatgaatttaaaacagttaaaattgttcgggtctagtctgaagaaggatcctgttagctcgttctctcatatgctaaatcttgttaatctattcctcactggagcatatgatggggaacagctaactttttgcaccagatggttcc

SEQ ID NO: 293264 - DNA, 397 bp, Zea mays
gcagttgcagctgagagtaccatcacattgtgggatcctgataataatgcgcttgttggtggcattgcagaaacgctagcgccagtgacaaatctttctttcgttgtgacatcagtgtttttgatgtctctatgtccgagttcaataccacagattgctctatggaatgcttcaaatattttcatgcaatgctcttacaacatttatacataatcttcatgcttgtcttcacatgcgtgtcaatttgcactttttactccaattatactatcatacttaatatcatcaacacaacttgctagtcatatgacattttttaaccccttcagcacatccatgattgtcttctacttgcattataaaatatctttctggactatgctggttatctaaagag

SEQ ID NO: 293265 - DNA, 436 bp, Zea mays
ctggtcaccactgttgtaggtcctagaagatcagggctatgatggtgcaatggctgatctgtggtgatgtggagttatcctgtgtgttctgctagctgggtatttacctttcgaggactctaatcttatgacgctgtataagaaaatctcaaatgcagaatatacatttccaccatggacgtcgttccctgccaagaggttgttaacaagaatccttgatccaaatccgatgacggtatgcaagagcacaaaagctgctcgaaataaaatactacccaaaacaatgtaggaattttggagagtctaaaagttcctactgcacttactagcacatagccagagatagatgtatttgggggaaagattcttttagggaagtatagacaacatgcatatatcgaaatgaaactatttgtgtgaggaaagagttgcaacc

SEQ ID NO: 293266 - DNA, 434 bp, Zea mays
cccgctgctgcaaatcccggggccgcccggggcgccgccgccagcagcgccagcggtgagacatgacgccgccggcgaccgggcaagggggaggaggccataaaaatagaaccagactggtgttggccattgcattgcctttagctgctgcaactgcaatattagctctcgcagtagcatgtttgtattaccggagtagaagaagaacaacagcgcaaagggactcatcaggaaagccatgttctcctagtccagatgacattgataagagcatcgattcgctcctttttgacctaccggcattacgggcagcaaccaataacttcgctgaaagcaataagcttggcgaaggagggttcggtgcagtttataagggaatcctttctgaaggccaacaagtagcagtgaagaggctctcacttggctctacacaa

SEQ ID NO: 293267 - DNA, 289 bp, Zea mays
caataacatgcaccatccattatatttatttattaaattgactctatcggatctgctatagtggggtttataactggggagggtgacaattaagttcatcgtactatgcttgaacttataaaccaccttgataatttttaatcatcacacaatattaaagaatttatgacaacgaacagtatagacattatccatcaatccctactgagtcctctccctataaacagtaatattgaattccctaatcctatcgaagattcaaaattcgatatatcaaatatccaatcaa

SEQ ID NO: 293268 - DNA, 414 bp, Zea mays
gaaaatgatgtagatcaagaattggatgatgacaatggcgtggagcgtatacttagtgggaaattgggtgagagcagtggatatgctggcagtgacctctatgactacaagtctcgagaaccagattactgcattggagaacaagtgctcaggtgattaccaatggattggtttctgtcacaatgatcttcagaatggcaatatcatgattgatgaaaagaccaacgtgctgaccatcattaaaatggccatcggtgtccctaaaaagcggaatgacaaatgggtggctaatcagcttttaaagctacatctggagtaaaaagcttcgaaggatgctcatcttcagtttatgcgctactatttgttgactgacatggacttgcaaaagcgcacttaatacttggtagttttgga

SEQ ID NO: 293269 - DNA, 244 bp, Zea mays
gtaggagttatgacagtgctgattccgacgatcattatcattgccaccaagaagtagcatgtgtgcggtacctactcggacaagcagcctgttgtactgatccaggtctacgagggttagaggacccgtacacgcgtcaacaacctgctgtgcaagttcgagctctccggcattcctgctgcaccccgtggtgtgccacatatcatcgtgtgcttatacatcgacgcctacggcatactgaacg

SEQ ID NO: 293270 - DNA, 396 bp, Zea mays
gcttagagagttatacttatactagcttgcgggcgggcggacgctgttgcgatggagctggtgactatcgtgacgcggacgctactggcgtactcggcgacgatgctggcgcgggtgctggtggcgagcgcgcagcggcgtcggtgctacctgctggactacgtgtgctacaaggctacggacgaccgtaagctgccgacggacctgtgctgcgagatcatacagcggaacatgctgctgatgctggaggagtacaagctcctgctgaatgtgatcgcgaactcgggcataggctaggagacgtacggtccgcgcaacatgatcgaggtctgggaggcccggccggaccggctgcgctggccatggaagagatggacgagaccttccacgccttcc

SEQ ID NO: 293271 - DNA, 457 bp, Zea mays
cactcatggcgaatgtccacctctacgcagtctcagcctgcgcaatcattctatcgctcgcgacctatgccttagccggtgacgccgacatgctgcaagacgtatgcccagctgactacacctcctcagtgaagctgaacggtgttcccgtgcaaagcaaacttttcatgcgcacgactgattcttctacggtctgaggaacccgtgcaacaccaacaacctctcgggctacttactctacggctgtcaacgaggacaagttcccaggcgtgaacacactacgcgtatgcatggcgcgcatcgactacgcgctgggaggacagaacacctcgtacacgcacacactcgccacctagatcatcttaggcactagacagcacgctcaaggtcagcttcatcaccatcggcaacacgcatttcaccaagaccgtaaccaaggacgacgtcttcgtattca

SEQ ID NO: 293272 - DNA, 471 bp, Zea mays
aattcccggtgcttctgctgcccctccggttcgggttcgggttcgtgaggttctccggcgttccgtttcgtgggtgagcggatcgaggtggcggcgtccgatgttgagtaccggtgcttcgtcggcggactcgcctgggccacagacgaccactccctccacaacgccttcagcacctacggcgaggtcctcgagtccaagatcatcctcgatcgggagacgcacaggtcccgcggcttcggcttcgtcaccttcttcacggaggacgcgatgccgaacgccatcgagggcatgaacggcaaggagctggacggccgcaacatcaccgtcaacgaggcccagtcccgcggcggacgtggaggccgcggcggcggcgggtacggtggtggccgtggacgcagcggctacagcagtggcaggcgccgagatggccgcagcagctacagcggtggcggcggctacagtggtggc

SEQ ID NO: 293273 - DNA, 482 bp, Zea mays
ctagttctagatcgcgagcggccgcccttttttttttttttttagaatcttctgtgttgagtttttgagagagatccggagtcaacacgatgaaattgaggccaagtttttttgaagaacgagctgcccttgaggcaaagtaccagaagctttatgaacctttatacacaaagaggtatggaattgtaaatggagaagtggaggtagatggtgtttgtgatgaaccggccagtgagaatactgttgagggaaaagaaccagacgctaaaggagttccagacttttggcttactgccatgaaaacaaacgaggttttgtctgaggagatacaagagcgcgatgaagccgctttgaaatatctaaaagatatcaagtggtctagaatcgaggatcctaagggtttcaagctggattttttctttgatacaaacccattcttcaagaattctgtcctgacaaaaacgtaccacatggttgatgaa

SEQ ID NO: 293274 - DNA, 353 bp, Zea mays
acgctcaggtcaaactatcagcacgtgctatgttttcttaccccttgattcacggcgtcaatatgttggcgatctctgcgagggatgcaaccatgttagatgaatgcaaacaagagatctagctaatgcctgcacggatcaacaatgtaaaacgcaagctctactacagattgtctctcaagctcaagaacacaaagaactggtctaccattctaagccatatcttcactttctcatacacgcgaatgaacaaaacgcatagtgacaacatgacggataaatggcttatttacatgaccaatgatggactgaaattgtagctcgactgttactgtctaaatgtgattatctag

SEQ ID NO: 293275 - DNA, 415 bp, Zea mays
gcctccgccgacgaccccagccccgacccgctccactacggcctcacgctctcccgaccggatgggcgcctcgacggcgtcctcgccgcgtacaccagcttctccatccactccgtggtcggcgccggacaactggaggccaaagtgcgcgacgaggccgatgccgtcgcgtactggacggccgtcgcgcccaacgtggaggcgtacggaagcgcagtggccatgaccatcgccacgggcgccgagcacctcgccaaagggatactgtggtgcagggaggtcacgtagagagcctacgctgggggaatgaggtcctcaaaaagaggatgcaagccgtcgacgccaacgtcgaggtcagccccaatatgctcaagcgaatcaaaagggctaagacggtgagccaaatatctgagaa

SEQ ID NO: 293276 - DNA, 408 bp, Zea mays
aggccattgagacctgaatatagagatgatcacatggtggggcttgtgactgaattcttggacgcagtacaacatttcataagtcttgggaaaagctatatcatatagtctagatttcttagctcagtacaaattgctcctagattcttatggaagaatgtcatcagtctattgtttcatgggtgtgcacccatctgactcaaataatattgttgtatggtgtgcacccctttgacttcaggagaaacttatcctatattttgcagatgtttgggtctgtgatatggtttcctttgtctacaccgaatgttctaattatctatatcgttcctttgtacagctcttggtgtagcttgccactctcaccaatcaagttttcatgtctgatctcgacattcagatcccaac

SEQ ID NO: 293277 - DNA, 432 bp, Zea mays
gccaaccagaagagcttgcagttactgagagtgtgtgtgagagagaggatgggtggcaggggcagggctgctctgctgctggccctggtggtggtggccgtgagcctggccgtggagatccaggccgacgccgggtacggttactgcggcgggtacaccgcgactccgacgcctgccaccccgaccccgaagcccgagaagccccacaccaacgggccgaagccggacaagccgaccaaggagcacatgccgcccaaggagcacggtcccaagccggagaagccgtccaaggagcacaagccgacgccgtccacgtacaccccgagccccaaaccgactccgacgacggacactcacacccggactccttccaagccgactccaccgacatacactgccgcgcctacgccgaacaaacgcacaccaaaaccc

SEQ ID NO: 293278 - DNA, 439 bp, Zea mays
ccgggggctggaaggaccggacgacggtggaggatatggacctggctgtccgtgcgatgctgcagggctggaagtttgggtacgtcggcgacataaaagtacgccggtgctaacgatcatcactactttctcgcacggaactcaagagcataacaagaaacgaattctaacgatcctcaggatatataactgcatctgtatgtatgtgcgttaggtcaagagtgaattgcctagcacgttcaaggcataccggtttcagcagcacaggtggtcttgtggaccggcaaacctgttcaagaaaatgatggtagagattttagaaaacaagaaagtgtcattgtggagcaaaatctacttatggtacaatttcttcttcgttgggaaggtcgctggccaaacggtgacattcatctactactgctgtgcgatccccgtgtct

SEQ ID NO: 293279 - DNA, 430 bp, Zea mays
agagaattgacacacccaaaaattattatatatatcggatacacttgaagaggctgaggtgataggtatgtaaacacgatctcgtacgactcaccaaaccaaagtccggaagttccattttttttgttaagaagagaacaaatatgtatcaattgttgaatcggatacaacaatgggccaaaaaggccaaaggggcaataagaactgctgttaaaaaaatgataaactttttttttatctttaggctattcacttttcacgtgctcagaatgttctgcagaattagggacttttttcttctattggctgatcttatgatgagaactttctccatttatgttttatttcccctaattctaattgggtggggtataaaggaatttgcgctcttcatatacccctatggctggatagtaattttcagtgatat

SEQ ID NO: 293280 - DNA, 377 bp, Zea mays
  unsure (1)..(377): unsure at all n locations
caaccagcccacccgccggttggtcacgctcctccccgatccccaattccctatctcggggcggcgccatgtcaggccggtgcgcggccgtcataggtctgctcgtgctcctcatcctctgggcctcatgcgcgcgcctcccacgccgcagcagcaccacccggggagctgctctgcctcgccggggagcgccgaccactgcggcgttcgcgctgggaagcttctggcggtcgaaagcggccttctggtgcctncactgcgtgatccgcacctacgtcgactacgctagcggctccaagtccaaccccgagtaccgtatcctctccgaccacgcctagtgcgttaaggtcgagcatgatccccggttgattcactac

SEQ ID NO: 293281 - DNA, 439 bp, Zea mays
gactcgtccgattcttattgatgatctgattaaatcagagatatattcagattatgtgcatgctcatctgtcccctagtggtgaccggaagatacccactgatatggaagattatttgaagggttgcaaatttcttccaaagcttaacaatgatatcccaagtgcaagaaatactacctataaagaaagattcagcagcttggaaaacttggtactgatcatgtctgaggactatgcagtattaatacctctggaaacagcgtggtttggttattaccctgatggagcctttagcccagtgctgccccctcaagagacgaagctgtatacagaatattggattggcttgaagaccctggacgaggctgggcgtgttaaattcgtgtctgtgccatgaggtcacctgcgtatcaccagaagcgacatgaagaagtacatc

SEQ ID NO: 293282 - DNA, 399 bp, Zea mays
gaagcatgatctgatcaccgtaacgcaaacgctgacacccgatgaggtcctctttcgagcaggtccatcagagatgactgcatactctcattactgtggatcactactattcgaacattaaccagagtactcgcatcagaccagtctcttacgtgacttatttatccgctaggggtaccaactagatcatgtatgtgactgcaccattatgaaatatcctcaacttagagatgaattctgacttcactctagctacaatatgaatcggtttgcaatccctcatgcagaaaggactgatcgatctgcatctcaagctttgttcagaacgactggatctggatctggtcacaatcgagagcactccaagcacaccagtcttctggagtcactgatgccatc

SEQ ID NO: 293283 - DNA, 423 bp, Zea mays
acgccagagtgaaatcctccatgctgaacaaaatgattacaagactgctgacatctacttggttggagcatttgaagcttggggttcactggatgacccaaaagccatctttatcctgaagtacatactctagtgtaaaataatggctaaccaaactgactatgttacaggaataatctcacctatagctgtcctaaaatatctgggtcctaataatcatgctatgaacgctgattcttatacatactctaatagatctctcaagtattttgaaactgcccttcgtgattataagtcccatctgtacgatgaccatattgtgcacagacatatttcatctctatatgatacacttctatagcataatctgcacaggattactgaaccctaattaatgccagatattgctcatatagctgatat

SEQ ID NO: 293284 - DNA, 374 bp, Zea mays
gttgaaatgaattttatgggcacactagtcatatctacagcatggttcatttctgagggtgggcaggtgggaagttcatgggggaccgtatttgcctgagatctgcagcagccacaggagccgataccaatctctgatctaggtcttaatgaaacagctgaccctgtgtgtgaaagtgacgtttgcgagattcttttcgacacttacactaagtcttacgatatcatctcatctgcatctgcaagaatattgccagtgatgatgtgttcagaggatgggatccttgcaggcgtcgaacatgataagagaccccttgaattgcttgctgaatcttgtgccatcaactccttcgacatagatcctcataacccctc

SEQ ID NO: 293285 - DNA, 432 bp, Zea mays
gtcagggcggcgtccacggcgcggctgcacaagcgcaactgccgccgcttcgcgcatcacgtcgggctcatcggcggcctgctggagcagctccgcgtgtcggagctcatgaagtacccggagacgcgggagccgctggagcagctcgaggacgcgctccgccggggctacctgctcgtcaactcctgccaggaccgctcctacctctacctcctcgccatgggctggaacatcgtctaccagttccgcaaggcgcagagcgagatcgacaattacctccgcctcgtcccgctcatcacgctcgtcgacaatgcccgcattcgggatcggcttgagtatattgagagggaccaatgtgaatattcctttgacgaggaagacaagaaagtgcaagatgctctgttgaatcctgacccttgcacgaatcctaca

SEQ ID NO: 293286 - DNA, 315 bp, Zea mays
atttctgggctcctagttcagttttggtgcagctacagcacactgccgctgaatgtgattgtttctcagatgggttccaagttcaagaaatcactggtctcggagaacgtgagggagtcgctgcacagctggtgcaagagggttaaggacaggagccgacacaacccgctcttctcgcggaacgggaccctcacgaccagatccgtgtgctccctagacaccacctacgagacggatcacgagacgaacacggtgtgcacgctgtcgaggacggcgtcggcaacgtcgctggacgaccagttgaccgtggtcacc

SEQ ID NO: 293287 - DNA, 321 bp, Zea mays
gctatgcataggacatgactcgttgcatgacagatgaggagtctggacagcagagtctagggtgcctcaaccccatgctcgtgaagcgtttcacggagttccctccgaggagcagtcttgaccctagcatgtacgtctacaacaccaccaccatcatgcacgcggacctagagaacaagctcgatgacctgacggtgcatcaggcgctgtacggaaacctgctatacatcctgtaccacaactacaacttcatgccgatcctgttcagggtgaacatcctgtaggacaactttatatactccaccagtaccgtgctattct

SEQ ID NO: 293288 - DNA, 336 bp, Zea mays
tcgacccactcgtgctatcctttgcgttcaatatccatcttagctttcaccgtcccacttctccattccgagcgtcgggagcccgattcccatgcactgcaaagcgtctacgtgcatatccgccggcgatccactcaccatctatgagatcgtcttcgaccctaccaaagcgtactatatccacatacgattcgtctgcacctcactctgccactccgatatcaccttctggaaagctataatggcaccagtgtttccaagaatactatggcatgaggctttcaggatattggatatcgtgctagagcacttagaaggcttcgcggctaggtacac

SEQ ID NO: 293289 - DNA, 393 bp, Zea mays
ctcgtatctgccaggacgacagtataggccatcgacatatttaagctcatgtcatccacctacatcttggcgcataggggagccttttacctgcgccacctctttgagaacatcaaggagtcgttgaagaacactgagacccaagtagacaataaggtactgaccatgaacctcctagacgagctctccagcgcccgcttcatcaataaggagctgatcatcaccatctaccgcgatgacgtgttcacgtactctgaagacgcgctcagcgccaacctgtccctgatacagaagatgctcgccgagctcgtggaccactccctcatcagcgacaacacggagcgctagcccttcgtgttctgcaagatcatcagcttctaggaggatctacac

SEQ ID NO: 293290 - DNA, 433 bp, Zea mays
gtcataatctagtgttcattggtcatccaatggaatatcataatctattattcattggtgagtcaagggggaatgcgttgtttggtggtttcttctctttgcacagttggttgctttaataaaagctgtacagttcggggcttcccttgcttaaacactattatgtttatgaattatgatataactcttgcttattcccttggctgacatctttttgtaattgctgcagtgggatactgctgggcaagatcgcttcaggacaatcactagcagctactaccgcggagctcatggaatcattgtaagttggccacctgaactagcaacttctgaaatttgtcaaccatattgatcatattacattattggctcattgctggctttcagattgtatatgacgtgacagacccagaaagcttcaataatgtgaagc

SEQ ID NO: 293291 - DNA, 387 bp, Zea mays
aacatctaataaaaaccaacatttcttttttcattgggacgcaattaaagaagagagaaaaagtatattttttttccaaggatgatttcttcctggagaaagagaagagctggtaagcgtgcagggaaagagcatgcatggaatgaaaatggtgaaatggagctaacaattcctagagattttaggtgtccgatatcgctggacttgatgaaagaccccgtcacgttatcttcaggtataacgtatgatcgacccaacatcgagaaatggatcgaagcctggaatttcacttgtcctcttaccaatcgagtgttaaggagtctcgaacccatccccaaccacatcataaggaaaaaaatccaagattggtgcgtctagaatcgatcc

SEQ ID NO: 293292 - DNA, 432 bp, Zea mays
caatttggctttttggttctttaacatgtatacaatgctatgttatgttttaggatgtttggcattgtgagatatgcaataggaagccagggcgaggttttggtgggtataattgtcttttaaatatatcctagtagatattttatgtttccatgcgattatgcattattactattcgatgtcatcttaccttttatagaaacaacggttgaggtcttgccacggttgtgccaaatcaaatatgccagtggtacactcgaggagcttctgtatgttgatatgccgagagagtcccagaattcatctggacagattgttttggactataccaaagcaatccaggagagtgtctttgagcaactgcgtgtagtccgtgaagggcatctaagaattgtattcaaccaagacttgaagattgcatcgtgggagttc

SEQ ID NO: 293293 - DNA, 462 bp, Zea mays
ggtcgaccacgcgtccgcggacgcgtgggcatctggatacgtcgactctaattacaaacatcagaaatatcgagaaggcggtcagagattgcttggaccacgttaagagtacgcggcacatgatcctctattatgaggatataatcagcaacagcaatgcattatcccgggtgcaagagttcctcggggtcccggtgaggaggctgatgagccggcaggtgaaaattcacacgaggcctatttcggaccttgtcaagaactgggaggaagttagcatcaaactgaacgggacagagtttgctcacttccttgatggttcagattatgccaagtgatggacggcaggttattcgcatttggagttgtagttgcaaacatgctttagaattcttttgtacagatgagtttgtaatgagcaaggcataaagacaacagatgacgatcacaagtgcaaatggaatc

SEQ ID NO: 293294 - DNA, 384 bp, Zea mays
gtgagtttaaaaaatcaacacttggaaaatatttcgggtttaatacttgcgcaactaaagaatttgaattgtttataatacgccatccttgcttagctaaaagtgaaacattaaattgagccatatttctgaagcccaatccaccctcttctttaggacggcataagtacttccactgacaccaatgaatacctctcataccatgcgttttttgccaccaaaatttagcaaaaatattctcaaattctcctcaaagagtctttggtaataagaagcatgacatagcgtacgttggaatggcctgtaacaccgatttaataaagacttctttacctccttgagataacattctagtactccacccatcaatcctggtagcaatct

SEQ ID NO: 293295 - DNA, 366 bp, Zea mays
tgaacatgggattgggaaattcaggagaagaagactgccggagtatgagattttcacgtcagatgagttgacaaagaagttccatggccgagttcttgaattcttcaaccatgggtgcgaggttcacttcttcatgacatggattgccaaggtagggtcctttggaagaagggaaatcatggctgtggaaagcgtttttaaggctcatcctaatggttgcttgatgattctatccagaaccatggactcagtacaaggttacaggatcctgaaaccgttgcttgatcggggtttcaaagttctagcattggccccagacttcccatttctggtgaagaacacacccgctgaaacttggcttgatga

SEQ ID NO: 293296 - DNA, 382 bp, Zea mays
atttcaatttgattgaagaagaagatttaccggttggagggcaagcaattcgtgggcttcctttgttttgtaaggatacaaaggagtacatttctaaaatagtagacattttaaggcaactccttactgctgatgagattgtggagcgtgatgctgttcataaagccttaatgtctgtattaaggcaggatgtgaaggaacttattggaataattgaagggcaggctgatttagatgcacaatttgacgtctctgatgcagatcatattgataggttgatatcgtgtctgttcatggctattccattttttgtgaggggtgcacctggcagcaagtttctcaactacttaaacaaacacattatacctgtttttgataagct

SEQ ID NO: 293297 - DNA, 388 bp, Zea mays
atctctacttccatttcatctgccatcaatttgctcggaggatcatgttggctatttttcacaaggcatttgctaatccaccagaggagctgaatagtccagcttctcataaatctaccaagaagcctaaacagcctgaagaaaccctaaatgatttcctatctcatcaccctcacaacactttctccatgagctttggcaacgctgctgttttggcttatgtccgccatgaacgtgctgcttcagttcatcagaggttgttttgtgggtttgatgacatatactgcctcttcttagggagcttgaacaatctatttatgctgaatagacaatatggtctttccaaagggagcaatgaagcgatgtttgtgattgaagcatataggac

SEQ ID NO: 293298 - DNA, 417 bp, Zea mays
cttggtggaaaggctggtgtttcttgtggacggtttcactatggcagtgcatttggtgagccaagtggtaatgctgacaaggttgcagacataagctctactctaatcaagcatggtttcagctataatggaaaagatttcttgtactcaggcattcttggtcagcctcttgaggcatacatcttcatgggaccaatctactatcagaaactaaagcacatggttcttgataagatgcatgctcgagctagtggaccgcgggtgttactgacgaggcaaccaactgaggggcgaagccgtgatggaggcttgcgtcttggtgagatggaacgtgattgtctaattgcatatggcgcgagcatgctaatatttgaacgtctactgttatcaagtgatccttatcaagtccaggtttgc

SEQ ID NO: 293299 - DNA, 392 bp, Zea mays
gaacatttttaaggacgagcatgactaagtgatttggacgcccctcaccatagagaatcccacatgcgaagggctgaaaacatggaattctacagttttggaccaacatgtgatccaaataatatagttttgaagggtttcaaattgccagaactagacgtgaatgattggttggtatttcagaacatgggggcttatacttcatcacgtgggaacgatttcaatggcttcaaaacctcagctattccaacttatatcctggttcttatgccacccgtaagacaaggaaaataagtggtttgggctaatttgcttgccaacttatatcttcttgcaatcatgacacgatcaaagataatttagcttatgaaataatgtcctatcttactatt

SEQ ID NO: 293300 - DNA, 380 bp, Zea mays
ttcgtcagagatatacaagacattgcctattaggggagagcttttacgtgcctttgtgaatgcggatttaatcgggtttcatacttttgattatgcaaggcattttttgtcgtgctgtagtcgaatgcttggtcttacttatgaatccaagagggggtacataggtgttgagtattatggaagaactgttagtatcaaaattctccctatggggatacacatgggtcagctggagtcggttttgagccttccagagactgaagccaaggttacagagcttcttaagcagtattgcgatcaagggaagacaatgttgcttggggtggatgatatggacatatttaagggtattagtttgaagctgctagcaatggaacaac

SEQ ID NO: 293301 - DNA, 378 bp, Zea mays
ccctctgtgccgtgtcttgcgggtttcacttcacaggtgtctcacgatctgcatgatggaaagcatgaatagctcttggcagttaggagatgatctccggggacaatctaaagcctcagaagatcacatatggttgatggttgcctccaaactggctgaacagacgaggataaagggtgagcgaatgaacaatctcgatctttcaaagggtccagctgaagtaaggacaagggataaatttgggttccatgaagacaacaaattcgagaaccttaacttcaatatgttgaacttggactccaagatcggagatagtgtaagcaaaagttccttccgaaatggtatttacaacaccgatgctgtttaccagaaaaatta

SEQ ID NO: 293302 - DNA, 393 bp, Zea mays
ggaaactgaaaacaaacgcactcactctcatgaagagcacgcattaagagaaaggaagacaaagaaaaagaaaaaaaactgtcttcagatctgaaaactcaaatccaaacttcatttatttccgtttgattgtcgagaaagagagagaaaaacggaaacgatggaaaagttcatcgataacttgtctccaatggatctgatgcggtcggagaaaatgtcgcttgttcaactcattattcctgtcgagtccgctcaccgagccgtttcttatctcggccaactcggtctcctccaattccgtgatctaaacgcttaaaaaagcccatttcaaccaacctttggtaatcaagtgaaacctttttgaaaaatggtcaaaaagcctccttttttttt

SEQ ID NO: 293303 - DNA, 387 bp, Zea mays
ggtggttcaagagaggataagaggaggagtaagcgacctgggtctaactcttgaagggttcctttttcttcatgctctttttatagaaaaagggcgtcttgagacaacttgggctgtcttgaggaagtttggatataatgacgagttaaagctcagggatgatattcttccagttccaaccaagcatgcccctgatcagactgtggagctgacaaatgaagctatcgactttttgcgtgggatcttccgattgtatgacagtgataatgatggatctttgcaaccttctgagtttgatgatatctttgtaactgcaccagaaagtgggccttgatgacaactctggatccttcatattgtttggctaacttgatttgcattggatat

SEQ ID NO: 293304 - DNA, 365 bp, Zea mays
cgcgaactccgcacgacagaatgcgaattgggcaccgtcgcttccttaaacgcggtgtcgtccttagaagatgtgccgccctttgatacctactcgcggtccatatactcagtacagatttcttggaaacttatagcagatcacgtctaaatatcgccctaccatcactccaatcggtcatggagcctaccgcatcttctgctcggcgttgaactcggagacgaatgaaatggtaccggttaacaagataatcaactctttcgataatcacatggacgctaagcgtacgcttctggaaaataaccttctccgacatttggatcacgagaatgttatcacgatctgagatgtcactgcttgctctt

SEQ ID NO: 293305 - DNA, 385 bp, Zea mays
ttcctctcttgttctttcagtttcctttgatgtcagaaggtatgggaactcaggctgctccagaaaatggttatggcagaagcaacagcttggaagagaaatcagcaatggagaaagcaatcgatgagtggatgccaatcacctcatcaagaaatgcaaaatggtggcattaagctttccacaatgtcaccgctatggtgggagctggtgtgctcagactgccttacgccatggcagaactcggatggggtcctggcgtgactgttctaatcctatgatggattatcaccctatatacactatggcaaatggttgaaacgcatgaaatggttcctggaagacgtttcgatagataccatgaactgggtcaatatgcctttggtga

SEQ ID NO: 293306 - DNA, 385 bp, Zea mays
tataaaaaatggctgctcctataacaatgctgattcgttggcatcttttttatcccttagtttactttctactgctttcacttctcgagattacgctgatgctcttgaaaagtctattcttttctttgagggacaacggtcgggtccgttgccgtctaatcaacgcctcaaatggaggggtaactctggtttgtccgacggtgcttcttatcacgtggaccttgtgggtggctattatgatgctggagataatgtcaagtttggccttccaatggccttcaccacaacaatgttggcatggagtgttattgaatttggcggttcaatgcatagtcagattgggaatgcaaagactgccctccgatgggccacggattatcttcta

SEQ ID NO: 293307 - DNA, 384 bp, Zea mays
gagaggagatagacgaaggagttaggttgatgtactgggcgaacgaatgtgatttggacggcattcgcgagctcttggactcggggatcaatgttaatttccgcgacatcgatgatcggacggctctccatattgcagcttgtcaaggacagaccgatgtcgtttccttgctccttcagcgcggcgctgacgtcgaatctacagatcgatggggaagcactcctttggcggatgctgtatattataagaatcatgatgtgattaaacttctggagaaacatggatctaagccttttatggctccaatgcatgtaaatcacgcgcgtgaagttccagaatatgagattgatccaaaagaacttgattttactaacagcatcaaca

SEQ ID NO: 293308 - DNA, 387 bp, Zea mays
aaaataccccaaaaaaataggaaaaaaaaagtttacggtgagagatggtgagcaaaacagaggagacccaattgaataggcttgaaaaccaggtagataatggaggaggaggtgcttgggagtacctttgccttgtgagaaagctcaaagttaggcgttcagagaaagtcttgaaatatggtttatccatcttaaatgatcccaagaaaagatctgctcttggccctgaagaatggactttgtatgagcaggtagctattgctgctatggattgccaatgtctcaacgttgcaaaggattgtataaaggctttactgaaaaaatttcctgagagcaaaagggttggcaggctggagggcatgttgcttgaagcaaagggatcgtggg

SEQ ID NO: 293309 - DNA, 388 bp, Zea mays
agagagagtatgaatcgccaccacgatccaaaccctgtcgatgaagaagaagtcaatccattttcgaatggtggttctgtcgcacctgcacgaccactggcatccgaacctttgggttttgggcagaaacatgatgctactgtggatatacctctggattcaatgaatgattctaagaaaagagaaaaggagctcgcagcttgggaagctgatcttaaaagacgggctaaggatataaagagaagagaagatgctgtttcccaagctggtgtttctgtagatgataaaaattggccaccaattttcccgattatacatcatgatatagctaatgagataccggttcatgctcagaggctgcaatatcttgcatttgcaagttggcttt

SEQ ID NO: 293310 - DNA, 387 bp, Zea mays
gaaaaacgaataatcaaatgaaaaaacagtattgaagacggactctttcgaccaagaattcttgctgccataatcggagaaacggcattaaaattggcgaaggttttgaagagaagacgaaaatggatgctgccaagaagaagtacagtataatagtaccaacgtataacgagcgcctcaacattgctctcatcgtctatctcatcttcaaacatctccgggatgttgattttgaaataatcgttgtggatgatgggagcccagatggtactcaagaagttgtgaaacagctgcagacactctatggtgaagatcgaattttattgagacctatacctaataagcttggattgggaacggcttatatacatggtttgaagcatgctt

SEQ ID NO: 293311 - DNA, 442 bp, Zea mays
agcaaatctttcagccacccgatccccaaccgcccggcccgacattccctccaaccgccgctgcggctgcgccgcccaccgccgacaggcgcagcagtcaacaggaaccgagccatggcgagcgcggatctgctgcggagggaggaggagttctactcctccctgtttgattccgccaaaggcgatggcgccaggtcgcgctcacagctgatcgagaggaagatcgaggccctggaggacatggccaccagggtcagtaaccggagatcgcggaagtggtttaacgaccgtttgctgattgaactcgtcccgcgtctttacgttgaagagatcaaaggcctattcgctcctccgccgtggggtgagcaagtgcccttgtcagcattctacagggcaaatgttggtgaatgggattccttcaggagcattgacatggatgctg

SEQ ID NO: 293312 - DNA, 446 bp, Zea mays
ggaccactctccatcctcgaagtgatcaggtgaccagacccaccgctgaaccactctccatgctcgaagtgatcaggtgaccaggtcctgaagaaaattgccctacaacaagggagagtacagagagggtaacatcgagcgtgtcatgagacagatcgagcttgagtccttcaacaaggctgtagccgcgcttaggggttcagcggacgtggatagactgagactgatggatacctacagcctctcgtccttgagaccggacggccacgttgggccttacagaacaccctatccctttgcaaggggcagcagtaaatccacgcccgtccaaaatgattgcttgcactggtgtgtaccatgccccattgatgcatggaatgatcttgttatgaagatggccctggatccatgaaaaccttatggatttgtatggtgtgctcttatgg

SEQ ID NO: 293313 - DNA, 286 bp, Zea mays
cttctgctccccctccggttcgggttcgagttcgtgaggttctccggggttcggtttcgtgggtgagctgatcgagatggcgtgcctctgatgttgagtaccgctgcttcgtcggctgcctcaactggaccacggacgaccactccttgcacaactccttcatcacctactgctaggtaacttagtccaagatcatcctatatcgagtgacacagatgtccctcatcttctgcttcgtcaccttatccacagatgatgcgttgcggtacgccttctacgtcatgaa

SEQ ID NO: 293314 - DNA, 326 bp, Zea mays
gtcataggcgaaatcagcagatcttttttgatgttaacgatcaatatgatccagaggtttgtttgggtcatctaaagcggtatgctttcaaggagcttcgtgcagctactaataattttaactcaaataacatcttatgtgaaggtggatatggcatagtatacaagggttatttgcgtgatggctctattgttgctgttaaaaggcttaaggattataatgccgtctgtggggaagtccaattccaaactgaagttttagtcataagcttggctgtgcatcggaatcttctccgtcttattgtgttctgcactactgatagcgag

SEQ ID NO: 293315 - DNA, 399 bp, Zea mays
atctgttgctaaatacacgacactttcattatgcttactagatatagatatcactggtttggtggctctatacaagccttcagcccctcacatcgatcacggcatagacttacatataatgctcaagcttcacacaatgggtttaagagactaccgctatctaaatttcatactaaatcagtatatccatactgaatggatagattctccaagaagtcctcacaatcttccaaatagctccgtcattactgggaataacattccctttgataaataccctcataaatttgaccttgtagatgcagattatattagatattacggtatgcacaacttttaccacacaatgcaaaaccttgagggagaatactaattcatgacatctgatcactcatatgt

SEQ ID NO: 293316 - DNA, 437 bp, Zea mays
aactactttgagatcgatctcgatgtccatcggttcagcttcatatcacggaaagggctcgagacgttccaggagcggctcaagcatggcgttcttgatcttggtctaactatccaggcacagaaggctgaggagttgccagagcatgtcctgtgctgcatgaggctgaacaagatcgacttcgccaacaacgggcagataccgacgctgataactgcagctgatgagtaaatctgtcctgttactgtaaggcactaactttctggaaaaagcaaaagagactgttgcttttcgagatgctgttgtatagatcggcagatagttgtagggactaactcaagtttgtgagctaagaaacacctaatcactgaggaaggaaaagaagatattgcagcaatctgcattctgaactctgaagacgatgcatatacatgtct

SEQ ID NO: 293317 - DNA, 445 bp, Zea mays
atcaggtatatgcctcgtaagagagacttctggttaagtgtactccctttgattcaagttggttggatcctaacttcctaggaaggcatctgaaaggatataatccaggtgactaggtcttgagcaatattgcaattatcttaaaaaggatcaactgtagtattctaccagtgtacttgaattgcttcatgcatgtacggtggcagattttagttggatttttcaattcttatggccttgcatggtgctgacagcaagcaaatattgacaggaacacctttttattgtcactgaactactgcgagcaaatctatacgagtttcagaaatataatcaagaatctggtggtgaggtgtattttactttgcctaagatacaagtatgttctgtgtccttcactgagatgttctccccgggaccatgactgctacttataatgatatca

SEQ ID NO: 293318 - DNA, 398 bp, Zea mays
gcagtactggaggaaacgatgagcttcggttctgtgggcatggaggaggagggcggcgccggtgcgtcggcggaggagatccggcggctgccggccgaggtgaactgggagatgctggacaagtcgcggttcttcgtcctcggcgcggcgctcttctcgggcgtgtcctcagcgctgtacccggccgtggtggtgaagacgcacctgcaggtggcgccgtcgccgcacgctgccagagctactgccgccgccattctacggcgggactgcctgcgggggttctaccgcgggctcagcgcgtcgctgggcggcacggtgcccgctcgcgcgctgtacatggcggcgctcgaggccaccaagagctccggtcggtcggccgacgttcggctgggcgtgtc

SEQ ID NO: 293319 - DNA, 255 bp, Zea mays
tcggcttatgaggccttcgtgcggcgtgcttgctccatgggaaagcatcatatcatcagtttgtcagggttgtgaacaatccggagatcatcgatgaagccgatgtacacgtgcatggttaagttcaagattgtcagcctgaaagtcataaggccggtggagtacgtgcctgaactgactgatgagcagaaggaccaggtctcggtcgagcaaatatcgcaggtagtattctcggatgctgatcgcccaagccca

SEQ ID NO: 293320 - DNA, 257 bp, Zea mays
cccacgcgtccgcccacgcgtccgacaaaatgctatcttcccacttgcttttggtgatatggcaatcatcaacctagacttatgcatgcttactacttagactacaaggatgataggctaacatatgttacaaactttatgggccatctcatctcttggcatactatcactctacgcatgatgcgtgcagagtcttttgtgaaccttggtgagcctaatattccggtggcatgagctacagatacacctaagtatca

SEQ ID NO: 293321 - DNA, 322 bp, Zea mays
caaggactccaagacgcttctcttctgcgataagccgttcaccgtctctgtcatcgggaagccctactagatcccgtggggagaggctgtttctcattatactctttagtccacctgtgtcttcactgacaaggacaaatctgccagcacatctgaatggtattgccaaaaaggacgctatctctgccccaagcatatatgcacccatgtttgttcttagtgtcaatgaggacaagctcacctcccatgttaacattgattacaatgctagctgcaccacaaactgacttgctaccctcgctaaggtcaatcatgacaacta

SEQ ID NO: 293322 - DNA, 313 bp, Zea mays
  unsure (1)..(313): unsure at all n locations
caagccgcacgagaaggcaggcaggcaggcagagaggaaggaagaggaggaagagggggagaggcgcgtggaggagcgggatgcggcgggcgaggctgccgccggtcccggtcccgacggcgccgggggacgcggggccggaggtgaagtaccgcggggtgaggcggcggccgtcggggcggtacgcggccgagatccgggacccggctaggaagaccccgatctggctgggcaccttcgactcggccgaggccgcggcccgcgcctactacgccgcagccaggaccatccgcggcgccgncgcgcggaccaa

SEQ ID NO: 293323 - DNA, 194 bp, Zea mays
gctgtagccatcctctctacctcatgtgtttgtccagacatgtggaaatgtgactgttgttacagacctttggtgcagtatcatctcatatttcgagttgaaatggtaatcactgaatgctcttcgcagggcatttccagcttgtatcttctccatgagatcgcatctatactcggactcgtggacgatgacat

SEQ ID NO: 293324 - DNA, 334 bp, Zea mays
gaagaagctgccacatactgatactgatgttcagttcaaggtgatgtttggaaaatatgggagcatggctagtgctagagttatgcgggatagcgatggaaaatacaggtgtgacggatttgtcaagtatcaaaatgcacatgctgcttatcaagctgttcaagagttgaatggcagcatattcattgattaacaactgtatttcgaatgatcacataacaactcttaaagatagattgattcgaacgataaatttgacatgaatgttcactaggtagctcaaaagtttcgcatcacagacttgtatttgaagaacttacaggagaacatcgat

SEQ ID NO: 293325 - DNA, 285 bp, Zea mays
gtggacgccggaggaggacctcgtcctcgtctcctacatccaggaccacggccccggcaactggcgcgccgtccccaccagaaccgggctgatgcggtgcagcaagagctgccggcttcggtggaccaactacctccggccgggcatcaggcgcggcaacttcacggagcaggaggagaagctcatcgtccaccttcaggccctcctcggcaacaggtgggcggccatcgcgtcgtacctgccggagcggacggacaatgacgtcaagaactactgggacacgca

SEQ ID NO: 293326 - DNA, 285 bp, Zea mays
  unsure (1)..(285): unsure at all n locations
agaaagttgtggatgagaaccttgagaagctgaagaaggtgctagaggtgtacgaggcacgcctgagcaagtgcaagtaccttgctggagacttcctcagcctcgccgacctgaaccatgtgtctgtcactctctgcctgttcgctaccatggctccgatgaagctgtacggngcggtgatgtcgtggaacgtgacgaggtgcgcaacggcgctggaggaggctggctccgactacgagatcgtgcccatcaacttcggcaccggcgagcacaagagccccgagc

SEQ ID NO: 293327 - DNA, 345 bp, Zea mays
cgacggcggcggtggcagccgtgtcgtcagctgagtctagctacgtcgagccacgccggtgccagccgccggcgccggacatcgcggtggccgtgttcccctacgacgtcgacccgatgcagttcgcgctgaacctggagtacaccgaggccgagttcttcctgcacggcgcgtacggcgtggggctcgaccacgtcgcgccgagtctggcgctgggcggcccgcctccggtgggcgcccggaaggccagcctcgacgaggtgacgaggcgcatcgtcgcggagtttggcctgcaggaagttggccacatcagggctatccagcgcacggtcggtgggattcctc

SEQ ID NO: 293328 - DNA, 417 bp, Zea mays
actatgtctgcgtgtcttacttaattgattgccttaagcccttacaaacttgttatttttcgaagtattactatgtgatcctaaagttattagtgggttgtcctcagcaatttaggtgccgtttggttcaaattttggtaacgtaatgggtaactcataacattaaatcatgtttgtttaagtttaactgtaatcgataccacactacaaatggatagtcttattcaaatttgttactgccggtattcgagtgtgaatcgttaccattaccatttacgttacatttcgtgaaccaaacggcaccttacttttttatagactatgtctccattgttttcattcactttcactgacacataagttccttatcacttatcagctggcagtacttctgtcttctcgccatctatgtcagtc

SEQ ID NO: 293329 - DNA, 395 bp, Zea mays
  unsure (1)..(395): unsure at all n locations
gataattgtgacaacaacttctgttcgaccacaccaagcttattacttgaaccgcctggctcatgtgttaaaaaatgtaccacctcctcttctgtggattgtggcggaatggccatatcagtcccgtgaagcagcggagatcctgaggtcttctggggttatgtacagacatcttatctgcaatcggaacagtacaaatataaggaagattattgtctgccaaaagaacaatgcaatttttcatatcaagaagcaccgtttagatggtatagtacattttgctgatgaggagcgagtgtactcagttgatttatttgaagacatgcgnaaaatcaggcgcttttgtacgtggccagtagcgacacatgtttggacccggtaccaagggggttttg

SEQ ID NO: 293330 - DNA, 201 bp, Zea mays
  unsure (1)..(201): unsure at all n locations
gaagcaccaacgggtgcatcaaataacaaagcaccctggagcagtaactatttgatgcaccaacgggtggcagtggctgaaggatttgagacattcagggatagatatgtcaagagnacataaacatactcgaaatcactagatacgttactgncattcgtgattaagcgctcacaaaatctagctgaatgcacgtgtaaa

SEQ ID NO: 293331 - DNA, 241 bp, Zea mays
ttccggggcctgcgtctgaagacggattgcctggtcatgtagatgggtatcttttagaggcaaggataaaccatccagggggatgtacagtggtcgacaggggtagcatttatccggctgatgccatgaacttggccttaatactgatcaatgttacaggtgttacaactattgctgggggagaaattagtcatcgaaggccatgtttacggaccaactgctgaggcaaaattttctactg

SEQ ID NO: 293332 - DNA, 154 bp, Zea mays
caatatgctgactttccttcatccgcacattcacgagctcctgtgcaaccgaaccactaacacggagcacaagttcgttcttaactacacgaacaagccaatcatcttctccatttctcgcctcgaccatttcaacaacttgacttttcttttt

SEQ ID NO: 293333 - DNA, 428 bp, Zea mays
caaggaacatacaaccaaggaatgggttatatgcaacctcaggtgattgacaaaaaaattcttggtagttgttatttgttgtttatttgtgtttataagcacaatgtatagcttgggtccctgctgtatttgtttatttactaggctgaaaacttgaacatcttggattggcagattagcacccttaatttattgcaaatttgcaaatcagttcacagcatttgcctagctgtaatgagtattgattaggtgcccccacaacaacttgctccttgtgcttaccggtcgtgactattgaggtgcccccactaacaattttcagtattggttggttccacttccataatgctacctccatatgttaagttttttgttcatctatgactataaatggttttttaatcacactgtggttggcattcatatgt

SEQ ID NO: 293334 - DNA, 165 bp, Zea mays
gttctagatcgcgagctgtcgcccttgtttttttttttttttgtgtacatttttcaaaaatgaatggcacaagccatcgatagattgattcatccactgatgacgatacatgcttctgggcttagtttacatcgaccgttttcagcaggcagccattgacattga

SEQ ID NO: 293335 - DNA, 387 bp, Zea mays
cataactatgtcaaataacataaatggagaggaccaacttgatggcgctgatgaggttaaagaggttaaaaggcgtgggaagacaaaacttattaatgtttggaacattccaagaggccatagggttgtagttaattgtaatgagctgaatcagcctatcggagaagaggcaggagtccttgcaaaattccttggcatggttgctaagaatggctccttgtgtagcttaagcttcaaggattggagactacttataggaaagaaagataggaaccataaacaaatcaataaggaggccattcttaatcaagtaaagaagagatttctttacccttgccggacggaaacatgggtgctgcgaacaatttgagagagatggaggcaaca

SEQ ID NO: 293336 - DNA, 421 bp, Zea mays
  unsure (1)..(421): unsure at all n locations
caagaatttgataatgtgaaggatttccgtgctcaattgtgcaaatatgccattgggaaaggatttgcgtaccggttcattaaaaatgaaactactcgtgtcacggtaaaatgtgttgcagagggctgcacatggcgaatgcatgcatccgagtcatctcgtaacaagaaatttgtgatcaagaaaatgacagatgagcatacatgtggaggaggaaatggagaaggtcagcgtcgagcgacaagacaatggctgaccactgttattaaggagaagctgcatgataatccgatgttgaagccaaaggaccttgtcaaggaaatatatgaacaatatggagttacactgacttattcacaggtctggcgaggtaaagaagtagcacagaacgaactgtatcatgctatcanggagacttaca

SEQ ID NO: 293337 - DNA, 415 bp, Zea mays
cacacacacacagacaagtggtttccaaagccaagtgtgtgtactagcaaccagctagctcgggcggcagcaggcagccatcatgtcggaggagaagcaccaccacttcttcaaccaccacaagaaggacgaggagcagcccgccggcgagtacgggtactccgagaccgaggtggtcaccgccaccggcgagggcgagtacgagaggtacaagaaggaggagaaggagcacaagcacaagcagcacctcggcgaggccggcgccatcgccgccggcgccttcgcactctacgagaagcacgaggcgaagaaggaccccgagcacgcgcacaggcacaagatcacggaagaggtcgctgccgcggcggccgtcggcgccggcggctacgtattccacgagcaccacgaggagaag

SEQ ID NO: 293338 - DNA, 375 bp, Zea mays
ggcaatattcctgcaagagcatgataacattagcgcttttagctatgacaatgttacacctggacgtgcacatgagttagatgaaaagatttggaaggtgtttgacaccatactgtgagacactgacatattgagggaaagcaccaatgaaaatatttctattgcaaaggccatcgcaattgatatggatataaatccacaattgaagcaagaacggattgcttatgaaactcttcagtacgattcgtgccgtatggaaggatggtttgccactgacgcacattcaatttcactacagggctgggatcaagaagtgctgctttcatatggccatggccttatggttcgtggatatcgtgcagttataaatactct

SEQ ID NO: 293339 - DNA, 432 bp, Zea mays
ggttcttccttggttgaagatgacaagcttgagcttgcgacctctctccttagaagagcggaggagaagggtgtctcccttatgttgccattcgatctggtcgtcgctgataagtttgctcctgatgctagcagtcagctctccaggttgttcctgcatctgcaattcctgatgcatggatgggtctggacataggtccagattcgatttcggcgttcagttctgccctggaaactactcagacagtcatctggaatggacccatgggagtttttgaatttgacaagtttgcagttggaaccaaggcaattgcaaagaagttagccgagcttagtggcaagggcgtcactacaatagttggtgggggagactccattgcagctgttgaaaagggtggtgtcgccgactctctgagccacatttcaactgggg

SEQ ID NO: 293340 - DNA, 446 bp, Zea mays
cagggagctaacgtctggcggttccttcaggcaattagcaggcggtatgacttaacggaatcgctgaagaagctcaagtgccggacgctgatctttgttggagaaaactcacagttccatgcggacgctgtccacatgaccacaaagctggaccggagatactgcgctctagtcgaggttcaggcttgtggttcacttgtcacagaagagcagccccatgcgatggtgatcccgatggaatacttcctcatggggtacgggctctacaggccatcgcagcaggaaagcagcccccggagcacactgagcccgttctgcatatcacccgagcttctgtcaccggagagcatgggagtgaagctgaagcccatcaagacgcgcatctcgcttaacgtttagcatgggtggatctcggatggccatggcttgacaaccacagctcagct

SEQ ID NO: 293341 - DNA, 443 bp, Zea mays
  unsure (1)..(443): unsure at all n locations
attaaaattgacgaagagaatgagtgcaccgacagaaactatgttttcacctgctcgctcacgatgttgtctgtcttctggaacgtcagccggtccgctgccgaagcacaacggcgtcagctggaggggcaattcctgcatgaaggatggcctctccgacagcaccgtccgccggagcttggtcggaggcttctacgatgctggggacgccatcaagttcaactaccccatggcctggtccatgaccatgctcagctggagtgtgatcgagtacaaggcgaagtatgaggccatcggtgagctcgaccatatcaaggagctgatcaagtggngaacagactacatcctcanaaccttcaattcatctgctgacacgatagacaggattgtcgctcaagtgggtgtaggtgacacctcttaaggcagcagtcagcctaatgacc

SEQ ID NO: 293342 - DNA, 408 bp, Zea mays
cactgagccgaaagtggatgagagcattgtgttggaaaacccccagcagactgatttcagtgacgatccttcagtgctcaaagataggccattgtatgctggggagattttggatcataaatgggtgcctattggatggaataggatcgccgagctggtcctgagggttcagtcagactccagctgggagaatgagttgatggagatgagtgatagcgaggatgattacaccgtggctgatcttgcagctccatactggcagcgccctgtgggacctacttggtggtgtcatgtcaccggaggccatccttcaatagatgcatggttgaatagcgctcactggatgcattctgccatcagaattgcactgagagatgagagcaaactgataagcgaccggatgaagta

SEQ ID NO: 293343 - DNA, 283 bp, Zea mays
  unsure (1)..(283): unsure at all n locations
catgaggcaatgggcatcgatgtgatgctgtacaacatgcttatgttcatgtgtgcagacattggctatgttgacgaggctgatgagatcttcagagacatgaaggcgtccatgggtgcccattccaagcctgatagctggagctactcatcaatggtgacgctgtactcattcactgccaacgtactgagtgcagagggcatactgaatgaaatggtggatgcccgctttaagccaaacatctttggcctgacctnactcatccgatgctatggcaaggtgg

SEQ ID NO: 293344 - DNA, 380 bp, Zea mays
atttcacaccttcgatatccccgtaactaccggccaactcctccagccggttgtaagggtgtaggtgggtgctcagactcaaacaagtgtgcatgtgcagtgaaaaatggtggagaaatccctttcaatgataaaggccgtattgtagaagcaaaacctctcgtttatgagtgtggtccttcttgcaagtgccctcctacatgtcacaacagagttggccaacatgggctcaagtttcggctgcaaatcttcaaaacaaaatcaatgggttggggtgtgagaactcttgaattcataccatctggaaagcttgtgtgtgaatatataggtgaagtgttggaggatgaagaagcacaaaaaaagacgaatgatgagtattt

SEQ ID NO: 293345 - DNA, 390 bp, Zea mays
ctgttggtaagggacttatcacttcacatgcccttatgagtttagaagctcgtgggatcctctttgtatcccctggaatggaggcatatgaagggatgatagttggtgagcactcacgtgacagtgatcttgaggtgaatcctgtgagaactaaagaacttacaaatatccgagcccctggaaaggatgaaaatgtccgtttgtctccaccccgattggtatgatattttctgcttttaatgagatcatgagagatggtgtttcttttctgtaaaagaaacacaatactacaattcctaatcaattggttaattgcccactgtaacttggatcagcaatgcaaattctagaacccattattggcatatgatattatgttcacacattggg

SEQ ID NO: 293346 - DNA, 361 bp, Zea mays
ctggaggagaagcatcaagctatggaggaagagaagattcagttggaggctaagttgaagaaagagcaggaggaggcactgaagcagctgaggaagagcctgaccttcaaagccaaccccatgccgagcttctaccacgaggcgacgccgtccccgaaggccgagttcaagaagctgcccacgacccggcccaagtcgcccaagctgggcaggaggaagacggcctcgacctccatggagacgtccaactcgtcgtcggagagcgagggcacgaggccgtgctgccgcgccagccgcgacggcctcgacagcagctgcagatgcggcggcaggagcaagccgcaggccgcgaacgccaagc

SEQ ID NO: 293347 - DNA, 324 bp, Zea mays
ctcactgctgtgacacgaaagcttctcttaccacatcatttacaagctcctgcgctcgtgaaacatgaatgcaccgactatatattaacatctgcctgcacacgctagcctccaaacactgcgctacctcacgcatcaacatcattcatgggaccttgatatactctcctcaatccttgtctggaacggaactaggtcttcatatcaacaacgctcttatcccacagcacatttgtcttaccatttccagcgctaccgctctcattcatcttcatcgctcaccatctgaacccatcctaacttaaagactcccggcatgtctta

SEQ ID NO: 293348 - DNA, 266 bp, Zea mays
ccgacgcgtacgagtactatttctccaagcatcaaactttcactttctctaaatttgaggtcacaaccggcgggggttaacaccatgatagactgcatgtgctcacaaccagatggagtattgacatataatgtaagcacctgaatttggactcaatttgccatcccactgtcactgcatctcactgatcacacacttgccgagatccatagaaaggttatacatatgtgtctgctgtgcatatatgcatttacctgcatatacat

SEQ ID NO: 293349 - DNA, 223 bp, Zea mays
gatgcgtcaaagaagaaagtgcttgattaagcacagagctttatgtggaacattggcctaacccagcagggttgaatatatggctggaggagccacccagaactttatcagggttgcccaagggatgcttaaaagtagtggtgcaacaagttacatgggatgcattgggaaggacaagtttggtgaggagatgaagaaaaatgctcaagctggacgagttact

SEQ ID NO: 293350 - DNA, 383 bp, Zea mays
attaaatattatggaccggttcgcagtgtttttctgtttctgcctttcactcttgtttgcagcagttcccagttggtgtagaactagtacctagttttgatagttgctagatgatgctatgccatatcttgttatggctactaactccattggttttgaacagaaaaggagaacttgtgcctctatggctatcccgatgagacatgggaggttaccttgccagctgaggaagtgcccccagagatccctgaaccagcattaggaatcaactttgctagggatggcatgaatgagaaggactggctggcgctagttgcagtccacagtgattcctggttactatctgtcgcattctactttggtgcacggtttggatttgacag

SEQ ID NO: 293351 - DNA, 323 bp, Zea mays
cccacgcgtccgcccacgcgtccgcaatatatttggcattgctgttcactccaagtgtactgatggccccatttgcagagactcttggcagtaagtataggaaaacatggcttcgacttgtccatcgtactttggagcttgcaggtcctgcgtttatcaaatggggccaatgggctgcaacacgccctgatctgtttccaagtgacctttgtactgaattgtcaaagctgcacacaaaagcaccagctcacagctttacctatactaagaaaactgttgagaaagcttttggtcgaaagctatcagacatttttgaaaatttt

SEQ ID NO: 293352 - DNA, 423 bp, Zea mays
cggacgcgtgggtttttttaggacaatgaaatgccatgtggatatttggacttggcgaagcacttgaaaggagacaagtctcgaaccttctattacatgagtcattggcagtagataacaataagctgaagtaacattctcaaatttctctcatggtatacagggcttaatcctcatcctcaacaaccttagttcccaaacctttgagaccctccggtgggatctcagcaactgtgaccagggagtagagttcctccttcgcgtcttcctcatcgttccggttgcgggcaattctgacacggacacgccttggcacactgcggataccactgctccagatgtgcttggtgagcttcacgtcaatcaagaagttcgcattcattttcatatacacgaacgtgtactgctataaagttaactacc

SEQ ID NO: 293353 - DNA, 266 bp, Zea mays
gcagatttcaatcttcgaatcagtctccagatatggctgctcgttgcatctacgggtgtccttggaaccttcggctaccatgctcccgagtatgccatgactggccagctaacttataagagtgttatatatagctttggggttgtccttttagagcttctaacaggaaggaaaccagtatatcatacaatgcctagaggtcagcagagtctggttacatgggcaacacctatattgactgaggacacagtataacaatgtgttga

SEQ ID NO: 293354 - DNA, 276 bp, Zea mays
cacgcgtacgggtaaatcctccgtccttatggatgttaaaccatgggacgatgagactgagatgaggaagctggaggaggctgtccgcagtgtccagatggagggtctgactagagagagcaaatgaacaaagaaaagattggatacggcatcaagaagatgactatcatgttgacaattgtcgacgatcttgtgtccatcgacactctaattgaggaccaccttacgcaagagcccatcaatgagtacgtacagagttacgacattggggctttc

SEQ ID NO: 293355 - DNA, 300 bp, Zea mays
cggtgttggcttctcctaccccaccggttcgtgttcaggttctggttcgtgggccgagagcggaagagcatggcctgcgtctggacggtgagtaccgatgcttcgttggcggtctctgctgagccaccgacgaccactatgtctacaacgacttaagaacctactgagaggtgctctagacgctgatcatactggatcggtatacgcaaaggtctatacgatgctgatgtgactcactatccacggtagactcaatgcgcacaacgactgagatcgtgaacatccaggtgctattgtgac

SEQ ID NO: 293356 - DNA, 301 bp, Zea mays
ggttcgtgaggctctccgagttcggttcgtggtgacggacgagatgccgcgggggatgttgagtaccgctgcttcatcggcggactcgcctgggccacggacgaccactctctccacaacgccttcagcacctacggcgaggtcctcgagtccaagatcatcctggatcgggagacgcagatgtcccgctgcttctggttcgtcaccttctacacggaggatgctatgcggaacgccatcgagggcatgaacggcaaggagctggactgacgcatcatcaccgtcaacgaggtccagtccc

SEQ ID NO: 293357 - DNA, 310 bp, Zea mays
cgtacgcgtgacaaccacgctaggcctggtggttgaagaacaacgtgccagatcttcaacgagggggggctggactacctctgaaacccgaggctcatccaggggcacagtatacttgccatatgagcctaccgggcagggctaatggacgccgtcgacgactggcgcatggacatcatgccgatcggcgaggtcgtcaacgctgtctaccagagcgactgcttcgtcacaatcgtcatagtcgccgaccacaatgccttcgacattctccaggtcaaggagctcaagaacggccgacttgtcatgcttg

SEQ ID NO: 293358 - DNA, 356 bp, Zea mays
gctcatccttggggatagcagtcttggcctttaccttgatcccgttcaggtcgtgagagctgtgccgcatcaccttccgcactgcttgctgcgaatcaaaggtgacgaaaccgaaccccctcgaccggctcgtctcgctgtcataaatcaccacgacgtccgttaccgagccaaacgtctcaaagtaagcccggaactacttctcggagatattatcccgcaaaccggcaatgaatacctcatatgaatcatagctcacactgtcgtcactgtcagcagtaccattaccagcgggcgactgattgtcttggataccctgaccccgggcttgctcagcctgctgaggctgcgagtgc

SEQ ID NO: 293359 - DNA, 252 bp, Zea mays
gcgtttgaatccctgatgcacctcccaggtgcccagctaatacaaggtgaacttcatgatccactacttccttaaaatcattcacctttttgatgaatattccaaatgtttacttgatggagcacacaatgtgggctctaaaccaattcaacaaatccgcatattccttttcgagaaagctttagcacttattggcaataaaacccttattcgccaaggccttcatgggcacctttgaaacaacccatcttt

SEQ ID NO: 293360 - DNA, 374 bp, Zea mays
cacgctcaatgctgatgaatttgaagacatggtggctgaaaagcggctgatcccagatggatgaggggtcaagtacatccccagacgcggccctctggacaagtggcgggcactgcactcctgagggcttccaaagtgctgtccacatgataatactcaccaatgaattctactacctgtccactgtaccattataaatgaagaacagataagaagatgagttagataaccaaatgagagaaaggtggagatattgaagattaccgggggggcgatttataggacccaacgctacttacacatacttgctacgctagagaacatataccagggtaccgaactaaagactactggccgggggttacaacgagaag

SEQ ID NO: 293361 - DNA, 360 bp, Zea mays
atcttcttttgcgtcgccagtcgagcttcatcggtcagacaccatttgcaagcttaatgtcggagacaacggatttggtcgcattgggcgcctggtcaccatggctgctcttaactctggtaaaatgcatattgttgccatcaattacccgttaattgacctcaactgcatagtatacatgttgcaatatgatctcacgcatggcaaattctatttcaccatcgacgctcagaacttaaagcctgtcattaatggatatctaatcaccatcttacaagagctagatccctgcaagatcaaatcctgctatgctgatgctgagtacaaaatgcagtccactggcatatttaccaccatgga

SEQ ID NO: 293362 - DNA, 328 bp, Zea mays
gtcagacagtgacctccacccccgcatccctcttaaaaggccagtacctcttgggggtaggggggagggttcagaaagcatctgctcatctgcctttctatcacccatcctccacaactcttttaatatatatacccttggcctctattacttcttcattgacctcaactacatagtttacatcatccaatatacatccacctataatacattacattccaccttcaagtcttaaaaccgtaacctagctattaatgtaaatcccatcaccatcctccaacatcgatatccctacataatcaagctttttccattctaactctcaata

SEQ ID NO: 293363 - DNA, 417 bp, Zea mays
ctttaaaagaggtaagagcaacgtgctttgggagcagagaagagggagaaagcagcatcttgcctggatgagccaggggacacagaagagaagcccactatctcatttaatctttacaactctcttgcaaggttccctggttgtgaaaatacatgagataaatcatgaaggccactatcatcctccttctgcttgcacaagtttcctgggctggaccatttcaacagagaggcttatttgactttatgctagaagatgaggcttctgggataggcccagaagttcctgatgaccgcgacttcgagccctccctaggcccagtgtgccccttccgctgtcaatgccatcttcgagtggtccagtgttctgatttgggtctggacaaagtgccaaaggatcttccccctgacacaactc

SEQ ID NO: 293364 - DNA, 418 bp, Zea mays
agcaagtgaaggccaggttgcgggaggcaggcctggcaccagtgcccatgatcatctttgctaaggatgggcattttgccctggaggagctggcccaagctggctatgaggtggttgggcttgactggacagtggccccaaagaaagcccgggagtgtgtggggaagacggtgacattgcagggcaacctggacccctgtgccttgtatgcatctgaggaggagatcgggcagttggtgaagcagatgctggatgactttggaccacatcgctacattgccaacctgggccatgggctttatcctgacatggacccagaacatgtgggcgcctttgtggatgctgtgcataaacactcacgtctgcttcgacagaactgagtgtatacctttaccctcaagtaccactaacacagatg

SEQ ID NO: 293365 - DNA, 417 bp, Zea mays
caataatgttcatagcaactttattcataataataaccaaaaaatcagaaacaacccaatgtccattggggataaacacatggataaacaacgtatccataaatgaagtacaggtggtaaaaagaagcaaagtattgatatatgcaacaaatgaataagctcaaaaacattatgctaagcaaaagaagccatacatatcatttaatttttaaaaattgtatataacagacaaatctcatctacagtgacagaaaacagatcaatgtcaccggccgctggaactcctagggagtactcactgcaaaggagcccttctggagtgatgaagatgttctctctcgattgtggtggtcgtggcatgggtacagaacacttgtcaaaaggcatggaattactcaagatgggagcatttttact

SEQ ID NO: 293366 - DNA, 393 bp, Zea mays
gtgtgctgggccttggaggaagggggccgagaccgggccttacttctgtagcgatactgtgaggcatcggaaggccagcctgttgtgtccgttttgaaggtcggtgggctagactggctggccttctaggggtgtggagacttcccaactctgcccttgtgctttcctggaatccccaatatgcccggaccccggtttactcctttgctgcgagcccttctctcccgtccagagttgctccgagcctatctgctcagtcctagcgattcctgtggggcttgggacgcgcggttcaagcaccccggaccatatggatgcagcacccatgggttctcgctccaatgcttctttcctccttggggcgtaactcataccctgggcacccctttccac

SEQ ID NO: 293367 - DNA, 411 bp, Zea mays
ggtggctatcctgctgaagcttggaacttctggacaagaaaaggcctggtttctggtggcctctatgaatcccatgtagggtgcagaccgtactccatccctccctgtgagcaccacgtcaacggctcccggcccccatgcacggcggagggagatacccccaagtgtagcaagatctgtgagcctggctacagcccgacctacaaacaggacaagcactacggatacaattcctacagcgtctccaatagcgagaaggacatcatggccgagatctacaaaaacggccccgtggagggagctctctgtgagtattcggacttactgctctacaagtcacgagtgtaccaacacgtcacctgacagatgatgggtggccatgccatgcgcatcctgggctggggagcggag

SEQ ID NO: 293368 - DNA, 373 bp, Zea mays
gcgcgcctcggcttcagcgccatggcgccctccaggaagttcttcgttgggggagactgggagaagaacgggcggaagcacagtctgggggagctcatcggcactctgaacgcggtcaaggtgccggccgacaccgatgtggaacgtgctcagcatactgcctatatcgacttagtccggcagaagctagatcccaagaacgctgaggctgcgcagaactgctacaaagtgactaatgacgcttgaactgatgagatcagccctggcatgatcaaacactgcggagccacacgggcggtactggggcactcagagagaacgcatgtctttggggagtcagatgagctgattgggcacaaagtgcgccatgctc

SEQ ID NO: 293369 - DNA, 366 bp, Zea mays
ctcagttttgctggaggccgcaaccaggcccgcgccgccaccatgtttcgagatcagtatgacaatgatgtcactgtttggagcccccagggcaggattcatcaaattgaatatgcaatggaagctgttaaacaaggttcagccacagttggtctgaaatcaaaaactcatgcagttttggttgcattgaaaagggcgcaatcagagcttgcagctcatcataaaaaaattctccatgttgacaaccatattggtatctcaattgcggggcttactgctgatgctagactggtatgtaattttatgcgtcaggagtgtttggattccagatttgtattcgatagaccactgcctgtgtctcgtctt

SEQ ID NO: 293370 - DNA, 416 bp, Zea mays
gaaacatttatggcctcaagatactatacatttaaagcaccccaatgtctctctttgtgtttttttacttccctttcttcttccttatataacatgaagaacattgtattaatctgatttttaaagatctttttgtatgttacgtgttaagggcttgtttggtatcccactgaaatgttctgtgttgcagaccagagtctgtttatgtcagggggatggggccattgcatccttagccattgtcacaaaatatgtggagtagtaacttaatatgtaaagttgtaacatacatacatttaaaatggaaatgcagaaagctgtgaaatgtcttgtgtctcatgttctctgtatttatgcagctgatttgtctgtctgtaactgaagtgtgggtccaaggactgctaactactttgcat

SEQ ID NO: 293371 - DNA, 411 bp, Zea mays
gcaaaatactacattgctagttgaatattcctaacgtttttgtcccataggaaagaatgaattaaacaggccaaacagatcaactttaaattgaaaaaaaaaaaaacaaaaacaaacaaacaaaaaaaaaccttattgttgccaggaaagtagatgcataaatgccactctggtatcctggccatcttaaagggcaattcttcttgatatggaggtagtaagtataacatattcaaattatctaaacgataggaatcataatattttatgctttttctagcagaattattggtaaaacaagaatacttctaaacataccttcattccacgtgttagaaagcaatattcgggccaggcacggtggctcacacctgtaatcccagcactttggaaagctgaggcgggtggatc

SEQ ID NO: 293372 - DNA, 415 bp, Zea mays
gtcatccctgtactcctgtttgtgggcgtagtttttatcgtgattggccttggctgcattgcagcctcaaacagggtggttgaagtggtctatgagtatgagacttcatgcataccaagacacatgcttggcaacaaagtcgcctatatccaaaacccagctatagataagacctgcacatggattctcaaggttcctagggatatgaagcacccaatctacgtatattaccagcttgacaagttctaccagaaccacaggaggtacgtgaagagccgcagcgacaagcagctgagagatcccaaagaggccaacagcacgcagcagtactgcaagcccgaagctaccaccgagcacgggagcgccgtcgtcccctgcgggctcgtggcctggagcctgttcaacgacacctaca

SEQ ID NO: 293373 - DNA, 414 bp, Zea mays
  unsure (1)..(414): unsure at all n locations
agttatggccgcaaaggcttgagaagacccctttctggattgatggttccaaggttggtgtctatggaaagcctgcaaatgaagattttgaggcagataatgcccactggaaacgggttgtaagtaaatcgtatgtgaatggcatgggaattgactggtccaaagtgagaaatgtcatggacatgagagctgtgtatggagggtaagtaaatggttttcgtagtttcttgggcatgtttatttatttatttatttttggtaattcagatcacactacataactactagttacccaagctggcacatagctaacttaaaacataacactataacaagcaacttgtccaccatatgtcatcaagcatatntctttgaaagattcagtcaacctggagaaattatctttattggtca

SEQ ID NO: 293374 - DNA, 352 bp, Zea mays
gcaagtgaagaagtacagtggtggcatgaggaggcgccttagtgtcgccatctcgttgatcggagatgctaaagttgtgtacatggatgagccaagcaccggattagacccagcttcgaggaagagtctgtggagcgcagtgaagcaagcaaagcaggatagagcaatcattctcaccacgcattccatggaagaagctgaaactctttgtgacagactgtgtatcatggtcgatggaaagctccagtgcataggcactcccaaagagctcatagctagatacggagggtactacgtgctgacgatgacgacactgccggagttcgaacaagaggtcgaagatctggtgcgc

SEQ ID NO: 293375 - DNA, 401 bp, Zea mays
gtaacattataaagcattttgaagttctattgtgggttcatgtgtcaagagaatttgctgttgaaaagcttgtggagaagttgtttgaagccattgctggtgacatgtctgaccacctcccattgcagcatgtgagcagaactatctcagacaagttgcagaagcagtggattctagttatgcatacgacctaccattcttgtctaaggaagatagctggaaagtgttccaacaatgttttggaattgccatgaaagctctagaccctgaatttccaacaatgttttggaatgaaaggaattgaagaatggcagtccatatgcaatagtaatttattagatgtccaggatgacgaacatagagtatttgcatgcttgtggttgaagtttgttcatttaccg

SEQ ID NO: 293376 - DNA, 396 bp, Zea mays
  unsure (1)..(396): unsure at all n locations
gaaataaatgactcgtgtttgttctttattcgttttgtgttgttatcggttacagttggagcctattggataacattattgaacagtgtaggattgtgtcactttatatctggaatttttttttctggtagttataaaaagtaaccatcttggtagttgatacaaccagatgccgcgttgtatacgggctgatggtcctttggttaactttcggcattacatttaactttcggngttaattgtccaggaggaaatagaggttgagggaaagttattacgtgctggaaaatcagtcggtgtcgtctccgtagatttcaggaagaaaaagacagggaaattgatggcacaggcccgtcacaccaagtatcttgtggcatcaagcaaactgtgaggcgc

SEQ ID NO: 293377 - DNA, 385 bp, Zea mays
cgaaggttgtgaacgccgtgaataaggaagggggcagcttaggatacttcgacatcttatctgaccaggaagtggggcggggttagaagacgtactacaactggtccaccttaccacagctatgctccagatgggggctaagagggggatgcgatattgcactcgagatggacaaaagcggacagctgaagtcgaccctgtcagagtagacacctagctagcagtctcgcttcgctggcgcatgtatcacatagtctgcatagaatcagtatactatggcatgcatgccattatattgatagatccacgattgtactagactgaagagccacattggttgaattgtgacacatgtgccgaaggaataactcacgcttgttcacac

SEQ ID NO: 293378 - DNA, 371 bp, Zea mays
ctaggcagccaggcagccatggcgcccaccgtgatgatggccttgtcggccaccgccgtcgctccgttccatgggctggagttcaccgacagtcttcccgacgaccggcgctgctccagaagcctatgtaacgttagcaacggcggaaggatccggtgcatgcaagggtggtcggactacggaaacacgaagttctagactctgtagtacctggcggcgattgcgacagacgacctgcttgagcaatgtgactaccatgatgtgcaacggctggataccctggctctagttcataccggacagatatgagtaccgtgagaacttcatctaaccgtgctaattcgaactgcgttactggaccatgcgaaagc

SEQ ID NO: 293379 - DNA, 326 bp, Zea mays
ggcaaggacgacgtgatcgagagcggtgctgtctgctgcgagttcgctgccaagggctacacggacccttccccggcgccgctgatcgacgcggatgagctggggtcctggtcgctgtaccgtgccgtgatcgccgagttcatcggcacgctgctgttcctgtacataacggtggccaccgtgatcggttccaagcaccagacggacgcgttggcgtcgggtgccgacgcggtttgcggcggcttgggggtgctgggcatcgccggggccttcggcggcatgatcttaggcctggtttactgcaccgccggtatctcggggggcca

SEQ ID NO: 293380 - DNA, 345 bp, Zea mays
actcgttcgaatctacttatccccctaattttaatctttatacctgctttgtcttttgaagtgccggggctaattcatcatggatttaatcataccattgcacaaataggtgttacacagtatgtcagcgacctattacttgacctactgctataccatctgtataaccagattgctacaaacaccttgaatcgactggatcctatgacacatgctgtcggtaatgtgttgatacgtgccttcatcatcggttaatcaatcattgcttatggcaacaaaacctgcactcatactgcaattgacacgtatcattgacatatctggtgttgctatgcactcttacat

SEQ ID NO: 293381 - DNA, 245 bp, Zea mays
cgactgtctacaccaatggccatagtcctgcggagtcctcgctcgcccgcctggctggggtagccactctccctgcgagccgcaccagcacatacagccgtggggctgactgcgaccaatgtgaccatcatgggacgtacggccggcgtcaggcccaagctgggcaagcaaggcacctacaacgtgaagctgatcacgccagagggagagctacagctgcaactgcccgacgacatggacatact

SEQ ID NO: 293382 - DNA, 348 bp, Zea mays
ggaggtcactaatctcgtcaaagtcattccagactttggatctcttcctcgacgctgtatcgcctgtgtacacgactttgtcgatgacgagcacgcgactgacgcgttgatgcagagagcggtagtctgcagtgacgacgacgaggtgaatctgatcgcggatgcctactcgatgagcttcgtgcacaacttagacaagacatactgggacgcctacgaggacacgtaccgagtgagcgatctcatggacaaattgcgcagagcgcgccgactgcagctgctggacccgtctgcggagctcggagcctctacgatgttggacgtcacgccggaagagattcgacggac

SEQ ID NO: 293383 - DNA, 411 bp, Zea mays
  unsure (1)..(411): unsure at all n locations
gcccgtcgtcgcgtccgtcgccgtcgtcaccgtcgcggacaccattcccgtcaatcaagaggacaacatcctcaaggggcatgggacgtcggatcaggacggggaggtggttgcgacgctctgcggggtggtggagcgggtcaacaagctggtctacgtccgcactcttcgcgcgagatacaagccggaggttggtgatatcatagttggccgtgtgattgagattgctcctaagcgatggaggttggagataaattttagccaagatgctgttctgatgctttcatctatgaacttgcctgatggtattcagagaaggagaactgctgttgatgaacttaatatgcggagtatctntgaagaaaatgatgttatctgtgctgaagttcgaggcttccaacatgatggatc

SEQ ID NO: 293384 - DNA, 437 bp, Zea mays
ctgatgattttgctgagggaaaaatcaataccctggatgagttatatagaactggagccaaggtaccttctgaagtgtttgtcaatagcaagttaacaccaaagcttgctcggcaaatgcaggacgttctcgcactatgtagtggcagtttaccttcttggtgttatcaaatgaccaaggcctgcccattcctgtttccttttgagacaaggaggcagtacttctattccacagcctttgggttgtcacgagcattgaatcgactccagcaacagcagagtgataatcacagctctggtggtgaaagagaggtcaggtttggcaggttacaacgccagaaagttcgtgtttcccgtaaccgtattctagattctgctgctaaagttatggagatgttctccagtcagagggctgttcttgaggtggaatacttttgc

SEQ ID NO: 293385 - DNA, 463 bp, Zea mays
  unsure (1)..(463): unsure at all n locations
ggatctactgcttatggggtgaaaaacatcgatgtcctagagggtgcaagggctgctctgaatctgtcaggagccgtgcttggatattatcctgtcaatgttctgccgtcaaaaactgccattgcaccagtcaacaaaacattcctacccaggtctaacgatgaacatgaaatgtgtgcaaggactatctactgcacaaattaacattgacaagaaggtcactcaagcagatctaaagttattctttgagtccatatgtggtgaggttggtcgttctttactccaaacacaatctcccttctgtatagctaaaagtttgcagaaatggcaccatcaagatcgatctggagaccaacaagatcatggacttcatcaagtttgacgtcggcaacgtggtcatgatgaccggcgggaggaacaccgggcatgtangagtgatcaagaacagggagaagcacaaggg

SEQ ID NO: 293386 - DNA, 211 bp, Zea mays
atccctacttacaaaactctgtacttaagttttcacaattcactatttcccaggccgtttctctcattcacacgtctgttacattcaccaaccatttacaaacctccttcagttatccaatccttcttattctgactgaccctaggactgatcatattaccattaaagagtctactcttacaaacattcccaccatcgccttctgtaatac

SEQ ID NO: 293387 - DNA, 261 bp, Zea mays
tctgtacccactcatcctttccctatttacaaaactctgtactctattattcacaattcactttttcccagaccggttctcttattcacacaggtggctcattcaccaaccattaacaaacatcattcagtgatcctctccttcttattctaacttaccctatcactaatcatcataccattaaatattctaaacttacaaacattcccaccatcgccttcttagatactcactactctattccctatgcatacatcgtca

SEQ ID NO: 293388 - DNA, 361 bp, Zea mays
tcgcccagattaggaagatgaagggtttgaagcataagaaggctcacctgatggagattgaggtcaatggtggtaccattgcgtgactaggtggactatggctacaaattctttgagaaagaggtccctgttgatgctgtcttacagaaggatgagatgattgacatcattggtgtgaccaaggggtaaggttatgagggtgtatccactagtcgtggtttaacagggcttacgtgagagtccctctatgggctacgtatagtctggtgtacatgcgcatgtgtttctacgagctcctggactctagtctgcagtgcaagtttgcttgagttgagacgcatatcatggaggaactggttcg

SEQ ID NO: 293389 - DNA, 269 bp, Zea mays
cggacgcgtgggcggacgcgtgggcggacgcgtgggcggacgcgtgggaaattaaagtatgccaggttctcgaaaaggatgtcagtgtattatgggtctatttggtaggatggctagaaacccaggctggaaacgccctggctagaggaagcaccggaggtttgtttgattgtagctggctaaaggtgacgcacaactctaactgctatttggttttcctggctataaagtctggccaaaggtggtgcacaattctaacaattgtttgg

SEQ ID NO: 293390 - DNA, 390 bp, Zea mays
agacctcctgtgccggcacgcgctgacactgcatgtcggcatgcagatgttagtctaccacatcgtgggcggcacgctgatggcgcgccagctctggacctccggcgtgggctagatgtcgcgatccaacgcctgggtgctggcgctctgcatctgcctatacttcgcctggttagcctggtcgtggaggccgctgggctggctcatcccttcggaggtgttggtgctgtaggttcggtcggcggggcagagcatgcgcctgtgcgtcaacaggctgctgaccttcatgatcggccatgccttactcagcatgctgggctcgctcaagttccggctcttctacgtcttacccgggtggatgttcattatgaccaccttcaatcgccattt

SEQ ID NO: 293391 - DNA, 392 bp, Zea mays
  unsure (1)..(392): unsure at all n locations
cggacgcgtgggcggacgcgtggggtacagcaatgtcccgcacacgaagctggtggaggtgaagggtcaccagaactgggtgaaggtgagcgggcagtacctgacattccccggcggcggcacgcagttcatccatggtgcgctgcactacatcgacttcctgcagcagtccgtccgcgccatctcgtgggggaagcacacgcgggtggtgctcgacgttggctgcggcgtggccagcttcggcggctacctgttcgagcgcgacgtggcgaccatgtcgttcgcgcccaaggacgagcacgaggcgcangtgcagatggcgctcgagcgcgggatcccggncatctcggccgtcatgggctccaagcgcctgcctttcccgagcaagtcgt

SEQ ID NO: 293392 - DNA, 335 bp, Zea mays
caaagagtggaaaacaagcaaaatgttaaatatactagactttgaattcccttcgattcatccggcgcggtgggctatggacctgcagcagcaagctaattaagtttatatatattgcatgagagagcatgcaccgctaaccatatatactactgagacttctgaattctagtatatgtaatccttttgtttgggtttaggaggcaattctaatcatgtatgccgaattccaaagagtggaaaacaagcaaaatgttaaataaaaaaaaaaaaaaaaaaattaaaaataaataatatataaattaaataataaatattaaaaataataatttatt

SEQ ID NO: 293393 - DNA, 414 bp, Zea mays
cggacgcgtgggcggacgcgtgggtcaacgtcaagtcctaggagacgacatcaggcactctgtggcggatctttaattaatttcttctttatttttcattctggtgaataaataggtcccaaagagagagataaaaggagaaggaaaggagacgtggcagcatggccacgttagtgattttttgttcggtgatttttttttgtaagctatatatagatagagagtagtcatttttaagttattaattatatagttgcaaatgcgcacgttaatggtatgctgggacgccgacgccgaattgtcgacggtcatggtttgaacagcagcggctttcaaagatagaatttctccatgtatgtatgtatgatccgaaagttgggtggcagtttcagtgaatggacagtgatatttttt

SEQ ID NO: 293394 - DNA, 286 bp, Zea mays
cccagcgtccgcccacgcgtccgggcacgacgaagccggccttaaccaacggcggcgccagggccagcttcggcagcaaaccggcggccggcgtgggcaccgtgcttggccgggccatggaggacacgcgcgcgagctactcgatgggccaagggctctggcgcgggcacttcggcgtgacccacctgtgcacgcaccggacgagcggcgagaaactggcgtgcaagacgatcgcgaaacggaagctggcggccacggaggacatggacaacatgcgccggaaggg

SEQ ID NO: 293395 - DNA, 407 bp, Zea mays
cggacgcgtgggcggacgcgtgggccggtgtactgcagtaatgtaaaggtccacaatgtgacgattaagacctcattggacgctccactgactgatggcatagttccagattcatgttcaaacttatgcattgaggacagcaccataagtgtcagccatgaagccatctccctgaaaagcgggtgggacaggtatggcatttccttcgggaggcctacctccgacattcgcatcagcagagtggacctgctatcatcttccggagccgctcttgcattcgggagtgagatgtctggtggtatctcagacattcatgttaaccacctccggatccacgactcctccaaaggtatttctttcaagacctcacccggccgtgggggttacatcgaggacgtggtcatctc

SEQ ID NO: 293396 - DNA, 390 bp, Zea mays
  unsure (1)..(390): unsure at all n locations
cggacgcgtgggcggacgcgtgggcggacgcgtgggcctggagggtgcaagggagggaggcggtcgaatccgtcatccactgagcaccgccagccccgcacgcggaggtcggagggctacgctccggagtccgaggggaaggcagaggaggcaagcaggccggatgggtgccgctggtgacgccgcggcagcgggcacgcggtgcgagctctgcgggggcgcggcggccgtgcactgcgccgcggactcggcgttcctctgcccgcgctgcgacgccaaggtgcacggcgccaacttcctggcgtccaggcacgtgaggcgccgnctgccgcgcggnggcgccgactccggggtgtccgcgtccgcgtccagcggctcctgcctgtccac

SEQ ID NO: 293397 - DNA, 404 bp, Zea mays
  unsure (1)..(404): unsure at all n locations
atcgatcagctagctagctgctgccaagagctagccaggggacagagcagcagcttgaagttggtcaccaatgctaaggatgggccgcgccagcgccacagcaggtgtgttgcgcttcgtcagggcgttcgccctctgcgtggctacggcatgcctcctcctggcggccggcatgccctcgcctgtggcggcgcaggacccgtcgaagctgagcctgcagtactactccaagacgtgccccaacgtggagcacgtcgtccggacggagatggagtgcgcggtgcgcgccgacacgcgcaacgccgngctcatgctccggctccatttccatgactgcttcgtgcaggtgatcagtcggtccgtcctatatatatcagctaatgcagcaacagcagctagctgat

SEQ ID NO: 293398 - DNA, 257 bp, Zea mays
cggacgcgtgggcgagggggtggtggagagcaagcccgccttcgtcgtcgtcgcctcgtccgcggcgacgcagtccagggcgcgccaggaagcaccggacccggcgccggcggcccgaccagaaccaatccaggggcgtccgcggccgcccgtggggcaggtgggccgccaggatccgggacccggtcaagggcgtccgcgtttggttgggaactttcccttcggccgaggccgcgcggcgcgcttacaaccacgcg

SEQ ID NO: 293399 - DNA, 421 bp, Zea mays
  unsure (1)..(421): unsure at all n locations
cccacgcgtccgcccacgcgtccgcccacgcgtccgcccctcgatccccctcaatccatatggcggnggggggggggcgatgcttgcggttgcgctcgtcgccattttgatctccagcattgtggtcgccgcctcattacttggatctccgacgcgcgcggtggtcgggtgggcgatgcttgcttgccattgtgctcgtcgtcgcttggatctccggcatggtggtcgccgcctcatcgtcgggtgagcaggtgtcctaccgtggcgactggatccgcgtccagcccgtgcccggtgccttcgtcgtcaacttcggccacatcttgtgactcacatttctcatgtttttgaatatgtatacaaatataaatgttgcagttaccctttcactgacatggttgatagacagatttacctcata

SEQ ID NO: 293400 - DNA, 426 bp, Zea mays
cccacgcgtccgcggacgcgtgcgctcacacgatcgaaaataggttcacttccgtgaagatggcccatccacagaagagatagccgaggttgtcaagtcaagtgtgctccctgacatgttcaagagcacatatgagtcaatcaccaatggaaatcctacgtggaatgagctgccagtctcaacaagcactctctacccctgggatccatcatctacatacatgcatgagccaccttacttcaaggatatcaaaatgagtactgctggcccgcggtctgtgaaggatgcatattgcctttcgaattttggtgacagcatcacaaccgatcacatctcacctgccggaaacattcacccagacagcccatctgcaaaatatctgaaggagcgtggcgttgaaaggaaggacttcaactcatatggtag

SEQ ID NO: 293401 - DNA, 426 bp, Zea mays
gtcgtgtaccacctcttgctgctcgtccactgtcacggactcgtcctcgtcgcccccgtcaccggcggcggccaatgccgcgcccgcgccacggaaggcggaggccgagactggcggggacgaggacggttgtgctggtaaggcggcgccggcgaagaagcgggagcggagcagcgaggggaagcacccgacgtaccgcggcgtgcggatgcgggcgtggggcaagtgggtgtcagagatccgcgagccgcgcaagaagtcgcgcatatggctcggcacgttcccgaccgccgagatggccgcgcgcgcccacgacgccgccgcgctcgccatcaagggccgcgccacgcgaagtgcccgccacaagagcggcagctgttcgacttgccggacctgctcctcgacgtccgggacgggttcgggcgc

SEQ ID NO: 293402 - DNA, 409 bp, Zea mays
cggacgcgtggggccaaaaggcactgaagaagccagtcaatagcgagttctactactagtagctagcctgctgatctgttctgttgtttagttcgcaaagccttctgtttcggcgaccatggaggatgagaggaacacacagccttctcggcaggaagaagcacgacgacgaccaggagaagaagaagcagacggatgagctggcgaccggcatggagaaggtcacggtgtccgagcccgagaagcacgggcacaaggaggaggagcacgaggtcgtcggcgagaagaaggagggccttctcgccaagctgcaccgcaccagttccagctccagctcgtcgagcgacgaggaagaggaggcgatcgatgagaacggcgagattatcaagaggaagaagaagaagatggg

SEQ ID NO: 293403 - DNA, 414 bp, Zea mays
  unsure (1)..(414): unsure at all n locations
tccaccgcgacgtcaagaccaccaacatcctcgtcgacggggactgggtcgccaaggtctccgacttcggcctctccaagtccggcccgacgacggtgaaccagacacacgtgagcaccatggtcaagggcagcttcgggtacctcgacccggagtacttccggcggcagcagctcacggacaagtccgacgtgtactccttcggcgtcgttctcttcgaggtgctcctggcgcggccagctctcgacccggcgctgccacgggagcaggtcagcctcgccgactacgcgctcagctgccagcggaacggcaccctgctggacgtcctcgacccaacgatcaaggaccagatcgcgccggagtgtttcaagaaggtcgcggacacggncgagaagtgcctcgccgagcagagca

SEQ ID NO: 293404 - DNA, 360 bp, Zea mays
acgcgtacgcgtggcacaatatcatcatcactacatcacccgcttttctcaaaagggacaggcataacaaaacaaaccctgaagataatagatacttcattaaaaggaatcactggatgaaaaagttcgcatatggagcattcaaaaccgtgaaattgttgattggaaagatttgcatgaaatggtcactgctgcttgctataccccagatggacagagtgcactaattggttcccataaaggcagctgccatatttatgatacatctgataataagcttctccaaaagaaacaaattgacctgcaaattaagaaaaagaagtccagtcagaagaaaataactggatttcaggtccttga

SEQ ID NO: 293405 - DNA, 255 bp, Zea mays
cccactcgtgcgcccacgcgtcttcccacacgtgcgcggggcggcaatgacctgctgggacctttaggtggtcaccgcgctcgacacctccaatacgcaatggtaccacttcaccgccatcgtggtcgccagcatcgggttcttcaccgacgcctacgacctcttctgcatctccctcgtgactaatctcctctgccgcatctactacaccgtggaggggtccgccacgcccggcacccttccgccgtacgtgtc

SEQ ID NO: 293406 - DNA, 425 bp, Zea mays
  unsure (1)..(425): unsure at all n locations
acgcgtccggaaatgttaacgcattaaaaggtatacggtatcagtaaaccttacaagtgtgatgccaagggaaaacggcatcagctgacacattgctatattcctgtttatttcgtccgaataaagtatataacttaagaaaggggctcttgccccacagcagctcaagcaaaaatgtacaaagaaaagcagctcgagtagagagaatttgccactctctcgacagattgagctgctgccatggcgctaattcacgacacatttgatgtctcggcaagacggggaggagctcagtaagtgagatgataaaaaaatagaatcaggttggagggtaagtatacacgggtagaaaaattgcctccttggccttaattntgggtcttctccaccttggccttgatcttctgctcgatgattgccttctc

SEQ ID NO: 293407 - DNA, 382 bp, Zea mays
  unsure (1)..(382): unsure at all n locations
cgagacgccgctgcaggtcaagctcaacggcgtggccaccatcatcggcaagatcgggctcgccttcgccgtggtcacgttcgcggtgctcacgcagggcctgttctggcgcaagctcgccgacggctcctacttcagctggaccggcgacgacgcgctggagctgctggaggtcttcgccatcgccgtcacgatcgtcgtcgtggccgtccccgagggcctgccactggccgtgacgctcagcctggcgttcgcaatgaagaagatgatgaacgacaaggcgctcgtgcggcacctcgcggcctgcgagaccatgggctccgncaccaccatctgcagcgacaagaccggcacgctgaccaccaaccacatgaccgtcgtg

SEQ ID NO: 293408 - DNA, 308 bp, Zea mays
ggagcaagcttgcaatgaagctctaatcctcctgctgtgcgacatgcctgccctgcaggaggagcaagcttgcagtgaagcatataagacttcaaacacacgataccaggcatgcatgccatacagtacatgggaatgaaaaccacacaacgctcgactactgataattgcatgacacagtcacttacgattgctataatcaatactgacagcatgacctacatggttccaatgcaggcattcgccttattaatcatccactacacactcaccctacctaatagaaacaacctggacagcctaatcaa

SEQ ID NO: 293409 - DNA, 423 bp, Zea mays
gggcgcgctggtcgacctgcagcggtccaaggtggcggtgcagaaggccaaggacgaggccggcgtcgacacgtggctcacggcggctaggctcgacggcgactcgtgcctgagcgactgccagaaggtggagggcgcgtcgtgagatgctgcatagtcaacaagatcggctatcgcttcatgatgtgctacggtgatacgtggttccgccaatcgcctatatgagccacattcgttcatgtcagctacactgagctgttaccacaggattatagatggtgcaatctctgctgaatttgtgaaagcattcattggctacatcgagaacccgacttcgatgctgctgtgaagttaggatcgatgacctaacacaattcttgtcaagttgtttaaataaccattccacccaaaagcggtgttttc

SEQ ID NO: 293410 - DNA, 387 bp, Zea mays
gtggcgctcactgtcgacctccccgccattggcgcctttactatcccgctcaccgccgagggcgagatcaagctccgcacctttcgggacctattagtctaagcaattcagatgtttggtgtgtgaatctgatcagctttcataccatagtcagtgctgatgtggatatgcaatatttgcggatttctttatgtgttcatggatttcaaattgaggacgggcgcacgcttgctgactacaacatccaagaaggagagcaccctacaacttgggctgcggctctagagaagcctgcctaacttacgcaagactgctgacctggtagactttcaatactggaagcggagtccaatgacatgatcgacgtcttccaaggccagaactggg

SEQ ID NO: 293411 - DNA, 317 bp, Zea mays
cccacgcgtccgcggacgcgtgggcgctcctaggggcggaaggccgccgtgccggatgttgggatatgcagcaagggggcagtgcgcacggatgcaatgcatttgaatggctgcacgctgggctctggtagctctgactatcgtgaaggcgagatatgcgcgagatatgtttcgaatgacgcctgcgatcttcaaaatcatgagcgttacacatagctattgtcgatgatgatatgatgcactaatggagcctaatggtggcataaagtatagcagtagttgttatatgatgtatgaaggtgacgttgactacagca

SEQ ID NO: 293412 - DNA, 424 bp, Zea mays
gggacgactgcgcataacagaggtgttcctcgcggcggcggtggtgacggcggcggcggtgacaactagtggtggcatggtcgccgcggtgcgggacgacgacttcttcgtggacggctcggtgtaatgcgacacctgccgggcggggttcgagacgaacgcgacgacgccgatcgcgggcgccaaggtgcggctggagtgccggcactacatgagcgcgagcggcgcggtggagcggtcagcggagggcaccacggacgcggcagggaagtaccgcatcgagctggtggacaaccgcggcgccgaggaggtgtgttcggtggcgctggtcagcagccccgtgcccgggtgcgccgagaaggaggttggccgcgaccgcgcccaggtgtcgctgttcacggacgccggggccggcctcgccacc

SEQ ID NO: 293413 - DNA, 426 bp, Zea mays
atgaatcagctccttgacacgaacccggagaccaggatcacggtggctcagataatgtgagagcaggtggtttaagaaagggttccggccggtcaggttctacgtcgaggatgaccaagtgcacagcttggcagacagtgaggctgaggcgctggaagaactggggcccagtgacagtgagccttcacccccacctccccctcccccgccaccaccaccaccacagaaagaggacgacggcgatgattctggctgggagtcagactcctccgtagcgtcctgcccagccacattgtcatcagaggagaggagacggcctgtcggatctcttccacggccggtaagtctaaacgcgttcgatatcatctcgttctcaaggggattcaatctgtcggggttgttcgaggagcgaggcaatgaagtgag

SEQ ID NO: 293414 - DNA, 429 bp, Zea mays
cggacgcgtggggcaacatggaaggctcaggtcgtcgcatcaatacgtggtgcacgtggagaaggctacctcaccggcaagaccaagatgcctgccgctgaacttgtcagcaaagatggtgacaaagttgccaactctgcctacgaagattggctagcttcggaccaacaagtccttagtttccttcttgcctctgtctccaaggatgttttgatccagattgcgactaagcacaccgcgacggaggcatggcatgcaatcgagaccatgttctcgtcacaaacaagagctcgggcagtaaacacgcgcctggctttatccaccgcccacaaagggaacatgtcggtggccgaatatgtcgggaagatgcggtctctcggcgatgaaatggctgcagcaggacgacctctcgaagatgaagaattggtg

SEQ ID NO: 293415 - DNA, 362 bp, Zea mays
cactgatccaagacaaaacatggctgtgaatgtgagcaccatgtggtcgttgatgcagggacaagttgccatgggtgtggcgttggcctttttggtgaaccgcgccttgtgccgtgcttcccaaagtcccccctggcaagaacatcacggccacctatggcaaggactggttagacgctaaagcaccatggtttggcaagccgacggttgccggtcccgacgacattggtggcggttgcgggtccaaggacttgaccacccccctttaatatccatgcgcgcgcggggaaatatccatatttaaaggtaggctctgttttgggggccgcgtttagatctaatgcgctaagcttgtggagtgc

SEQ ID NO: 293416 - DNA, 391 bp, Zea mays
ggcacacgtctgctgcctcgtgttcttgcttgcgatggaggatgcagttgggctaccgatggatggtgcctgcgctcggctagacaccagtggcgctaccacggccgtctacattaccgtccatcacatcgccgtgttcatagaggccatcgaccttttcgacggggacggtgacaggagcatctcagccagagacctcgaagctgacgtgcgatcactgggtcagaactccaccgaggatgatctccatgacatgaccatcgaaggctatactgacggctactgcactatcgatttcactgagttgatgcacctcatggtcagcctgatgaaggacacggacttgtacgaggagctcaacgacgactgcatggtgatcaccgacgaccac

SEQ ID NO: 293417 - DNA, 338 bp, Zea mays
cccacgcgtccggacggaaggactagcgtcatgggcacgcccaccgagacggccatcctggagttcggcctcgaggtggagaagtacaccaaggtggagcacgcggacgccaagaagctcaaggtggagccgttcaactcggtgaagaagaccatggccgtggttatcgcgtccccgaacgcggccggccacccgcgcgcgttcctcaagggcgcgtccgaggtcgtcctgagccggtgcggctccgtcttggacggcaccggtgccgcagagaagctcacggaggcgaaggcgaagcgcgtggccagcgccatcgactcgttcgcgtgcgaagcgct

SEQ ID NO: 293418 - DNA, 270 bp, Zea mays
ctcactcgtccagccacgcgtccggactaggtttagagagcggcggatagcggccaggcgggggacgcaaagaagatccaggacgacttctgctcgacgctgcgcgacgccaagaagggtacggacctgctcgtgttcaatgagtcctgcacgctatcccaacatttcaacctgcagctgtacggtagtatccatcgcaaggtcaagtgctccgaacagaaagtcataactgctccactcatgaacgttttccatgacgaatactacaag

SEQ ID NO: 293419 - DNA, 430 bp, Zea mays
cccacgcgtccgcccacgcgtccgcccacgcgtccgcccacgcgtccgcaaagggccatccgctgcggtcagtgtaggtttctgaatcatagcttggcgatgcctgaggctagacaaatactgagctagccttcagaaaaaaaaagaaaagaaagagattgagaagcagggagaaaaaatggcactggcccattgaggaagcttgagaaccagttaacaagaattgccaacatattcttggacaatcttgttaacagagttttaaggtttcccagcagagaagagcgcgtgcaaccaccacattcatataattaataagcaaggtttagagaagaggcaacatgggcacaaagatgaagaaggggatcctgaagccgttccgctatatctcaaccatcatggatggtaaggaggctgaaatgcaaattgg

SEQ ID NO: 293420 - DNA, 176 bp, Zea mays
cccacgcgtccgcccacgcgtccgcggacgcgtgggcggacgcgtgctctttcgcgcgggccctagtatctacgacgctactacataccgtacgcctccttcgacaagctttgacgaggggcacggacgatgaatactccgatcgtcgaggtgcagcacgtctttacacgccagat

SEQ ID NO: 293421 - DNA, 421 bp, Zea mays
cgacagcttctccacctcctgggcgaaccttccggcggccatgtacacgaggaccggagtgccggtggctttgtgcaggttcaggaagtacccacaggctttgggcgtcggacaaggaagccgtcggcctggtcgtttctcacctgaagaagatgctcccggatgccactgaaccgacgcagtacctggtgtcgcgatggggctccgaccccaactccctggggtcctactcgtgcgacctggtcgcgaagccggccgacgtgtgcgcgaggttcgccgcccccgtcgagaacctgcacttcgccggcgaggcggccagtgccgagcactcggggtccgtgcacggcgcctactcgtcgggcatcgccgctgccgaggaatgcaggaagcggctcctggcgctgaagggcatcccggacct

SEQ ID NO: 293422 - DNA, 396 bp, Zea mays
attgagcgcggttcctaaactcggatcctgcattttgtttcggcgatatgtgttggtgttaccagttgctgcagcgatacttccaatttctgtgccgatgggtttcctcgttttcttcttattttgtttcctcgtcgtcgcagcctgcaaattggtagtttcttggttcttatcagtggagctggctttggaatttgcaggcaccgttctgagctgcgctggtgctcctggaaaggtgttggtgcctggaggtggcagtgatgacttgctttcctccgtagagcctgtcagcgacactcaacctgaagaactacagcctttgcactttcatatcaggcattgtgcaatgcctcgtgaattgttggttaaggcaccgtgctggttcttgggctactg

SEQ ID NO: 293423 - DNA, 436 bp, Zea mays
  unsure (1)..(436): unsure at all n locations
tcggtcaacacccatcttagtctttctagagcctttcattaggccaatggtacccggtggaggagggcattcttggccgctcgccaagggcgaagaagttcagcagcaggagcatcgggtttctgaacaacacccagatgtcagcgtggcggacacggagcatgtaccaccggggcaggagcaccccactgatgtgcaagaccacgagcaccctcgcggcggtcatggcgcagatgctgtcccatcgggccacacacgtctgggtgacggacgcagagtcggaggaggacggcgtcgtcgtcggcgtggtgggctacaccgagatcttcaatgccgncaccaggagcacctgcccaagtccgacagcatcttgatgcaccacatcgtgctgtacagtatacttgctgtggttgatccgttggtgccccggtgcacg

SEQ ID NO: 293424 - DNA, 430 bp, Zea mays
cccaccgtcgcgaccgtggcggactcgtggccactgcccggcaccaacgcgctagttatcgagggcgaggcgcctccacagcgcactacgagcgtgccccgcaagtactccgagtacacgccctgcgaggacgtggagcgctccctgcggttcccgcgggaccgcctcgtctaccgcgagcgccactgccccgcggacggcgagcgcctgcgctgcctcgtgccggcgcccaggggctaccgcaacccgttcccctggccggccagccgcgacgtcgcctggttcgccaacgtgccgcacaaggagctcatcgtcgagaatgcgctgcaaaactggatccgcgtcgactgctacaggttccgcttccacgggggcggcaccatgttccttcgcagaaccggcgcttacattgacgacatcgccaagctta

SEQ ID NO: 293425 - DNA, 414 bp, Zea mays
cccacgcgtccgcccacgcgtccgcccacgcgtccgggctcccagttcttcatctgcaccgttgctacctcttggctcgacggcaatcacgtcatcttcggccaggtcgtcaagggcatggacgtcgtcaaggccatcgagaaggtggacacccgcaacggcttcacctacaaggtggtcaaagtcgctgactgctgacagctctgctagatctctctgatctggtatgttcggacaacctaccttcgtcatcgtctactactcctgcgtccattcctttggatctgaataatatggtggtaatctgaatggtggtattagtttatcatgtatcgctcgcagtataatatatcggtttaggtgatgatctttgaaaaataataaaattttgattcgaaacaacaacacaaactt

SEQ ID NO: 293426 - DNA, 451 bp, Zea mays
  unsure (1)..(451): unsure at all n locations
cccacgcgtccgagccattgaagacaatgaagctcgggcattgatggcttgacaagccattgtgtcatgtgaggatccgttggtgaatttacaggaccagaaaaacaaattgactgaagaggcggaggtggagctccgacgagccaatgaggcaattgaaaagctgaaaaccttcaagaacgaatgtggactgcctcatgtgcaaatggaatggcatgatcaccatgaaatagaactggtccatgcactgcccttcgaggattctgatgattctgcgctgaatgaaagcaggcttgacctccaggaaatatgtcaaagagtcaaagaaataattgaatcttaccctgagctatcagttgcggaattagcagataaagttgatcgacttgtggaaaaggtgatcagccttgaacttgccactacttcacagaatgctcagatcgatngaatg

SEQ ID NO: 293427 - DNA, 472 bp, Zea mays
aggcagaagcagagataatggacgacgtacatgtctggttcgtctcgctggcctgccttggtggtttgtacatcgccgccatctgctggcggcccctcgcctatctcgcgttgtgcctgcgtgggccgaaggacctgcaccgctacggctcatgggccatggtgactggcccgacctccgggctcggccggtccatggccatggagctcgcgcgacggggcctcaacctcgtcctccttgacctcgacgccaacaacctccaggagacctacgaggccatcaagtccgtccaccccgtgaagataaggactgtggttctagacctctccctcgtcgccacaccagaaggcgacaaggcgatccgacgtctgcgggaggcgatcgaggggctggacgtggggatactggtgaacaacgcggcggtgaacacgcctggcgcagtgtacctgcacgaggcggacatcgagcgctt

SEQ ID NO: 293428 - DNA, 412 bp, Zea mays
cccacgcgtccgcccacgcgtccgcggagaatcggattgctcccgaccgcgattacgccgaggctgtcaagcacaccaactccggtggcagcatggagctgcttgcgctgaatgttcagatataccttcaaatgaacaggacggaccacgcagagaagcagctcagggtgatgcagcagctggacgaagaccacacgctgacgcagctcgccaacgcatgggtcgaccttgtgctgggtggttccaagatccaagaagcgcgcctcatcttccaggacctgtccgagaagtacccgacgacctgcacgattcttaacgggaaagccctgtgctcgatgcacatgggcaacttcgaggacgcggaggggttgctgctcgagtcactgaacaaggacgccaaggatactgagac

SEQ ID NO: 293429 - DNA, 447 bp, Zea mays
cccacgcgtgcgcccacgcgtgcgcacacgcgtctgctgacccctttacattctctctctcgggcacgtattcgccggcgtggaatttgctccctcggcattctaccatttatcaatgcacagattgtgtttcaactccttgcgcaactctacccaaaattgcaagaccttcatcggaaagaaggggaagcaggaagaaagaacgttcttcactatacaagatatgcttctgttggatttgcaattgttcaggccattggacaagttctttatctccgtacctatgtgaatgatttcagcacagaatgggttctaacatctgtgacattattgacacttggatcggtctttactactttcattggtgaaagaatatctgatctgaaacttggaaatggaacatcacttcttatatttacaagtataatatcatatttgcctgcatca

SEQ ID NO: 293430 - DNA, 475 bp, Zea mays
  unsure (1)..(475): unsure at all n locations
caaccgaaaccgatggcgtcgggctcccgcggcggcggcgggagcgacttctccgtggtcgtggtgggctccgacgtcgccgaggcgaacgcctgcttctccgacctcgaggagcgccaggtcgtgcgcgtccagggcaccgatcgggcccgccgaaccatcgtccgcgtcgtcggcaagttcttcccggctccagcaattgatggtgaacgtctgaaaaagtatgtgttctacaaactccacaccgaattgcctgtgggtccattctgcatcttgtacatgcacagtactgtgcagtctgatgataacaaccctggagtgtcaatcttgaggacaatttatgaggagctttcacctgagtacaaggaaaggcttcaggttttctacttcttgcatcctgggcttcgctccaggctggccatcgccacacttggcaggctatttntaagtggagggttgtattggaaaatcaagt

SEQ ID NO: 293431 - DNA, 463 bp, Zea mays
  unsure (1)..(463): unsure at all n locations
cggacgcgtgggcggacgcgtgggcggacgcgtgggcgcgaggataaggcgagatctcgagggcgtgcctaccgtccgtccgtccgtcctgttcttcgtcgtcgtcgtcgccctcagcagcagctcgctcgctttatccaccttgagtgacgagttaatgcctgagtgctgctgacctgaccaagtgaccaccataccatcctgctcctttggacctttgcgcgcgcggaggacagttggtgctggcacgcacggcaaccatgcacgacgacacagcggcaggcttgtttgcgatcgtggcgtggctgtacaccgccacggagcgaggtgagcacgggtggctggcagcgtacgtcaggcccgggtcgtgctgtacggngcggctctgtacactgttggcgagtcgtccatgttttccgtgcacgagatctttgatatatgccgcacgtacagtcgtgggtgc

SEQ ID NO: 293432 - DNA, 343 bp, Zea mays
cggacgcgtgggcggacgcgtgggcggacgcgtgggcggacgcgtgggcggacgcgggggcagaatggcaaacatggaagcgacacaggcgcctacgacgctcaaggaaggttcgttcccgcgaagctggacgagatgttcaccaagcacgccaagaccgtaccgaacgctctgacgaaagacgagctcgacgagatgctcaaggataaccgggagaagatggacgtcgcaggatggctgggagccaagtcggagtgggagatgctgtacaagctagccaaggacaaggacggccgcctgtccaaggacaccgtcagggccgtgtacgacggatccctctttt

SEQ ID NO: 293433 - DNA, 366 bp, Zea mays
cccacgcgtccggttctctgttaccttagataatgctttttctaattcaactgccatgcgcacattgtcacctatgcttgctggttatttgggtgctgatgttgatccaacagataccagtaacaaaacttatagtgtgcttcatcagcgttgtgcatgtcacattattaacttgatagtgaagtgtgggttgaaaaggcttaaggattatttagatgtgtttaggactgctattaatttcttaaactcttctaaccagagaattggttcatttagtaattactgcaaagcaaaaggttgtagacctagaaaatttggtttaaacatggatgttagatggaattcaacttatcttatgctaaaaca

SEQ ID NO: 293434 - DNA, 351 bp, Zea mays
tgaacgtcttgggcggggaggaggacgacagggacgaggggtggcggcggtggtcggtgctggtggcgacggtgtggatccaggcgctgacggggaccaacttcgacttctcggcctactcgtcggcgctcaagtcgtcgctgggcgtctcgcaggaggcgctcaactgcctggccacggcgtcggacctgggcaaggcgctggggtggtcgtcgggcctggcgctgctccacatgccgctccacgccgtgctcatgctgtccgccgcgatggggctcgccgcctacgccgcgcagtactactgcctcgtgttcgccggcggcgctgatgcgggagcgggagcgtcgtcgt

SEQ ID NO: 293435 - DNA, 365 bp, Zea mays
cggacgcgtgggcggacgcgtgggcggacgcgtgggcggacgcgtgggtcggcctgtggagcgtcagcgctgcgctcatcaacggcgctcttggtagcaagtgcagacctcaaaatgcaacgtcatcgaagttggatatctacatagaggacatccagaaagggaaacatggaagcgattcagggtcatacgacgccgaaggaaggtttgttcctgacaagttcgaagagatattcgccaagcacgccaagactgtccccgacgccctgacgtcggacgagatcgaccagctgctgcaggcgaacagagagcccggggactacagcggatgggctggcgcagaagcggagtggaagaccctttac

SEQ ID NO: 293436 - DNA, 383 bp, Zea mays
gtgctctccaggaggaacagccacgcgtctatcaaggcacccagagacagctccggtgcggccacaccgatgtcgcatagtgcttcatcaagtggcatcaagtggtgcgagaacaatgtgatatggagctcactctcctcaagcttggtgcgtcatggaaaggaagcaatgaagcagagagacatggagctgcaagctgtgcttgatggactgctagaagcatctgcctctgagaagttgataaaatgcctgagcaaatactccgaactacattctgacaaggacgacgacccaaaggaggtcatcagcaggttcttgaaattctctcaagaactggatcatgccatcttcattgctcagtcacaggccagactcaagcaccc

SEQ ID NO: 293437 - DNA, 430 bp, Zea mays
ccccggccaaggatgttcttgctgttcaattgggacttgatgtattcaatatctactgatcctgcaattcaatatcctcaagctcataccatgttctggatctttgtaaaacaaataagggttcctggtctggctctgaatcctcagcttccaaaagatcactgccattcctagcacaggattttgaatcagatattgacacaagacttctgaagcttgtaaataagattgcttctggatcttgtggggacatgtttcttgggacctacagtggtgaggaggttgctgttaaagttcttaatcctcagaatttgaacaaaaatgtatggagtgaatttaagcaagaaatcaacatgttaagggaagttgatcatccgaatattgtccgattcattggttcatgcacaaaggcacctcagttttacataat

SEQ ID NO: 293438 - DNA, 423 bp, Zea mays
  unsure (1)..(423): unsure at all n locations
cccacgcgtccggctgcgctgctgcctacagctagagatgcatcgatctcagttgcccgcctcctgtccgccatggtggcggcggcctcccgcgatccacgacacgaaggcgtccatggtgcccgcgtccgaccggtagtgcttctgcgtgaactcgaggaactcgcgccacgtgaagtccgggaacgcgcgcgggcggcccgcctgcttgttctcctggaggagcgcgcccggcgggcggacgacgcggtccagcggcgggttgaggaagaaggcgagcgaccggcgggcgccgtcgccgctcaccacggcgcggtgcangcagctggtgtgacgcccgtcggtgagcgcggcgaaggtgtcgccgatgttgaccacgaacgcggtcccgcggggccgnaccgggcgccacggtccgccgcc

SEQ ID NO: 293439 - DNA, 458 bp, Zea mays
cggacgcgtgggcccaagcaccgcgtcgaacaaagcatcgacatacagacagccagactgcgagggaaaccggctacgccaaaaccaaatactctgtgtgcgtacgcgcggcagtgagcgacgaggcgcggtgcgcgcgcactggccatgagccggggccgcgcacgccggccggttccaggcagtggcacccgcgccggcgcgctcgaggtcctgctgctcctggcgtacgacgtgctgctagcagcgtaccccgccgcggccgtggaggcagaggcaggggacgaggaggcggtggactacggcgcgtcgctgtccaagagcctgctctacttcgaggcgcaacggtcggggcggctgccgcacaaccagcgcgtgccgaggcggtgccactcgggccttaccgacgggctgcagcatggcgtggacctcgtcggcggctactacgacgccgggga

SEQ ID NO: 293440 - DNA, 436 bp, Zea mays
  unsure (1)..(436): unsure at all n locations
gcgcgcagagcaagcagcaggcgtgcagccgcacgtgcgagtcggaccactggacgagtgacgtacagttaacccgcctcttccatgatcttctgccgctctcaccggcgttaattctttgcgacagcgccgccgttcctgcggtacggcaagtactgcggcatcatgtacagcggctgccccggcgagccgccgtgcgacgcgctggacgcctgctgcatgcaccacgacaactgcgtccaggcaaagagtacgtctgcgttgctccagtcgtcgtcttcagttcctatagctccagtagtgaatcttcagttcctatagctccagtagtgaatcttcagttcgacagcacgcacggacgtgggctgacgacggctgctgcgcgcgtgttgtgtactaccatgtgcagtggactacctgagcacggnctgcaacg

SEQ ID NO: 293441 - DNA, 459 bp, Zea mays
cccacgcgtccgcccacgcgtgcgcccacgcgtccgcccacgcgtccgcccacgcgtacggggggcgtacggcagagctccacggggatcaccatctccaactgccacttcaccaaccacaacgacgtcatgctcttcggcgccagcgactcctggccgcaggaccagatcatgcagatcaccgtcgccttcaaccacttcggcaggggcctggtgcagcggatgccaaggtgccgctggggcttcttccacgttgtcaacaacgactacacgcactggctcatgtacgccattggcggcggcgacgcgccaaccatcatcagccagggcaaccgctacatagcaccaccaaacatcgccgccaaagtgatcaccaagcactacgcggaagaaggcgtgtggaagaactgggtgtggcacacggaggacgacctgttcatgaacggcgccatcttcaat

SEQ ID NO: 293442 - DNA, 384 bp, Zea mays
cccaagcgtacggttgtagcatcgacctatatctgtaattctgtagctcattgcgtatcatgtgggcgagagatgaacacatatccgcattctttctactgaaacaccagaaatatgcgctcttgctccataattcgttaacacaactgcaatggcggacggtactgccatgaaggccaaggtcctgatctcttgcgaaggcacatactcctcggcgtccatgtaccttggtctgtctccagtgaggacgatacatcgaccacagctaccgggcttcacctagtatccgaacggccaatccttagacacagagatcttgctcctgctcgatccaagcttctttatcggaagtctgaccatcacggacaatctggtccatatctt

SEQ ID NO: 293443 - DNA, 430 bp, Zea mays
acaccctcgacgaccgactcctacacgcacgcgaccttgaactcctcaccgagctttacaccgcaaagacgcaatgataccactgggcctccatcgagggggccggcatgacattattcaccgacacctaccacctcttctgcatctccctcgtgactaacctcctcggccgcatctactacaccgtgtaatggtccgatacgccctccaccctcccaccgcacgtgtccacgtccgtcaactgcgtggacttcgctgacacgctgtcacgacagctcttcttcagctggctgggctacaagctctggcacaagaacgtctatggcatgacgctcatgctcatggtcctctgctccgtcacatcccagctctcgttccgccacaccccggcgttcgtcatggcaacactctgcttcttccgcttctggct

SEQ ID NO: 293444 - DNA, 408 bp, Zea mays
cggacgcgtgggcggacgcgtgggcggacgcgtgggcttctatcgtctatacgcttgggtctcctccatattgtcgtatgaattatgcgatcacgaaagggaggggatactgggtagcaattggtgtggagaggaaaggttcaagttgattttaaccaaggcagcacgacggcagcgacgacgacatacaacaacacgacggtaggggtgatgatggcagcgccatcgggtggtggatgcagtggctgtcttgactgcctgcatgatattgtgcatgcactatcgatgggatcatgcctgacagtagagcagcggcctgccatggctacgggaggtgcgcacaaagggagagatgtaaaagagaggaaggaaaaggtggagggtaggataataggaaatggagtgggt

SEQ ID NO: 293445 - DNA, 350 bp, Zea mays
cccacgcgtccgcccacgcgtccgcggactcttgggcggacgcgtgggctgcatcgagggtgcgcacccttcttgcgggcctggttcttgaagtcgtgcgtgcaaggactcattgggtctgccatgtactctgctgaccagtcagtggattctgctaaacaaatccagcacatttggcatcattagcctatgtttttccgagatgaactgcaatctaggtcgtagacgcaacctgtgggcattctatcagtccatgtagcagatcgaatgatcaacccatgagatttacaacagaagatggcaaacaatgtggtacatgcgatcagacgcattaaagctatatcgccaca

SEQ ID NO: 293446 - DNA, 334 bp, Zea mays
acgcgatcttggccgcttcgacaaggactccccgatcagggccatcgacttcggcctctgcgtctccttcaaggagggcgagccgctcatggacatcgtcggcagcgtctactacattgcgcccgatgtgctcaggacgacgtacgggcacaaggccgacatctggagcgtgggcgacatactctacatatttctcgccggcgtgcctcctttctgggcagagaacgagaacggcatctataccgacatcctgcgagggaagcttgacctctccggagagccatggccgtacatctcgttgggagccaaggacctcatgatgaagatgctcagc

SEQ ID NO: 293447 - DNA, 293 bp, Zea mays
cgcgcgcatcgccgccaaggtggccgccaaggcctacgagctcggcctcgccagccggcggccccgacccgacgacctcgtcagctacgcggagagctgcatgtacacccccacctaccgcagctaccggtaaggaccacccatgccgccatgcgtggcatggagccatggccggcgctagaggagtgagttttacacgtacgtactttgattttttttatgtactgtatttctgtgtacggcaaaatacaccacacccacatatatacggaggtgaagttgattcttctgac

SEQ ID NO: 293448 - DNA, 294 bp, Zea mays
tggcggtggagtcggactacttcacggtttacggtgtcgtattcctgaacgacacgcggatgggggaacctggctccaagggcggccagacggtggcggtgcggctgttctggaccaatacgcagatctactactgcaccatcgacagcggacagtacacgctgtacaaccacaatgtcctgcactactttaagggctgcctcatctggttcagaatcgacttcatcttcggcttcagccttaacttctacgaagactgacttatcaagtctgaagttaaagacgtggcggttc

SEQ ID NO: 293449 - DNA, 440 bp, Zea mays
ctccctaggccctagccaagggaatagaggcctccctggatccactaccacggaacacggatcataactctcacgcagatgctggagttccattggagaacattctttatcttggtggacctaatattgcttctgaaatttacaacaaagaatatgcaaatgcacgtatttgtggagctgacaaatggagaaaaacccttgcaaaatttttgaggcggcctcattttattgtgtgggataacagtgatctcatcactcatgaagtcatgggcggcttaaaaaatgcctatgctggtgctggtatggttagctgcattaaccaacgagagtgcaaccagcaaatccgtttactttgcactttgcacatctgagttgatctacatcacacaccttttggaagaagagcctgagaaacttgttggtagagatggcaatgggta

SEQ ID NO: 293450 - DNA, 412 bp, Zea mays
cggacgcgtgggtgccgcaggtgtgggacgaggagggcgcggccaagggcggcgcggtgaccccggcgccggccgcggccatgctgggctcgcctactgcgagagcggcgtgccccgggaccaggccaggttcgccgtcgtcttctcccacggattcaccggcttccgcgaggacagcgtccgcgcctcccaggaagttgcggaggagctgggcgtgtacatggtgggtttcgaccgcgccgggtacgggcagagcgaccctaaccccaaccggtccgtcaagagcgcggcgctggacgtggaggagctcgcggacgcgctggggctcgtgcccgagttctacgtcatcggcatcttcctcggctgccatgccgtctggggcgcccctaaatacattcccgacaggatcggc

SEQ ID NO: 293451 - DNA, 340 bp, Zea mays
cccacgcgtccgcccacgcgtccgcccacgcgtccgcccacgcgtccggcatacagcagagctatcatgcagatcaccatcaattaggtggggtgaggttaagatgcgatcctcaaagcgttgcaagtacagtgagccagctggaggtttgtggtcctcttcaaataacgttgctttgcaggatatcgagggatcgagcagtcagcacatacctcatgaatatggcgatggcatccagccaagtgttgtgcaaaacgtacaataagtgcaacatggaacaattctagataacattccggaaaacaacagtactgatgaacacactagagaaaattctggg

SEQ ID NO: 293452 - DNA, 307 bp, Zea mays
cccacgcgtccgcttcgccacaagcacctcgtgtcgctcatcggctgctgcgaggacgagggcgagatggtcctcgtgtacgactacatggcgcacggcacgctgcgggagcacctgtacaagagcgggaagccggcgctgacgtggcggcagcgccttgagatcaccatcggcgccgcgcggggcctgcactacctgcacaccggcgccaagtacaccattattcaccgggacgtgaagacgaccaagatactggtggacgagaactgagtggctaaggtttgcgactttgacttgtccaagaccg

SEQ ID NO: 293453 - DNA, 240 bp, Zea mays
acaacgccgatgcggacgccatacacgacctaaccagcgccatacgggggcgcgcccccacgagcagatgtcgaagacggccgagttcgaggtcttcaatgttgatgacctgatgaactgggcacgtaagggctcgatttggcccatgacctttgggctcaaatgctgcgcggtcgaaatgatacacgccggcgcgttcagctacgacttccaccgggtcggagtcatcttacggccctc

SEQ ID NO: 293454 - DNA, 401 bp, Zea mays
tgagaaatgccgtcctctacaccaccatcagtacaacccactccaagccttcagacattggcatgtcctgcagtagcccagaatactcatattgatgttagtgagatcaagtccaagatttttaagaggataggacatgaacgaggaaataaatactttcagcacctggaaaggttcttatcttcaagattgagcaagaatgaattcgagaagctctgtcttgtggcacttggccgtgaaaacctcccattgcacaaccaccttatctgttccattctacataatgccagtcgagcttgtggcccacctgtaattaatgaccctaagctggtcagaggtgccaccacttctggccatgcagttgttcctcctgtctgggacaatggtggtgccttgaacct

SEQ ID NO: 293455 - DNA, 426 bp, Zea mays
gcgtaaagggcatttggagtggcatgattggaggaactttcatgcagacggctatcttagtgtgggccaccttgagaactgattggaacaaagaggtagaggaagcacagaaaaggctacacaaatgggaggatcagaagacgacgacgacaacgacggagcccctccttgcgggggtcgtcggcaatggcaatgccaattagtttactggatggacatcattctcccagacggcttcaccagcgtcaccgtcaggatatggaccctgcaaagtgtttctccggagtgtttaagttttctttcccgtatcaaaatttgcgaaacagagaaggaagggttttttttttgaaaacagaactgacgtctatcttttgagtgtaagaaattcgagcatacatgtggattttttttaaaaaaaaaaaaata

SEQ ID NO: 293456 - DNA, 283 bp, Zea mays
cgcactcttgctacacacgagactgctgttctcattgagctcatcttacgacatctgcgttatcgttaaacagatgtgtccggacattcaaactccgtaccttacaatttcttgcgctcggatcggctccttaagtccggaccttatcaccaaaaggaggaccggtgccccatttccaacctacagaatgtgttaaatcaccttgaacttacatgtatttcacttgcgccccaatgctagtacttatcctacacctgtcatgtcatttcacaaacattgacta

SEQ ID NO: 293457 - DNA, 300 bp, Zea mays
accacgcgtacgccctacgcatccgaccacgcgtacgcccacgcgtcctcccacgcgtgcggtacaattcatccgatgttttacagctttaaaaacaaaataaaataaaaacaaataaaataaaaaaaaaaaacaataactataatacaaacgaagaacaaaataacaaaacaatacaaatactgctgtaacggagataaggaacctaaagagcgccgtcagcaccgtcgccgacaggcgcaccgcctgcaactggctcaagaacgccgacagaggcgtcaacggtcttaacgcctgtaa

SEQ ID NO: 293458 - DNA, 402 bp, Zea mays
tgccttcaaattctgccgtagtagtagttatcgccatctttcttgttgttatcctcggcgccagccacgcggtcaccggcgcccgtgtcggcaccatgatgatccggcagccttcttcgtcgtcctccgtcctgatgttcagggaggcgcccgcgttccggaacggccccgactgcggcgcggacggccgggtggacatcgccatgacgctggacgccaactacctccgcggcaccatggccgcggtgctgtccatcctgcagcacacggcgtgccccgagagcgtagcgttccacttcctcaccgccgacgccgacgccgacggccacggcctctccgccgcgctgcgcgcctcgtttccgttccttgaccttcgggtgtaccgcttcgacccgtcgcgcg

SEQ ID NO: 293459 - DNA, 346 bp, Zea mays
gcgacggaaaacatgagatagcacgcaatctgacaaaacgaaaaaacgagaaagacggggagggtgctgctggcatcgggggccacgacctcggacgccggcatcacctgcagtcaggtgagcttcgccatcgcgcactgcctctcctacgcccgcggcacagagtccggcccctgcgaatactgctgtagcggcgtcaggaacctcatgagcgccgacagcaccgtcgccgactggcgcaccgcctgcaactgcctcaagaacgccctcaggggcctaagcggcctcaacgacggcaacggcggcagcattccgttcaagtgcatgttcagcatccccttcacca

SEQ ID NO: 293460 - DNA, 384 bp, Zea mays
gattcctgtaatggaaaccatgttcgatgcggattcagaaccaaaaaatcgtaagcttgaagaatttgacactaaggcaaatagaaacatgggaatgattgacgaagaatcagatgatgacgatgattatcaagttcctgaagctaatatagaggaagacgtgaacaaatctcatcatgatatcaagcgcacagatgagcctacagaaaaaattgatttatcttgttttttgagtattcttcatcgtgatcccgaggagaaaagtcgcaattgttggacagtacctgatagcaagatcttcaaagttcgtagcaaaaacttcccacaagacaaatcaaagatacctgcagcaagttatctcatggagcttgcagccattgactg

SEQ ID NO: 293461 - DNA, 390 bp, Zea mays
gggaaggccaggactgtgttcctgcgctacacggtgatgtggcgcgactggagcccggcgggggtgctgcccgtgcggatctacatcttcgacgtggccggctgcggcgtggaatacgacgtggaggagcaatgcagcggcggcgcgggcggcgagtgcgtgcacgttaagacggccactcaagcgctgccactgggcggcgacttggtgttcggcgtggcgcaccagcacgcgggcagcgccagcgcgtcgctgcacagcgacaacagccgcctgctgtgctagtccgcggccacatacgggggcggtcaataggccatggacaaagctgtctacatcgtcagcatgtccacgtgctacccgcgctcccacgccatcacagtgctcgac

SEQ ID NO: 293462 - DNA, 335 bp, Zea mays
gagacgcttcctgctggacgttaatccacacgatttgactctgagcttacaaatgcgggaggctatatctgacaatgcagccactatgttcctgtttatataccagagaatactgacctgacaagtgtgctcaattgtctaggtaattacctatgcctatctaattcaatttaagccactgttatacctctcacttaacataacactgctttcacacttgactttactggtttaggactatccggccatgattatgacagcttgaattggcatgagaaagaatacctcaaatgtgcattgtcatgtcttccggacaataaacacgtttacactat

SEQ ID NO: 293463 - DNA, 421 bp, Zea mays
catgaagtgagattttatggcagaaagcttcattatttggagcaaagaaaatataagggccaaagagcatttaccaaacatattgcgacaagctctaatttgcaaaacacctggatttggaatgtcttcatttgctcatgtttcacttattctagctcctgatagaagtaaactgtctagacgacatggagctacttctgtggggcaggttacttaccgattgtttcctatcttaaaactctaccaacatatcttgttttattcaaggcataagaatgaaccatgatgtatttttcgctgcacaatataaagaaatgggctatcagcctcaggcaatggagatttatttagcactactgggctagggtgatggtactgaaaatgagttcttcactattgatgacctagttttgttcttaat

SEQ ID NO: 293464 - DNA, 400 bp, Zea mays
gaagagcatacgatggcgtgcacgaacaatgccacgagcgcatcgatgctagtgatggtgggattagtccttcgttgggagaaggataagtcgaaggtcttgtctgcgaacgcttacgcgactggtactgactccaacgttatcaacttgagcccctccaaccacagcttctaaaacagcaagaaaggttacaactaagcattgccataagcatgggcctgggcctgtcaaccaaactatcatcatacccaagggagactcatttgccgaacaacttaattccaaaggcccttgaaagggcaacgggacgttcaagttgaatgtcaatttgcaagtcaacacggacttaagccagtacacaacccatggtaatggcatcgctattttactcacgaataac

SEQ ID NO: 293465 - DNA, 341 bp, Zea mays
cggacgcgtggggttgccaaagaattcccttccctagccgtcgtccgcgctcgtctggctgggaagttcccggacccgagattttgcccaattcttaggttaaaaatcggtttacctggcttaaccccgggtcttcttcctttggttgttgttaaagggaaaaaattcttagatctgttccggatcaagcgttccaactcgggaatcaagggtttcacacatatatttgtccatttgaaaattatgtactcaaggggtctaaaggtggcaaaaagtctagcaattgtcgttctatgatgtatgaagcttccctttgctacaacatttaggacgttcgacct

SEQ ID NO: 293466 - DNA, 424 bp, Zea mays
cgcacttcttgatgaggcatgtatgttccccaagtccacacacgagacgtttgcccggaagctataccagacttttcaaaagcacaagcggtttgtgaagccgaagctatctcgtaccgattttacaatctgtcactacgccggagaggtgctgtaccagtctgatcagttccttgacaaaaacaaagactacgttgtggcggagcaccaggaactgctgagcgcttctaaatgctcgtttatctccggattgtttccgcctccgccagaggagacgtccaaatcgtccaagttctcttccattggagctcgctttaagcaacaacttcaagcccttatggacacattgaactccacagagcctcactatattagatgtgtgaagccaaacaatgtcctgaaaccagcgatctttgagaacgtc

SEQ ID NO: 293467 - DNA, 276 bp, Zea mays
gggaagacgaagacagagtccgagattttgtggatcgaggtgaagcccggttggaagaagggcaccaagatcacgttcgccggtaagggcaaccagcagtggaaccagctccccgccgatctggtcttcgtggtcgacgagaagccccaccccgtgtaccggcgtgacggcaacgacctgttggccgaggtccgtgtgacgctcgcccaggcgctgggcggcacggtcgtcgtcctcaccgcgctcgacggccgcgagctcgccgtcgacgtgggc

SEQ ID NO: 293468 - DNA, 404 bp, Zea mays
  unsure (1)..(404): unsure at all n locations
cccacgcgtccgcccacgcgtccgcggacgcgtggggcagctgctttcccttcgggagggcgacggcgacctccccgacgacttcgagttcgacatccacgtggacgtcaccttcgccaacgagcgcctgcgccgcgcgtacgtcgcgctccaggcctggcgccgcgccatgtactccgaccccaagaacttcaccggcggctgggtaggagccgacgtgtgctcctacttcggcgtcacgtgcgtcccggcactcgacgacgctaacaccaccgtcgtcgcgggcatcgacctcaacggcggcgacatcgcgggttacctncccgcggagctcggcatgctcaccgatatcgccttcttccacattaactccaaccgcttctgcggcatcatccccaagagct

SEQ ID NO: 293469 - DNA, 418 bp, Zea mays
ggccggctcgttgcacctcggcctccgactcccttggtcagcatagctgtcgcggcgggctccagcccgggcccctccgcgcccctctcctgccgcggaccggcgcctcgctggcgacgttcgagcgtgagggcgcgcaccggggccgacgacggccgcgggcatagggagtccccgtacgaggtgctcggcgtgtcgccgtctgcggcgcccaacgagatcaagcgcgcgtaccggcgcctcgcgctcaagtaccacccggacgtgaacaaggagcccaatgctcatgagaagtatctgcggatcaagcacgcttacaacactctgatgaactcagagtcacgatccaagtacgcgagcagcagttcggattcgtcctggtcctccagctaccgggagaggaaatcagctgctgcag

SEQ ID NO: 293470 - DNA, 212 bp, Zea mays
cccacgcgtccgcccacgcgtccgcccacgcgtccggacgcggaatctcgacgtcaggctaaacaagaggggcagggtcgagatggatggcggtcagtactgtcgaagaggcacgctcgtcatcgaggcagagatcttcgaggtggctccatcggtgcgcgtggtggagatgtggaagattggccgagactcagatgagtaacgagcgttgt

SEQ ID NO: 293471 - DNA, 409 bp, Zea mays
gatctttatattggcaggtggatgctttcaaaaccacgagacaagataattgtggcggccaaagttgccggttattcagagtggtctacatttctttgagacaatgcaaaagtggttcgtgttggtgctgccaatatcaaagaaagtattgaaatgagtcttaaacgcttgtctacagattacattgatttgcttcagatacactgggttatgttgtgtaccttgtctgtgtgaggcgtggtggtaggaagaggcctttgcccaagtgtattatctatggctagcccaagcaccagggtatcacccaactcaagttctagaggtacaagagctctctcgctgatgagagagctagacgcaagcttggtggactgaaggttcttaacttctactgggtgaacgaagtaca

SEQ ID NO: 293472 - DNA, 429 bp, Zea mays
cccacgcgtccgcccacgcgtccgcccacgcgtccgggcccgatgtcgtctttcagggagcggacgattttcgactcgatgcggccggacccggccgtcatggctggactggagaagatgtccgacgccgccattccgccagcgaaatacgatactacgtcgccggccccgaatgcgctcaggtccccctgctgctgctgctgctgcgacacaccgaatacgtcgtgtatgtcgatgggtgacggctcgaacgggcccagctggttgcacgacagatatttcttacgctcctcgacgcgggtgagtgtgtccatgaggaatttctcgcacgtctcggcttcattcgtcaacaccaacaccgccggatctggctcgaacatcctaatttgcttctccaactcttcgacctgatgtctggattttctaatc

SEQ ID NO: 293473 - DNA, 423 bp, Zea mays
cccacgcgtacgcccacgcgtccgcccacgcgtccgcggacgcgtgggtcgggccgggcctccctcacacaaataataaggaaaggtcccgcccttttcctccgacatccacaaggggggaggggaaaacacgtacattcacccggcggcaataatggccttggttccggctccggcgacgacgaccgccgtcgtcatcctatgcctatgcgtcgtcctctcctgtgccgcggctgacgacccgaacctccccgactacgtcatccagggccgcgtgtactgcgacacctgccgcgccgggttcgtgaccaacgtcaccgagtacatcgcggacgccaaggtgaggctggagtgcaagcacttcggcaccggcaagctcgagcgcgccatcgacggggtcaccgacgcgaccggcacctacac

SEQ ID NO: 293474 - DNA, 284 bp, Zea mays
ggaccttgtcaggcgctacctcggcagcatcgtaccgcctggcgacaactaggatgccgccctcaattcagcggtgttcagcgacggatccttctgctacgtgcccaaggacacggtctgccccatggaaatttcgacttacttcaggatcaacgacaaggagacaggccagcttgagaggactctgattgtagccgatgagagaagctctgttagctatttggaaggctgcactgcaccagcatttgactcaaatcagctgcatgctttagttgtggagcttg

SEQ ID NO: 293475 - DNA, 162 bp, Zea mays
tcgacgcaagccacccgtccacaacatcatcggcacctgctctacccctcaagcccttagactgctcttcacggccagggacacatgcaccggcgtcaccatagatgacttcaacgacgactatacctacaccaacaacaagaccatcgctatattcacgaa

SEQ ID NO: 293476 - DNA, 330 bp, Zea mays
ggcgaaagaagcgtgggaggcggtgaggtcgatgaggatcggcgatgaccgggtgagggccgttagcgtgcaacgcttgtggaaagagtacgagaacgtcggtttctgtgatggtgagagcgtcggctacttctcgttgcggatcaacggcctcgtcgcaagccttcgagagatgggcgagacgctggaggaccaccgagtcgtgaagaagatcctccgcgtcgttcccaaacgtctcatgcaggtggccgtggcgatcgatatgctcacctgacctaacacgacgacgattgaagagctcttcggtcgactacacgttgctgatgacgc

SEQ ID NO: 293477 - DNA, 367 bp, Zea mays
cccacgcgtccgaccacgcgtccgtctcaactctcctttcctctcgtgggcgatcggctctctcctgcggcggcggcggcgatcaacgtcgacgactacggtccacgattctccttcgaagcgcgaatcatgatacattttgtgctccttatcagcaggcaggggaaggtgaggctgaccaaatggcacactccatacccacagaagcagagatccatgatcatcacagagattagtacgctcgtcctgacaagaagccccaagctgtgcaattttggctactggcaaggctacagaattgtgtacaatagggatgctagcctttacttctgcatgggcattggccactttgacaatgaactggaaa

SEQ ID NO: 293478 - DNA, 334 bp, Zea mays
cccacgcgtccgcacgctgttattgccaccttacgagcatcttgctgaagactgtgggcgggctggaactgcgggtggggtactagcactggactactccggggcaccacatcggcttcatcgatatgtaccgcctcaccttcttcttcgacaacttcggacccaacgcgactaccttcattgtgccctcagtgatcttcccggacagattgcctgttacgtgccacggtatctcaactgactcacgaaagctggagcgctatcatcgtgatgcttcaagttcctgtacctggcgcaaaaccgtttaccgggccaagacagaccactgataccc

SEQ ID NO: 293479 - DNA, 434 bp, Zea mays
cccacacatccacatttccaataacacatttcatcgcaacatataccatccttcactggtggcatcatgaacacatgtgggtgaaacttacacacctgatacccgctgtccattctgcccgtcagatagtaacatgggttactgacccaatgcatgggaacactattaaggcccattgcggactcaaaaccctctcgttcgacaggattttgggtcacgtgcgtgcgttctttgatgtccacgaacaagaagggagccaccctggaggagtgcatctagagatgactggacaaaatgttacacagtgcatcggcggttcacgtactgttaccttcgatgatctggggtcacgctaccacacgcactgctacccaaggctcaatgccttacagtctctggagattgcatttatcatcgccgaacgccttatgaaa

SEQ ID NO: 293480 - DNA, 451 bp, Zea mays
ggcttctcctccccctcttaccaagtcctcttcgggttagggttacttagggttttgtggaggggcgatggcggcggctgatgtggagtaccgttgcttcgtcggcgggcttgcctgggccaccagcaacgagtcgctggagaatgccttcgcctcctaccgcgagatcctcgactccaaggtcatcaccgaccgggagacggggaggtctcgcggcttcggcttcgttaccttctcctccgagaactccatgctcgacgctatcgagaacatgaacggcaaggagctcgacggccgtaacatcaccgttaaccatgcccagtcccgtggcggtggctgtggccgcggtggctactgcggcggtcgcggcggcggcggctatggtggcgggcgccgtgacggcggttatggcggccgtggcggctaccgcggtcggcgcgagggtggtggc

SEQ ID NO: 293481 - DNA, 460 bp, Zea mays
  unsure (1)..(460): unsure at all n locations
aattgcgccactgctcgttatcctcctcttgcattgcattgcaggtcgtagttgagcaggggggaccactgcacaggatgtggtggcagacgtacgtcgatgagcacctcatgtgcgagatcgagggccaccacctgagctctgccgccatagtcggccacgacggcgccgtttgggcccagagcaccgcattcccacaggtgataccaatttgcatgatccttgttcgttctagctcttgcatgccgatcagatcaatcacgcggtttccttgtgcgcatatgcatccagttcaagccagaggagatgaccaacatcattaaggacttcgacgagcctgtgtttctggccccgatcgggctcttccttggccccaccaagtacatggtcatncaaggcgagcccggcgctgtcatgcgcgggaagaaagtactgatgatcccgcgtcgtctatgctcat

SEQ ID NO: 293482 - DNA, 360 bp, Zea mays
cccacgcgtcctaacacctgcaatgggagagataccatgtttgttttgccgcctctgtctgctgactagtacattcaaagggcttatgaactcttatgtctcatcttgaggattcaactttctaagtatcccccatcaactctcttatcttctgtgtacggcacctcctgtttattcaagttattcatgaatggttatctcggcctttgggtatgttcatacaatagccacctttgaaatggctgcaggttttcacgcattgatccagtacactgatgcagatactgcctcagctgctagagaagcctgagattgatagagcatcctaagttacttgcttgcataacacgtttcatcctg

SEQ ID NO: 293483 - DNA, 176 bp, Zea mays
gagcggaattggatgggtttgaatcccaaacaagtcaaacttcttctcaatttttttcaagccgactcaatccatgtgttttgggaataaccgaccaagcccttagtgtgtttgttacttcattccgcatggtttgggcctttgaagttaaaagaatcataagaccttgttcggtt

SEQ ID NO: 293484 - DNA, 461 bp, Zea mays
agaagatttgcttgagcatatccaattaccaccctgagcactggcagccttcatggagtggggagtaggggtggtaatggatcaagatccaaatgttttttcacaatacgttagggcccttaattaattttagttcaaaaatgaatagtaatagagctccaccctaatccgatttgatccttaaaatttatagtgtaaaatctagagcccattaccacccctattggtgagtaatctttagtcatttgtttataaggctattctcaatggggagtttatgttgtttctaagactgccgcatcatgtaaaaaataaaacatggataaagcatccatcctcactgcatagtttcattctatggtttcaaatacatttacttcacgacttataagagttgtaattgtgcccagagagttctctcttaaaaatgttgccacatcattaaaaacgcttatgtggca

SEQ ID NO: 293485 - DNA, 406 bp, Zea mays
cccacgcgtccgcccacgcgtccgcccacgcgtccggctcattacaatccttcatgggagcatcactacactacactacattagagagaggtcgagcgcccctcctgcgatccgccggcccgccgagagctagctgctgatcggtcgaggagagtcatggcgacgtcaacgatgcgcgttgccgccggcgtgctgctggtcgtgtcggctctggcgaccttggccctggccgacgacctctacctgttctatcagtggaaggtgacgtacgggaccatgtccctgctgggagtgccccagaaggtcatactcatcaacggcgagttccctggccccaggatcaactgatcctccaacaacaacatagtcgtcaacgtcttcaaccagctcgaccatccgctccttt

SEQ ID NO: 293486 - DNA, 414 bp, Zea mays
ctggatcatccggagcaggcacgactctgtgttcaagttttagagcatcatgccaggtgcgtttgttgcactgaaactgatgttccagactacatacatcgacgaaggcaatagatccaagtgttgcgtattcaaaggtgatcctgcaaaggttgctcatcactgtggcagcagcaaagaagttaaagagaaaataagcatgataatggatgaacttgcccttgatggatatcaggccatagctgtaggacatcaagtagactcttgttgggactttattgcccttctgccttatacagatgaccttaaaagcgatagtgctgatgttgtcgatagccttatcgatctaggtttagatataagagtcctcacagaaagtccattgtcgaccacaaagcacgtttgtggaaagct

SEQ ID NO: 293487 - DNA, 412 bp, Zea mays
  unsure (1)..(412): unsure at all n locations
gccaagccttcggccaagccttccggttccccgtttccttttcaaactcaaatcatggggctccacngatcggctccaagcccgcagaagacgagcaacagcagaagcgcccgtctctcttctcgccgtaccagatgccccgcttccgcctcacccaccggtgagcctccatcgcggtggtgctggcgccgatgaccaggtgcagggcgcccgacgcgatcccaggccccgcgctcgcggagtactacgcgcagcggtccacggagggcggcttgctcatctccgagggcaccatcatctcgccgtccggccctgggttccctcgtgtccctgggatatacaatcaagaacagactgatgcatggagaaaggtggttgatgctgttcatgccaagggagctatctttttctg

SEQ ID NO: 293488 - DNA, 292 bp, Zea mays
cccacgcgtccggtcgactgctgctgcgttctgttccgttcggaagatgttcttggagagcttccgggtggagagcccgcgggtgaagtacggcaacggcaagatccattcgaagtaccgttacaacaccaccaaattcttccggccgggaattgccgccgccccgggttggttgttcccccaaaggtcgtgaacttacactctaaggaccagcacaaacttccaaaaatctggggtgaacgctcgccatatggcgcggacacaacggcaccactctcaggcccggtgatat

SEQ ID NO: 293489 - DNA, 413 bp, Zea mays
tgcatcattaaactggaagataaaaaatctggggagctttatgctagggcatttcggagagagggtgaaccacatccggtggaacctgtaattgatagtagcagatattttgtactacgtgttgaagagaatatagatgggcgtcagcgccatgctttcataggtttaggcttccgggaaagacctgaagcatatgacttccaagctgccctacatgatcatatgaaatatttaaacaagaagaaggccgctgaagagatgattcagcattatgagaagcaatcttcagtggattacagcctcaaagaaggggagacattggttcttcagcttaaaaataaggaaacaggcaccaagacaaaatcgacattttttgagcaaggcctaaacaagctctccgttaacgaaaagac

SEQ ID NO: 293490 - DNA, 339 bp, Zea mays
  unsure (1)..(339): unsure at all n locations
aaggaacaccaaaatgacatatattccaaaccatctataccatgtgggtccttctaattcagcacactggacatccttcagacatggcaatacaaacagcacaatagctcgacangattgcatatgcatcatcttacacaactactgcaaagcataccatgatcatacctaaagtcgacttacttgctgaaccactcagcttcacatgaccttgccatggctacgtgaccatacatgtagatagcaatctgctatcgaccacagccctataccagtaccgtgcacattatcattgaaacgaaagactacgcctgcataacctatgcatcacatgctatg

SEQ ID NO: 293491 - DNA, 412 bp, Zea mays
cccacgcgtccgcccacgcgtccgcccacgcgtccgcccacgcgtccgcccacgcgtgcggtcccgtccgtccgtgcgtccgtccgaccatccgtccgtccgcagcaatggtcggcggcatgtcaccgccgcggcggacgctgtcgatggggagcggcggcgccatgggacgccgcgcggcctctgccggcgtgatgggcgacagccccaagcgcgggctgtcccgatcgatgaccatgggcggcgagcgcacggtgaagcggctgcggctgtcccgggcgctgacggtccccgagagcaccaccgtgctggaggtgtgccgccggatggccgcgcggagggccgacgccgcgctgctcacggactcgaacgcgctgctctgcggcatcctcaccgacaaggacatcgctac

SEQ ID NO: 293492 - DNA, 406 bp, Zea mays
cccacgcgtccgggggtgcgcgacgttctgggtcggggaggaaggggaggccccgcggcgggtggcggtgcccgtggcgcgcctgggccacccgcgaatgctggagctgctcggggaggccagggaggagtacggcttcgcgcaccagggcgccgtcgtcgtcccgtgcgccgtcgagcggttcatgcgggcggtggaagcctcggcgtcggcggggaacaggcacgagcaccaccgtcacggacaccatcaccaccactttcgcctgcctcatattcacatcgcccggtgctttagaccgtcgcacgtcgttgcttaggattcacgtcgagcgcgcgcgagtagcaaaaaaatttcattttcctttttgtttggaagtggcaagaattctggttttttttcttct

SEQ ID NO: 293493 - DNA, 437 bp, Zea mays
ctcaagccagacatcacggcgccgggggtgaacgtcatcgcggcgtggagtggcgcgacggcgcccacggacaagtcgttcgacaagcggcgagtggcgttcaacatcctctccggcacgtccatgtcgtgcccgcacgtctccggcgtcgctggcctgatcaagaccctccacccggactggagccccgccgcgatcaagtcggcgatcatgacaagcgcgacggtgctggacgcggagatgaagccgatcctgaactcgtcctacgccccggcgacgccgttcagctacggcgccggccacgtgttcccgagccgcgcgctggacccagctcgtgtacgacatgaggacgatgaacaggggatcgttcgtgtgcccgaccacccccatgagcctacacgacctcaattacccatcaatcactgcgcacggtcttt

SEQ ID NO: 293494 - DNA, 333 bp, Zea mays
  unsure (1)..(333): unsure at all n locations
cgtagctaagcacttcacaggttatggcgcagcctccactgggaccaggttctgggcaagcgctgttctgatcaatgccatctttcgagctgtacctgtcgcaccggaatcagtatggctagaaggtgcaggcctnctggagaaactgcatgccacagagattttgaagaggttctatcagcaggcggcatcggtctatcccttctccttcaagctgtggcacgcccatctgaattactgcaaagccagtgggagcaacactgagagcatcctggaaagtgcgaagcaacgtggcatcgagcctaatctgacaccaacataatgggtcccttg

SEQ ID NO: 293495 - DNA, 264 bp, Zea mays
  unsure (1)..(264): unsure at all n locations
cggacgcgngggcggacgcgngggagctccgccaccaccaccaccaagcccaacaacagggggcncgcgaaaanaangaagagccgcagcacggcaacaacggccgcgcgcgaggagcaagcccncgcgcaagnggcggccaccgccccacaggaagcggaggcaaagaagaagagagcggcggacagcggcgaggcggcggaggcgaagaagacccaggacgacggcagcacgacgcagagcgagggcaagaaggggacggac

SEQ ID NO: 293496 - DNA, 317 bp, Zea mays
cggacgcgtgggctgacacatgaacatgctctcgggtgcagtcatcggaataacaaataggacgcgtcaacaacagccagctcgcgaaaataatgaagagccgcaacatggctatcatctgccgcgctcttggtgctagccctcgcgctagtggcggccaccgaccgcacaggtagcgtaggcatagaagatgagagcggcggacagcggcgaggcggcggatgcgaagaagatccaagactacttctgctggacgctgtgcgaaggcaagaaggcgacggacccggtcgtgtgcaaggagttctgcgcgctctacc

SEQ ID NO: 293497 - DNA, 312 bp, Zea mays
cggacgcgtgggttaggtcactgggaggaaccatgctgtggaacatgttccagtggttttgcgctgctgcaaagggctgtggcttcggagtgttccctatctttggcctcgaggcatataaacacggattctacttcgacttctgcatgtccaacatcggcatcggcatgctgtgcccgtacaccatcaccgtgtccatgttcatcgggagcgtcgtctcgtgggggctcgtcttggcgtacctcgcgaccaaggcgggcgtctggtactcttcgcacctcagccccagcaggcctcagcggcatcaggggc

SEQ ID NO: 293498 - DNA, 397 bp, Zea mays
cccacgcgtccgcccacgcgtccgcccacgcgtccgggtgcagcgcgcgagcgcgttcgtgcggcatggaacagaacgacggctcgttcctcgccgtgcgacgcctctccggcggcgccatccaccaccatcgccaccactcttcgccggctgaggtcgtgggcgtgtccacggcgtggatcgggaaggggcttacgtcgtgcgtgtgcgcgcaggggacggagagcgacgggcgcctctccttcgatttgagtcccattcaggaagagtgcttgcataggttgcagaaccggatagaggtgcagtatgatggttcaaatctagagcatcagaaagcactggtggccctttggcatgcttcttttcctggaactgaacttctaagattagtatcaga

SEQ ID NO: 293499 - DNA, 436 bp, Zea mays
ggcaacaccatcgtggaaatccaagtaggaatgggccccgacggctagctgcgctactcgtgctacctggagagcaacggcacctggaaattaccagtcatcgacgcattccagtgcaacgacaggtacatgcgtagacgactgaaggcggcatcgcacgcggacggcaagcttgagtggggacaccgtgggccgaccgacgctggcggctacaacaactgatcagaggacaccggcttattgcgtggagacaacggtgggtggagcaccgagtactgtgacttttttctgtcctggtactcagctagatgctgctggagcacggtgaccgtaatctggtcgggcaccacattggcatttggtgcggcatccgcataggtcagacgaaaggtctccagcttccactggtactacaggtgaaggtgccacgcctcag

SEQ ID NO: 293500 - DNA, 332 bp, Zea mays
cggacgcgtgggcggacgcgtgggcggacgcgtgggcaacggtgccggcgctggtgacaacggcagtgcgtgcgggatcaagaacgtgaacctgccaccctacagcggcatgacggcgtgcggcaacgtccccatcttcaaggaccgcaagggctgtggctcatgctacgaagtgagatgcaagggaaaacctgaatgctcgggcaatcctgtcacggggttcatcacagacatgaactacgagcctatcggtccctaccacttcgacttgagcggcaagggccttcggcttccctgggcaaagcccgggctcaacgacaagcttcggcact

SEQ ID NO: 293501 - DNA, 241 bp, Zea mays
cgttccgccatgcgcgcaccgaggcacggcagcatgcgcgcccacgtcgccctggccttcggggcgctggtgctggccggcgacgccctgcacacggcgctggccggcagatgcagtttcgactacaaggatgccctaagcaagaccatcatattcctggaggcccaacgctccgggaagctgccgtgcagcaatcgcgtcaagtggcccggcaacttagggcttaacaacggcaagctcg

SEQ ID NO: 293502 - DNA, 435 bp, Zea mays
cccacgcgtccgcccacgcgtccgcccacgcgtccgctctttctctctcgcacgagccgcgccggcgccgccaccacgcgcgcgggagacagagaccacagccgcagccaccgacgggcggaataggaatggtggcgccggggggaggagcaggaggaggtccgttgcggtggcccggcggcggaagaggaaggatgcgtgcatattagtttccgatgaccccacctgatcatgtacctagctgaacaaatgggactggaactgatcttgtcaaagttgcatgatctcaaatgggaatacccccatcttgacactgtacggaagaaggtggtggagattagtggaagggatgaacaagaggttatggttgctgcttgcccctacagaatttgccctctgggggctcatattgatcatcatggtggagtagtcaca

SEQ ID NO: 293503 - DNA, 452 bp, Zea mays
gactcttcctcccactcttcctctgactcgtgggcttctagatcgcaagtggacgcccttatggaacctttgagaatctcattacgctaaaggccttctccttcccattctttctctcctcttttgttctcctatatcacataaacaatggttaatgctgttgctgtgcttggtatcatctatggtgtcaagggctccatctttttcacccaagatggagatgtccctaccgctgtcacctgaagtgtctctggcctcaatcctggcctccatgggttccatgtacatgcacttggtgacaccaccaatggatgcatgtcaactggaccacactacaatcctgctagcaaggatcatggggcaccataagatgagaaccgccatgctggtgatcttggaaacgtgacaacttgatcagatggtgttgctaatatcaatgtcaccgacagcca

SEQ ID NO: 293504 - DNA, 426 bp, Zea mays
  unsure (1)..(426): unsure at all n locations
cggacgcgtgggggagaaaccgccggcggccgtcggcggtttcacggacacgtctacggcggccgagagcgggctcgcagatgtctgcagcggcggcgtgaaggagcttgtgccggacccgggccacttcgagtggccgtcgggctgcgatctggggtcctactggggcaccagcgtgttcgccgacaccgacccggcgctgttcctgaacctgccgtgagccgtgacaacgccacggcgtccatgctcaactaatcaaccatcacacgacccacgagatagatgagatgtgaaccgagcacgctgtagcgtcaagctcttgaaggcttgaagctgtgctgtagtntcctgagcttactagcgatctctgctggtctctgatctgataatctcttactagtcgccggttgtgctccgatctagtaa

SEQ ID NO: 293505 - DNA, 437 bp, Zea mays
agaagttcaaagaaaaggttcctctgtcaatgcaaccaatcagctggtctagtgagaaatactatttgaggcagatcttgcctctagtacgaaaacacaaggttgtacgttttagcaagacagattctcgccttgcaaacaatggcctgcctctgaagctccaaaaacttcgctgtcatgttaactacaacgcattgagatttgccccatctattgaggctctaggaaacaagatgatctcaactctcaggagaactggatcttttgttgtgcttcatctgagatatgagatggatatgcttgctttctctggttgtactcatggatgttctgatgaagaaacagaagagttgacaacaatgagatatgcatatccctggtggaaagaaaaggaaatagactctgagaagaaaaggcttgagggattgtgccccctt

SEQ ID NO: 293506 - DNA, 449 bp, Zea mays
cccaattccgggtcgaccgactcgttcgcccactcgtccgcccacgcgtccggaatgatcttcacaactgcttcggctacaccggtgagggtgtggcaattaaagttatccggaataagcagaccggacagtctgaaggatacggatttgttgagttctacagccatgctgcagctgaaagggttcttgaaggattttctggtcatattatgccaaacactgaccagccctttagattaaactgggcatcgtttagcatgggagataggcgctcagatgttgcttcggatcattccatattcgtaggcgaccttgcttccgatgtcaatgatgccacactgctggaggttttctccagcaggtactcctctgtcaaaagtgccaaagtcgttatcgatgctaacactggtagatccaagggttatggcttcgtgagatttggagatgac

SEQ ID NO: 293507 - DNA, 463 bp, Zea mays
cccacgcgtccgggaggttctaccacgtggaatcgctctttaatggaactttcgctttagctggtcgtgaccaagaaaccaccggctttgcttggtgggctgggaatgccagacttatcaatttgtccggtaaactacttggagctcatgtagcccatgccggattaatcgtattctgggccggagcaatgaacctatttgaagtggcccatttcgtaccagaaaagcccatgtatgaacaagggttgattttacttccgcacttagctactctaggttggggagtaaggccggggggagaagttctagatacttttccttactttgtatccagagtacttcacttaatttcctgcgcagtcttaggcttctgtggcatttatcacgcgcttatgggacccgagactctcgaagaatcttttgcattctttggttatgtatgggaagatagaaataaaatgac

SEQ ID NO: 293508 - DNA, 328 bp, Zea mays
  unsure (1)..(328): unsure at all n locations
cccactcgtccgcccactcgttcgcccacgcgttcgcccacgcgttcgcggactcgtgggggagaaaaccgtcctgatctggatggacataatgaaggagtaactatggctggatatggttatgggatccctattagtcgcctttatgctcgatatttcggtggggacttgcagatcatctctatggaaggatatggaactgatgcttacctncacctttcacggctgggagattcggaggaacccttgccgtaatttattcaaaagaaccattcctgtaattaggatattgcttctgtgctggtatgcaagtatagttctgaaggcc

SEQ ID NO: 293509 - DNA, 437 bp, Zea mays
  unsure (1)..(437): unsure at all n locations
cctcgccatcccggccgtcgtcgtgagtgcgagtgcctccatctggcgttgcgcgcgcatggtcgcgactgctcagtccgcagggcacttgtgcgcgcaagcgcgtcatgtccgcgccaccggcttccgctgttcaggctccacggtcgagccccctactgtaactcacgctcctagtctcgccgtcgtctcgccgcggcagcgcctcatcgacctcgcccctgtgaccgtgtcgtcgtcctgagattgcgatccgtttccgagcttcgaggaatcaaagatcgagcgttggcaaccaagagatcaagctttttgaggtctacaacattgaacaccctgagcatctgtttggtgaaggttgcctttggtgtaatctatgctcangtcaagaagaagtcgtcgaggcggatctncaagaattctaagacttcgacgag

SEQ ID NO: 293510 - DNA, 431 bp, Zea mays
  unsure (1)..(431): unsure at all n locations
cggacgcgtgggcggactcgtgggcgcagccggcaccatctcttcccgcaccccccattcggacgccggagctcgacgaggacgaccgacgacgcacgcagagatccggcgtactgcaaattttgaaaactgaactgtaagatggcatcagcagagctttcccgtgaggaaaatgtgtacatggcgaagctcgccgagcaggcggagaggtacgaggagatggttgagttcatggagaaggtagccaagactgttgactcggaggagctcactgtggaggagcgaaacctnctgtctgttgcatacaagaacgtcattggagcccgccgcgcctcatggcgcatcatctcctncatcgagcagaatgaggagggccgaggcaatgatgaccgagtaacactcatcaaggattatcgtggcaagattgagac

SEQ ID NO: 293511 - DNA, 338 bp, Zea mays
cttactcggtcgcttcaagtcgatacctatcattgttgagcttgacagcttgaacgtctcgggtgatgtttggttcggttctggaattgcactgaatgggaaagcgtccatcactgcaaaacctgtcgtcaagctataaattcaatacggatcactgattggtgaataatgatctcagtcgccttgaggacctttagataagaataagcgtatcaccacgtacgcttacttacccaagtgacggatcatcgctcgtggactctcctgaatatccagacaagtccgatgatactacggaccatatcaactgccagcatattgcaatcattgtacatgta

SEQ ID NO: 293512 - DNA, 438 bp, Zea mays
tcgcccactcgtccgcccactcgtccgcccactcttccgcccacgcgtccggagagctgacaaggagacttggttcggactgccaacaagtgtctcgtgttataggcaatgaccttaacctgatttcacgcaatttacttcagggtgcaggtgcattaatttatctgctagtcttatcttggcctctcggattgtgtacaatgtttgtttgtgcaactctatcagcaattatgctagttcatggacggtttcagaaaagggcagctaaatttgcacaggagttcaccgcaaacgccaataatgttgctcaagaggtgataactttggttaggacagtgcgagtatatggaacagaaaagcaggagtttaaaaggtatgcaaactggcttgataagctgtatgatgtgagctttcggcaaacagtggcttatggaagct

SEQ ID NO: 293513 - DNA, 321 bp, Zea mays
gacggacgcgtcctacgacgactcgtccggcactgcctgctgcctttttcatccgacaaccctagaaccacaaagctgatatctctacactggtgtgcgcgctgcatccgcatgatatcgctaaagtcaacggagttgctgcatatctcagacactgcaacacacctgctcacgttcttcacttcactggaccctcatagctacccaacttcttaaaaagtcttaatcacgatgtcattcctgccggtgtcccaaggaaacctgcgatgactctcgatgacctctttaacatcaacacatgcatcgacaagacacttgttt

SEQ ID NO: 293514 - DNA, 406 bp, Zea mays
  unsure (1)..(406): unsure at all n locations
tacgacgtcacgcttgttgtactcacattcccccaggtcaaggacaggtaccactggataaggagtatgaaggatactgtgatgagttcgtgagtggtctaggccgtcgtctcccaatcaactttggttgctggatcgttgtcttcatatgatgtaattatttaactattttgtacagaactccattatatattaaagttgtggcattcgtttctgtaccatgagtcatcatatgtgtgagacttggtcctagcacacttggtgattattttcacgcctgggttttggtgcccctagaacccgggtgtgacagaagtggtatcagagggatgttgactgtangacgaaacctagatagaactggataacccttacctacttatctttgctactctgatttttttct

SEQ ID NO: 293515 - DNA, 358 bp, Zea mays
cccacgcgtccgcccacgcgtccggtggagccctacaacggcagcttgccgggcctgcgctacaaccgaaactcgtggacaaaggtggcgcatattctttttgtggattcgccagttggtgccgggttttccttctccagagatgccaaaggctacaacgctggagcggtatcaaccacgctacacttggcgaagttcctcaccaagtggttcaacgaccatcccgagtaccatgcaaatcctttctacatcgatggagaatcatacgctggaaaaattgtaccattccttgcacagatgatttcagaaggtattgaagcaggaatgaagtcggcacctcgtctcaagggctatctag

SEQ ID NO: 293516 - DNA, 447 bp, Zea mays
ttttctttctaattaaagtaaaaagtacccacggaaatgcccaaattgcaaataaaaaaaatgaaagtaaaggatatattttaacctgaaacggatatctttgtatcttttttctttttgttatttctaactcatatttatgagataataaaatatgacaaaagctataccaaaaataggttcacgtaagaaagtgcgtattggtttgcgtaggaatgcccgttttagtttacggaagagtgcacgtagaataacaaaagggattattcatgttcaagctagtttcaacaataccattataaccgttacagacccacaaggtcgggtcgttttggtcctccgcaggtacttgtggattcaaaagctcaagaaaagcatcaccctatgctggtcaaagaacagcagtagatgctattcgtacagtgggtttgcaacgagcagaagtta

SEQ ID NO: 293517 - DNA, 425 bp, Zea mays
atctcggacacggcaaatttaccggcaacgtacagcgaacgccagaggtccgcagccgttgagccgccaagggagaggacgaaatggcactgtccacgacgaacacgaacgcctccgagtcgcagctgcactgctccacctttgcgtcgcgctacgtgcgcaccgcgctgccgaggttcaagatcccggagcagtcgatccccaaggaggcggcgtaccagatcatcaacgacgagctgatgctggacggcaacccgcggctgaacctggcgtcgttcgtgaccacttggatggagcccgagtgcgacaagctcatccagtcctccatcaacatgaatacgtctacatggatgagtaccccgtcactaccgagctccagaaccggtgcgtgaacatgatcgcgcacctgttcaacgccccgatcg

SEQ ID NO: 293518 - DNA, 374 bp, Zea mays
ggacagccttgaccaatgaagcaaactcatcccaccgcaaagaaccactggtatactgatggaccagctcaactataagttttcgatccaacatgattgttttcttgaatcccaggtacctccggtgtccttcgacaactttagccatattgccatcatatgtgggaacaaatatatcactttccagtgataccaagtaatccagtgcagccatttgcgacgaatggttctgaaagaacatgagatcagaaggttccagaagcgtctcctttctcaccacgttagggtaagccaaggtaagagaagccattctgcgttttccaccatatatcttcccagctgcaatgtaaatttgcatacttttgtcgatattc

SEQ ID NO: 293519 - DNA, 437 bp, Zea mays
  unsure (1)..(437): unsure at all n locations
gtcgtcgtctcactcaccccgccttcacgcctccctcaccaaataaggtcccgcccttttccgacattcacaggggggacaggaaatcagcggccatggcctcgattccggcgacgaccttcgccgtcatcttatccgtcctcttctgtgccgcggctggcaccgccgtcgacaacgacctccccgactacgtcatccagggccgcgtctactgcgacacctgccgcgccgggttcgtgaccaatgtcaccgagtacatcgcgggcgccaaggtgaggctggagtgcaagcacttcggcaccggcaagctcgagcgctccatcgacggggttgtgtgatactgtgatcaagcaaggagacgacacttgaattctctacagtttggcatangtcgggagagacactctcgaccggccacaccatgtaacaaactaacc

SEQ ID NO: 293520 - DNA, 382 bp, Zea mays
cgcggttcctaaactcggatcctgcattttgtttcggcgatatgtgttggtgttaccagttgctgcggcgatacttccaatttctgtgccgatgggtttcctcgttttcttcttattttgtttcctcgtcgtcgcagcctgcaaattggtagtttcttggttcttatcagtggagctggctttggaatttgcaggcaccgttctgagctgcgctggtgctcctggaaaggtgttggtgcctggaggtggcagtgatgacttgctttcctccgtagagcctgtcggagacactcaacctgaagaactacaggttcgattgtccccttctgtgccttcatggtacaaatggtccaaatgtctgatgaaattaaattgggtttca

SEQ ID NO: 293521 - DNA, 442 bp, Zea mays
gagcgctcttctgggcgcataggcatgaaaagattcgaggagatggactgggacaagaatggaacggtgaccttcaaggaattccttttcgctttcactcactgggtggggatcaataatgaagaagacgaggacgaagaagaatgagcgtgtcggctgaaggagattaggcgttccgaatcgaccgagccagccagccagccagccagcccccctcaggggaggcctccagcagctccctcctgccgtggatcagaagcggtagagctcatgtgttctctgtgtgtgccgagctgatgggtagatgtcatgttcgtataaatagaatgaaacactagccgtgtcaagggatttgcttgataaaaaaaaggttacgctggtcaaacgcttctcaattaattaggttaccttggcattaataaagtatttgcagtgtgtttgg

SEQ ID NO: 293522 - DNA, 432 bp, Zea mays
  unsure (1)..(432): unsure at all n locations
cccacgcgtgcgcccacgcgtccgcccacgcgtccgcccacgcgtccgcccacgcgtccgcgcacgcgntccgcgaccgcgtggggggctaaccgaggaaggatttccgccttctgctcgggaagatccggtcggtgcacgcggcggtcgcagcgccgatacgggagtccaacctgatcaccgctgcttgcgacaagtggatgagcggccaggttgataggaagatgccgtaccaagagaggcatgtcgcgcagcaggcgtccattgttggaaacatggaggcatttggcttgctgcaaaaaggctagccatgaggtggttgatggngagaatgcngcggtgagtgctcaggcagttgtggagtttggagctggaagagggtacttgactcangttgctgtggactgttatggggatagaaatgtcttcttg

SEQ ID NO: 293523 - DNA, 470 bp, Zea mays
  unsure (1)..(470): unsure at all n locations
ctgatccacgccagcggtttctgcgagaggagcgctttggtctcagtgatgggttctgacggaaccgggtgcttttggtggcgcagtgttggaacggaggtggaggggccggcggcgaaggggacggcatcgcgacggccaccatcatggtgcttggtgacacctgcacgcgcgggtgtcgattctgcgctgtgaagaccagcaacaaaccgccgccgcctgatcccctggagcctctgaacacggctttggctgttgcaagctgggggtatgatctctagtaatcctgcctggctgatcatctgctgattgtgaactgttaggttctcagaactcgtgattgatcgatgcaattgtaaatntgtaattggtgttaggccctggttgtttccatagtgctaagtttagcacaacacttttttagtaaagttcatatatggaaccaaacattcatactaaaagggcagtgc

SEQ ID NO: 293524 - DNA, 403 bp, Zea mays
cgcataggacgaactaccgatgcaagctgcgatcgatcagtcaccgcatctccggttccgcgcaggcatggacgacaagtcctgctacgtggccaccggcctctccctggcggccatcctcctcgtcctccaccgcctcgtggtccgtgctggcggcaaggggaacgccgccgcgcggcggctgcctcctagccctcccgccgtcccgttcctcgggcacctgcacctgctagcatcggagtgccctctccactcgtcgctggcccgactcgcggcgcgccacggccccgtgctctcgctgcgcctgggctcccgggccgtcattggtgtgtccgcgtcggaatgcgccgaggcgtgcttcacggagcacgacttggcgttcgccaaccgtcccagactgacc

SEQ ID NO: 293525 - DNA, 381 bp, Zea mays
gtacgcaactcacaacccgagccgagcaaactcgattcaccatagacctatatctgaaccttgctacagggtacggtcactgaaaaggacgatgagctactacagccagcagccctcagtcggcgtaccgccgcagcaaggctacccggggaaggacggctacccgccagcggggtacccgccggccggctaccccccgccgacgcagggctacccgccgcagggctacccgcagcagggttacccacagcagggctacccgccgcagtacgcgcagccgccttcacagcagcagcagagcagcgggccttacttcatggaaggatgcttggctgccctctgctgctgcttgctactggacccctgcttctgactgaacca

SEQ ID NO: 293526 - DNA, 456 bp, Zea mays
  unsure (1)..(456): unsure at all n locations
ccgagaacgtgctcctccgcgccgacggccacgtcacgctcaccgacttcgacctctcccgccttgcgcacccgcacctnccctcgctcctcggcttcaccgagacggacgaccttctcgcgtgggccgtcccctactgctccggcggcgacctcaacgagctccgctactcgctccccgaccgcatcttctcccccgcggccatccgcttctacattgccgagatcgtctccgcggtcgccgagctccacgccgcgggcgtcgtgtaccgtgacctcaaggtcttcgacaagcgctccgccgcccgcagcaggaagcctgacgccgacccgcgcgcggtgggagatcagcgtgctctcccgccttgcgcacccgcacctnctncaccccagcaggtcgtccgcggagtcgtcgtcgcccccgcggtcagcgtcgtcccgcggccaccacaacccg

SEQ ID NO: 293527 - DNA, 316 bp, Zea mays
cggacgcgtgggcgtggatgtgcttgggagtccctgtcgtcttctatgcctccgggagaagtgtcataagaattcgtgagcaaagctatcgcgtgagcatcataaaggcggcaatctacccgggaaacgtgctctcactttacatgacgaagccaccaggcttcaagtacaaaagcgggatgtacatgtttgtaaaatgcccagacgtttcgcctttcgaatggcaccccttctccatcacttcggctcctggagatgactactcgagcgtgcatatccgtacgctaagtgattggacatcagaactcaagaatct

SEQ ID NO: 293528 - DNA, 472 bp, Zea mays
  unsure (1)..(472): unsure at all n locations
cccacgcgtccggcgacgcgctcaagacctacgcgcgccggtggctgccggccgttgccaagagcgggtacctggtgctggagcaaaccgacatcagcacagccgagtggaacagccggcttcttgtcgaaaagatggtgagcttgctccccgccgagaggaacgccgtctcctgcagcttctttctcaagcttctcaaggcagccagcgtcctgggcgcctctcccgcgtccaaggcagagctcacgaggagggtggcgctgcagctggaagacgccagcgtgagcgacctcctgataccgtcgtcgtgcgcgggcgagacgctgtacgacgtggacgccgtgacggccatccttgaagagctggcgctgcggcaagcggcggcggcgggggtcccggaggcaagcccgccgcacgcgcgcggacacaggcggtcgcggtccgncgagagctcggagtacgagggagcgcg

SEQ ID NO: 293529 - DNA, 388 bp, Zea mays
acgcccacgcgtacgcctacgcgtggggcagcagatgcggctcatcgaccagactgacgcgcgtgtgcaccgcaccctgatgcgcaccgtcgtcggtcaagtgggcaggatggcggagacgatcgttctacctgtggaactactacggcagctcaagcccgcagagttcggcgacaccgatgagtaccaccaatggcagttccggcagatcaagctcctggaggccggacttatcctgcacccctccctgcgtctcgaccgtctccactctgacgtgctccggatccgcgaggtcatgcgcgcaacagatatccgtgccatcgacaccagcaagaactccgacgtgatgcgcgcactaagcaacgccgtgcacgctctctagtggcgc

SEQ ID NO: 293530 - DNA, 450 bp, Zea mays
cccacgcgtccgcccacgcgtccgcccacgcgtccggtgccgccgccaccgtcgtggccggctccccgcctgaacgctcgtcctcccgagatccctcctcgcgctcgccgcgcgcgccatgccgtcgcgccgcccctccccggtcctcctcctcctcctcgcgctctcgctcgccctcctcttccttctcctctccccttccttcccctccacctcccgcttctctcgctccctcagctctggctccgctttcgcctcctcatctccggcgtcaacctccgcctcgcctgcacccgtcaagatctacctgtacgacctgccggccaagtttacctacggcgtcgtccgtagctacaaggctgcgcgtgcgacatctggctccgcgaacgccgctgctactctgcccgacgagcaactgcggtacccgggacaccagcactcggcggagtg

SEQ ID NO: 293531 - DNA, 377 bp, Zea mays
cgtcgtcctccctctcctcatcagctcctgcttgcactccggcaggaaattagatggacacgcctcaaagcgaaaggggtccgaactccttacataaaaaaatgaattttatgctcaccatatatacgaattccactacactcaattagatgaagttgtcaattactatccacaactttaccatggtgtgcacaaatgtggtattcctatttacatataactaattgggaaagttcatacctacaaactagtgcaaataacaactattgaccgttatataaaatatcatgtcaaacagtttgagagatgtctccacatgatgtttccagcttgttctattgctgcaaaaaggcacatatactcatctactgcgatat

SEQ ID NO: 293532 - DNA, 410 bp, Zea mays
gacgcggacgcgtgggctgacgcgtgggatgatgttgaggttcctgaaagcaaggaaatttaatggttgacggagcaaagcagatgtggtcagagatgcttagatggaggaaggaatttggtgctgacgatatagaggaattcgactacactgaattagatgaagttgtgaagtactatccacaactttaccatggtgtggacaaaggtggaaggcctatttacatagaactaattgggaaagttgatacctacaaactagtgcaaataacaactattgaccgttatataaaatatcatgtgaaagagtttgagagatgtctccagatgaggtttccagcttgttctattgctgcaaaaaggcacatagactcatctactgcgatattggatgtgaaaggcgtgggccta

SEQ ID NO: 293533 - DNA, 406 bp, Zea mays
gaagcgcgccgggcatggcaccgccgacggcaacgaggccatctgcaccggcgaccacgacgggtgggtgctggaggagctcatgtggaccatgttctgcaacggcaagagggtgggctacgcggtgcggcgggaccccaccgaggtcggacatggacggccccgacggcgagatggcgtacatgcgcgggagcttcgagcacaccgtcgggtcccgggactcggagtcgctctacatggtcggaccgcccggcggcgactgcccggagctcgccatcttcttcgttaggctatgaattgaaccgagcgaaccatacgaatcgaacaatacagtgtacacgtcgcagtcgtggtgtctaatctctcgcctggtctcgttcgttgttcagcagcctcagctagcgtc

SEQ ID NO: 293534 - DNA, 270 bp, Zea mays
tgcgtcaccattgattacatctagcgtcggtttatcggctcgaacaacaagaccatggctagattcacttacaccgagggcagcaccaatgtttgcctcaaggagcttgcatgcttctataccctccatctactgacccatctctctagttataatatatctctctttcttttattgcatattattttctatccatttcttacgctcaactttttatctacttacatccaacatctatattatgttctactgtttaacatcctttatttt

SEQ ID NO: 293535 - DNA, 344 bp, Zea mays
cgacgagacctctcgcagcgagtgggacgatcctctccaacggtggcgcagtccaagaaatggctcatattgcaaacggccgggaccatggcaactgcgtctcccttcttcgtgtcaatagcgcaaactccaaccagagcaacatgctgatcctccaggagagctgcacggacgcatcgggctcatacgtggtgtacgcgccggtggatgtggtggccatgaacgtggtgctcaatggcggtgacccggactacgtggccctgctgccgtcaggcttcgccatcctccccgacggaccgtcggcgccgggcatggctccccatcacggaggaaagggtgctgcc

SEQ ID NO: 293536 - DNA, 385 bp, Zea mays
cggacgcgtgggcggacgcgtgggcggacgcgtgggcggacgcgtgggggagttcctgtacgtagacttgtaaaagctgccgactcagtttcggtatgcctatctaaagggttaggcgcacccatcggatcagttgttgttggttcagaggccttcatcgacaaggctagaattcttaggaagaccctaggcggtgggatgagacaggttggagttctttgtgccgctgcttatgttgctgttcgtgacaccgtgggaaagcttgcggatgatcacaggaaggctaaagccttggcagagggcctcacgaaaattaaacagttcacggtggattcatcttcggtcgagaccaatatggtgttcttcgatatcggggatccacaca

SEQ ID NO: 293537 - DNA, 419 bp, Zea mays
caattcccagattcgacgcacacgtcactcctaatccaccatacctatgtctaactgctttccaatcaacacatccaggcttgccaacagtacacgtttacctatcaagctgagccaattacactaacccttactactttaactccctaactttcctctccccacacaagctaacaaaatcacctattgctatcttgcattctaacttataaacattcattcataatcctacacacatataacttcacaccactcacttttcaaccaatctctatgaccaattctgtcaatcaacaattcctctcatactaggttcaattactatcgcatacacattcatcaatatcctaaaactaacctttctcactactgtctaaacccatctcacattccctattgatcactgaacaatccaacac

SEQ ID NO: 293538 - DNA, 462 bp, Zea mays
  unsure (1)..(462): unsure at all n locations
ctcgcctccgcctcctcccgttccccaggtcgccgccgccgcgtctccctcacgggccagtgcccgagcacccccctcacgcgccacagtcgaaaccaaagcagctcgcggtggccacacccggacctcgggctcgacatggggttcatgctcgtgcgcaagccgcgtccgggggacgagaagccggacctggcgaactggatgcggtgcttcctgtcgcagcgtctgtctcagcccgccgcggcggcggaggagaccgcgaacgcggagggtaaggccgccgggagacgagaggaagaggagggtggcggggaatgacgctgaccacctcgtcgtcatggtgaacgggctgtacgggagttctgcggattggaagtttgcagcagagcagtttgtcaagagattggccggaaaagtctacgtgcatcgtantcagagcaattattcacaaataacatatga

SEQ ID NO: 293539 - DNA, 480 bp, Zea mays
cccacgcgtccgcccacgcgtccgcccacgcgtccgcccacgcgtccgctcgcggtggtgcgtgctcctcctcctccggctgctcccggggcgggcgctctcctgttcctcctcctcctgctgctggtgccagggccgggagggcggcgtggaggtggcgctcatggggctcgccggggacgggtcggcggacaccgccaacctcagtaatagtgaaaatggtcggttcagttatggagttgcaagttctcccgggaaaagagcatcgatggaggacttctatgaggcaaggatagacgacgttgacggagagaaagttggaatgtttggtgtgtatgatggtcatggaggagtcagagcagctgagtacgttaagcagcatcttttcagcaatttaatcaaacacccaaagttcatcactgataccaagggccgtattgctgaacttacaaccgcacaggatcagaatttctgaaagct

SEQ ID NO: 293540 - DNA, 470 bp, Zea mays
cccacgcgtccgcccacgcgtccgcccacgcgtccgcccacgcgtccgcccacgcgtggcgggcacgcgtccggtatagacaatgcaatgagagccttgttccttttagcgctcttctgtgtcgtgcatggtgagaaggcaaagtcaaaggacaacgatgcaaaagcgtccgggcccggtgggtccttcgacatcaccaagttgggcgcctccggcaatggcaagacggatagcacgaaggctgtgcaggaggcgtgggcatcagcgtgcggcggcaccgggaagcagacgatcctcatacccaagggcgacttactcgtcggaccactcaacttcacaggcccatgcaagggcgacgtgaccatccaggtgaatggcaatctgctggcgaccacggacctaagccagtacaaggatcatggtaattggatcgagattctacgcgtggacaaccttgtcatcaccggcaa

SEQ ID NO: 293541 - DNA, 400 bp, Zea mays
ctgtatgtgatctctggtgttggtggcagcttgctgtcttctctatttatggtgtcaaatatggcagtcggtgcttgaggtgcattatttggactattgggctcaatgctgtcagagctcataacaaattggacgatatatgagaacaagtttgcagcactcttgactctagttatgatcattctcatcaacttagctgttgggatccttccacatgttgacaacttcgctcaccttggaggatttatgtcagggttctgtcttggttttgtgctgctaatgcgaccacagtttggatatattaaccaaaagaactctcctcttggatttcccatgggcgtaactaaacggaagttcaagacatatcaagtcatacttttggttatttctacaatgatac

SEQ ID NO: 293542 - DNA, 330 bp, Zea mays
gcacacgcgaccgacgacgcgtggggtacgaccaccagcaagcgtgcggattcacgtgatcaacgccactgtcgccggaatcaaactactcaactccaagttcttccacatcaacatcgacaactcagagagcatcaccgtgaaggacgtgaacatcaccgcgcccgccgacgttgagaacacggacggcgtccacgtcggaggctcctccaagatcagcatcctcaactcgaccatcggcaccggcgacgactgcgtctcgattgggcccgggtgcaacggcgtcttggtggacagcatcacctgcggccccgggcagggcatcagcgt

SEQ ID NO: 293543 - DNA, 292 bp, Zea mays
gctatgcgtccgcttgtctttcgagtattctttagagtgatcccgaggagaaaagccgtaattgctggacagtacctgatagcataaactttaaagttcggagcaagaatttcccacacgacaaatcatagatacctgcagcaagttatctaatggagcttgcagccatcgactggtttaaggacaccaaacgtatggataacgttgctatgcacaacggttgtgttgctcaggctgctggtgaaaaagggatgcatacattgaatgtcaacatacagattccttgatcaac

SEQ ID NO: 293544 - DNA, 441 bp, Zea mays
cccacgcgtccggctgggcgatgtgcaggccaggatagtcggccctggtttcgatgggaccgtgcaggagttccttgaggaaagcctggggttccaacaggggatggctggtgtcacggttgcggtgctcattggcttctcccttttcttcttcgccgtctacgcgacttctatcaaggttctgaatttccagagaagatgaccagctgcctgagctaagtaagcctccgtggtttgcttttgctactgtgtggtgccaacatcaaagtctacttgctagctactcggcggatgccggatggatgaagcacccgttggtcgtaggattgaagttttcacacgtagagaggatggtagataattaaaggttcatgtctgtatatgattactatcgcaaatataatgagcaacagtagtgatgcatttgtgctgtacgtaaga

SEQ ID NO: 293545 - DNA, 343 bp, Zea mays
cccacgcgtccgcccacgcgtccggaggtggagtcttcagacaccatctcgagggtgatagttttgccggtcagggtcttcacgaagatctgcatgcctcccctgaggcgcagcaccaagtggagggtgctctccttctggatgttgtagtcggcaagcgtgcgcccgtcctcaagctgcttcccagcaaagatgagccgctgctggtctggagggatgccctccttgtcctggatcttggccttgacgttgtcaatggtgtcagaggacctgcgcggcatgctcaacatcgggttccagctgatgaccaccatcggcatcctggcggcgaacctgatcaact

SEQ ID NO: 293546 - DNA, 315 bp, Zea mays
cggacgcgtgggctgacgcgtgcgccgacgctttatccgacgcgtgggagatcgcgagcttgggggatacctacaagatgatgcttattaataaatcctatatatatatactatattttataattcctattctctaattattgtataatcttcaataatattgttaatatccaatcacccctcatgattacataagcatttatgattgtataaccaaattatataattttcatatactatgcaattaaaaaatattaataattcattaatttattataaaatatattaattatttattaaaattctatattttta

SEQ ID NO: 293547 - DNA, 193 bp, Zea mays
gtcaaagggcatcgatgcgaaagcgttcggacctggtggctccttagacataaccaagttgggggcatccagcaatggcaagacagacagcactacatctttgcaggatgcatgggcatcggcgtgcagcagcactggaaagcagacgatgctcatatccagaggtgacttcattgtaggacaactcaatttc

SEQ ID NO: 293548 - DNA, 243 bp, Zea mays
cccacgcgtccgcccacgcgtccgttttcatatactatgcaatgaaaattatataatttggtgatacctgcagcagcaagctaattaagttggccgatatatatataatatataatggaagccctgggctttgattattggggaagccccaaccagaatgcggataggccaccaccccgcatgattacgttagcatttatgctggtataaccaaattatataattttcatatactatgcaatg

SEQ ID NO: 293549 - DNA, 333 bp, Zea mays
  unsure (1)..(333): unsure at all n locations
cggacgcgtgggcaaaggccttcctcccggcgtatttgctttggctcttctcctccacgccataagatatctagcaattggtcactcgccttaattagttcgctttgcttttgaggttgattcgaccattttgctgtagcgtgaattgcatgcatggacatgcaacgctccaatggcctttggaatgtggaatttttttccccattttctgtatttttcctataaaaaatgaactggttcttatataattcctctcaaaaaanaaaaaannnnnnnaaaanaaaaaaaaaaaaaaaaaaaccaaaaaaaaaaaaaaaaaaaaaaaaagggggg

SEQ ID NO: 293550 - DNA, 447 bp, Zea mays
cggacgcgtgggcggacgcgtgggcggacgcgtgggcggacgcgtgggctacagttcagggaagctgcaatgtccaaagatgatacggaattactaaaggtcatggctaactacggtgaggatgtagttgaagctctgggatatgaaatggatcggcttgagtctgagatcaaaaaacttgtgcctgggattaaacatgtttacaatcaaggacacaatccagaaaggcttacttttaaaacaaaaattttgtagattaactatgtacattgcatttgatttaaacaacttacacatagaacatctggatactactaaacagaaaccacaccactagagagcatgcattaacaacattagaaagcgggtacacaagttgcattaaatccacacgactttacatatacatatacattacacaatcagttaatatacagatgactggat

SEQ ID NO: 293551 - DNA, 316 bp, Zea mays
cgtcctgcgccaggtacctggacgagcacggcaacgtcgccgccctcgacggcgccaccgcggaccacctgagggccaccatcgacagcttcgccaacgaggcgctccggacgctgtgcctcgcctacgtcgacgtcggcgacgggttctccccgagcgaccagatcccgacggacgggtacacgtgcatcggcgtcgtggggatcaaggatcccgtccgtcccggcgtcaaggagtcggtggcgatctgcaggtccgctggcatcaccgtcaggatggtcacgggccgacacatcaacacggccaaggcgatcgc

SEQ ID NO: 293552 - DNA, 384 bp, Zea mays
  unsure (1)..(384): unsure at all n locations
cccacgcgtccgcctcttcatagagcgcgtcggggtcgggggaggacctgtcgatttggcatgagctgccgattcaatcatcctccggataggaatctggctattgcctctgccagaatgaagggagaatatcctgagagagcgggacagccagagtgtcagtattatctgaagactggaacatgcaagtttggccctacatgcaaatttcaccatcccagggaaaaggctggaattgcagggagggtgcagctaaacacatcaggatatccactccgcccgaatgaaaaggagtgtgcatattatntaaaaacaggacactgtaaatatgcanatactngtanattcaccatccggacttttcaatgtggtgctttcgtcacg

SEQ ID NO: 293553 - DNA, 424 bp, Zea mays
tccacctccgcccgcgtcgagcgagggacacaccgcctccggccgcgcggcacgatctccggtccccaacatgagcacgacagaggatgagaggtccggcgccgccgcagaagcgggaggaggggaggaggagagacgggagaggagcgtcggcctgatggccggcctcgtggacagggccaagggcttcgtggtggagaaggtggcgcagattcccaagcccgaggcggcgctggatcgagtctccttccagagcataagccgcgagggcgtcgagctgcacagccacgtcgacgttagcaacccctactcgcaccgcatccccatctgcgagatcacctacaccttcaagagcgccggcaaggtgatagcgtcgggcatgatgcccgaccccgggtggattgcggcgagcggcagcacccag

SEQ ID NO: 293554 - DNA, 240 bp, Zea mays
cccacgcgtccgcccacgcgtccgcccacgcgtccgttcacgcgtccgggaaaaatgggagaaagctatatccaacctctcaacatatgccacatgtgcacctggtccagtttcatacgtcaatgagaaagatgtggagactacgttgaccatatttggatcttttgagttcagcttagaagcaatgccagaaaattcaagaatttttttcatggctcttgcagctatctcttgggaaga

SEQ ID NO: 293555 - DNA, 197 bp, Zea mays
cggacgcgtgggcggacgcgtgggcggacgcgtgggctaaatagaaacaatactgatggcgcgaaacatgatcattgcggtggctctactccatgccacctttcttgcggtggctagatctgattgggttccaaaataaccatcaaattcagatgacatacgaggtgcttgcatcacggagtgcaccatatataata

SEQ ID NO: 293556 - DNA, 295 bp, Zea mays
  unsure (1)..(295): unsure at all n locations
atgtctgtctagcatgccgagctgactacgtcctagctagcgcaacgacgatggccaccgcgctctccttcaacgccctcgcagtggccgcgctcctgtccgtggtgtccgtcgtcacctacggcgctcgcgcacagcagcagcccagccacaacgccttcgagtcgtcgcaggacaggtnccttgtgtcctacagcagtggctggctgcccgccaaggccacctggtacggcgcgcccaccggcgcccggcccgacgacaacggtggtgcgtgcgggttcagggcccaaccagt

SEQ ID NO: 293557 - DNA, 260 bp, Zea mays
cccacgcgtccgcccacgcgtccgcccacgcgtccgcccacgcgtccgaattggtcgtctgagaaattttgatagcgccgcctgatgtgttatcatcattatatgtgtaattttactgttttaccaggagattgctacgtcgagttatatgttgtgtcgaattcacgtgtaggctctgaatcttgactgtgttcgttcattttcgcttgtttcacactgaagtgttataagctcaactttactgcttttgttttcttgtg

SEQ ID NO: 293558 - DNA, 336 bp, Zea mays
gatgctacagtccacaacttcactactctttatgtagactacgctcaaattactgctaactgtatcaatcatgggccattatcaatctgcctcaatactgactacatgcatacatacattgaaagcgtgtcatgcacatacatatgagatacgcaccttgaccattgtgctctcattgctggatacggagactctgatttcgccaccattcatctgaatgacaagccttactgtatcatcaagaactcatgaggccagaactgatgcgagaacggatactacaacatatgcaggagttccaacattctcaacaagtgctgcatctattacatggtc

SEQ ID NO: 293559 - DNA, 461 bp, Zea mays
cggacgcgtgggttcaaatggagaatatgtgaaatctgggctttgtgtgctggagaaatggattgtggacactgaagagcatgcaggtgcagcttgggatgagctgcagttcattaggcaagcggttgactttctgatcattccacagaaaagcaaaaagaccattgagcagattaagaaaaatatttgcccggcattaagtgtgagacagatatatcgcttatgtacgatgtactgggacgacaaatatggtactcatagtgtatcagctgaggttgttgccagaatgagggacatggtgagtaatgacatgcaaaatcctgtctctaattcatttcttttagatgatgacttaagcattcctttcacaaccgaggaaattgcagagcaagtaccagatgttgacatgtcaaacatcgaaactcccgcatctcttcgtcatgttcattctgctcagttct

SEQ ID NO: 293560 - DNA, 284 bp, Zea mays
acgcaggcggacgccccgagaaggaactagcgacagctcagaggcgccgagcacttatgccacagacagggcttgtaccaccatgaactaaagccctagaacctcctgagccacgagcacaggaacctgaaggtgtgcgacttccatctgagcgcgctcagggagtgccagaagcaggacggaatgctgcacaccagctgcgggagccccgcgtacgttgcgcctgagatcatcaacaggaagggctacgacagtgccaaggccgacatatggtcctgcggcgt

SEQ ID NO: 293561 - DNA, 270 bp, Zea mays
cacacgcatgcgcctagaacgagcttgcactaaatcatcaacctcgactacttcttccacaggcgggcataataccaccatgacttaaatacctacaacctcctcagccacgaacacagacacctcaaggtctccgacttccatctaagcgcgctcattgactgtcagaaacatgacagactgctgcacaccacctgcaggacctctcactacattgcacctgagatcattaacaataaggtctactaaagagccaaggccgacatatgc

SEQ ID NO: 293562 - DNA, 189 bp, Zea mays
cccacgcgtccgcccacgcgtccgcggacgcgtgggcttgttcggaaaaaaatgccatgttgctccttgttaacatgtcgcatgaccataatcttttgtttaaatttttaaatatagagttccatggcaaatggcaaagtcgaaactagttactcctccaatatattggaagaacaataaatttggtgt

SEQ ID NO: 293563 - DNA, 320 bp, Zea mays
tccacatctactcatacctctgttttaaagttcacgcttcaacactcaacaaccgggcgtggtatatatgtaaagggtctacacttacaatctattgcatatttgattattatacataacttttatcatttgatgattccatcttaatctctatatacatctgaaatgtatgcataacccaataacgaacgatttgaaagtgtactcgatcattctaccattagacaataagatcttctttctaaaaatattctattttgaactcttatatgttcaaaatttatattgaaattcttttataaatttttccttactttttc

SEQ ID NO: 293564 - DNA, 356 bp, Zea mays
gcggcagcgcccgacagagcgagacgcagcggcggacgaggggcagaggcgagcgcggcctgcagtccctgctaccatggacactttcttcctgtcgcacggctcgcccacgctctccatcgacgacaacatcccggcgcggcacttcttcaagtcgtgggtgccggcgaaggtcgcgggcgaccaacccccgcgcgccatcctcgtcgagtcgggacactgcgacacgggcacgccggaggtcaacgtcatccaccgcagcaacgacaccatttacgacttctatggcttacccaagcccatgtacaagctcaagtaccccgttccgggcgccgcacacctgttcctgcggacca

SEQ ID NO: 293565 - DNA, 271 bp, Zea mays
aaaaaaaaaaaaaaaaaaaaaaaaaaaaaaaaaaaaaaaaaaaaaagggggcgcgcgctctaggggacacacgtttacgcacgcgcacgtgccacgttatctctcttatatagtgacctctatatacattacagtgggcgtcgttacacaacgtcgactctgaaaaaactgtggcgtcacaaatcttaatcctcttgcaacacatccctttttcgacatgtggcataatcgcgaagaggcgcacacatatcgcttcttaaaacatgtgcac

SEQ ID NO: 293566 - DNA, 353 bp, Zea mays
atcagataggcctgggagctacgcgtaggacaccttgacactactggcgagggaagcgctagaccggcgctcaactgacgcatggagcaggaactcctgcgctagaagtatgtgtgccgagctgttgatctgctgtggtgacactgaggacaccgaggaggtgctcgtgatcatgcggctcaactccatgctcatcaacatgatcatgtacaactgcaacgacatgatgatcaacgacgtcaatgtgacggtgtccggctacagcttcaacacggacggtatacacatgggcaactcgatcgacgtctacatcaccaacaccgacatcggcgtcggcgaccactgcatctaca

SEQ ID NO: 293567 - DNA, 298 bp, Zea mays
cccacgcgtccgcccacgcgtccgcccacgcgtccgcccacgcgtccgagatgatctgtagagactgagccttcctttgatggttaccacatatgaatatgaggagaagctatgcactgctttaactgttacagtggatgcaaaagatggcacaactactgtagtatctgccaaggacagggcataaacagtcatgactctagcattttcggactctaatcctgaggatctcaaccggcctggtcatattttatctttgaaatacacatatagtggtgatatgaaacagtctggacac

SEQ ID NO: 293568 - DNA, 317 bp, Zea mays
gaggcgcgggccaggagccagcgctacgtcttaccgaaacatgtgcctcccgaataagggcgaacgctgtcacacaatctatagccatgcactggacatctaacgatatcatcgacctctccttgctgaatgtcgacagcaatttcggcatcaggaacgtctatctctgatacgcatcagcatgtacccttgcatgtcctgacatagcacacaatgtcgtcgagaccaacgggatatcactagtcgagattgacaaggatctaattcgaacagattgatgactatgcctagtcatactgactcgccaaggacactat

SEQ ID NO: 293569 - DNA, 384 bp, Zea mays
tgattatacagtattctgtctctatagattgtagctgcagcagtctgaacatgaaattaacgaacaacctcggtactgcttggccaggatcccggtgctttcaactagttagggctcgttcggttagctctcaatccatgtggattgagtgagattggatgagtttgaatcccaaacaaattaaacttaattttttccaatcccatctaatccatgtgtattgggaataaccgaacaaggctttactgttttatctgtccagcagtaccgaggttgttggttaatttcatgataagagagcgagtttcagcaatgttcgtatactgattatacagtattctgtctctatagattgtagctgcagcagtctgaacaaacatcaat

SEQ ID NO: 293570 - DNA, 291 bp, Zea mays
cgacaagatggcgtgcacaaacaatgcgattagagccttgttcctcctggtcctcttctgcgtcgtgcatggtgagaaggaagagtcaaagggcatcgatgcgaaagcgtccgggcctggtgggtccttcgacatcaccaagttgggcgcctccggcaatgtgcatgacagacagcacgtatgctgagcacgaagcatgtgcatcggcgttcggcatgcactgggaagcagacaatgctgatacccaacggtgacttacttgtctgacatctcaacttctcaagcccttgc

SEQ ID NO: 293571 - DNA, 333 bp, Zea mays
ggcgtgatcatcgcccccatcctcgtgatgatcccgatgatcatttaccggaagcggctccgggtcaacctcgcactcctggcgctcttcaccgtctgcatcagcttcgccgaggggctaacctgtgtcactcgcaacgtacaagacatcctggacgcggtcacggtcgggccgtgtaaacccgtccacgcaaccttctacggcggtcgtgacggatcctacaccaccgcggtcgcgtgcggctacaaggacactcgcacgcacgggtactgtctgcatactgtggccgtgagcactgtgcttgtcggcgactgctcggcctgcgtagggtgc

SEQ ID NO: 293572 - DNA, 252 bp, Zea mays
  unsure (1)..(252): unsure at all n locations
cccacgcgtccgcccacgcgtccgcggacgcgtgggcggcgcgtccagaccgcgacggcattggcatgaggggaggaggagccggagagaagctccaccacaaggaggccaatgccgcgcacggcgccggcgccggcgccgcggggaagggggccaaggcttgtttcgtcaacggcctcctcctctacgtcgtcctgccggtgctggtcttgtacttcgtcatcatcgccgnctcgcagttctacaaccctc

SEQ ID NO: 293573 - DNA, 387 bp, Zea mays
cccactcgttctctcctgcgcagcgcaacatttacacgctaaggctggccgactacatcctggaacaggtcctgtaactactacgtaccatctgcattgcatgtccacgactatagcttctagtttagactttcaatcatactatcatcaaagcaaaggccttcctgccggcgtatttgctttgactcttgtacttcacgccattagatatctagcacttggtcactcttcttaattagttcgctttgcttttgaggttgattataccattttgatgcagcgtgaactgcatgcatggacatgcaacgctccaatggcctttgtaaagtgaaatgtttatccccattatctgcatttttcctatcaaaaatgaactggttctcatat

SEQ ID NO: 293574 - DNA, 381 bp, Zea mays
cccacgcgtccgcaagcattgaagccgtatctcggcgtcgccggacgagacaggttgaggcggggcggtaatggccgacggtgaccttgaggtgctcagcgtgctcgacaccgggaagactcaatggtaccaatttaccgccatagtggtcggcggcatggggttcttaaccgacgcctacgacctcttctgcatctccctcggtactaaacttcttggacgtatgtactacaccgtagaagggtacgagacgcccgggagcctaccgtcgaacgtgtccgagtgcgtcaacggataggccttactgggcaacgcttcatggcagatgttattcggctggctgttcgacaagctcgggctcatgaatgtctatggcatgac

SEQ ID NO: 293575 - DNA, 312 bp, Zea mays
aaaaaacagaaggaaatcattgagttgtggcatgaatgcaatgtatctatagtacacagaacatatttcttcctcctctttagggggacactgctcacaatattcacttggaactggtgcatagtatactattccacattccacggtatcctagaggaccatctgatgcttatgctactgacacctccgatctcataagcacttcgaatgcctatcacagcggatatcgccacatctctactgcacctgctccagacaaaaccggaacctttggtacaccatgacctaaagcccgccaacattctgctggac

SEQ ID NO: 293576 - DNA, 298 bp, Zea mays
cccacgcgtccgtccacgcgttcgggtgcttagctgcatccgacaccctaacatggggctggtactccgcgcatgcccggagtacggctgtctcgtgtacgagtacatggaccacggcagactctaggaccggctgctacgtctgggcggcacgcagacgctcgcgtgggcccagcggttccggatcgcggccgagatcgcgacggcgctgctgatcctgcaccaaactaagcctgagccgatggtgcaccgcgacctgaagccggacaacatcctgctggaccgcatctacgtgagc

SEQ ID NO: 293577 - DNA, 423 bp, Zea mays
atccagtatctgctacaccagtggtactactttcacaccacagggagctgtacttgctcatggtaacttaattgcatatgtaccacggccacgtttacgcattaagttttaccactctgatctgcacatctcacatctacctttggctcacatctatcatagagctaaccaccttacatcgcttgactatggagctgccattggattctaccaccgggataactcgaatctgaatcactatctctctgttataagaccaacaacatacgcacgtgtatcacgcattatattacaaccttcatgctgcagttgcaaatgctgttcagcaatctgctcgattgagataaacgctgtatcatcctgaatacaatgccacgcgacatgccatgataaatcatagaatccacatacctatatgggaca

SEQ ID NO: 293578 - DNA, 420 bp, Zea mays
  unsure (1)..(420): unsure at all n locations
cggacgcgtgggcggacgcgtgggcggacgcgtgggcactccctcgctccgtctaccagtacgaccacgtccctcctcgtcgacgatctcgtagcggcggcgcacatggcgagcgacggcgcggcggctacgccagcgaaggttaccccaaagaaggccaatctcctcgacccgcactccatcaagcaccttctcgacgagaccatctncgaggtcgtgaagagtaagggctacaccgaggacacgcggctgggcaactggaagctggggatcggagccgtcgtgattgctgtcgccctnctcgctcagttttaccccaagaagttcccgcagaaccgcgatttcctccttggctgcatcgccctgtatgtggtgctgaatgtggtgctgctgatccttagctacaccaaggagaaggat

SEQ ID NO: 293579 - DNA, 443 bp, Zea mays
  unsure (1)..(443): unsure at all n locations
cggacgcgtgggcggacgcgtgggcggacgcgtggggcccgagatccaacggcgtctgatggggagcaagctgcagcaacacctcggcacctgacctggccatgcatgcacacgtatactataatctaacaacgtagctgacctgggcaaattgccagcctgacaggggccagggtgctcgaatgtctcactctcaccgccgactaactttccatcaaaattgattcttgttcatactccatagcatgcacagattgattgaactgctacttgagattcttgtcattggtattagagagagagacagagacagaacgattggcatagcatgcagaattgtttggaagaagctagcanagcagttccttgtttgtatcctctgtaccagaagatgagtttgatctaggattaatccctgcaaggcaaggtaaagtaaattcatg

SEQ ID NO: 293580 - DNA, 474 bp, Zea mays
  unsure (1)..(474): unsure at all n locations
acgcccacgcgttcgcccacgcgtccgaaatgaagaaaataaaaatagttgcaagaaaatttcctcgctccaacatcagctagatttatcatccaaggatcaagaagctcagcaaaatattctttctcagatagaagaagtgaagagggagaatattttactacaggcaaagaacacagaaatggaacaagagctcttaaaagctcaaaaatgtagccatgataatatggacaagttgcacgatgtggaaaagaactatgttcatctccgggataacttgaaaaacttagaggataagatctcaaatttagaagatgagaatcatttattgagacagaaggccttgaatttatctcctaggcacagccgaactgggagttatcactgcggttcttcaccatgcagcccaaaatcattcgttgaatcttcacctgtgaaacttgcacctnccnctcataaccagacagaatcaag

SEQ ID NO: 293581 - DNA, 451 bp, Zea mays
cacgtcaaccacggcaagtttaaggcggagccgtggacggacgggcacgcgacgtactacggcgggcgcgacgggttaactgacaccacggacggcggctcgtgcggctacaagggcgagctgtacaccaacggcaccgggtgcggcgcgtgctatgagctcaagggccccaagggcaccgtggtggtgacggccaccaacgaggccccgccgccggtgagcgggcagaagggcgagcacttcgacctcaccataccggcgttcctcaagatcgccgaggagaaggccggcatcgtgcccatcacctaccgcaaggtggcgtgcgagaggaaaggcggcatccggtacacgatcacggtgaaccagcactacagcgaggtgaaggtgaccaacgtgggctgcgccggtgacgtggtggcgctgtgggtgaagggcaacaagcgcgttaagt

SEQ ID NO: 293582 - DNA, 439 bp, Zea mays
tcgtgcgcacgaccgctgattcgtcggcggccttgtctgcgccaccagcaacgagtcgctgggggatgccttcgactgctacggcgagatcctcgactccaaggtcatcaccgaccgggagacggcgaggtctcgcggcttcggcttcgttaccttctcctccgagaactccatgctcgacgctatcgagaacatgaacggcaaggagctcgacggccgtaacatcaccgttaaccaggcccagtcccgtggcggtggctgcggcggcggtggctacggcggcggtcgctgcggcggctgctatggtggcgggcgccgtgacggcggttatggcggcggtggcagctacagcggtcggcgcgagggtggtggcggcggctacggaagcggtggcagctacggcggtcctagcgagggtcgtggtggcggctacggctgc

SEQ ID NO: 293583 - DNA, 465 bp, Zea mays
acgcattcttcccctctgctaccctcttgcgtggactcgaacacccgaaatcagaacgccgtcggcagagccgtatccaggaaggtgaaagcaccgccgccaccgtcgtccgcgtgctacaccatagtcgtgaccttggagtactacctaggagattcgccttattgtgattcttgtgcgcgatcacttcgagagagcggaaaccagccgttccttcctcaattgctcgccggaggagggccgtcaccctgtttccatgtcgtgccgtgggcaaggggttcgggcattacgattcaccgacgagccatctacagaggatctcggggttcagcaggtggagactgctgagcaggagctcgttgaagagatcaaagatgtggtgtttgccctgaaacacaacagtgctccgggtcccgatggtttcccttctgaattttatcaggagttctgggaagtcatcaaagt

SEQ ID NO: 293584 - DNA, 410 bp, Zea mays
cccacgcgtccgcggacgcgtgggttcctcttcatcgcgtccaccacgttcctgtgcctcggcgtgttcggcttctgctgggtggacctgctgctcacctcccggcggcgcggcggcgtcggcatcggccgcgccgtggccgagtcgcccgtctccggctgcctcatcgcctacacgttcgtgacggcgtggttcgtgggcgggctcacggcgttccactcctacctcgtgtgcaccaaccagaccacgtacgagaacttccggtaccggtacgagcgcaaggccaacccgttcaaccgcggcgccggcagtaacgtggccgagatcttctgctcgccggtcccgccgtcccggaacgacttccgggccagggtgtcccccgccgacccggacgccgtcgcgctctatta

SEQ ID NO: 293585 - DNA, 447 bp, Zea mays
cccacgcgtccgcccacgcgttcgcccacgcgttcgcccactcgtccggaagatacaagagaatttgttggagagttgaatatcacactggtcaaaggcaccaacttggccgttagagacatgctaacaagtgatccatatgttgttttaacgctcggagggcagaaagttcaatcaacggttaaaaaaagtgatctgaatccggtatggaatgaagtgcttaagatatctgttcctcgaaattatggacctctaaaacttgaagtgtatgaccatgatatgttctcagccgatgatatcatgggtgaagcagagatagatcttcagccaatgatcacagccgccatggcctttggagatacttcacgtcttggtgacatgcaaattgggaggtggttcatgaccaaagacaacgccctgatgaaagatagcacggtgaatgttgtg

SEQ ID NO: 293586 - DNA, 428 bp, Zea mays
ccgttcccaaaataccccagctgctgcatgtcttgcatgcgaaccgaggagatccgcgaaacgctgaactccatcgtgtggcccgggtgcaactccgccaccagatcgctcatggtttcctcagacgacgatttgccagacggcgtattcgcagcgaatgaagaagaagacggcatggatacgtaccgtcggcggcgacgcgtggtctgcttgacgcgggccagatctccgatgaactagagcaaggagggcaggcgagcgggcgaacgggcgaacagtttcaaaatgctagggtttcacgacgcgcaaaaaggtaagaaagcctgagccacgccgactcccccctttttatacataggacgcgacgcttcaggaagcccgcagtccaacagtacacgttcatcaacggtcacaataaaacccccgga

SEQ ID NO: 293587 - DNA, 444 bp, Zea mays
acgaaaacgaaccatcgagcaccgactaaacgtgtacaactacttatagaccggaaccgtcaaactgggatggggaaacagaacaaacccatcaaccatggcgaactcggcgtcggggatggccgtgagcgacgagtgcaagctcaagttccaggagctcaagtcgaagcgaagcttccgggtcataacgttcaagatcaacgagcagacgcagcaagtggtggtggacaggctggggcaaccgggcgacacctacgacgacttcaccggctccatgcccgagagcgagtgccggtacgccgtcttcgacttcgacttcaccaccgacgagaactgtcagaagagcaagatcttgttcatctcctggtccccggacacctcgagggtcaagagcaagatgctgtacgcgagctccaaagaccggttcaagaaggagctggaggg

SEQ ID NO: 293588 - DNA, 306 bp, Zea mays
cccacgcgtccgcccacgcgtccgcccacgcgtccgcgcgggcctccgcggtgacgcctgcggcttcccttccctcgccaaatgctgcgccgcgctgcgcctgccggggctcggccgcgccgtccacgccctcgcatttctcgcgggcgctgccgtctctcgcgacgccttcgtgcgcacctatctcgtcgacatgtacgccaagtgcggcaggcttcccgacgcgcaccgtctgctcgacgaaacgccgtgctcgagccggacgctggtcggcctggaactgcatgatcctggcgtacggacgga

SEQ ID NO: 293589 - DNA, 395 bp, Zea mays
tcgcttctgcatctgcgattgctaacgatatccgtctacctgatgactaccctcccgctaagccgcggctgtacacgcgtgagctgggatcgcggagccgcttgtctactcgcttccggtcccagatagccttcctctccaacaaatattggattctcttacttcattacgtgatggcttgaagttctctggcagatgccgctaatcgatgggaaaggagttgattagagagatcactgatctaggacacaggcatgacatttatgtgagcacaagtcatcgggcacagcatttgctgcgccgaggacccttttctttcaaacgatatgtagatgcatgcaaggccttaaggtttgacactactgagctgaatgctcggtctctcaacctccctg

SEQ ID NO: 293590 - DNA, 429 bp, Zea mays
cccacgcgtccgcacaaaccatggctgcgattatcacaaccatgtcgacacccacgcgcgcgcgggttgtcatggctgacgtggctgacttactggtcaggccatcatcgtacgtacttccgaaacggcccgcacacaggaacatcactgtcacctatgggaaggactgactggacgctatagcgacatgatatggcaagccgacggttgccgctcctgaccacaacggtgctggctgcaggtacaaggacgtgaacaagcccgccttcaataacatgggcgcatgcagcaacatccgcatcttcaaggatggtctgggctgcgggtcctgcttcgagatcaagtgcgataagcctgtggagtgctccggcaagcccgtggtggtgcacattacggacatgaactatgagcctatcgcggcgtaccact

SEQ ID NO: 293591 - DNA, 442 bp, Zea mays
gaagcataaccctgtacatagtgcttttctctaacttcaattgatggtgtgtttgtcaggcgaggggctatcatcacaaccttcattgtgtgctatgctcttacatcgtttatttctggatatgttagtggtggtctttactcaaggagcggtggtatggttctgcacacttttctttaattttcatgtttgtttgcgcaattcagtttctttgcaatatctctttccatgacgtaccttcatgttcttctatttcaaaaatagtctgcagtttaacttgtcatgtatggaatcctcacctcacaaaatatggctcttatcgattgcttcttgaattcatggcaggcaaaaactggattaaagcgatggttcttacagcatccctctttccgttcttgtgtttttcaattggtttcatgctgaatacaattgccattttcta

SEQ ID NO: 293592 - DNA, 442 bp, Zea mays
ggaagaatggcaccagaaattgcacaacaatacaagcccagatgatgtagtgatatgccaggccttaattgattatatcaagagtgactttgatataagcgtttactgggacaccttgaacaaaaatggcataaccaaagagcgtctcttgagctatgatcgtgctattcattcagaaccaaatttcagaagtgaacagaaggcgggtttactccgtgacctgggaaattacatgagaagcctaaaggctgtgcattctggtgctgatcttgaatctgctatagcaagttgtatgggatacaaatcagagggtgaaggtttcatggttggtgttcagatcaatccagtgaagggtttaccatctggatttccggagttgcttgaatttgtgcttgaacatgttgaggataaatcagcggaaccacttcttgaggggctattg

SEQ ID NO: 293593 - DNA, 390 bp, Zea mays
gacacgcttgcatgcacacacaatgcgatgtgagccttgttcctcctggtcctcttctggggggtgcatggtgagaaggaagagtcaaagggcatcgatgcgaaagcgtccggacctggtgggtacttcgacatcaccaagttgggcgcctacggcaatggcaagacagacagcactaaggctgtgcaagaagcatgggcataggcttgcggctgcactcttaaacagacaatcctcatacccaaaggacacttccttgtcctacaactaatcttcacaggcccactcaagggcgacttgaccatccaagtggattgcaatttgctggcgaccacagacctaagccagtacacggaccattgtaatcatatccagattctactcgtctat

SEQ ID NO: 293594 - DNA, 444 bp, Zea mays
cccacgcgtccgccaaaatgatttgcatgagctatggtcattgttggagttcatgatgcctgatatatttgctactggggatgttgatctgaagaagctgctgaatgcagaagatcgcgaactaatttcacagataaagtccattttagggccatttattcttagacgtttgaagtcagatgtaatgcagcagcttgttcctaaaatccaacatgttaagtttgttgtcatgggcacagagcagtctgaagcttacaaaaatgccataaatgagtaccgtgctgcttgccaggctcgtagtgccaagtcttcagatggcatttccaataatgttgctggattgattccaaagcgacaaatatcaaactattttacacagtttcgtaagattgcgaatcaccctttgcttataaagtgtatttatggtgacaaagatgttgatcg

SEQ ID NO: 293595 - DNA, 431 bp, Zea mays
  unsure (1)..(431): unsure at all n locations
atcagctgctttcttgtatgtcagccttagatccttccaactcttttgcttcttttgatgcacacaaggtacgaaagctagctgatttatatcctaatgacatgtcaagcattgacttgttaaaacttgacttgcaacttgacaattatattgatggcataagagaagatgatagattcaaagacataactaatcttgtggacctctcagttaagcttgttgaaacaaagagacataaggtgtttgatatggtttatttgcttctcaaattggtattgcttttgccggtggcgacagcaagtgttgaaagggcattttctacaatgagtttggtgaagactaaattgagaaacatgatgtgtggtagtcttttggatgattgtctngttacatacatcgagagggattatttcttcgaagtgaatgaagaa

SEQ ID NO: 293596 - DNA, 244 bp, Zea mays
gtcgctgtcatgctcatcttcgaggtcaactaatcctaacaaggaaaagatggcgacgacggcgtccatgcttatgaacaggtacgagctcgggcgcacgctctgacagtgcaccttctgcaaggtgtacctaggccggaacatctcgtccagtcagtgcacgtgcatcaaggtcattgactatgagaacgtgatgagcgtcagcatgatcgaccagatcaagcactagatctccgtcatgcgc

SEQ ID NO: 293597 - DNA, 384 bp, Zea mays
cctttcaacctgtgctggaacatctttggcggacatagtcaatgcatctacggaagcttccttatagaaaatgcctatcatcatcggccatccgcgtcctgtccatgctgagatcctctctacatctcccccaaacgcagacagagagctccactagaaagctaaatacggcatcacagaaatgtgcgcagacctatagaactgggctagcaagagcccttatggatacacggcatctgactctccgaacctcaatgctagttcacgctgaacaacaccgattgtcccatgtggactcacttgtacatgagactgtagtgccagccaaccacgataaatgtagatctagtcggtcgctcatactgagagaagttctatatgcct

SEQ ID NO: 293598 - DNA, 440 bp, Zea mays
  unsure (1)..(440): unsure at all n locations
cccacgcgtccgcgaagagcttcacgcgaagcaatcacaatggatcgtacctgatcaagaactacgagaatccttgaggctcgctgtagccgaagtcctgttgccagcctaccgatcttttatcaaacgctttggcaatcttgtggacaacaacaagaacccgcagaagtacgtgcggtacagcccagaagcagtggaccaacttctaggccagttcttcgaagggcagcaatgggcggagcaaaagcgctgagcaacatagagtgagagtgacggcatgagtacagccagatgccagtaagttcaacagcacagatttcttccgaagcaaccaccagttccttctcgcactacatataatatatagtgacataaacgtctgctgtgcaagcactacctagttntcttttctcagaaaaagcgcgcctaagtttcttttc

SEQ ID NO: 293599 - DNA, 324 bp, Zea mays
cccacgcgtccgcccacgcgtccgcggacgcgtgggggaaaagaagctcgtcttttacacaaaagtaaaagatgcaattacttccttaaacgctaagaagactatcaataagaaaaatacacggagtcggcgtcagaagaaactgaaagcatatgacctctcagcactgtccgagtccctcccagaaccaggtgcaccaaagcagaagcctgaagcaaagttgaactgcaagtcaagacagtcattagtattacgggaggctgctcatctcaaggttgtgctgggaaagatgcagttccagcttgacccatttgctgcgatcca

SEQ ID NO: 293600 - DNA, 320 bp, Zea mays
cccacgcgtccggatgatatcaagtatgatgaggaatatgtattgaatgcacgaggaatgaatctcttcacatgccaatggagacctttgaactctgaaccaaaagctctgatctttctatgccatggatatgccatggaatgcagtatttcaatgagaggcacaggtacaaggttggcgcaggctggatttgtagtgcatggaatggactatgaaggccatggaaaatcttctggacttcaaggatatattaatagtttcgatgacattgtggttgattgctctaagtactttgcaagtgtctgtgagaaagaagagta

SEQ ID NO: 293601 - DNA, 438 bp, Zea mays
acgaggcgcaccggtgctgggaggacatcttcgacgccatcagcggcgctaagcacctgatgtacatcacgggttggtcggtgtacacggagatcacgctactcaaggacggcgcccgcccacccaggcccggcagcggcgtcacgctcggcgagctgctcaagaagaaagccggcgagggcgtacgtgtgctcatgctcgtctgggacgaccgcacctgcgtcggggcgctcaagaaggacgggctcatggccacccacgacgaggagacgatgaactacttcgagggcaccgacgtacactgcgtgctatgcccgcgaaaccccgacgacttcgggagcatcgtgcatgacctgcagatctccaccatgttcacgcaccaccagaagatcgtcgtcgtcgaccacgacatgccggtgcagcggtcgcatcggcagc

SEQ ID NO: 293602 - DNA, 454 bp, Zea mays
gttttagttaatattttatgttattcgcatgtcatgatcaggaatgtgaaattcagttgtaatataaacatttttactccagtattctttgtatgatagtctaacggtttctcatatgcagagactcttgtacattcaacattggatcagtgcgacagtgctgattataccctagaagttctcttcaatatgaaaaatcacacagtgcatgtgaagaaaaggccttacctgaaagtgtttcttgagaaggttgctcagatgtttgagctcgtcattctcacagctagtcagagaatctatgctgagcatcttatagataaacttgatcctgatggaaaatatatctcacggcgtatttatcgtgaatcttgtatattctctgacggttgctatacaaaggatctgacaatcttggggatcgacttggcgaaagttgcaatagttgacaatactc

SEQ ID NO: 293603 - DNA, 440 bp, Zea mays
cccacgcgtccgcaacgcttctcctgctggttactccgcgcgccttctctttctctcccggacgtcgatcgtgttcttcagcacgggctagctagctccctccctcccagccatggcgacgccgttgcatctccatttcgttctggaattggggcgttgcacacccatgccgtcgcgttgccttgggttgtaggacaacaaggggcacgggcatccgctgcccaagtttggggagtgggacgtgaagaatccggccacgtccgagggcttcaccgtcatattccagaaggcccgcgacgacaagaagaccaccaccggccctggggctgggaacgcgcgcgcaggcattccggcggccttcaggaacggcggcggcgacggcgggtacaggcccgacttcggcgacggcaaccagtacacgctcgccaaacggaagaagt

SEQ ID NO: 293604 - DNA, 479 bp, Zea mays
  unsure (1)..(479): unsure at all n locations
cccacgcgtccgcccacgcgtccgcggacgcgtgggggaagagcagtttgctgaaaattttactcccaattatactgtgtgtgctgctactcatgcttggagcccttgtctggacatgtaaaagcagaggcaaacggcaaaagaagagagttcaaaagagaaggatgctagaatacttgagttctactgatgacgctggggacaagaacataaacttcccatttattagctttgaaaacattgtcacagcaacagataatttctctgaatctaatttgcttgggaaaggaggttttggcaaagtgtacaagggaatgttggaaggcacaaaggaagtagctgtcaagagacttagcacgggttccggccaaggcaaggaggagttcaaaaatgaagtagtcctaattgcaaagttgcagcacaagaacctagttaagcttctcggttgttgtattcatgaagatgagaagctgntagtt

SEQ ID NO: 293605 - DNA, 354 bp, Zea mays
cgcagaccgcgtcgagaagatgctcgccgtgctcgacaccaacatgctctgagtgaaccctgactgtggtctcaagacacgcaagtacacagacgtcaagccctgcctgaccaacatggtctctgtcaccaagctcatgcgcacccaacttgacagctcgaaatgaggtacctagatagctccatggtctgatagctcagaatgaaccagatgttttgacataatttgggtgatacccgctaggccatggaggaagtgatacgttagcctctcattggtgggatacaccattacaaagatgcgttctaagaacggagtgagagcttttctttgcgctatgaatctgggggtatg

SEQ ID NO: 293606 - DNA, 348 bp, Zea mays
tcgcccacgcgttcgcccacgcgttcgtccacgcgtccggttctagatcgcgatcggccgccctttttttttttttttttttttttgttttttttttttttttttcagctccagaagtgcttaattttataaacgttgtcaatatggatttcccagagtcacaacacaaaacttcccatgaagagtgccctaatggttttcaacttgtaaatgtgaatcgtagtccaccaggattgtggacgaacacgaagttgataaattgcaggaaccacttaacctagagttcatcttttggggctggcaagcagtcctcattccaaaagttggggaatttcagctttgcagctg

SEQ ID NO: 293607 - DNA, 367 bp, Zea mays
gccacgcgttcacccactcgttcatttactttttcctacatcaatacagaaatatgaggtggctctgctgatgctgacatgtgggtaccttggaattatcctactctgattgaagatgggcatcttctcatactgcctattatgcaaattactgactgatacttccctttattctgggaaacaagctatagctgatgatgcttctgatcctttggtctacctctgccctgaccttcatgcatatgctaccgagatcgattaacacatcataacaatactccctgataacaaggctgatctggtgccgctgaatatcaagcagagatcgactgattattctaaggcccatgacattctctatttgttc

SEQ ID NO: 293608 - DNA, 445 bp, Zea mays
  unsure (1)..(445): unsure at all n locations
tgtcgtccgcccacgcccgtccgcgcccgatcaggctgcgctctcagtgtcgagcantcgacagggcgtcgggagcaggcggctggcgagtgaccgaggaggttcgtgagcgaggatcccaggagcctcgcgagcgggtcagcagcccgggcgtgcggcggctgcgggtgggccggcgaggcgtggagctggagctgcgaggcagcgtcgggctggccgctgtctctgcnggatggctcaaacggaggaagcagcacgcagcagcagcttggagcatggggcggtggaacgaggcggctgatcgactgcgccggcgagtccgcgcgcgccgcggtgggccgtgccttctcctcgatggtgctcatcatccgggagctccagagcttcacgctgcanatgcgggaggcggtcgtctacgaggacctgcagagcgttctggcgcgcg

SEQ ID NO: 293609 - DNA, 506 bp, Zea mays
cccacgccgtccgcggacgccgtgggcggacgtgtgggttcagagtcaacacagtctgagcacggacgactgggagtccctcgactaataagcatcataggatcgtgggcgcacgttccttgcggctgcttgtcgtacagcgggtcgctgcgggcgccccgaaggtgccagaccggcgcccaactatcaccaccaactacaactggcaaagtcggctcatccgcacagggccactctggtaccggtcaggcccaactggttgccggctgctcactgacgaacggccggtgtcgtgccgggatcaatgagacgtgacacctgccacgcctacagtcggcatgacgtgcgtgcggcaaccgtccccatcttcaaggacggcaagggctgtggctcatgctacgaggtgagatgcaaggaaaaacctgagtgctcgggcaatcctgtcacggtgttcatcacagacatgaactacgagcctatcggtgcctaccacttcgacttgagcg

SEQ ID NO: 293610 - DNA, 391 bp, Zea mays
tccacgcgtccggtccactgctacattctcatccgtcgccaatcccttcccgtgctcctatcgggctgaatgagaagaagagatggccggcagggccaatggccgggctatctgcatcgatctgggcacgacgtactcttgcgtcggcgtgtggcagcacgaccgggtccagatcattgtcaacgaccagggtaaccgtaccacgccctagtacgtcgccttcaccgactccgagcgcctcatcggagatgcggccaagaaccaggtcgccatgaaccccatcaacaccgtctttgatgccaagcgtctcatcggcaggaggttcagtgatgcgtctgtacagagtgatatcaagcttgggcccttcaggtcatttctgggcctggtgaga

SEQ ID NO: 293611 - DNA, 428 bp, Zea mays
  unsure (1)..(428): unsure at all n locations
acttgctagtggggaaaacaagatggagcaacgcatgcattgtagtgatccacaagatacagatccaacaacattgcctgctcaaaggccggcaatctcaaacatagtagcttataagaaaagcactcaaggaaaggaatacatagaatggggacgaagggggcccttgagcttagaagcacttccggtgaacaatcgctggtcctgactcatcgtactcagcctttgaggtaacatactgttggagagcagcttgcctgtaactatctgtaacaatgaaacagacaacacagaattgctcccagtgcaacagctggatgatattagagaagcttctgattctgcgccagagatctncatatgcgaacctaacctgtgctccagtatgaactatggcacagtgcctggaagacactccatgtcagaag

SEQ ID NO: 293612 - DNA, 328 bp, Zea mays
gtcaggcaagcttccaaggatgacttggtagccagtgatggacatgagagtgataggttagccatgcagattagcgccagccggctggatcatgaccttctggctctagacatactactgcaagatactgcccaactcgctggtgatgagacgttcgagaacaacggagatgtgtcacgagataactctgatcaacttcaagctcatgcacatgaacatgtacgatgacgaggacatgctgatcaacgacgttaatgagacgactcacgatgacatgaacgatactgacgacattcacataggcgactaggctggtgtcacgatcacc

SEQ ID NO: 293613 - DNA, 359 bp, Zea mays
cccacgcgtccgaaaaaaaaaaaaaaaaaaatacataaagacctacaactaacaacgataaggaggagctaaactcgactaacctcgacataaaccttatcgtccgtccctaccatgaatgaaatcctgcacatccatggcggtcagtgcgggatccagatcagggccaagttatggcaagtgatctgccacgagcatccaaattgaccacacgggcaaacacggcggtgactccgacctacagctcgggcgcataaacatctactacaatgaggcctactggcgcagaagccttccgcgcgccgcgctcatagaactcgagcactgcaacatgcacttggtacgctccctacactacg

SEQ ID NO: 293614 - DNA, 263 bp, Zea mays
atgacgcgtggcccaacgcgtggacaacgacatgcttatcaaggacgctaccgtgaccactcacggggacagatacaacacggatggcatgcacatggaccactaacccaacatcaccatcaaccacaccttcattgacgtagacaacgactgcatctgcatctgtgccgactcctccaatgtgaacaacaccggcatgacctaaaaccctggccaccgcatctgcatcgacaacctatgtcagtacacagacaagatcgacg

SEQ ID NO: 293615 - DNA, 446 bp, Zea mays
gttctagatcgcgagcggcgccctttttttttttttttttttttttccttctaatttctttcgaatttaacttggatcgaacacacctgtatcctgtcgttctaccctgtatgttgtaacacacggctcgtaggacgtacgttttgatcagctgcacatacatatacacattataatcacacacatgcacacacaccgggtctaggcataacgattactcttcctcgccagacaagcccaagctcaccggcgtgccagtctccggtatccagtccgcgccgtgcaagaagtgccccaccgtgaactgcagcgccctgtccttgcccatcacgtggaacccctgcatctccttccgcccggtgacgttggcgccgtcgccgccgttcctgaactctccgaagaaggccgtgcccaggttggccttgccctcccagggcatgtacccc

SEQ ID NO: 293616 - DNA, 373 bp, Zea mays
cggacgcgtgggttgtactccagcctctcgtactggagagatgctgagatttgttttgaacaaggctagagccctcaagttgtactcagctgcaacactccatgcagaaggctacatgcatgaggcgcgagatcaaacaacggatgcactggccgcctacgtcaacgcgttctcgaccgagcttgagcatgtgccgtccaaggtggccatcggcgcaatgctctccaagcaaggtcccaggtttctacctgcagcgaggtgcttcctctcggacgcccttagagtcgagcccacaaaccggatggctcggctctacctaggacaagtgcacaggtcttgatgggaggatctctgacgctgccgactgctttca

SEQ ID NO: 293617 - DNA, 439 bp, Zea mays
cccacgcgtccgcccacgcgtccgcccacgcgtccgatcactacgttctgcaaaacggtgttctagaagagcaccagctagggagcagaataatgaacatactcagagtgagcagcttcatggttctgcaagtgagcagcaagctagagagcaacttcatggttctgtaagtaaacagcaaactgaagttcttcgctccaatgtcagcagtggcgatgcctcaaaatgtcattttggccctatagttactcagaagctgaaggaacattttgaaaaagatccatatccttgccgtgcaacaaaagagggtctggcacaagagctaggactgacatttaatcagatcagtaagtggttctctgccacccatcattattcaagagatgctgttgccaagaaccaaaaatacccaggagaaaatactactgagaataatagt

SEQ ID NO: 293618 - DNA, 421 bp, Zea mays
gctgatcaacgctgtcgattactgccataggcgacgcgtgtaccagcgagagatccagggtgaaaatgacatggttgatgctatcggcaagttcaacggtctctattgtggactgagcgcactatctaaaacagtcgcagaggatactgtgctacgcacaacctgtggaactagcaattatgttgctgcctaggttataaacaataacggctctcatgtacctaacgctgatctggtggaatgtggactcattctctatgccctgctggcggggtacctcgcatttgaacattcgaacctgatgctgctctacaagaagatcttcaaagcggatctcaggtgcacgagctgactctccacaagcgcagagaatatcatcacgaacatacttgaacctaatgctaacaatagaataactatt

SEQ ID NO: 293619 - DNA, 383 bp, Zea mays
ccgccccccgcaggagcacggagcggtacccgtcgcggctgtccagcgggtcggacggcgtggaccagcagcagcagcacagcttcgaggcgtcgcgcacgcccagccggtggggcgactcgttcggcaacgacagcacgtcgcactcccagaccagcacctcctcatggtgctcgcagcctccggacgagatggaggcggagatgaagcggctgcggctggagctgaagcagaccatggacatgtacagcacggcgtgcaaggaggcgctgagcgcgaagcagaaggcgctggagctgcagcgctggaagatggacgaggagcagcggtcgcaagagacgcggctgacggaggagtcggccatggcgctcatcgagcaggag

SEQ ID NO: 293620 - DNA, 245 bp, Zea mays
gcttcttggtttttaagaaactgagaatctaatttctataaacttagtcataaactagtatgtttggaaccacctcaatttctataaaccagtttcttaaaaactgggtgtttccaaacagggcctaagtcactgtagtgcttagccagttgtaacttaagagagttctgttaggttgccttgtggccacaaaaaaaaaaacacaaataaaactgtgcattacgaaaaacacaatgaacaaccac

SEQ ID NO: 293621 - DNA, 365 bp, Zea mays
gttatggcaccagtgttggtacaggcaacgcagcacggcatcgagtcaagccagttagcaagcgatggaacaggctacactgataggagagaacggctagaggagggatcggaagcgcgactgccatgggcatgggcatggagaccgcggatactgcccgtgcattctatacggacgtaaaacgaatcattatcaaggtaggcacggatgctgtcactggaatgaatggacgatcggccatgggcaggctagtctctctatgtgaacaggtgagacaactgaatgtttacgggtatgaggagattctgctgacgtaaagatctgttggtgtatgcaggcagatgatctagtactgtagacttatc

SEQ ID NO: 293622 - DNA, 424 bp, Zea mays
cccacgcgtccgcccacgcgtccgcccacgcgtccgcccacgcgtccgagaaaatttgacagctgtattgttccattacgacgggaatgtcaatgggtggaatgatctaccatggagcaaaagtgtgatacatatagctgcttctaaccagactaaatggtggtttgcaaagaggttcctccatcctgctgttgtgtctatgtaccagtacatctttctttgggatgaagacctggaagtagataactttaatccgagaaggtacttaaatatagttagatcagaaggactggagatatcacaaccaggtcttgattctaagctttctgaaattcatcaccgaataactggtcgtaaaaatacagggacctttcatagaagagttagtcgggcttacaaacgttgtttaagagaaggaccgcct

SEQ ID NO: 293623 - DNA, 432 bp, Zea mays
gcacaagatggacgtcgccgatctcagcgaagggggctgcacggttgacaagaccggcaactgcgtccggctgactgagcctgaggaccccgccttcgtgctgacgagcgtcctagatccactatgagactatcagcaagcagaacctccgctagctaactaggattcacactaagaagtgtccactcatgatatgcaccaccgatgctgcctgccactggatcgtcaacgacgcgcgatgaccaaacatgtgcatcaactgctccactcctgctgccgtgaacctgtattgctgtgccaacatcccatgcaccagagtaaccatggacgacgaccgcatcatgtacagtgacgccaactacaggaccatgaacagttgcacaatcgctgaaggctgctccacagtgatcctaagagacctcgtatgctgat

SEQ ID NO: 293624 - DNA, 375 bp, Zea mays
cagacgcgggctcgaacgcggaaacccgaagcctgcgacggacgcctgtgacatgacggggctcacaagcaatgcgatgagagcctcgaacactgatgctgactactctgcatggcgcatagtgagacatgaagatgtcaaagggcttacaatgctatagcatacgcacctggagggtccatcaacgtcacctagctgatcacctacggccctggcagaacacacagcgcgcttgctgtgcaactcgcatgagcctaggagtgcggcagcacttcgaatgtgaccaacctgatacgctgagacgactgttctgtacgtccactaaactctacatgcccttgctgggacgacctgaccattcatgtgcatgcgcat

SEQ ID NO: 293625 - DNA, 446 bp, Zea mays
cttgaatgacacaaggtttgagagggccatgcgattttatttcgtgtatctccgattggattggctctggtcacttaacctatttgctttgattctattgaatttcctagagaagcctctctggtgtcaaaagtatgccccacatacttgtgatcaaagggatctttactttcttggacagttgccatacctaagcaaaacagaatcactcatatatgaggtaacgcttccttgacatgtgtagtgcttgtgcttcagtgcccaggcaagaacttaatgactcaaaccttaaagcgttattatggtcagtagtgtgtttcagggcatgtatatttaccttcagtttccctgaagcattcttttacaagttttctgactttcagttggagttggagctatcatagtatgcaattgtgcatgttttgaatgaaaatatatagcttctt

SEQ ID NO: 293626 - DNA, 349 bp, Zea mays
agtgggatggcttctcctccccctccggttcgggttcgggttcgtgaggttctccggggttcggtttcgtgggtgagcggatcgatatggcggtgtcggatgttgagtaccgctgcttcgtcggcggcctcgcctgggccacggacgaccacaccctccacaacgccttcaacacctacggcgaggtcctcgagtccaagatcatcctcgatctggagacccataggtcccgcggcttcggcttcgtcatcttctccaccgaggacgcgatgcgggacgccatcgagggcatgaacggcaacgagctggacgggcgcaacatcagcgtcaacgaggcccactcccacgg

SEQ ID NO: 293627 - DNA, 333 bp, Zea mays
cacgcgtccgcggacgcgtgggcggacgcgtgggcggacacgtgggcaaaactgaagtttttggccgaacgaggcattttcttgacattttctcaacacaaaccatgtaataggttttgttgtagacttcatatagagttgtttgagcacgatgacaaggtttgtttgaatttaaaaatttgcatttgttgacacgcgcagtttcaagcacgcctagtatttatcttctcatgcgagcagttggttcaacttcgagaaatatttaaactacactttactgggggccttcgtcttccgaaggtcccaacaaacatgatttaacaatgtttccgg

SEQ ID NO: 293628 - DNA, 413 bp, Zea mays
  unsure (1)..(413): unsure at all n locations
aggacacatgggctctcccggcacacgagggcgcaccgttgatggtggcagcaccgacggacgcaaccgtcgcggccgccagcatggacctcctctaggacgatgacgagttcgcaaagttcgagatcaacgacaaatgcgatgaccacgcagaaggcatcgaagccctccaacagtgggacgatgagtgagataaccatcacctgcacgatgatttctcgctgcaccatatcgaaaagctggacagaggcaacgggcagcataactgaggttttatttctcgacattacacaaatgacttttatatggcagccacttttggtacagttgatgtgcttaggttatccaagtttttggccgtcagaacctcaagcccattancgaaagtggcggggagccgcctcatgggaaac

SEQ ID NO: 293629 - DNA, 429 bp, Zea mays
cggactcctgggctctaccgacacgcgaggtcgctgtgctgatggtggcatcaccgacggtcctctaacgtggaggccgccaagatggacctgctgtaggacgatgacgagtttgaaaagttcgagatcaaccaaaaattggatgacctgtactacggcttcgaagccctgcaaccgtgcgtggatgattggaatgtccactacctgaaccatgatctctaggtgaacttcatggacgacttcgacagggccctcgagcagattagctctaacgtcatcaatgtactctatatcaatgatgttcatatggcaggtactatcggaaccagcgatgtgcttcatgatatccatgtaatgtacatcaagaacctcaagcccattagcgaaggtggcggtgagccgcctcatgggaaacttggctgggccatc

SEQ ID NO: 293630 - DNA, 230 bp, Zea mays
ggtgggctggcttctgctccccctccggttcgggatcaggttcgtgaggatctacggggttcagtttggtggtgtgagctgatcgagatggcgatgtaggtatgatgagtaccgctgcttgttccgcggtctcgactgagccactgacgacgactctctccacaactccttcatcacctactgcaaggtcctctagtacaatatcatactcgatcggttgactcagaggt

SEQ ID NO: 293631 - DNA, 423 bp, Zea mays
gcgggcattggcgctggccgacgcgctcgttccggccacggcgcgcgcccagctgcggcgggaccaccaggctccgccgggcccgggcccgcacagcgtcaccatcttcgagttcggcgccgtcggggacggcaggacgctcaacacgggccccttccagaacgccgtcttctacgttcgctccttcgtcgacaagggcggtgcgcagctgtacgtgcccagtggccgatggctcaccggcagcttcaacctcaccagccacctcaccctttacctggaggaaggcgccgtcatcgtctgcgcaaaggactcatcacaatggctgatcgttgaacctttgccatcttatggcccagggctagacctttctggtcctagacattgaagcttgatcagcggattacacttaaccgattgttgtat

SEQ ID NO: 293632 - DNA, 281 bp, Zea mays
cggacgcgtgggcggacgcgtgggcggacgcgtggggcggcctcccacccatacaccttgggcgggcgccgcgccgtcgagggccatccagagctcgccatggcggccgtccggtccaacagggcccacgcccaccagcactgccgctccgaggcgtcgtgcccgacgacctccgtggccgtggcggcggcgagggccggcgacgccccacgccaccgttcgcaggctccggtgcaggtctcgaaagggcatcaccagatgcggcggtcagcggcgttccc

SEQ ID NO: 293633 - DNA, 352 bp, Zea mays
cccacgcgtccgcccacgcgtccgcccacgcgtccgcccacgcgtccgcggacgcgtgggatccaagagagaatgccgcagcacatctcaacagtcgccgcacgcgccgtccccgccgatctcgcgcaacagccgccgcacatgccaccccgccctcgcacccacggcatccgcgcccagatgttgcgggcggcgccgtccccgccgatcccgcgcaacagccgccgcacatgccagcctcggcctcgcgcccacgacatccgcgcccggctgttgcggccggcgccgtcctcgccgacccctcagatataaagtcactctggtgttcttcaagactacccgaagcgattca

SEQ ID NO: 293634 - DNA, 390 bp, Zea mays
  unsure (1)..(390): unsure at all n locations
cggacgcgtgggcggacgcgtgggcggacgcgtggggtcgctgctcgtcctgcctagctgacggtccggccagcatcacctcctgctcgcggcctcgcccagctccctccaccctccagtgagacgcagatctcctgctcgcggcctcgcccagctccctccaccctccggtgagacgcagatcttggtgcgacggggcactacggaggcagggtagtgcggttgtgcgtgtgttggtggcctggttctagcaaccgagaatgttcagagatgaattagagagagatggcatgcctaacattgaaagaacattgcgacaaggattccagactnggttcagaacccatatnctcagaatgcggaatataaatcaaggagaggctgatgatg

SEQ ID NO: 293635 - DNA, 252 bp, Zea mays
tcgggaccttcatactcataaacacattccatactttgagatacaaaatctgactggaacaacacgttatggtaatattaatacttatcttggaatataacaaagcatgatagatgatctggagtctgttggctatcttctgctatattttataagaagaatggccttaaagctggcactaagaaacaaaagtattataaaattagtgaaaagaaaatgcttacctcggcagatattctgtgcaaatcttac

SEQ ID NO: 293636 - DNA, 180 bp, Zea mays
acgccacgcgtcacgtcttcctgtccctctccgatccattctccagggcagctaactatgcatgtgtgaccgtgcaaagatgtcgtggcacgcgtacttggacgagcaccctgatgtgccagatccaggggcaccacctctcggcggcgggcatcgtaggtcacaaccgtgccgcctggg

SEQ ID NO: 293637 - DNA, 336 bp, Zea mays
  unsure (1)..(336): unsure at all n locations
ccgaggccaccgccgacggcctgctcatcatcacgttccgcggcctcgagggcgtcttcgtggacgggtacgctgcggcgctcggaaggaagacgacggcgacgtgttgggccgtcggcccgacgtgcgcctnctcctccggtggcctggacgcgggcgcgaacggccgccgcggcaaccgcgccgacgtcgacgtcggcctcctcctgtcgtggctcgacgcctcgccggcggcgtccgtgctgtacgtcagcttcggcagcctcgcgcagctgtcgctgaagcagaccgtcgagctctgcccgggccttgnagggttccggccggccgttcgtc

SEQ ID NO: 293638 - DNA, 457 bp, Zea mays
  unsure (1)..(457): unsure at all n locations
ggccaacgagttcttcctgcagatgctgtgcgagcgccggcccgggcgctttgtccagatgatggactccatcgccgacctgggactggaggtcaccaacgtcaacgtcacctcccacgagagcctcgtcctcaacgtcttccgcgccgccaggcgggacaatgaggtggcagtgcaggcggacagactgagggactcgctgctggaggtgatgcgggagccgtacggcgtatggtcgtcgtcggcgccgcccgtggggatgagcggcagcggcatcgccgacgtgaagcatgacagcgtggacatgaagctcgatggcatcatcgacgggcaggcggcaccgagcgtcgcagtgggggtttcagaggatcactacggcggctacaaccatctnctccaatacctcgcttgatcattatttaattgcgttcggtcatgttgaaagttcgatcaaact

SEQ ID NO: 293639 - DNA, 346 bp, Zea mays
cccacgcgtccgcccacgcgtgcgaccacgcgtccgcccacgcgtccgcggacgcgtgggctggcagcagcgcaagctcatggccgactccgcggctgaagccacgtacaagcatgacccggtcgaggtcgccaaccaacttaaccgtgcagtccacagatccgtcgagaaggaggacattggcacgaggcgggagatgatggggacgacgactaggaagtctaagttcagcgggccgtgcagggcgacgaacccgatcgaccggcgctggcagtgccggcaggactgcgcgacggaccggaagcgcctggcgcggtgcgccaaggcgttctggcgcaacatcacc

SEQ ID NO: 293640 - DNA, 499 bp, Zea mays
ggcttggaacctttgggctgatttatgtgcttgtactgggtgagtctcggcgcaggcagaaaacggttgacgttgaggacacttagttttctgctcgtgataatggaatcggtacggctaaggtcgggcctgttggtgatgatgttttgagggttgctccttttagtactgcggggtgtttgtgttatatcggcgctacggctgggacggggtagaaggatgttcatgctggcgatgaggtgtagcttaagaggggcacttcgatttctaagcattttactgagtatgggactgctagtaatcgggatgatacggagaagactcggtactatattcctcataatgagtcttgtgcggtctttgaggagtattttgcttcttctattgaggtgttttcgaattttaaggtcaatagggagaagacgatttagactacgcctgagattcctaatatttttgtcacgcatgctgttacttaggttgcgtctctctcgcacgt

SEQ ID NO: 293641 - DNA, 393 bp, Zea mays
tgcttggaacctttgggctgatttagtgcttgtggatgtgcgggtggggaggcgcttggggctatgtcgtctaatcttaagcctccttatacgaatacgcattagcgtaagaatacgtcgactaaggatgcgattgcgatggtgtttggggatagttttaatatggacggtacttatacgggtgatctacttgggactattactattaatattgctaccggtgctggtgatgatcgtactcttactggtttcgggattcttaaggcgaatactatcggtgcgattcgtggttttggttatggtactagtactggtagttcaaggtggcataaggatgagaaggatgctatggatactaatgctaaggaccgtatctccaagaagataacgcct

SEQ ID NO: 293642 - DNA, 486 bp, Zea mays
  unsure (1)..(486): unsure at all n locations
gcttggaactttgggctgatttatgtgcttgtttatgtgcttggcacttccgtcgtcgacgagcttatcggtattaccggtaagtgttcccttagtactaacgctgagaatgccgaggagaattgctgcgtttcttgcgagtcttcacctcgtcgtttcggcgtctcttagcatactagtggcgcgacttctcctgaggagatttcgcattagaagattaaggacggtaagttccccgccgacgcttctaaggagggaggtgcttctttcggtactaaggccgataagggtattaccgaggccgccggtatcgacaaggagattattatttaaggttacgatgattccggtaagtgtcgtgttaagcatcatgaggttggcgtttgtcccgttaagcggtgtgtcgcctctaagaccggttttaacgagttactatagtccgttactgattcgaatgtctanggctcggtctgtcacgttactact

SEQ ID NO: 293643 - DNA, 441 bp, Zea mays
caactgggcttgccctctgctgagagacacgatgaggttactgaatgctgccggaccgcgctctgggcgactattacccagtgaaggcactgtaccaggcgcatcgtcgacccgtccatgtgcctgcacgaggacgctgactaccggccggtgatcagcgacgtcgtggcggcgctctccttactagccgacccgaaatactaccctaccggaggcacatgaagctgaacacatgagcacgcatagcaggacagacaacgatagcagacctcctaggacctagaaggtcacgtgagacgacgacatgaagcatagatgaccgtatagggggagctaactaacgggaaacatggcaaagggaggatctgcagagctgtctgaatgatctcttcaatctgaatttcgtataaggcacaccacgtaggcaggatgtaacatcat

SEQ ID NO: 293644 - DNA, 380 bp, Zea mays
gcgtccgaaccgagctttcagtatgctgaaagacagcttgatttaagaggacctaagacgacccatggggggcgagcaggcacgcagtcaaggcgctataccaggcgctcccctgcgggtacatgtgactacaggatgacgctgccagccggtcggggatcatggacgtcttcgcgagactctcgttgctctccgacctgcaatactacgctcacggaggcacggaagctgaacacaagatcacgcatagcattacacacaatgatagcagtccttctacgaccgatgtggtctgcacttacgacgacattaagcatagatgaccgcagagggggagctaattatctggacacattggacaggtaggatttgcagagctg

SEQ ID NO: 293645 - DNA, 344 bp, Zea mays
cccacgcgtccgcccacgcgtccgcccacgcgtccgcccacgcgtccgcttattttgcgacccatcccattcccacgcaaaggcaccgagcgtgatctccgtccgtgccgccatggcctcgcaccgggcgctgctgctgctgctcctcgccgccgcgctcgtcgctgcgctggccgctgtcgcatacgccgacgacgccaacgccaagcccaccatcctgacccccgtggcgcataccccgctggggtccttcgacggcgacaagccggcctctgacgacgacgccgtcgacgacgacgaggaacgccgccctgtcggcgcgcccaacggggccaccatgactg

SEQ ID NO: 293646 - DNA, 381 bp, Zea mays
cggacgcgtgggcggacgcgtgggcggacgcgtgggcgaggagcacaagtctatgtgctacagccttcgtgtccatgtgctacccttcttcaggttctacagaggagcacagggacgactctgcagcttcagctgtacaaacgcaactattaagaagttcaaggatgcacttgcgaagcacaagccagatagatgtagctttggcccaacccgggggctagacgaatcggagttattagccttggcagcaaacaaggaactgcagttcacctacaccagggagccagaactgactcccaggggagatacccccggggaggtcattgctcccgagcccgcaaagcttcctgccgctacaaagcctttggtcaagctggggtc

SEQ ID NO: 293647 - DNA, 282 bp, Zea mays
tgcgacaagaccgtccacttgatcaacctcctcacagccgacggcgttacctaccatatgacatgcttcaagtgcagccactgcaaagggatcctctacatgagcagctactattgcatggacggcgcgctgaactgcacgacccacttcgagcagatcttcgtggacaccgacagcttctccaagatcttcacgccaagtggccagtcttcagacatgggtgtactggcctgaggccccagcatgctatcatctgcgtagtctggtactcacgagaagtgt

SEQ ID NO: 293648 - DNA, 357 bp, Zea mays
gtacggtctgttggaatggattaggtgtggctagttttggtttggtgcatcctcgtatgtgcttttgcaggaagattttcgtagggggtgtagcttgggagacaactgaagaaacattcacaaagcattttcagaagtatggagctataactgattctgtgatcatgaaggacaagcatactaggatgcctcgcggatttggatttgttacattttccgatccatctgtgcttgacagggttctagaggatgaacatgtcatagatggaagaacagttgaagtcaaaaggactgttccaaaagaggaaatgtcatcgaaagacggtcctaagacaaaaaagatctttgtgggtggta

SEQ ID NO: 293649 - DNA, 426 bp, Zea mays
cggacgcgtgggtgaggatatgaagaaaacttgaaagaacttcatgcatgctctgaagtgcctcgtagttgagtcagaacaaggcgcggatgggtgcgacagagctgtgggatctcttggcctccgactcagagcaattcgtggagatgtgcagggtgtatcaacacctcaagctgaagaactggtttgtaaggtcgagactacagtacggggcagactttgttgctcactgtcatcgtccgacacttgcgcactcgtagttcgtggaggttgtggctctagaagggaaagcattcgacaccaggtgtgccctcatgaaagtctggtctgaactattatgtgtgctttgggactcttcaagtgtggccaagacgttacttattcttaccatcagcaccaagagctatgagctaggatacttggatt

SEQ ID NO: 293650 - DNA, 440 bp, Zea mays
  unsure (1)..(440): unsure at all n locations
cccacgcgtccgcacctatggtggtgcctagtgggcctaaggtgccagccttgctcgcgtttggagattcaatcgtggacacaggaaacaacaactacctggtgaccgttgtgaaggccaacttcccgccgtacggcagggagtaccctaaccacaaggctactggcaggttctccgacggcaagatcaccgaggactttctagcgtctgcgcttgggttgaaggagacgctcccgccatacctgaacaagagcctcaccctggaggacctcaagaccggcgtcagcttcgcgtcggcggggagcggctacaacaacgccacgtgccggacgtcgtcgaccatgacgatcgagcggcagctgcagttgttctccgagtacaaggcgaaggtggngggcatccacgagagggccctcttcgtggtctgctccggcagcaac

SEQ ID NO: 293651 - DNA, 351 bp, Zea mays
cccacgcgtccggacagacctccggtcagtaaacaggcagatggcataatgacctatgatgtatgtagacaaactcttggatgttactgatgaagaaagaattccaatgttcaccgatgccagcccagaacttgcacctatctgtgacctcggtaccgaaggtgccaacagactgcataaggttgacacgcaaaggtacgacacaccttcgaccatcctgggacctcatgcttcaggtgtgcatgcgatctacagcatgccgagttgtgagaacccagcttacaccggtattatagctgtgttgatgcgctgcgaggtcgatctatctggagcacgacggatacacactcc

SEQ ID NO: 293652 - DNA, 396 bp, Zea mays
gcgtcacgcttactgacgtgttgtccatggccattgttcaagccgaccaactcctactggtccagagagatgcaatgtccggctcgcgatacatgacttacccgggcacacaggtcacattcatcttcgtctatgatggccatggttgcccatgagaccttcggttgcatcaatgactacctatgcaaccatctcagaaagtttgcaactgatcgcatgtggatgtcagcaaacctgacccggtaagctttccaagctactgaagatggatgactctctatagtcagcaaggaatggtctgtgaagcatgagattcgacaagacgactgccgatacctcgtaagcataatcagcgatctgacatctgtatgtggtatacgtgttcaactcaaatgc

SEQ ID NO: 293653 - DNA, 428 bp, Zea mays
caggttgcttttcttaaatcaagaaaaagttttgtcaagatagctatacagtctggatgtgctttagtcccagttttctgctttgggcagagctatgcatacaagtggtggaggcctggtggtaaattgtttatcaagatcgctagagcagttaaatttactcctattatcttctgggatagatttggcacaccattccccttcccaaaacccatgcatgtggtcgtgggtaaaccaattgaagtcaataagattccccatcctacaattgacgagacaattgcaacagtatgcatgttcttggcgggaaaagttgacgaaacacccagacctctgaaggatgtcatacttctttcatatgagatcatccacaaaaaggatcctgctgcagttcaacgaatgatacagaaggaagtatatgaacaaca

SEQ ID NO: 293654 - DNA, 425 bp, Zea mays
cccacgcgtccgcccacgcgtccgcccacgcgtccgcccacgcgtccgatggacaactctttagggcgcttggtgtattcgcacagaggaaaatcaacctcacaaagatcgaaagtcgtccacacaaggagaggcctcttcgagtatctgatgactgttcctcactcttaaagaattttgattacctcttttacgttgaccttgaagcatcaatggctgatccaaagattcagaatgctcttggaaatctgaaggagtttgcaacctttttaagagtcctcggaagctatcctacaaatgtgaatgaaccttagaaaacactgcagattacatgatggattagcaggaatggacgaaatggtttgagttggttctctgagcaagttgacaagtgaggacctctatgaagctgatgctaacattta

SEQ ID NO: 293655 - DNA, 390 bp, Zea mays
  unsure (1)..(390): unsure at all n locations
cccacgcgtccgcccacgcgtccgcggacgcgtgggttcggctgccctggtgttgccagatcctcgacgcattctccggggttcccggccaccggtgtcgcggtggtgaacaaggggatgggcgtatcgtatccgtcacacagtangccggacgtgctgtctagtccggggacgccgagctgcaatcggcgtgggatggcaggcgttggctaccagcagggtcctcgttcagaaagagtgatcccgccttggaccggccatacaagccattctgggagcggcatggtgttaccttacagcactgggactgggaggacgctgccatcgaaatgggaggatgcagagaggtggatcttcagccccaaccccaccccaacaatgcactcggga

SEQ ID NO: 293656 - DNA, 438 bp, Zea mays
cccacgcgtccgcagcttctcggcttatggtgccagagccagaccgacgtgcctagtagcggactatcttagcttcaagagaccgacccaggcaagatccattgatcgatggagctgcttcctctgctcacgtggctcctccttgcgcacgccctggcctgcctggcctggacggccgccgcgcggcgccggcagtctcggtgctacctcctggactacgtctgccacaagcccagcgacgaccgcaagctgtccacggagacggccggcaacgtgatccagcgcaacgcgcggctggggctcaccgactaccgcttcctcctccgcgtcatcgtccgctccggcatcggcgaggagacctacgccccgcgcaacatcctggagggccgcgaggactcgcccaccctgcaggacgcggtggacgagatggacgccttc

SEQ ID NO: 293657 - DNA, 405 bp, Zea mays
ggaaatttgggctggttgtagttcttgtccttttaaaaacttatcgtagattcctttaatctgtcggcgacggatcctgcggatgaggggaggcgcttggggctatgtcctctaatcttaagcctccttatacgaatacgcattggcgtaaggatacgtcgactaaagatgcgattgcgatggtgtttggggatagttttaatatggacggtacttatacgggtgatctacttgggactatgactattaatattgctaccggtgctggcgatgatcgtactcttactggttttgggattcttaaggcgaatactattggtgcgattcgtggtttcggttatggtactagtactggtagttcacggtggcataaggatgagaaggatgctatggatactaatgcta

SEQ ID NO: 293658 - DNA, 471 bp, Zea mays
tggcttggaacctttgggctgatttatgtgcttgggtaagaattggaagtgcggaaagaatgaggtcgatgatgataagtgtgagtctgcgcggaaggaagatgggtaggagcacgtgtaggcgatttggacgtctggtaatgggtggcgtgaggttattcgtgcggatggtatgtgttgttctcgttacacttggggtaagacgtataagaaggcgcggactgtggttggggatactgcttctgctggttcttgtgatcattaggatgataaggttgatgctacttctaagcatacgaatgatgaggtgtgttcgtctaaggttcatggggagtcctttgagatgtctaggtctaatgagggtgctgatgctgacgggtttgaggagggtgaggagaatggtgatcataatcatacctagcctgaggatgaggatactgataagactcaagaacctcgctctcttccctc

SEQ ID NO: 293659 - DNA, 303 bp, Zea mays
cggacgcgtgggcggacgcgtgggcggacgcgtgggggccgacgaggaggccgggtcgctgctgcaggagcgcgactcgcacggcgaccgcaagactgacaaccaggcctagcgagtgtgacggatctgaccgcccgatcggtctgaaccctgacaacccgtacaagttcgatgcaacatttgttcattccttgtgtcgaacatgtggggaaaaaaagggaaatatatatgagcattttttgtattttttggccagttgtagctgttactaccacgtaaacagtacgcaaagtcgttcgcatt

SEQ ID NO: 293660 - DNA, 337 bp, Zea mays
cccacgcgtccgcggacgcgtgggcggacgcgtgggcggacgcgtgggcggacgcatgggcgtccggaaccgccgcggccggcacgcacccacccgctggcctgacccgctccggcgcatgcggcgagacccctatatcgaatccacttatatacatacatcacgtgtactacgacatcgaacaataataatgaacagttatcagacgtaccggcggacgattcacaagtgtacagaaaacgatcgactccactccaactatacatatcctactatggctgttgatacaccccgatggatcacaaggcatgcatgcatgtacatgcacgcatggtca

SEQ ID NO: 293661 - DNA, 393 bp, Zea mays
cccacgcgtccgcccacgcgtccgcggacgcgtgggcggacgcgtgggtcagcgggctgcaaagccgacgaggataaagaggagcccggctccgcacgcgggagcgagaggatcgccggcgcaggatgtggtgcgcatcgtgcttggcgtccgcctgcgcgggctgcacctgcaacctctgcacgtcggcggcatcggccgtgtcccgccgatccgcgcgcctcgcttactgcgggctcttcgccggctaccttatcctctacttcttgctccgtcagttcgccgagccgctcctcaagcatatcccatgattcactaaatttctgcatgtgctgaaggcttaagatgcagaacagtgatgtggagtgtccctttgctccacaaaatgaaatg

SEQ ID NO: 293662 - DNA, 369 bp, Zea mays
cccacgcgtccgggagagaccgccacccccacgcccgcacggcccactcagcgctctccacccccgtcccctcgcggcggcggcggagcccgagcctgagtcctgcccccccgggctaggttggtctccgcctccgccctccagtctctttggcacaacctgcagccgctggcgcaggtggacatggatctgccaagcctcgccgtcgtgctgcgcgccgcgctcagtcacgttcctgaggagcgcaaagctgcagaggagagtctcaaccagttccagttcacaccacagcatttggtgagattgttacagatcattgtcgatggaagttgtgatatggctgtaagacaggttgcaagcattcatttc

SEQ ID NO: 293663 - DNA, 270 bp, Zea mays
ctacaagatggcgtgcacaaacaatgcgatgagagccttggtcctcctggtcctcttgtgcatcgtgcatggtgagacggaagagtcacagggcatagatgcgaaagcgttcgggcctgctgggtccttcgacatcaccaagctgggcgccttcggcaatggcaagacagactgcacgaaagctgtgcatgatgcattggcatcggcatgcggcggcactgggaagcagacaatcgtcatacccaagggagacttccttgtcggacaact

SEQ ID NO: 293664 - DNA, 431 bp, Zea mays
cccacgcgtccgcccacgcgtccgcggacgcgtggggttttgggatggcagaacaacagagagaatgtggatgacatatctgcaactttggctggtatttcaactgagatagacattagcatattctaccgtggcctagatcaaggaagcaaacacaccctggtgtcagtggtttgttactatggccagcattatcattgttttgccttcaaggatggacgatgggtcatgtatgatgaccagacagtcaaggtaacccaataaccatactactttgagcatcctttttactgttcgtactaatgtggcccaattttggttccatgttatttgtgcaggttgtaagtagttggggtgatgtgctcgtgatgtgtgaaaagggtcacttgcaaccccaagtgcttttctttgagtctgcaaattaatcattc

SEQ ID NO: 293665 - DNA, 387 bp, Zea mays
attatttatttattttgttcagaactcctattgcataataaagttgtgacattcgttgctataccactattcatcatatgtgtgagacttggtcccagcacacctggtgtttatgtttgcgctcggatctctaaaacccgagtgtgacagaagtggtatcagaggaatgttgactgtaggacaaaacctagatagaactggacaaataatactgtcgaagaggaaatctccggccgggtggcggaatgcacccgccctaaatcctaagatgaggagatgcctaaacgttttgcctgttaggtggaaacgagaagaacacaagaacacacaaggatttagagtggttcgggccgccggagcataatacactactccactatgtgatgt

SEQ ID NO: 293666 - DNA, 407 bp, Zea mays
  unsure (1)..(407): unsure at all n locations
cttccaccaccgcctcctcccccgccctctcctcgtccgcgtccgtccccagtctccggcgggcgaacccgaagccgacgctggtgacgaagcgtgccgccatgagcgcggcgaagctggtgccgagcgacatggcgagcgcgccggccatgaggaaggcgttggcgagcacgatggtgcggcggcggcccaggtggtcggccacccagccggcggcgaggatggacgcgaccatgaacacgttcatggaccccgccagcacctcgacctcgccgtcagtgagccccacgtnctcccgcatgaacagctccgcgtcgctcatcagcgtcaggtctgcagggcacgtatatggatcggtcggaagcatgagtttagcacatcgatctctcttcgtgattaattggatg

SEQ ID NO: 293667 - DNA, 348 bp, Zea mays
tgcctttcagcagcatgatccaggagatgaagggcaagatcggcgccatctggttgcgcggcgtgctacggttccggccggggggccacgccggggccgggcgagcgccggcagccgagccggacgaggcgtcgcgggagggctgctgggcgcagttgcctttcgagcttctacgtatggtgctggtcagggtcgaggaccaggagtcacggtggccggcccgcagcgccatcgtggtgtgcgcctgcgtctgccgctgctggagggccgccgtcaagattgtgcgcgtgccggaggcttctgggaaactcaccttccccatctctcaagcagccttggccaagggat

SEQ ID NO: 293668 - DNA, 306 bp, Zea mays
acgcgatcaagcttgcatacagctagtacgttgaacctatgagtgcttgtagaaagctattgcattggttaaacctggagttcggatccgagaggtctgtgaaatcataaatagacatgcttcgatgtcaggtttatctgtagggaaatcctattgcggccatggcataggggaactgcttcactgtgccccaaacattcctgattattcaaaaaacactgctgaatgtatcatgaaggctgggcagacatttacaattgaaccagtgtataatgcattctcaatcatcacgccacagacgatcat

SEQ ID NO: 293669 - DNA, 351 bp, Zea mays
cggacgcgtgggcgctggggcagacgccgacggaggaggagctgcagggcatggtggacgaggtggacgcggacggcagcggcgccatcgacttccaggagttcctcaccctgatggcgcgccagatgcgggaggccagcggcgccgacgaggaggagctgcgcgaggccttccgcgtcttcgaccaggaccagaacggcttcatctcccgcgacgagctccgccacgtgctccagaacctcggcgagcgcctctccgacgacgagctcgccgagatgcttcgcgagggcgacgccgacggcgatggccagatcaactacaccgagttcaccaaagtcatgctcgccaaac

SEQ ID NO: 293670 - DNA, 293 bp, Zea mays
ctcacgcgtccggatggtccatggcattttcaagcacctgcctgtggtggggaacggggaggcgttggccatgctcgacatcgccaagtgcctctacgacgacatgtccctgatggagagggcgtccgataaggcgaaggcggcgatcgccaacgtcgcggctggcgacgacaagtactacagcgtcgaagctctaaaggagcaaatgttcaggccctgcttgcctgacattatagcctaacactcggcacccaaaatggagtcactctgcgatttctaccatgcagctacca

SEQ ID NO: 293671 - DNA, 375 bp, Zea mays
gacacatgtacagtcacacaccatgagcgggacctctcaaatctagaggagagcatgagcagctggccgactgctgcgtgatggcctcaccttttccagcacgtgcgacggccgcgccgtgcagtccggcatgaaggcgcagaggaacaccacggcggagaccttgtccgggaacgtctcggcggccagcgcgacgttcacgccgtcgaggctgtggccgacgagcacgacgcggtccccgttcggcagcgacgcgaggaggtccagcagcggcctggtgtagtcctggaacgtgggcacctcccgcagcgcccgcgggtcggcgcccgatgccgccaatgtcggcgcgtcgacgcgggaccccgtcgcgcggag

SEQ ID NO: 293672 - DNA, 432 bp, Zea mays
cccacgcgtccggcctttgtgagctcgcgagtggagagaaaaaaaggagcagcgaagagcgaacgaccgagatgctggagaagctgtgggacgacgtggtggccgggcctcgcccggagacaggcctcgagaagctccgcaaggccaccaccgcccgcccgctcgtcgtcgtcgacaaaggtgcgttttgttgcagtcgatgccgtcgaccccgacgacgccggtgacgccttctacgacgacgacgccgcgcggcgccagcaacgtgtggcgcagcgtgttccacccggggagcaacctggccaccaagggcatgggcgccaacctcttcgaccgtccacagtccaactcctccaccgtctacgactggctctacagcgacgagaccaggagcaaccaccgttagatcggaacggacgaatcgggtggtag

SEQ ID NO: 293673 - DNA, 250 bp, Zea mays
ggactacttcaagaggttgttcatctttttgaaggataaggatggctattggagggggtttgctgtcaacctggcctctggtggtgctgctggtgctttctctttattatttgtgtactacctatactacgcgagaacatggttatctaatgactcgatatgctgtcaagggaggaggtgaaactcattactatgtgcacggttatctatgccttatgacactgaagttttatagtatcgttggtctata

SEQ ID NO: 293674 - DNA, 433 bp, Zea mays
cccacgcgtccggagaaggtactagatcgtggtgaaaaaatcgaacttcttgtggataaaacggaggatctccgagcacaggcacaagatttcaggcaacagggaacgaagatacgaagaaagatgtggtgggagaatatgaagatgaagctcatcgttttcggcatcgtggttgcactgatcctcctcattgtcttgacagtttgcaaggacttcgattgctgataagatgcaggaacatgaaaggaaagaacatgagaaaaaatgtagggggagtgtagtgccatgacaccgcgggaccaaaatccatcatttgtgtgatgttgttggcattggccacaatgttcttagctacgcctagaacgatgggctcaaattaagttataacagggctctctaatattttaaataattgtaatagtagcaaatatcg

SEQ ID NO: 293675 - DNA, 345 bp, Zea mays
cgggctcccacttccttcccagcagctacctgttcagccccaaggacaagagcgacgtcatggtgtcaaccacctgctggtgcatcatgctcgcctccctcctcgccatggcgtgcgcgttcggcccactccaggtgctcaagatgtacggcatcccatacctggcgttcgtgatgtggctagacctggagacgtacctgcaccaccatgggcaccatcagctatctctgccctggtaccacggtcaggaatggagctacctgcgcagcggccttaccacggcggacagggactacagctggatcaacaacgtccaccacgacatcaggacccacgtgattcatc

SEQ ID NO: 293676 - DNA, 409 bp, Zea mays
  unsure (1)..(409): unsure at all n locations
gcctcctgcacaccgcgtgcggcacgccggcgtatgtcgcccccgaggttctcttgaagactggctacgacggcgcgaaggcggacatctggtcatgtggcgtgatcctcttcgtgctcctggcaggctacctcccgttcaacgacaccaacctgatactggtgtaccggaagatcacacagagcaactacaagtgcccaccgtggttctctgtcgaggcgcgcaagctcctcgccaggctgctagaccccaaccccaggactaggatctccatctcaaaggtcacggcaaatccctggttccagaaaggactctgccctctcaccaccgacaagcccctcgacttgtgggagacctccgaggtgctcggcaaggaaaaagcctgcaggtgccgncaccaccagcgcga

SEQ ID NO: 293677 - DNA, 387 bp, Zea mays
cgtgcgtccacgcgtccggacctgttcttgaggctgtttgttctcaagatctagttttccaaccggggggagtctccagaagttcgctcggcggcatcgctttcttgttgagcatggtgcatgtcaagatccactcattgtttcaggtgcactctttcctcagtgctacattctacctgagatgtatcaagattcgctacacaatttttttcttcccaactggacagattggcaaccttgcagatactcgtaatcggactctgcatggtgtttgaagggttcacagctgtttcatggggcatcaagcccgccgttatgccagataaccaacacgaacagttttgactctttaatcattcatttctggtgagaatgcaccgcaaatct

SEQ ID NO: 293678 - DNA, 393 bp, Zea mays
cggcccgaccgatcgcgtccgggctgttcttcaatcaagaaaacgtctcgttttgataactatacaatctgcatgtggggaagtccctcatatctgcttcgggcagagctatgcatacaagtggtggacgcctgctggtaaattgtttatcaagatcgctcgagcatataaatttactcctattatcttctaggatagatttggcacaccattccccttcccaaaacccatgcatgtgatcttgggtaaaccaatcgaagtcaataagattccccatactacaatcgacgagacaattgcaacagtatgcatgttcttggcgggaaaagttgaacaaacacccaaacctctgaaagatgtcatacttctttcatatgagatcatccacaaaaa

SEQ ID NO: 293679 - DNA, 405 bp, Zea mays
atatgctgctgcctgacctgtataatctccgatctgggcgtccatgaggatttggatatgaacagaggcgctaccacagaggcaatcaataccttggtggcatacaagttccaatcaaagagggttcatgatggggatgtgggaggagatggtggtggagctttgaaacgttggaactgacagaaagcgagctattactagactaaaagctctatgctgtatctgcttgatcacgttttaatactacgaagacctgggcgaactatcctgtgcacatgcattccacacggaatgcatagataagtggatccagatgaacacgttgtgtcctgtatgcaaggctgagatcatgggatcataagcgtcctgtgatccatagagtgactatgaggatcccgacaacac

SEQ ID NO: 293680 - DNA, 443 bp, Zea mays
cccacgcgtccgctctactgcatgggtcatcctcacaggtgccatggtcctcctcgccgttcctttcatcatccctgcctgctccagttgctcatatgtggatacagatggccctgaccctgcatcgccactaaaccatgatgacccacataagccactcctaataagtaacaatcatcagatggagtccaatgccatgatgcaaaatccaaaggagaaccagatgcagggcaattgttgtggaacagtgatgggcaagggccgcctggcgacactcggtgaagaacacagtgcaaaaaagctcattcggtgtgtggacttttggctctactacacagcctacttctgtggagccactgttggcctggtatacagcaacaacttggggcagattgcgcagtcattgaaccagcagtcacagctcaccatgctccttgctgtct

SEQ ID NO: 293681 - DNA, 451 bp, Zea mays
accgtacccgtgacgcgtgggcggacgcgtgggcggacgcgtgggtttatgatgatggcactgctaagggagagttgcctgaaacagtttattgctttgatggtgtcttctataattactttagcataggaatggatgctcaagtggcttatgggtttcaccaattacgtgatgaaaagccatttcttgcacgcgcaccttcatgtactacggcaatttacgcaggatatacctgcaagcaaggatggttctttacacaatgtattagtgatcctgagttaaggggattgaggaacattatctgtttatcaatcaagaggatggacagctctgagtgggagaacattcctgtcccatcgagtgtgagggcaatcgttgcattaaatcttcacaattatgcaagtggaagaaacccttggggaaatttgaagcctgaatatttggagaaaag

SEQ ID NO: 293682 - DNA, 377 bp, Zea mays
ggtgtaccagtctccgaggtgctagcccgccagatcgacgcccttgccgacggccgctcgtggtctacgacgccaccctcgccctgaaagcgcttggggtctgcatcttctcggctgagattgggagacaggcagcgtccgagcggcagtgggaggtgtacaggttcctcctggacgacagcagggagttcccgttgacgaacagtctcgctaacaggaaccgtgtggtggatagggtgaggaaaacgctgatgggatgctacaactagtagggctcctctcctcggcgtcgacctgtctgtctgtctgaccaagaataatgcaaagcttgaaggcaactaacgactggtgtttctagactccgttgtcgtcgtcgc

SEQ ID NO: 293683 - DNA, 331 bp, Zea mays
gttcggtatcgcgttgtcttcggtacacctttcctatccgatcgctacgagaccccaccccgagcggacctattctgaccccaacgaccactctctccgtcacaagtaatggcatacggcgaccgcattaccacctacgaagactgacacaacgatatcgagcaacgctatccgcactatgcctatggacctctagttgtagctgatcaactgggtgctgctcccatgtatgaacttgatcgtcaccaacatgatagcttcatcgaacaaaccatccgtcttgagcacgattcacatacaatccacgttcatcaggaaacacttcaactga

SEQ ID NO: 293684 - DNA, 179 bp, Zea mays
ggaggacgtccgagctcaccatccagtttgttgactggtgctcaaatggctttaagtgcggagttaactaccagagtacaaacgttctgcctgattctcacctaatgcaactgcacctcactaactgcatgacctcctactacaccattgatctgtcagtggtcttcccaatcgatcac

SEQ ID NO: 293685 - DNA, 398 bp, Zea mays
  unsure (1)..(398): unsure at all n locations
cccacgcgtccgcggacgcgtgggatttgctcttgatccatctatcactcgtttccgcctttcggagcctctccgccagcctattctcacagcagagccatctatctatacaagggtgcttaacccacaagataaatttattatttttgcatctgatggtcctttgggagcacttgacaaatcaacaggccgttgaaattgtccacagcaatccacgatcaggaattgcaaagaggctggtaagggcagcgttgaaacaagctgcacggaagagggaaatgaggtatgatgacctcaggaaagttgagaagggaattcgccgcttcttccacgatgacattacagtagttgctgtttacatagatcacggattactgcnagagagggatacttccgtg

SEQ ID NO: 293686 - DNA, 273 bp, Zea mays
ttggctaccctcgtcgtcgtctcactcaccccggcttctcgcatcgctgaccaaatataggggccggccttttccgacattcacaggggggacacgaaatcagcggccatggtctctattccggcgacgaccttgagcgtcatcttatacgtcctcttgtgtgcctcggctggcaccggccttgacaacgacgctatgcgactacgtcatccagggccgcgtatactgcgacacctgccgcgccgaggttcgtgaccaatgtcaccgagtaca

SEQ ID NO: 293687 - DNA, 263 bp, Zea mays
gcgctatacatggttgggccccatcttgtatcaagtccgccgaatcctgttcacttatgattgaaaaagactgataaggccattgctttttcacgaccagacataccaacacctgtgatccatagtccggaactgtcacaggagtatcgtctgcctctgattgaatgtaacagtgcaaaatgctccactacactctctggcagaggcacaccgttagggctacggccttctaggctgcagcgagctcattggcgtacagtttt

SEQ ID NO: 293688 - DNA, 132 bp, Zea mays
agtacgcgtagacggactcgtggcaatccaagtcgatcggctaggccaatgccagctactgcatgaccgaaagcgcgcgcgaggactgcaagcagctcttgcaggacgctgcatacgacctgatgggcatgc

SEQ ID NO: 293689 - DNA, 442 bp, Zea mays
gttgcccgacagctggaacctgaagggatcctttgcaccggttttggtcctgggaagctacttcgttctgataacggcaatttcttctgggctctgtgccagacaccgatctttgtctggcacaaatcctgtgtgaggtctcaagggcagcgagcacttgataatgtgcgcgctctacctccaaatgagtgtctcgagacacactctgatctttgtgacccggtgcccgagctggtcctttgtggagcgccctggtctgctgctggtcaccgcgtttctgctcgtccagcttgtcgcgacctttctcgctgtctacgccaactatggcttcttcacgatcaacagtatcttctgtggctgttccactgttgtctggctctacagcatcgtgttctactatcctctggacctgatcaagttcttcatacgcttcgtgctcagc

SEQ ID NO: 293690 - DNA, 321 bp, Zea mays
agatgcccgatggcgtacccgcatgggctttagcgagtaaccattccaggtagttccactagaacctgacggccagcgacgtgcaccacaacccgcagggctactaccactacggacagatcaacatcaccctcaccatcaaggtcatggtctacctcggtcacatcgaccgcaagcttcgatacggcttcaacggcatcttctacagtgacaccgagacccccctcaagctctccgagtacttcaacgtcacctaccgagtgttcagctacaaccagataggcgacatgcctccagtcgtttacggtccactacatgtca

SEQ ID NO: 293691 - DNA, 421 bp, Zea mays
  unsure (1)..(421): unsure at all n locations
cttctcccccgcggccatccgcttctacattgccgagatcgtctccgcggtcgccgagcgccacgccgcgggcgtcgtgtaccgtgacctcaagcccgagaacgtgctcctccgcgccgacggccacgtcacgctcaccgacttcgacctgtcccgcctcctccaccccagcaggtcgtccgcggagtcgtcgtcgcccccgcggccagcgtcgtcccgcggccaccacaaccgccggtcgcgcgtccccgcgcggagcgactcggttctcagccagcaggtcaagtcgtactccaactccaacaactccaggccccctcaccagccctggtccgcggcgtcgtcgccgcggcagcagctccagagcctggtccgctacatcatggggagcggcgacgggaccggngtgggcaggaagagc

SEQ ID NO: 293692 - DNA, 249 bp, Zea mays
cagccccatatccatgttccaggtgacttttctcaagtgcggcggcgtggtgctaggaaccgccatccaccacgcggccatggacggcgtgggcgcgttccagtttatgcagacgtggtccggggtggcacgcggcctggacgtggcggaggcgtgcgggccgcagccgttccacgaccggacgctcctgcacgcgcggcgcccgccgtgcccgacatccgaccacttcgtctactccccggcgttcct

SEQ ID NO: 293693 - DNA, 386 bp, Zea mays
atcaccgcggccagcgactacaaccagtcgctgcagttccgggacctggacagggagaagaagaagatcgacatgcaggtcacccgcgacggctaccgccagatagtgtccatatatgacattgtcttcggggatatcgtccacctgtccatcggcgaccaggtgccagcggacggcctgtacatcgacggctactcggtagtggtcgacgagtcgagcctatccggcgagagtgagccagtgcatatgtacagtgcaaaacctttcctgctcggcggtaccaaggtgcatgacgggtcggccaggatgctggtcaccgcggtcgggatgcgaactgagtggggaaacctcatggaaacgctgagccaaggctgtgaggacgagac

SEQ ID NO: 293694 - DNA, 360 bp, Zea mays
accacgcgtccgctcacgcgttcgacgacgcttggggcgccgtccagctcggcgaccgtgtgtcgctgggagaacgaggtgctccgacttgtcgaggagtgcagaggcgttgtcatggacatccaggaggagatgccggcggacgacccggtgttgcgtccctggcagatggcctacccggctgccgtcatgcccatcggcgccccggacatgctccactactgatgattgccttcaccaaccacaccaccatacatctgaggctgtcagctggggctggttggcaacaatacaagaagaattggctgcctgttaacaacattgacatctactacctacctggctgctttgagaattaca

SEQ ID NO: 293695 - DNA, 411 bp, Zea mays
  unsure (1)..(411): unsure at all n locations
cggacgcgtgggccgctctcgtcttcgccatactcatgaccgccgccgttgcggagcaggggccggcgcccgcgccaaccagcgacggcacatcaatcgacctggggattgcgtacatccttatgctggttgccctagtgctcacctacctgatccacccgcttgacgcgtactgcccctacaagctcttctgatccctgcgcctttccgtttggtcatgcggntaagggcgcgataggattttgagttaggcaacgtgcttatgtgaggctgggaggtttaggatgatgattgcggtcatctggtcttgcttggtatgatgtattggaggctcgaagctgctggtgttctgattgagtttgtatcggacggactccatgatctttgagctcagtccctcagttctgctct

SEQ ID NO: 293696 - DNA, 330 bp, Zea mays
  unsure (1)..(330): unsure at all n locations
gcacacagctcatcagttcttcttcgttgtcttggctagctgcctagctagctagctggttcctcactcctctccgagaaccccctttttcatctctctctctcgcctagctcctttcgcgatgttatcttctctgctggcctcacaactcgagagagactcgtgaaaagaatccagatatataaagagatcgagggcagctagcttaattattagcatgtcgatgagcttcttgagcatggtggaggcggagctgccgccggggttccggttccacccgagggacgacgagctcatntgcgactacctcgcgcccaagctcggcgccaa

SEQ ID NO: 293697 - DNA, 387 bp, Zea mays
ggcgacggcaagacgacgctgcttcactttgttgtccaggagatcattcggtcagacgacgtgcgtgcggttcgggccgccaaagagcagagcaacagcagcatatccagcgtgacttctgacgatctcaccgaggatgtcagcgacgacacggagcactacaagcagctaggcctgggcgtcgtttccagcctgggagacgacctccagaacgtgcggaaggcggcaatcctggacgccgatgcgctgaccatctcggtggcgagcctggggcacaagctggtgaaggcgaacgagttcttgaacacgggcatgaagagcttagacgaggacagtgggttccatcgcaagcttggcgagttcatcgagcagtcccaggtgcgcgtg

SEQ ID NO: 293698 - DNA, 382 bp, Zea mays
cccacgcgtccgactagatctgatatctcatgttgaatcttcccatggggatatgtggacagattaacaaaatgaacttattgaatcacctgctgagatgctctatggatcgattcatgttcggtctactactacaagtgaagggctgtccgcattgctggataagtacaggaacgttgagttcggcagatgccctctagtgtattgcagcggccaaccatgcctttctgtcgggcaatcggatgtttctcgtacaagtacggcgaagatttactgccctacatgtgaagacatctacactgcaagatccaaatatgtaagcaacatcgacggcacttactgtgtgacaacattcccccacttgttcctgatgacatacccg

SEQ ID NO: 293699 - DNA, 353 bp, Zea mays
  unsure (1)..(353): unsure at all n locations
cggacgcgtgggccgacgccttggcgctttgagccgangccgccaacaaaaaccaggtgggcgttacccctcggcctgccaatgccttcatcggcctcatgtacgggctgttccgggtcatgggctacgtcccgttcggggacgccacgcgggacatcatcaccaccaacctcggagcccggtggctgtcggccgccgtgcagctggggctctgcatcaacctcttcttcacgatgccggtgatgatgaaccccgtgtacgaggtcgccgagcgcctgctccacggcaagcggtactgctggtggcttaagtggctgctggtcgtcgtcgtcggactcgccgccatgtacgtg

SEQ ID NO: 293700 - DNA, 367 bp, Zea mays
tcggccacgcgttcgattccaggaagccagtttgatggtgctgggacttaattgggcaccgagtctttatggtattttactggctgacccccccaccaactctggcggaaacacaaagttttgatttgcaggcattccgttttagtgcacacatagagtttctgaggcaatcaagagttgttcgaccggcgcttctggtgtcaatattatgtgcttacaagaagcctggacaatgccttttgccttctgcacacgcgagaaaagatggtgtgaatttgctgaaccagttgatggagaatctactcaattccttcaggaacttgcacagaagtataacatggtaatagtgagcccaatccttgaaagg

SEQ ID NO: 293701 - DNA, 385 bp, Zea mays
cggacgcgtgggcggacgcgtgggcggtcgcgtgggcggacgcgtgggctccgacggggactttaagcacacccacgctgaagccggtacgctgtccatggctaactacgggcccgactccaatggctcccagttcttcatcaccaccgtagacgaaaaccggttgcccaagaagctggacgggcgccacgtggtgttcggcaaggtggtgaaagggatggacgtcgtgcgcaagatcgaagccgagggccagctcaccggtgtgctcaaggccaaagtcgtcatagccaacagcggccagctgccagcgcccgccgacggcggccatcgtgacctctgatcgatgacgaggagaacgactcacgatccatcaatccgatcgatc

SEQ ID NO: 293702 - DNA, 440 bp, Zea mays
cccacgcgtccggcaatcttcttttgaatgcaaggcttcaagtcacggtgaagaacatttgctgaatgtatatacttcaagccacgaagaatttgataaagaaaatactgacagtgctcctctgacaaagcttgatttgaacgaataatttgatgcagatcagtatccatcaattcatatgcaatatacacatcattgaatgcagccctctgcgcaggaggtatgatatcccttattgcatatgaattgatggatactgacagtgctcctctgacaaagcttgatttgaacgaataatttgatgcagatcagtatccatcaattcatatgcaatatacacatcattgaatgcaagcctctgcgcaggaggtatgatatcccttattgcaacaatattctcgtggtccatgtggcggagcaacttgatctcgccgaacgtg

SEQ ID NO: 293703 - DNA, 336 bp, Zea mays
cggacgcgtgggcggacgcgtgggcggactcgtgggggcgcgtgctacaagatcgtcctgagtgtgaccatctcggtgatcacgtcgtgctgcaccttcggcttgccgtggctgacggcgtgcaccccctgcccgccggagctcgccagtaagtgcccgaccatcgggcgctccggcaatttcaagaacttccagtgcccgccggggcagtacaacgcgctggcgtccctcttcttcaacaccaacgacgacgccatccgcaacctcttcagcgccgggtacgacagggagttcggcgtgttcacgctcctcaccttcttcaccacggtgtacacc

SEQ ID NO: 293704 - DNA, 391 bp, Zea mays
cagctcgcgcgagctccatcggggacaaggccatacctcaacggagtgcaaggtcggccgggccgttcgggagcgatggatgcgcatagctggtggtgcgggcatgggtaccggcacacggcgcaactctcttttttcttgtgataacagatcaataacatatcataccttccaattgcatagctgaatcgaaacatgtcgcgtaggatagttcggctaggccggagacctgctgttggggacttgttctcaaatgctatgagttaagaacaaggcaacacaaaaatgttaatggttaaagtccttcgtccttcgaagcattatctcccttaggatataatgatcttcagacgaaggtcatgaaggatgtaccttcatcatcacagtatat

SEQ ID NO: 293705 - DNA, 405 bp, Zea mays
atcgacctgacggggcagggccacgaaaagctcctctccccagttaccgacgttaagtacgtcccgaaccagtggtgcgtgttcgacgacggggccgaggacaagtccaagctgcctagcaacgtccagtatgcatgtgcgagcggcgactgcacggcactcggctatggctgctcctgcaatgggctggacgagaagagcaacatctactacgcgttcaacatgtactttcagatgcaggaccaggatgtgcgcgcctgcgacttcgaagggcttgccaagatcacagacaagaacgccttcacgcgcggctgcctgttcccggtccagataatcagtgccagtgctcgggtggcgccagctctattgatggcggggctattggcattgcttgtgaatgtgaat

SEQ ID NO: 293706 - DNA, 458 bp, Zea mays
cccacgcgtccgcccacgcgtccgcccacgcgtccgcccacgcgtccggtggatgcatacactcgttaaatctcctcacttcttctccggatggtttcagttctgcttttccctctcgcccgccctagatccgctgggatctgagtctctgtttgatgctgctttccaagccccgccatagatccgctgggatatgagtctctgtttgatgctgttttccaagcctgaggagttccggccggagtggttcataggcgaggagaagagcgtggacgcaaccgtcggcgggaaggcgaggagaagagcatggacgccacgcgacgtcatacaatcgcattattgtttggttggtactctaaagacgcctcttgttctaatttattgcctgcagaatcatatgctaaattagaaacagacgcttcgtttcttcctaaatagaaatactaatttactgggtt

SEQ ID NO: 293707 - DNA, 440 bp, Zea mays
acgatcgctcgaatgactggcttgtcgatataattaattgcaacattggtcatgatgctagctcggcatgtcttatcggtgtgctgcacatctatggcttcgagagcttcacggtgaacagattcgtacaattctgcattaactatactattgagacactgcatcgacagttgactcatcacgtgttcaacacggtacacgacgagtaccctggacagcaaactgattgaaggcatattcagcgtggtgacaatcgagatgctcttgaccttatggagtggtaacctcgtggtggtatcgtacttcttgatgaagcatgtatgctgcacactgccactgacgagacatgcgtgctgaaagtctaccatagttttgaaaagcacaagctgcttgtgaagccccagctatctcgtgacgactgtacaatctgtcactacgcc

SEQ ID NO: 293708 - DNA, 378 bp, Zea mays
cccacactctgcctgacacgtgggttatgcccctgtttactcctaccgaacttaccaccagggaagatcttatgcagattccgtcagcacccctgttgaaggcctaccacactgtgtacgaggactacctgtcggagcttgacaaggtcatcaaggttctccatgaccttgtcgacgagcagaattacgcctcgctcatgctcctgcatccatggtacttcatacacacactcgatgtgcgcaccaaaaccggacgccccttctgcgcctttattaacccagtctaactggcgcccggagactacggcggactggcaagtgccattaggctgctatgacacatcaacgacgagtttctcatcctatcatactctgact

SEQ ID NO: 293709 - DNA, 354 bp, Zea mays
gcgtccgcccacgcgtccgcccacgcgttcgcggacgcttgggcggacgcgtgagtgccaacttcacgagcttgtgtgaatagtctggggtaccgactgcataaattactgcagattgcgacacctgtaaaagttacacaagaacatcttgatcgagcttaccaggcaaccaaatctgcagatctgatgaacttggaatcaaggtctatagcatctgaagatattggaagacaggttcttacttatgtggaaaggaagcccatctagtatttcctgaaaacagatgacgagatcactttgaatgacattgtcgtaaccgcaaaggagatgatgtgtacaccactcactatggca

SEQ ID NO: 293710 - DNA, 305 bp, Zea mays
  unsure (1)..(305): unsure at all n locations
cccacgcgtccgcccacgcgtccgcccacgcgtccgcccacgcgtccgggggctctcccaggaggacctcgtcctgctctccggcgcgcactccatcggcggcgcgcactgcttcatgttctccaaccgcatctacaacttctcccaggacgccgacgtcgaccccacgctggacccggagtacgccaagtggctgcgccagatgtgcccgccgcggcagcccggcgacgaccccgagcaagcgcccaaggtgaagttcgacgcgcagacggnggagcggctcgacgtcgcgtactactccgagc

SEQ ID NO: 293711 - DNA, 448 bp, Zea mays
ctccttctgctcggaacgcacacaccgaccggtacccgatctccgatccgctcgtcgatccgaagatgcagatcttcatcaagaccctcactggaaagactattaccctcgaggtggagtcttatgacaccattgacaacgtcaaggccaagatccaggacaaggagggcatccccgcggaccagcagcggctcatctttgctggcaagcatcttgaggacgggcgcacacttgccgactacaacatccagaacgagagcaccctcgaccttgttctccgcctcaggggaggcatgcagatcttcgtcaagaccctcactggaaagactatcaccctcgatgtggagtcttctgacaccatcgacaacgtcaaggccaagatccaggacaaggagggcatccctgcagaccagcagcggctcatttttggcggcatgcagctcgagga

SEQ ID NO: 293712 - DNA, 304 bp, Zea mays
gcgacaacctcttccattcaaccctgatcatctccacacccgcctcaccccgacccggggactggtctgattaacaaggagagtcttaacctacatcacgacaacgcacaaagcaaccaactccaattgctaactgccgatgacatgctcacctgaagatactgcattcctttcattaaaagctggtgacggtgtcattaagggtagaaaagaacgagcttgtgaacgtcaaatttctgcgaagccatggatttctgcgcttacaatatgttgttttcaatcggactgttcttccttattcttg

SEQ ID NO: 293713 - DNA, 351 bp, Zea mays
cccacgcgtccgcccacgcgtccgcccacgcgtccgagaatgtacacggaggtaaatattgcccatacataccctggaacaaattgtattaattgtcacagattgactgcactcagaattacacagcattcttttggacatttggtgggtaaatatgaaatctctttgggaatatacctgtatatgcagtggtagagaatatcgctgttccttttatggtggatgcactggaaagggaagaattgtactctgaccagccacagcatctcttttgatcatgtctatattctgctctcagtgaaaaaagagatttcattatgtcatttaacacggaccaccatttatgtgagc

SEQ ID NO: 293714 - DNA, 415 bp, Zea mays
  unsure (1)..(415): unsure at all n locations
cccacgcgtccgcccacgcgtccgcggacgcgtgggtttttccatcggtccatcgaaccacgattcccacgctatagtttttgtacacaagcaggatcattttaagaagatatatgtcaacaacaaccgctacattacgacagccaccaccatgagcaaccggtgctctggatcagaccaaaaaactagagttcttcaatgtttcgacaggtctggcgaaccacaaacacaaggatgttttttcatggttccttattgtgccctttcgggcacgatgagcatcctcctgcactagtcggctgtccagctctgctccacaatctcgcggactttgcggntgtactcccgctggttctcgctgaacagtcttgcggcttctgagtttgcaagggagttccggtttggatcacacagc

SEQ ID NO: 293715 - DNA, 342 bp, Zea mays
atctgagttaaaggagtacttatgctggtgagactgcaacatcaaagaaaaagagaagaactcctgcgtggtgtgacagaatattgtggcgtggtgatgggattgtacagttatcctactaccgcggggagtctagattttctgatcaccgttctgtttgtggaaccttcgctgttgaggttgaggtgcgaaacaagaagacaaacaggcgctcatcaaatgctgacatgagaattgatgctgaagagctcttacccacgggcaagggtaaaagagatgagaatcatgttgcacgcgaggaggataggctagtattgcagccggactcgcagatgccgtacg

SEQ ID NO: 293716 - DNA, 203 bp, Zea mays
acgctcgtctcacgctcccttcctcacacaagatatgaggaaaggtaccgcccttttactacgacatccacaaggtgcgaggggaatacacgtgcatatacgcggcggctatcatggccttggttccggtttcggtgactactaccggcgacgtcatactatgcctatgcatcgtgctctgctgtgccgctgatgacgacccg

SEQ ID NO: 293717 - DNA, 353 bp, Zea mays
cccacgcgtccgcccacgcgtccgcccacgcgtccgcccacgcgtccgcttttggaatactaaatttgccagacctgatcacttctgagaaaatttgctactggagataacaaatttcagttttatttcgcatttaaagatgcctattgttatagtatctgaggcagtaggacaggacttataagatacaacttccccaatcattcatgatacaatccatgaacaacttgagttatctattaggcactaagttactgctcaactaaaagaaatggaactaaactaacaaatacaaatgctacttaagtacatatgctatatcctatgtcaacgacgaattgcacagtggaatt

SEQ ID NO: 293718 - DNA, 398 bp, Zea mays
cccacgcgtccgagtatttccatcagacacgctgtctggatgtctataaaggaaccatctgtggcttggaaggaataaactttattactgtagcaacgcctcaccttggttcacgagggaacaagcaggttccactcctgtttggatctgttgcaatggaaaaggttgcttgccacatcgttcattggatatttaggagaaccggtagacatctctttctaactgacgatgatgaagggctgcctccactgctgcagcggatggttgaagatcatgacgatctctactttatatctgctttgcgagcattcagaaagagaatggtgtacgcaaacgcagactgtgatcacattgttggctggagaacatcatctattagaagaaacaatgagctttct

SEQ ID NO: 293719 - DNA, 315 bp, Zea mays
cccacgcgtccgttgtacgccaagaaggactacaagaccccctcatggaagaggtatttgcagatctcgcggcggttcttcttggagggggtcttgtacgccaagaaggactacaacctggccaagcaccccaagcttgatgtgcccaacttggaggtgattaagctcatgcagagcttcaagtcgaaggagtatgtgagggaaaccttctcatggcagtactactactggtacctcaccaacgatggcattgagcaccttcgcagcttcctcaacctgccatcagagggtgtgcctaataccctcaagaagtct

SEQ ID NO: 293720 - DNA, 464 bp, Zea mays
cgaagactggcgggcaccaataaccctgttcctacaggggtactatcatccaactgacgtcagtgaggcaaagcgcctcagacatcgaagccgggacttcgcactgattgagggccaattatacaagaaaggggtcagtcagccaatgctcaaatgcgtcaccgaaaccgaaggcatgcagatcctacgcgaagtccacagtggcacgtgcggctcgcacgcagggccaagggccctggctgccaaggtgatccgacaagggttttactggcccgcaatgatctgcgccgcaaatcgggtcacgaggtcctgcgaagcctgccagaagttctctcctcggtcatgcaacccctcgcaatatacaaagctgatcgcccatacatggcctatccagcgctggggcctggacatcgtcgggcccctgcccaccgctcatgggaaccttaagttggccttcgtagccg

SEQ ID NO: 293721 - DNA, 457 bp, Zea mays
  unsure (1)..(457): unsure at all n locations
cccacgcgtccgcggacgcgtgggcggacgcgtgggcggattctggattcatttgatgttggcgtttcgtttattgtttttctaattgcccattcattcatgccgttcgtgcccacgcatgcagcccatgaggatcgagcatggaggagcctagttcttgatccaatctcccagcatgcttgacgaacgcgaagacgaacgtggggcgaacgctgcatgctaacgcggttgatcttattcctaataatacgtagcgattcgggagattgatttttgatcatgcacaagcgatccaaatcctgcgagccgtacaggaagatggaggagcgcgtcgggtgcagcaatgccgcgacgtccttcgacgactccgncaccggcagggcgccgggcgccgcggcggcgcagtgcttcacggtgtcggtgttcctcgccaagatcaacggcgccgcgcgccacg

SEQ ID NO: 293722 - DNA, 335 bp, Zea mays
cccacgcgtccgcccacgcgtccgcggacgcgtgggcgtctccttctccctcctggctccagcacgagcggcagctgtcggagcacgacagttgcagcgtccttcaggggaggaagaaaggggacgacggcacgagtttaaaccaacaatctctcgtcatatatatcataatagagagtaggacgacaaaagccatgggcagtaatggcagagatcataggcgcggagtcccacgcccgccacctttaccactttacagggattgggaggaggaagaggtcgtcaaggctggtagacgtcggcagtcgccgttggcgcagtcgtcaacgtcgccc

SEQ ID NO: 293723 - DNA, 416 bp, Zea mays
gtcgcgcgtctaggttcactctctcactatagcgcccgctctgtcgcccttcgtgtacctgttcttcctcttctcactgcctgccactgagagcgtaagtcaaaggcacgaagtggctcagagcatacgccctgagagaccattgtaactaggcctgtcggcaggatagtagccgtcgactaatccctacaaggaacagatggagaagaaggcgcacatcctgatgaacaggtacaagcttgggcgcacgctcatgcaaggcacctatatcaaggggtaccacagacggaacctggctttcagagagagcgcgtgcatgaaggccatcgacaaggagaaggtgatgcgcgatggcatgatcgaccagatcaagcgcgagatctacgtgatgcgccgtgtacggcaccccaacgtga

SEQ ID NO: 293724 - DNA, 297 bp, Zea mays
acgccaaggctggctgcctattgattggacctgtaccatggatgactagaggctcgatattgggtcggggaagctacgtgcacgcgctatggacatgggaacggtagaggacctaatactgcagctgatgaacctaaagacacacattgcgacagaaagaaaggtacagatgaccgataccgagatccagcacatctgcatcaccgccaaggagatcttactctgccagtacagccttctagagctggtggcccccatcaacgtctgcggtgacatccactggcagttctcggacct

SEQ ID NO: 293725 - DNA, 373 bp, Zea mays
cccacgcgtccgcccacgcgtccgcccacgcgtccgcccacgcgtccgcggacgcgtgggcgggcaacggcgtcgtcaccgccggtgagaagctaggcgtggagcggatcgagctgccgctgatctacatctcgctgtcgcggaaggagaaggaagacgatttccttgcgatgaagggcaccaagctgccccagcggctccatgaaaagggctaagaacgtggaccagaccctgcaatctgtcttgccggagatgtggctgtccgatttgacgaggggacggtacgaggtgcgggagaagatatgcgtgacgaagacgcgaagagggctgaaagggatggagagcattgacagcgactcggagcctatagatg

SEQ ID NO: 293726 - DNA, 458 bp, Zea mays
  unsure (1)..(458): unsure at all n locations
gatcgatcgatcaaaaatccatcggcggcggccctaacccggccggtcccgtgtcaatcgtccgaattgaatgacaacgacaacaagctaggacggcagcagcaatgccggcccccggcgctgttctattttgatcccaggcccagcgatgcattggtacggtcaccaccgactgctattggtacggtcaccaccaccacagcagcaacagcatcgccctgtcgtcgtcgtccctgtccctccccgcctgcagcagcactagcagcatcacctactcctgccacctgcagcagcagcggcatcgtcgcaccatgggcggtcaccagctgcacctgtcgtccncgaccgcggtgctgggccacgtcaccccggcgctgcgcgacctctacgccgtggggcgcaagctcgggcaggggcagttcggcaccacgtacctgtgcacggagcttgtccacggc

SEQ ID NO: 293727 - DNA, 368 bp, Zea mays
cccacgcgtccgcccacgcgtccgcactaatccaagacaaaacatggctgtgaatgtgagaaccatgtggtcgtcgatgcgggctcaggttgcgatggttgtggcgttggtgttcttggtgagcggagcatggtgcgttcctgataaagggcctccaggtaagaacatcagggctacctatggcatggactgcctggtcgctacagcgacatggtttggcaaggttactgatgccggacatgaccataatggtggcggatttggatgcgcggacgtgaataaggccgactggactagtactggcacatgccgagtccatggtcattcaaaggatgccttgtgccgtgattcctgcttcgagatgatct

SEQ ID NO: 293728 - DNA, 341 bp, Zea mays
cccacgcgtccgcccacgcgtccgcccacgcgtccgggagaagaagaaaaggaacatttagacctgcctcactcacttaggcgtcttggagagtgtacattttatgatgatggcactgctaagggagagttgcctgaaacagtttattgctttgatggtgtcttctataattactttagcataggaatggatgctcaagtggcttatgggtttcaccaattacgtgatgaaaagccatttcttgcaagtggacctttatccaataagttgatttacgcaggatatacctgcaagcaaggatggttctttacgcaatgtattagtgatcctgagttaaaggg

SEQ ID NO: 293729 - DNA, 449 bp, Zea mays
  unsure (1)..(449): unsure at all n locations
cccacgcgtccgcgctgcctcgaggaccttagcctggcccacgagcttcgtatgctcgtatgcacccacggtgccactagcgtctactcgatgctcacgctcagtcacctctccaggggcagggcaccagtcgtcgccgtgtacctgttgcaccttgtcgagctcgcgacatcgcgcaagtacgccatcacgcagcagctataccacgcccgggatggtggcgacgatgaggacgagtggggctacgcacgtgagatcgagcatgtggcctncgccgtggctaccttcacctatgacaatgccatcctcgtgcggcagatgacggccatatccagcttgggctctatggacacagacgtgcgcaactgtgtggaggatgcgcgtgcgtcgctggtgatcatgcccttccacaaggagcagcgctacgatgggcgcatggtgtgccggca

SEQ ID NO: 293730 - DNA, 448 bp, Zea mays
cagcggatgagtgcgacggcgacgaggccggcgcgctggtcgccgccgcctgcaccggcagcggcagcgataccggctcgacccgggacgcgccggcggtgcggtccccgcgcgccgcgtgggcgctgttcgtggaggagtcgcggaggctgtgggcgatcggcgcgcccatcgccctgaacatcatctgcctctacggcaccaactccacgacgcagatcttcgcgggccacatcggcaacctggagctctcggcggtggccgttggcctctccgtcgtctccaacttctccttcggcttcctcctcgggatgggcagcgcgctggagacgctgtgcggccaggcgttcggggccggccaggtgtccatgctgggcgtctacatgcagcgctcctggatcatcctcgccgccttcgccgcgctgctcacgccgctctacgtgtacgc

SEQ ID NO: 293731 - DNA, 417 bp, Zea mays
tggcactaagaaccaaaagtatgataaaattagtgaaaagaaaatgcttacctcggcagaggtacttctttttgccaacacgaacattgtaatcctgtcatggtagctgttgcagacactgtttgaactaacattgtcttaaacagattctgtgcaaatcttacccgccggagttcgtctcatatttccactattgtcgatccctgcgatttgaagacaggccagattactatccaatgaagaagctctttcgtgatgtatctatacgggatggataccaatttgattacgcatttgactggactgcactcaagtacccttaaatgggctccaacaacaagctagttcaacaaccaagtgcaagaatggcttgggttggaccatcagttgagagaacagacaaagcttacatggggc

SEQ ID NO: 293732 - DNA, 378 bp, Zea mays
cccacgcgtccgcccacgcgtccgcggacgcgtgggcgcgccctgctgcccaagaagcggatccgcgcagggtgaccctggcgcgcaggacgggacgtcgtggatctggtgtccggtccgccattggccgtggcgacgccgtcagtcagtaagtgcgcggtcctggaatggtatagagctatcgtacaaataagttctgttttttttggtggctgtagaattgggaaagaggctgttgtttatgagggaggatgaatggggaattgaaagcttgtaaagagaattcctacagatttgttcgttgtatctgttaaactatacttgctgacagttcaagaataaatgatgagctttcacctgaaaaaaataaccatggtt

SEQ ID NO: 293733 - DNA, 338 bp, Zea mays
gccacgcgtccgcatcatcgacacgtacggcggctggggagcccacggcggtggcgcctgctccggcaaggaccccaccaaggtggaccgcagcggcgcctacgtggccaggcaggccgccaagagcatcgtggccagcggcctcgcccgccgctgcctcgtgcaggtgtcgtacgccatcggcgtgccggagcccctgtccgtgttcgtcgactcgtacggcaccggcacgatccccgacaaggagatcctcaagatcgtgaaggagaacttcgacttcaggcccgggatgatcagcatcaacctcgacctgaagaacggcggcaacaggttcatca

SEQ ID NO: 293734 - DNA, 371 bp, Zea mays
cccacgcgtccgcccacgcgtccgcccacgcgtccgcccacgcgtccgcaagctgctagaacgtggagaaaggtccaaggggatgaggaagtacaatgctatcgacaagtggaatactcagctgaagtccatttaccaaacattgtccaacagagtttgatgagaaggatcgctgctgctgcgtgcattgcacacctagcattgttgatagcctgttttgcggatttgagggcaactgcaaagaactgtctggtgacgcttgcgatagaatcctggatctgggtaaagttaatattgactacgaggtcgtctctgaattaaacaagataatcaagcgactacaagcaaaaagaagtgaacctatgacaaag

SEQ ID NO: 293735 - DNA, 239 bp, Zea mays
cccatgtatacattgttcctgtttgtttcgactttttgtagcttctggccaccaaagactgctgccaactgccaaacactcagcttttcagccagcttctataaaaatccgttggataaaacccttccaaattaaccataacatattatccggtgaatcctcgcaattataggtaatccgcactttattggaccctaaccccaatggcaaatttaattttcccccgttccaaccatggg

SEQ ID NO: 293736 - DNA, 430 bp, Zea mays
cccacgcgtccgcccacgcgtccggataaaattagtgaaaagaaaatgcttagctgggcagagattctgtgcaaatcttacccgccggagttcgtctcatatttccactattgtcgctccctgcgatttgaagacaggccagattactcttcaatgaagaagctctttcgtgatgtatttatacgggaaggataccaatttgctcagcgcacaactgtgtgtcttgatttttcttctgtttatcacggcattagtgccatgccgttttatgttacagtgttgtgtgctcgcaagcatccgaaaatatgcgtctgagtttagggttgggtcaaacttgtcgaatttggggttctgttataatatgttgagcatgaataaagatggatgctggtgactctgtcgccatcgccgtccatcatgagtgtcctgt

SEQ ID NO: 293737 - DNA, 374 bp, Zea mays
cccaaggtcgtcgacgcgttgagggaggagcacgacgcgatcgccaagaacaggaggggcccggatgcccccgtcacgtgggccgagtacagatcgatgaccttcaccaatcaggtcatcatggagatggtgaggcttgcgaacatcgtgccggggatatttcgaaaggccctgcaagacgttgagatcaaaggctatacgattccggcgggatggggcgtcatggtgtgcccaccggcagtgcacttaaaccccgacatctatgaagaccctctggcgttcaacccgtggagatggcagggcaaacctgaaatcaccggtgggacgaaacacttcatggcgtttggaggtggcctcaagttttgcgttggcac

SEQ ID NO: 293738 - DNA, 384 bp, Zea mays
catgcatgaagaacgaccaaccaatttaattaattaaggagtgtgtgcagtggatgggcatgccacgacacgacgtaccacgacgactgagtccctggcggagagcgcgaggacgtcggagcaggacacgactgcgccaccgcactccttctggaggcggtcgtggatgtcgctgatggacttgaacgcggtggggcgcaacgtgaggttgggcggcgcctgctgctcgcccgggccggtggctgagccgtacaggagcacggacgcgttgcagccctggacgaagcagtcgtggaagtggatgcggatgacgccggcggcgaagacggcgtacatgcgcacggtgtactgcacgaacctacgcacgacggacttcgacctggg

SEQ ID NO: 293739 - DNA, 436 bp, Zea mays
cgaggagatgcatgacgccgagttaggttgcagtttgaagaccaatgggccaggagtagcctacttctactgggttacaagagagcaaggctccttcgagtggttcaaaggtgttatgaactacgttgccgatagtgatcgcgacgatgtaatcgagatgcgcaattacctgaccagcgtgtacgaggaaggcgacaccaggtcagccctgattgccatggtccaatcacttcagcatgctaagaatggcgtggatatcgactcatgcagcaagattcgaacgcattttgcaaggccaaactggagaaaagtgttctctgattcggccaatgcccacaagaactcacgcatcggcgttttctactgtggatcttcaacactgaccaagaccctgagagatctttcgatagagttcagcagtaccacgacgactcgg

SEQ ID NO: 293740 - DNA, 398 bp, Zea mays
cccacgcgttcgctcacacgtccgcacacgcgtccgcccactcgttcgcccacacggccgatctttccatttccctatctgccactatacaattcgcgagttcttccttctctgccgccatggcgctctatgtggacaacacctcgtatggacgggagtacaacgtccaggatctctagcaagcgcacttagctcgccttgagattgatctggcccaggtcgaaatgcccgaactcatggcctgccccgcccagtttggcccgtccaagccctttgccggcgctaggatctccgcgtctcttcacatgaccattcacaccggcgaactgatcgagacccttaccgcgctcgatgccgaggtccgttggtgctcctgcaacatcttcttcacacaggac

SEQ ID NO: 293741 - DNA, 373 bp, Zea mays
acgcatgcgtccaagagcccgactcacctgtggttatgcacctgggcgttcctcctgtggtcatgggcgacctacttggcgctatggctggccctacacctagcgctggccctggccgcgcagcgcctgcgcctgcgcctgacggttccgctgagcaccatgcccgcggcgcacgcgctgctgatggccagcgcgtcaaccgccatctttaccgggacgatgctgtcggcggtggccgatatacgggacacgccgtggacatggcgacgccgaagccgcagcagcccgctgcggacactgctgtgcttccctgcccggacacgctcctcaggccgcagctttttctgggcctacgcctactacctggcccgct

SEQ ID NO: 293742 - DNA, 449 bp, Zea mays
  unsure (1)..(449): unsure at all n locations
gtctggatggcggatggcggttccacaaactctcctgctagttatgctggtcgtcgtgctagcgatgtgtcgtcgatgtcgccaactccagtcactccaatgctctaacgcttgacgtgcgcgttgtactcgacagccacagtaggttcacgcgtcggacccgagacaaatcctgacctacgacaatcgttgtacgagtaggcgtgacggatgcgtcaccaacgctggcgcgtgccgctacaatgacactcgcacgcatgggtacggcttgcacacagtgtacgtgagcactgtgctgttcggagaccgtacggnctgctgacggtgctacgaggtgctgcgcgtgtacagctctagcaggtgcaagcctgaagcggcagagctgatggtgacggtgaccgaactgtgcccgtgctaagaccaatgatgcaagccaccgcggtaacact

SEQ ID NO: 293743 - DNA, 435 bp, Zea mays
cccacgcgtccgggcttgctgagctggagctgatggatctagggtttgggttgcggtgatggtcctgcagcgcaggaggagctcatggcggaagctccggcgagccctggcggcggcggcgggagccacgagagcgggagccccaggggaggcggaggcggtggcagcgtcagggagcaggacaggttcctgcccatcgccaacatcagtcgcatcatgaagaaggccatcccggctaacgggaagatcgccaaggacgctaaggagaccgtgcaggagtgcgtctccgagttcatctccttcatcactagcgaagcgagtgacaagtgccagagggagaagcggaagaccatcaatggcgacgatctgctgtgggccatggccacgctggggtttgaagactacattgaacccctcaaggtgtacctacggaag

SEQ ID NO: 293744 - DNA, 300 bp, Zea mays
gaccccgtacggtttctcggaaggcaagctttttcttggcggcggccaccttaaccggccgcggttgccgggatgtgccgtaagggtggtcgataccgccacgccttcttggaagccttcccaagggcaggaagcaaatactggacacccatctcctcctagatgttcactcttaagtgctggaagatcttttgctggaactcagaatgtttcaagtctgcagaaggatgaagcatggaaagtgaatgtccgcatccatggttgcaatcttgaccagggttatctatgtggaacgatgga

SEQ ID NO: 293745 - DNA, 450 bp, Zea mays
  unsure (1)..(450): unsure at all n locations
cccacgcgtccgcatttttctcttctgctcagcgccccggcatccaatcccccctgccgtgggccgtgctctctccggtatcccaccatggatatgccaaatgacacttgcccttcaccaaaactccacacaagactgaggctgtgggaatttgcggactgttatgtttttgaaccagttggtcttaatgatcttttactgtcagtcaaccggatcaatggatcaatgaatctagtggaggaattgccacagcatggcccctctataaatccaaaagttcaaatagtgtttggtgtaataggagtgctaaaacttgcagttgggacatatattctggtgatcactgaccgtgattgtgctggatcctacttgggacatgcagttntcaaagtgagaggtctgagagctctgccgtgtaataattccctttctgcttctgctgaacagaaa

SEQ ID NO: 293746 - DNA, 337 bp, Zea mays
cgctcgggcaccagtttgaaccgcttcccttcccttcgattccggggttcctccttacccgattgcccccgaaggaccgggccggcggcggcaaaggcaaaggcaaaggcaaaatgttcggccccccgccgaaaaaaagcgacaccaccaagtactatgagatcctcggggtgcccaagtcggcgtcccaagacgacctcaggaaggcctaccgcaaggccgctatcaagaaccaccccgacaagggcggtgaccccgagaagttcaaggagctcgcacaagcctatgaggttttgagtgatccagagaaacgtgagatttatgatcagtatggtga

SEQ ID NO: 293747 - DNA, 266 bp, Zea mays
aaccctgaaggtggattcgtttgacaccattgacaacgttaaggccaagatccaggacaaggagggcatcccccaaaaccaggacgggctcattttcgctgccaaacagcttgaggacggttgcacgcttgctgactacaacatccagaacgagagcacactccaccttgtgctccgtctcacgggaggcatgcagatatctgtgaaaaccctgaccggcaagactatcaccctagtggtgtagtcctctgacaccattgacaacg

SEQ ID NO: 293748 - DNA, 361 bp, Zea mays
cccacgcgtccgctccaacgcctcctctcgcccgtccccatttgagacaaatccgcgtgcgtccatctagagagagagagagagagagaggaagcttctctgattccgcgggtcggctcgcccggacatgacagagataaagcaatgattcgctccggctagcatcgcatctgatcgatcactctcaatcccctgcagctcccagccacggcaccacgggcgtcgatctctcccgagcatcagcgccgacgcgggcctgggggcagcgtagatctcccaccctgctgacaccattgacgcctagccggccgacccattcaggatcggacacgtacaagaacgaccagaaggcgcgcacctc

SEQ ID NO: 293749 - DNA, 277 bp, Zea mays
cccacgcgtacgaaggaaagttacagatgattattaaacgttgcatcatgctggttgtggtcatgaggaaatgctggacaaccttggctctttacttgaacccaactgtacacataacccacacgtccaagctactgaagatatcaccttcctggagaccattgatactgctgaacccctcgcaaggatttcacctagtgactacgcttataagcatggtgaactacacctatgacaggagtttgcaataaccccgttggcgatgaactaccagggc

SEQ ID NO: 293750 - DNA, 321 bp, Zea mays
cccacgcgtccgcccacgcgtccgcccactcgtccgcccactcgtactcccactcggtgggatcctcatcagacattacaccaattgatcaccaaaatatatcgctttaataccaactactcatgtcattgtactgtcggcaacaaatctagctgatgtttctgatcctgcccttaatcgcactggcagatttgaccgtctcgttatgctttaagctcctgataggtttggaaaagaatcaattctaaaaattcatgtcaaaagaagatagcttccactgaataaacatgtacatctaatcaatatagctgcaatgacaac

SEQ ID NO: 293751 - DNA, 362 bp, Zea mays
gacaggcgttgctggaggtatgatgcacgcatacgatatgggcggattccctgggggggatactgccttatcctcggctgcccaaattgcgactctgacttctgaccttgcaaatgctaatcctgaacagcaaccaacgatccttggtgaaaacctatacccactgattgagcaactggaaccaaaccaagcggcaaaggtcactggaatgcttttggagattgatcacactgaagcacttcaactgcttgagtaccctgatgccctcaagtcaaaggtagctgacgcgatagatgttctacacaatgcgtcccatcagcaaaacgcaaacacttggaccagtcagcttgctacattatcac

SEQ ID NO: 293752 - DNA, 428 bp, Zea mays
cccacgcgtccgcccacgcgtccgaagaaatcttacatgccatcccagagaaaacaacgcaaattctgcaattgcccagtggaaatggccaagaaatcctacaaagatgcttgcttttggtgtccacaagcatatgccaatgacatggactcctcagaagaggatgaattggatgacaatttgaatgatatttttggccttaatgatgatggcattacttcgtctgtttctgcctccagggaccagctaaagtataacctcatatcttgcaaacaaatggttggtatttttgtcacagtctgggcaaagaaagaattaatgcagcatattggacatttgagaacgtcctgtgttggtcgcggaataatgggatatcttggaaataagggatgtatatcagtaagcatgacactataccagacaagctt

SEQ ID NO: 293753 - DNA, 314 bp, Zea mays
  unsure (1)..(314): unsure at all n locations
cccacgcgtccgcccacgcgtccgcccacgcgtccgggctgcccctgcatccaccacggcggcggcggcggcggcgctgctgcttctgctcgtgtcgctcgccgcggcggcggacatgtcgatcgggtcctacggggagcgcaacgaccaggaagccccgcggatgtacgcggagtggatggcggcgcacggccggacctacaacgccgtcggcgaggaggagcggcggtaccaggtgttccgggacaacctccgctacatcgacgcgcacaacgccgncgtcgacgcgggcgtacactcctttcggcttgggc

SEQ ID NO: 293754 - DNA, 422 bp, Zea mays
gccttgaaggagcaagggttgtacgacgccgacaaaatcaaagaggtcatcggaggtgccgactccgacaacgacggaaggatagattattcagagtttgtggcaatgatgaggaaagggacagctggtgcggagccaatgaacaacaagaagaggcgagacgtagtcctatagtgggtcagcaagtgtgtaatgtgtataggagctcaagcaagcaaatttgtgtatcagtacacagatgcaatggagctacttttgcggcttagttcacggatggctgtgtacattggggcattgtttgcgggggattttaatgctatgcatacttagggactgagaaagacatggacgagttcatgatgcgtgcagatcagtctggaagtcctggaccaaatagagagaaaacaataggatgacgattc

SEQ ID NO: 293755 - DNA, 384 bp, Zea mays
agcaggcgggcgcggagggccaccgcgacgccgcgggggtgtggtacgtgccctactgggagggctacgacgacggcttcgaccgcgacgcgcacgacgccacgcactacatggagcagatcaagctcgtgggcgccgccacgttgggggccgtcctcgaccgcctccacggcgtgggccgccccgtcacgctcgtcgtgtacacgctgctgctgtcgtgggtggccgacgtggcgcgcgcccgctccgtgcccgccgcgctctactggatccagccggccaccgttctcgccgtgtacctccacttcttccgcgccacggacggcgtcgaccgggccatcgccgcggcgggcggcgacccgtgggcgagcgtccggttcccgg

SEQ ID NO: 293756 - DNA, 279 bp, Zea mays
cccacgcgtccgcccacgcgtccgcccacgcgtccgcacacgcgttcaaccacgggtggggtacattgacggacgtggtaccccatgtctccgatcagagctccgtacaattcttagatggatatgacaatgctaatccgtagaaagatgatcaactgtagctaggtctctttctagttgcaatgaacctcttgcaatcactacatagcattctacatagtgatcatcgacatcttgttcttctacaggatgtacaacaacatttccgtgaactagatc

SEQ ID NO: 293757 - DNA, 423 bp, Zea mays
cccacgcgtccgcccacgcgtccgcccacgcgtccgcccacgcgtccgcccacgcgtgcgcccacgcgtccgcccacgcgtccgcccacgcgtccgtaggcgccttcttcgtcccacgctccgtctttatttgtaatctgaagcttacaggaacatttgagtggatcatggacggattggtaggcctcttgaaagtccgggtggtgaggggcatcaaccttgcctaccgcgacgcaagaggcagcgatccgtatgtcgtcctacgacttggcaagaagaaacttaagacgagcgtgaagaagagatctgtgaaccccatctggcacgaggagctaactctgaccgtcacagatcccagcctagctctgaagctggaggtgttcgacaaggacacgttcagcagggacgacccgatgggggacg

SEQ ID NO: 293758 - DNA, 411 bp, Zea mays
cccacgcgtccgcccacgcgtccgcccacgcgtccgcccacgcgtccgattaccaggcgcagcagtattaccaggcgcagctgtatttccagccacagcagcagcagtattttcagcagcatcaacagacgttggcaatgccaatgccaaacatgtatcaccaccagtatcagtactctgtgcctacatctggagcttcgaacccatttggtgatcctttcagtgaccttgccccaatgggtgctcctgcaaaacagagcaactcagtttttctctgaactggttgctacttctgagtctgatcattcaattggtagagcagcaaacctgtacagcacttgttccttcgctaagtggaggtgttgtatattgtctttcttttgcaatatccaaatcttgaaatataacatt

SEQ ID NO: 293759 - DNA, 422 bp, Zea mays
cccactgctataggcagcccacatgcgcgcgcactcccaagtcccaagtcctaagctagccagctgagctcgctcccagtccaagcgccggcgccaccaccgcagctgctcgctggtcaccatgagcaaggagaagcaccaccgcgactggatcctccggcgctgctgtggctccctcgccgcctgcatcctgacgctggccgccgtcgtcggcttcatcgtgctcgtcatcttcctggcgctgcgcccctccaagccgtccttctacctgcaggacgtgcagctgcgctccatcgacctcagcgacccggcgctctccctcgacctccaggtgacgatcgtgtcgcggaacccgaacgagcgggtgggcgtgtactacaagacgctggacgcgttcaccacgtaccgcgacgaggcggtga

SEQ ID NO: 293760 - DNA, 419 bp, Zea mays
gtctctcgttgcccacatagatatgtttccatggttcttagattcttctctatgtttgcagataagatcaatgcataaatgggagaaggtcagtttggatggccatgtcttctgaaataattgattaaactcgcgtttggcatgctgtgcaacacatgcagcaggttatgtttgtaacgaatgtgtctggaatacattaggtacctttggtcaggtgttggagtgttgggacaaggaaaggaaagaaatggtggctatcaaaatcattaggggcattaaaaagtacagggatgctgcaatgatcgaaattggcatgctcgagcagcttggtaaatatgatgaaagtagatctaggtgagtttgctgggtcggttaacacccttctgtatgctttacattcataagattgcttgcatata

SEQ ID NO: 293761 - DNA, 405 bp, Zea mays
cggacgcgtggggaggaaggtgggagagaggaaggagcagaggagagagggaaaagagggagcaggcggcggctgagaggatggcaggggcggcggccacagggaaaatggcggctagggttaggatgttgggcctaatggcgtcattaaacttgtggacatacccgtttcatcattgttgtccttaaacaactccaaaagtgctgctgccttttcctccccctcctcgcgtcgagtggctccacgcttccacttggttccgaagcactttctgcaatctcctcccatttctggtgtgcttcagctatgcagttcagcagcgtgcttaccctagacggaaaagcgtgtatgagcccagtgaagaaaagcagtggaggttatgggaatgagaggatgaggatcaac

SEQ ID NO: 293762 - DNA, 416 bp, Zea mays
ctcttatccacccgcgcgcccaccgccgcgcgcagcaccgcgccgcccacccgcggtcaccgcagcgccccaaatgccgctccaaccctagcctctcgccatgcctttcgatctcgggcggccatgggaaactgatgccgctcgccggtcgccgtcgcgcgggaggacgtcagctcctcgcactttcccgcatccacctcgtcatggagctctgcgagggcggcgagttcttcgaccgcatcgtcgcgcgggggcactacaccgagcgcgccgtcaccaatgtcactcgcaccatcgtcgaggtcgtccatttctgccatcggcacgacgtcatccaccgtgacctcaagccggagaacttccttttcgccaataagaaggagaactcgccgtcgcgcagcgcccctctcgatatg

SEQ ID NO: 293763 - DNA, 437 bp, Zea mays
cggactcgtgggcggactcgtgggcggactcgtgggcggcgtgcacatcagctgggtgcgctcggtcaccatggactcctggaccgaggcgcagctccgcaagatggaggccggtggcaacgaccgactcaacgccttcctcacagctcgcggcgttcctaaggagacgccccacgtcgccaagtacaacttcaacgcctcagccgcctaccgcgaccgcatcgccgcgctcgctgagggaaagccgtggactgacccgcccgtggtcaaggagactcccggatctggcgcccccgcccccgctaggaagccgcccgtgcacacatctgccgactccggctgcggctggtgggacgactgggacgacgattttcggccggacatgatgcggaatcagtcggttggatcgttcgtcgacgcgggtgcgcagtcaggga

SEQ ID NO: 293764 - DNA, 448 bp, Zea mays
ctacgaggtactcaccgagcctctcaaccaccatgttgcactgtccaggggtcatgggctcgtcgtagagcaaggcctgtgattgaatgcatccaaacaacgacaccaacgccaacattaattaattagtagtctccatgccctgggattgtgcgtggccgctccgttaaacaccacccatccttcgttcggcattttttcccccttgtttatataattttattgtatcgttttggcaaataattttgtgattcgaccccaaagcaagtttggttgtcttacgatttgtaaacctggaacaatatataatgtgattgaactgctttgtctaaaaaaatagaatctaaatatgcaaaccccgtggccgtcaataaacgattaaacactaacgtactaaaggccacaaaacagaaagtcgctaacaaagtacaaatagtccgtgcatggc

SEQ ID NO: 293765 - DNA, 440 bp, Zea mays
  unsure (1)..(440): unsure at all n locations
gatctctgctcccgatccatctccggctgccgcgcgcggtagatctccgttcggcagcgtgtgatctgcccgatccgtgcggttgggtctggatcgggtggtgaaggtagcgggcgcggaggaagatggggctcgcgttcgggaagctcttcagccggctcttcgccaagaaggagatgcggattcttatggtcggtctcgacgccgccggtaaaaccaccatcctctacaagctcaagctcggcgagatcgtcacaaccattcncaccatcggtttcaatgttgaaactgttgagtacaagaacattagcttcacggtctgggatgtcgggggtcaggacaagatcagacctctctggaggcattactttcagaacacacagggtcttatctttggtggggatagcaatgaccgtgaccgtgttgttgaagccagagat

SEQ ID NO: 293766 - DNA, 447 bp, Zea mays
  unsure (1)..(447): unsure at all n locations
cccacgcgtcctgtgctacggccctacgcggcgcagggccggtcgcagttccaggaggagggggaggtgctgagctgcatgcggcaccccaacatggtgctcctcctcggcgcgtgcccggagtacggatgtctcatgtacgagtacatggccagcggcagcctggacgactgcctgttccagcgctgcggcggcgcctgcgggaccgtcatccgctggcagtaccagttccgcatgtgcgccgagatcgcgacggggctgatgttgctgcaccagaccaagccccgagccgctggtgcacctgcacctcaagcccaggaacatctgctggaccgaactacttgagcaagatcagcgacttctggctggcgcggctcgtgcctccgtccgtcgncgacaccgtgacgcagtaccgtatgacgtgcaccgcggtgaccttctgctaca

SEQ ID NO: 293767 - DNA, 438 bp, Zea mays
gtctgggtcgctcgctacattctggataggatcacggagatcgcctgtgtggtggggacgggggaccctaatccgatcccgggcgactgaaacggcacacatgcgcactctaactacagcacggagtcgatgaagaaggaggtcgtatactaggtgatcaatgcggccatcgagaagctgaagctgcggcacatgtagcacatcgcggcatactgcgagggcaactagcgccggctcaccgtcattcacgagacctcctacatcaacacgttcagctggggcgtgaccaaccgatgcgcgtcaatgctcgtgttccgatagacggatcatatcgacaaggtctacttctaggaccgtcgcccagcatccaacatggacccatacgtggtcacctacatgatctccgaaaccaccatcatctggaagccctgaggtcta

SEQ ID NO: 293768 - DNA, 392 bp, Zea mays
cgcctgtcttgctgaagctgaactgctgatccgtcttccaagctgtggtgtcatcccctgagttctgatccaagatgtatctccagtattacatcaatgagaagggggacaaggtctacaccaccaagaaggagtcacctcttggggtgccgacgcagtctgctcacccagctcgcttctcaccagatgacaagtactctcgccagcggtacctgttgaagaagagatttggacttctgccaacgcagaagccagcactgaaaataggtatctgaggaaacatatcaaacactgctaggcactactatgacatctcagcgcattcaggcactatatgtaatgctatgtgtttgacaggtctcaagtgctaatcaaggagggtaacagctttg

SEQ ID NO: 293769 - DNA, 460 bp, Zea mays
ccgcccgtcccgcctgcctcgccgcaagcgcacgcgctcggctcgccgcgtcgggtcgccggagggcgaacgaaaccctaggatcagggaggctccgggcatcgctgctcgacccccatgacgtcctgcgggtgcctgatgctcgagaaggtggagggcgacgcgtcggcgaagacgagggtgaaggccgcgccgggcgccggtgccggcgcctggtgcggctcgtgcgctggggactggcggggccggtcagaggccatcttccccatctacgtgatggggagctcgcgggagagcaccgtggcggcggcgcgcggcatagtcgactcccccgaggaccccatatgggttgccgtcaaggcggaggccaagtctgaggcagaaaaggaacctattttgagtagcttcttgtatgccagtgtgctgtctcatgactgcctagagcgtgcattgagcttcg

SEQ ID NO: 293770 - DNA, 454 bp, Zea mays
  unsure (1)..(454): unsure at all n locations
cccacgcgtccgcccacgcgtccgcttgaagttcttgaacgtgcaggtatgacagactgtggagggatgttctactcctgtcgacatgaatggcaagctttctggtactgaggggccaccagttgatgatccgactcactatcgaggtcttgctggcgcactgcaatatatcactttcactcggcctgacatttcctatgctgttcagcaagtttgtctacacatgcatgatcctcgggaaccacattatacgttgatcaaacgtattcttcgctatctgcatgggacattggatcatggcttacatcttcgccccacagatgtttctgctttggttgcctactctgatgctgattgngccggttgtcctgacacccgtcgttcgacctctgggtatgctgtttttcttggtgataacctcatctcttggtcatccaagcatcaacctactatt

SEQ ID NO: 293771 - DNA, 313 bp, Zea mays
cgtggatgcccgcgccacagcctcttctgctgtcgcttcttgtcgccgtgctaacggtgtggccgtatgtctccaacggcgggcacgccaagcccctgacgcctgtcggtcgcgtggtacaccacaaccactgcaagttcacggtcgggccgtggaaacccgtccacgcgaccttctacggcgggcggtactggtcctgcaccacggcgggcgcgtgctggtacaaggacacgcgcgcgcatgggtatggcgtgcagacggtggccgtgagcacggtgcttttcggtgactgctcggactgctgcgggtgcta

SEQ ID NO: 293772 - DNA, 394 bp, Zea mays
cgtgctctaacagtggatgtggcatctgagaacattcgaacttggacactccaggggtttgatcaggggagaagcagcggacgcagcgcagctacgatttcaccggagtcacgtcgtggtttgcggccaagtgcgacctcatccttctcctgtttgatccgcataagctggacatcagcgatgagttcaagcgtgtgatcgggtctctccgcgggcatgatgacaagatacgcatagttctcaacaaggccgaccaagttgatgcacagcagctgatgagagtgtacggagcactgctgtggtcgctcgggaaagtcctgaacacaccagaagtcatgcgtgtctacataggttcattcaacgacaagccgatcagggagacagcggctgggcc

SEQ ID NO: 293773 - DNA, 394 bp, Zea mays
cccacgcgtccgcccacgcgtccgcccacgcgtccgcccacgcgtccgcgcttataatctggggagagcaagatcgggtgttcccaatggagctggctcacagattgaaccggcttctagaggggaattctcgattagttgtcataaaaaatgctgggcacgcggtcaatatcgagaagcccaaggaagtgtgccggagcatcattgagttcttcaaggagcctgtcgctggagctgcaaatgcggacgacaaggtgtagtagcttccactaatggcggacgtggacaggtcttcgctgggcatcggcagacggcgcacccgcttgtggcacgcaaacacaaggcagatacgtggcattgtacatctacatccctctgccattggtctgatgta

SEQ ID NO: 293774 - DNA, 385 bp, Zea mays
ggcaacttcttagctacacacaatctcatagagactatgagagaacggatgtttaaacctgctttgtcaaccattatcacagagaacacagaagtcgcaactgtttccctttcagatccagtttgtgtagcagcacggaaaatgcgtgagttacaagttaattcagtcattattactgctggaaatttgcttgatgggatctttaccccaagggatgtgctgatgcgtgttgtggcccaaaatctttctcctgagttaactctagtagaaaaggtaatgactgcacaccctgactgtgctacattggacacaacaatccttgatgcactacatatgatgcatgatggcaaattctggcatattcctgttcttgatggagatgggc

SEQ ID NO: 293775 - DNA, 397 bp, Zea mays
cccacgcgtccgcccacgcgtccgcccacgcgtccgggaaacacacgcacgtccgtccctggctccgtgcgagcagacgaaacaagggttttctgctgctgctcttgacttgcaaacacactgcccgggtggctgcaccctgctggtctcgaccccgtggccgaaacctgctcgcgatccgtgatccgctgcgagggtttcagcgccgacggccccgtttctgggcatgtgagctcacatgggtggacaaacggagttcaagggagggagatttggtccagtccagaccagacacggccacgaccaaaccaattctccgtgggcgtccggacgtgcctgcacgggtcagtctgaagagaaatctgggactcggcactcccgagtgacgagcgtagcc

SEQ ID NO: 293776 - DNA, 450 bp, Zea mays
  unsure (1)..(450): unsure at all n locations
cggacgcgtggggtcaactcgatcgatccatcgcatctctgccttgtattttggatgtcgatccgtgtggactgttacaaaatattacatatgtgaccaatccaaggggtgcgacagttttccccaagggacacaccccttgggatacaccccttcacttgtatataagtgtaatgatctatggaatacaatcactgttctctgcctctctctttgttaccactgagtaaacttgagtatacttcaacacgttatcagcactgcttgcgagatcagagaaaaagacttgtgctaagttccttgttcagatgaacgtggacttggatcgctacagcatgcaacaacggattttcttaaaacanatcgctcataagttggagaaaggtgatggtatggaaactactcttnctctccgcttttcgctgtctgctgtctgcgtgtaattttata

SEQ ID NO: 293777 - DNA, 441 bp, Zea mays
cccacgcgtccgagaaggagaactgtaccaaaagtgcagaaggccattctggactctgcattgcccatggtggtggaaggcggtgccagtttccagactgcacaaagggtgctcagggaagcacaaagttctgcaaggcacatggtggaggaaagcgctgcacattcgtcggatgcaccagaggggctgaaggcagcacttcattttgtaagggccatggtggaggcaagcgctgtgcctttcagggcggtggcgtgtgcccaaagagcgtgcatggtggcactcagtattgtgttgcacatggtggtgggaaaaggtgtgctagctttggttgcactaagagtgctagagggcgcacagagtattgtgtgcgccatggaggtggcaagaggtgcaagttcgagagctgcaccaagagtgcgcaggggagcactgatttct

SEQ ID NO: 293778 - DNA, 385 bp, Zea mays
acgatccaggacacggacggcattcctccagaccagcatcgtctgatctttgctggcaagcagggggaggatggttgcaccctcgcggactacaacatccagaacgagagtacccttcacctagatctccgtctcaggggtagtatgcagatctttgcgaagaccctgactggaaaaaccatcaccctgcaggttgagagctcggacaccatcaacaatgttaaggctaatatccaggacaatgaggtcatccccccgaaccagcagcgtctgatcttcgacagcaaacagatggaggatggcaccaccttagcagactacaacatccacaaggagagcactctccaccttgcgctccagctccttggtgaccactaagtcatgg

SEQ ID NO: 293779 - DNA, 384 bp, Zea mays
cgtacgcatagcgcattatccttttgagctcaacttgtcatctatgatatgtcttgcaactgatcaggtgtgggctacttcatgattcagatcgctgctagcatgaccaagatttacatggtgcttcaacttgtcaatgggggcagaactgttcgactggattaaaacatacaagatgcaaatatggaggaacaacaatcttccttggtggatggacttaaaactcccactactgtggctgatcaagaattcacagtcgtggagtgcttgtccaatcatgagtatcactcgcagactcttggatatgtaattggtggaactaacatgagatgcgacacctaccatctcacatgaaggatcaatctcttaattgccacactggac

SEQ ID NO: 293780 - DNA, 301 bp, Zea mays
acatgttcacgcaatccatgatttacatttaccagtagatgccgtcaaaataagcgtgggttgatgtaaggtcaccatcggtttgcccaacgtaccgatgctcgacctgtaacaatactgcatcgccaatctccgtgccgaatctatagtactgatggaacatattccggtatgctcgcaagaactactcaaacaacaagattctgagccgtctcgaaattgtacacggaaaggctggcagctacacatggctcacttacaagcagctatactacaccgtgctcaatgttaggtctgccat

SEQ ID NO: 293781 - DNA, 436 bp, Zea mays
gcgctccagattcctcgtcgcgcgcgctgagcaggagaggcgcgccgccatcgtgcgcgcggagggggagagcgaggccgcgcgccttatctccgaggccacgaccactgcgggcaacggcctgatcgagctcaggaggatcgaggcggccaaggagatcgcaagcgttctgtcgcgcacgcccaacgtctcctacatccccgccggcgacaatggccagatgctgctcgggcttaacgccgcccggcttcagaatttcaggacgagatgaaactgttcttggtggggaggagggaaagttgtttctgtagagcttctagaagtgttgctaagagtctggttttgattaatgaaatggctggaagtctgtttgtgctcaatagagtgtttcttctgtgaaataaaactggtctatgagatggtgtggccagctctt

SEQ ID NO: 293782 - DNA, 434 bp, Zea mays
  unsure (1)..(434): unsure at all n locations
cggacgcgtgggcggacgcgtgggcgccccgcgcggcggtggcaggccgctccaggaggagatgtacgcatcccccgggaaccgcttcgcctgcggcatcgccgccttcaacgggagacaagaggacgcggcggacgccgaggcacagaggacggtggctctcgtggccagggacccgcccacgagagagatgacggtggatcagctgctcgtcaaggccaaccagctgcatcatctcctcgaccggttcatcgcctgccgccctgtaggcgcggccaaggcgaaccgagtggtgggggtctctctgtacccgctgatcaaggagagcgtgcagctctactgcgagctcacggaggtgacggccacgctcatcgagcagttcgcggagatggagaccgcggactgcgagcgcgtgcacgcnctcttctgcggtc

SEQ ID NO: 293783 - DNA, 415 bp, Zea mays
cccacgcgtccgcccacgcgtccggtgaggtgagtaatatgaagcaagagaataacaaggtgaccaaagagctacaagctgggctcgagcatgtaaggggcctccaagtggaaattgggaggacagttctgaagctcagagacaatattgaactatccattgggagaagcagtcgagcacatcagaacttcagatatctatcagggaaggccggggtacctcaacgaacttccttatttggttctaggacgaaaaagacatcattattttcatgtatgcctcccattgccaaagccgatttctgacatgaggtcaagtctttttagataacattggttagagggttagctaattttttcttctattcgatatgggtggttctctatgaacatgcttaaaaaaattgatgcaaggt

SEQ ID NO: 293784 - DNA, 415 bp, Zea mays
cccacgcgtccgcggacgcgtgggctgacgcgtgggcctgaacaaccggcaggtgtgcgcgctcactctgctcaactccaagttcttccacatgaacatgtaccggtgcaaggacatgctgatcaaggacatgaccgtgacggcgcccggcgacagccccaacacggatggcatccacatgggcgactcatccggtatcacgatcaccaacaccgtcattggcgtctgtgacgactgcatctccatcggccctgggacctacaaggtgaacatcaccggcgtgacctgcagtcctggccacggcatcagcatcggcagcctacggcggtacaaggacgagaaggacgtcacggacatcaacgtcaacgattgcactcttaagaagacgatgttcggcgtccgcatcaaggcgtac

SEQ ID NO: 293785 - DNA, 322 bp, Zea mays
cggactcgtgggttctttctttcttatttttctctttattttcctcatcacctttttcttggtctttctctattattatctctacatttttttttttttcttcttctttttttttttctctctttaaaaagcatcccctccaatcttttcaccaagcactccttccacttccactacacaccccaccacaaaaacaaactctccctcacctcctcccagatactgtccaccgtcaccaatctcaaagccatcactatgctctactgccttcaactactgcactcccacatcggctcccacatccccaccaccagcctactct

SEQ ID NO: 293786 - DNA, 396 bp, Zea mays
cttcgagccgctcctcgtcgacttcgggttctccagcctcatcagccacatgcagtccccgaactccctgttcgcgtaccgcgccccggagtgcgccgccggccaccccgtgagcgcaatggccgacgtctactgcctcggcgtcgtcctactcgagctcctcaccggcaagttcccggcgcagtacctccagaacgccaagggcggcacggacctcgtcgtgtgggccacgtcggcgatggccgacggctacgagcgggacctgttcgacccggccatcatggcggcgtggaagttcgccctgccggacatgacgcggctcatgcaggtggcggtggactgcgtcgagacggacctggagaagcggccggagatgaaagaggcgttggtgagggt

SEQ ID NO: 293787 - DNA, 478 bp, Zea mays
ttggtgttcgcggcagcgccagtttgcttcccggtgatcatggcggcggcggcggcggcaaaggccgtgcggggccgtccaagcgcgcgaccacgtaggtcggctccgccagaccgccactccggcctctgtgtcaccggaaattcgtcgcggaaaattagtgtgcactgggcagtgggcagatatgcagttggttctcctgtccatgaacaattaccatctcaagggaattaagaagctttcaggccttgccaaggaagactgggggattccaagatgaagaaaaatgttatgatgcacaaggttatagaaaattctagtgaagagaaataatatcataccttcctcttaagaaatacatcagcacataaccaagagattccagatcatctcttctgctttgctctgtaaggaaatgaagaaaggttaacccaaattcatctattaaggcatccagatttgtggatgaatatagtct

SEQ ID NO: 293788 - DNA, 452 bp, Zea mays
  unsure (1)..(452): unsure at all n locations
tgaataactcgatcgagatagacctatcgctatcggtgtagcattcaagtagggaggtggccatgaacaacattgaatcgtcggagctgaggaaggtgttccaaatgttcgacaagaatggcgatggccagatcacgaagaaagagctaggggagtcgctcaagaacctgggcatccacatctctgatgacgagctcgatgccacgatggacaagatcgatgccaatggtgacgggtgcgtagacgtcgaggagttcggaaagctctaccgctccatcgtcggcgagggccaagtggacaagcacgacgaggaagaggacatgcgggaggcattcaacgtcttcgaccagaacggtgacggcttcatcaccgtggaggagctgcggtctgtgctgtccagcctcggcctcaagcaagggcgcacggccgangattgccgtaagatgatcagc

SEQ ID NO: 293789 - DNA, 440 bp, Zea mays
acgcgtgcggccacgcgtgcgtgcacgcgtccgctcacgcgttctgctacgcgtgcgtgcactcgtccgtgcacgcgtcctcgcacgcgtacgagcatacctgcagtcatttactccaccaggaccagcgagttcaacagcagacagatcgggactattatgacgagccgcaggatggcatcatcggccgcactgtcggtgctagccctagcgctagtggcggccaccgccccacacgtagcggcggcaacgacgacgagagcggcggagagcggcgaggcggcctatgccaagacgatccaggacgacttctgctcaacgctgtgcgacggcaagatggggaccgacctggtcgcgtgctaggagtcctgcgctctctgccagcagtccaacctggtgctgtacggcaggatccagtgcaagggcaagtgcaccgagca

SEQ ID NO: 293790 - DNA, 433 bp, Zea mays
cccacgcgtccgcccacgcgtccgcccacgcgttcgcccacgcgtccgcccacgcgttcgcccacgcgtccgcccacgcgtccgctaaaaagaaggttagattagggagcccagcggctcaatggatttcagtttataatgctaggcgacccatgaagcagaggtaccattacaatgtggctgactcaaggctaagtcaacatatagaaaagggtaatgatgacgggctttacgttagttgtgtggcttcctcggcaaacctttgggcactcatcatggacgctggaactggtttctgttctcaagtttacgagctctcaccagtttttctccacaaggactggataatggagcagtgggagaaaagttactacataacagcaattgctggatcaaccaatgggagttcattggttgtcatgttcaaaggaac

SEQ ID NO: 293791 - DNA, 385 bp, Zea mays
gttgaccttgtcaggaaagctatgccccttgtactgacacctgagaacgatccggggaaggatgagctcaagcagctccaggtgcagctggaaaacatcaacaagctggcacacaagcaggtccggcgcatcctctggtctggtctgggtttcttgatcacccaggtgggcctcttcttcaggctcacgttttgggagttctcgtgggacgtgatggagcccatcacgttcttcacgaccactacaggcctggtcgcgggatacgcatactttctcatgacgtcaagggacccaacctaccgagacttcatggagaggatgttcgagtctcggcagaggaagctgatccagatgcagaacttcaacttggacaagtaccttgagc

SEQ ID NO: 293792 - DNA, 416 bp, Zea mays
  unsure (1)..(416): unsure at all n locations
gccgcggcggggcgagacggcggtggtccccattgacgtggcgtccgccggcggcgggcgaggcgatgagcggcccaagagagagcgccaccggagtcacggccccggccgccacggtccgcaccggagtcgcccgccgcccccgcccccgccggcgttccggccgttccggcggtggttcccgttccttgtgccgctattcatcgtcgccaacatcgtcctcttcgtgctcaccatgtacgtcaacgactgccccgcgcacgcgcgggccaccggcgccgcgataggcggatcggtcggcgagagcgccaccgcgcagggctgctggctcgcgcccgagctcgggaggttcgcgttccagtcgttcaaggagaacccgctcatcggcccttcctccgncacgcttgttggaaatg

SEQ ID NO: 293793 - DNA, 465 bp, Zea mays
gtggcgacttcgtgaagtcgctgctctctcccctgtcaacgctgctggttgctgggctcgtcgtccttgacggtgaaaagtgggtcaaacatcgaaggattctgaatccggcattccacgcggagaagctgaagggaatgctgccggcattcttagcatgttgcaacgaactggttgacagatgggagaaacagatctctgcttccgctgaaccaactgagctggatgtctggccagagttccaaaacttatcgggagatgtgatttcaagagctgcattcggtgttagctatgaagaaggcagaagaattttcctacttcaggcggagcaagctgaacgccttgttcaatctttcaagacaaattacatccctggcttctctctcctgccaacagaaaacaacagaaggatgaatgaaatcgacagggaggtgaagacggtcctgaggggcataatagagaaga

SEQ ID NO: 293794 - DNA, 461 bp, Zea mays
cccacgcgtccgcccacgcgtccgcccacgcgttcgcggacgcgtgggcgcgcacacacacagacacacacacacacacacacacgacgtcgtacgcggcagctagcagagcacgcacgatcgccgcagcgtacgtactagcacagaggacgacgaccgacgccatggcggacttcttcgcgcgcggcggcgcggcggcggtggcggcgctggtgatggtggcggccgtgctggcggcgtcgtgggccggcgtggcccgcgcggacttcgcccaggaccgcgccatgtgcgcggaccggctgatggggctggcgacgtgcctgacgttcgtgcaggacaaggcgacggcgcgcgcgccgacgcccgactgctgcacggtgctgaagcatgtggaggccgccagcaagctgtgcatgtgcgtgctggtcaaggaccgcgacgagccggcgctggggttcaag

SEQ ID NO: 293795 - DNA, 478 bp, Zea mays
gggcgagctgctcagggacatcgtcggcagcgcctactacatcgcgcccgaggtgctcaagaggaagtacggcccggaggccgacatctggagcgtcggcgtcatgctctacatcttcctcgccggcgtgcctaccttctgggcagagaacgagaacggcatcttcaccgccatcctgcgagggcagcttgacctctacagcgagccatggccacacatctcgccgggagccaaggatctcgtcaagaagatgctcaacatcaaccccaaggagcggctcacggcgttccaggtcctcaatcacccatggatcaaagaagacggagactcgcctgacacgccccttgacaacgttgttctcgacaggctcaagcagttcagggccatgaaccagttcaagaaagcagcattgaggatcatagctgggtgcctatccgaagaggagatcacagggctgaatgagatgttcaagaacatt

SEQ ID NO: 293796 - DNA, 429 bp, Zea mays
cggacgcgtgggctgacgcgtgggcggacgcgtgggcggacgcgtggggtcgggcgttacaagcaaatcaagcgaacagaaggtgtctcgagcactgacatagttgggaggatattgctaacattcaggcagaaagatgctggcactgatttaagtgttgtcattgctgagaagtctggagagaaatcaaatgatgaagtgaaaagcttggtctctcattttgttcatagataagagatctttgcaagatgatgttcttcattaatctcaatgtgcgttttacagcgtttctatgtcttaattacccatggatcaaaaatactgagactctcctgacactccccttgacaacgttgttctcgacaggctcaagcagtttagggccatgaaccagttcaagaaagcagcattgatgatcatagctgggtg

SEQ ID NO: 293797 - DNA, 469 bp, Zea mays
gcgcgaacaagttctgggcgccgacggcgaagccggcgctggcagcggagccctgcacggggcagctgaacccgctgaaccccaagacgtaccgcgtggcggaggacgtgctgcgcgacctggcggccttgttcccggacccgtacctccacgcgggcgccgacgaggtgaacacggcgtgctgggaggacgaccccgtggtgcggggcttcctggcggacggcggctcccacgaccgcctgctggagctgttcgtgaacgcgacgcggccgttcctagtccacgagctgaaccgcacgtcggtgtactgggaggacgtcctcctggggcccaaggtgtcggtcgggcagacggtgctgccccacgacaccaccgtgctgcagacgtggaacaacggcgccgagaacaccaagcgcatcgtggcggccgggtaccgtgccatcgtgtccttcgcgtcctactactacct

SEQ ID NO: 293798 - DNA, 242 bp, Zea mays
gtacgaagcagactcgtccgcaagtccactcggaggcaaggccccgcgcaagcagctcgccacgaaggcggcgaggaagtctgcgccgactaccggcggcgtgaagaagccccacaggtacaggcccgtgacggttgctctgcgcgagatccggatgtaccagtatagctcggatctgctgattcggatgttttacttcatgctttttgttcgtaagatttctcttgacttgtagtcggttg

SEQ ID NO: 293799 - DNA, 331 bp, Zea mays
gcgtctggacttgagcaacaatttcatatctgggagcattcctgattcgctgtctagaatggagaatctggaggttctagagctttcatccaataacctcagctgcgtgatttcgatacccctgacggagctcaccttcctgtgcaagttcagcgtctctaacaatcacttggtggggcatatcccaatcggagggcagttcctgacgttcttcaactcgagctttgagggtaatcctgctctgtgccgatcacgtgcctgcatccacctgattttgtccagtgcaacttctaatgacacggacataaagtacgagccacgtatgacgaac

SEQ ID NO: 293800 - DNA, 418 bp, Zea mays
cccacgcgtccgcccacgcgtccgcatcccttcacatttcccattccctccctcgttgatcccgcattcgtctatggcggctgcactgggcgccgtgctccggcggctgcatacggcggcggcgcagccccctcgcctgacgaaattcgcgctgcacccgcccaaattcaatttctcagagtatacagcccagcagttgatagcaaaatccgatcagtgggcggtgaaaaggttatatttggacgacgacatgttgggataatgtcagctgaatcagtaggaaactacggagtccggatactctttgatgacttgcacaagacagggatcttcacatgggattacttgcaccatctcggttcagacaaattcagtctgatgagaaattacatcagaactttgagaaagcatggtctta

SEQ ID NO: 293801 - DNA, 307 bp, Zea mays
actgacgcgagtatcgacgacatgttcttagatatcgttgtggaccacttcgaggagggcgctaacaactacgagggacttgacaaacatcctccccgagaatgactgcctatacgctatctatgattgcgactttgtcactgcagaagatgaccataacagcatgatcttgtatatcctatggtccccattcttcgccaatgttaagagcaagaatctttattcaagctcaaaccaataattccagaatgtgctcaaatggcattcatgtagaacttcatgctactgatgcatgtgaaatcagtct

SEQ ID NO: 293802 - DNA, 385 bp, Zea mays
atgcgtattggtctgattggaacacgtggatcagtattcgcgttgggaacgatatgtcaccagacgggatctgcgaatgtgggtgggaagtgtagcatgatcatctaaaatattcaggttcaattggtcgcttctttgaaatcacattggctatacggagatgcataccccagtatgggctcaagtataacttacatgtctgacatcgcacagccttctcggaatatcaaagtcgtcgcctgatcctattcacgccaataaacagtggtcaagaactctgttgattgaaatccattcatttatacctactactgcctatagtctggcgattgatcaagtattcgatattcgttattttcatccataccgtgactaccgttgtaag

SEQ ID NO: 293803 - DNA, 332 bp, Zea mays
gccaggtatgtgaggttcgactgggaacaattaccgaatgtcactgagactaccggggacggccacgacgaactgagcttacgacacgatccttaagaacctctacatcatctaccacaagcgactaatgggtcgactacaccttcaacaactaacgtgacgttgtcacattgaagatcatactgtatcgtcagacacgaactgtccgcggcttcgacttcatcaccttattgaccaacgacgacatacgcaatgccatcgaaggcatgaacggcatagagcttgacgggcgtatcataaacgctaaccaggtccaattcctcagagggcgt

SEQ ID NO: 293804 - DNA, 321 bp, Zea mays
cccacgcgtccgcccacgcgtccgcccacgcgtccgcccacgcgtccggtttgttatgcgcactggagaaacaaaaatcagcgggctgttaaaactgttaatgagacaataaaactcctgctgctggacagtaattatgagttagatgtaccttcatcaggggtttatttacctctatgatattacatagtataccttgtacatcagaatgatacaaaacaataagtcccaaaaaggaaggtgagttaaaaaacaaaaaaaaaacaaaaaaaaaaaaaaataaaaaagaaaaaagaaaaaaaactaataaaaatataaaaa

SEQ ID NO: 293805 - DNA, 445 bp, Zea mays
gcgtgcacccgcatcatcaccaacacgcacgtcggattcagctgcctttcagccttaacagggaggtctccgtcgactcagcgggaaactcgttactcaaacagtaggactttcaggggagacgcctggcgaaaagcatgcgtaagatcaacgtcgcatagcgactacaggacgtctagatcaaatgcctacccagacgggacactgagcttcagaatgaccacatgaacctcaggaccaagattgacgagggagagcaacagctgcagcaagtgactgtggcccagtctgtcgcagcagcagctgccatccacgtggagctgaatccgttcttggagatggataccaaatgcttcttccctggcggtcccttcgcgacactggacatgaagtgcttcttccccggcagcttgcagatgctggaggcacagtagcgccagatgct

SEQ ID NO: 293806 - DNA, 308 bp, Zea mays
gtgggttggcttctcctccccctccggttcgggttcgggttcgtgagagttctgcggggttcggtttcgtagggtgagcgcatcgagatggcctcgtaggatgttgagtaccgctgcttcttcagctgcctcgcctggaccacggacgaccactccatgcacaatgccttcagcacctacagcgaggtgctggactccaagatcatcatcgatcgggagacgcataggtcccgcggcttcggctttggcacacttctccacgcaggaggtacattcagaacgccatccaggtcctgaacatgacagaa

SEQ ID NO: 293807 - DNA, 409 bp, Zea mays
cccacgcgtccgctccttggacacgactcgccgcacccatccccatccgccgccgctgccatggccgacgagattgacacgaggccggcctccgcgggctcccgcggccgtcctgcgcacgctaccgaggacgacgacagagaggagggcgagatcgccgccgacgccccctcgcctgccctccccgccgcgcacccgctcgagcactcgtggaccttctggttcgacaacccgcacggcaaaaacaagatggccgcctgggggagctccatccgacccatccacaccttttccaccgtagaagacttctggggcctctacaataatatccatcaccctagcaagttgattggcggagctgacttccattgcttcaagaacaagattgagccaaaatgggaagacccta

SEQ ID NO: 293808 - DNA, 329 bp, Zea mays
ataaagatgcgatggcagaatcatattgtactgcaagagtgacaattgtgtgttccagtcacatatatgacctagttttgtgtgtctatatgtcgaaacccatatgtctgtgattttattatatgttatgtaagcacaaatgaaacatgccggactagttgcttttgcttgtctatgtatttgtttattccctttgcctcaaagatccatcttcagggtagccatgccggcatgaagttattcatatgctcgggagcgaacccgatctgcagggttggctctgctgcagcttccaggggatgaaagaataatccctagttctagatcgc

SEQ ID NO: 293809 - DNA, 252 bp, Zea mays
cccacgcgtccgtctatattgtatagaactaagatcatgcttaattgacatatcttgtgatcatatctctttcattttggtacaaatgcatatatcttattattctcgtaccatgactacggctaatatgtttccaagtatatttctatactaagtcgtagattgaaagggaaatggagtcttcggcgaagacaaggcttccactcaactctatgggtgttatctaccctttggcattacttcgtaatctat

SEQ ID NO: 293810 - DNA, 387 bp, Zea mays
cccacgcgtccgctttatcaagctactaaagatccttggtacctagaagtgggtgaaaccattgtgaggtcacttaattactatactaaagtggatggaggttttgctagcatcagagatgtttcaacaatgaaacttgaagatcaccagcacagcttctttctttcagaaacgtgcaaatatctatttcttctgtatgatgattcattcttgaggaatcaaaattacctttttacaaccaaaggtcattccctttcaataagaaacacgtggcatgaagaattttctggaacatatgttcccaggcattggacatcttgtaagggttaggttcaacccatttgcgccagcgcattattgtcttaaggtttgcccgagaccattttc

SEQ ID NO: 293811 - DNA, 418 bp, Zea mays
cccacgcgtccgatctcggagcttgaacggagcgtcaccagtctccagatggaggtggcggcgctgtccccaaaagggtcaagaggatattggcaaacaggcagtcggctcagaggtcacgagtgaggaagctgcagtacatctcggagcttgaacggagcgtcaccagtctccagatggaggtgtcggcgctgtcccctcgcgtggccttcctcgaccaccaccgctcactgctcaccgtcggcaacagccatctcaagcaaagaatcgcggcgctcgcccaggacaagatcttcaaagacgctcaccaagaggcgctggagaaggagatccagcggctgcgccaagtgtaccagcagcagcaggtcaaggtggccaccaccggcggcgccgacatcgccaccggcgacttcgcgtc

SEQ ID NO: 293812 - DNA, 238 bp, Zea mays
ccgacgcgtgggaaaacacgtactgattgctcaagagcttggcctgcaagtcctggggggtatcatatgatgggcaaatacaatttaagctccgaaactttctactaccaccccatcacttgcgataccaaatgctatatcaaatgctggactagactcatccaatgttcatattgttgagattaatctagccttttctgctgccgtactagcaaatcaaaagttacttgtgattgct

SEQ ID NO: 293813 - DNA, 441 bp, Zea mays
cccacgcgtccgcccacgcgtccgatgcaataaatcaaataaaataagattaagattgacaaaagatgtaaaaaccaagagctaaaatgaatactatttccagttctaggcggcattataaattctatttttttcttataatgatgtgaatcttgatggtttaatattatggttttaggacaattattatggtttcatactatttccagttctttagtcatggattttttttcagaagttgatgaactctaccttcgcaggatctagttccttgtatcttactgtcttttgagtttgagcatatactgatgtggagaggaagtgattggaaatcatctcttcctccattagaaaatagttatgaagtgacaaaggtgcaagaaagttttagtggcaaagaatctaatgaaaaggttacacattcaggaaatggtttgatcc

SEQ ID NO: 293814 - DNA, 216 bp, Zea mays
ccgacgcatgcgcactcacgcacttaacgagcttctcaaagctgaccccaaggatgaggatctttaaacactgtgggcgatcatacgatgcttcacgtgccctgacagatacttacagaaagtcatgcgactggctcttggaggcatggacaccgatcaggatgacctcaccagggtcgtatctactcgcgcctagggaggcctgcagctgttaaa

SEQ ID NO: 293815 - DNA, 235 bp, Zea mays
gtaccggtcctgccttctcgacccaagcgttccctgacgcatcagctctcatgcaatcactaggatctgaaagctgaccccacagatgagggtgtttcaacactgtgggcgatcatccggtacttcaccttgcctgacagatacttccagaaagtcattcgactggctcttgaatgcatgggcactgatgaggatgacctcaccagtgtcgtaactactcgcgccgaggtccacc

SEQ ID NO: 293816 - DNA, 398 bp, Zea mays
ccacgcgtccgggccgccctttttttttttttttttttttttttttttttttgtggtgtgtgcacaacgacaaccatccctgcaaaattattaatacacgaacaaatccgtccaaaattgctggcaagtaaatcataaattatccacccaactgggaacaaaacggagaggctaatcattctaactacggcgctcactgatcactccaatgacgtagtataacttccaaagttttattgaatggccctacagatgtgtatgatcaagcaatcttgggcttgggcttaagtttattcaattgcgagtttgggaaaactccagcaggagcgatcctggttccaatagagttgttgggaaaaacaggggtcctgaataactgatctgaggtcacaatgacc

SEQ ID NO: 293817 - DNA, 442 bp, Zea mays
ctgaggtgtgcgaaagaaagctggatgagtaccttctcactcgcagctacatcactggctaccaagcttccaaggctgacttggctgtgctacactgcgttcatcgtctgctcccatcgcccaaggatatcaactcagcaaggtggttgaatcacattgatgcgctctataggctgcacggaattactgcaaagggccaaggtgtgtaggttgaatcacatgcagctccttcagacccatctccatatcttgctgaacctcacgccctaattgctcacgaggacgacgacgatgacgttgacctttgtgatgaggagaccgaatatgagaagaacgctgctgaagagcgtgctagaactgccaaggctcttggcaagaagaaagaatctgggaagtcatcagtcttacttgatgcgaagccatgggaccatgagactgacat

SEQ ID NO: 293818 - DNA, 446 bp, Zea mays
cccacgcgtccgcggacgcgtgggcaacacgcaggggtccggccacgacgggccctacaggtacgacatcaagcggtcggggaacaacgtcaacgtgtccacgggggtgaactggatgctgctgggcagccccgtcagcaaggacttcccgctcgccatctaccccgtcgacaaggtgccgctcccctacgagctgttcgggcccaagccgcccacgccggcgcccgcgccggcacccgcgcccgggccggccaaggccaagaccaagaagaagaagaagtccgccgccatcgccgagccgcccacggccgacgacgacgacaccggcaagggcggcaaggggctgggcaagggcggcgcgaaacgccaccgtaaggttctccgcgacaacatccagggtatcacgaagccggcaatccggaggctggcgaggaggggcggcgtga

SEQ ID NO: 293819 - DNA, 432 bp, Zea mays
cggacgcgtgggccgtcccgccgtccgcattctcttccggtgtcgccatcccctccgtcgcccgccgcgtccggccgcggcaacccgacctgtgtcaatctccatgactacctcaaggcgtcttgctgataggaagatatcacgatttgagaagaatatcacaaagaggggcgctgttcctgagacagccaagaaggcaaacgattatcctgttgggcctattcttcttgggttctttgtcttcgtggttgttggatcatctctctttcagatcatcaagacagcatcaaacgctggtctattctgaggagaatcggttgacacatgcaatctgtcactagaaactattcaagtgtagggcgtggctcaatgtcgcctatttaatgttgtaccgtggtgagttttaggtatatatttaatggaagtgcttat

SEQ ID NO: 293820 - DNA, 147 bp, Zea mays
caaagattataagccctaatacggatgatgccaaatatgttataaatgtaaaacaaatcgcaaaggttgaggtcggatcgggagataatgactctccaactgatatacccgaagggttgaggttcgggtatggcatcctatgtttca

SEQ ID NO: 293821 - DNA, 448 bp, Zea mays
cccacgcgtccgcccacgcgtccggtccttggcagaaacgctggctgggtcccttggtgcatcaggatcttctggaaacgtggcatactatatgggtcaaatggctatggccatgggaaaacttgtcacactcgagaatttccttcgccaggctgacaatctacgacagcagaccttacatcagatgcatcttatcctgactatccgacaagctgctcgtgcgctttttgcaatccatgactacttttcacgttttgtctctctgagatcttattggtttgctagtgtttctttagttacattatttttattattgttctatttatttttttttattttttatttttttttcttgttttattatttttattattttttttttttattatttttttttttatttttttctattttttatataatattcttattattttatttttttttt

SEQ ID NO: 293822 - DNA, 161 bp, Zea mays
catgggtatccgtctgctcagttaaatgcgctgcattgatactacgctatagcatacccatgcggcgaccattatggactgtggatcgatggatgctgttactcctgtcaggatttgttctaagttaatcctaaggaaaaaatggtgcttcttggtgctgc

SEQ ID NO: 293823 - DNA, 424 bp, Zea mays
gaatcacacaacagcagctcaaaaaacctttcacacctcaacaagcagagcatagacccgggattcgtcggcgcggtagcgagagctagagatggacggttggatgttctgtttctagacctctctgtttgtggcgctgtatctccttctggacgtgctcttctgctactcctgctctgtctgttttctttcttttgtttgtttttttttttgttgtcttttattttctttatatttatttttactttttattttattattttttttttttatatttttttttttttttattttttttttttttttttttttttttttttttatttttttactttttttaattttagttttattttttcttttttttatttcttttttttttgtttttcttttttttttcttttttttttttttttttattttt

SEQ ID NO: 293824 - DNA, 341 bp, Zea mays
cccacgcgtccgcccacgcgtccgcccacgcgtccgcccacgcgtccgcccacgcgtccgcccacgcgtccgaggaaggggtccaataaaaaaaaaaatcgccgccgtcgcccagcggaccttctcctcctcttccccgcacgccccgccgctggctgcgtcgggctacaccccgcgccgcgagtacggcctggtgcccatggtgatcgagcataccttccgcggggagcgcgcctacgacatcttctcgcgcttgctcaaggagcgcatcgtatgcatccatggccccatcactgacgatacggcgttcctcggcgtcgcccagctgctcttccttgaat

SEQ ID NO: 293825 - DNA, 382 bp, Zea mays
gacaaagtgaaccgaccaccagcgaccttcgtgaaggtttacaaatctggaacctacgggaggtcgcttgatatcactaggtttagcagctatcacgagctccgtagggaactggggcgcctatttggccttgagggccagttggaagacccattgagatcaggctggcagcttgtattcgtcgaccgtgaggaggacgttcttctcgtgggcgacgacccttggcagtaagcactgcatgcgacgttgattcttttttttttctgcattcttcctcacattgcgttggcaacccaaccccacagggaattcgtgagcacggtgttctgcataaagatccttctcccgcatgatgtgcatcagatggggaagcatggcctgg

SEQ ID NO: 293826 - DNA, 431 bp, Zea mays
cccacgcgtccgggttattcccaatacacattgattggacgggattggaaaaaattgtgaggaagtttgacttgtttgggattcaaacccatcgaatcccgctcaatccacatggattgagagctaaccgaacaagcccgtaatgtattccttggtttctgctttcccggacgcgtgtgtgcggaagccaaactggatgaggcacttcaaattgatcccaacacgtccgatgcactctggtgcttgggaaatgctcagacctctcatggattcttcactccagacaatgcaatagctaatgagttctttacaaaggcaaccggatgttttcagaatgctgttgatgtggaacctgcaaatgagctgttcaggacgtctttagacttgcaaatgaatgcacctgaactgcatttggatatccaaaagcaaat

SEQ ID NO: 293827 - DNA, 195 bp, Zea mays
tgggccttcatttttccaaccaatgccacaaccttgcaaccagggcaaggggccttgggagggccttaaccagaaggacccgttcccaaggttcaagggttaaaaagtcgttcaagaaaaaaagggtcttgagggtcatttttaaaaaggaatgcaacacaacccgaagaacaactttcctggttaaacttatta

SEQ ID NO: 293828 - DNA, 182 bp, Zea mays
tcggtcgaagatgctcgagactatcaggtctctgatacagcgcctggagaaagtcgacccgttgaagatgacgcacgaggagcagctctgcttttggatcaatatccacaatgctctggtcatgcatgcttttctggcctatggtctgcacgacaagcgcatgaagagcacggacatgattc

SEQ ID NO: 293829 - DNA, 362 bp, Zea mays
cccacgcgtccgatcacgcgtacggccacgcatgctcggacgcttgagctcgaatcatgtcgtacaagccggcattgtgaagaaggagcacatcaagattcatggtttctgagcaaccgccgggtccatatcaaaccaaccctgcatgcagggcatcttattatatataatatctgaggtggagcatatctatctggctgtgtactgcaagcaggcctagtacgccgtctgcgcgttcctcctattacacatataggcccctccctgcgtgtatgcttgttaccgtcgtgttcaaccttgtactacgaggctccatcgaacatcgatggcttgcttctttatcagaacatgtttgaataaaa

SEQ ID NO: 293830 - DNA, 398 bp, Zea mays
cggtcgcggaattcgcgcggcgcgacaccacgcgtgcgcggacgcatgggcaaaaacgcattgacgacacgcttctggctcgatgtatatcctgtcaaaaaatttggctcgctgcatgaacatatatagtgcgtcactggatagctatgcacacgatgatatatcagtaggttcatggatgatgggactgaatgcaacttacgtggatgatgaccggttgtgctgcagcaggtccagacaagagaaaatctgttgcaatgcttgagcggaaggcgtggctgctggcctgtagctgtacatcctgatgaagatagtgcacacctgtcattttgtatacactgctttcgtgaaccggaaaaggctactatccagatagaaacggcttgcaccaaaaatta

SEQ ID NO: 293831 - DNA, 257 bp, Zea mays
ggacattgttgcgctttctggtggtcacaccctgggaagatgccacaaggacaggtctggatttgagggagcctggacgtccaaccctttgatctttgacaactcttacttcaaggagcttctgagcggagagaaggaaggccttctgcagctaccaagtgacaaagccctcctctctgatccatccttccgcccacttgttgacaaatcccaattctgaaagcttcaggtgggcctcggctagttctagatcgcga

SEQ ID NO: 293832 - DNA, 427 bp, Zea mays
  unsure (1)..(427): unsure at all n locations
gctccagcccatagtgaatctcccggagtcgcccaaacaacagcgacaaccatggccgccgccgcctgctattcgccagcgcgcatcatcatctcctgctcagctaccaccacctcctcaccgtcgtcagcgcgcacgctgcgcgtcgccgtagtggggggtggccccgcgggcgcgtcggctgccgaggcgctggcctcggcgggggcccggacgttcctcctcgagcgcagccccgcgggcgccaagccctgcggcggcgccatcccactctgtatgctggacgagttcgccatcccgcgggacctcgttgaccgccgcgtcacccggatgcgcgtgctctcccccttcaacctcgccgtcgacttctcccgcgcgctgccccccggggcgcacatncccatgctccggcgcgaggtgctcgatt

SEQ ID NO: 293833 - DNA, 385 bp, Zea mays
cccacgcgtccgcccacgcgtccgggttgcgtcgactcgccgcctgcactgcgcagccaccacccatgactacaacgtgttcagcttccacccggacaactcgccgtgccacggcttcgaggaggtcctcgcctgctaccgcaagatcgtgccgcacctcaagctttccgggccgacgtcgttcgcgcccatcgtggaggcggccgtcgacatcgtggaccggagcggggggcagtaccacgtgctcgtcgtggtcgcggacgggcaggtgaccaggagcgtcgacaccggtgacggcgacctcagcccgcaggagaagagaacggtggactccattgtcatggcaagctcctacccgctgtccatcgttctggttggggtcggg

SEQ ID NO: 293834 - DNA, 358 bp, Zea mays
tcgaccacgcgttcgtccacgcgttcgcccacgcgtccgcccacgcgtccgcagactttggacttgcaaagcttttagaggatgaagaatcacatattactacaatagttgcaagaacattttgttaccttgcaccatagtatatgcaatttggcagagccacctagtgagactgatgtctacagttttggggttatggtactcgaaatactcagtggaaagcggcctactgatgcatccttcattgagaagggactaaacattgttggatggttaaattttctggctagtgagaaccgggagagggaaatttgtctcctgaactgggaaagagtgcagactgagaccttatatgctc

SEQ ID NO: 293835 - DNA, 294 bp, Zea mays
cccacgcgtccgcccacgcgtccgcccacgcgtccgcctatattgtgtgcctccacatattggggagcttgaagcatcgacaagttactagtcattgcttacttatataagaacataagtagtatttgctattgtcaagtgtgccttgcttgatgcaagttgtgttttcgtatcattattattatgcacggccatcgtacgtgtatggcttgtatgggttattgccaacttaataaaagcacactctgtttgcctaaaaaaaaaatataataattattatattaaatataaaaa

SEQ ID NO: 293836 - DNA, 141 bp, Zea mays
gttatgcttcctctcaactacatgaacaagttcggctcaggtgtcggttcctacgggttgatgaacaaggatggtaagccttaccttgtgaaattccattggaagccttacttgtggtttgaaatgcttgctcgtcattga

SEQ ID NO: 293837 - DNA, 346 bp, Zea mays
cccacgcgtccgctagttgctcatttccagaactcaagtttgatgaatgaggataaacgctgccgccctatactcttccactctgatggtccgaatgcaggagatcaagaaccattccctgtgggatcaaatgtccgttctatgtctgtatggtccatgattttgagcttgtaattttactattattactttgtgttttttcattttttttgtttttatttcttttttgttttaaagttatattattttttttttttctatatttactgtattttttttcatttttttttttatttctttttcttattttttttatttttttactatttgcaattcttaatttatt

SEQ ID NO: 293838 - DNA, 294 bp, Zea mays
aggacgccaccccgaacctcaccctccggggcttcggctccgtgcagcgcgtcaaggaccggctggaggaggcgtgcccgggcaccgtctcctgcgccgacgtcctggcgctcatggcgcgcgacgccgtcgtgctggccaacggcccctcctggcccgtcgcgctgggccgccgcgactgccgcgtctccctcgtcaactagaccaaccagctgccctcgtccaccgtcaacttcacccgccttgtcagcatgttcgccgtctagggcctctccgtcagggaccttgtcgtgc

SEQ ID NO: 293839 - DNA, 380 bp, Zea mays
gcaagtaccagaagagcacggagctgctcatccgcaagttgcccttccagcgcctcgtccgtgagatcgcgcaggacttcaagaccgatctccgcttccagtcctccgccgtcgccgcgctgcaggaggccgtcgaggcctacctcgtggggctctttgaggacactaacctctgcgccatccacgccaagcgcgtcaccatcatgcccaaggtcatccagctcgcgcgccgcatcatgggcgagagggcctgagcgagtcgagctcctcttaccgcatgcggcgtctttgttgctattgtcctgtttgtatgattttgtcatttattggttttttatttggttgtttgtttacttggttccttttttcttgttcttttg

SEQ ID NO: 293840 - DNA, 341 bp, Zea mays
ctttgaatctttggtatccttcaaatcttcattggattaggtatccttcaaatcttcagtatgcttcgagtcttcggtacgcttcgaatccttatggggtaataacttccaagtttcaaaatttaagtgaagagacttattttttccagaagaatagattcatagtttaagaacggaatacccatatatgaaaataagagcttccgtgcgtaaaatgcgtacacaatgtcgactgattcgcaggcgtgggcgaattagagtcattcgttccaatccgaagcataaacaaagactggggtaatctttcgaaaaagaagcttttctgtctaatagcttttctt

SEQ ID NO: 293841 - DNA, 329 bp, Zea mays
cccacgcgaccgcccacctaccagcgggcagtaacacgccacgatcacgacacccccgccggggcgcgcgacccggacagaacgcgcccacccagcgccgcggccaaggataaccagatcacccacgacaacaagcagcagagggcaagcacggctcgcgcagaccacggagaggagagcgccctaccgacgcacagggacacgcagccggctaacgccgacgaaggaagacagagcacaggtaaaacaaccgagaaggagagcgaggccgggaaggacacccgaccgaggggaccaggcaaaaaaaccacaacacacgccagagcaag

SEQ ID NO: 293842 - DNA, 312 bp, Zea mays
gccacgcgtacgttgtatgaatagattgcagtctatacagagatcataaagctatactcaggtgcaagcgcatgaccaagaactgcactgcttactattatgagtggcctgatatataaggaacctttaccagtttgaggcacccaacttttatttgccaaaacagtttgtttaacagcatcaactaattgctcaacagttgtagcaggcatacacatctatctctgcaccgttttagtatacttatagcattctttttatgacttaatataaggatggacccatcattttttctatatgcttttaggcctt

SEQ ID NO: 293843 - DNA, 197 bp, Zea mays
cctcctcaacctccagcccaaccttcagcccgtaatcgagagcaatggcgctcgccaaggccaaggagatcgttgcctccgctcccctcgtcgtcttcagcaaaacttcctgccctttctggctcccggtgaaaccattggttcaagaacctcgaaccaggctacaaggccattgatttgaataaggaaggtgttgg

SEQ ID NO: 293844 - DNA, 317 bp, Zea mays
cccacgcgtccgcctctctgttttccaaaggtttcaagaacacgagcagccagatcacggcggcctacacctcggacgggcggtacgccgtgtgcgcgagcgaggactcgcacgtctacctgtggcggaccacccgggtgccgtctgccgcggccatcggcatcggcatgaagcccaaggcgtggtgcaccatccgctcctacgagaacttctactgcaaggacgtgtccgccgcggtcccctggacgcagtcgccgtccccgccgggcgccagcgacggcagccccactggcagcagcccggcgtcggctgacaag

SEQ ID NO: 293845 - DNA, 315 bp, Zea mays
cggacgcgtccgcccacgcgtccggtttctagagccctctctgccactcgtgatcccactagggacaatgcctgccctcgccaagcccgcctcccgcaccgccaagcccgccgcggctccgaagccgaagcctgccgccgccaagccgaaggcggccaccgctggtgccttccacccgccttacttcgagatgatcaaggaggctatcacggcgctcaaggagaggaccggctccagctcgcaagcgatcgccaagtatgtgggggacaagcacggcgcgtctctgccggcccatttcatgaagatgctttccat

SEQ ID NO: 293846 - DNA, 333 bp, Zea mays
cggacgcgtgggcggacgcgtgggcggacgcgtgggcggacgcgtgggcggacgcgtggggggttttgctgctctccgaccccgagctccgaaggccgcagcatcaggcgcggcccccctcgcgtgtgaccgagatggcgctgccgaatcaggggaccgttgattaccccagcttcaagctcgtcatcgtcggcgatggtggaactggtaaaactacatttgtgaagaggcatctcactggagagtttgagaagaaatatgaaccaaccattggtgtggaagttcattcgtaggatttcatcactaactgtggtatgatcaggttctaactgc

SEQ ID NO: 293847 - DNA, 433 bp, Zea mays
cccacgcgtccgcccacgcgtccgcccacgcgtccggcaaattgcagctgctcgtcgccggcgatcgccgcagggttcgtccgagaggggagaggctctctgtatcggggcatggtgatcctggaccgcactccggccgcggcgcagggggccgcctgtagcccgctcccgaagtcgcctaggttttcgtgggaggtggcctcgccgccctcggaccccatcctcccgtacctcaggtctattagtagggccatggatgagctcggaacagggcctcagtatgacacgacagccttagacaggctcaagcattacttgactgaatgcattgcaaaatatggtgatgactaccaatacttcactgatccatggttgctcaagatttggatcctctatgcagatgcaattgaggacttccccagtgtttacaacc

SEQ ID NO: 293848 - DNA, 402 bp, Zea mays
cccacgcgtccggtcgctggtatatgtactgcgcagtcggtgtaggtgacgacgaatgaaaactgaaatcttggtctcctgaatacctgaaacagggtcgtttcgagatactgtctctgtccgggtcgtttcttctgtcagagaacggtggccagcgcagtcgaactggtgggctcagcgtttcgctagcaggccccgacggccgtgtcctgggtggctgtgttgccggactcctgacggctgcttcaccggtacaggtctgctgtcgtcctctggatcctgctggctgaaaaatcactaccttcctggttccattcatttcgtcgtggtagcgtaaattacagagcgttgtcggtcgtcgactgtatctccagatttcctcgtcgacgccactcaattgcc

SEQ ID NO: 293849 - DNA, 404 bp, Zea mays
ggtctgtgctgagcttgctttgattattgttcacactttgtagtactcgtacttttcgcccccttcccttgtgggcattcttgacgtccctgtcttcctcggctgccgcagatacatgatttcgtcaaacattggtgaagtcgcttctatattcctaacttccgccctgggcattcctgagggtttgattcccgtccaacttctatgggtcaatctcgtcaccgacgggccccccgcaactgctctaggtttcaatccgcctgacaaggacatcatgaagaagccacctaggaggagcgacgactcactgatcactccctggatcttgttccgctacctggtaaacggtctccctcgcgtgctacccgtcccttgactctgttgggtcgtcatcttttggagac

SEQ ID NO: 293850 - DNA, 333 bp, Zea mays
  unsure (1)..(333): unsure at all n locations
ccacgcgttcggccacgcgnttcgccacgcctccgggtccccatccttcgccaaggggaagagcaagatgctttacgcaagcttaaaccagaaattcaagaatggccttaaatgcattcaaggtgaacttcaagccacaaattccaatgaaattaacctttattagatcaaagattcggcaccctatgcgcaacggcatttcgaggttcatgatcacaccttattgacattcctacatattgtggatatgtatgcgcctttatacactgggctctgaaaaactgtttttgggagatgtggggttgttgctctgtgaaaagatactcataggtt

SEQ ID NO: 293851 - DNA, 344 bp, Zea mays
ctcacgctccgcgttctgtcgcgacccgacttcgaacacctcccggacatcttcacctccgtcggcctcgagtactacgagaaggtcctcccatccatcggcaacgaggtgctcaaggccgtcgtcgcgcagttcaacgccgaccagctcctcaccgagcgtccccacgtctccgcgctcgtccgcgaatcgctcaccaagcgcgcccgcgagttcaacatcgtcctcgacgacgtcgccatcacccacctagcctactggcaggagttcgcgcaggccgtcgagaagaagcaggttgcgcagcatgaggccgagcgctccaggttccttgtcgcgcgcgctga

SEQ ID NO: 293852 - DNA, 383 bp, Zea mays
cccacgcgtccgcccacgcgtacgatcactcgtccgcccacgcgttcggggttagggtcccagctccccgtagcctgggcgagccaagtgatggccggccctgccccctccggcgcaactagtgcctccgccttaccgtccccgctgatgcagctgccgtcgacgttcgcggagctcgtcaagggcccctccggcctccagaaggtcatgcttcgcagcgctcgcaactgctgtgcccagatgtatctttatggaggtcaagtaacatcatggaagaatgacaatggggaagacttgctatttctcagtagcaaggctattttcaaaccttcaaaagctaatgctggtggtttaccaatctgctttcccctatttggatcaca

SEQ ID NO: 293853 - DNA, 261 bp, Zea mays
cccacgcgtccgaaaccctctggactagggtttatctgggctcgcctcgttagttgttacccatctgtgtattcgattgtaaggtcgatctgtgtcacatgctagtgctgcggtcattctatggttcatcagactcatgcatcaaccagcatggactgtatgatcgatggaagctgttactcctgtcatgatttgttctaagttaatcctaaggaaaaaattgagctattaggtgctgcaaaacatacatacaacggcagt

SEQ ID NO: 293854 - DNA, 341 bp, Zea mays
  unsure (1)..(341): unsure at all n locations
cccacgcgtccgactcattagaccacatcctgccatttggaggcttgttcatgggatgacaggggtttaccttgtcgccctcactttcttgctttttcagactcgtgatgatgctaggcaattcatgaagtatcttcatcctgatcttggtgtcgaatttcctgaaagatcttatggaactgattgtcgcatatatgtccctgatcatccaaaaagcaggtttaacaatgtttatgagatcattttttgatgaatttgttatagctcatatccttggatggtggngtaaggctataatgatacgaaaccaaccactttttgtggtcttggcaattgggttt

SEQ ID NO: 293855 - DNA, 456 bp, Zea mays
  unsure (1)..(456): unsure at all n locations
aggccgcgtacctccacgggcacttcagcgcccgcgtcaagctgcccgccgagcacaccgccggcgtcgtcgtcgccttctacatgtccaacggggacgtgtacgagcggacgcacgacgagctggacttcgagttcctcgggaacgtgcgcggcaaggagtggcgcgtgcagaccaacgtgtacggcaacggcagcacggcggccggccgggaggagcgctacggcctctggttcgacccaaccgaggacttccaccgctacgccatccactggacccgcgacaggatcatattctacatcgacgacacgccgatcagggagatggtgcggacggagtccatgggcgcgcagttcccgtccaagcccatgtcgctgtacgccaccatctgggacggctccagctgggccacctcggngggccgctacaaggtggactacaagtacgcgcnctacg

SEQ ID NO: 293856 - DNA, 510 bp, Zea mays
  unsure (1)..(510): unsure at all n locations
ctgcacgtactcggtctcgtgaattcccgtggtcgactccactgccgtccgaagggaaagtatcntgggccatcttgatatctgcnntgcgtcgatgtaaaatgccgggcttacttcctttgcgtcacgnaatcaagctgttacttaatgctcaacactgaagatggttactcaanttaggganagctttccgaagccaatactctgggctgtgattctgctctttgtgatgggtttcatagcaggtggtttcattctgggtgctgttcacaatgcaattttgctgatagttgttgtggtgatatttggttttgttgctgcacttcttatctggaatgcttgctggggtagtagaggtgcagttgggtttgttaatcgctatcctgatgctgatctcagaactgctaaagatggacaatatgtaaaggttacaggggttgttacctgtggaaatttcccccttgaatcctcgttccaaagggtcccgaaatgtgtatacacttctactag

SEQ ID NO: 293857 - DNA, 366 bp, Zea mays
cccacgcgtccgcggacgcgtgggcccacgcgtccgcccacgcgtccggaggatatcttgactggatttaagatgcactgccatggctggcggtctatttactgcatcccgaagcggcctgcattcaaaggttctgcgcctctgaacctttccgaccgtcttcaccaggtccttcgctgggcccttgggtctgtcgaaattttcttcagcaagcactgcccactttggtacggatacggcggcgggctaaaattcctggaaaggttttcttacattaactccatcgtttatccctggacgtccattcctctcctggcttactgtaccttgcctgccatctgcctgctcacggggaagtttatcaca

SEQ ID NO: 293858 - DNA, 436 bp, Zea mays
  unsure (1)..(436): unsure at all n locations
cccacgcgtccgcccacgcgtccgctttggaactgctgatgctgctgaggtggatgctggttctgcctgaactgctgaggttgattgcctgagaaacgaggacgattgctgcttccaggctggggtccactgatcttgcgcttacgatcctccatctccttacgcttcctctctgtcatgattgctctgtcaatcaggtgctggaatgtcgggaaggtgtgattcatcagctgatactaaagagggtcaaccaagcctctcaggaaacggtactgccgcttggcgtcagtgttgacatcttcaggagcatagcgagacaattgcagaaacctgtctcgatactcactgacagacaatggcccttgcttgagagctaggaactccttcttcttcactgtcatcagacctgcatgaacatggtactgacngaagcttt

SEQ ID NO: 293859 - DNA, 342 bp, Zea mays
  unsure (1)..(342): unsure at all n locations
tcccacgcgtccggacccacgcgtccgcccacgcgtccgcggacgcgtgggccgccttaagaggtaggtgttctggtgctcggttgcgtagcagtaaagggagttttcgtcgtgatgctgctattactgaactgggaggtatgcgacttctatgagtagttgcttattagcctacagaaaatatagggatctggagactggttatgtttcatggctgttcttctttcaccggtaccattttatgacgaacgttgtatgactgattatcttcttggttacgttactgctacggcatggcctcatgaccctnttttgatctaaaaaaaaaaaatattattgttt

SEQ ID NO: 293860 - DNA, 317 bp, Zea mays
aggaggagtccccgagcaggtggcgaggctgtgcagcttcgaggtgctcagcggcctgtaggggaaccaaaccggaggtgtcgcttttggaaacgatttagtcattggcaagtctacgttcttcagggaaggcaaggtgggggactgggaaaaccacatgaccaaagagcaaggacagaggttggatgacgttttggaggacaagcttaagggatctggtctcgtgttttgattaattcatatagcatgttgcatgtcatgaataatcattcgcttacacatgtagtggtattttaatgtattggatcttttttttt

SEQ ID NO: 293861 - DNA, 421 bp, Zea mays
accacgcgtccgcccacgcgttcgcccacgcgtccgatttctgtgaagggaatcaagggcgccttaacaggcgtacttctgcctgtgttggtgaccatggagaatggaaagcctaaccttaggaagaaggtgatgccagctgtcattgtgaggtagcgcaagccatggtgctgaaagggatgacgtctacatgtactttgaagaagcaagacaaatataaggatgctgaacctagtgcaatagatctttttaaggagatgcattgcagcaaaaagaaagggtttagcatatatgttcagaaagctattgttgatatggaagaaatggtggcaacatcagttcaagatggacaacaaccgaaatatcctacaaaagttgtttatagtgtgcaacttggctccagtgtgttcttatgcaatct

SEQ ID NO: 293862 - DNA, 333 bp, Zea mays
cccacgcgtccggccacacgtgcgcccacgcgtccgcgcacacgtccgtacacgcgtgcggggtattctccctcttgccggttcccaataaagatcagctgctcatgatgtcctgcagagcgagaagaaggcaatggcgtgtcgacagctttcttttcacctctgagtccacgaactaggggcaccctgacaagctgtgcgactcagtgtcagacgccgtgcttgacgcatgccttgcgcaagacccttacagaatggtcgcctgctagacctgcaccaagaccaacatgatgatggttgtctgctagatcacgaccaacgcgaccgtggact

SEQ ID NO: 293863 - DNA, 282 bp, Zea mays
ctgacgcgtgcgctgacgcgtgggctctacattggcatctgatgctgactacgagttcctggggcaggccatgggtcatggtgcgtggtcgaacactcagacgctgacgctgctgctgatcggactacctaccgtactagtgctggtagctgattatcgccaatagcacgtatcgtgtatcggtagtgggcaagccgccggttactacatcgtcgacgggcacactggccatattggggcacctacaccacatttgtccctagacacacatatctttcaagg

SEQ ID NO: 293864 - DNA, 192 bp, Zea mays
ttcgggctttgcttagttccttcctctctctagatctcgcctatacaacgaccagcggagggtacgtggttggagatccaagaagcgtaagaaatggtagcccacattgcatccgagcatgcttgctatgtcaactgcagctattgcaacactatactggaggtgaatgcgccaagcatacgttgactacaa

SEQ ID NO: 293865 - DNA, 234 bp, Zea mays
ttgacgagaatcaacgcggaacttatgacttcatctacctgccaattgattttagggatagatgtaacgcgggatatgcattcatcaatatgacagatccactgcaaatagttccattttacatgacattcatcggcaagaaatgggagatgttcaatagcgataaagcggcatcacttgcgtacgccagaatccagtgaaggaacgctatgagtgctcattctcagaattcta

SEQ ID NO: 293866 - DNA, 132 bp, Zea mays
gtgaggccgatgggtttgttgttggtttcccgacaagattcggaatgatgtccgcacaattcaaagcttttctggatgcaaccggaggtctatggagaactcagcaacttgcaagaaaacctggtgggatct

SEQ ID NO: 293867 - DNA, 269 bp, Zea mays
atccctcgtgaaagatgcagatccttgtgaaaactcttactggtaagaccatcaccctcgaggtggaaagctccgacacaattgataatgtcaaggtcaagatccaagacatggaaagtatccctcctgaccaacagaggcttatcttctctgttaaacagcttgaggatgtccgtacccttgctgactacaacatccaaaaggagtccaccctacatcttgtccttcgactcaagggtagcatgcagatctgcgtgaaaaccctcact

SEQ ID NO: 293868 - DNA, 450 bp, Zea mays
cagaactgggtctgcttgaaccaagcctccaggttttgagacttgatggtaatccattgagaagcataaggaggccaattttagacaggggaaccaaagctgttttgaaatatttgaaagacaaacttccggagcaataaggaccgcatgcaactctgtcgtttatgtttgtttgaaagcttgatctcaagtggtgaagctgttgagtttcttgatttaagctgagacagggagaatgtaatataagtacaaaaatagcggtcgtaagctccttttctgtcggatttaattcatcatggctgtggatgtaatggatactattacagtcaaatgcagtacacattggtagcagtgagagccgaaacccgtaaaacacgaacgtactggagcctcatgctttgtatgttttaaccctatccccttttattggcttggagagtgttaaggttg

SEQ ID NO: 293869 - DNA, 268 bp, Zea mays
aaaaaaggcaataacagtcttaagcatttatctataaatttaagcaaccaaaacaaacatccaaaaattcagaaactcagtcacagctaatttaaatccatataataaaaccttaattcaaaacaagcataaccatatcatttcactaagaacaacatcaaaacgaaccatgacagttcttcaacgggaactcttctggaaccttgccctggcacctgttccaccaaacttcttaggctcgcacctgctgggatcagcgaccagcaaa

SEQ ID NO: 293870 - DNA, 416 bp, Zea mays
tcacaaccccatgaagagaaagcaaatattcccacacatgtccagatccttctcctagacgaagtaagggtgaagtcaattcactcaaagctagccaagaacctaggctccgtcaatgtcatgaagaaggatgctgccgccaatctcccagccaaggacggcagcgtggtagggtcaggcaattacatagtcacgatgggtcttggcaccccaaagaagaatttaagactcatattcgataccggaagtgacatcacatggacacaatgccaaccttgcttaagatcttgctataaacaacaggatccaaatttttcacccagttcgtcctcaacttattccaatgtttcctgctcctcagcagcctgcacttcattgaattctgctacaggtaactcggcttgctgctcatcatc

SEQ ID NO: 293871 - DNA, 450 bp, Zea mays
  unsure (1)..(450): unsure at all n locations
tttctaatattagtattagaaataaaaatgaaaaagctttttgtgacttatcctccctctcacaagcatatgtattttacaaattatcacaaacccaagttattagttgttataaattcaaacctatccttcaatatcatggaacatctctttttcttaaaaatgaaataaaagattattttgaagaacggggagtatctcattccagattaagacatcattatgggttaagacagaaaattgtttggcattctggaatgaatgaatggaaaaactgttataggagttcttattcattacgatttagttcagaatagatggcttaaatttaggaccaggacaatggcaaattagagtcaatcaacactatctggctcanaataaacatttaacaaaatgggattcagatgaataagaaggattagttcattacgaaaaaaaaaatgattt

SEQ ID NO: 293872 - DNA, 196 bp, Zea mays
aaaacccgtgttgcccaaatgggataagcctaatgagcacgagaaacacgaattcgaatgtccggaaatacccgagtgcatggaagagcgcgatgagggtatggaacatgaacatgaggagtgccacgagtcacacgaatcgaacgagctcgaagagtactagatggaaaagcccaatttccccataggggagaag

SEQ ID NO: 293873 - DNA, 221 bp, Zea mays
ttgtccatggtgcccgaacactctttaagtttgctagggatcaaagaggcagatatagtgctggtggttctgaccctgccctcgtgtttaattgctcaagttactgttatgaggttgtttggagtggagcctggttatactatgccactgggaattgatcctatctacagttagctactcatcctaaacttgccaagcatgctgatgctttctggggtggc

SEQ ID NO: 293874 - DNA, 331 bp, Zea mays
atcgattctttatttcgggcaaatccaaaacaaatctatcgatggtttacttgaccggggttaccaatcacctttcaatgcttcattgttcaaaaccaaattagattacgtcaaaaacccaattccaaaagcttgattccaaaagatttggtctaagctttatgaagaagatgccgaaaccgcagccatggctttcattgcttattgaggaaaaatggcggaaatcccaaaatcttgaaccccatttccacacacagatggaaactcataccatatttcatacacagtgtggtgggatggagaagaaaacaccaatgcccaaaggtgtatg

SEQ ID NO: 293875 - DNA, 289 bp, Zea mays
gcataaatcgccgaggaaaacaagatgtcggggcagcaagaagaagataagaaacccggcgatcagtccggcggtcacatcaacctcaaagtcaaaggccaggacgggaatgaagttttctttaagatcaaaagaagcacacaattgaagaagctcatgaatgcatattgctaccgacaatctgtggatttcaactcgattgccttcttgttcgatggtcgccgtctgcgaggtgagcaaactccggactagcttgagatggaggatggtgatgagatcgatgctatgc

SEQ ID NO: 293876 - DNA, 202 bp, Zea mays
ccgtctcctttacaaatctcgccagctttatgttagtcaagctgttctgcggcaggaggttgccattcctgtccggttttactctaaagaggcttgtccccctggtttgatatgatattagatattgaaaaatatctttgtggaggtttttaacaatttctagacagtattgggaatatttaggatggagaaaatcaccatt

SEQ ID NO: 293877 - DNA, 140 bp, Zea mays
gactaatcgtgcctatggctcgcttgtgactttgctgatgatgaactgaaagatgaacttttctgcatctcggttgcgtcagtggtaaagtgcaaaatgcttatggaaacgtaccgagaagatgctgaatcacataaatc

SEQ ID NO: 293878 - DNA, 411 bp, Zea mays
taacttttaccaaacaaataatccgggaagaatactatgagaaatacatgaacaaacaacttcgaagctattctttctccatggttgatgactcaatcctacccttcaagcagcaacctgaccaaagagccacttgcggatctctggaagttatttattgaatgcaacatccaatcgtgcatccaaggtgttctcacacacaatctttccatctcgagatgctatcacaacaccttctgagcagaaagggccatgagcattgtgatgagaaggtgcaggatgaagatggacattgtcaatgaatatctctggtggatgaacattcactttggaagcatattcttcttttgctgaatccaggacagaactcaccaagggcacattatctttgcgacagcgcagtaagatagc

SEQ ID NO: 293879 - DNA, 451 bp, Zea mays
cggacgcgtgggctacatcatcttcattaaaggtagctagcaagatatggtttatttatttcaagagttagagggcaaggatacgatggagcctcaaatatgagagggcagtttcatggattgcaaagattggtattggatgaaaacccatatgcattttatattcattgttttgctcatcaattacagttggtggtagtttctattgccaaatgttgtgactcagtatatgatttctttaattacatcttattgattgtcaatactgttagtgcatcttgcaaaagaaaagatcttcttcttcagagacatcatgataaaattgtggaagaattagatagtggtgtctatattttctgggagaggaaaaaaccaagaaacttgtctcggcaggtcaggggatactaagtggggcccacattataagacattggtgcgtatctttttatgt

SEQ ID NO: 293880 - DNA, 292 bp, Zea mays
gcgggcgtgtggacccacgcgtccgcccactcgtccgcccacttgtccggcttgaaggatcataatatcatgcccggcatcaaggttgacaagggtttagttccattgcctggttccaacaatgaatcgtggtgccaaggtcttgatggtttggcttcaaggtgtgctgagtactataagcagggtgcccgcttcgcaaagtggaggactgttgttagcatcccttgtggtccatctgcattagcagtgtaagaagctgcatggtgacttgctcgatttgctgctattgctc

SEQ ID NO: 293881 - DNA, 298 bp, Zea mays
gagaacacgagcgccgacctgggcgttcggatccgtcagcagcgatgaagctctactcgagcctgtggaacgccgacgactgggcgacccgggcggcgcgagaagacggactggtccaacgcgcccttcgtcgcctctaccggcttccacgtcacggctgcaggcctcccggggcgcgctttgcgcacccagggcgcgcgctgtgggaccagccggagttcagggacctcgacgccgtcagtaccgtcgcctggccgacttaggcgcctgtcaccatctacaactactgcaccgatcg

SEQ ID NO: 293882 - DNA, 427 bp, Zea mays
cttacaaacaactcagagaaatctacttggtgaggacttgggtccacttagcgtgaaggagttagagcaacttgagaaccaaattgagatatctctcaagcaaatccgatcatcaaagaaccagcagatgctcgaccagctctttgatctcaagcgcaaggaacaacaactgcaagatgctaacaaagatttaagaatgaagatagaagaaactagtgaagaaaatgtgctgcgactgtctagccaggatattgggtgtagtggatctagtgggcatggtgatgaagccaaccaagaacaccttcaacttgctctagaaccttcgctgcatatatggtatcaaggctacatggaccacctgtactatgattaagttgcttctttgtgcgctgtgtgctctaatggccaaggttcttctatatatgtt

SEQ ID NO: 293883 - DNA, 427 bp, Zea mays
caaagagatggacgatggatacaagagcatgtgttgaacttccctccaaaactgttttggcatgttatattgatctttctgcagaggagcgtgaatactatgatcagatggaacaggaagggaggaacaaaatgcaggaattcggtgacagagattcgattctgagtaattactcaaccgtgctttatttcattctgaggctccgccagctctgtgatgatgttgctttgtgtcctttagacatgaaagcatggtttcctgcaagctctatcgaagatgtgtctaaacacccagagctgttgaagaaactggccttattggttgatgatggagatgactttgactgtcctatttgcctttcttcaccaactaaaactgtcataaccagctgcactcacatatactgtcaaacctgcatcctaaaaat

SEQ ID NO: 293884 - DNA, 329 bp, Zea mays
cggacgcgtgggcggacgcgtgggcggacgcgtgggcggacgcgtggggcttcagaaggacgggtccctcggcgccgagacacggtaggcgggggccggccaccgcctaccgccacccgacggagaagtgatctgagtgttcgtcgagctgtagtcaggtgattcgattccacgcacgttccattttacacggtgaatcttcagtcgagcttgtagtttcttgggtttgtgattgtaaagatggtggttgtgcttgtgcccgtacgtactgtagatgcagcaacgtgtacctacacaatttacatttacagagaaaatgcatgctggag

SEQ ID NO: 293885 - DNA, 298 bp, Zea mays
aaaaagaagaaaaaaaaaccagacctcaaacggccaaacctccttggacacgactcgccgcacccatccccatccgccgccgctgccatggccgacgagattgacacgaggccggcctccgcgggctcccgcggccgtcctgcgcacgctaccgaggacgacgacagagaggagggcgagatcgtcgcctacgccccctcgcctgcccttctcgtcgtgcacccgctcgagcactcgtggaccttctggttcgacaacccgcacggcaaaaacaagattgcctcctgggggagctcca

SEQ ID NO: 293886 - DNA, 412 bp, Zea mays
agcacggagctgctgatccggaagttgctcttccagcgcctggtccgtgagatcgctcaggacttcaagacggatctgcggttccagagccacgccgtcctggccctccaggaagccgtcgaggcctacctcgtctgcctgttcgaggacaccaatcctttgtccatccactcctagcgcgtcaccattatgcccaaagacattcagcttgctcgtcgcatccgttgcgagcgctcgttttgcttttttgcgccctgcctctttttgctcttgaggattgtggttgtctttttttattctttatcttgttgtttcttttagtcttttgttaattatctattttttttccggttttatatttttttgttctttttttctttttgttttttctttttttttgttcttttgtttt

SEQ ID NO: 293887 - DNA, 389 bp, Zea mays
tggaaatgcttgaggatgtgccctcgctatttgtcgctgttgttccagcgcacgtctcgatatgatgtactgagaactttgaagattattctgagcaccggctcaaatttttttctctgctccgagcaattgtcacccattgctttcaagcattaattcagctttcaagccagcaattgaagcttgtgatcgattcgatgaattgggcgtttagacataccgtgagaaatatctctgagactggccttagtctatagttggaaattttgaagaactttgttgctttaggaattcataattcattattactatattctctttttgacattttatctagatatttttgctgtttttgatcagctcatttttataaattttgtgttttagtt

SEQ ID NO: 293888 - DNA, 450 bp, Zea mays
  unsure (1)..(450): unsure at all n locations
aggtgaacctggagttgtcatccgaggaaagaaggtgatggcctcacgggtgctcctgctttctggcgatttgtgtccttacctgtgagtacctcatgttaaattattttaccanttgtcttaaatgattgctattgtacttaaagttatactgataagtcgtacgctctgtacttgaatgagatcttttggttgcgatcattatgtatgttcaaagtaatagatggactccatcttggttattttagtgttcgctagcagccttaatacctaatcaaattaggttcatattcgctttttagtttatcatgctcattcaaaattagctaccaccttttggaatgctattattcttttaactaattgatatgatttctggtttttgtgtgttactgtatgttttttgctatagttttatcctaacttttctattaatctattttattttta

SEQ ID NO: 293889 - DNA, 287 bp, Zea mays
cccacgcgtccgcccacgcgtccgcccacgcgtccgcggacgcgtgggttttggccaatgatgaatggaaggaggatattcttccagagatactggatggtcacaatgtttgccgtttttctggatccagatattcctgtaaggtgtgattagtttgattggttgtaagggctttttcttgtttaacatgctgcatatatttctttctattatttatggttattatcttttttattaccttaaggagattttttctcaaatttttatgttttaggcattattttttt

SEQ ID NO: 293890 - DNA, 359 bp, Zea mays
gcgacatgtgaaaactcatctagttcaatatggccttctatgctgcgtcggacctgtgatggccgactctaaccctctagtatgacgcacgctgttactgctgctctcctagatgaatgtatacgagaagacactcatggtatctagctcccagatcgaaatgtagccgaccgacaaggttgatggtgtaacaatggttatagataatgtgcttgagcaggctctgtattgagcttaccaacatgtccttatacatggacgaaaggtattcagcgatgtctccacattagacgaggatttagggactgacaataatgtcgttgttataatgctcagacagaacaagggatcatcaagtg

SEQ ID NO: 293891 - DNA, 446 bp, Zea mays
tggtgacttcccttcaatccttctacaataataaacaggttgggtgcaagatgggctatggattctgtgctactggaacaatgatcttcaaaagtaatctgtcttctcgagaaattgtagagcagctggtccatgcatcctactattctcagatccaaaatgttgttttcatggagcttaccaacgaagattctgaaatatgcagttcaagttacggatatcaagctgaagctttaccaacgcggctatcattcacgtggaaagtggaaaatttcttgtcttttaaagagattatggagtccagaaagatttttagtaaatatttttaggctggctgctgtgagttgcggataggttgatatgagtcgtttgatacgatctgcatatacttggtaagtgatcaatcatctgggtttgatcctgattagaaactttgggtacatttt

SEQ ID NO: 293892 - DNA, 332 bp, Zea mays
cccacgcgtccgcccacgcgtccggaaggcttcaaggccaaccacgccaagtctggtggctgcggctctggctgcggtggtggctgcggcaccctgttcagctccagcgctgcggccggccaaggccagtccagatccggcggctgcggctctggctgcggtggaggctgcggcagtggcagcatggtcgctgaaggctccaacggcgggcacgccaagtccggcggctgtggctgcagttgcggtggccgaagtggctgctgccgctgatgctgttgcagtggttgcagcaccttgtccaacgcatgatctgtgttgagtggttgcatttg

SEQ ID NO: 293893 - DNA, 264 bp, Zea mays
cccacgcgtccgactagaggcacttgatgatgaagatgcatatttagctcaaagtgttttggatcatatgcaactaaatgacattgaggctgccgaaactgctaagctctggtgtccagtatgcaagcaaggatatctacgagaaacacgtaatctcatatactgtactctgtgtaatctacggcttgaccttggagaagataagatgactctggagttcttactagaacggttggccaatgcacatattgatcactttgacag

SEQ ID NO: 293894 - DNA, 257 bp, Zea mays
cccacgcgtccgtccacgcgtccgtccacgcgtccgagaatacaacactcggcaaagccttggattccggtagtgcatattacaaccatttgtgtgtaaattgcttatttgagaccctaaacgaattctaataaaaaagttgtcaactacaaagattaataacttttgaagttctacaacttttattttgacacttttttcatcatccgatgtaatttgcaaatatttgaattttaaatttgacatacttattttca

SEQ ID NO: 293895 - DNA, 230 bp, Zea mays
cggacgcgtgggctgacgcgtgtgctgactcgtgggcggacgcgtgggctcttcttccgattgttggtggtgtagctttggcatcccttactgaggcctcctttaactgggctggattttggagtgcaatggcttcaaatgtaaccttccagtcaaggtatgtgctaatctagaaacttatggtgaataaagttgaatctctcgacaacattatcctattctcgatcatt

SEQ ID NO: 293896 - DNA, 387 bp, Zea mays
agatgatgcggggactgtgcagctttattgtgagaaagacagccttacggaggaccaatttgagcaactaaaggcgtttattgatattggtgatatattaggtgcaagtggatccattaaaaagacagagaaaggggagctatctgtttatgtgaaaaatttcgaaattctcacaaaatcattactcccactaccagataagtatcatggattaactgatgtggacaaacgttatcgtcaaaggtatgttgacatgattgcaaaccctaaggtcgctgatgtattccgaactagggcaaaagtggtttctgaaattcgcaagacaatgggaatcatttgggtttattgaaatcgaaacttcagttctacagggagcaacaagtttgt

SEQ ID NO: 293897 - DNA, 232 bp, Zea mays
ctcacgcgtcctcccacgcgtccggccacgcgtccgtccacgcgttcgaccacgcgttcggccacgcttccgacactgcagtctccaaacgtccagcactcacagtgcatacaattggtccgtgcttctttcgtgtgccacatctgaaggaggatgaaaccccaccctaaggaggaactcctggatgggcagcaatttcaagtgctcgaattggaccttggcttcggttgtt

SEQ ID NO: 293898 - DNA, 387 bp, Zea mays
cccacgcgtccggaacgtcatccgcgacgccgtcacctacaccgagcacgcacgccgcaagactgttaccgccatggacgtcgtctacgcgctcaagcgccagggccgaaccctctacggcttcggaggctaggctggatgcctcttctccttgctgtcgtggatgcctgtttgttgttagggttatttcgtttagttccttgtctgtgacgtgttggactattgttagtagtattcttgaagttgtttcgaatgtaatccaatcttatcgttcgataattgaaaaaaaaaaataatattatatatattaattatttatttattattattatttttctattatataaaaattaatataaaaaaaggggcggcccttttaaaggatcc

SEQ ID NO: 293899 - DNA, 461 bp, Zea mays
ccccgatctcggcgacatcgaagaggcccacaggttcgggctctcggtgattgccatcatgatggccgcgtgcctgctggagcccggggacaaccaccgctacaacatgttcccgtcagacactcacgtcaggatgcacgatgtcgtgcgcgacgcggcgctccggctcgcgcccgccaagtggctggtccgcgcaggcgctgggctcagggagcccccgcgcgaggaggcgctgtggcggggcgcgcagcgcgtgtccctgatgcacaacaccatcgaggacgtgccggcgaaggtgggtggcgccctagcggacgcgcagccggcgtcgctgatgctccagtgcaacaaggccctgccgaagaggatgcttcaggcgatccagcatttcaccaaggctacatacctggaccttgaggacaccggcattcatgacgcctttcccatggagatctgctgtt

SEQ ID NO: 293900 - DNA, 444 bp, Zea mays
tcgcaaaaacctcgtcagtttgggaacagcggaaaaccggccccccgcccgcctgctaggtgctagcaacagcagtcgccgccgatgggggtggactactacaaggtgctgggcgtcggccgcggcgccaccgacgacgagctcaagaaggcctaccgtcgcctagccatgaagtaccatcccgataagaaccctacgccgcaggccgacaccctcttcaagcaggtctccgaggcctacgacgtgctcagcgacccgcagaagcgagccatctacgaccagtacggcgaggaaggcctcaaggccggcgcgccttcgcccgccgtcttcacgcacggcgccggcgccggcgtccacaggttccgctttaacacgaggagcgccgaggagatcttctccgagatattccgcggcgggtttgctggggcaggcccccgttacccc

SEQ ID NO: 293901 - DNA, 397 bp, Zea mays
tcgcccacgcgtacgcttcatgatactggttctttacccagagctgatactgtccagagtcttcctctacctgttactgataggggagtgctactaccggtggcgtctgaggcattcttgacacatggacacccgcctattccacgcggagactgttcaccccgacgagcttgaccaggagcttgacacctttcccactttacggccatgatacgtcttgcggatgcggttcgacaggctgctcatcgttgccttgaggatccagaccgtggtcagtgaccttgctactcagggcgagcggttgcagtcagtgctgagctggacggacccaatgtccaccggcctgttcgttgacctatgctttgttggcgccattttgctgtacgttacacccttt

SEQ ID NO: 293902 - DNA, 336 bp, Zea mays
gcaatatgaaagcctgatgctttcgttcttcgttttatttaagatcactttcctcccttggtgttatgaaatgtgcaactctttaatcagggatggcaaccgatagtgaagcctcgaaggcagctgaggttgtggttgactggcataaacaggacaaaaagaggatgctccatgcagtttaccgtgttggggatctggaccgcacaatcaagtactacacagaatgctttgggatgaaactgctgaagaaaagggatgttcctgatgagaagtacaccaacgcctttcttggctttgggcctaaaaaacaccacttttgcagtgaatttaccaact

SEQ ID NO: 293903 - DNA, 396 bp, Zea mays
gattcaacaaagacgtacgtacatgcacaaaactagagcgagctgtgtgtgtgtgtgttcgtcatctcctcgatcatggcgaaggcgcaggcgccagggccgcaccctctacggcttcggcggctaggctgagtaccatcgccgaggacgacagggagatgctggcgctgtgcgggtcaccgtcggaccacggccacgcgcaggcgcaggtggcggcgaggttcatgacggaagtggcgccgccgcaggtggtgtcggtcatgcggcgaaggaaggcgccgaggagcctggacaccatcggcgaagacgacagggagcagcagctggcgtgcgggtcggcatctgaccacggcctcgcgacggcgtggtcgtcgctccagaggataccgactccac

SEQ ID NO: 293904 - DNA, 376 bp, Zea mays
aactacaggcgttcgcatatcaacatgcgttggaaccactatcctacagaaagatctactctggggaattctgcactgaattaatcacaccctactatctggaacctgttgaaaggtgggaagaaattgctggcacagtctttcagcacttcgaacttgatggccaccgattgatatcagccgatgagttagcacacgaactaaatgtgtcgccgacacattacttcattgtgcatgactggatcacaaaatcggacggcatgcttaacttctttgggttcaccagaattcttcacggtgtcacgatactgggtttaaatacaatacgacactaaacagatgcaaactgtattcacttctaatttgaagactctca

SEQ ID NO: 293905 - DNA, 440 bp, Zea mays
cccacgcgtccgcccacgcgttcggccacgcgttcgctcacgcgttcgcggacgcgtgggctgtggctccgaggtgtatagctgtctctcacacatgtcggcaccatgtcaggcgcctgcaccagggcttgtgctctgcaagaacgatctcccctgagatgaggagcaacccagactctgatagccagtacttggccgagctgctcgccgagcaccataagctgggggcattcatgcaagtgctgccgatacgcagccagctgctcaaccaagaaatcatgcgggtgtcaagcatggttcatgaccatggattcagcgatcttgacagacaccggtttagaaagactagccctatgtcttgaccgatggatcgggctgatctacatggaaacggtcgcggaccatggaatgggatgcaccaagagagattgggctttcct

SEQ ID NO: 293906 - DNA, 434 bp, Zea mays
cggactcgtggggttggcttctcctccccctccggttcgggttcgggttcgtgaggttctccggggttcggtttcgtgggtgagcggatcgagatggcggcgtcggatgttgagtaccgctgcttcgtcggcggcctcgcctgggccacggacgaccactccctccacaacgccttcagcacctacggcgaggtcctcgagtccaagattatcctcgatcgggagacgcagaggtcccgcggcttcggcttcgtcaccttctccacggaggaggcgatgcggaacgccatcgagggcatgaacggcaaggagctggacggccgcaacatcaccgtcaagctcaacatgcttgccaacgatcaggtccgtcccctgttgcaggacgtcgccacatccatggccaggctcggttccttgctgccgtccgactttga

SEQ ID NO: 293907 - DNA, 312 bp, Zea mays
atcctcgcatttcttcccatcccccttcgcaacccaaaccccaactcgccccgcatcgatggcgcccaaggccgagaagaagcccgcggcgaagaagccggcggaggaggagcccgcggtcgttaaggcgcccgccgggaagaagccgaaggcggagaagcgggtccctcctggcaagtccgctgccaaggagggcggcgagggcaataagggcaagtaaaagggcttgaagagcgtttaaacctacaagacctacatattcaaggtgctgaaccacgtgcacccggacattgacatctccttcaaggccat

SEQ ID NO: 293908 - DNA, 453 bp, Zea mays
agggcttcggatcccacaccgaggaaaggagaagagagggtcggaataatggcggccgaggagggtgccgtgatcgcgtgccacaccaaggacgagttcgacgcccgcatggccaaggccaaggagcagggcaagctggtggtcatcgacttcatggccccctggtgcagtgggtgccagatgatggccccggtgtacgcggactgcgccagcaagtacccttccgcggtcttcctcgaggtcgacgtcgacgaactgctggaacggcgagacgctcgagagctttgctaccgtcgacgaggacgagctccgggacgccgtcaggaagtacgccggcgctggcactacgacggctcctgcctcggcgtccgcctaattcaggagatgtgatgtgtagcagatagcgcgcgcgcaccagtcgtcaataaataaataaataaataaataaataaa

SEQ ID NO: 293909 - DNA, 263 bp, Zea mays
caattctgaattcgagggacgacgtacgcgtacgttcacgcgtgcggtcatatcagcctctgactattcaaccacctggaccgagatcgggcgggtgttaacaatccctgggataccaaggatgatggcttttgccggtccttatcctaagatgaatatggacccacttgtgaaggcattggccgaatgccatccgcggagggaacttgctacccttaaattgctattgggtaaccgcaaggctttttccagttggaacaaat

SEQ ID NO: 293910 - DNA, 390 bp, Zea mays
aaaaaaaataaaaaaaaaaaaataaaaataaaaattaaaggccggaactccagctggtccagggttgatggcgcctaaagtcgacatgatacccatggcatagaatccgctagatgaggagcccgcggcctagaatgcacacgtcgtgaataagacaacgcggagaatcggatcccaaatggcatgtccgctgacaaggatgtcgccaagggcaatatgggcaagaagaacgtcaagaagagcgtgtagacctaaaagatctacattttcagggtgctgaaccaggtcctgccggacattgttatgtcctccaaggccatgtggatcatgaactcttacattaacgatttctacgagaagttcgctcctgaggccgccaagttttcgcgc

SEQ ID NO: 293911 - DNA, 458 bp, Zea mays
ttcccggtcgaccactcgtctcgcccactcgttcgcccactcgttcgctgacgcttttgctgacgcgtgggaaaacacttaagcggataaggcatacaaggaccggaacaagctaagcagctgaagaagccagcagaggaagagctcctgtcactagaaggcaccctactggaagaagcctaaagctgataagctggtcctctctggcaagtccagctgtcaaggagtacgtcaaggtcaagaggggcaagaagaagggcaaaaacagcgtgtagacctacaagatctacatcttcaaggtgctgaatcacgtgcacccagacattggcatctactccaaggtcatatctatcatgaactccttaattaacgatatcttcgagaagctcgatgctgaggccgtcaagctcgcgcgctataacaagaagcctaccatcacactccttgagatccatacc

SEQ ID NO: 293912 - DNA, 346 bp, Zea mays
cccacgcgtccgcccacgcgtccgcccacgcgtccgcggactcgtgggttttttctttttcgttttcgtttgattgctttttatgctgtttatgttttttttggtggtaaatatattttcattcaaatgggaaatagtgagttccagtcgtgacaggccaaaattggatcccgtggcattcggccatagtatgataacctttaactcacgattattacgggtcctgaggaggatacaaaagggcttcggatgtacaatcagagcttgtgtgactggacagtttgcaacatggggtgaacaattcaccatattttatccaagttcaattccgagattatgggtcaaa

SEQ ID NO: 293913 - DNA, 373 bp, Zea mays
cccacgcgtccgcccacgcgtccgcccacgcgtccgcccactcgttcgcccacgcgtccggtaacagtgatggtagtgagagcagcgatgatgacaagaggacatagactctactcaacagcaatcttttttcggttcagttgttatgatctttacatatagttagctacattgatagcggaatgtggggtcattttttctgtctggcccattttgtgtacatcctttttgacaacaaacaggtaaaagtgacaacgtttgcaaatcgacaaacaatggtgagttattcaatctaaaaaataaaaaagaagcagaaaaatcacccaacatgtttacagatagcaagggagcaccaaagaaaatatgtaacacc

SEQ ID NO: 293914 - DNA, 394 bp, Zea mays
cccacgcgtccgcaaagctcttcaatctattcacccagtttaacaatgtgttgactgattttgatagagacatgtggtcctatatatcattaggctacttcaagcagataccaaaggctggtgaagttggttcttccactatgcctcataaaatcaaccccattgattttgaaaatagtgatggcaatttatgtcaggcgaattctatattgtctggtataagcatgaaactaccaatatcccggttgcagcgtgacctaacagactcgactgttttgagaaacctgggtatgggattaggtcattctctattggcttacaaagctaccatgcgtggaatcagcaaggttcaagtgaatgaatcacgtttagctgaagacctggagcaaacttg

SEQ ID NO: 293915 - DNA, 441 bp, Zea mays
  unsure (1)..(441): unsure at all n locations
cccactcgttcgcccactcgttcggccgatcacagtggaggatcacaggcaacaacgacgacccgcttggtgtgcgttgctctggaaggtaacagaagtttgggagtggcccatcgcactcgttctgaagctcacaataccatcaacccttccttccgagtggagcaaagtttacatcagcgcaaacatcagcctgtgccctctcctaatcctgtactccttcagctcgttcatccctctagacacccgaatagtgttcctcctcccgcaagtccgcttccctctatggtccgtcgtgctcttcgccagcctgtgcctagccctcttccactacctnctcgagaaagaagcccccgaaacagagaccatcgcgagcaccaccatctncttcatcatgagcgtcttctggatctcgaccacngcnggagagctnctgagctg

SEQ ID NO: 293916 - DNA, 365 bp, Zea mays
gaacatgtaccggaacatggacatgctctatgaacgtcctgaccaaggccgcgcccggggacagccccaacaccggtggcatccacattggcgtctaattcggcatcacaatcaccaacaccatcattggcatcggtgacgactgcatctacatctgcctctgcacctgcaaggtgaacatcaccgtcatgacctgcggccttagctacggcattagcatcggcatcctaatgcggtacatggaccagaacgacgtcacggacatcaacgtcaacgattgcactcttgataagactatgttcaacatgatgtgtcacgctgctcaactccttgatcaactacgccattagcctggtctgtactgt

SEQ ID NO: 293917 - DNA, 397 bp, Zea mays
  unsure (1)..(397): unsure at all n locations
cccacgcgtccgcccacgcgtccgcccacgcgtccgcgaccatctccgtccacctcatggctccggcaagcagttgctatactcatccagggtcagatcagcaactcttgccttatcctgctggctggccgcagcaccggtggtgtggtggaggatggcattgaaatacgtggccagggtaccgtctccatggtgggcgccacaacgtcgtttggctggttcatgggtttccgtctgctcggtaaaatgcggcgcattgggaggacgggatgttgtgtgcgccgctgttagcttcagaccatgcatcgacattcacaaggggaaagttaagcagattgttgggtctactcttcgggattcatccaatgatggcatggaactngtgacaaactttgaa

SEQ ID NO: 293918 - DNA, 398 bp, Zea mays
gcgacctggcggaccgtgggatccgcggccctttttttttttttggcgggtaagatcaatcagcatgtcctaatctctttgcccattgtgccgcagatcaagttctggatgttaccaagttacggaagatacaaaattcttccgctgagcatattgctctgcgttattcaacggccaaaggaaaatgactatttctataactcgcgtttaaatattaacagccaaggttgggaaaaagcagcatttgtgaaaagcttcaagcagccttgttcttgcagtagttctccagccactccatggtaacactcttcggcctctcaagtggcatgccaagggcacggtcccagatgagctgagatcctatccccatgctttttgaaacaccgaacaagacagtg

SEQ ID NO: 293919 - DNA, 372 bp, Zea mays
cggacgcgtgggctagctagctttccccagctcttcttccacagcactgtctgtctggcaattaggtgtactaatgcgctagtggcactgctgctactctcgtgtactcccagctatctcctctctatactcttgtacgtacgcacgtgtcgcaaccgcaatggagtgcgagaccgggcttgtgcgctccctgaacagcgagggcctgtgcatgtcggcagcggcggcggcgccacgcgccgacgccctgaactggcgcaaggccgcagaggacctgtacgggagccacctgtacgaggtgaagcggatggtggtggagttccgcgagccgctggtgaggatccagggcgccagcctgagcatctggcaagt

SEQ ID NO: 293920 - DNA, 409 bp, Zea mays
cggacgcgtgggtctcaccaaactttctaaagctcaccatttgccctgcctacttgggtcgtacgcaaccctcgccgagagcagcccccgtaaaatcttcctctgcatcctattcgctattgcgggtggcatcgccggtggcgttcgtgtgcttctcggtacggtgaaacctttattgccgttcctgccgcactttcctcatttcttgagactttggccgttggacggtggactctgcgggatccccaatctcctgctgagcttccgcacagagggcgggcatggctggaaggcataccatcattctcatgcaaccatcacagaacagatcgacgaggacatttatggactacgattcagttaaccactcgctggatggaatatgtggtctttacgaaaggaaaatcag

SEQ ID NO: 293921 - DNA, 361 bp, Zea mays
gttctagatcgcgagcggccccccttttttttttttttttttttgcgccaacatctcggtacaattattcgttcccccatcagtaccaccactagaacaaggcgatggagcagatagagcgaggcatgctatgccatggcccatggcacgcgcggctgactgtctgactgactcgaacaaaacacaaaaaacgacactgctacaatattatatactagagcttattaattagctagagataaagagtccttccgaggaccccatcacgccctgcagcgtcatcgccgccgtcgtctcacttgcaggtgcaggggtcgcaggtgcagttggcgccgcacttgcacccgccgttctcagctcc

SEQ ID NO: 293922 - DNA, 250 bp, Zea mays
cggacgcgtgggggcatccaggtaccatcgccctgatcgctgtcagggagggcgtcgtgcagctcggctccatgaaaaaggtaacggaggacctgagctacgtggtgatgctccgccgcaagttcgggtacctcgagagcatcccgggggtgctgctcccgcacccgtcgtcggcgggcgtgttcgcggccggtgggtgcgtggggcccccgccggacatcgccgcggcgtggtcgtcgggcctgatgcc

SEQ ID NO: 293923 - DNA, 343 bp, Zea mays
cccacgcgtccgcccacgcgtccgcccacgcgtccgattctgtggtgtgtcattgacaaggacacgtagttcgctggtgtctgattgaatctgggtctgctctagtcgatttggtccctagtagtatgtaacaggagaagataagagtttgttggatgtgcttgaaagcttcgtcctgttctcgcttccccaaccattctagagtcagaattccatgtcattcaagctgatcttctcattcatcgttttgctgcatagtgcgtcttggtccaattgtcttcatttaggttctagtttgagaaccctattttttcaatggatttttatttttacaaaaaagaaa

SEQ ID NO: 293924 - DNA, 370 bp, Zea mays
cccacgcgtccgcccacgcgtccgcccacgcgtccgcccacgcgtccgcggacgcgtgggtccagatctcccttcgcagccgccgaggaaccccttcacagcgcggaagatggctgaacaggaggccccagtcgtggttgaggcaccaaccccagttcttggggagcctatggacttgatgactgctctgcagctcgtgatgaagaagtcaagtgctcatgacggacttgtgaagggtctccgtgaggctgccaaggccatcgagaagcacgccgctcagctttgcgtgcttgctgaggactgtgaccagccagattacgtcaagctggtgaaggcactctgcgctgagcacaatgttcacctggtcact

SEQ ID NO: 293925 - DNA, 403 bp, Zea mays
agaataaagcagaagagataccgggatgtctaagacggctggcgtaggcagactcagaggagccggggcgtcggacgcggggcaataataacatttagcagctgctgtatgctaggagttctacggtcaatacgctgcatccatacactcttacaccatgcgccacatgatctatgatgactgctcatacaactgaatccctgttactaacgttaactccaagatcctatccaatgtaatcgagtactgcaacaagcacgtacatgccgtcgacgtcgccgtcgtcgcctcgaatgccggttccgacgacgtgggtgccttcttcgtcaacagtaccgacggcttcggtgaggaccttaagaactgtgatgcggacttagtcaaggtcgaacaggccacgctt

SEQ ID NO: 293926 - DNA, 276 bp, Zea mays
gtccagctttctcgctgtgagcctccaccagcgccctaagccacacgctgaggctgtcgccgatgtctacaaccgcgacgatcacccagccgatctgtataaatgccttaacgacacgacatccagtctcttgcttgccactatggcactgcaatgctcaaggctccttttgctgaccatcatgcaccaatggctgcctttcctaacattggtggccgtcctcgacacactgccgtcactgtctggaccggaccacaagacgcatttgctggccat

SEQ ID NO: 293927 - DNA, 356 bp, Zea mays
cggacgcgtgggcggacgcgtgggccaggagctgctgtcgacgcccggcgcgcccacggcgccgatcgtcggacggttcgccgccagccagaaggagttcttcaggagcttcgccaggtccatggtcaacatggggaacatccaggtgctgacggggagtcagggtgagatcaggaagaactgtaggatggtcaacggaagctagacccgtcgacggcacaagttactggtgaactgaaagcagttctgctgtatgtacgatgcctcaaacatgttgatgggataatggtgcgccgatcgatttatttgtcaaggagatccaataaattggttatttgcatttttttcaacaaaaa

SEQ ID NO: 293928 - DNA, 296 bp, Zea mays
cggacgcgtgaatcgacccacgcttccttaacaaacacaataagacacaccagggaggcttacaaaactggggggaaagatctacctgatctaaatggcaagctcactgatatgtacttccaagttcctactgtaaatatataaaaataataacctcaccatcataatcaaaaacggagcctactatgaggatatcaaaaaaactattaaagctgcttcctaagatccactcaagggtatcatgggttatgttgaagaagatctggtttataccgacttccttggtaacaacatgt

SEQ ID NO: 293929 - DNA, 446 bp, Zea mays
cccggtggacgcacgcgtccgcccacgcgtccgctgacgcgtggtccttaaggagctgccgggcgcatacgccttcgtgagggacatgcctgtgctgggcgctgtccacatcatgcgtgcaggtggaggacgagcggacgctggcgatcagtggttagcggcgccaggaggagcgcgaggactccaagtacctgctcatggagcggcagctgcgcaagttcatgcgcaagttcgtgctgccggacaactccgacatggacaagatctctgcggtgtgcatggacagcgtgctcaccgtgaccgtcgagaagctgcccccgcccgagcccaagaaacccaagaccatcgaagtcaaggtcgcctgatgtgggactaggtctaccgatcgtggctctgaagatgtgggagcagtgccagcgagttgtgaggacctttacctgtgtgga

SEQ ID NO: 293930 - DNA, 253 bp, Zea mays
cttgtttctaatgccaaaggacccaaatccgtttgggtacctaaagttaagaactaagtttcttttgtaggttcatgcatccattgtctcaagtaggattctcgttttcactatcactttctacattactgaatagactggggtatcattcttttactccttttatttttgcttttatgctgcggtaaatttgatggtattctaataattttagtatatgtaagtatggtttgcagttgtatatattattagt

SEQ ID NO: 293931 - DNA, 339 bp, Zea mays
ccacgcgtacgcacactcttgaccacacgcgttcgtctaccagagacccatcgaaccaggggtgtcaatgcgttcgtgcgacacattaagaacgtcataatccatgccacacctgtcatcttcaacaccctgtaccaaccctaccgagagggagcttactatctacatatataccactataaactcaacatgggtacccacactgctgtctaccactagcctttcactgaacatccctgactattatacacccacacaacttatgaaacctaaagctaagaacgaaacgtaccttgatgctgtaatcacaattcccaatggaaccttgtttaccatgtg

SEQ ID NO: 293932 - DNA, 335 bp, Zea mays
cgagcggccagactttatgagaggttgagggggggacaccatggctgcgatgaatctgtacggttcagtgatgtcttggaacgtgactaggtgctcaacagcgctggacgaggctgaattcgactacaatatcgtgcacataacttcgcaccatcacacaagaccacgacacatcgatggaacttgtttagtcaggttccagctgtacaggatattgaattgtacctgttccaatcaatagcaatctgcaagtacgctggttgcacaaacaagccagagctgattagggaaggaaatctcgaagaggcattaatggttgatgtttggatcgatgt

SEQ ID NO: 293933 - DNA, 271 bp, Zea mays
cttgcagaatcgcttgaaaaaaatataaatgtcgtgcaaatcacaggcaacaaaagaagctgggcgaagccagcaacacgcatgcactgcgacgtgcagcagttctaagtttaaaccttcgaagtcgcctgatgttgtgtcatgtcatggtaggcctaccgattgatgaattctcaaggaagactatggatgccattgcagaagagctgacttatgagaagacgcttgcttactcatgcatgcagtaaattctaccacatgcagagagcac

SEQ ID NO: 293934 - DNA, 459 bp, Zea mays
cacgttcacacttcgggcttattcgtttcaccgttaatccatgtggattgggtggtattgaggtggtattgagtcggtttaaatccatagcaagctaaaattcatcccaatttattccaatacactccaatccacatgtaattagaataactgaacaaggtcttcagtgtttcattctattccacacacttagttcaactttgtttaaggtatactacattatccttgtacactactcagcctgtgagttcatatcggttatgatgattgcctgtcactcatcaaatcatacttttcattatccatagaaaaaaaaaccgaattaggtttttaagacagctagcttttgatacatgtgtgtgttatctcaatattatgagggctccaaaagagtatgatgggtagctcgagtaaatcgaattaaactattttttactggcagatatctggaacagttta

SEQ ID NO: 293935 - DNA, 388 bp, Zea mays
gcgtaccgtgagacaaactcagacatattggtttacctatctgagttgcagagttcttgtgcggtgtagaatggtgccctacagaatgcatgcactgagcttgcagcccgtatgtctggcatggacagatctagcagaaatgctggctatatgcttgatcgacttacgcttacttacaactggacacggcgagcatccatcactacatagcttactgagattatatctggtgcatcagcccttgaacgataagtgaagagactatgtggacttatgcctatttgcccaattgagatcctcacacatgaaggcttattttcttccggaggctcagtttcaacccttatcggttcactgttccttgatgaacgtattctcatgctttatt

SEQ ID NO: 293936 - DNA, 327 bp, Zea mays
ccaaatgcgtttactgtgggttctaccaagaggcttgcccagtcgatgctattgttgaggggcctaactttgagttttttatgtcttgctgctaagccttgatatgcatttaggtactgtttttatgtctctaggaaatcaatctatgttttctcaacttctggatcatttaatacttgaaatagctggctaaccatttgaaaagatatatgagatatcatgaggaagttatcttcacacatgatagagaacagaagtttagaatttttttttctctaaactcagatttgatttcacatgactatagttgctactgcaatcttaggg

SEQ ID NO: 293937 - DNA, 385 bp, Zea mays
acaaaaaaacagaaaagaaaaaggaaaaaaaggacacaaatgccagcagaaaaaggtatacacacgcggatggagcactacactttacagaggcgagaagaagcacgtcgtacgccggcatcgccatcttcgctgccgtcttcggcgtcccatggtacttcatgacgcgaggggcaaagcatcaatctcaccaagattacatggaaaaggctaacaaggcgagatcagagaggctttcttctggacagtcatctgcactaaaagaatgtatgtcgtattgcctattctggtccctgaccttcatagcttgtcatagatcatacactgtattgatctgcactcaacggatttgatctcgtgttaaataagccggttatctttcttt

SEQ ID NO: 293938 - DNA, 336 bp, Zea mays
aacagacatacacacacacttacagggcgatataatcccgagcctggagatccccgacaaggtacgccatcatgcatctggtcacgttgcgaccatggagctcaacaccgaccaaatctaccgagactacatgctcgattccgaagataactggaattgccagctcgaaaacattaccttcaccgccaaatatggaaacgttccacagatccatgcacgtcttcatcaaactatgcctagtcatatttatgattatacctgatatgctcaagaacgctaccatgttcaagctcttggaaactacaattaatcgcaaatgatcacctattacaattt

SEQ ID NO: 293939 - DNA, 317 bp, Zea mays
agatattctctgcaaaaagagggcacttgaagttcgccattcaatctcaagagttctttaggactctgcaacggtactacagtaatgcctatatggatgcttacaaacaagcagcgataaacttatttctaggatacttccaaccgcaggtgggaaaacctgcactttgggagccagaatctggtgacgagcatgtacttgatgacgagacaaggtaagctagcaatatatacctatgcttgaacttacagggttaagtatgctcctaataaaagaacaatatacgctttttaatcgacaacatttgaataatatgt

SEQ ID NO: 293940 - DNA, 441 bp, Zea mays
ccacgcgtccgcccacgcgtccgcccacgcgttcgcccacgcgtccgtccacgcgtgcgagcggttctacgtccgagtcgtcgcatcaggtcccctcgattcgccggcggcggcgccaccaaccaagctcatacatctgaattgactagtccaactcagggatttctttggggaccaatcaaactcaagaactaagtttcatgtctgatctcgacgtccagcttccatctgcttttgatccgtttgcagaggcaaatgctgaggactccagtgctggtgctggatcaaaggactatgtgcacgtgcgtattcagcagcgcaacggaaggaagagtctgacaactgttcagggcttgaagaaagagtacagctacaacaagatcctcaaggatctcaaaaaagagttctgctgcaatggtactgtagtccaggatccagagc

SEQ ID NO: 293941 - DNA, 259 bp, Zea mays
cggacgcgtgggaaaaaaactaatagctaatacacatactaaacaaaactgacaaacgggcggcattgccatgtgacccaccgtgatgatgagcctcgtgggcaaccggcgttgaccctttccagggtctcaagtacggcagcagccttcccgtcgtccgcagagcaccaggagcctcggcaacgtcagcaacggcggaaggatccggtgcatgcatgtgtggccggcctactgctacaagaagttcgagacgctgtca

SEQ ID NO: 293942 - DNA, 375 bp, Zea mays
gtctgctcgtctgtcgtctccacctcgtccctcacctctgaccccaagcgacccaagccaaggttgcaccccacccccgcccccgcccctatccaatccgatggagggcggcgactcgtccggcgccggcgccggcggcgccgtggccgcggcggccaagtggcggagcgacgcgtcgcgggcgttccagtactacctggaccgctcgacgcctcacgctacggggcggtggctcggcacgttcgccgtcgcggccatctacgcgctgcgggtctacatggtgcagggcttctacatcgtcacctacgggctcgggatctaccttctcaaccttctcatcggtttcctctaccgcatggtcgaccccgagctcga

SEQ ID NO: 293943 - DNA, 451 bp, Zea mays
  unsure (1)..(451): unsure at all n locations
cccacgcgtccgtgcaggggaaaaccacagccatcatttgatcagactaagcctgctctgccagcacttgcacgacttatccattccaacgacgaggaagttctcactgatgcatgctgggccctgtcatacttatctgacggcactaatgataagatccaggctgtgattgaagctggtgtttgcccccggctcgtggagcttctcctccatccatcaccatcggtgcttatacctgctctacgaactgttgggaatattgtcactggagatgatttgcaaactcagtgtattattgatcatcaagctcttccccgcctcgtgaatctgttgacgcagaaccacatgaaaagcattaagaaagaggcatgctggactatttcaaatattactgctggaaacanagatcagatacaggctgtcataagttgccgtatcatcgctcctttgt

SEQ ID NO: 293944 - DNA, 285 bp, Zea mays
tcgcctgagaacagatttggatcgttgagaggagctgctgagatcaagcagcaccccttcttggaaggcttgaattgggctctgattcggtctgctgctccaccagagacacaaccttgcaacatcgtgactcttgccaaagagcggaaatagtgctaaactgtaccagaacgaaactaaggaacttaacactcaaggtcctctcagtcgcttctgaacttcaagcacttgcatacaatctgccgttatttcgaaagagtcaggatgtatcccggttgcgaacat

SEQ ID NO: 293945 - DNA, 464 bp, Zea mays
cccacgcgtccgtcttaccttgccctaatgcctcctcgtccgatccattcctcaaacaataaaatatccccagatagctaggctcggccgggacgtacgcatggaggtggaggaggagctgcctgctagcgctgatcttaccggtggctcaaagcaggcgaccactacgacgcccttctacctcgccttagatcacacagcttccgccaggtcgtctccaccgccggcagaggcgccgccgctgccgcgtgctgctgctgccaacagcgagaggggatccgaaataatcaaggcgaagattatgtcccacccactctatccggctgtcttgagagccttcatagactgccggaaggtcggagcgccgccagagattgtcggccggctttccgccctcgctgatgacgtcgaaatgaattcagacgacagacaagaacagcgacgagcagtagacccagagctcg

SEQ ID NO: 293946 - DNA, 451 bp, Zea mays
  unsure (1)..(451): unsure at all n locations
cgccgcagccaatccctccccagcagccgtcgtcgccaccgctgcagcgcggaggcgacgccccatcgccgccaagatgcagatcttcgtgaagaccctgacggggaaaacgatcacgttggaggtggagtcctcggacaccatcgacaacgtgaaggccaagatacaggacaaggagggcatcccgccggaccagcagcggctaatcttcgccggcaagcagctcgaggacggccgcaccctcgccgactacaacatccagaaggagtccaccctccacctggtgctccgcctccgaggtggcgccaagaagcgcaagaagaagacgtacaccaagcccaagaagatcaagcacaagcacaagaaggtaaagctcgcagtgctgcagttctacaaggtggacgacgccaccggcaggtgacccgncttcgcaggagtgccccaacaccga

SEQ ID NO: 293947 - DNA, 435 bp, Zea mays
  unsure (1)..(435): unsure at all n locations
cggacgcgtgggcggacgcgtgggcggacgcgtgggcggacgcgtgggcggacgcgtggggccgcatccaccgcatgctcaagctgggcctgagcatcgacgaggacgaggaggctccggaggctgacaccgacatgccccctctggaggatgacgctggcgagagcaagatggaggaggtcgactaagctgggtttattcttatggaggaaagagagagaacatcgggtctgttctgtgggtcttaccacttatgctattatgcaatctgttgttggtatgctagtgctactattgtctctgctgtcttctagttaattttggtgttgttttgcgtggtcagtttctcatcgcatcagtggtagaaaacattcacctgtgggactaanaaaatgtttgactgggaatnggaacgcaatcggcaggtcttctgtt

SEQ ID NO: 293948 - DNA, 377 bp, Zea mays
gccacgcgtccgaccacgcgtgcggccacgcgtgcgaaataaaagcagggacaacactgaggatgcatatggtgtgagtctggagtacttttgacaaggactgggcgaacgactatgagcatccacacatactagacgaatgcattatccagattatgttgacttgacggctgcctcaatgaaatttgcgagacagattaatacctgcttgaacctgataaaaccgactggcctcaaactgtattcactgagccgaatatacatgttaaccaagatgactactgcggatgaacgcacttatcctgagacattgggaacttatgacattgctaaatgtccataggtacgcgccgtgtattggaacgttaagaccccac

SEQ ID NO: 293949 - DNA, 355 bp, Zea mays
ttacgcgtgaaaaaaatggcatttaaatgctgcagaactgcaggccgggacaacctaggtgtgcatttggcgtcgggctgagtacttatgacaaggcctcggtgaatcactatgtgcattcacacatacagatgaatgaatatcgagattgggtagacctgtcggctgcatcaatgaagtttgctagacagattaatacctgcttgaacgttatggatatgactggactcaagctgtatgcactgagccaaataaagatgctgacgatgattactactgacgatgacctgtattatcctgagaaaacggaaactgattacattgctaatgctccatatgtattttcagcgtgttg

SEQ ID NO: 293950 - DNA, 422 bp, Zea mays
cccacgcgtccgcccacgcgtccgcccacgcgtccgcccacgcgtccgcgtcgtcgggggaattgagtgtgagagctcgaaaaaacccaggggatcggccggaccagcagcgagcgagcgcgagctctgcgtgcgtgtgtgtgtctgctctagattagatcacctccatcgtcaataattgcaggcagatccatagtctgctggtggcgagacaaagcaacggatcgtcgtcgatccggagagcggaaagcgcgcagatcgcgacggccatggggcgcggcaaggtggtgctgcagcggatcgagaacaagatcagccgccaggtcaccttcgccaagcgccggaacggcctgctcaagaaggcgtacgagctctccatcctctgcgacgccgaggtcgcgctcgtcctcttctcccacgcc

SEQ ID NO: 293951 - DNA, 449 bp, Zea mays
cccacgcgtccgcccacgcgtccgcccacgcgtccgcttccatgtcctaagagcatttggagacgcagaaattactcatgttgacgatacagtagatcctgttagagacatggaaactattagtgaagagctcagactaaaggatatagagttcatgaaaaagaaacttgaggaccttgataagtcaatgaagaggagcaatgataagctgctcaaaattgagcatgaattatgtgagagggtcataggccatcttgaggaagggaaagatgtccgtttaggggattggaaagctgctgacattgagatcttgaatacattccagctactttcagctaagccagttgtctatttggtgaatatgagcgagaaggacttccagagaaaaaagaacaagtttctacccaagatacatgcttgggtgcaggaacatggtggtgaaaccatac

SEQ ID NO: 293952 - DNA, 318 bp, Zea mays
cggacgcgtgggcggatatctcggctctcgcatcgatgaagaacgtagcaaaatgcgatgcctggtgtgaattgcagaatcccgcgaaccatcgagtttttgaacgcaagttgcgcccgaagccttctggcggagggcacgtctgcctgggcgtcacgccaaaagacaaacaactaaaaaaaaaaaaaaaaaataaaaaagtacataataataagaatagaaatcaattatcgattcatatcaggtgaactagctgatcatgcgaataaaggatgttcagatactgactcaggcgtatctgtatctgaccgatcagat

SEQ ID NO: 293953 - DNA, 464 bp, Zea mays
cggacgcgtgggctcccccacccgtccatcgccccctccctccggtctgcgctcccacaggctcgcccctgcgcccccgccgattcgcgtcgccctttgttggaaggaacgatggagcagaccttcatcatgatcaagcccgacggcgtccagcggggcctgatcggggacatcatcagtcgcttcgagaagaaagggttctacctcaagggtaagtgcgtttcattttgttctcgaattgattgctggaacacgtactctgtttaaatttcctagctatacgcatgaacttctctgctgttgaggcaagatttgatgtgcagattctggtgatatcttagaattgtttaatctatgtatacgttcggttgcgtgtgatcaccatctgaaaaaggatgttggtcgtggaagcaggaatattgcgtggagattagatttgattgaaaaccattatcttgatgtca

SEQ ID NO: 293954 - DNA, 459 bp, Zea mays
gaaaggtggccttataatgtttgatgtgacagcagattatgtcacctaccatttgattgagttacctccagtaatcactttaggggtttttggaggaatactggggagtttgtacaactttttcctggacaaggttctccgtctctacaaccttatcaacgagaaaggaaaagcttacaaactactactcgctgcaacagtcactgtttgtacatcatgttgtctatttggcttgccatggattgctgcttgcaaaccttgtccaactgacactagagaagcttgtccatcaatagtccgttctggtaatttcaagaaattccaatgtgcaacagatgaatacaatgatttggctagcctattcttcaacacaaatgatgacactattagaaacctctacagtgctggcactgatgatgaattccacatttcgtccatccttgtgttctttattgcatc

SEQ ID NO: 293955 - DNA, 457 bp, Zea mays
cggacgcgtgggttttttggtaccaaaggagtctgggcagattcgatgaacaaatagagctacaaactggatccaacttggctgagtcggaggaggtcttcgcaggatcgtgaccaacgccggacatgttggtcgatgcgtcggaggagtctgagacggctactgcggcgtggcacaaaatcaagagggagtcgcttggttctcttcgtcatagctgggggaggtagtaggtagcttacttctttggttacctcggccacaaatgcttggacaggggtgcttttctcaagcgttgacgtatcggtcatccttgtctacaatgtctcattagtaaggatgaaaacgatcggtaaacattaaaaccattttcgttttcatatttttcctcaaaaatgagatcgaaaacggtaacttcagaaacgaacacgacatcggtaattcggaaacatcgaaaaca

SEQ ID NO: 293956 - DNA, 378 bp, Zea mays
gcgccaagtcccggaggcggaggcggtgatctttgttcgtttcctcgcctctcctctcctcccctctcctttcattccctgtcccgtggacggcaatggcgggcaccgcgcggcttcttcctgccgcggcggcggcgctgctgctgctgctctgcatcgcgggcggcgcgcgggcggccaacgtgacgtacgaccaccgcgcgctggtcatcgacggcgtgcggcgcgtgctcgtctccggctccatccactatccgcggagcacacccgacatgtggccggggctgatccagaaggccaaggacggcggcctggacgtcatcgagacctacgtcttctgggacatccacgagcccgtgaggggacagtacgacttcg

SEQ ID NO: 293957 - DNA, 451 bp, Zea mays
cttgctctgtgaaattgatagtttgaagacacagcaacttctcgataggccttgcagtggcatcaatggcttagtttcatcctttgtttcacggctaagggaagagaactcttctcgagagcataccattttaagaactgctcaaaagcttaagtcattctcgtttaacaagttctcagcaaacggctaccatgatttcctgccatcgcggcttcgtcccaagtttcagaacattgatgccaacgagtgtactttctctgagattctttgcctaatatgtggaagcccgttcagtgaatcagagctcctgaatttggaaaacacaaagctcaaggctcagaagaaaattgatctttatactgcccattgttgtcaaagttgccatttccagattctcccagcagctacagatatgtatggacatttcttttcgctactaccgaaattttgg

SEQ ID NO: 293958 - DNA, 443 bp, Zea mays
  unsure (1)..(443): unsure at all n locations
cggacgcgtgggcggacgcgtgggcggacgcgtgggtcctgcagtgacattggacagtcaggtattttacgtaattgaattgaacacttgatctctgattagcacatggatggaaacacatgtctctgctctacgtcagatgatctccggtgccaagaagaaggaactcttctttgggatgccttaccgccagggcgaccagccagatccgggcgcgggcaccgtcgagagcatcccgcacaacccagtacacttctggagcggcgacccgaggcagccgaacggcgaggacatgggcaacttctactccgccgcgcgcgacccgctcttcttcgcgcaccacggcaacatcgaccgcttgtggtcggtctggaacggccttcgtcccggcgtcagcgacttcaccgaccccagctggctggacgccagcttnctcttctacg

SEQ ID NO: 293959 - DNA, 441 bp, Zea mays
accgcccacgcgtccggcagagcacccttcactttttgctgcgcctcaggggaggcatggagatgttcgttaagaccctgggcggccagactatcaccctccaagcgcaatcttcagacaccatcgacaacctcaaggccaagatccatgacaatgatggcattcccccacaccagcatcgtctcatctttgctggaaagcagcttgatgacagtcgcactcttacctactacaacatccagaacgagagcacccttcacttggtgctgcgcctcagacgatgcatgcacatcttactgaagaccctgaccggcaagactatcaccctcgaagtggattcttcagacaccatcgacaatgtcaatgccaagatccaggacaaagagtgcatcccaccgtaccagcagcgtttgatcttcactggcaatcagctggatgatg

SEQ ID NO: 293960 - DNA, 439 bp, Zea mays
cccacgcgtccgcccactcgtccgcccacgcgtccggaaaattcgaagacgaggagcagctacactgcggacggacttcgggcatggagggccagttccaggttggcaaggaggaggtcatccaagcatggtacatggacgacagtgaagaggaccagaggcttcctcatcatcgcgagcccaaagaattcatccctctcgacaaactttccgaactaggaatattaagctggcgcctaaatgctgatgattgggagaatgatgagaacctcaagaaaattcgtgaagccaggggttactcttacatggacatttgtgatgtgtgcccagagaagttgccaaattacgaggctaagataaagaatttctttgaagaacacttgcatactgatgaagagatacgatattgccttgagggtagcggctactttgatgtgag

SEQ ID NO: 293961 - DNA, 405 bp, Zea mays
  unsure (1)..(405): unsure at all n locations
gtctctatatgccctagtaggcattggctctcagatggctgctcttatactacttgcgattgtaccgtccattgttgctatgttatatgtggagacaagaactatcataacttccttatattgcgtgctactctcttacatctttcatgtctacgatattgtagtgnatggtctgtattgactgaatggtcgtaaacactgtataaaagctactatccttacagcatgacttcctgcattctggtatctctcgattggactgctgacacacactattgctatcttataccaatcatctgcaactataccatttggcacaatggatgtcatgaatatgctctgacctttcatgtacatcatgctcgtcatattggaaactgtagctgatctaaattaggaatgcgc

SEQ ID NO: 293962 - DNA, 472 bp, Zea mays
  unsure (1)..(472): unsure at all n locations
caggggtacaatctaggataacagagaaatatttggcctctttaacaatctttatgatggatcttgtaatattagaagacaaaagaactatcaactcattctgaatcttaggactgagataatggtaatgaatttctttgttctgaatacgcctaagatggtcttgcattaccaaatcaaactctgcaatcatctcaacacaggctaagaaatttccattactatcactataaagctgctcaatgcttcctctaaaagccaagttgcgtttaccaagaaatttcacaattgctattattcttagcaaaacttgtctcaaacgttctttctctttattgatttgcttttgcaagtctttatcaatagtttcctctttctgcattcgtgtcctcaattcattccacttgntcatgttctgaaaatgctcaacactattttcatggtctctaggctttgtactaatatttcctcc

SEQ ID NO: 293963 - DNA, 435 bp, Zea mays
aaaattggaactttgggaagaaaatctcagtactgctgtgagcctcgaagtgttgagaatgaccgagaagttttcagctgctgcaggcactagaagcatcagctagttttaaaatgtattgctcgtagcaggcagactgaaactagctgatgctttacaaaattacaatttgtatttcccaacgtttttggactttaggggacgaaattaccgatatggtccttttcattaccacgaacgagatcttgttagatctctcatactctttgcgcaaagtggggtgacagatacacccccagataaaggtagtcagggcatacgaacctttatggcttcaacagctttccattattccaaatattggaagaattataatgaaggtataatatgggttattaaaaatatacatgagtgtcctgacttaaatagtaataa

SEQ ID NO: 293964 - DNA, 230 bp, Zea mays
gctacacatgttcttgcatcttctggtgtccttacgacgactgataaagcatcagcacggttaaagggtggtgcaaagaaagctgtgatatctagaccatcagctaatgctcacatgataggagatggtgctaatgagaatagctatcatccatagatgaatgttgcttataatgcaagttgcactaacaactgccttgctccagttggcaatgatgaacatgacgaatt

SEQ ID NO: 293965 - DNA, 367 bp, Zea mays
accacgcgtccgtccacgcgtacgaccacgcgtccggagaaagaaggcattactgccgtgcagcatacgctcatctatgctggtaagcagcttgctgatgacaagaccgcagaggactactacatcacgggtggatctgtcctgcatcttgtacttgctctgaagggtggttactagtctaaacctgatgaactagcagtcagataaactgacgtgtcggctgctaaatgtgcaggcctgatgttgaactggcacggagatgattacagcttatcagctctgcacctgtgcccaatggcaggggctgcctttcaagctatcgtctgatctggaactgttccacattatctaatccctgttggttcat

SEQ ID NO: 293966 - DNA, 294 bp, Zea mays
cccacgcgtccgcccacgcgtgcgatgaggcggacatacgcagcaagccaagcatatacggatttaaatccgcacaccctatggtatctcggcgcggctgctatggcaagcggcagtcctgacgaaggggaatgcgcgcctaccgccggaagtgaaccgggtgctctacgtgcggaacctgtcgctcaacatttcgtgcgacgagatgtactacattttcggcaagcacagtgcgatccagtggatccgtctgggcaacgccaaggacacgcacaggaccgcttacgttgtcta

SEQ ID NO: 293967 - DNA, 185 bp, Zea mays
agctggtcaagcacaacgacaccggggaggttggactagtgatgcgtcaggcgaagacgctgaagatgtgagccaaccatctagtgctggagacgactaagatgcaggaacacgcggcgagcgacaagtactgcatttagaacgcgctggagtttgctgacggctagatcaaagaggcagatgtt

SEQ ID NO: 293968 - DNA, 283 bp, Zea mays
acgcccacgcgtacgcccacgcgtacggttggcttctcctacccctccggttcgggtgcgggttcgtgaggttctccggggttcggatacatgggtgagcggatcgagatggctgcgacggatgttgagtaccgctgcttcgtctgcggtctcgtctgggccacggacgaccactcccttcacaacggcttcagcacctacggcgaggtcctagagtccaagattatcctcgatcggtagacgcatagggtcctcggattcagcttcgtcaccttcttcactg

SEQ ID NO: 293969 - DNA, 450 bp, Zea mays
cccacgcgtccgcggacgcgtggggcgacacttgcacgggtgtgcgggcgatcaggttgtgggggagcgtactcgtgactgctcgtttcgtccgctcgactaacgctgatccagttcttcgtcgtcggcgccgttcgtgggactgcactgcttacatctgcctgcgtcgactgcgtacgactacatcgaacatatacacgagatgtctcttgtgaatagagccactgatgccttgagcatcggtcactccgcaggttccatctaagagagaaggcaaacaactgtggaaaattgaccgcaaagcacataaggaggatggataggaaggaaatggcatggttcaaagtattctgccaaggaagaggcatacctgtgctgacctccgagctgttcacacggactccaaaagccgatcaatctctgcgatccatggtcaccaatggaatatag

SEQ ID NO: 293970 - DNA, 226 bp, Zea mays
cccacgcgtccgcccacgcgtccgcccacgcgtccgcgctctagacactggtgaaccctagcctgctagccgccgcggcgccgtctttgccctcgctcggccacgcgccggcccgtcccgccgcgcgccctttgggcttggtcggccggccggccacgccttgttccgcggcgcgccatacgggtgggggttggcttggccggcccggggccgaccgggcacgcgc

SEQ ID NO: 293971 - DNA, 311 bp, Zea mays
tttgcccgcagtgcttctgcttcttctacttcttcttctacttcccggccggcgggcgagcttgggttagtggctcttcttttcggagacctgtgaggagagccattatcatggccgctgttgagactgttgttctcaagggtgctatgtcatgccagggctgctccggggctgtcagaaaaatgctctcgaaaaatgaaggggttgaaaccttcgacatatacctcaatgagcagaaagtgacagtcaaaagcaatgttaagcctgtagacgtctttcagaccggtttcaaatttgggtaaaagaccttc

SEQ ID NO: 293972 - DNA, 461 bp, Zea mays
  unsure (1)..(461): unsure at all n locations
cacggtcatggggaaaatcgtggtgtgcatgttcggagcaagcgacgcggatggcatctggttgcagaatgctggtggagcagggatagttgatgtggattcttacgagtggtctcgtgatggttccgcgctttattccttcacccttccgggtctcacgctcagctacaccgccggcgagaagctcagggcgtacatggtctcggtgccctatccggtggcgtccttgagcttcggctgtgagacggtcatcagccgcaagaatcgggcgccggtggtggcgggattctcgtcgcgtggccccaatcctgccgcacccgagctcctcaagcccgatgtcgtcgcgccgggagtgaacattcttgcggcctggtcaggcgacgcaccactagcggnggtcttcgttcccgatgggaggagagcgaactacaacatcatatcggggacttccatggcgtgcc

SEQ ID NO: 293973 - DNA, 401 bp, Zea mays
cccacgcgtccggttctagatcgcgggccgcccttttttttttttttttttggttttttttttctttttttaacggggcaaattaagatctgctgctggcataacattacgacaatagttcatccgttcgacaacaaattttggcacaacttccacaggttcagcacttgaacaatctaagttaccaacacaaggcattttaagttcagagaaaagtgagaaataaacacatggccatttctagtccatctttactccaacaaaaccttagatgctgctcgggtacatgaacactctgaccttgcgccccatggactcaggcgggaggttggacttgaacttggcacggacgacgcccgagtttccgtgcggacgggtgacctttgcccaaatgcaccctg

SEQ ID NO: 293974 - DNA, 457 bp, Zea mays
gagccagcttatggtcgagtcaatttcagcgctccaacggaaggagaagtcactgcaggaggagaacaaggttctgcagaaggagaaagcgttactcctgcatgcagctcgcggagaagcagaaagaccagcggcagcaagtgcaacgggaccaaactcaacagcagaccagttcgtcttccacgtccttcatgttaagggaagctgccccaacaacaaatgtcagcatcttccctgtggcagcaggcgggagggtggtggaaggggcagcagcgcagccgcaggctcgcgttggactgccaccatggatgcttagccatctgagctgctgaaagtttgccctcaccgtcgcgatgtgatagcccaaaatccagcaagtcttccccggaccccggactgtccccgcttctccgtctggtgcagtatcgtcgtgatcgcgagaagcagcagcagcggt

SEQ ID NO: 293975 - DNA, 349 bp, Zea mays
accgggccgacccactcgttcgacggctcgtacattcactcatcgactgtttcatatgtacaagacggcatgaatatcgcagaggaggagatatatgagcctgtgcagtcgttcctcatgttcaaagacctcaatgaggtcatcaagagggccatctcgagccagtatggattgaccgtcggcgtgttcaccaacagcctgtacacgggcaacaccctgactctctcgctcattgccggcaccgtctgtctgaactgcttatacgtcttcgatgctgctattccgtttggcgggtacaagataagcgacatagctaggcagaaaggcattgacagcctgaagaactacc

SEQ ID NO: 293976 - DNA, 316 bp, Zea mays
cggacgcgtgggcggacgcgtgggtgctgatcgccatcgagggcatgaacggcaaggagctggactgtcgcaacatcaccgtcaacgaggcccagtcccgcggcggccgtggaggctgcggctgcggctacggtggtggccgtggaggcggcggctacggcggtggcgggcgccgtgatggcggctgcggctacggcggtggcggctgcggctactgtggcggcggtggctactgtggtggttgtggcggctactgcggtggcaaccgtggctgttgctactgcaacttcgacgggaactggaggaactgatctgt

SEQ ID NO: 293977 - DNA, 316 bp, Zea mays
ccggggtcatacccgccacggtgcacgtccaagtgcggcgactgcagcccgtgctacgcggtgcacgtggccgtgccgccgggcgtgcctgtcaccaccgaatactacccggaggcgtggcggtgcaagtgcggcaaccggctctacatgccatgaccatgagcgagcaaggaggcggccagccggtgaagaatctctcgagagcgccggccgctggggccggcgctgcattattgcgccgggccgggtgcctctcgcctgcgcgcggtgtcgtcgtggtcctcgccgcgcgcatgggcgggatctgcgctctgca

SEQ ID NO: 293978 - DNA, 268 bp, Zea mays
cccacgcgtccggcgcagtcttcatcactcacaccaatcgcccacaagagctctcaggagaggtcttaaccctagcttttgcagctgctgagagaagatgatctacgacgtgtactccccccttttccgttccttcctcagccagaatggctgctcctacaagagggaaatggaagagcattaaccaaatgagcagatgcccaaagctaacgagaacaagcctgtgattaaccaatgaatatttacagaagctttggtcaaagtgcaa

SEQ ID NO: 293979 - DNA, 313 bp, Zea mays
cggacgcgtgggctgacgcgtgggcgtgtcgcgtgggcggacgcgtggtcactggcggggtcgacggggctggagcagaagcagatcaacaactggttcatcaaccagcggaagcggcactggaagccgtctgaggagatgcagctcgcggtgatggatgggttccacccggtcaccgtcaacgccgtcgcgttctacgtcgacgcacgcctagtgggagcaacgccggcgatgttctacgcccggccagatcatggggctcatcatggtctctggcacaatagattcagcccactcacgctaccatgaagta

SEQ ID NO: 293980 - DNA, 316 bp, Zea mays
ggggattggagatattaatgcagttaagctgatatctaagtttggttccttggataatgtactgaaatccgtggacgaagttgaggatgaacgaattaaacaggctttgatttctcactcggaacaggcaatcctttgcaaaaacctggccacgctgcgttctgatcttcctcattatatggttcctttcaagacagccgaccttgtatttaagaagccacaggatgatggagagaaattcataaaactcttacgagcattggaagcatatgcagaaggttcctcagtaaatccaatcatcagaagagcagcctat

SEQ ID NO: 293981 - DNA, 426 bp, Zea mays
cccactcgtccgcccacgcgtccgggggcgtgcaaactactttgccaacctttcaaagggacttctgccaaagattggccgccggctgcccaagggccagcaagcaaacagcttgcttgacttgatgactataagggctttccatagcaaggtactgcgttgctttggccttggaacggcagtgggcttccgcatcaggaaaggggttctaaccgatatccctgcaattctttgcttcgttgctcgcaaagttcacaagaagtggcttgatccggcccattgccttcctgccattcttgcgggtccaggaggtatttggtgtgatgttgatgttgttgagttttcgtactacggtgctccagctcaaactccaaaagtgcaaatattcacagagcttgtggataagttgtgtggcaatgatgaatg

SEQ ID NO: 293982 - DNA, 366 bp, Zea mays
gtcggcttctcctcccactacggttcgggttcgggttcgtgaggttctacggggttcgggttcgtgggtgagcggatcgagatggcagcatcagatgttgagtaccgctgcttcgtccgcggcctcgcctgtgccactgacgaccactccctccacaacgccttcagcacctactgagaggtcctcgagtccacgattattctcgatcgggagactcataggtcccgcgacttcggcttcgtcaccttctccactgaggaggcgatacagaacgccatcgaaggcatgaacggcaaggagctggacggtcgcaacatcaccgtcaacgaggcccagtcccgcggcggacgcggaagctgcggctgc

SEQ ID NO: 293983 - DNA, 417 bp, Zea mays
cccacgcgtccgcccacgcgtccgcccacgcgtccgcccacgcgtccgctgtcctgtcggattctgtcgccctatacagtgacgcgatgaacatcttccgtaagaaggaagtggcctgatctcagatttcaaaagtagtcagtgctggatgaagaatggtctcgcaatgcaagactcgatggtacgaaggaaaacgatgcgcttggattccgtgaaggaacgatttctttgtcagcacctcagaatttggccacttgaaagaatctgatgcttgaagtttcctggttctgtgtacacaagtcggctcaatgtcagaattgagccgcttgaaatatatttagttatattctatgcggagagtaagtcttggaaacagccttttccacaataatgtacagttattatgccaatttctga

SEQ ID NO: 293984 - DNA, 267 bp, Zea mays
  unsure (1)..(267): unsure at all n locations
gttctagatcgcgagcggccgcccttttttttttntatattatatgctcttcatctgcgacgcccactagcagctacccttcaccgactactaaaagccgaagccgaccgacccaggggtgcgcagcgcaatgcaactagcatccagctctctctccccggaccgttcgccgacgtttagtttctattgtgcacgtgcatgcatcgtagactgtttcaggccgacgctgcgccggcgccgttcgcattggttgcttttacttggacc

SEQ ID NO: 293985 - DNA, 372 bp, Zea mays
cccacgcgtccgatttattggattttggcggcaggtacattcaaagcacttgtgctacaacgggtgagggattgtatgaaggcctggactggctgtccagcaacattgcaaccaagtcctaaattgtcaagcgaggtttggatcatctaggagcttttggatgatgatgatggtgctggatatttagggttgggttggtatttccgtatgtaagatgtatgcccctgagctcggcagtttttgagctctgcttaagattctcacagttaaattgttttatgtaatttgggccttgagatgtttttgaaccaaacagctaaaagagttcagttgagttaactgggtgccattattacattatgagattctttg

SEQ ID NO: 293986 - DNA, 239 bp, Zea mays
catgtacaccgtcttaagagagttaaatgttagtgcttgcctcctgttagattgaatgggcggtttaaccgagacattcagacaagaagaatgagaacaaggaggttgctgcgaatgactttctaccagcgagcgccgcttatgaagccatacagcactctatggacctgtatgctacatacatcgcttgagggcctgaagaggtaggattctgatggctaggaaaggtcgcgaggatg

SEQ ID NO: 293987 - DNA, 213 bp, Zea mays
gcagcagtatggcttgaatccttatgaagccacaaccacgattcatgaggcacagagcgcagatgttgatgagagcacgacatgcatatagaggtacagcatatggcacgaggccacgcatgtacccatgtgcagcagcagcttaaatgaaccatggcttactgaccaccgcggaggcggagcaccatgtggagagtgctcttcttctggatg

SEQ ID NO: 293988 - DNA, 427 bp, Zea mays
cccacgcgtccggacccacgcgtccgcctatctttgccccctgagtctcttagcattctgtggtctatgctcagtattttaaaagttcatttttttgcatatctatgtggcatcaattaccatatgtattgtggcatgtatggacttctgcttatttttagaaaataatgctcgcttgactgaatagataaataatactcactccattttttatattttgtgtgttttagttcaaaaatggactggtcggacgattaatattccagaacagagatgatatatctgacccatacatactttgatgtaacaacttggttttatgcttcttgcgctgatatggcagcttgacttcacaccatttacggtgcagatcattgtcatcctcaatgactgcatgcgtcctttatattagttatcgtgcatgatc

SEQ ID NO: 293989 - DNA, 365 bp, Zea mays
caggcacacaagctgtactttgtcatgtccctttgagtacgcatcagtgtcatgcaggtggtaatgtcttgtagtggtccgtttaggcggtgtagtcatgggaacgcgacctcagatacctggtttcttttgattgtgatgttatcttgcattattgcacctgtaggatttgttgaagctcatattttccagggttttggatcttttgtgctagtcttgtgtctttgtgtatgcagaggctgagctaggattatggtatgtaagggagccaactaattcatcaatactatatgatgttatcaaaaaaaaaataaataaatttaataaaattttatataaaaattttaataaattaattatataat

SEQ ID NO: 293990 - DNA, 135 bp, Zea mays
  unsure (1)..(135): unsure at all n locations
gcctagtacgccgnctgcgcgttcctcctattacacatacacgcagggaggggccgatatgtgtaataggaggctccatcgaacatcgatggcttgcttctttatcagaacatgtttgaataaacgctatttggt

SEQ ID NO: 293991 - DNA, 431 bp, Zea mays
tcgcccactcgtccgcccactcgtccgatggtgtgcttcttgtcgcacctatgtgcaagatttgagaagatgtaacaccacctgcacctgtattgaaggcactgagcatattgtcatgtcttcttcctgaggcgaagttatttccgcagaaagatataggagatttggcatttagagatccaaggaaaaggaaagtagctgagtacaatgccatctcatattctgaccaaatgagattaagaacagcagttgaacttttaaaagccacgaaggacattgaatcacagttggaaaagatctcctctccattgctgattcttcacggagccgcagacatggtaaccgatcctcatgtcagcaaattcctttatgagaaagccagcacgaaggacaagaccctcaagctctatgaaggcagctaccattcaatc

SEQ ID NO: 293992 - DNA, 410 bp, Zea mays
accagatgaaattgcgaaggttctgaatctggaagtgatggacagaagcaggcactggaagattgtgggctgcagcgcttacacgggagaggggcttctcgagggcttcgactggctggtccaggacgtcgcttctcggatctacgtcctagactgatgctatttgccgcgtcagtcgtcctagacggatgctatttgtcgcgtcagtgctacttgagcatcattagagtgtggtgcctgcattaaagcctgtactaaggccctgtttgtttaaggtttaaggtttaggaatttgtgttcactcctactcactttgggattgccgggggaattggttgcctggggtatattgaaggtaaattaaacgttcatgagttcatttctctttatttatatgtcagattaaggtt

SEQ ID NO: 293993 - DNA, 416 bp, Zea mays
gccacgcgtccgccgtcccgtgctccctccgctaggtctcccatttgcttccccacctcgggggtcggctcccccagagagcaggagccgcctcgtccctgccggtcccgaccatcgagacgatgctgtccaacctcatgtaccggttcgactggcagctgccggcggcgatgaaggcggaggacgtggacatgaccgaggtgtttgggatcacggtctcgaggaaggagaagctgctcctagtcccacaggctgcgtgatgatgatgataatctagtgcaatgcaatacacggttttaaattactaacaccaaaggctgtgttactggaccttacataataaataataaatgtgctactactatatagccaggcttcacagtaacacatacttctattgcccatgctacatatat

SEQ ID NO: 293994 - DNA, 347 bp, Zea mays
cccacgcgtccgcccacgcgtccggggagagggaggccttcgctacctccgtggcagcgagagacgaccatgaaggcgctggtggtgacggtgcttctcctcctctcttccaccctcgccgcggcacagtggtgcgtgtgcaggcaggacgcgtctcaggccgcgctgcagaagacgatcgactacgcgtgcgggtcgggggcggactgcaactccatccacgagacgggggcgtgctacaaccccaacaccgtcgcggcgcactgctcctgggcggccaacagctactaccaggacctcgagcgcggcgagctgcgccgtggcgcggctgagtttgcggacggcga

SEQ ID NO: 293995 - DNA, 359 bp, Zea mays
gctgcatctgtcctttaacctccgcgtaaacatcctttggtatgactattcaggatatgggcaatcgttatgaaagccgagtgatcacaatacttatgctgacatagaggcagcttacatgtgcctcatagagaaatttggtgccaaggaagaagaaataattctttatggacaatctgttggaagtgggcctactgtagatttgtccagtcgtttatctcagctgcgagctgttgtcctgcatagtactatattgtcagggctgatagctttgtatcctttgaatggcacatattggtttgacaatttcaagaatattgatcaattactctaagttacatgtcctgtgcttcattatt

SEQ ID NO: 293996 - DNA, 468 bp, Zea mays
aagagatggaaattgattctatagatttacatgctacttaacaatttacaacttatagcacgctcgggtactttcttctctataacataaatataatgtataactatctctctcatatgatttatgttaatataaaaatatattacatgtacaaatatattaacttaattagtttcctctaaattataattagtagaatgaaattcaatttcaacgaaacaaaccgggcccaagagagtattggactgtatggaaaacaggggtgatgagaaatcctcaagatctccaattttttctctactgttttttttaaaatgtatgtcaataatagtgtccatcttgggaatgcaaactaaacgttcaacaacattctgttggtaggctctgaagatataagctcatatgttgtctttatgattgatagtcagtgataacagttctggagttggcaaatgcacatttaaattc

SEQ ID NO: 293997 - DNA, 445 bp, Zea mays
cccacgcgtccgggtattgtttggttgccagcaagcaaatggtcggtatatttctgaccatttgggtgcgcagcgaaataagaaatgatgtgagaaacctgaaagtttcttgcgtgggtagaggactaatgggttatcttggaaataagggttctatatccataagcatgtctttgcaccacacaaccttttgttttgtctgttgtcatctgacctctggtgaaaaggagggagatgaactacggaggaactctgacgttatggaaattctaagaaagactagatttccacaggtccgtggtgctgctgatgtcaagtcaccagaaacgattcttgagcatgaccgtatcatttggcttggggatttgaattatcggattgccctatcgtactgctcggcaaaagctcttgtcgaaatgcataactggaagcaactgttagagaa

SEQ ID NO: 293998 - DNA, 450 bp, Zea mays
cggacgcgtgggctgtcagatccatcccttccccgggctgttaagatctgccgtggcggacgccctgcaatccgcgcgcttttcgtcgggtgggtgcaacgaatcgaccatgcttcaggaagctttggctttaagacgaaggtatacgtgatatggaaatacaacccgaaggtaggatgaacgagcgccgaagctgtggctgaaggagctttggcttagtatgatgatgaaggtggaagatgaaaccgacctaaaagggaaaagactactcagcccttgatagctcaccttatgattagcagtaaatgtcagggatatgaatgtaagtttgtccgggttgcgtcccgtgcctataaatagatgaacagtaacaccgtactgttcacgcggcattgtaatcttgcgtcactctcgcattttcacgttctagcaagccgaaggtattaatgt

SEQ ID NO: 293999 - DNA, 443 bp, Zea mays
gcaagcaggagaattgtaaatgtaatcattgaaactatactataacagtcatatgagaatctgtcagtcattatccatatgtgttttaatgcatatatgtataagaatataactaagttcatgattacttgtggcatcggtctttccgccatttttcctttatgtagccatccattttgccttcttgctccttggtttttcttgttgcattctggtttgaatacgtttaatatttttgtccacttctataatatagctttcaaacagcgctgaaggtggttctctactcaaagatattcctgctaccaaggatggaagggttgattggtcacaggatttcttctgcaaaccagcatttctgacagtgtctggacagcttaatggtgaaacatatgcttcagctctatctgatatttacacatttggtccaacgtttagggctg

SEQ ID NO: 294000 - DNA, 300 bp, Zea mays
cccacgcgtccgcccacgcgtccggtggtgcccttaaagcatgggagtgatctctggttttgctgtcgccgagctgggaaataggaagctgaatcgacctcgcaagcggggaatgtatccttttttgctgcaacataaaaaatgctacccaggcatagctgggtaccttttaacttctgtttgtgggatttgctagagtgatggtttcgatatatagggggacttgaatgtctggaaaaaaaaaaaaaaaaaaaaaaaaaaaaaaaaaaaaaaaagggcggccctagttctagatcgcga

SEQ ID NO: 294001 - DNA, 354 bp, Zea mays
aaaagatgtcaatttagatgaacttccatatgatccggccgataggaggagaatcacagatgatcctgggcttaagctgcaagatcagattagaagaaggtacttggttaaaggtcctcacagaccacaacctagttttaagtatccacaaaaaaatcatagtgggcaagccacgtcgatttaacccagcatggtttgatgagtacagttggattgaatatagtgagaaggtggatagagctttttgtctttactgctacttgtttagagattgtattgaaggtcaggccggaaatgatgcttttgtaacaaaaggtttctcttcctggaacaagaaagatagattagatgttc

SEQ ID NO: 294002 - DNA, 449 bp, Zea mays
gcagaatgcgttagccatgtaccaattgcagttggagcagaacctgctcattttgacctcttgttggcaaggagcgcaatatctcaaggcacttatttgtcaaatgattggctagtgcttaaactacaggaactggtctcactttcataccagattagtactgggcaatttgaaggaatgcaaccaataggtgtgaagcttttgtgtttgataatggacaagttcggcaaggcagtagatccggaatttcctggccatatcttgctggaacaatttcaggcccaacttgtttctgctgttagaatggctataagcactgcttctggtccacttcttttggaggctggacttgaactcgcttcaagggttattaccagccacattattggtggggatagactagcttttagtcgcttggtttctctgataacacgcccgttaagtgacat

SEQ ID NO: 294003 - DNA, 413 bp, Zea mays
cccacgcgtccgctggttcttgcggggattgcgctgttctcatctctgtgtgttgcttctgccggaataagaatgagacattgctatgtggagacttgatggtaaagggggagctgtctgaggaggacggggtgttttcttgcaatgaggtatgtggccgcacgctcgcctgtggcaaccatgcttgcaaggatatgtgccacccagggccttgtggggagtgtgagctcatgccgaggaaggtcagtacatgtcattgcggcaagaccaggctgcaggagaggagggcgagctgcttggacgcaatccccacctgcgataagatatgcgataagaaactgccatgtggggtgcacaagtgcaaggtcaattgcccatgaggaagatgcccaccttgtttggtgctcggtgag

SEQ ID NO: 294004 - DNA, 213 bp, Zea mays
tcgcggacgcgtgggcgtgtgctcgcattaccttccattccatcccgcctccaaacccgaactccagttcgccccgcatcgagggcgcccaaagccgagaagaagcccgcggcgaagaagccggcggaggaggagcccgctgccgagaaggcgcctgccgggaagaagcccaaggcggacaaccctgtcccagcaagcttgtcctatctgcaa

SEQ ID NO: 294005 - DNA, 439 bp, Zea mays
gagcgcttggtgcaggtgctccgacgaggtgaatccgcggaagcagccgtacaagttctccgaccggaagctccgggacctggggctgcagttccggccggtcagccagtcgctttacgacacggtgaagaacctccaggagaagggacacctgccggtgctcggagagcggacgacgacggaggccgccgacaaggatgcccccgcggccgagatgcagcagggagggatcgccatccgtgcctgagagggcgatgccacacatgaacacaaagcagtgttcatactgctgccctgcacctgcacctgcttcttcccctgctgtgtaaacaggcctgtgtttgttctggctgatagtgatgtacccttagaactggaccggtatggtccgtcctgggaaccatagcgaggtgattaaactgggtaatgttggatgttc

SEQ ID NO: 294006 - DNA, 411 bp, Zea mays
  unsure (1)..(411): unsure at all n locations
cggacgcgtgggcggcgttgaccatgaacgtcgcgggagtagtcaaggattggctgttgatggcattctcgtggtccgttatccgggacaccgtcaccccgatcaacctgttcggatatgggatcgcgtttttaggggtggcctactacaatcatgtcaagctgcaggcgctcaaggctaaggaggcccagaagaaagccgcacaggctgatgaggaggttggatcgctcttgcaggagcgcgatggacacggtgatcataagagcgacaatcaggcttagactgtcagatctgatcctggccttcccatattgacttcagcgcccagaagaattcttgatctgntgttgcggcactacgcaactcaacgagatttttgtcgatgcacattggggaagatcttgagcaact

SEQ ID NO: 294007 - DNA, 395 bp, Zea mays
tcgtccacgcgttcggctgtgagaatggccttcggtctttctacgggcgaggatccctcgaactccaagggtgcatcaccgagccggtagacggggaggtctcgcggcttcggcttcgttaccttctccttcgagaactccatgctcgacgctatcgagaacatgaacggcaaggagctcgacggccgtaacatcaccgttaaccaggcccagtcccgtggcggtggcggtggcggcggtggctacggcggcggtcgcggcgggcggcgctatggtggcgggcgccgtgacggcggttatggccgcggtggcggctaccgcggtcggcgcgagggtgtggcggcggctacggaagcggtggcggctacagcggtcggcgcgagggtggtggtggc

SEQ ID NO: 294008 - DNA, 393 bp, Zea mays
ggcaacatggagatggcacaacaacaaggtggatttattggccatcgcccaagacttgcatgggtcaataaggcatcaaaacaactggaccgtgaaaaaagacctgtgcctagcgggccagaccccatacatcacagcatcccatcacatgctcctcagcatccaccatcatatggcaaagctccttatgaagatgacaagagcatagcatctcctggtctgtccaacccgataggtcctccaccatttttagatagatactagttcatgcaaaagtagtgagtatttatgcacctatgccaatgaataacctctaattacctacatgtattgggctggtgtttggtaacatgaagcaataactttctcttatcgaaaaaaaaaatttaagat

SEQ ID NO: 294009 - DNA, 393 bp, Zea mays
  unsure (1)..(393): unsure at all n locations
cggacgcgtgggcggacgcgtgggcgacgatacattcagatccagaagatggcacttccctgtggtacaattttacgatctcccttgtctgggcaccattcctggtcaaagctaaaatatttgaggacgacgatggagtttctactgctgatctccagctgcaccttgacgttctcgagacagactggactagtcaatgggagaagttcgattacgcggtgatatccacgggccaatggttcttcaagactgcagtgtactgggagaatggagctgcgattggctgccactcctgccagaacaaaaccctggaagagaggcctncggagtactccttccgcagggcactcagggtggccttccagttcatcacattctcaccttacaagccag

SEQ ID NO: 294010 - DNA, 353 bp, Zea mays
gagattggtatcatgtcgcagtgttgcttgtataaaaatgttagaagtgcacgccctgcgtggtttgctaatcttgctattaagatcaatgccaagtttggaggaagaaacttagaatttgctaatcccaaataaagcttaccgggtgttacaattgaaccaacaattatatttggtgctgatgtcacacaccctgccgttctagatgataccgccccttccattgcttccgttgttgcctcccaagactggcccaaggtggctaactataatgggattgtccgtgcacatggtcatcgtaaagagctcatcaatggcctggaagacattgtcaaggaactcctacttgcatt

SEQ ID NO: 294011 - DNA, 278 bp, Zea mays
tcgcggactcttggtcggactcgtgggcggtctcgtgggctgactcgtgggctcttcttaagattgttgtgagagtaggtttggcatcccttactgaggccttctttaactgggctggattttggagtgcaatggcttcaaatgtaaccttccagtcaaggaatgttctaagcaagaaacttatggtgcacaaagaggaatctctctacaacattaacctattctcgatcattacagacatgtcattctttctgtacatcatagtaaccttacttaca

SEQ ID NO: 294012 - DNA, 387 bp, Zea mays
cccacgcgtccgcacgcgtccgcccacgcgtccgcccacgcgtccgcccacgcgtccggcagcattttatgatccatcaaaatcaaggaaaatatgcactgccccgcagcttgtgagtgagaatgaaccacaaaagtatcgggatgtaatttatggtgactatgtctcatcttggtatagcaaaggtccagagggcaagcgaaacatcgacgccctcctgattcagcactagagccataggtatgccttaaaacagggttgggccactcatctgtttcctaaacttctaatgcatgtacaatatatcagtttccaactttaaacaatcaggataaggaaaccaacttgtatactggatgcagtgcaataaagtaccttttcattgtc

SEQ ID NO: 294013 - DNA, 429 bp, Zea mays
cgctggacgtctgcgtggaggacgagacgatgcggtacctgaaccggaaggacgtgcagcaggccgtgcacgcgcgcctcgacggcgtgcagaggtggacggtctgcagcagcgttctggagtacaagcagctggacctccagatcccgaccgtgaacaccgtgggcgcgctcgtgaaagcgggcattcccgcgctggtgtacagcggcgaccaggactcggtgatcccgctgacgggcagcaggacgctggtggggcggctggcggccaggcttcggcttaacgccacggcgccgtaccgtgcctggttccaggggaagcaggtgtgcgggtggacgcaggtgttcggcggcggcgcgctgtcctttgccacggtgcgcggcgcgttccacgaggcgcccttttcgcagcccgagcgctcgctcggcc

SEQ ID NO: 294014 - DNA, 438 bp, Zea mays
ccacgcgtgcgcacacacacacacagacatttggtttccaaaaccaagtgtgtgtactatgaacgagctagctcgggcggcggcaggcagccatcatgtcggaggagaagcaccaccacttcttcaaccaccacaagaaggacgaggagcagcccgccggcgagtacgggtactccgagaccgaggtggtcaccgtcaccggcgagggcgagtacgagaggtacaagaaggaggagaaggagcacaagcacaagcagcacctcggcgaagccggcgccatcggcgtcggcgccttcgcactctacgagaaacacgaggcgaataatgaccccgagcacgcgcacaagcaccagaatcacggaggaggtcgctgccgcggccgccgtcggctccggcggctacttattccacgagcaccacgagaagaagaaggaccac

SEQ ID NO: 294015 - DNA, 231 bp, Zea mays
acgtccacgcgtgcgcgcaagtacaaccaggacatagattatctgccgcaaatgctattcacgagggcggcctaattctgtcagctgccgcaagaagaaatgtggtcacagcaaccagctgagggccaagaagaatatcaagatctgaagtgctgatcctagtcactttcatggacaatgttacgctttattgctgtgtggtttatgaacagggtttggttacccaacatt

SEQ ID NO: 294016 - DNA, 409 bp, Zea mays
attggatacaggtctcgtatgtccttgacactgaagacttctcgtcccggcttcctaagagaaggaaaatacttcggagtggaactgtgtctgacagtctctcagatttcaacagtatatgctgcaaaagtgcaccgcttcaatatgttcctatccaaagcataagatcattagtcctacaaactgtcatcatcattgtatctaaacctggagatattgctgagaccccagctgctttgcttcttcaaccataatattcagcagttggcagatggtgactccatcgacattcagtctcataacgccctttttgaataacaaatggagagatctatagggtaaatacagcacaacgaatcgagcatgtaagccacaacactcatctctgatgtgcggatagatgtgtata

SEQ ID NO: 294017 - DNA, 287 bp, Zea mays
attgcttctgaagacgatactaatatggatgttgatgttgtggctttgatttcaatcaaagattgatgtttagacacagttcgttacttacaacaagccaacaaatggaaacagattgatcaaattgtctccactacttattgaaagggaaatgtgcccttgggctatttctaagtattttggtgattaagtgtccaacacaagtgcctaagtgttaaattataccaaggactcaagaagtgaaaatcaacataaaggtatttttctaagacttagtactttgtttt

SEQ ID NO: 294018 - DNA, 458 bp, Zea mays
  unsure (1)..(458): unsure at all n locations
cagggcgatccagagggcgaactgcttccacgtggaggggcacggggacccctgcaacatgtccggcacgccctacatgatcatcttcggcgtcgtgcagattttcttctcgcagatcccggacttcgaccagatatcgtggctctccatcctcgccgccgtcatgtccttcacctactccaccatcggcctgggcctgggcatcgcgcaggtggtgtccaacaagggcgtgcagggcagcctgacggggatcagcgtcggcgcggtcaccccggtcgacaagatgtggcgcagcctgcaggcgttcggcgacatcgccttcgcctactcctactccctcatcctcatcgagatccaggacaccatccgcgcgccgncgncgtccgagtccaaggtcatgcggcgcgccaccgtcgtcagcgtggccgtcaccacgttcttctacatgctgtgcgggt

SEQ ID NO: 294019 - DNA, 412 bp, Zea mays
acgcgggtgttggcttcctgcagttctgcaacctgaacagcttccgaacaaaattcatcctggggttgtctttgtttatgggtttgtcggtgccacagtatttcaacgagtacacttccgtagcaggctttggcccggtacacacgcgtgcaagatggttcaacgatatggtcaacgtggtattctcctcgaaggcgttcgtcggcggggctgtggcgtatttcctggacaatacgctgcatcggcgagatggcgccgtgaggaatgaccgttggcaccatttctgggacaggttcaagtcctttaaagacagacccgcgcaaccgaggaatttctacttcctttccattcaaccttaaacaagttctttccggtccttctgaaccttattgcctggtaactgaaaaatgct

SEQ ID NO: 294020 - DNA, 286 bp, Zea mays
attttactgcatctaatcgctgtggctctatctaataactgcgttgcgttcctgctttcaggtctcggtggagaatactcgacggactccgcaaccggcgtactgtcgacgctgttcgacttgggcggcctcgtggtcggcatcctcacgggccacatctacgaccatgtggacgcccgggctctgacggccgtgagcttcaccttctaggcgattcctgcgctcttcttctaccgcgtctacgggaacctcttgctggcctggaacatcgacctcatgctcatca

SEQ ID NO: 294021 - DNA, 397 bp, Zea mays
cccacgcgtccgcccacgcgtccgcggacgcgtgggcaagccttccacacacccgacgccgaagccgaccccaccgacgtacaccccttccccaaagcctccgacgcccaagccgaccccaccgacgtacaccccttccccaaagcctacgacacccaagccgaccccaccgacgtacactcccacaccgaagtcgccggccaccaagccgtccacctacactccgacgccgccggtgtctcacacgctcagcccgccgtcaccatactactagaaagcgatgcctaccataccacactgctgtcagtctctggagcatttaggtggtctggatcaatggaaagggtgggtcctagtcaggcggcaaagatgagctggtgatgggtatgatgatgat

SEQ ID NO: 294022 - DNA, 428 bp, Zea mays
cggacgcgtgggcggacgcgtgggcggacgcgtgggcggacgcgtgggtgagatttgaagcctaaggccgatggggatggaggcgagatgcggtgacctggccgtagctgccggcgcccgcgtccggcgcccgctacaaccgcgggacaccaacgtggcggcgtccacggtagtggtcggcaaggctgcgccgaagcccaaagctcatccaaagggggcgacgaggcccactttgccttcgctgccgccggcaccgctgttcccggtggtgaagccaaccccgcccgtgaaggaccagtgcgacgcgtctgttgcgggcgtggccgaagtgtcgctggcggaggagctcgagagggcgcgggagcggcgcgctcggctccgcgcggcgcgggaacagacggaacgggagatggtgagccgtgccgaga

SEQ ID NO: 294023 - DNA, 407 bp, Zea mays
cggacgcgtgggattgtggggatctcttcttgctgcctgtcgaagccacagttgtgttgagctggctgagttatcagtggaacgtcttgcagatcttggagctgatgattctggagtctatgtccttctgtcaaatatctatgctgatgaaggaatgtggggtgatgttttgaggattaggaaattgatgagtgatgagggaatgagaaaggatattggacggagtgtgattgaagtggatggtgaaatacatgagttcgtgaatggagtcggctcatatattggtaaggatgaaatgtacttgatgctgtggaatttgtctaacatggtggcatctatttgatgctactttgtctaccaaaacaaagtactaatcctctagattaaaaccttacaaaattaataac

SEQ ID NO: 294024 - DNA, 418 bp, Zea mays
ctccgccatcgcgccctgcctctcctacgcccgcggcacggggtccgccccctccgcgtcctgctgtcttaatcgaccaacaccctttgtgggtctagcgttcaagaggaaatggcagaacaagaggaaggagcaggggaaaccgtgtgacagacccaacatcgtcaccggtgccaacgttcaggtctgctgggagaagttcgcaaggtattttgaggtggagctgaaggaggttaagctatcagaagggtactacgtcatggaccccgtcaaggctgttgagatggtggatgagaacactatctgtgtcgcggcgatcttggggtcgactctcaccggagagttcgaagatgtcaagcagttgaacgaccttcttacagacaagaacaaggaactgggtgggacgtgcctattcacg

SEQ ID NO: 294025 - DNA, 392 bp, Zea mays
cccacgcgtccgcccacgcgtccggttctagatcgcgagcggccgcccttttttttttgggtggtttttttttttttttttttttttttttaagtactcacaaaagcatggctcttcattagacgatcaattcaaaatgagatacagtagttattatttagcaagaaaaagtcatgatcgtcagaacattcttccttaacagaagtcgtagggcttcttagtttagtacatacagtagcatgcataaagctaggaccgatatgggtatatatagaggatttatcaaaagcattacgtccaacatatattgaagatccatggccactagagcacacagcgcacaaagaagcaacttaatcattgttcaagtggtccatgtaagcttgataccc

SEQ ID NO: 294026 - DNA, 347 bp, Zea mays
cccacgcgtccgcccacgcgtccggtttactacttacgttgtacgactctattcccccggttcgctactggcttattaagtttggcgtcattgttttcttgatctctgagatgctttgctttcaccacctgcttttttgtcatctgtgtacattgagtcgacggacaatcattttcttgcttcgagcaggcgagagcagcacacgagttgcagacacaacatggaattacactctgtatataggtttgagtttttgcatatgaaatgcagctcatgtataagatttcagtctatactgctatgatatgttacaagaatatgaggggacctcgttgaatcttaataaa

SEQ ID NO: 294027 - DNA, 422 bp, Zea mays
cccactcgtccgcccacgcgtccggatttttggcgcaccggacactgttcggtgcaccaggtctggcgccctccaaaccagccactctcgagaattccagggcagtctccgctatagttcaccggactgtctggtgtgccaccggaccgtccggtgagccagcggagcaacggctaactgtcgccaatggtcgactgcaaaagcgttctgcagtaaacagtgcctcaacagaagtcagagcacagaagttagagggcactgaactgtccggtgcagctagaagacaaacatctccaacggtcaactgctccgaaccctaacagttgcgctgacgtggcgcgcaccggacaatgcacagtggatgtctggtgcgcccatcgccagcagcctttgctaacggctaggaagtggttgggggctat

SEQ ID NO: 294028 - DNA, 353 bp, Zea mays
gccacgcgtccggcaatgtttagcgcaaatttcttgctgcccacagatgctggtcgttgcgttgctataccatgtatatgcccgtttatagtcgcactggatgatggtgcacaaacagttcaggtggagctggtaccctgtcccgacatttgcaccttacaaagtctaaggcttgttctacacattgatccttgctatgtgtggtcacgctcagacgacagcaactgctttagtggctctgcagagtctgacaccggatgcacagagcgtattgagactgcttgatgagtattcagattcataatgcaaggacgagagcttgccagtcaacatgtttgtatacgaaatggtcg

SEQ ID NO: 294029 - DNA, 435 bp, Zea mays
caagagatagagattgctggtcgagaagaagagatgttacatatataataactactgtaggcagcggcatctcctgctgggacgaaggttcaagaagctagctaagagagaagggcataacgagataataagcagcgcgcgaagatgcaagactgggcgccggtgttcgtctcgctggtgctcttcatcctgctgtcgccgggcctgctgttccagatgccgggcaagtgccggatcatcgagttcggcaacttccagaccagcgccatctccatcctcgtccacgccatcctcttcttcgccctcgccggcatcttcctcgtcgccgtcggggtgcacatgtacctcggctcctaggcggcgccggcgcgccgtaccttctcttcctctctatctctctctcgctgcacgcgcgccatccgtctcttcttttat

SEQ ID NO: 294030 - DNA, 431 bp, Zea mays
cggacgcgtgggcggacgcgtgggcggacgcgtgggctaatgtatccatctatggagggtgctgagctttattatgaacaaaacgtgctggaggtggaacctgagattctcccggacatcagttggcgtctctctagttcagtagatggtaaagctaagattgctgaaggccgtcttaccgatgatgagcttgaccagtaccattctttggagaacaatccaattattattgagctgatagacgagccagcgatcccgcatctggtagtgtattgaagaatctgcgccagctggacagaaagctctgcttccttgctgcttgctctggaatctggagttgcctagtctagaatgctagtaagtcttgaccctggtgttgtccccaactatgttctgatgatgtaggatttcaggccgagtactggtaccag

SEQ ID NO: 294031 - DNA, 380 bp, Zea mays
cgtacgcgtgggtgctagttcatcactgccttctatgagagggatcctgcctaactatttcagttcacagtggtcatttgctcatgtccatttaccacaagtcactcgtcacatagtagcctttggtgcccataatactgtgatgatggctggcctgcatggcatcttattcaggttcagttttgaccattcgaatggagggcagatgttgccacatgaacatttgcggcttctcaagtgcgacagcccacctttcatgactgcagccgattgacctgctgcacgtggatcatccatccgaccatgtaaatgtcgacatgccactgtacatatacgctgtctaccggctaagttataggcagacggaataaggatagctg

SEQ ID NO: 294032 - DNA, 218 bp, Zea mays
gctaaagaactacagtgttgtctttatctttcaactattattgtcatatggtgatgtgggcacaaagtgcgctctaaaggatgagcatgtttatgcatcggcaaaatgtcaggcctgaagggagcttataccttttctggcaaatgattggcacatagtactcataattagtcagtggaccaaaatgcttgaccatcatgaatgggcaatggaaatta

SEQ ID NO: 294033 - DNA, 426 bp, Zea mays
caagcaaccaccgccttcccgatctcgtttagaggaagccccatcccgaaaccgccgccgtattccaatggcgcccaaggccgagaagaagcccgccgccaagaagcctgcggaggaggagccggcggcggagaaggccccggcggggaagaagcccaaggccgagaagcggctccctgcgggcaagtccgcgggcaaggagggtggcgagaagaaggggaagaagaaggcgaagaagtcggtggagacgtacaagatctacatcttcaaggtgctgaagcaggtgcacccggatattggcatctcgtccaaggccatgtccatcatgaactccttcatcaacgacatcttcgagaagctggcggcggaagcggccaaactggcgcggtacaacaagaagcctaccattacgttccgcgagatcca

SEQ ID NO: 294034 - DNA, 328 bp, Zea mays
cccacgcgttcgatcaagttgattgaatgtgggaggacgctgtgtcaaagcttggccctgctgaaagcttcctcaaggcggtgctcgcgatcccattcgctttcaagagagtggaagcgatgctgtacatcaccaacttcgatttagaggttgactacctcaagacctcctacaaaactcttgaggcagcatgcgaagagctacagggcagcaggttgttccacaagatactagacgcggtcctgaagacgggcaaccgcatgaacaccggcacgaaccgtgggaacgcccacgcctttaagctggacgcgctcctaagctagtcgac

SEQ ID NO: 294035 - DNA, 325 bp, Zea mays
gtacaatgtatacgttcacagcttcttgctgtatggttcctttgcatcgcgagcggagattctgaagtccaagaacggaccattcagctcctgcatgctgcgcggatttagtggtaaatatacctacaacggacagcagttcgatgcgactgctagaccagaaggagcattgtatgacaaatgcaggggagagattgccaaggcgatgaatctcaaggcaccgtgcaaggcaaagaactgcaccttcggtggtgtgtggaatgggggaggtggagctggccaaaacgacatctaagtcgcgtcaggtttctactacctttgctta

SEQ ID NO: 294036 - DNA, 145 bp, Zea mays
tttcgtccacgcgttcggccacgctttcggagggttttttgtgtgggcccatcctggctttcgccgagttatgttatctatctataggatcggggtaccgtttcgctttgtcaccgtgttagtggccgttctacccttggattaa

SEQ ID NO: 294037 - DNA, 177 bp, Zea mays
atccattatatgaaatacgacaactgcaacgactccggaaggagcttgatggacaggtatacgaagatgaacgacactatgaagacgtatgggaagggcatattattatcgctgtgcgaatggtggaggcaaaacgctgatacctgggcaagctgcatggggaacagatcgagaacg

SEQ ID NO: 294038 - DNA, 355 bp, Zea mays
gccgccgtcgcaggctttcccccatcgtctcacaagatgcagatctttgtgaagactctgacggggaagaccatcactttggaggtggagtcctcggacaccattgacaatgtgaaggccaagatccaggacaaggagggcatccccccggaccagcagcggctcatcttcgccggcaagcagctcgaggactgtcgcaccctcgccgactacaacattcagaaggagtccaccctccacctggtgctccgccttcgcggtggctccaagaagcgtaagaagaagacgtacaccaagcccaagaagatcaagctcaagcacatgaaggtgaagctctccgtgctgcatttctata

SEQ ID NO: 294039 - DNA, 203 bp, Zea mays
ggaaaacagctttgtcgactttcattcattatatattacaggtacagcacatgatgtgtatattgtttcagtagcttgttggacgaattcctgttcctggtcatccggccgccgagaagccttctcgccatctagcattctcctggtcatgttggccctctgaacgagccgcaccagcgcttgcaccagctgcatgacattga

SEQ ID NO: 294040 - DNA, 362 bp, Zea mays
  unsure (1)..(362): unsure at all n locations
cggacgcgtgggcggacgcgttggcggtcgcgtgggcggacgcgtgggctcccggagaaccagaatgctactctcacccttcaaggctgtggcggggccatggacgaccttgtcgagcgctttaaggacgggctccacatgtgcatgaccgaggtctatgacaagaagccggagttgttcgagcctctcatggcctgtcaggctcccaagtacatggtgttcgcctgctcagactgccgcgtgagccctgcggtgacactgagacggcagcccggcgaggtattcaccgtccgcaacatcttcgccatggncccagcctacgacaagaccaagtacactcgcatcgggtccgtcatcgagta

SEQ ID NO: 294041 - DNA, 336 bp, Zea mays
  unsure (1)..(336): unsure at all n locations
cccacgcgttcgccctcgcgttttcccacgcgtccgactagttctagatcttgcgacagtactcactgacgctgaggtccccctggacggctacggtggtggccgtggaggcggcggctacggcggtggcgggcgccgatcggtttcggagaagagaagcaaatcaagatgtttctcggctcgctcccgcggcgcccgagcaaggaggctgcttacaagcagctgcngtcggacatcatcatcatggcctgctgcgccgtcgtgaatgcggccaccccttacattctgcaattcgctcgcccgcgacggcgacattcaggaactcaagctagatct

SEQ ID NO: 294042 - DNA, 372 bp, Zea mays
ctcgtagagagaaggaaaaatatccccttaccctagctcccgatctcgatggcgaaccctcgcgtcttcttcgacatgaccgtcggcggcgccccggcgggccggatcgtgatggagctgtacgccaacgaggtgcccaagaccgcggagaacttccgcgcgctgtgcacgggcgagaagggcgtgggcaagtccgggaagccgctccactacaagggctccaccttccaccgggttatccccgagttcatgtgccagggcggcgacttcacccgcggcaacggcaccggcggcgagtccatctacggcgagaagtttcccgacgagaaattcgtgcgcaagcacaccgtccccggtgtgctcttcatgggc

SEQ ID NO: 294043 - DNA, 290 bp, Zea mays
cggacgcgtgggcggtcgcgtgggcggtctcgtgttcggacgcgtgggtgggattccacatcttaagtggttcggggtggaggggcagtacaatgtcatggtgattgatctgcttggtccaagtctggaggacttatttaactactgcagcagaaagttctcccttaaaacagtactaatgcttgctgatcagatgatcagtagagtagaatacatgcacacaaggtgtgttctacatcgcgacatcaagcctgataattttctcatgggtttaggacgtaaagcaaacc

SEQ ID NO: 294044 - DNA, 265 bp, Zea mays
cagacagacactaagaagatatctgcagctgctttatatattgagacaatgtgttacagatgggatgaaagcaccggattgattgatgactatcagctggagaaaagcgctgttctttttgggccaaagttgatcagcgctggtgcaagtgcatatgctcggctatatgattatgaccgtatgcggatggtatgcctcaagcagatggcactacttctagcagacttggcacatactgtgtgggctagctgcagctggcgtagac

SEQ ID NO: 294045 - DNA, 199 bp, Zea mays
  unsure (1)..(199): unsure at all n locations
cacgatcggttccaatcgactttttngttgaatcgcgactaatccaggccgtgtgcgtgtggggctttggactctgctatgcgtgtccctgaattggactctgcgtgttcggcaggctgcaagccgacactgttgcagctgttcggactgctgcagctgcaatccataggagagaaaaatactggagaagcctcagccg

SEQ ID NO: 294046 - DNA, 412 bp, Zea mays
tatgctgaagttttaggctattgaattctggtgatgcacaccacataactcagccacaaagtggtggtagaggtgctattttagccatgaagcgtgctttggaccagtcaggtcttcatgtaaatgaaattggttatgtgaatgcgcatgccacgtcgactcctcttggtgatgctgtggaggcgaacgcgatcaaatctgtatttggcgaccacgcagcatccggtgatcttgcaatatcctcaacaaagggagcaattggtcatctgctaggggcagctggatcagtggaagcaatcttcactgtgctagcaattcaccacggactcgctccgtctactcttaacctggagcggccggacccgctgttcgaaggggcattcacgccactagctgcgcccaagaagatgtc

SEQ ID NO: 294047 - DNA, 409 bp, Zea mays
gacccacgcgttcggatcgacacttgcattcacgcttttgatacactgctcaagaatagcaagcgagcgcgagtgagctcaaaggtagcctgagcaaatcacttaaacaggtgtcagatcccactctgcctctgagctggaaagggcagaaagcattcaaatctgagtctgacgtcaagaatgaattcaagtcaatggctctgagctttgccagtgccaagaatgccgccatggagatcccacctgaaaactacctcattgtcacaaaaaatggaaatgtgtgcctgggcatccttgatggaacggctgccaagctgagtttcaacgtaattggagacatcacgatgcacgatcagaaggtgatctatgacaacgagaaatcccagctgggaatgggcccgaggggcat

SEQ ID NO: 294048 - DNA, 272 bp, Zea mays
cctacgcgtccgccctcgcgtccggaatcgaagtacagggcctgctagatgctatcgcgcagagcatgaacatgccgtacgctaagtccaggtactgccgtggtgtccctgaccccaagatcaggatctacgatgtcgggatgaagaggaagggtgttgccgagttccccgacggcgtgcacctcgtctgctgggagaaggagaaagaccccagcgaggcgctcgaggctgcccgcattgcccgcaacaagtacatgaccaaatgtgcagga

SEQ ID NO: 294049 - DNA, 391 bp, Zea mays
  unsure (1)..(391): unsure at all n locations
gacccacgcgttcgctgacgcgtgggcaattctgtccggaattgcattacgagacgaagcagcagacgaagcgagccaggatccttagnaatacgggggtacgcgtatgtcaccagcatgctcttagcacaaataatgtccagatggctgcagagctggtagcagtagcagaccagaatgctctatgtatgtttcacgtcctgatggcagatgtgcgcgagaaagcaaccctatttatctgagggattactacgagatcaaggaaaatgaggtcgcgttcttaaaagagcggacggggtgcagacagaacgcgatcgccaagatcgtcgaggacaagcacaaggacaagctcccgtccaactttcgcaagctcctgctttgccagctcaag

SEQ ID NO: 294050 - DNA, 389 bp, Zea mays
  unsure (1)..(389): unsure at all n locations
cccatcgccgccaagatgcagatctttgtgaagactctgacggggaagaccatcactttggaggtggagtcctcggacaccattgacaatgtgaaggccaagatccaggacaaggagggcatccccccggaccagcagcggctcatcttcgccggcaagcagctcgaggacggtcgcaccctcgccgactacaacattcagaaggagtccaccctccacctggtgctccgcctccgcggtggcgccaagaagcgtaagaagaagacgtacaccaagcccaagaagatcaagcacaagcacaagaaggtgaagctctccgtgctgcagttctataaggtggacgacgccacaggcaaggtgacccgncttcgcaaggagtgccccaacac

SEQ ID NO: 294051 - DNA, 285 bp, Zea mays
cccacgcccacgcgtgcgccctcgcatccgcggatgcaatcccaaacccagaagaccatcacagggggagtgtaaaacacaaacaggccagacaaagcaaaggccacgacccatcacaaggaccccatccaacccgcaccagcagccgcccatctaccccggcaagcagctcgcggacagtcacaccctcgccgactacaacacacagaaggagcccacccaacacctgctgcaccgactccacgcgggcgccaagaaacccacgaagaacacagacaccaagcc

SEQ ID NO: 294052 - DNA, 405 bp, Zea mays
cggacgcgtgggcggtcgcgtgttcggtcgcgtgggcttcggcgtcttcgacggccacggctgctcccacgtagcaaccatgtgccagaacatgatgcacgaggtggtcgcggacgagcacaggaaggcagattgttctggcgaagagacggcgtggaaggccgtgatggagaggagcttcgcgcgactggacgagcaggccgccagctgggcgaccagccgcagccgcgacgagccctcctgcaagtgcgagcagcagaagcccttgcgttgcgatcacgtggggtccaccggcgtggtcgccgtcgtcagccccacccacgttgtcgtcgccaacgccggcgacttccgggccgtcctattccgcgccggcgttcccgttccgctgtccgtcgaccacaagcc

SEQ ID NO: 294053 - DNA, 400 bp, Zea mays
cccacgcgtccgcccttgcgtccgcccatgcgttcgggccaacgcctccaagaaggatgagggcatgctccgggccggcggcggcggcgccggaaagcgcaagaaggccgccgcgagcggcaagcccaagcgccctccctccgcttacttcgtctacatgtctgaattcaggcaggagtaccaggcgcagcaccctagcaacaagagcgttgcggccgtgagcaaggcagcacgggaaaagtggcgctctatgtcagagcaagagaagcaaccctatgtggaccaagctgggcagaagaggcaggaccttcaaagggtggtgccaccagagcgagaactgcatcaccgtctgcaagagcgagggcaataccggcaggttctgcaagctcggggcttgcat

SEQ ID NO: 294054 - DNA, 392 bp, Zea mays
  unsure (1)..(392): unsure at all n locations
cgacgactactgcgactagcctttcgtcgtagattgacggcgtgatggacgagtttacgcttgtgaaattagtggatgttcggaaggaagtgcaatgccctatatgcctaggaattattcggaagacaaggacagtcatggagtgtttgcaccggttttgcagggactgcatagataaatcgatgcggcttggaaataacgaatgcccagcgtgccgcactcattgtgctagtagacgttccttgagggatgatcctaactacgatgctttgattctagctntatatccagatattgataagtatgaggaagaggaacttgcattcagtcgagggcatgaacggcaaggagctggacgggcgcaacatcaccgtcaacgaggcccagtcccg

SEQ ID NO: 294055 - DNA, 329 bp, Zea mays
cctacgcgtccgccctcgcgtctttccatgcgtccgcccacgcgtccgcccacgcgtccggtgggatgggtggtgcctactacttcaagaacatttggggagagcgtgtggcaattgtcaagccaactgatgaggaaccatttgctccaaataatccaaaaggttttgtggggaaagctcttggacagccgtgcctgaaaaggtctgtacgggttggggagacaggcttcatagaggttgctgcttacctactcgactatggtcactttgcaaatgttcctaccaccatgctggtccagatatcacacacaatcttcaatgtgaactac

SEQ ID NO: 294056 - DNA, 440 bp, Zea mays
acccactcgtccgcccacgcgtccgcagtatctattgttcgtgaacaccctcgaaccaagccatattccggatccagtgtcaagttgaaaacaaatttagagattttttgttgtcaaagaactttgttgggatccacaccccaaaattgatttctggatctagcgaagggggtgcagctgtattcaagcttctgtacaacggtcaacctgcttgtttggcacaatcccctcagttgtacaagcaaatggctatctctggtggttttgagcgagtatttgaggtcggccctgtgtttagagcagaaaattcaaacacacacaggcatctatgcgagttcgttggtcttgatgctgaaatggagattaaggagcatcattttgaggtctgtgacattatagatggcctattcgtatcaatatttaaacacttgtctgaaaac

SEQ ID NO: 294057 - DNA, 395 bp, Zea mays
gcacgcgtccgctgacgcgtgtgtcttcccacgtgtccttggacgcctgggcggacgcgtgggcggacgcgtgcacgacgctgacgacctgcgcgcgaccgaacgaccctccgtcgccaccatgacgctgatcgacggggaggacttccagcatatcctgcgtaagctgaacaccaacgtacgataggaagcagaagatcatgttcgacatgacctcaatgaagggtgtcgggcgccgcttctgcaacatcgcctgcaagaaggccgacatcgacatgaacaagagggccggcgagctgacacctgatgagctggagcgcctgatgacagacgaggccaaccctaggcagatcaaggtgccggactggttcctcaacatgaagaaagcatacaag

SEQ ID NO: 294058 - DNA, 374 bp, Zea mays
  unsure (1)..(374): unsure at all n locations
accacgcactctgctcatgacaatgaatcactttttgatattattagtgtaaaggtatggaacttatcaggatatctaggaaatttactgcaatttatgtattttggtatcaattatcaatctgccaatcaatcattttcttttgctttcttcaataaacatttattggcaagacagattagcatgaatgttttgttacacttttttttactgcttgcagtattttctaccttttgaaattatgctntatagttataaactaaacatgtatttatgtaacaatttagttttccagaaacagttttccaatctatttcagaacatgatcttgtaccttgtgaagttttttgttgttgcttgtgcagactctgatg

SEQ ID NO: 294059 - DNA, 285 bp, Zea mays
gctactccttgctccacccgtgccctcaaattcgtttctagatcggatgtccatttccaggtatggctacctttataacctaaagcaatatatatatatatacactacctatcaagtactacccaaaattctactgcgtcatccacacccacaaggaaagctacctgcactatggctatgcctattcaattaggcgagcgaccaaaaatgctctagagcggtgtcacttctatcaaagctacatctgtgctccctacctccatgcgctaaactgtctctcatcaa

SEQ ID NO: 294060 - DNA, 439 bp, Zea mays
cgctcccaggacgccgccgctggggacggcaccacgactgttgtcgtcctcgctggatcgctcctccgccgcgcccagtcgctcctctccgccggggcccacccaaccgccgccgccgacgctctccaccgcctcgcgacacgcgctgttgagatcctccacggcatggccatccccattgagctatctgaccgggaatccctcgtgaagtccgcgtccactgctctcaactctaaggtcgtctcccagtactccacccttctctcgcccctcgccgtcgacgccgccctctccgtggtggatcccgctcaattataagctgctgaaggccgctggtctgtttgcgggatccatcttcctgatgcggaacttcggtgatctgatggccatttagtaagcttatcagcgttgtttacttggatcctatggaatgtgtttg

SEQ ID NO: 294061 - DNA, 381 bp, Zea mays
catcctctgatcacttgtgcagtgcccaaaggatgggatcagggtctcctgggaatgtgcgtcggggaaaagcggaagctgaagatcccatcaaagcttggctatgggcctcaaggctcgccacctactattgctggtggagcaaccctcatatttgacacggagcttgtcgctgtcaatggagaaccaaccaaccaatctgacgagctctagattcatcatacaaatgaatccattcaccttgttactcggaactcagcagatgtcatactatgcaagagatgagccttcattccctgccacttgtatagtgtcgaaaaagagccagcgttggaaatcaaaaaatccgctgtgtataaaaaaaaaaaaaaaaaaggcaaa

SEQ ID NO: 294062 - DNA, 303 bp, Zea mays
cccacgcgtccgcccacgcgtccgcccacgcgtccgctcaaaccctagccgcctgctgcgagtttcagagctcaggaatctgcgccatggcgagtgagacggagaccttcgcatttcaggctgagatcaaccagctgctctcactcatcatcaacaccttctactccaacaaggagatcttcctccgcgagcttatctgcaactcttccgatgcgctggacaagatcaggttcgagagtctcactgacaagagcaacctcgatgcgcagcctgagcttttatccacctggtccaaaccaaggc

SEQ ID NO: 294063 - DNA, 347 bp, Zea mays
ccgattcttatgtcagatccgtcagatgtttgccattcgactctaccatcgataatgcggataggcgatatgacctagttgctgacgattgctggaagatgcacgagctgagaccgcaggcaaaatctgttgatgatgcaaaatcctagttacttacaactgtgtcacatgagatcacaacacctatgaatgctctcctcagaatgctgcatatgcttttaggaacagatctaactatgacacacaatgattatgcacaaactgctcaaatgtgtgccatagcattgatcactctgctgaatgatgtacttgagcgatcaacaattgtggctggaaagttatagctt

SEQ ID NO: 294064 - DNA, 343 bp, Zea mays
gccagcgcatggtcgcggcggcttccgacgcgctgtcggcggccgtgggccccgaggtgtcgcacctcggctggggccactggtacacgctgcgggagctggaggaggccaccgtcgcgttcgctcccgagcacgtcgtcggcgagggcgggtactgcatcgtctaccgcggcgtcctcgccgacggctaccaggtcgccgtgaagaacctgttcaccaccaggggacaggccgaccggaagttcagggtgaaggtggaggccatcggccgcttccggcacaggaatctgttccggttactggcctacgtgcccaagggcgcccaacggttcctggggtccaa

SEQ ID NO: 294065 - DNA, 286 bp, Zea mays
aataagaatttctactctcttaaagaaaaacaataataaatggggatggcagaattaaatatgctataatacctaacgaaagtagccatgagcggagagaggtaaaggcgatcggctcaagcgcccgtcaagaaggccacgtacaggaactccaaagctggcctccagttccctgtgggaaggatcgtcaggtttctcaaagccggcaagtatgccgagagaagcggcgcccgcgcccctggttacctcgatgccgtgctcgagtatcttgccgctgaggttcttg

SEQ ID NO: 294066 - DNA, 442 bp, Zea mays
  unsure (1)..(442): unsure at all n locations
cgcccagtcgtcgtcctacgccgccgtgccgtgcgggggccccgtgtgcgcggggctgggcatctacgccgcgtccgcctgctcggcggcgcagtgcggggcttcttcttcggctgcgggcacgcgcagagcgggctgttcaacggcgtcgacgggctcctgggcctcggccgcgagcagccgtcgctcgtggagcagacggcgggcacctacggtggggtcttctcctactgcctcccgacgaagccgtccaccgcggggtacctgacgctgggcctgggcgggccgtcgggcgccgcgccgggcttctccacgacgcagctgctgccgtcgccgaacgcgccgacctactacgtcgtgatgctgacggggatcagcgtcngcgggcagcagctgagcgtgcccgcgtcggtgttcgccggcgggaccggggtggacaccg

SEQ ID NO: 294067 - DNA, 356 bp, Zea mays
aaaagattgattctgagaatctgctacatttggcatttagtgtgttccttttcaactcagagtatgagctgctacttcagcaaaggtccgcgacaaaggttacctttcctttagtttggaccaatacctgctgcactgcatgtttatcaaaagttatcgctcctgctcgcggaaagtgagcttgactgttgccggggtggaagtatcgttttggactgatgcatgagtgctgcggaggggtttgttgtttggttgtttgttcggtgaccgaatcgcgagctggacgcctgtttaatccgtgcttatacatcggctgaagtaacagcaataagagggacaatccgtagctctttccg

SEQ ID NO: 294068 - DNA, 449 bp, Zea mays
caaagtggacaaccctgtcgccctctcggtctccctcgagcttttcttgtgcgcagccggagccgctgcttttcgttcgtcttcatcctacgcgagggcgaaacccacaaaccctctccctcctgtactccggccgacacatccaggggcgatgacgctgggtagctccggcgccggatcgagcgtcgtcgttcctcgaaacttcaggctattagaggagctcgagcgtggagagaagggcattggtgatgggacagtgagctatggaatggatgatgctgatgacatctacatgcggtcatggactggtaccatcattggccctcacaatttgctttgtgacaaagactatccggagaagccaccatctgtcagattccactcaagaatcaacatgacatgcgttaatcacgagacaagaatggttgatccaaggaagtttggtttgc

SEQ ID NO: 294069 - DNA, 378 bp, Zea mays
cccacgcgtgcgtccacgcgtccgaccactcgtctttccacgcgtccgcccacgcgtccggccaggcgtcctcccacgcgtgcgcccacgcgtccgcaacacatggttgatcaactgacagaacttcataaaaaagaacaaatgctttgtgaagcaaataagtgtcttcgaagaagactggaggagagcaaccaggttatatggcagcatgcgtgggagcaaagcgagcggcattctgaagtgcagccgcagcagctcaatggcaataacttcttccatcctctcgattgtgctggtgaacccacccttcagatagggtatccttcataggcactgactagctcatgcatgaccaccttgctgccctcgtggttgcca

SEQ ID NO: 294070 - DNA, 418 bp, Zea mays
cccacgcgtccgcggacgcgtgggccgaagctgctctgtcctttgaagatacaaaagatgcttgggccgaagctagcataattggtggaaaattttttaccgatatctgggataatggtggccgagagatggccggagaaattattcgaagaagtgagaagggcattcacgatgctagagaagtagctgaggctgctgacaagagcgcagaagccgaaggtcaattaggtactaaataatagttcttatcgtgttgtaatctttaggcttttaagatctgtttgcgatttgtaatagcaatgtagccgggtcctgcttcagatccgactaaagcgccttcggaccctcagccgaagggggacgacgaaattaaaaagatggccgaagatatcatggaccaagttgttgatcgaactgt

SEQ ID NO: 294071 - DNA, 435 bp, Zea mays
  unsure (1)..(435): unsure at all n locations
gcaaaactgaactttgctgataatgctgtttttagacagaaagaaatatttgcactgcgtgatactactcaggaagaccccatggaggtcgctgatgccaaagcagatttgaactatattggtcttgatggagagattggttgcatggtgaatggagcaggattggccatggcgaccatggatattataaagttgcatggtggtacgctcgccaattgtcttgatatcagaggaagtgcatcagagggtcatgttgtgcaaactctcaagatactgacttcagatgatagagtgaatgcaattctagtgaacatttttggaggcattatgaaatgttatgtgatagcaagtggaattgataatgcagcncaacatgttgacctgaaagttcctgaggtagttcggttggaaggcacctatttataccaaggaaag

SEQ ID NO: 294072 - DNA, 438 bp, Zea mays
attgaagtacctgaagtggtcttaatggccttaatcagccttcttccgaccataccacagagcctgtcctgctgatgctcctcctcttccgcctccatctccaaaagcagcagcaacaataatgggttttgttgcatgcttacacaggctacttacatcaagaagtatggcatcacatatgatggcgtttcctgtcgctgttgggagaataatgggtttgcttaggaatggttcggaaggagtagctgctgaagctgctggacttgtggctatgctaattggtggtggtccttgtgattcatctatcttaatggatacaaggggagaatcccatgccacctacatgcatgcaaagtctgtactattctcgcaaccaatgtatgttccgatccttgttaaccggttgaagccaatatcggtgtcaccatttgtatctct

SEQ ID NO: 294073 - DNA, 378 bp, Zea mays
cggacgcgtgggtaactcgtctgctcgcatttcctcccaatccatcccgcctccaaaccggaactgcaagtcgccccgcatcgatggcgcccaaggccgagaagaagcccgcggcgaagaagccggcggaggaggagcccgctgccgagaaggcgccggccgggaagaagcccaaggcggagaagcgtgtcccagcaggcaagtccgccggcaaggagggcggcgagggaaagaggggccggaagaagggcaagaagagcgtggagacctacaagatctacatcttcaaggtgctgaagcaggtgcacccggacatcggcatctcctctaaggccatgtccatcatgaactccttcatcaacgacatcttcgagaagc

SEQ ID NO: 294074 - DNA, 371 bp, Zea mays
  unsure (1)..(371): unsure at all n locations
cccacgcgtccgcggactcgtggtcgcttttctacttcctctaactctatgatatcgccgagaccctcggcgtctcggccgacttctccgacatcaactacccatccctgaataaatgtttcatctatcacgaccagctctagtatgctctctatgactccatcttcgtcgtattatgacacggtctacccatgccgcccaccttcactagtgtatatatgntgaacgacaacaactgcatcaataaagaactctgcactcgcattagaaaacacaggcttaacgatctcgtcaatatgatcagctaccctgtcaactgcactgtcccgattgcagcacatgttctcaagaatgctggtacttatcatgag

SEQ ID NO: 294075 - DNA, 414 bp, Zea mays
cggagaattcgcccttaggagcacaagccgacgccgaccgcgtacgcccatagccccaaacccacgccgacgacgtacactcccaccccgacgccccccaagccgacgccacccacatacactcccgaccctacgccccacaaacccacaccaaaacccactcccactaatacgacgtacaccccgacccacaaggctccgacacctaagccgaccccaccaacgtacactccaaaccccaaacgctagacgcccaaaccgaccccagctacttacaccccttgccgcaagccttcgacacctaatccgaccaactctacgtacactccaaaccctaagccacctgataccaagcccttcacgcccaatccgaccacgtcaacgtacacccattcgccaaagcctacgacaccc

SEQ ID NO: 294076 - DNA, 441 bp, Zea mays
cccacgcgtccgcggacgcgtgggattgtgcaactccatgatttgaagtattcctggcatgatcttgtatcaagggggaataaaaatgctttgaccattctgagcctatgggcaccagtcttagctatatacctgatggacatccacatttggtacactcttttatcagcacttgttggtggcgttatgggtgccagagatcgccttggagagattcggtcaattgaaatgcttcataaacgttttgagagctttccagaagcgtttgctaaaaacctttccgcttcaaggatacctagcagacgcattgatcgtgtaaatgaatcagaaattacaactaagacgtatgcctcaatattttccccattttggaatgaaattatcaagagcttgcgtgaagaggactatatcagcaacagggaaatggatctgcttatgatg

SEQ ID NO: 294077 - DNA, 395 bp, Zea mays
cccacgcgttcgcccacgcgtccgcatcacatcaattgttctaccgtgattcgcagctgggtcttggtcatgtgcggtgggtttcttttccggacgttcatattcaggccgcttgtttcgtgccgacgccgggtccagctccggcaccgtccggctcctccgcgacgaacacgaacgactcctccgctgctcctcggccagccaagcccagcgcattcccacccccaatgtacggtggtgtcacccccggcagtctccagccacacgagtgcggcggccggtgcgcggggcggtgctcggcgacggcgtaccagaagccgtgcctcttcttctgccgcaagtgctgcgcggcgtgcctgtgcgtgccggcgggcacctacggcaacaagaacacc

SEQ ID NO: 294078 - DNA, 389 bp, Zea mays
  unsure (1)..(389): unsure at all n locations
atccaggtccggaggcgttggcaccttgttgagctccaacgccatgggtggtgagggccggcaggcccattcagctggctgtggctccggctgtggtggtggctgcggcagcggcatgctcatcgaaggctccaaggccaacaacgccatgtccggtggctgtggctctggttgcggtggtggatgcggcagcgagcttcttgacgcccaccgcatcctcgccgccgtccagaacgcgcagcgcagcgccaagcgccgcggcgcggggcccgcgaggcccgtcattgccgtcaccccgaccaccaccttcgcgctccaggtgccatccctgacgtctctggcgcacacncttcgnctcgtcgacgcccagctcgtgtggatcgtcgtcg

SEQ ID NO: 294079 - DNA, 421 bp, Zea mays
cacgcctgctccgacgcgtgggcggacagcgtctttcaacttcggcaagtgcaactgccgctccagctgcgcctgcttcagctcatgcaactgcatgtcccctgacgtggagaccgccgtcgccagcagcatcaagaccatggtcctcgctgcgccgaccaccaatgccagcgccagcggcttcgaggcggccaccgagggcggcggctgcgactgcaacacctgcaactgctgcaccagctgcggctgctcctgctgcagctgcaactgagccggtccgtccggcccggcgattgcgcacgagagtcgagaggacgaccacgactaagcgtataaatataattaatagccacgtctaaattagatcccggcaactgcaccccccattatcgatccatggtccctcctggggttcatgttc

SEQ ID NO: 294080 - DNA, 462 bp, Zea mays
gacccacgcgtcacgcggggctccgcgccttcgagcccacggcattggcttcttctccggcaaggaccccaccagggtggggccgattgagccctacgtcgccaggcacgccgacaagagcatcgtggccagcggcctcgcccgccgctgcctcgagcaggagtcctacgccatctgcgtgccggagcccctgtccgtgttcgtcgactcctacggcaccgggaccatccccgacaaggagatcctaaagatcgtcaaggagaacttcgacttcaggccagggatggtcaccatcaacctcgacctcaagaagggcggcaacaggttcatcaagaccgccgcatacggccactttggccgtgacgacgccgacttcacctgtgaggtggtcaagcccctaaagaaagcatccgcttaagaatgtattgagaagttcactggacatgaggatcatcttcctct

SEQ ID NO: 294081 - DNA, 325 bp, Zea mays
atttatgcccacacattctcaatctcatcttacattttctctccttatagctacaggaaagtcaggtcataaagcttatcctattccaacaactttcattaactatctgcattaacaaagcatgactccttacatcaacctttaccactatgatcaccctcttgcgctagataagaaatatgcacggattgtaacaccataaatcgctgacttgttaacagactatcctgacttctaaactaacacctaccaacaacgctttaagaactcgattacatgaactgagccaacgatagtatctctactcccttattacacatgtcta

SEQ ID NO: 294082 - DNA, 100 bp, Zea mays
cgggtaaacccgctagctgtgtaatcttgtccatctatcatgtatgcttgttactgcccagttgcgcttgaatctagcggcgcttttggtgagagggtgc

SEQ ID NO: 294083 - DNA, 439 bp, Zea mays
cccacgcgtccgcttcatgccggcatggctactcctgaagatggatctttgaggcaaagggggtaaataaagatgcgatggcagaatcatattgtactgcaagagtgacaattgtgtgttccactcacatatatgacctagttttgtgtgtctatatgtcgaaacccatatgtctgtgattttattatatgttatgtaagcacaaatgaaacatgccggactagttgcttttgcttgtctatgtaaaaaaaaaaaaaaaaaaaaaaaaaaaaaaaaaaaaaaaaaaaaaaaaaaaaaaaaaaaaaaaaaataaaaaaaaaaaaaaaaaaaaaaaaaaataatataaaaaaaaaaaaaaaaataaaaaaaataaaaaaaaggggcgccctttttaaggagccaaattttacgtacccttacttgcaacgcaatagttttt

SEQ ID NO: 294084 - DNA, 438 bp, Zea mays
cccggtcatgatccacatctttccgagcgatttattggctggccttttcctcttctgaccggggggaaggctctaggggcacctcgccactctcactaatcaagtactaatgcatgatctacacattcagatcccaactgccttcgaccccttcgctgacgccaatgctggagacaatggtgcacgatcagactccaaggactacatctacgtgcgcatccagcactgtaatggccataagagcctgaccaccgctcatggatagcagaatgatttcagctacaacttgatcctcaaagatatcatgatagagcactgctgtaatggcacactgctccatgacccagaactagtacaggtcattcagctccactgtgatcagaggaacgaactctccaatctactagcacaggccgtcattgtgcagaacgatcacat

SEQ ID NO: 294085 - DNA, 385 bp, Zea mays
aggaatctcaagaaatccatttctttgttgttaagacctacaagggtggcaatgactgtgggatatttgaatctgaaagaacagttggtcatacagttaccagccccagtgacacagctcagcaatgcagatctctctttttgtcgaagtgatctccagcttatttccaacacatatttattaagtcatctttgactgaatgccttttggtatttttttcaagacaatacatgccaccattttttctttgaataattggatctataccattaaaagattgcaactttagatatatactattggctccacatatcattgactcatgtgaaccatacatgtaagtgagataacaatgatatatatttaaagttgtaatcctttaacg

SEQ ID NO: 294086 - DNA, 396 bp, Zea mays
gccgggtggaggcccgcggcgtccggtgcctttgccggtgccggtgccggcgaggccccgggggtccgccgcgtcctcaggatccaccacaacccgcgcgcgctggcccgcttcgaggagtaccgcgacctggtccgcgcccgggccgcccggcgctgcggcggcgagggcgccgtggtggaggagcgctgcatcgcggacggcaacgagcgcctgcgcttccactgctccaccatgctctgctccctgggcggcggcgtgtgcgggagcccctactgctgcgtgtgcagcaccctgcggcaccggcgacgacgtcgagctgctggtgtacaaccccagagcagtgctcccgtgctttgtcatcctctacagcagcagctagtcggtggcatgaca

SEQ ID NO: 294087 - DNA, 391 bp, Zea mays
cccacgcgtccgcgcagacatacgcgtctacgtactcgcctacctccgcggctcatacctgtaactcttgtcccaattccatccagcgatgcatcccgttgcgcgacaccatgagggagtgcatttcgatccacatcggccaggccggtatccagttctgaaacccgtgctggcatctgcactgccttgagcatgacattcagactgacggtcacatgaccattgacaagaccattgatggaggtgacgatgctttcaacaccatcttcactgagactggcgctcggaagcacgtgcccggtgctcttgatgccgacctcgaacccactgtcatcgatgacgcgaacactgggacctaccaccagcacttgcacactgagcagctcatcaa

SEQ ID NO: 294088 - DNA, 376 bp, Zea mays
ctgacgcgtgggcggactcgtgggttgcattataagggtaaacccgctagctgagtaatctgggccagctatcatgtatgcttgatactgaccacttacccttgaatctagcggcgcttttggtgagagggtgcaatttactttaaacatggttcgtgacttgctgtaaatagtagtattaatcgattcgggcatctagtaactaaattaagggtgtgtatggttaggcttttgatttctaaacgacaaaagccaaactaaagagctggatccataaaatagcattttctaaaagtcagactttgtggcggtacaaaaaaaaaaaaaataataatattaataattataaaaaaaattatattaaataatatatatt

SEQ ID NO: 294089 - DNA, 355 bp, Zea mays
cccacgcatacgaggacgcttgagcacacgtttgtctgccgcgctctctggccttgcgtccgccgggctctttcaacccaacggactctcaatgatgtcaaccctcacgagttcggtgttctgcaatgtcatgacctacaagcctgagttcaccgaccacctcacgcacaagctgaagcaccacccctgacagatcgaggccgccgccgtcatggagcacatcttggaacgcagctcctacatgaagctggcgaagaggctcggcgagctcgacccgctgatgaagccgaagcaggacaagtacgcgctccgcaccttcccgcagtggctcggtccacagatcgaagtcatccgc

SEQ ID NO: 294090 - DNA, 440 bp, Zea mays
gggagggagagaaaaacccaggccccccgatctcctcctcccactccgatcgcccgagcgatcgccgagcttccccgttccctccccgccccccgcgacgccgcgacgccatggagccgccgcacgccgagcaggccgtcgccgctgtagcagcaggaggagagggcggcactgcaagcccgggcaccggcctcgaagggccggtgcttaggcgggggctggacggcggtggggaaggggaggacggggagctgggggcggggcaggaggcggacgcacggctaccggagcggactggcgaggcggactgtggctactaccttcgcacgggcgcctgcggcttcggggagcgttgccgctacaaccatccccgcgatcgtggtggcactgagtttggtggaggtaccaagaatggtgcagcacaagacttttcaaaacga

SEQ ID NO: 294091 - DNA, 436 bp, Zea mays
acgtccacgcgcgtcgtgacgcgtgctcgaacgctaccctcgctccttcactctcatgccggcggcttgctttactgatcgacattgtcaagcgccgaccgaagcccgacatggctaccaagctttctaacgccactgccagcgatccgacggtcgcacttcaagaacgaatcggacacagcactctggctctatcaaccgtctgcgaccaaagctcacggacgccttcacgattctatctccgatcatgcggcaattcccttccggacatactgggggggtgttggtcgcaccgcgcaagctaaagctcgccactgcaatgggcatggcccgcggccggttaaatgagccgggtgcatcgtggatttgctgaagaatgctgagagtaacactgatgtgaaaggcttggatgtggacaacctctataattcacaca

SEQ ID NO: 294092 - DNA, 424 bp, Zea mays
cggacgcgtgggcggacgcgtgggtttcgtcacccctgacgctcgacgcctcttctcctgtcgtgccccgccgattcgcgtcgccctttgttggaaggaacgatggagcagaccttcatcatgatcaagcccgacggcgtccagcggggcctgatcggggacatcatcagtcgcttcgagaagaaagggttctacctcaaggggatgaagttcatgaacgtggagaggtccttcgcgcagcagcactacgctgacctttccgacaagcctttcttccccgggttggtggagtacatcatttccggccccgtggtggcgatggtgtgggaggggaaggacgtcgtgttgactggccgcaggatcattggggccaccaggccttgggaggcagcccccggtaccattcgtggggactacgccgtgg

SEQ ID NO: 294093 - DNA, 446 bp, Zea mays
ttaagcaatcagacattaactcgaccgtgacaacaaacgcacacaaacagcaccacatgtccaaaggccacatgacctatacatcagcatcctttgcctacaggctgtcgcacatatcaccgaaccctgactcatctgaccatgatcttctcactgctcgaacggaggtagacaaggctgctcgcgcctcaccatacatatactctggtggccgaaggcttgtgtgcctcggtgaacacttagcctacctgcacatcaaggcaatctggacacacctactgaggaactttgagctcgagctggtatatccatttcaagagaacgactgtcacgacatggttgatggcatcaaggccgacgtgatggttcactacaagaggcggaagcttgacgtggacaactaagattgtggccacaatctctacatgcttgcttcttggcgattc

SEQ ID NO: 294094 - DNA, 429 bp, Zea mays
gacccacgcgtccgcggacgcgtgggcggacgcgtgggcggacgcgtgggtagagactggggaggccgtagcgttcaaagaatacctgcaggagtacgagaacaccatatgcggacgccaccccatcagcgtcttccttcacatgttgaaacattgctcgacaaaaattaagataggctttgtccgctacgagcagtccagccagtgcaagaacatgagggatagcagcgtgagctatgcatccgcagcagcgaaggttgctggtgcatccggggaagaagataaacaagactgagcgagctacagctctggttgatatactatatataaaccgccaaaccttggtgcggaatgtgtgactggtttcccataagaaaaagaacatgtgatttggtaaaacattttcttcttcagtaaaaataataaata

SEQ ID NO: 294095 - DNA, 440 bp, Zea mays
gtgaagcggttgccatcgcttgagatggatctggctgcagcaaaccatgaatgtcgggggtgcaattatactcgcgagacaaatttaactcattctgggaaaaagccactggttgttattgcaataatgactacctttgggatgaaaaactaccctgatactgtcaggaaatcatcgcttcccacatgttcaatgttcaaaaaactataagaagaaaaatgcattctagtacatttcctactttgaagaacctcaaatccttgacatactattgatagggagatcgattacaaaaatatgagcaccaaggattacttgattttggatgatcatctagagccaaatcaatagctttctaaaaaacaaaaaattgttttactaattcatcaaatacattctattctgcactccattgctatgtcaatgatcaaatatacata

SEQ ID NO: 294096 - DNA, 253 bp, Zea mays
cccacgcgttcgcccacccgtccgccaatccttccgggattccggaaaaattggccaaggggaggaacacacacggccacaaccagttttacaaggcccacaagaccggtataaagaagccaaagcgccaccggcagaccttcaccaagggtatggaccccaagtttctgaggaacctgatgtattcaaggaagggcaacaaaaagagttgtgggtctgaagaattaaaaagaaaacatggttgtttttttta

SEQ ID NO: 294097 - DNA, 322 bp, Zea mays
ctacttctagatccctaccattgccttctgtgatactgactcttccattccgtacctcgatgtcggcattccagctaacaacaaagggaggaacacctttgggtgtcttgttttgccttctgcccaggatggttctgcaattgaggggctctattcttcctgcgcacaagtggaaactcatggtcaatcttcttttctacagacccccagaaaactcaaaggcccgggaggagaattttcccgtcccccctgattttcccgcattcactgattaccaacgaactgatcagtggggtggtgatcagtggacctcttattgggg

SEQ ID NO: 294098 - DNA, 277 bp, Zea mays
gccacgctgacgatcacacgttcgatggagcaaaagatggacaaatgacagtacacggggtgcctgaccatggtgcacatggccttctgctcgtccctcgccgtggcgctcgtacgcgtcctacgagtcgtggacctcccgtcctcgcccgacatgacgtcgcagctctacctctcctacgtggtgcccatcggcgccctctactcgctctcgctctggttctccaactgcgggtacatctacctatccgtatccttcatccaaatgctcaacatgc

SEQ ID NO: 294099 - DNA, 436 bp, Zea mays
gttctgcgacggcaagtgcgcggtgaggtgctccaaggcgagccggcacgacgactgcctcaagtactgcgggatctgctgcgccacctgcaactgcgtgccgtccgggaccgcgggcaacaaggacgagtgcccatgctaccgcgacatgaccaccggacacggcaaccgcaccaggcccaagtgcccctgatgatattcattccttcgctccctccggggagccagctgtcttgcatgcgtatatgtaatgtatgtataggctgtgcaatgcatgcatacatgatacatgccgtgactctggatcggcggatgcctatgcatgcttttcactagctattattactactactactactcttcctgtcttcctactgtgtgcaccagagtgagagggacgacatgcatggcgatgacatgtcgtgttatgtgcact

SEQ ID NO: 294100 - DNA, 347 bp, Zea mays
cggacgcgtgggcaaaaaatgtgattatttgttataatggtctctgttcttaaggcgtggcctaggcgtcgcctaggcgacgcctaggcgtccgggcggtggtctaacgcctaggcgccttgcccgcctacctcgcctaggcgtccaggcggtggtccaacgccttggaccgccttaccgctttaaaaaccatgataatggtaaacgtaagttttgtgctatgagcctatagcttctcccctatcgtgggcagtcgtgtcaggatacttggtttctgtgaaacattcaggctgtcattatgtctggtctgtagaatgtgctagtgtgaatgttctgctatttcaata

SEQ ID NO: 294101 - DNA, 320 bp, Zea mays
  unsure (1)..(320): unsure at all n locations
cggacgcgtgggcggacgcgtgggcggacgcgtgggcggacgcgtgggcggacgcgtggggccttcgtgaaagctaaagacggaggcttggaagtcattcagacctaagtcttttgtaatggacatgagcctacgcctggaaattactatttcgaggagaggtacgatttagtcaggttcataaagacggtccagaaggccggcctgtttgtacatctctgcatcggtcctacatttgtggcgagtggaacttcgggtatggggtatttctccatttcctgaaatcacctncgttaaaaatggagcattatcgtgtcttc

SEQ ID NO: 294102 - DNA, 350 bp, Zea mays
acgcctaccgacacgcgttcgccaaagcctccgacacctaagccgaccccgccgacgtgacccctgctcccaagcctccgacgcccaagccgaccccgccgacgtacactccaagccccaagcctcccacacacccgactcccaagccgaccccaccgacgtacaccccttccccaaagccttcgacgcccaagccgccggccaccaagccgcccacctacactccgacgccgtcggtgtcttacaccctcagcccgtcgtcaccatactactagaaagcgatgcctaccataccacactgctgtcagtctctggagcatttaggtgggctggatcaatggaaaggttgt

SEQ ID NO: 294103 - DNA, 294 bp, Zea mays
  unsure (1)..(294): unsure at all n locations
caaatactgatctcactgatccagtatggctatggcaaaggcaggcgcgccgagggtctcggcggcccagctggtggctctcgggctagcgctcctctgcgctgtcgccggcccggccgccgcgcagaactgcggctgccagccaaacgtctgctgcagcaagttcggctactgcggcacgaccgacgagtactgtggcgacgggtgccagtcgggcccgtgccgtctnctcaagctcttcgcccgcctcgccgtccttggcagctcgcgcaagcgccgcgctgcctccgcggg

SEQ ID NO: 294104 - DNA, 329 bp, Zea mays
cccacgcgtccgcccacgcgtccgcccacgcgtccgggcacgccacgcaacgctcttggagtcggtagctcactcgatcgcagaggccacgctgctcaagttccctcagatctccgcagtccgagtgaaggttggcaagcctcacgtcgcggtgcgaggcgttctggactacctgggcgtggagataacgaggcacagaaagaaagaatgagatgctgtacacatgtggtgatggggagccagttcaatgctgatggcactgcggccataaccataatccacgcacgcttgttgcttgttggcaactaggcatatccctttcacctttg

SEQ ID NO: 294105 - DNA, 314 bp, Zea mays
cggacgcgtgggcggacgcgtgggcggacgcgtgggcggacgcgtggggaagatcacgagaaggatgtcctattagttggtgatgacccatgggaggacttcgtgaactgcgtgcggtgcatcaggattctttcgccgcaggaagagaggcaaatgaggctggccagcgactacggagacagctttgttggcaaccaagcgtgcagcagctcggacggaggtcgcccgtggagtggcaccggcgactagaaatagcaggcgatgtctgagcacaaatgtttggtataatccgtccaacgattgcaagaaaatga

SEQ ID NO: 294106 - DNA, 352 bp, Zea mays
cccacgcgtccgcccacgcgtccgcccacgcgtccgcccacgcgtccgattatccttatgctttggtctttcaattgctttggcatcaagtggcattgtgccagcatttacggaggatgtcgctcgatctgtaaacgttgtacatgtcgtcgataccacaggagtacatggcgggcatatagaaccagtatcctatatctctttgttttccaatacacctggaaagctgacgaatgaattagtggaccttggaagcgaagaattttcttgcggaaggaacatgactactgacttggtaacatttacagtgaagtatggctgttggagttacaaagagagcagtaccggattg

SEQ ID NO: 294107 - DNA, 421 bp, Zea mays
cgactcgcatcgacattgctagagttgcgattcctgaggccatggagcagcagacaatatctattgccaaagctgccattacaataatactcattttagggacttcatttcttgcagctgccaatccaattgcaagatgctatgacgctcttaagatcagttctcatattctataagcatttatctcgagtcagcaattaggaactgtgatggtttttaggtcaccgggaaggttgttgagaagatcttggactgggagagaagtgcacagaagcaagttaaaatcctgttgaagcccgctcatgtcatcctgcaacgtctattcaattttttcttattccattttgtgacgttatgactaagcatgccaactggcatccttagcccacttcttatcgagcttgggtgcataccacatgta

SEQ ID NO: 294108 - DNA, 451 bp, Zea mays
cccacgcgtccgcccacgcgtccgcactcgtagagagaaggaaaaatatccccggaccctagctcccgatctcgatggcgaaccctcgcgtcttcttcgacatgaccgtcggcggcgccccggcgggccggatcgtgatggagctgtacgccaacgaggtgcccaagaccgcggagaacttccgcgcgctgtgcacgggcgagaagggcgtgggcaagtccgggaagccgctccactacaagggctccaccttccaccgcgtcatccccgagttcatgtgccagggcggcgacttcacccgcggcaacggcaccggcggcgagtccatctacggcgagaagttccccgacgagaagttcgtgcgcaagcacaccgcccccggtgtgctctccatggccaacgccgggcccaacaccaacggctcccagttcttcatctgcaccgtcgcgac

SEQ ID NO: 294109 - DNA, 342 bp, Zea mays
ctacccacgcctaccgacgcagtcgcactacgcatgcatgaattccttccgtaattgctaccagatatcgggctcgcaggcgttatgagatcaatatcactgctgtatatgaccattccatgtacaccagccagttctgcatgaagttagctgctctaacgaccgctatatgcagtttctgctgcaaagcctaatccaaagcacaggctgcgtgtgcttacaccatgaacactgctagtgcggtcaccgtcaggagcacgatccgtcgtctgagggagcagactgaagcatgatatatctctttatattattggggtttcctgtagttgctcttgtcaggca

SEQ ID NO: 294110 - DNA, 368 bp, Zea mays
cccactcttcctaccatggttacccactatctctttatgatcctggagtacgactccaagctccgcctcatggagcacctcaagcacctctccagcatccacctcaccatcctctcctcccagatcactcaatcaactgactatgcatatctcgtgagccatcaaccatttctctcaaccatgaacctagttctgaatcctgatatgctgatctagaagcgtttaaatagcatcctattgtctctcaactttcatttcaatcaattcaatgtatttgtcaaggatcagctttcgctttatgttgattattattattgcaatgctccaatcacgaccttcatcatctatccattttatccacattatca

SEQ ID NO: 294111 - DNA, 298 bp, Zea mays
gagagagcggcccccgtgaggagctcccacacctcgactgctggcctgctcgcgtggcctcgcccctatgtcgccctttaacttccagcacgccaacctaaccagccaactgaggaattcaggaatgaagaagatggaggacaccatcaacgctggcatcaactggcttgacaccaaccatcttgcctaagcctatgaattctattacaagattaaagaactttagagcctttgcaaccccattatcgtcaatatttaccaaggctctgtttcctacatttgaagcttcttctgcatt

SEQ ID NO: 294112 - DNA, 385 bp, Zea mays
tcacacgcgtctgaccacaccatcgaccacgcttacgactctagatcgccagcggtcgcagaggagtggctttatcgataaggcaactatacttggttacacaatccatattcttaaagatttgactactcatgtgaacaagctgaaagctgaatacacttcactttctgaagaatcgtgtgagttaacacaagaaaagaatgagcttagagatgagaaagcttcactgaaatctgaggttgataatttgaataatcagtatcagcaacgaattctggtgctatacccatgggttggaatggagccttctgttgtcatggggccaccttctgcatatccctacccagtcccagttccaataccctttggtgctgtacccattcat

SEQ ID NO: 294113 - DNA, 405 bp, Zea mays
tacccactcgtcctactagtactagatctgcacccctcacatgcttcactacttatgatttcctccaccaaccacgccaccatgcatcttattctatcaactcattcttattatcaacattacaataataattttcttcctatcaacaacattcacatctactacctacctttctgcttatataattacattacctctactatctacttctctattaaatctacctcctattttcttcaataattatctcttttctttactcttctcttatattctatctatcacattatattatattattctcattttattttataattcttaatcatctttctaattctacttttctttctattaattttatcaaactatattattaattaaatttatttaaaaaaataaaat

SEQ ID NO: 294114 - DNA, 430 bp, Zea mays
ctgaacaaggagaagttccgggcgctcgtcctcaactccgtcgtgctgctgacgttctcagccgcgctcgtctgcgtgaaccacggctcggacgagaccggaagcagcatcccgaaggggaagttcccggcggggttcgcgctcacgctgtcggcgtcggcgctcttctccctgatcctgtccctgacgcagctgaccttcgacgaggtgctgaagagcgactcgctccaaaccgtgctggagatgcagttctggagcaacaccgcggctgcgtgcgtgtctgtggccgggctcttcgcctccggggagtggcgcaccatcttcggggagatggatgcgtacaagaagggggaggtggcgtacgcgatgacgctggcgtcgactggcttctcgtggcagctgtgcacgatgggcctcatggggctggttg

SEQ ID NO: 294115 - DNA, 397 bp, Zea mays
cccacgcgtccgcccacgcgtccgcccacgcgtccggaaaatgttgtggaagcgttcaaagatgtgtctcgaaatgccagtaaagcaaaagacataatcgatcaatgcgataattccgaggggcagccggctgcagaggaggggcggccggcggcgtgctgcagaggaggggcggccggctgtagaggaggggcggccagcggcgtgctacagaggaggggcggccggctgtagaggaggggcggccagctctgtgctgcagaggaggggcggcttcaggtaagttagggtttaggttttgtaatgggcctttggactggttggaccgaactggggacaagtctgccgacttgctagccctagtctacttatatatttcagtcgtgggcaagtttag

SEQ ID NO: 294116 - DNA, 261 bp, Zea mays
tccctggtcgtccctctcttcctctgtctcttggtctgtctcttggggcatcatagtttcttccggtacacccaatccttccgcagggataccacatccaatataggtcaagttcaagatcctagctcagggttccaccatcatcatcaccaccaacacatcatcatctcgcatctcgtccagtctatgcttgatctatattggatgtggtatcactggagacggcttgggtctgggggatgcatgatcctgctcatctct

SEQ ID NO: 294117 - DNA, 345 bp, Zea mays
ggcccgggcaagcagcgacgactcagacaccgagaagtcggcggcagcggctggggcaggggctgactcctaccagcagctagtccggcggctgccccggccgtatcacaacctgaatgacggcgggcatagcaacctcaaggcgctgatgtgagtcgtagtcctggcttgtatccaatcacaacaagagaggctttgacccacagtggctgtccataacataatacaaagccatcttccttgcgaacggcttaattgctattgtatctgggctatttacgaaccttcttagctgaaaacttgagttttggatcctgttgctccatttgatgcagctgcgttctt

SEQ ID NO: 294118 - DNA, 400 bp, Zea mays
cccacgcgtccggcttgacgggcgcgggcctcgtcgaccagatgggcaacttgttctgcaagacgctgctgttcgccgccgtcgcaggcgtgctgctggtcaggaaaaacgaggacgtcgagtcgctgaagaagctcgtcgacgagaccacgttctatgacaggcagtggcaggcgacctggcaagatgactccgctgggggaccaaacaactagttcagcgttgtggtacaaaaaaaatgcaaaacgctttcttgttacgtagcttatctatttcctcggccttcttgttttccctgtgtagtgagatctttttttttttttgtttttgacaaacgcaatgatctacgtcatgttgtaaaattgtatggaaaataattctgcagtttcagttttttttt

SEQ ID NO: 294119 - DNA, 356 bp, Zea mays
  unsure (1)..(356): unsure at all n locations
ggccacgcgnttcgccacgcgttcggccattcgttcggccacgcgttcggccacgcctggggaggaaaccattaaaggtcaagttgaaggtcttggtttcaacaattcattccttgatccttgtgggtttccttctttagattgtgggtttcactgtcttccatccaagaaacactgtacaaatcacctaaacaggtaatgtactcaggagggggtgatgaaaacaagaacctcaaactcaaataagtacaaagagggttctcatgttatggagtatggtgataagaccttcaaggatgagaagctntccttttatcaaggttttgatcctgctaatgccaacattgcaaacatgc

SEQ ID NO: 294120 - DNA, 364 bp, Zea mays
cccacgcgtccgcagctagctagcgttcctaatcaccgacgaataatctcttcttcacctcactaacaccgagctagcagctcgctctgtcctgcaacaatggccgctcgctcctcctcccagcagctggtcgcggcggcggtcctggcagcggcgctgctgctgctggcggcgggggccgggacggcgtccgcggcggtgagctgcggcgaggtgacgtcgtcggtggcgccgtgcctcgggtacgcgatgggcagcgcggcgtcgccctccgcggcgtgctgcagcggggtgcgctcgctcaacagccgcgcgtcgtcggcggcggaccggcaggccacctgcaactgcctcaagagcatga

SEQ ID NO: 294121 - DNA, 385 bp, Zea mays
gcgacccgtccgcagcgcccgatcattttaacggaaactgccaaaatctagtgccaggcgattgattgactatggtagtgcaccataccatcaccaggattgcatactcactgtgtgtaccacacactattgcgccattgaagacatttagggacatcgatcgatatatacatgtgatatctggagtgctgcttgcatacttgttgagctttgctcgtgtgatacactgcatcatactcacgataccttggaacagcttgcactgatggatataggtctaggtcctcttccactgtacatgctggaaagagccgaccaacatgcggcgaagtacgtaagaataggaggattgaactggccgccagcaataacaacagtagagagc

SEQ ID NO: 294122 - DNA, 351 bp, Zea mays
gcatgttgtctctcgctctcgctctcatcaaaatgaagggtacgacataccgcggggggggaaaatcctgccggttctagcggcggtgcacctggactcgtcgctgtacgaggatcccagccggttcaacccttggagatggaagagcaacaacgcgccaagcagcttcatgccgtacggcggcgggccgcggctgtgcgccgggtcggagctggccaagctggagatggccatcttcctgcaccacctggtgctcaacttccggtgggagctggcggagccggaccaggccttcgtctaccctttcgtcgacttccccaagggcctcccgatcagggtccagcgggtcgc

SEQ ID NO: 294123 - DNA, 309 bp, Zea mays
gctacccgatcccaaggacggatcattttaaaggaaactgccaaaatcaagtgccgtgcgattgattgactttggtagtgcagcataccatcaccaggatcgcagtttcattgtgtgtaccacacactattgcgcccttgaagatatttagggacatggatggagctatacatgtgatatctggagtgctgggtgcatactcgttgagctttgctcgggcgagacactgcatcatactcacgataacttggcacaccttgcaatgatggatagaggtctaggtcctcttgcactgtacatgctggaaag

SEQ ID NO: 294124 - DNA, 186 bp, Zea mays
  unsure (1)..(186): unsure at all n locations
ngcacgcgtccgggctatcagtggctgtccgatatacgtgagcaacgagcctgggcaggcaaacttanagctgctcaggaagctcgtgctccccgacgggtccttgctacgcacgcagcttagcgggcggcacacacgcgactgactcttatgcgacccacaacgcgacggctagagtttgctaag

SEQ ID NO: 294125 - DNA, 361 bp, Zea mays
  unsure (1)..(361): unsure at all n locations
ctcgtcggngcgcaacgccaccgncgtttcgagcggtgggtccaacgactcgagcggcacggttcgacacctcgtcgtaccagcagcgcgccgaggcccttggaggcctgctggagttcagcgcgcagctgctgcagcaggagcggtacgaggagctgggcatcctgctgaagccgttcggccccgagaaggcgtcgcccagggagactgccatctggctcaccaagagcttcaaggagacggcgtcatagcggagggagggagggagacgtagctgccagttttctaacgtgcaatgtagttcaggtagtctaagctatgttaggaccccccaagtgtatgtgctggaaggaaggcaaca

SEQ ID NO: 294126 - DNA, 280 bp, Zea mays
  unsure (1)..(280): unsure at all n locations
ggaagaagcttaatgaccggctctacatgctccgctccgtcgtgcccaaaatcagcgagatggacaaggcctccattctcggcgacccgatcgaatacctgaaagagcttgctgggaagatcgacgacctccaaaacgagctggagtcaccaccatccccagcttccacggcctcgctgccttcgacgcccacgagcttncgncctctgacttccacgcttgccgccctaccatctcgcgtgaaggaagagctgtgcccgagcgcgttgcctagccctac

SEQ ID NO: 294127 - DNA, 188 bp, Zea mays
accatcgcccccatctccatcgggttcatcgtggggttccgcaagacacaggacaccgcgtattaccgatcttacataatgcccgacatgaacaatatgacccgccctcatcaactgggagtggggctaccaatgggtatactgggtcggccccctaatctgcagcggccttgccggactcatctacg

SEQ ID NO: 294128 - DNA, 228 bp, Zea mays
tgcgaggacagacaagtacacctcgtatgttttcatcgtttacaatgctaaccgcatcacacagtgccttgctacccttgctaagggcattcatgacaacttcggcattggtgacggtctgataacaactgttcatgccattactggcactcatactactgtttactgaccctcatcctaagactgtagaagtgagcaggctcccatctctaacatcattcatagcag

SEQ ID NO: 294129 - DNA, 348 bp, Zea mays
cggacgcgtgggcggacgcgtgggcggactcgtgggttcgcgcggtggttggtacctggggaagacgaataattcccggctggggctcctccagtccactccacccatgcttttgtgtcaggcggagcggaggtagagcatagggagtgaataaccgctaccttatttcatttctatgatgtatctatctaatttggtccttccctgataatgcacgacccgtagtgttaaaaaaaaaaagaacatgaaattgaaatagaaattgacccaaagataattgaacattgcataagaaaatgctaattaaactggaacttgacataaaaattaaaaaagggggggcccctt

SEQ ID NO: 294130 - DNA, 286 bp, Zea mays
gcaatctctaccaccaaatcctgttccgatccaaaccccttgcccctttgtacctgtccggttggcccgaccaaaccaaccggcaagaaattcaattgccggaaagcccccaaggaaccacttgcccacaaagcgcggccccaatgttgcccgggacaccggcagattaaaaaacccaccgttttcgccccggcaccgtctcgctccgggagatacgcaagtaccagaagagcacggagctgctgatccgcaagctgccgttccagcgcctggtgcgtgagatcgc

SEQ ID NO: 294131 - DNA, 233 bp, Zea mays
ctttttctccttccgtttggaggagtccttcttctccttcctcttggtgcgggactcttgcgatgaagtgctcccgtggcttgtagtgggctattcacccccccccccccctctaggcgactatcaattggtatcaaagcccggtgcttcattagagcctaaccgctcgaagtgatgtcgggagatcacgccaagaaggagatggagaccggcgaaaaggttctagatcgcga

SEQ ID NO: 294132 - DNA, 394 bp, Zea mays
cggacgcgtgggcggacgcgtgggcggactcttgggtttctcttggcacatgctactgcggttgcaagataccgtacgaaatatcagggtctatatatgcttggaagttggaacaatggctgctcagaagggtaaggtcggaatagtcctggacttcaactgtgacgaggctcttacaaactcacctgatgaccaagcatcatcccaaagagcctgggacttctacattggctggaatgttgatccattgataaacggactctattcacagataatgcaagatctcgtgtaggagatgctgcctaggttcacttctgagcttgctaatctggtgaatggctcggcagactacatcgttatcaacgagtacacatccatctacgttaaggggcag

SEQ ID NO: 294133 - DNA, 273 bp, Zea mays
ctcactcatgagcacactcgtataccaactctagtatatcaacacttgcaatgacatccagggcgcttttaaaagcctttagaaaccctaaatataatacatgggcattatcaactctaataatagtgaatccccactctaagaaaaaagtgattccccccgtcattgtactacaactcaagccgagacgccacaaggacagagtctacatgtacttctaatataatgcttgattgattgttaatcccaaaggtgagattaaaagttcctcta

SEQ ID NO: 294134 - DNA, 377 bp, Zea mays
acgaccactcgtacggctagcgcctgctgcgatttgtctgtgatcatgtcttgcagcgggaacgggcgcaactgaagatgcagctgttactgatgcagctcatacaactgcatgtgacatgtcatatagacctgcctttgatgattatctgacgcacgatgctagctactctggcaaagaatgacagtgaaaggagtacctatacgtgctcatacagcagcctcatggtcttaatgatcctgaccacagtgcacaaattgaagatggagttcagctacaccaacatcatcaaagatctcaagatagatgactgctgcaatgggacattagttcatgacccagaacttggtacaggtcattcagatacatagtgatca

SEQ ID NO: 294135 - DNA, 252 bp, Zea mays
ggagaaagaaatgatatccaatcacatgcttttattggttcacatggaaaattcagggcgggctaacatgcttgtagatgaccaattcaaagattcgggtcggatgtattcattgttccgaagggttccagatcgactatcaactattagagatgccatgacttgttacttatgggccacaagttagcagtctgtgacaaatcaaaatcgtcggtctcagctatcgaacttaatgtgagcattgtcaaatgc

SEQ ID NO: 294136 - DNA, 339 bp, Zea mays
ggtgggttggcttctccttcccctccggttctggttcgggttcgtgaggttctccggggttcggttccgtgggtgagcggatcgagatggccgcgtcggatgttgagtaccgatgcttcgtcctgcgcctcagctgggccacagacgaccactacctacacaacgccttcagcacctacggcgaggtcctcgaatgcaaaattatcctcgatcgggagacgcagaggtcccgcggcttcggcttcgtcaccttctccactgaggaggcgatgcggaacgccatcgatggcatgaacggcaaggagctggacggtcgcaacatcaccgtcaacgaggccc

SEQ ID NO: 294137 - DNA, 413 bp, Zea mays
gctaggttcttctgcagagccttaatatcactcttgaaagccagaagatgccagtgcacatgggtcagcataataaaaggatgagctgccccgccatggcacagctcctctccaataccctgtactacaagcgattcttcccatattacgccttcaatgagctcggtgggcttgacagctaggggaaaggatgcgttttcacctatgatgcagtaggttcctatgagagaaccggttacagtgctcagggaactggatctactttgatcatgccagtcctggacaatcaactaaaatcaccaagtcctctattactccctgtcagggatgctgtcacaccattgtcggagtcagaagccatcgatctagttaaggacgtgtttcgatctgcaactgacagagacatctacact

SEQ ID NO: 294138 - DNA, 372 bp, Zea mays
cccacgcgtccgcccacgcgtccggaaacacatcttcatcgaagacgacgtacaccccttgggcaagcctccgacgcccaagccgaccccgccgacgtacactccaagccccaagcctcccacacacccgacgcccaagccgaccccaccgacgtacaccccttccccaaagccttcgacacccaagccgaccccaccgacgtacactcccacaccgaagccgccggccaccaagctcgccacctacactccgacgccgccggtgtctcacacccccagcccgccgccaccatactactagaaagcgatgcctaccataccacactgctgtcagtctcttgagcatttaagtggtcctgatcaatggaaggg

SEQ ID NO: 294139 - DNA, 351 bp, Zea mays
ctcacgcgtccgcatccaccacgcacgacacctacccatacctataccataggctctgtgagtgaacttgtaagctgtagatgaggatgagccagcgagcacagcgaggtacacggagctagctcaacatatcacacggatagaagagcaagacgtccgacggcacctgtacctgcatagacatcgtgctggccattatgctgccgccggttgcacgaatgttcaaggcctgctgcctggtagagttctggatctgacttatgcttacattgttcggttacctaccgggcatcatatacgctcgatgggctatcaccaagttgtcggtcggcgcgttagcattgaatgcgc

SEQ ID NO: 294140 - DNA, 422 bp, Zea mays
cgctgccgcacttctacccggacggggacttccagatcgcgtgcgaccacttcacgggcgaggggagcgacctgaacaacgcgcccaacggcgggttcgcgtacgtgcggtccagcgcggagacggccgagttctacaggttctggtacgcggcgcgggagcgccacccggggctgcacgaccaggacgtgctcaacgccatcaagcgcgacccctacgtgggcgagctcggcgtccggatcaggttcctcagcaccgagctcttcggcggcctctgcgagcccagccggaacctgagcagggtctgcaccatgcacgccaactgctgcatcggcctgcgccgcaagatcggcgacctcaacgccatgctccaggactggaggcggtacagggcgctgccgcgcgaggagaagcgcgaggtg

SEQ ID NO: 294141 - DNA, 427 bp, Zea mays
cccacgcgtccgcccacgcgtccgcccacgcgtccgcccacgcgtccgtgggaaaatgtggccagatgcttctgatactgatgcttcctctcactataagcttccgttctcaagaactgtctacattgagaaaactgattttcgccttaaggactcaaaagactactatgggctggcccctggtaaatctgtcatgctaaggtatgcgttccccataaaatgcacagacgttatctatggtgatactcctgatgatattgttgaaattcgagcagaatatgatcctttgaagacttctaaacttaagggtgttctgcactgggttgctgagccagcacctggtgtcgaaccattgaaggtggaagtaagactattcgagaaattgttcatgtcagagaatcctgctgaattggaggattggcttggt

SEQ ID NO: 294142 - DNA, 333 bp, Zea mays
cctgccgccgggcgccgcgctggtgcagatcgtgccgtggggcgggctgcagtggatggcgcggtccgactacggctaccccgcggaggccatgggcctaaagtacatccagtacgagatcggtgtcgccgagagcacgcttaaggacaagttccccagcggtctcaagatcttgaccaactcgactgcgctacacaagatggggttcatgttcatcacgcatacactcatggaccgacaggacatcagcgtcgacgtaggccgattcaaggaggtgctgcttcaggtgctcaacatggctcgcacagtattacagctgcatgctcactgctt

SEQ ID NO: 294143 - DNA, 400 bp, Zea mays
caatcactgttcaatgcttagtctagtcctgtattgtgagaacccacataattcgtgagagatggagatctatgacggattgaaagcatgacgatctagaacaacactagccggccagtcaacttctataagcaccgcaatgggctcctcaagaatgcgtacgaactcttcgtcctctgcgactcttaagttgccctcatcatcttctctagccgtggtcgcctctacgagtattccaacaacagtgtcaaggctactgttgagaggtacaagaaggcacacaccgttggctcttcctctgggcccccgctcctagagcacaatgcccagcaattctaccagcaagaattatcaaaactgcgcaaccagatccagatgctgcaaaacactaacaggcact

SEQ ID NO: 294144 - DNA, 374 bp, Zea mays
aggcgttcgggacgcatggtgcgggagcatcggtgaagcacgcgccgtatgtcagagcagcagatgcgaaggcctgctctttcggaactgagtgatctctggatatgcacagcatggcctgacggaacattgcctatacttgccaagagaaatgaacgggcatataagccctgatgcgacatccatgctaggtgtgctctcataatgccgggatgcattcatcgaggcagaggtcccacggtgcttcaaggcaatgactgaacatggagtagtaccagagatagatcactacttacgtatggtgcatcatctagggcatgcatggctgctagatgaagcacgcgatcttattcagacgataccgatgccttcaa

SEQ ID NO: 294145 - DNA, 367 bp, Zea mays
cggactcatggtgcgggagtatcggtgaaacacgagctgtattatgagagcatcagatgcgaagacctgctcttttggaactgactgatctttggatattcacaggatggccttactgaacattgcctatacttgctaatagaaatgaacgggcatataatacctgatgcgacatccttgctaggtatgctctcataattccggcatgcattcatcgaggcagacggcccaccgtgcttaaaggcaatgattgaacatggagttgtaccagagatagatcactacttacgtatagtgcatcatctagggcatacatggctgctagatgaagcatgcgatcttattcagacgatacccatgacttcaa

SEQ ID NO: 294146 - DNA, 325 bp, Zea mays
gttatagatcgcgagcgccgtccttttcatgaacctgtagaaagtttgtgtgtatttggtaaaggtagccaaggataagcatctgatggttaagctgcctgtcgggatccctactaatgttctccacatgaccacccgcaaatctcgaagcagtttatgaacaaacacatgggaccggtacgagttacgtatacataagacggtgatcgacctgatcagctaccaagacaattttaagcagatcagctctattaccattgacccacttgaagaacaaaacgtgactgtcaactacatgtaatgacgatctatatattcttaccgc

SEQ ID NO: 294147 - DNA, 424 bp, Zea mays
tatggacatatacctagttgtttaagatgaccctagaactcatgcagtttgatgccatgtttgatccttatgttaaatgtcggtctccaccaaagatacttgtcatcttgaatcctcgatctggacatggtagatctagcaaagtttttcatggaaaagtggaacccatatttaaggtatgtctagctgagtagaagcatgcatcttatctcaagattggatctgtgttgtcgcttctactaggaactttggtatgatctagtcatgcttcccaagatcatatttagtccggtgtttcatacaacctaagatgtttataaatgagttgtagacaattttataagctttccaccttcacaaggtactatccttttttcctggtcatattctggattcctgtattttcctggtgtgtgcaagaaat

SEQ ID NO: 294148 - DNA, 296 bp, Zea mays
cggacgcgtgggcagctttgaccgccgcctcttttcccctccgctactgctcctccccaggggagtccctcgcaggagcggcggcggcggccgcggcggcgaggtcgcaccccacatcggcgagcggcggcggcacctccggaggcaaaggctagatgttcgggcgcgctcctgacaagagcgacaacaccggagtctacgagatcctctcgttgccccagtacgcgttccaggacgatctcaaggaggactaccgcaaggctgatatgatgaaccacctcgacaagggcggtgac

SEQ ID NO: 294149 - DNA, 265 bp, Zea mays
agacgagcaaggccaggcatgaaggaatttcaattagaaagtatcttccttcaccatgtgtatatgtatggaggttgccgacattgctcttatacatgtatatttgctactggatataatatttctattttacattattctcatacttcttttttataataccttactattaatgatttatacatttctctaatgtatattgttgcttattatcatttttatctatattatatctcattctcaatatctttttaatttttaattt

SEQ ID NO: 294150 - DNA, 285 bp, Zea mays
accacgcgtgcgtgcataagatacccaaaggttctatacttgtaggccctcactgggacagggaagactttgctcgccaaagctacaacaggagagtctggtgttccattgtggtctatgactgggtcagatctcatggaaatgtttgctggtgttgcacctttcacggttctgcacttgttacaagaagcatggcagggggcttctagtatggtgttcaattaccaaatcgaagctattggtcgatgcaagatgacttcatgagatctcacggtcaaatgatca

SEQ ID NO: 294151 - DNA, 438 bp, Zea mays
ccaggtttctgattttggacttgcaaggttagcggctgattccaatacacatgttaccacacgtgtcatggggacatttgggtatttggctccagagtatgcattgtcaggaaagttaacagcaaagtctgatgtatattcttttggggttgttcttttggagctgatcacaggaagaaaacctgttgatgcttctcagccattgggagatgaaagtctggttgaatgggtgagttcatcacttcattttatataataagtgaccttactgcatgtcactaatgttaggttctaaattatgcgtaacttttctgttttttaaccataaccagtaaccatagtcatgagattgagatccactaataaatgacatgattatttcgtgatacaccaatggatgtgtctagacttcttcaagcttcaactgttgatttcctg

SEQ ID NO: 294152 - DNA, 262 bp, Zea mays
gactcctcccacgcgtacgaactagaaatgcttcccatcttttcgacctaaataacatcctctctaccggcagcgtgcatactagctcatcatgcatcggtcgcacacttaatttaacggattagcgtgtggatctgtcaaccccatggcgcctctgcttgattcgtgtttcacctgttatgttctgagattcatgataatgctatgagaactgaaattcccgtttcatgcttcttaaatctttgacctctgcggttgtgcc

SEQ ID NO: 294153 - DNA, 239 bp, Zea mays
cttttgaatgtttaaccaaatctgttttgagaccgatagtattgaatcagtgatgatgtccaagctcgcctgatggggagtgatagcaagccacatgattggcgagacagattacaccatcattgctgaccttacaattggtcagtctacaggccaaatcatgacgggagctccttgtctggctgagcgcctggccttatacaatcagctgctcatgatcgaggaagagctatgcgttt

SEQ ID NO: 294154 - DNA, 401 bp, Zea mays
aaacatcatgcctaattactttgcttctttgttacaatgacacaatgcttataaacgcggattatttgataactaaccgaaatttgatattccttgatcataatgactatcatcaatctatacggatacctagatccaagaactataaaaccctctccaacatacctcctcatgggtcctttcaactgatgacatacatacttcgctctcaaatcatacctattatctggttctaaacccatattgtaacccagtttattacccgtataaacctcattttaaatgctccgaatcatttcttaaaaagaatcacattacctaatgttaacattgaaatgactgataatttataggcctctatccccaatataagatctttacacatttctgcttcatatgct

SEQ ID NO: 294155 - DNA, 421 bp, Zea mays
ggcaggcgcgttttggcctgccacatggaacagccctctacgccaggaagttccggctctcctgctcagaaatgaatggtcgttacttcagcaatgaattcatcgtggaggtcagcgttctgcacagcgtgaaccgggtggcccaccccagccacatgctcagctcccagcagttcctgcaccgaggtcaccagccaccgtctgagatggctggacacagcctggccagctcccaccgcaactccatggttcccagtgcggcgaccctcatgatcgaggagtgcgtgggctatctggtgctcatggtcatgctgggtctcgtgcgcattcactgactgcaccgccgcgtctcggaggccagtgggcctgccggagccttcagcgaccccaaggatcccgatctcttctgggatgactcagc

SEQ ID NO: 294156 - DNA, 418 bp, Zea mays
cggacgcgtgggtctagatcgcgagcggcctcccttactttccttttgtcttttctcagctgcgtccagtctactcttgggcctgttgaataaatttctcatcgccaagaaagtgctttatttttatttttaatttctagcattccttacactctaaccctttcctctgcgccctgttcctcacagccggcctgcagcatccctggcaccaccctacccccaggtacctgaagtttagcatccagcatgggccacatgaccccatcatgtcggtgtgcctgcccagcaacccctgggtcacagacgacgatgcctactgggccatgaacgctcccaggtgagcaggtcggccaagggtgcacgagtgcccaccccattcctgacactcttgacccgtccgtcctttaccaactcggtc

SEQ ID NO: 294157 - DNA, 415 bp, Zea mays
ccgcggccggacgcgggtcgatcgagcgtgcgagagctcggtggacatctacttccggcggcaggtggagctgagcaccatgtaccggcatatggagaagcacaactacgagagcgcggcggaggccatccaggccgtgcgcgacaacaagctgcacgctttcatctgggactcggcggtgctggagttcgaggcctcgcagaaatgcgacctggtgaccacgggcgagctcttcttccgctcgggctttggcatcggcatgcgcaaggacagcccctggaagcagaacgtctccctgtccatcctcaagtcccacgagaacggcttcatggaagacctggacaagacgtgggttcggtaccaggagtgcgattcgcgcagcaacgcccctgctaccctcaccttcgagaatatg

SEQ ID NO: 294158 - DNA, 385 bp, Zea mays
tcgactggatttggaaaggttctaaaaacaaatcacagcaacattctggatgatcctttcataagaggacacattggaaagcttttggggaacatcagaacacaagtgcttataaaattaaataagccttacacaaggattcatattccttttaatttctaaaggggttaaacttagatgtagctgatgtgaaagctgctgtgcattgctatgggatacactattcatgggccaatttgatcaagtcaaccagttccttggactggatcatcaaaagaggggtggtgcccgatatactggactagataaatggaccaaccaactaaattctctcaaccaggctgtagtcagtaaactggcttaacagagaacagcttttacagac

SEQ ID NO: 294159 - DNA, 422 bp, Zea mays
cagggatccctaaggaggaggagttcaagctgatgtacgggatgctcttctctatccgctcttttgtcagcaagaggtccccgctagacatgaaggacggcttcctggccttccaaactagccgctacaaactccattactacgagacgcccactgggatcaaggttgtcatgaatacagacttgggcgtggggcccatcctagatgtgctgcaccacatctacagtgcgctggatgtggagctggtggtgaagaatcccctgtgcccgcttggccagactgtgcaaagtgagctcttacggtcccgactggactcctacgtccggtctctgcccttcttctctggccaagctggcttaaggaagccctctacctgacccctcataagaatccctgtctgcctggggcccaacttaacctgc

SEQ ID NO: 294160 - DNA, 268 bp, Zea mays
cgacgccacatgccaccgcgacttcattaagaacatgatcacaggcacattccatgcggactgcgccgtgctgattgtggccgcatgagtgggtgagttcgaggcaggcatcttcaagaatgggcagacccgggagcacgcgctgctggcctacacgctgggcgtgaagcagctcatcgtgggggtgaacaagatggacttcacggagcccggctacagcgagaagcgctatgatgaaattgtcaaggaggtcagcgcctacattaag

SEQ ID NO: 294161 - DNA, 411 bp, Zea mays
  unsure (1)..(411): unsure at all n locations
cttacatcgaccgcctaagagtcgcgctgtaagaagtaacaacctcttctctccgccatctgctcggcagccgcgaaacagcaactatgcgtgagtgcatctccatccacgttggccaggctggtgtccagatcggcaatgcctgctgggagctctactgcctggaacacggcattcagcccgatggccagatgccaagtgacaagactattgggggaggagacgactccttcaacaccttcttcagtgagacaggggctggcaagcatgtgcccagggcagtgtttgtagacctggaacccacagtcattgatgaggttcgcactggcacctaccgccagctcttccaccctgagcagctcatcacaggcaaagaagatgctgccaataactatgcccggngtcactaca

SEQ ID NO: 294162 - DNA, 396 bp, Zea mays
tttttgtatttcatttagacccaagaacatgctgatcatgtattcaatatgtatgctataaatgctatggtacctatgttgtatattattgtaaaattattacataattttagtaaatcatggggtgacgatttgattattacatttttagttttcagtaattaaaaagatttctgtgaattcttaaaaaaacaaaaagaaaatcattgaattactgttacctggcacaaatttgctataaaatctgcctgggtggatgacccgtatgcatgcattgggtttgagggctagttagccattccattgaacttccatttgaaagatatgagcaagctttgtcccaatccatcaagggagtctgtttccaaccactcatatacactgaattagaatatc

SEQ ID NO: 294163 - DNA, 328 bp, Zea mays
attggctacgtggaaacatgtctgtgaaaagagtatgtagtggcttctttcaaattggtagatgctgaatatgttcacttttaaatcccaattctgtcccgatcttacagactctactgtacttgaatggttaataaaactgcacagtgctgttaaaaaaaataagaatacctatgatatcataaccgacgagcataaatgtgaacagatgctctgaataactagacttgaacatgacagattctattaaatacattaatataaaagtttgagcagaaccaacaaaatgaaataaaaggggctgccctttttaaggattcaaatttaa

SEQ ID NO: 294164 - DNA, 423 bp, Zea mays
caagaccttctaccggaactcgcagctggttttccaccaaagaactcacagccgggagacgtacttccagtgccccacctgccaaaaggccttcctgcggagctccagcttcatgaagcaccagcggatccacacgggggagaagccctgcaagtgcgactactgcgggaagggcttcagcgacttctcggggctgcgctaccacaagaaaatccacacgggtgagaagccctacaagtgccccgtgtgtgagaagagcttcatccagaggtccaacttcaaccggcaccagagggtgcacacaggtgagaagccctacaagtgcacccgctgcggcaagagcttcagctggagctcgagcctcgacaagcatcagagatcccacctgggaaagaagccccgcccgtagccgggctctctgag

SEQ ID NO: 294165 - DNA, 167 bp, Zea mays
caccttgatcctctactggcatgaaaatcagacagtggttatccttttcgggagggggggtctttggtccatcggccacttgccacatgttgtctttcccttggctgctggctcctgtgggtcacactgcttcttatcctgaacacttgacatgttgagggcagaat

SEQ ID NO: 294166 - DNA, 426 bp, Zea mays
gaggaagaggaggaggaggaagagagctcctctgagggcttggaggctgaggactgggcccagggtgtagtggaggctggtggcagcttcggaggttatggtgcccaggaggaggcccagtgccctactctccacttcctggaaggtgaggaggactctgagtcagacagtgaggaagaagaggaagatgatgaggaggaggatgaagatgacgaagatgatgaggaggatggtgatgaggtgcctgtacccagcttcggggaagccatggcttactttgctatggtcaagaggtacctcacctccttccccattgatgatcgtgtgcaaagccacatcctccacttggaacatgacctggttcacgtgaccagaaagaaccatgccaggcaggcacgagttaggggtcttggacatcaaagctga

SEQ ID NO: 294167 - DNA, 341 bp, Zea mays
cttgaatacaagaaaatggaaactgaacagccagaggaaacctttcccaacactgaaaccaatggcgaatttggtaaacgccctgctgaagatatggaagaggaacaagcttttaaaagatctagaaacactgatgagatggttgaattacgcattctgcttcagagcaagaatgctggggcagtgattggaaaaggaggcaagaatattaaggctctccgtacagactacaatgccagtgtttcagtcccagacagcagtggccccgagcgcatattgagtatcagtgctgatattgaaacgattggagaaattctgaagaaaatcatccctaccttgga

SEQ ID NO: 294168 - DNA, 416 bp, Zea mays
cggacgcgtgggttgcttttcccctataccgaccctcataaagacaaaccaaaccacgagagcaacctattacaaacctaccagaagggaaacgtggcagcagaagctaatggagaagaacccaaggcaagctggcccagacatttagccatgcaccattctgttaccttgcgagtctgataataaacttgctgctgacctgctgtgctcacagtagattctaaactggactaattattgtggggttttaatgagaagcctaagtttggaaatccttaagcagtgatgttgaaaaaaaaaatgaagccctgaacagtttaaaggtaacaatcctgtttctagaaagagaaagctgatggcaaaggcacattccaagtgacccgaatccaggtgcccccatcctgcaataggcagtc

SEQ ID NO: 294169 - DNA, 394 bp, Zea mays
gcaagcaccttttcttatgataagcccctttcaggacgtccctagtgcatcggccactacagaatctgcctgcagtgcaggagacctgagttcgatccctgggttgggaagatcccctggaaaagggaaaggctacccactccggtgttcttgcctggagaatcccagggatgggggagcgtggtgggctgccgtctatggggtcgcacagagtcggacatgactgaaatgacttagtaacagcagccgcagcacccactccagaattctgtcctggagaattccatggactgtatagtccatggggtcccaaagagtcagacacgactgactttcactttccagtggttaagactctgcttccagtgcaagggactctggttcgatccctggt

SEQ ID NO: 294170 - DNA, 202 bp, Zea mays
aattactacttgatggtctcaagagacacgctaggtgctaatcaattacaacataagtgtccaagtgccactatttgtcccgttttctttgtgtatgctcttgtatataggatcacgtatattactttatcccagtctccttacgctgtaggtcattcctctggaaaaccacacagatgtagtcctcatgcagacaggccat

SEQ ID NO: 294171 - DNA, 430 bp, Zea mays
cgacagatagccgtaacttctgtgctgtgccagccgcatccctgagacaagatggtggaaggtcggagtgaacggattcggccgcatcgggcgcctggtcaccagggctgcttttaattctggcaaagtggacatcgtcgccatcaatgaccccttcattgaccttcactacatggtctacatgttccagtatgattccacccacggcaagttcaacggcacagtcaaggcatagaacgggaagctcgtcatcaatggaaaggccatcaccatcttccaggagcgagatcctgccaacattaagtggggtgatgctggtgctgagtatgtggtggagtccactgggggcttcactaccatggagaaaggctgggctcacttgaagggtggcgccaagagggtcatcatctctgcaccttctgccgatgcc

SEQ ID NO: 294172 - DNA, 331 bp, Zea mays
gtacttcatgagtgacgcttacatggcgtgcgaccagcagtacaaattcagcgtggatgtgaaagaagccgagacagacagtgactcagattgagtccagaggcattcactattgcacagaggagagccgaacccgagttaggggcgtgtgcagtgcatgggacctctgcggagacctggccccaccccaccgtcctgcttttccccggcttccttggcgttcacacgctggctccagtgtctgcaggtgtcgggcacaaaccgtgtacagcattttgaggcgtggtctttgtacctccttttcagtctaataaaatgacttggagaaaaa

SEQ ID NO: 294173 - DNA, 254 bp, Zea mays
ttctggaagcccttcaagtaccagggcctgaccattggggtcaagaaggagatgccccggagcacgctggactccttcatgcagcccttccagagcacgctgtggctgctggtggggctgtccgtgcacgtggtggccgtgatgctgtacctgctggaccgcttcagccccttcggccggttcaaagtgaacagcgaggacgaggaggaggatgcgctgactctgtcttcggctatgtggatctcctggggcgt

SEQ ID NO: 294174 - DNA, 369 bp, Zea mays
tttgtttgctgcttttgaagactgtgttttggagaaagcaaccttgctgtgaaacagtgtggagatgtaaattttataaggctgactcttactaatcactatttcccctgtggtttgttatcagtacaattctctgttgcttaatctagagctatgcacaccaaattgctgagatatttagtagctgataaagaaacctttaaaaaaaataatgtaaatgaatgaaatatagataaactatgagataaatatcattacggcatgtaatattaaattcctcctgtctcctctgtcagtttgtgatgtgattgacattttgtagctaggttaaaattattaaaaattatagaccccaaaataaaaaaataa

SEQ ID NO: 294175 - DNA, 175 bp, Zea mays
gaatttgttaatgcaccacacaagtgcggaataaagactgattcaacatacaaggtagcattacatattgtaggttagcattacagcattatgcagtttcacacaattcatgttagcttgtatgttgaatttgttaatgcaccacacaagtgcggaataaagactgattcacatt

SEQ ID NO: 294176 - DNA, 421 bp, Zea mays
cgaaaccagaggtggccggagctacagccaaggaccactgacatgtctgagttagagaaggccgtggtggccctcattgacgtcttccatcaatattccgggagggaaggtgacaagcacaagctgaagaagtcagaactcaaggagctcatcaacaatgaactttctcattttttagaggaaatcaaagagcaggaggttgtggacaaagtcatggagacactggacagtgatggggacggcgaatgtgacttccaggaatttatggctttcgttgccatgattaccactgcctgccacgagttcttcgaacacgaataaggaaaagaaagcagcggagctgtttctgcagcagagacggagtttgaccaggggaacacaggcagggcttgcagggctgtaggagctgagctttccgtgt

SEQ ID NO: 294177 - DNA, 317 bp, Zea mays
ctccgctcccgcgagtaacttggctccgggggctccgctcgcctgcccgtacgccgcccgccactcaggaccgcgccgtcggcctctgcctcgagcagaccccttccgacggccctcgctgcgcaggctgggacgcctctcccccctccgcccccgccgcggaaagttaagtttgaagaggggggaagagagagaaacatggacatgaagaggaggatccacctggagctgaggaaccggaccccggcagctgttcgagaacttgttctggacaactgcaaatcaaatgatgggaaaattgagggcttaacagctga

SEQ ID NO: 294178 - DNA, 416 bp, Zea mays
cccagtcacgcctgcggccctctcccctcctctgaaattccccagtgggcatctcctcggtgccactaaaatccaccagcccagtaaccaaggggctggtgttaatccagaccccctccccaagtgcttccgagattaaaaccgcttcatcgggaggtagtgtgtgttcttttccagaactgggctccacagtggtgatggtggaggtggtggtagcagacccagtgaagacagtttcttgcaagctccagcaactcaacagtttctcatctgctgggaacatgggttcccatgtagcaagtcgtacgtcgtgccctgttctccttagctagttaaactcacgagctgtgttttacaactaatccttaataactatggtaattaactgtgactgtgggttttttaaaatctgtcat

SEQ ID NO: 294179 - DNA, 425 bp, Zea mays
tgtgttcagaacacttacggttggacaaaaatcatctaacacaaagtgttgaatatctgatgtaatttgttgagtatggtattgaaagtgaaaaccagaacagttgtgtaggtatggaatggttgtaagtgtattagttgtttgttgtcactatcaggtggctgggagctgaggctcccttgctgtccagcatgacgagagaacattgtaccacatttcactagcccaagaaaaaataaaaattctagctagatatggtttccactgaaggtgtctcgctttcacaccattataatgtcaaaaactcaggttgaaccattgttaagtcggagactgtctaaatttattatgtagatgtttattaccaggtaagttttagttaaatctcactcttatccagctgtttcccttattagaaaaataat

SEQ ID NO: 294180 - DNA, 351 bp, Zea mays
tcccgaccgaccacgcgttctataatgattgcaactgtatctatttatgactcttgtgctgcgttgctagccaaatcggctataatccctgcactcattgagttgctaaatgctcaacaagaagatgatgaatttgtttgtcagataatttatgtcttctaccaaatggttttccatcaagccacaagagatgtcataatcaaggaaacacaggctccagcatatctcatagatcttatgcatgataaaaataatgaaatccgaaaagtctgtgataatacattagatattatagcggaatatgatgaagaatgggccaagaatattcagagtgagaagtttcgctggcat

SEQ ID NO: 294181 - DNA, 455 bp, Zea mays
  unsure (1)..(455): unsure at all n locations
cccacgcgtccgcccacgcgtccgcccacgcgtccgcttccattcgaacccctctccatgtccttcaacgagataaattactatgttgacatgcctgcagagatgaagagtcaaggagtaaccgcggataagcttcagctgctgtcagggatatctggggcttttcgacctggtgttctcactgctcttatgggtgtgagtgggtctggaaagactactctcatggacgttttatctggaaggaagactggaggatatattgaaggagaaatttatatatctggttaccctaagaaccaagaaacatttgccagaatatcaggttactgtgaacaaaatgacatccactctccacagatcactataagggagtccctactctnttctgctntcatgcgccttcctaaggaggtcactgaccaagaaaagaagatattcgtggatgaagttatgga

SEQ ID NO: 294182 - DNA, 415 bp, Zea mays
  unsure (1)..(415): unsure at all n locations
cccacgcgtccgcccctacctctccagcatctcccgtctccgtcgtctcgtctccgctcctgacctcgcgagccatgggcaagatcaagatcggaatcaacggtttcggaaggatcggcaggctcgtggccagtgtcgccctgcagagcgaggatgtcgagctcgtcgccgtcaacgaccccttcatcaccacggattacatgacctacatgttcaagtacgacaccgtgcacggccaatggaagcacagcgacatcaccctcaaggactccaagacgcttctcttcggcgagaagccggtcaccgtctntggcatcaggaaccccgaggagatcccgtggggtgaggctggtgctgagtatgtcgtggagtccaccggtgtcttcactgacaaggacaaggctgctgcacatct

SEQ ID NO: 294183 - DNA, 184 bp, Zea mays
aacttccaatcaaagatactttcgatctttttaacacccgcaatgcccaaccaaaaagcgtcctcctttatggacctccatgcacatgaaaaacattgcttgcacgtgccgatgctcatcacactgactgcaccttcatcaggatgtctggttcttaattggttcacaaatatattggtgaaag

SEQ ID NO: 294184 - DNA, 304 bp, Zea mays
gcgcccacgcgtccgcggatgcgtgggcggacgtttgggtactagctgcccgatgggcaggtcgtcactatcgtcgcttttaggttcatatgcccataggtgcttttgcagccgtcgctgatcgggatggaagctcccggcatccacgagaccacctacaactcgatcatgaaatgtgacgttgatatcatgaaggacctgtacgggaacatcgtcctcagtggagggacgaccatgttccctggcatcgctgacaggattagcaaggagattactgccctctcaccgagcatctttaagatca

SEQ ID NO: 294185 - DNA, 201 bp, Zea mays
cggacgcgtgggcggacgcgtgggcggacgcgtgtgtcgtgaacctggtgggcgacccttacctgggggcataagaccccggggtagccttcaagacggccatcatggactggatgacgccgcattcagccaagcccatctaccacgccgtgattaccgtcgtcgggaggccctacgccaccgaccgcgccgcggggaggc

SEQ ID NO: 294186 - DNA, 310 bp, Zea mays
cggacgcgtgggcggactcgtgggcggactcttgggctgacgcgtgggcgccaccatacgtgctagaagagcgatgcctaccataccacactgatgtcagtctctggagcatttaagtggtctggatcaatggaatgtgtgtgtactaggcagccggcaaagatgagctgctgatggtaatgatgatgataagaggtcactggtaccctactacgtaccctggtctttgtgagctggcatccgtgcccgatagacgatcgaggagagaatgacgcacagctctctgctaccggactgtcttctgccgtac

SEQ ID NO: 294187 - DNA, 371 bp, Zea mays
cccacgcgtccgcccacgcgtccgcccacgcgtccggttcttctgtgaagtcggtgatgggtacattcaagacgacttcaacctttgtggcctcagcagccaagttccttattatgattatgctcttgatctcattttagatattgaatcatctcatggtgatatgttcactgaggaacaaaatgagctcgtagaatcagctgcagagatgctttatgggctgatccatgcacgatacattctgaccagtaaagggctggctgcaatgctggagaagtataggaactatgacttcgggcggtgcccgcgtgtttactgctgtggtcaaccatgcctgccggttggacaatcagatattcatcgatctagta

SEQ ID NO: 294188 - DNA, 479 bp, Zea mays
tcggtcttgaattgcctggccgacccactcgtgcgatcggcatcttcctccccaaagtttaccctttcctcaaggaaccttaattttagattcttgaagaatatgagtcaccctgtatttttggtccaatcttttaacaactatggtcctatgcttgctctaatcaacttatttataggcttatattttcttatgtttcataatatttccttgtattcatatttttttgaccttttatatttatttttccaattttttattttattttttgtttctatttttattttctttttttacctttatatcttttttttttttttatttttttttttttatattatttctttttatatttttattttattttttctttttattttttttattttattttttattttacatttttatttttattctatttattttctttctttttaattattttttatttttttatttatttattcttatttttt

SEQ ID NO: 294189 - DNA, 341 bp, Zea mays
  unsure (1)..(341): unsure at all n locations
gcgcccacgcgtccgcccacgcgtccgcggacgcgtggggctagttttcctttttctctggggaaagagtagagagcccaaagatgagagctttaagcagggtcggagtggggctcgccgtggtgtccgcgctgctccttctagcgctcaccgcggagctctattacatcttcgtgcacaagcgccggctgcggcgacgcgcagccgccatctccgacgcgtcgtcgtccccgtcctcgtcctcccgcgagctgctccagctcttctgcttcaagaagccgccggcgctcgcgtncacctacgccgtcccggaggccgcgacgacgccgacgccgacgacg

SEQ ID NO: 294190 - DNA, 347 bp, Zea mays
cccacgcgtccgcccacgcgtccgcccacgcgtccgcccacgcgttcgcggacgcgtggggggacaggactcagatggagatgctgttctgctccactgtcgttggccttccgttcctagcggtgcccatggtgttaacaggagagctcgtgactgcttggacttcctgctcccagcatctctacgtgtacgcggtgctggtgttggaggcgatggccacgttcgtcggccaggtctccgtgctctccctcatcgcgcttttcggtgcagcaaccacagccatggtgacgactgctaggaaggcggagacgctgctgcttgtgtacctgatatttaccaagcccctt

SEQ ID NO: 294191 - DNA, 395 bp, Zea mays
atcagtttcctcaatatcttcttcctctgcttcagcgattgcttgttctgcatggtcattaggaacctcttccgaagtcactagcccagatcgttgcatggcttctgagatggggacagtctccaaagcttcagtttcgtccacctcacgttcaaccctggcggtagaacgcactctggccatttaattatgaacttgtggaactttaatactttcttcctccgaagcaagtttcaaactggagcttctttcgattccgacagacaagcttctgcgactgttaaaaattttggcagcaaaacagtgcaaatagcaatgaatactgtggtaacttcacacctacttgtctgtttatatagtgctgtatgtaagaaagctaaacgccaggattttta

SEQ ID NO: 294192 - DNA, 271 bp, Zea mays
  unsure (1)..(271): unsure at all n locations
ggaannccgggggggccagcgtccggcaanaccacanananagagagtgttacctacgcgcctgcagatcccaaattcggtggattattaaaaggagggcgaccgaantcttctatngntttcatcatggacttcgcggagaatctgatcctccgtctgatggaagacccggacaagcgcgaccatgttctgcgggagcatgtctacaagatgaaggagcggtgcgagcgcactaaggcggcgtggagccttcctctgcgcccctacggct

SEQ ID NO: 294193 - DNA, 301 bp, Zea mays
  unsure (1)..(301): unsure at all n locations
cccacgcgtcctaaactaaacaacacctatttctctaaagatcacaatgatnagagcccgtgctgttttagccgtgctggccacctacttcttcnctgtgcccactcacgccgagcagtgctggtctcaatccagccgctcgctgtgccccaactgccttttcttcagccaattctggtagtgcatcagcacctcctactactgcggcaactggtgccaaaaccagtgcaactgcagcttctgcatcacccctaacccttctaacaaccgcggcatttctttcattattccctaatctctc

SEQ ID NO: 294194 - DNA, 182 bp, Zea mays
  unsure (1)..(182): unsure at all n locations
aacccggggcggccgcgcgtccgcccacgcgtncgcccacgcgtccgtgatggtgttcggcgagatcaccaccaangcgagcgtggactacgaggagatcgtgcgcgacacctgccgcgagatcgggttcacctccgacgacgtggggctcgacgccgaccgctgcaaggtgctggtgaaca

SEQ ID NO: 294195 - DNA, 356 bp, Zea mays
ccacgcgtccgtccactcctccttccacacttccgctttcttttattccacacgagatttctcttctggttgagctcattggaggacaccttcggtatcttttaacaaattttcccccccaatcaaactccccaccttacaatttcttctctcctgatcttcccatctagtcctttccttttatcctaaatgattttctttaccctcatttctaccctttttttattttaaatctcttttataatatttttttccactttcttccttatctttcctattaattctacaatcttttatctcatattcaatattctattttctttcttctttcctttcttttttttttttcttctttt

SEQ ID NO: 294196 - DNA, 138 bp, Zea mays
acgggacggaattcggtcctgcggatattcaagggccttctgtggcgcatccgacaccgctcgaggtgcggtgctattacagacggtggaccctactttcagctgaaccgattccagggttggcgttccgttaagcat

SEQ ID NO: 294197 - DNA, 338 bp, Zea mays
tccacgcgtccgcggacgctttacgacctgttgttccacactagatttctgctctcctttagcggaggttatgacacctgcggtatctcttaacacatgtgccgccccagcctaactctccaactgacaatgactactgtccagatcggcatcacctggccgcaccttagatccaacatgaggcgctgcgtctcgtattccgacccacacaatatgtaaaatatccttaaactgatggatctttgactagcacctggaaagctccacttatactacagctttcaggtgatcagacagcgtctgactaaagaacacctccacaggcgtttgctttctca

SEQ ID NO: 294198 - DNA, 174 bp, Zea mays
cgccacgcgtccggcctagctctatagctcgagtattgcttgctctccacatgaaacaaagcagggcagcaacaatggccgtcggctcggtggtctcggtcctcctgctgctcctggccgccgccttggctggcatgagcgccaacgccgtcaccttcaccatcaccaacaact

SEQ ID NO: 294199 - DNA, 342 bp, Zea mays
cccacgcgttcgtctagttggagcacgcctgtcagtacccgcaagatggcgaactatgcctgagcgcggctaacccagaggaaactgtgctaccagctctacgcgctactgacgtgcagatcgttcgtctgacttgggtataatctccaaagactaatctaaccatatagtagctggctccctacaaaaactccctgatgatacctgtagcccacacgagtcctattgcgtaatgcccatgattaaaaagctcagaggcgcaacgccatcgacctattcttaaactttaaatcacatggactgcactgctgctatcttgaacactgcctcagtatcctaagc

SEQ ID NO: 294200 - DNA, 152 bp, Zea mays
tccacgcatgcggtctggtaattgtaatgagtactttctaaatcccttaacgagtatccatggaagacgcatgtctgatgccagcagccacaggaaaaatagttactatagcgtatacttaacttgtagcatttaagaagctcaaagatgca

SEQ ID NO: 294201 - DNA, 417 bp, Zea mays
  unsure (1)..(417): unsure at all n locations
cccacgcgtccgcccacgcgtccgcccacgcgtccgcccacgcgtccgcggacgcgtgggggcgaccgcgagcagcggatctacctctggttcgaccccaccaaggagtaccactcctactccgtcctctggaacctctacatgatcgcgttcttcgtggacgacgtgccgatccgggtgttcaagaacacgagcgccgacctgggcgtgcggtacccgttcagccagccgatgaagctctactccagcctgtggaacgccgacgactgggcgacccgcggcgggcgcgagaagacggactggttcaacgcgcccttcgtcgcctcctaccgcggcttccacgtcgacggctgcgaggcctncgcggaggcgcgcttctgcgccacccagggcgcgcgctggtgggacccagccgag

SEQ ID NO: 294202 - DNA, 235 bp, Zea mays
tagatcgcgagcggccgccctttttttttttttttaaacagaaagcatcagcctgttgggtaatttcaaaggggtcttgggtgattcattaaacagattcaactacaaactgtattcaactgcaatcattgtccataacactcaaagccttacagattcacacatcattgttaagcaagtaatttttattactcataattatatattgatgtcatcattgttacttaaacattca

SEQ ID NO: 294203 - DNA, 323 bp, Zea mays
cccactcgtccgcccactcgtccgcgcactcgttcgcggactcgtgggcggaggcgtgggctgacgcgctgggggactcgaggcaactccacgcttgatgggtgaacggctgtggtggaggacatgcgtcgtcagctgctgacctatggacgaagaattactaccccagagctttttgcaagaatagatgctgttgatgcaaacactgtgaagcgtgttgcaaaccgattcatctatgatcaggatgctactattgctgctatgggaccgatccaaggacttgcagactactactggttcagacgcctgacctacatgctccg

SEQ ID NO: 294204 - DNA, 360 bp, Zea mays
gcggtgagagagaggatgggtggcagcggcatggctgctctgctgctggccctggtggtggtggccgtgagcctggccgtggagatccaggccgacgcctggtacggttactgctgctggtacaccccgactcctactccggtcaccccgaccccgaagccctagaagccccccaccaatgggcctaatccggacaagccgtccaatgagcacaagccgtccaaggagcactgtcccaagccggataatccgtccaaggagcacaagcctacgccgtccacgtacaccccgagccccaaacccactccgtcgacgtacacttccaccccgacgccccccaagccgacgccaaccacatac

SEQ ID NO: 294205 - DNA, 179 bp, Zea mays
tgctggcttgtgctccgcctttccttcctacactggttcattaggtctctgcggggttctggttgcagaccttagcgcatcgagatggcggactcgcatgttgcgtaccgctgctttgtcggctgtctaggctcggccacggaccaccactcactgcacaacgccttcagcacctaccg

SEQ ID NO: 294206 - DNA, 267 bp, Zea mays
gccgcccaaggagcacatttctaccattgtagcactgtcccaagcctctgagtccgtccgtggagctcaagccgactccgggcacgtacactcctagccccaaactcactcctccgacttacactccaagcctcaagcctactacacactcgacgctcaaacctacctctccgacattcaccctttccccatatcctattactcctaaacctaccccaccgacttacactcattcatcaaagccttctactcctaatcctcctacac

SEQ ID NO: 294207 - DNA, 416 bp, Zea mays
gcggacgtccatcgagcacaaggcttccaatgtagcacagtcccaatccggagaaggcgcccggggagcacaagccgacgccggccacgtacaccccgagccccaaacccacgccgccgacttacactccaagccccaagcctcccacacaccctacgcccaagccgaccccaccgacgtacaccccttccccaaagcctgcgacgcccaagccgaccccaccgacgtacaccccttccccaaagcctgcgacacccaagcctccgacacctaagccgaccccgcctacgtacactccaagccctaagccaccggctaccaagccttccacgcccaagccgaccccgacaacgtacacccctttgacaaagcctacgacacccaattcgaaccctgctgcgtacaccccttttttc

SEQ ID NO: 294208 - DNA, 347 bp, Zea mays
ggcacgcctacgcttccgcctacgcgttgtctgactcgtgggctttcgcgtggtcggacgcgtgggccgacgctggtgccgtagaagaagccggtagcgcacgggaagtgtgcggtctacagctggaggtccaagaaggctttgcagctccccgagtacccgaacgcggatgagctggacgctgtgctgaagaccatcgagacgttcccgccggtggtgttcgtcggagaggctcgccgtctcgaggagcgcatggccgaggccggcatgggccgcgccttcgtcctccaaggtggcgactgctccgagagtttcaaggagttccacgccaacaacatgcgtgacac

SEQ ID NO: 294209 - DNA, 445 bp, Zea mays
cggacgcgtgggcgcgcaggaggtgccgacgacgaggatcgcggtggcgatgaccgggtgcggcggggcggtgctggagggcgtgctcacgttcctgctggtgtacacggtgcacgtggtcggcgagcgcgagcctcggtcgcgcggcggcgacggcaagcgggagttcgcggccacggcgctgggcgcgctggcggttgggctcacgcagggcgcgttcgtgctggccgcgggcgcgctgacgggcgcgtccatgaacccggcccgctcgttcggcccggccgtcgtcagcggccacttcaagaaccaggccgtgtactgggccggcccgatggtcggcgccgccgtcgccgcgctggtgtaccagatcatggcgtgcccgagcgtgacggggaacgtggaggcggtggtcgtttgacaagctagtgtgcaactgtgctgtgca

SEQ ID NO: 294210 - DNA, 389 bp, Zea mays
ctttcccctacctctccagcatctcccgtctccgtcgtctcgtctccgctcctcacctgggcagccatgggcaagatcaagatcggaatcaacggtttcggaaggatcggcaggctcgtggccagggtcgccctgcagagcgaggatgtcgagctcgtcgccgtcaacgaccccttcatcaccacggattacatgacctacatgttcaagtacgacaccgtgcacggccaatggaagcacagcgacatcaccctcaaggactccaagacgcttctcttcggcgagaagccggtcaccgtctttggcatcaggaaccccgaggagatcccgtggggtgaggctggtgctgagtatgtcgtggagtccaccggtgtcttcactgacaagga

SEQ ID NO: 294211 - DNA, 426 bp, Zea mays
cccacgcgtccgcccacgcgtccgcccacgcgtccgcccacgcgtccgcttcttcggcggggacgccgtcgggctcgtggacatcgcgctcgggagcttcgtggtgtggatcagggtggtggacgaggcggccggcgtaaagcttctggacgaggccaagttcccggccttgacggcgtgggcggagcgcttcttggcggtggacgccgtgaaggaggtgatgccggacgccggaaggctgttggagcactacaaggggtttctggctaaacggtctccacctgctggttactgaacgctgtaactgtaagcctgtaacagcaagctcagtgttcgtgtacttttccgtgcgttaacgtgtactagagttcaggaaaggctttgattctgtccagagtccagacgaataaacgaatggtttttatt

SEQ ID NO: 294212 - DNA, 314 bp, Zea mays
ccacgccttccgtttaggttccggtttggccgccacgccaaagcttcttcaaaaaagggtggggaaaccttaaacttctcttaaccgcccctttgggttccccgcccccgtgccccccactacctggaccgctcgctggtcggcgactaccagttcgacccgttcggtctcgggaagcccgtggagtacctgcagttccagttggactcgcttgaccaaaacctgtccaataatgaggccggcggcatcatcggcacccggttcgagtcctcctaagtcaactccaccccgttgcagccctacagcgaagtgtt

SEQ ID NO: 294213 - DNA, 347 bp, Zea mays
  unsure (1)..(347): unsure at all n locations
ggaaacgcggcgcgagccacgcgtccgcggacccctggncggacgcgtgggcctcgctagctgaggacggtacancngcgcantggttgcgacgtacgacgacgacgacncangcgccacacatggcatcccagctctccgccgccgtgccccggttccacggcctccggggctacgccgcgcccaggtccgcggtggcggcgctgccgtccgtgagggtgggcaggaagaggtcgtcgtcgcagggcatccgctgcgactacatcggctccgccaccaacctgatcatggtgacgacgacgacgctgatgctgttcgcggggcggttcgggctggcgccgtctgcg

SEQ ID NO: 294214 - DNA, 250 bp, Zea mays
  unsure (1)..(250): unsure at all n locations
cggacgcgtgggtcgcccacgcgtccgcccacgcgtgcgganactcatnnggggacggttggtttttagtggcggcctgaccacccacanaccaataanttcttancttgccaccaaattcttccgggagttcaaaataagcatatatcccgatattcccaaataggtcaacctttttaactgcctgctgaatccatgagcaggctagagacaacctggcgaacttaaacatcttattagccacaggaaa

SEQ ID NO: 294215 - DNA, 245 bp, Zea mays
  unsure (1)..(245): unsure at all n locations
gcgnaaacacctcaatgtctagcagtaccatagccctctcctccacaaccttcgggggcggggcactgaacatgccgtggtctctattccactaaacccgcctgacgatgcacatgaccgcggctaaggcaaacccagccgcgagcttcggcagaccgtgatacaggcctgaccgcgttctctacctgggccctctgtgcggcgcacccacaagctaactgactggcgagtctcccggtcgacta

SEQ ID NO: 294216 - DNA, 312 bp, Zea mays
gggctgcatactgaagtggtgtgaatagagatggtggcacgcagggggtggtgtctgccctgggggggggccttaacctggccgtggagatccaggccgacgccgggtacggttacggtggcgggtacaccccgacgccgacgccggtcaccccgaccccgaagcccgagaagccccccaccaaggggccgaagccggacaagctcgccaaggagcacaagccgtccaaggagcacgggcccaagccggagaagcctgccaaggagcacaagtcgacgccggccacgttcacgccgagctccaaacccacgc

SEQ ID NO: 294217 - DNA, 326 bp, Zea mays
aattaccgacccgacccacgcatacctcccgccccttctaaaaaacacacaataattatactaaacactaaatcttagacactgtaaaatttaataacagatcaacccaccaacccaaactacaacctaacaaatcttccatcctcatcattccccccaaacccaaccttttagccaaaaacacattcatcgcacagcttactatccaccacataaccaaaatatccataaaaatatagctattacacttacaccctcaaactcccacttatcctacacctctaaagtcatttcacaaaatcgtactataatcaaactcaacacct

SEQ ID NO: 294218 - DNA, 420 bp, Zea mays
  unsure (1)..(420): unsure at all n locations
cccacgcgtacgctcgtagtaggcaaagttgctaattgaacatgcctttcgaacacatctgctcctcgacgggcgatgcgatagccgaattctgcgacgtccacaccgccgacagccgcaagaccctcgaggctcacctcatcggcaaaacctatgtgtctggtgactccattactaatgatgacattaatgtcttcgccgtggagccgtcgaagcctgacgctgagtttcctaatgccgcccgctggtacgagaccgactctgcggctgcagcctcaagagtccctggtaaggctgntggtgtaaatctgcctgctggatcagctcctgcggcatctgctcctgcggatgaggctgacgatgatgatgaccatgatctttttggtgacgaaactgatgaggacacgaaggcatctgatg

SEQ ID NO: 294219 - DNA, 295 bp, Zea mays
ctgagagtgtgtgtgagagagaggatgggtggcagcggcagggctgctctggggctggggctggtggtggtggccgtgagcctggccgtggagatccaggccgacgccgggtacggttacggcggcgggtacaccccgacgccgacgccggccagcccgaccccgaagcccgagaagccccacaccaaggggccgaagccggacaagccgcccacggagcacacgccgtccaaggagcacgggcccaatccgcagaagccgtcccaggagcacacgccgacgccgaccacgtaca

SEQ ID NO: 294220 - DNA, 436 bp, Zea mays
gcggtagcggcgagtccttcattgtcggagtcggaagaggagcaatccgaggcccactcgttgcctagatgcgcctggccctttgccttcttgtaatgcttcttcttttccctcttgttttccttttcctggtcactatcattatcaggccagttagcgataaaatgaccaatcttaccgcacttgaagcatgagcgcttccccttcgtcttggtcttgcttggctgccccttgtgaccctttagcaccgtcttgaagcgtttgatgatgagagccatctcttcttcattaagtccgaccgcctcaatttgtgccaccttgctaggtagcgcctccttgcttcttgttgctttgagagcaaaaggttgtggttcgttgatcggtccattcaaggcgtcgtccacgtaccttgcctccttgatcatcattcgcccgc

SEQ ID NO: 294221 - DNA, 396 bp, Zea mays
cggtcgatccaattgtcacttgctctcccttttacaagctaatcaaggccgctgcatccctgtactatctcgaagcattgtgcgtcgctgaagagaatcaccaccaccaccacctgttccaccacaagaaggactaggagcacgccgccgccggcgggtacggcgagtccgccgagtacaccgaggccaccgtgacggatgtcgtctccacgggcgagaacgagtacgacgagtacaagaatgaggagaagcagcacaagcacaagcagcacctctgcgaggccggcgccatcgacgccggcgccttcgcactcgtacgtagtccgtacgatccgatcctccttgagtagtatatatatacataaatgaacgacgagaacgaattatatatatata

SEQ ID NO: 294222 - DNA, 276 bp, Zea mays
gcatcgacactgatacgatgtaccaaaacggcaacatcaaaaagaattacgaaatgaaccctgaagatgaagactaaaaaaagtggagctaacatcgatctggactcacaaatgaaaggaaaatgagttgatcggaagacatgcaccagacaaaccataattgctgcctgaaaatgcgttagtagaaaccgataagctaaagcctggcgaaggaactagagataacaaatactgctacttgatactagatacattggcttcaaaatatgactcacg

SEQ ID NO: 294223 - DNA, 368 bp, Zea mays
gcgggcacacgacttggaagaagactttgaatactaccaaaataactaacacttgggaggactcattaatgtaatggagagtgttattgaaattgaacttgcacacatacgcatacacacagacatgggaacacaatatgctagattctattctaaaaaccttattgaacacattaaactacacatcacacgtttcaacatacctaagattattcctactcttaatcaacctcatcactaacaagaactctcctaactactcatacaccttgacatacatgacaatgcatccgacaatattatcaaccatattataaatgcatctgaacatacacaggatcatgatcagtgcaatgaagtttccaatg

SEQ ID NO: 294224 - DNA, 368 bp, Zea mays
acggacaaaagtggggacaaaactggcaacaaatctggcacacaatttgccgtggcgggcgccgtgctggtcgtggcactgctgctgacaacctcggagaccaccatcaactgcggcctcacctgctcccacataaactcctgcctctcgtactgcctctgctacaagcgcggcacctgctcctgctgctgtaggtgctgctggaacctcaagagcaacctcaagagcgccgccagcaggggcgccgactggaactgcctctagaactgcctcaagaacgtcagcagggtcaacagcggccacaacgccagcaacgcctccaagatccgcgtcaagatccgctacaacatccgctactccatcgactg

SEQ ID NO: 294225 - DNA, 184 bp, Zea mays
cgcacatatcagcaaggtgattttattttggcgaaggtgaactctctcactgccatgtttacataactacccttcaggtactacaaccttccatactgtcaacccagagatggcgttaaaaagagttctgaaaacttatgcttgcttcttattgttgatcaaataaataattcttcctaccgtt

SEQ ID NO: 294226 - DNA, 358 bp, Zea mays
cggacgcgtgggcgcctcgcgccggagcacccgctgccggcaggctacgaggactcgttccgcgcgctggagtgggtggcggcctccggcggggacccctggctgtcgcgccatggcgacctgcgccgcgtcttcctggccggcgacagcgccggcggcaacatcgtccacaacgtcgccatgatggccgccgcgtcggggccgcgggtcgagggcgccgtcctcctgcacgccgggttcgggggcaaggagcccgtccacggcgaggcgccggcgtctgtggcgctgatggagaggctctggggcgtcgtgtgccccggggcgacggacggcgtggacgacccgcgggtgaatccct

SEQ ID NO: 294227 - DNA, 308 bp, Zea mays
  unsure (1)..(308): unsure at all n locations
agagaagtaataattcggatttaattttaccttttaatgtacataaaaacggctatgttattattctaatggcggccaggcaccctaaaaaacnnttaccacatccaantaaggcaccatgctcgcaaattacccaatccttacactggtatgtacttacaataaataacaataccgctcgcattagtgtctggtaattggaatgaatacaatctaaatcccttaaccaggatccattatattgcaattcttgttccagcaaccgccgtaattccaactccaataacgtatatttaagtttttgcaat

SEQ ID NO: 294228 - DNA, 427 bp, Zea mays
aaaaaaaaaaaaaaaataaacaaaaaaaataaaatggcagccgacgtactaaatagaccgaggaagaacacataaattgggcagaatgaaagagtctctagagttactttacttgcattgacgatggcctacattgtacatacgggttctctattgtaattaccctgcggggatatttataatgctggtaagggaatacactttgcagatctggtgtgataaccatgtctttactatcacgtactgctggatcaacttgctgctaatactgcgataatgcatccatctgtaaaaagtactaaaagtccaagagggaacggcctatacgatcctcgggtgaattatgctctgcaggttggtatatgactacaaatgctacagcttcactttgtaattaacaacgttctctactatactcctcaaactc

SEQ ID NO: 294229 - DNA, 262 bp, Zea mays
gaggaactcatcatgaatccactaattggtggtggtttcggtattggtggttgaatgggcctaaggcttggtttcaatgggcccggaattggtcaagggactggtgcaagacaagctggaaaaaggattggcagaccacccgaagcagaaagtaaaataagaagtactttattgcttagactaacttttatagaaactctaacaatttatggactcggtgtggcactagcgcttttatatgcgaacccttttgtgtaatcct

SEQ ID NO: 294230 - DNA, 385 bp, Zea mays
aaaacaaaaaccaagagagcaacaaggaaacaaacaagcggaaggcccaaaaaagggcgagccgaaaaccaaacccagagcgtgtgcgaacggaccgagccggacttctcttctcgggacccgtttgacggtgaactatgcctgagcgatgcgaatccagacgaaactctggaggaggcacgaagcgatactgacgagcaaatcgctcgaccgacttggatataagggcgaaagaccaatcgaaccatctaggagctaggcccctccgaagcgcccctcacgatagctggagcccacacgagtcctatcggataaagccaatgattacaggcatcgagggcccaacgccctggacctattcacaaactccaaataggtaggacgg

SEQ ID NO: 294231 - DNA, 362 bp, Zea mays
cccacgcgtccgcccacgcgtccgcggacgcgtgggaatgatgatgataagagggcacggctaccctactacgtaccctcctctttgtgtgctgccatccgtccccgttagacgatcgaggagagaataacgcagagctctctgctcccggcctgtcttctgccgtcccggccgtttaatttactagtgtgttcgtcctatatgtttagcagcagcaggtgtattgtgcgggtatgtaatggtattgcaactatattgggtgtaaaaccataataaatgtgggcaaatatgcaaggaaaaaaggcttctacttctaaaaaaaaaaaggcataaaaaagcacaacgcccaagactctatgctc

SEQ ID NO: 294232 - DNA, 344 bp, Zea mays
aaggctcgtcctcctacgcttccggcgtgtcgtaccaggacggagactatctttctgaggagggtttataaccatccactgattacatccaaagctcaagatgctaggagggctatgatctatgttcatgccacattgatgatagtgcactatgcttacatcatcattatgtccaccaacattaaccacaggtccatggacggagcctgtgactctcagatcaccatgtgctcgtaccagccgtaccacctgtcaactaggcaacctgcccgaggcctgatccaaggcttccagatgtcatattggttcgaacaccagcagatgctgcactacttattccaccg

SEQ ID NO: 294233 - DNA, 364 bp, Zea mays
ctcacgcgtccggagttttgtaccacactagattaatggtctaggggcgctcatacgcaggacacttgccttatcttttaacagatgtgccgacacagccagacttggcacctgacaatgtctagcgcccggatcgggacaatgaggctggaccgttcaacgaaaatgagggtcgttacgacgcatcgagcgctgtctatactagcattgtcggcaggcgtcgcgacactggagtgacggtcggcatctgccactaagatgactatgttgacgatgaagctaaatccagactaggtatactgacactgaggtacccaattgagcactgaattcgtcaagaactgggatgacattgagaatatct

SEQ ID NO: 294234 - DNA, 237 bp, Zea mays
cccacgcgtgcgcccacgcgtccgctgaggcgaaccaagctggagaatatcaacctgaggagcgcccacaatctgagactgattacatccgtgctcaagaggctatgagggtcatgatctatgttcatgcccgaatgatgatagtggacgatgaatacatgatgattgggttcggcaagatcaaccataggttcatggacggagccacagactctgagatcgccatgggcgcgtacc

SEQ ID NO: 294235 - DNA, 413 bp, Zea mays
cgggctactcggatgaccgtagcaattttagagctaatacgtgcaacaaacccggacgtgcgtgaggggcgcgttgatgagataaaaggctgacgcgggctctgcccgccgatccgatgattcatgataacttgacggatcgcacggccttcgtgccggcgacgcatcattcagatttctgccctatcttggagtcaatggagtctggcaggagaccatgaagaagcatgccactgggtttgtccaaggtgccctgaagcgtgatgagttttgtggtttcatcatgtagccgttcaacgtaaaaacagtatggaggtatatctaccaccacctgatgatttgatgaaccacagactgtcgtggttagctgtaaatgacagcgaatgtttatgtttctagtgacaatgtgaata

SEQ ID NO: 294236 - DNA, 486 bp, Zea mays
cgttcggaattcccgacccacgcgtccgaaggcacgtacgtcgacacctactcagatgcatatgcccacaccaagacgtaccactaggtcgggcttaattagaagtcggacagccacacccagcaagtctctaaatcatactacgaatcacatcctgacttcctctacatgaaagcatacgtagtgaccacctattgttttcttctcagcggacccaatgagtaactacaccatgttacgaataaaagcgagggaaaatcggatgagcaacttttgcagctatatgaaatgcactttgaaaaatcacgtcttgaggacgaaaaacacgataaaatggacttgcctacttttgcaccgaataaactcataagtaatccaatttccgaggacacgaacggaagtaagctgattttggtattcgtatcggaattagccagaagaagaaaccatgttcactgcccttcattctctggcctgactgcctta

SEQ ID NO: 294237 - DNA, 423 bp, Zea mays
agaaatagtaaatttgaattgagacacatattctatgacagattttaacttaccctctggtttcgtacctttagtaggcttagtatttccggcaattgcaatgacttccttatttctttatgtgcagaaaaataagattgtctagaaacgacggggccaaattttctcaatgtatttccaggatcataatacagatatttttttgcgtaagtactataatatgatagggtatgtagctctttctacacacaaatgaaaaacgtctatggatgcagatataagctacgagcataaatgcatgcatatgcgtagccgactatagcgagtttttctttttttaagtggatccactaattttttttgaatagaaagtcaatgtatctaaccaattatttcacaggagtactagctactgaacgctat

SEQ ID NO: 294238 - DNA, 323 bp, Zea mays
cccacgcgtccgcccacgcgtccgcccactcgtccgcccacgcgtccgaaaaaaagaagggaaaaaaaaaaaaaaaaaaaaaaaaaaaaaagacaaacaatataaaaaaatccagccttacctcttagtgcatccaacctcatatctcttttattgcgacaccttaattcttttcactggccacctatttacaacttactgactgggaaatcccatcctttacccaactaaatccctttgcttcccatcctcatttccccagctgcccttctacctttcagcccctgacctatctcccttcacatcagttccgctcccttttt

SEQ ID NO: 294239 - DNA, 401 bp, Zea mays
gttggcttctcctccccctgcggttcgggttcgggttcgtgaggttctccggagggcgggttaccgggtgagcggatcgagatggctgcgtccgatgttgagtaccgctgcttcgtcggcggcctcgcctgggccacggacgaccactccctccacaacgccttcagcacctacggcgaggtcctcgagtccaagatcatcctcgatcgggagacgcagaggtcccgcggcttcggcttcgtcaccttctccacagaggacgcgatgcagaacgccatcgagggcatgaacggcaaggagctggacggccgcaacatcaccgtctactaggcccaatcccgcggcggccgttgaggctgcggcggatgccggtacggtactggccgtggatgcggcagcta

SEQ ID NO: 294240 - DNA, 431 bp, Zea mays
cccacgcgtccgcccacgcgtccgcggacgcgtgggaaaaaatctcgccgcacgggggctgcgagtatctggcaacgctccggtgaattacagcaactggaggtgaggcgaccgctgcggtgccgtgcatcaccaccctgccccggtgcccccccgctccacgacgacgcggcacccgcacgtagtccggacggcgagcacttgagctgagtcggccgcgcttcggctttctcgcccgagttgctcggtgccgcgtcttccctctttcggcggcgtgatctgcgtctcggcgctaagagagctgtcgtctcccggctccggcacttgcacaagaccttgagctgatcggccggccttctgcgcgacggtgaatctccgcttctcattttgataatttcccgcaagtcccctcacttcggatttgactgaag

SEQ ID NO: 294241 - DNA, 376 bp, Zea mays
cccacgcgtccgcatgtttgggcttattacatgaaacgacaacaatattagaaagcttagcaagcacgttagggccaggatgaccaagacgttggtgccatagggacgcaggagcagcaacagcagcaagagcgtagtgtgtagtggctggaggagcacgcgcagtaggaagactgatggtgtacagtgacccagagttgttgcacctaaggattgtgttcctggaattgagatccttcacagaaaggccaaacaggtcaaattccatggaacaattattatcagtcgtaaactgacgaacagaaagaagattcttaatgatatcaggtgtaacaagaacattgctaagataaaactggccagaaagcaccatatc

SEQ ID NO: 294242 - DNA, 360 bp, Zea mays
cgggcgcgtggcgaaatttccatttataagaccttctcgattgtgcccaatatttgatgtcgggtaattcctacggcctggggggaaaaaagggcattaacttattatagagattgagcgatttgactatttttttttttaaccgtacctatatctcattcttacaaaacttacacagggttcagcctagagagaacagctgttatcataggagactctgactagcctaaggctatgggaactactggtcttttctgtggaggatcctagttcgttgtgatccaaggtgtacctgtagttgatatactaagaaagataggcgctgcgggcattactatcgataagaccgccatgtacttg

SEQ ID NO: 294243 - DNA, 414 bp, Zea mays
cggacgcgtgggcggacgcgtgggcggacgcgtgggtggaaaataaactgagtgaatggcgagttttcgtattcctgcagtacaggtacagccacaacggctcgggaattccatggctctattggattggatggaaaaattccttttcatctaagtggaaggatcctgtatttttttactaggaattctgctccctcgaaaagtttttctttggggaaaaccaaaataaaaagagaatggaagaattcttcttattccataagaaaataaaggaaccctagaattccatttgcataaggtacattacgccatacaatctaaatataaaaggggtatggggcaattaatgactttgaaaacgcgaaatagctgatgagggaagttgctgttgagaaataggaaagtggaatgaaa

SEQ ID NO: 294244 - DNA, 410 bp, Zea mays
acctggacgtatatcggaatagcccctactttctcacatgcttatgcaccctccaggtagaggctatcccatatcaggacagacaagaagaccgctacaataagagtcctcaacttcttgaatacaacccagtatacaagaaaactccactgcttgtccataatggaaaacccttatgtcagtccatgcttattgttgaatacattgatgacatttggtcacataattcattacttcctgctgatccctactagagaactctggcaaagttttaggttaaatatgctgatgatgacatgttttctgcaagtattgcattcttccttaacaataatgaataagagcgagaaaagagcatacagaagatatggcagcatctcaaggttgttgagaatcaacgatttggtgat

SEQ ID NO: 294245 - DNA, 187 bp, Zea mays
gcgtccacgcgtccgaagggacagtcggcaaagcggatccgtaacttatggaaaaggatcggctctgacggttgggctcgggggtcccggacccgaacccgtcagctgctggcggaatgctcgagctgctcgcgcggcgagagcgggccgtcgagtgccggccgggggacggaccgggaacgggccc

SEQ ID NO: 294246 - DNA, 256 bp, Zea mays
cccacgcgtccgagaaataaaaaggaaaaacaaaataaaacaaaaccataaaaagcagaaaagaaaaaaaaactaatactgtaaataaaaaaccaatctaaacatgggcgtattaaacaatttaactaaagaaaatgcccatgaatgaaaacaaagacatcaacatcagacccgtcgcatctcaagtgctgcaccaactgcaacttctccatctcgtagctctacacctgcgacgacgtcaaaaaggactgccacc

SEQ ID NO: 294247 - DNA, 369 bp, Zea mays
gccacgcgtacgataacacattggtgtcagtctctggagcatttaagtggtctggatcaatggaagggttgagtcctagccagccggcaaaagatgagctgctgatggtaatgatgatgataagaggccactgctaccctactacgtaccctcctctttgtgtgctgccatccgtccccgttagacgatcgaggagagaataacgcagagctctctgctcccggcctgtcttctgccgtcccggccgtttaatttactagtgtgttcgtcctatatgtttagcagcagcaggtgtattgtgcgggtatgtaatggtattgcaactatattgggtgtaaaaccataataaatgtgggcaaatatgcaagg

SEQ ID NO: 294248 - DNA, 274 bp, Zea mays
gcaagatgtgtctgaggaagctgtcgctgctttggataaaatagaagacgccctcgggaaggtcaacgagggtccattctcccttggtcagttcagtctggtggacattgcgtatgtaccattcatcgagaggtttcagatattctatttcaaccttaagaacttttatatttccaaaggcctaacccacccttaaaaattcaatggaggaattgaccataatggatccttccccccagactaaccaggacccacagtttttactggaccaacc

SEQ ID NO: 294249 - DNA, 357 bp, Zea mays
gcgttcgtgaggttctccggggttcggtttcgtgggtgagcggatcgagatggcggcatcggatgttgagtaccgctgcttccacggcggactgcactgaaccacagacgaccactccctacacaacgccttcagcacctacggcgaagtcctcgagttcaagatcatcctcgatcgggagacgcagaagctccacggctactgcttcaccaccttctccacggaggacgcgatgcagaacgccatcaagggcatgaacagcgaggaactggacagacgcaacatcaccgtcaactaggcccagtcccgatgaagccgcggatgcagacgcagctgcaggtactgctgtagccgatg

SEQ ID NO: 294250 - DNA, 264 bp, Zea mays
aacacaccatcgactgatcaaattctctatcgatccgtgacttagatacaacaattgactgtgacaaatccactattggtttcacgatcagcaatacgtatagtaactcccaatttatgaatctaatcaagacgtaatagcaaaccatcgactcccaaagttccgactgacataggacctaaacatggaagagcacttgccattcgtaaactattaaaatcataccaaaaccgtccaggtcgaaatatggctttcaaattaact

SEQ ID NO: 294251 - DNA, 325 bp, Zea mays
cgacgcacgggtcactcgacgcgtgagctagctgtataagtcgagtatagcttgatctacacaagagacaaagcagggcacggacaatgtccctcgcctcctcgtcctccgtcgctgctcctgctcctggccgccgacttcgctatcatgagcgccaacacgaccaccttcaccatcaccaacaactgctggttcaccgcgtggtccgcggccaccccgttgggcgccggcactcagctgaacccgggcgcaacgtgtaccgagaacacgccctacgtcaccagctactgccccgtgtagtgccgcaccggcatgctccttaaca

SEQ ID NO: 294252 - DNA, 418 bp, Zea mays
  unsure (1)..(418): unsure at all n locations
cggacgcgtgggccaccatcgatctgcaagtctcgctacgtagcagtgcaataaaaaaaagcagccgcaatggcgagcagcaccatggccctctcctccacggccttcgccggcaaggccgtgaacgtgccgtcgtcgtccgccttcggcgaggcccgcgtgacgatgcgcaagacggcggcgaaggccaagccggcggcggcgtccgggagcccgtggtacggccccgaccgcgtgctgtacctgggcccactgtccggcgagccgccgagctacctgacgggcgagttcccgggcgactacggctgggacaccgcggggctgtcggcggacccggagacgttcgccaagaaccgngagcntgaggtgatcccactccgctgggccatgnctggcgcgctcggctgcgtctttcccg

SEQ ID NO: 294253 - DNA, 357 bp, Zea mays
acgcccacgcgtccggcaggtggtacctttgatgtgtccctcctcaccattgaggaaggaatctgggagggcaaggccacagctggtgacacccatcttggtggtcgaggactctgacaacaggatggtcaaccacttcgtccaggagttcaagatgaagaacaagagggatatcactggcaaccccagggctctccggaggctgatgaccgattgtgagacggcgaagaggactctgtctttgactggccagaccatgattgagattgactcgctgtatgaggtcatggacttatactgcaccattacccgtgccaggtttgatgagctcaacatggacctgttcaagaagtgcat

SEQ ID NO: 294254 - DNA, 418 bp, Zea mays
attgaaataagcatgtttgaggtctgcaaaatatacagtcgtgtaaaacagcaaacacgtggcatccacaaaatatgcctcagcacacaacaattttgcaggactaagggtctatttggttcgcggctaactgcgccaaactttgcctaagtttagttgtttgaattgaataactaaccttagaaagaaaagttaggcaaagtgttgcaagttatgcatcgaaccaaacaggccctaaatgttttgaaactgtatatatgaagcctgttgatggccacttctaggtagctgggatgatgaatgcattttcaagcacattctgtttggtggtgctgccaatgatgcgttcggctcggccgttctgggagaagtgtacgggcacgagcgacgcaactggatgccatgggtgaggaatgag

SEQ ID NO: 294255 - DNA, 201 bp, Zea mays
cccactcgtccggcccttttgttccacacgagatgtctgagctcgttgagctcatgtcaagacacctgcgttatctcataacagatgtgctctcccagccaaactccccacttgacaatgtcttgcgctcagatcggcccacataggccggtccttgctgtcaaaacgagaggcggtgcccagctaaggacccacggaata

SEQ ID NO: 294256 - DNA, 450 bp, Zea mays
cttttgcacaacagcaagtctcctatttgggccatgtcatcaatgctcaaggtgtagctacagatccagttaaaattcaagctattgccgagtggccagtgccaaactgtctcaaggatttacgcagttttttgggccttgccggctactacaggaagtttattaggcattttggggtcatttgccagcccttgaccgctttactgaagaagggcagtctgtttgtttggacaaatgatcatggtattgcatttgacactttaaaaaaggctttggtgacagctcctgttcttgcattacctgatttcactgctgcttttatcgtggaaactgatgctagtgctgacggtgtgggtgcagtcctcatgcaaaaaggtcatcctctcgccttgcttagtaaggccctgggtcccaagtctaagggattgtcaacatactaaaaatagtact

SEQ ID NO: 294257 - DNA, 453 bp, Zea mays
ctaccagctgcacacttacttgcaggggttttcgctgttgtacaccttcatcgacaccatgactctgtgccctgggtggctctttctggtgatatttatgacggtgtacttcttcgttgtgaggcgcaagtggtcgccgcactttctgaggttccatgtgatcctagcgatccttctagacactggctcccaagcagtggccaccatgtgtacctggatgccaagcatcgtttatcaggggaagccaatgcagtacttctggatgtctatcgcgttcatacagatcttcacagtgctcgagtgtttgcgctgcgctctgtgtggaatgtatcctaatgtcccattcatatcccacaccgctttcattcactctgatctgaatctgttcaggtaggtgcttactacataaggtccaggactcaaggaaagatttcggaatggctacttacagtt

SEQ ID NO: 294258 - DNA, 205 bp, Zea mays
ctgccatccgtccccgttagacgatcgaggagagaataacgcagagctctctgctcccgggctgtcttctgccgtcccggccgtttaatttactagtgtgttcgtcctatatgtttagcagcagcaggtgtattgtgcgggtatgtaatggtattgcaactatattgggtgtaaaaccataataaatgtgggcaaatatgcaagg

SEQ ID NO: 294259 - DNA, 341 bp, Zea mays
cgacccacgcgtacgttatgtcaccacatacagaaactaaaccaattcctgtatttaaacctgctgtcaatgattagaaacggactatactacaccccggagtacgaaaccaaggatactgatatcttcacagcattcccattaactactcatatccaaactcctcctgaagaatcatgagctgcagtagactgccaatcttctactagcacatgtacaactgtatgcactgatacacttaccagacttgatcgatacaaacgaccatgctatcacatcgagcccgtttctagggacccatatcaatatatctgttatgtagcttattcattatacctatt

SEQ ID NO: 294260 - DNA, 268 bp, Zea mays
ccgcacatcgcgcggtgtccggtgcgcacccggcagtcctagaatatcctgaggagcgcggttcgtacactcgcggtcgcactcataaccgcatatggctttcaaggagaacagcctctggccaatggaacaatgtaagcaagggaagtgcgtaaaacggatccgtaactacaggaaaaggattgtctctgagggttgagctccgtgatcccggtctactaacccgtctgctgctggcggaatgatcgagctgctcacgcgcaaatag

SEQ ID NO: 294261 - DNA, 351 bp, Zea mays
gccacgcttgcggacacattagacgacatatttgaccatccactcgagcaccaggccggggcaatgtcacgcgcgatggcgcgcggcatggtctccgcgaacggcggcacgatcacgggctagaataacgtgtcgatctacttcaccatcgactgcaccgacccaatcatggacatcatcatggtcgtcaacttgctggagaagctcatgcaggaccgcatcaaggtcgctggcagcctggctgactacctcagcatctctgtcaccatgtctagcgagacgaccaacgttaccgtaacctttgacagaccgtacttcaagagctacatgaagaacttgtccaagaagtac

SEQ ID NO: 294262 - DNA, 378 bp, Zea mays
gttaacttcgggaagaaattgatggcagatcaaattccagaatggaaaggatattatatcggttacgagttgatgaagaagaaagttaaacagtatggccagcagcttcagcagggggaaaaagatcgtcgtcgggttctgaaggatttctcgaagatgcttgatgatcagatagagaagatcgtcctgtttctgttggaacaacaaggactattggcaagcaggattgagaagttaggaaagcaaagggcaatactacaagagcagccagatatatctggcattgctgagttacgagaagcttatagggaagttggtatcaatctcatcaaacttctcaagttcgttgaccttaatgcaactgcatttcggaaaatc

SEQ ID NO: 294263 - DNA, 373 bp, Zea mays
tctcactcttccgcggactcgtgggtctgcctaatgactgtcgtatttaggtatatatctagtgctttgcccatcttcagaggttatcgtttgagcggatactattcgtatttgggaccttcgtgctcatcgattataacctctaaggggccccaaccgtttggacttgagtatgttgaaaaaagacattcaaccttggcaagaactacgttcatcataatatatgacccatgctcctttaagctctttaaattccctgggtgacttagctacctagatcaatgctgataattatatatgccctataacttggttatcgacctcccattttgttctaagattcatctattttgtggtccatttgtggcattca

SEQ ID NO: 294264 - DNA, 305 bp, Zea mays
ttaaccgtctgatatcacttttgatatttctaggatggatggtatgctctttcttaatgggacggctaagatgatcttaactcccaactgatagactctttggcccaataagaagggttctaaagcggaagatcttgtgtgactgtccagtctcatggaggagacagatcttcccttgaagatgttgccccaagtaacttccttgactttggaactaaccctactgttctaacttaaatctaaaataactgatcaccaaaggattgctacctatacattcacctggcttgatcttgcttttccta

SEQ ID NO: 294265 - DNA, 427 bp, Zea mays
cccacgcgtccgcccacgcgtccggaaaaagtttcgagaaagctgtaacgcactatgtgtacaaacctaagagatccacattgaaactctatgatttcatgtgtggttctcttaggtttctacacatagtgtctcacaactttctccaaacattctaaattttttatcacagactctacatatgatatcatgacatgtggacaagtttcatgattttctaagtttgtttgtgttttataaattttttaaacagttgtatggcaagttcacggccatgttgagtgagcatggtgctcgaagtttccggtccgctcctgaaatcggtcgtaacttgtgctatgtagcatggatatcatttttgcattcacggttttccaagtttcgagtgacctgcaattcaaatctgaattttccgaagaaattcaaa

SEQ ID NO: 294266 - DNA, 266 bp, Zea mays
acgcgtacgtcctgtcgttcgcacacgacattactcgcctcgttgatctcatcttaggacacctacattagctcttgcacatattccggccgagccaggctccccacctgacaatgtcttccgtccggatcggcccggctagtcctttccttgtaaccaaaacgacgctcggtgccccgcttgcgacccactgaataagtcccataccgttaaaagtagtgatatttcacttgcgcccttacgctcccacttatcctacacctctc

SEQ ID NO: 294267 - DNA, 379 bp, Zea mays
gatgtttcttggccccgtgcccagcgctcctaaacccaagcgccgccgcgagtgccatggggtgagcatcgacatgggcatggcatttacgcggctcttctagacggacttcttcaaccgcgaggctatcattctcgtcctcagactggacattgctggctagaccaccatactatatacactgcacatgggagaagtcctcttcacgatcccgacaattggattcaacgattatactgtgcagtacaacaacatcaaggctcaagtatgggatcttgaaggccaaacatgcattaagccatactggcagtgctactttccaaacactcaggctatcatatatcgttgatgatgcaagcgatacatataggcttgtaac

SEQ ID NO: 294268 - DNA, 458 bp, Zea mays
cctgacaagaagtctgataacaagatgccaatgactcctagacgaaaatcaccagtggaccagaaggtgccacctaaagatgatagccagaaagctgctaggaagagcaccccaagtgctccctcagatgacgctgacaaagcagctaagaagcatattcctactgtaaagagaacatctggggtcttaggaaactcgaatgttataaatctagtgaagattcctcccaaccgcaaaaaactaacagatattagcacttcatggacatcactccctccatcacttgccaaactaggaaaggagcttcttaagtacagggaatcggcacaaatagctgctgctgaagccatgcaagaagcttccgctgcagagagcttgctcagatgtttgagctcgtacgcggaggtgagctccacggcggatgagcacaacccgcagccagccgtagagaagttctt

SEQ ID NO: 294269 - DNA, 377 bp, Zea mays
cccactcgtccgcccacgcgtccgtcgcattccacccgcccccttttcgcgtgaagtcgcgtgcgccgcggatcctgccgtcacgaatggaggcgtggccggacgatttccgctgccccatcacgctggaggtcatgactgacccggtcatcctcccctccggccacaccttcgagcgccgcatcatccagagctggctcgacggggggcacctcacctgccccgtcaccaacctcccgctgccgccctccccgccgctcatccccaaccacgcgctgcgccgcctcatagccgtcgtctcgccttccgcggcggcgtctctcgtccctgctgagggaggggctcacgcgaggcaagaagcggtgtcggcggctgct

SEQ ID NO: 294270 - DNA, 343 bp, Zea mays
acgcccacgctagcgaaactacgtacttgacaatgtctttctctccgatcatctcctacaggccggcccgttcagaccataagaggggcagatccccgatcgcgacccacgcaataagcaacttcacctttaaaattctcttattcgattttcgtgcgcaggctcccacttatcctactcctctgacttaatttcacactcttgcactacagtcaacctcaacagcgtcttctttatcctctgattccgtcaaatccatctccttggctctcgcctcgatggattgtatacatgcacactgacaatcttcttaatgctttcatacgcgtaactcattaaatca

SEQ ID NO: 294271 - DNA, 385 bp, Zea mays
cccacgcgtccgcccacgcgtccgcccacgcgtccgcccacgcgtccgcccacgcgtccgcccacgcgtccgcccacgcgtccgcccacgcgtccgcccacgcgttcgcggacgcgtgggcggacgcgtgggcgcgctcgaaagcttgcgcggtggcgtgctcatggtcgcgcgcatagtggtatgccaaaagaggatgctgggaaagtctgcacagtggagactgttatgtcattctgtatacgtatcatttgggcgacttgaaagaagaatactatcttagctactgaattgggaaggatagcttggtggactatcaagtgtcggcatcttaaatgactaatacaatggggaattcattggaaggacgggctgttgtgggtcg

SEQ ID NO: 294272 - DNA, 303 bp, Zea mays
cggacgcgtgggtgaaattgcattctgagtgttactccattttttgtgttactctacgggattgtactctgtggatccttgggcctaatgctgttcgaattgcgctgcattctggaatgtaaatacaacgaaacgtattcgtgtaaaatgaaattccaatagaataagaccggagtcttcatgtcccgttatggacggcctgctttaataaaaatactccgtctggcagctttaccatgactcactataaaaacgcctacgatcctgaagtaatcagaaaaacgaatttcctttttgggaaaa

SEQ ID NO: 294273 - DNA, 316 bp, Zea mays
cccacgcgtccgcggacgcgtgggcggacgcgtggagaaatcctagactgaagttatgggcccggtcggtgatggaccgcttccttgtctgtaccatgttcgctggaagctagaggccgtacgccttctcgtccccgtcggcggttccgggccctttctcccgctgctccagctccgcttccaccacggtcgcgacagatagcactgggaggagctcgttctcccgtgcgccgactaagagccgaaagccaccgtttctgtccgccttggacgacacaaagtccgtacttcgcgatccgatatcacgcttcgacct

SEQ ID NO: 294274 - DNA, 330 bp, Zea mays
gcacgccgcccgttgcgcagggagcaccgaggcaggccggctcctctcgtcggcggtggggcctaagccaatgtcaccggccctcggggctcgaacgccctaacgcggatcagatcactctgccagcagacgcgcccggtgctagcttgcattctgacttagacgcgtgcagtcataatccggctcacgatatcttaacgccactggcttttcaaccaagcgcgataaccaactgtgtgaatcaacggctcctctcgtactaagctgaattactatgtgcaagcggtcatcacatgggacctaccaacctgtctgacgacaagtgtaaac

SEQ ID NO: 294275 - DNA, 369 bp, Zea mays
cccacgcgtccgcccacgcgtccggtcattcgtccgacctcgcgttcgtgcacactactagggactcatataatctggcgcatgctaacatcatatgcatggctagtcatactgaaaatgatcatgaggacgagatcaatcccgctcatgagctcttgcttgatcactccatgaaagagaaagacactgaccgaacagactactacggtctataccttgaaaaccagtgccgatttgctctgcaagtcatcgaagctgtcggctatgagatggacgccaacatatacaggattaagctatatgcattggcataatattcaaaggctggacactatgatccaaaagaattggcgctctacatgaggaatg

SEQ ID NO: 294276 - DNA, 439 bp, Zea mays
cccacgcgtccgcacttgagtaggtaagaaattctggaacctctttcacttgcagcctatgcgtgatcagaagggtgatgttcaatacttcattggggttcaattggatggaactgagcgtgttcgagaggctgctgcaaaagatggtgccatactggtttgtttctaccttaatggcgactagcatatatgtgctattgtgcttgctatcacaagtacctagaaaaatgagaataaaatgccagataactttgtcatggctgctatattataaatgcaagccatccatagtgtagtgattgcaatgtttattaacatgtagtaccatctagtattctagtgtttattaacgatttatatctcttaagccctggtgattaacattggcttaatttgtgttttagtttgcataaggtgatttttgcaactaattttgcgt

SEQ ID NO: 294277 - DNA, 406 bp, Zea mays
caggttttaatctttctgggttttttgaggataagtatggtctcagggaagagagagttagtaccagacagcctgtaacaacagtatttacaaagctgaaggagcttgccaaacgcctaaagttgagggtcaagaagaaagaaaatgggaccttgaaattggcagctccgaaggaaggaaagaagggtatgcttgagcttgatgcatagatttttgaggttgctccttctttgctcttagttgagttgaaaaaaaccaatggggacacgctggagtatcaaaagctagtgaaagaggagataaggccggcactgaaggatattgtttgggtttggcaagatgatcaacaccagtgctcacaatcaccagagtctctattatcaccaccggagacacaagatgaatt

SEQ ID NO: 294278 - DNA, 391 bp, Zea mays
cccacgcgtccgcggcgcgtgggtctggacaaaaaatgctgctaatgaagctgctcggataagcatcgggaagcagtggaaggaatttctggattacaaggactccattggattcattgttcatgacgatgcaaagaagatggacaagggactgaagaaccgttacacggtttgatcccaaagagtagtagcatgtagggtggttctatccgattccgtagcaccttgcagagtgtgttgaaggttctctatttgctgaggagttgcttaagcataatctaacatgatgtcgaatgtattcctgtatgttccatatgtcagtcacctaggtgttgtttttgtctcagcgctgtgtgctatatatatatatatatatatatatatattggat

SEQ ID NO: 294279 - DNA, 446 bp, Zea mays
cggacgcgtgggtttttgaaacaggaaagcaataaacagcaaaaaaaaaagaattgatatcgcatattttacagttaccttgcagttctcgtactctgcagtcattttctcactgtctgttacaaagtacggagagatgtaaccacggtcaaattgcattccctccacaacatagagaaagttctcagaactcttcccctcttcaagggtgacaacgcccttccgaccgaccttgctcatggcctctgctatcatgttaccaatttcatagttgttgccagcactaactgcagcaacatctgcaagctcactatcttcaacctccttagacaacttccttagttcttcaactagtgctttagctgttttctcaataccacgagtaatctgaacaggattagcaccagctgccacgacctggacaagacagtttttagctgaaaaca

SEQ ID NO: 294280 - DNA, 272 bp, Zea mays
cgcccttgtccgtaccagttctgagtcggttgttcgacgcccggggaaggcccccgggggggccgttcccggtccgtcccccggccggcacgcggcggcccgctctcgccgcacgagcagctcgagcattccgccagcagccgacgggttcggggccgggacccccgagcccaaccctcagagccaatccttttcccgaagttactgatccgttttgtcgacttcctttgcctacattgtttcattgtccattaggtagttcactttgtata

SEQ ID NO: 294281 - DNA, 377 bp, Zea mays
aaaaagcatacaaaaacaacatacaaaaaaactaacaataaaagaaaaaatagataaaaaagagtggaaataaaaaaaaaagagaagggaaatggcaaaggataattcgattcttcgacctcaacacgggcgccaagatcccttcagtcggcttgggaacttggcattctgatcctgtccttgttgctgaagccgtcgcggctggccatcaaggttggttaccgccacattgattgtgctcaaatctatggcaatgagaaggagattggctctttgttgaagaatctgtttgaggagggtgtagtgtagcgcgaggatttgtggattacatctaaactctggaatactgatcatgcttcataagatgtaccactggc

SEQ ID NO: 294282 - DNA, 270 bp, Zea mays
aaactgattggcaccaggccccaaaagcggacgtatctgaaccatgcgaaacaggtccccgtgaggatcaagctgatgaggaggatgattctccaatatgtctcgttgaatacgacacagaaaatgcacattcggtcacctactgccagcatcattggcatctctggtgcatactctcatggatggacaggcgcgtgacatgcccagtctgtgaccagataactctgacagacaggatgtacgaatagcactctaggctgatgatcctgc

SEQ ID NO: 294283 - DNA, 339 bp, Zea mays
cccacgcgtccgcccacgcgtccgcccacgcgtccgcccacgcgtccgaaaaaaaaaaagagaaaaaaaaaaaaaaaaaaaaaaaaaaaaaaaaaaaaaaaaaaaaaaaaaaaaaaaaaaaaaaaaaaaaaaaataaaaaaataaaaaataaaaaaaaaaaaaaaaaaaaaaagttggacactttttaaaatcgaaatgttatttcaatagattgacaatatctaactttttaaattggttcaaaataattaattcaatcaggcagaaaatataaaataatagggactgtaaaaactgtgtatttaacaattctaaagtctttatgtcaaatttcattt

SEQ ID NO: 294284 - DNA, 312 bp, Zea mays
  unsure (1)..(312): unsure at all n locations
cccacgcgtccgcccacgcgtccgcccacgcgtccgccccaattgtatgctgatcgtttcagttggttcgtgcaaagtcagatggctcagtgataatttgcatctatctgatgacttgaatcatgctgaaccaggctttagttctgctagcagtctgtccagtttcaataactacgtttatttgttgatagcatttccattcatttttcggtatcatgccttggtttcttgttcaaaataatatggtttgcttgcatgaagtacatgtagtgacagtnactagtaagagttaaaccatgtgagtatttttta

SEQ ID NO: 294285 - DNA, 260 bp, Zea mays
agcggcagcagcgctcgtttgatccccgcggcggtccggcgtccgggtaggggagcgaggatgacggagtccctggtgcggaacaagccggggatggccagcatcaaggagatgccggtgctgcaggacgggccgaccgcgggcggttttgcgcccgtgcgctacgcgcgcccgatttccaacttgggccccagcggcaattggcattttcttaacggccttgggggctttggggattggaatgtcccaggtcggcaagg

SEQ ID NO: 294286 - DNA, 179 bp, Zea mays
cccacgcgtccgcccacgcgtccgcccacgcgtccgtcaacgcgttcgtccacgcgtccgcggacgcgtgcgcaagcgtcagcaccgtcggctgcctccgtgctatctatacgctgacgatacttccctacgccaggcacgccaagatgaatcttgacaggttccttatgaatctgaac

SEQ ID NO: 294287 - DNA, 198 bp, Zea mays
gccacgcgtgcgcccacgcgtccgtccacacgtgcgcacacgcgttggtgcacgcgtgcgtagagaacaactaaggtcatgggcgtcttccccgatttggctaaataaaatgccctgtttgatagcaaggacatcgacatcaacccgtggcagcttaagagctgcaccaacttcaacttgtccttcatggagctctac

SEQ ID NO: 294288 - DNA, 144 bp, Zea mays
cggacgcgtgggcggacgcgtgggcggacgcttggtcagacgcgtgggcgtggcaatgaggggcatcttggatgccctactagcgtggccggcgaggcggttgtgttcacggtggtgaaccagtgccgagttcaccctgtgggc

SEQ ID NO: 294289 - DNA, 418 bp, Zea mays
catcagccaagagctacgcaaacgcacagcgatgcaccagcacgagataccagccaccatgcgcctgtccctcctcctcgtcatcgtggccgccctctcggcgcgcgccgcggcgcagctgccgccggcgggcggcgccctgaagccggacttctatagccagtcgtgcccgcgcgcggagcggatcattgcggaagtgatgcagacgaagcagatggcgaacccgacgacggccggcggcctgctccgcgtcttcttccacgactgcttcgtcagcgggtgccaagccttcgggctgaacgggttcaaccaggttcagaaatccgaaccccacgccgagatcaaccaattccttcccggggacccctttgacgccctggtgccccccaagcttgcccttgaacttgaatgccccggg

SEQ ID NO: 294290 - DNA, 332 bp, Zea mays
ggccgaggaggccggcggcgagaagaagcaccacttcttcggctagctgattgatcctcccatatcgatcgtcgtccctccccgtttgctacgcgtgcgtgtgagagtgatatcgagcgccggccggcctgcacgcccgccgtgttgtgcgtacgtacgtacgtatacatgtatgtatgtatatgcgcgcgtgtgatgcacgaataagcgtggctacgtaatctatcgtatgtacaacgtggggaatgcatgggcttgggtatgatccgggtaccgggacccaaaaaggtttccacccttggtttccttaaaaaaaaaaaaaagggcggccc

SEQ ID NO: 294291 - DNA, 281 bp, Zea mays
cccacgcgtccgaccacgcgtccgtccacgcgtccgccacgcgtccgcccacgcgtccgggaagcaagcaagcaccgagtacatacatactaggcagccaggcagccatggcgccaaccgtgatgatggcctcgtcggccacggccgtggttccgttccaggggctcaagtccacgcgaagcctcccagtcgccggccgttcctccagaagcctgggcaacgtaagtaacggcggaaggatccggcgcatgcaggtgtggccggcctacggtaacaagaag

SEQ ID NO: 294292 - DNA, 278 bp, Zea mays
cccacgcgtgcgcccacgcgtccgcccacgcgtccggttctttttcgcggcccccgcttcggcgcgggaggttcggggggtccaccgtggcgtgcttcctgctccgcttctcgacgggcgggcaggccacgggcaccttcgggctgacgggcgtgtcggtgtgggaggcgctggtgctggagatcgtgatgaccttcgggctggtgtacacggtgtacgccacggcggtggacccgaagaagggcagcctgtgcaccatcgccctcattgccatcggc

SEQ ID NO: 294293 - DNA, 441 bp, Zea mays
cagatacttactctacagcaaagaatgagtttctacgctgtgaactcgatagtaccctagaggaagagctcatttgactcactgccatacatccactatatagaccgcatcgacagttgtgccatatcaattaataacgcacacgccgtaactaatgaaatcattgcgcatcacttgaatgcgactaccactacattccaataaatgactaatagaaccatatttgcactggaataagtcattgctactctaatgcacgactacttaacaataggattcaccacagatactaatctgtctcactatagccgcaacaacggcctactcattcacatccaccgacccatgcactcacatattgatagacatacaaatcatgacttgcatatccgtggattatctaaagcatagctgatgtctgagagagatcatatgcactac

SEQ ID NO: 294294 - DNA, 293 bp, Zea mays
acccactcgtacgcccaggctttcgtccactcattcaaactccttatcgtcgactgcgtcacctaccctaagacgtgctgtgctaacagccactgcggagggatcctctctatatgcaactactcttccatacacagtgtgctgtactgcaagacccacttctagcagctcttcaacgagacctttagcttcttcaagaacttcacgccatgtggcaagtcttcagacaatggtgaactgacaatggcccccagcaagctatcatctgcgtttcctagtactcatgataagtg

SEQ ID NO: 294295 - DNA, 294 bp, Zea mays
cccacgcgtccgcccaggatctacagcttgatatatctgggagatgcatgcctgattacatattgccaactaccttagctaaggttcctaactgtatgccattgttgagaaaaatatctctgaagggaaattatcggctttctgataatggtttggtcacaatcatctcggctgcaccttctttatgttccataaatctgtgtgagtgttctcttctcacttaaaaaaaaaaaaaaaaaaaaaaaaaaaaaaaaacaaaaaaaaaaaaaaaaaaaaacaaaaaaaaaaaaaaca

SEQ ID NO: 294296 - DNA, 405 bp, Zea mays
cccacgcgtccgcccacgcgtccgcccacgcgtccgaaaaaaaaaaaaaaaaaaaaagaggaaaaaaaaaaaaaaaaaaaaaaaaaaaaaaaaaaaaaaaaaaaaaaaaaaaaaaaaaaaaaaaaaaaaaaaaaaaaaaaaaaaaaaaaaaaaaaaaaaaagggaaaaaaaaaaggggcataaaattaaaatgaacgaaagaaaaaaaaaaaaaagtaacaaaggaatgaaacaaaaaagaaagacaaaaacacaaatgtaaacaacacttaatgccgaaaaaacagatggaaaaaccccaatgatgaccagggtgaaaaaacgccctaaatcaagagggatctaaacaagtgcgtatcctaaaaggggattttcaaaatacttgtctaaagaattgggaaaatg

SEQ ID NO: 294297 - DNA, 355 bp, Zea mays
gaattaccagctagacgtacgcgtacgcgtacgcgtacgcgtgcaagcctctgcttcagctgaccactcacgccacccggggatgggtacctgtgcatgttcctcgtgggcgcctaccaagaagttcctcggtttgtctgcacaacctcttcggcgggccgagcgttgtgcgcgtgtcccagtgcgactggccccactgtttcgccgtgacgcccgtccccgcaggcccgtactgtgccgacatgcttctcgcgatgcatcactagcccgaggtgatgtacgaagtgctgaagcagatgaccgactgcgccacggtcgtcgtcctcgcccgggccttcagcgcaatgccgtacct

SEQ ID NO: 294298 - DNA, 408 bp, Zea mays
cccacgcgtccggccaaccagaagagcttgcagttactgagagtgtgtgtgagagagaggatggggggcagcggcagggctgctctgctgctggccctggtggtggtggccgtgagcctggccgtggagatccaggccgacgccgggtacggttacggcggcgggtacaccccgacgccgacgccggccaccccgaccccgaagcccgagaagccccccaccaaggggccgaagccggacaagccagccaaggagcacaagccgcccaaggagcacgggcccaagccggagaagccgtccaaggagcacaagccgacgccgaccacgtacactccgagccccatactcacgccggcgacgtacactcccacccggaccctctcatgcctgccccaaccacatacactt

SEQ ID NO: 294299 - DNA, 312 bp, Zea mays
tacgcaccttttgatccacacgagaattctgttcgctttgagctcatcttacgacacctgcggtatggtttaactgatgtgccgacacatccaaactctccacctaacaatgtcttccgacccgatctgcccagctaagactgtccttcgacccaaaaggacgggcgatgccccgctttcgacccacggaataagtcaaataacgtttaaagtactggtatttcacttgcaccccgatgctaccacttatcctacacctgtcaagtcatttcacaaagtctgactatagtcaagcttaacagggtcttcttt

SEQ ID NO: 294300 - DNA, 465 bp, Zea mays
cccacgcgtccgagagtgtgtgtgagagagaggatgggtggcagcggcagggctgctctgctgcgggccctggtggtggtggccgtgagcctggccgtggagatccaggccgacgccgggtacggttacggcggcgggtacaccccgacgccgacgccggccaccccgaccccgaagcccgagaagccccccaccaaggggccgaagccggacaagccgcccaaggagcacaagccgcccaaggagcacgggcccaagccggagaagccgcccaaggagcacaagccgacgccgtccacgtacaccccgagccccaaacccacgccgtcgacgtacactgacaccccgacgccctccaagccgacgccacccacatacactaccgcccctacgccccacaaacccacaccaaaacccactatcactactacgacgtacaccccgacccccaagcctacgacacct

SEQ ID NO: 294301 - DNA, 433 bp, Zea mays
cggacgcgtgggcggacgcgtgggcggacgcgtgggggcagacatcgtctctactgatggacatatatgatttagcttgtggcgatacatgttatgtccactagagaaacgatattctgagacactcgccttcgcccaagactgccttatgattatcgctgatatggacatgtggtacatgcttctctacccttagaagtctttcactccgaatctcgggacgagattcttttaaggggggagggctgtaacaccccaggtgtttaccgtatgctcgacaacgagtatgaacttaagcacgaaatatcagtggataacacggattttaaattttaatcatcctcacttattgcgattttaatatcgcatctgttccgtttatcgcgagtgtgacatcatttttacttctatttattcgggctcttcccaaatt

SEQ ID NO: 294302 - DNA, 354 bp, Zea mays
acgtccactcgtacgcggacgcgtggtaaatataatatgaaataagaaaagctaaccgggggtggtgattcagatacttagttcactaaatggctcctgccaatcatgttcctttgatcattgtatgatatgatttatgatctgaaccacattaaacacctttctatctaacgcaacctgatggccaagtgcctggagatatgaccgcgggtcatcacgatgatgccttcagcaccttcttcagccagactggtgctgggaagcacgttccccgtgcaatcttcgatgatctataacccactgtgatcgatgaggtgctcactggcacgtaccggcagctcttgcaccctgagc

SEQ ID NO: 294303 - DNA, 333 bp, Zea mays
tacgatccacagatgcactcacatacattccttggttaagatctgggttcacttgatgacatggaggttgatcagcttgagaagccaaccgattcattcttaaatcacatacgatccacaaggtcacagcatatgcttgaacagctcactgatcttcagacgtggtagcaaatgatgtgtgaagcatataacttcctaacaagaaagctggatgagaccagcatccaacttcatgtccaagtgtgcgttcacggcgccaactgattactctactaccagcggtactccttgccacagccagccccataacatgttgtcctttgattattcttt

SEQ ID NO: 294304 - DNA, 380 bp, Zea mays
gggacgcatgcgtccgcctaagcatacacacataagagctggtcatgaaagacctcattgattgacgaccaggcgaggtctattctcataagtggcgtaccctcacaactatggacctgacacagggactctttctgaacacaatgacccattcgatgcgttggtcctgatgcaggagcctgttattcctggctcgttactgcgagcatgaacaatcggtcttatgcccatgattgaccagggtgaaaaggattacaagatattctcaacctgtgctgatgatcctgaatatcgtctctactacgacatcagtgagctgtcttctcatcgtcagcacgagatcaagcggctctttgaagattattagaaggatgataatt

SEQ ID NO: 294305 - DNA, 335 bp, Zea mays
cggctggacggacgcatgcgtccacgcattcagaccctcactgaccttaccgctagcccagcctgatctaatgttaagggagcgtttttcagaacgcctgtcggcacccgcaagatggcgaactatgcctgctctctgcgaaaccacaggaaactattgtatatgctcgaaccgatactgacgtgcaaatcgatcgtctcacttatgtatacgggcgaaagactaattgtaccatctattagctcgttccctacgaatgttccctcactatagctgtatcccacacaagttctattgtctaaagccaacgattataggcatcttaggcgcaatat

SEQ ID NO: 294306 - DNA, 318 bp, Zea mays
gcggcggctatggtggcgggcgccgtgacggcggttatggcggcggtggcggctacggggggcggcgcgagggtggtggcggcggctacggaggcagtggccgctaccgcggtcggcgcaagggttgtggcggcggctggagggactgatgtgtgggcccatcctggcttctggcgagttatcttatatatctatagtattgtgttaccgatcgcttctgtcaccgcgttagtgttcgatctacctttggattacgtgttggtacccctgttgttccctttggctgctcccgctatgaaacgagacgagagaataatg

SEQ ID NO: 294307 - DNA, 360 bp, Zea mays
ggcatcagctgagctgagctgagctggtccatggagagggattactcgtccacggacggcgggggcagcgagatgcccgggaagaaggcgaggaagccctacaccatcaccaagccccgcgagcggtggagcaccgaggagcacgcccgcttcgtcgacgcgctgctcatgttcggacgcgactggaagaagatcgaggagcatgtcggcaccaagacgacggtccagatacggagccacgcccagaaatacttcctcaaggtccagaagcttgggctggccgcaaggctgccgccgatgtacccgaggcgccacttcgccatgcagcagcagcagagctcggtggccgatggtagcagc

SEQ ID NO: 294308 - DNA, 401 bp, Zea mays
  unsure (1)..(401): unsure at all n locations
cgacccacgcgtccgcccacgcgtccgggcagatcccactgataaagctgcacatagagaagaaagtctgtagcgagttcaacgattggctcgtccatattagaagaatggccaagcagattgggcaggcctccataagccaggcgtcgttggcttaccaaaagggcgaggagatgtgtgcacggcagagggaagccgaagcgcatagccatgctggaccagatgagcatctgtatgccttggacctggagaacacggaagaggaatcgacgctntattttgatctcacaccggtttatcgggcgcaccacatgcacacatgtcttgggatggaggacaagtttagagactattactacaagaacaggctgatgcaactcaacttgtacatgcagatcttc

SEQ ID NO: 294309 - DNA, 410 bp, Zea mays
gaccgactcgtccgcccacgcgtcctatcacttgccctcccttctcacgctcagtaacgccagtccatacctagtctagctcgaatcattatccatggctgacgagaaccaccaccaccaccacctgttccaccacatcaagcacgaatagcacaccctgcactgcctttactgcaagtccagcaaatacacgcacgccactgtgaacccagtcacatcaccgtccagaaccagttcaacaagtacaagaacgaggacaagcaaccccagcacaagcatcacctctgcaaggccatctccatcgtcgacagcgccttcgcactctactagaatcacgaggcgaagaatgacacctatcacgcccaccgtcacaagatcaaggatgatcgtccctcatctgacatcctcat

SEQ ID NO: 294310 - DNA, 391 bp, Zea mays
cgcgtccgccacgcgtacgcccacgcgtccgcaaggttctgaagcaggtgcacccggacatcggcatgttctccaaggccatgtccatgatgaactccttcatcaacgacatcttcaagaagctcgccggcgaggcggtcaagctcgcccgctacaacaagaagcccaccatcaccttccgggagatccagacctccgtccgcctcgttctacccggcgagctcgccaagcacgccgtctcggaaggcaccaaagccgtcaccaagttcacctcgtcctaagctcctttcgagtatgtccttaagcgccgtggcgccttttgactgtatggaatggttggcatctgaaagttgatctgaacagtgcaatctataattctggcatactattc

SEQ ID NO: 294311 - DNA, 239 bp, Zea mays
acccactcgtccgcccgcgcgtccgcccacgcgtcctctaggttctgaagcaggtgcaccccaacatgggcagctccttcaaggccatgtccatcatgaactccttcatcaacgacatcttctagaagctcgccggctaggcggccaaactcgcccgctacaacaagaatcccaccatcaccttcctgcagatccagacctccgttcacctcgttctaccctgctagctctccaagcac

SEQ ID NO: 294312 - DNA, 441 bp, Zea mays
cccacgcgtccgcccacgcgtccgcggacgcgtggggtttgatctgcccgtcgttttctggtcttttaattaaatccctgatgcacagtcatgtattgatctggtttggtgttcctagatgcgtgtaataaatggggaaaaaccatgtcgtaataaaatcaatttatttttaatgaaaataatacatagccggattacttctctaatcttacgatttctggtctatttcttattaaacgaataaggtctgaatcaaggtcagagccggagatgtgcatgggtgcatctcatatggcacatcgcagacaaaagattgcatagttggctccgatcctatttggcaagtgaatcagagatggcaatggcccaatgggctcggatcctatttggctagtgattagagatggcaatgcccaatgggtacccgcgatccgatacttt

SEQ ID NO: 294313 - DNA, 437 bp, Zea mays
atttcttttcgctgatgtcatctacatatgtcacttgttaaatgattttataatggaaatgtatggttgtgaatttgtcaatttatacttaggcccgtttgttttgttggaattgaattccattataataatcataatttagacaaactaattaagttaatatatttatatatttaatatattagtatattatcctgaatcatatgagagatatagttatacgctacacgtatgctatagagaagtaagtataagagtgtgctataagttgtatattagaaaagtagcatgtaaatttatagaaccaatttttatctctcaccctatgaatttgagatagacttatatataaactttgaaaagttatggaatgtcacattctaaaaaatagcctactccattagttagattccaattcttcgaaatgaagaaacaaa

SEQ ID NO: 294314 - DNA, 316 bp, Zea mays
tcggacgctgctccgggctgctgatctgcgcctccacaaggctttggcctctgtgttgaaaggggtaagctttaccttcagccgtgggtaatgagaagtcccacatgaacattgtggttattggccatgtcgactctggcaagtcaaccaccactggccacctgatctacaagcttggaggcattgacaagcgtgtgattgagaggttcgagaaggaagccgctgaaatgaacaaacggtccttcaagttctcctgggtgcttgacaagctcaaggctaagcgtgagagaggtatcaccattgatattgctctgtg

SEQ ID NO: 294315 - DNA, 371 bp, Zea mays
cccactcgtccgaccactcgtccgtccactcgtccgcccacgcgtcccgaagagggggaggctgtatcaagggcatcccaagaagcagctcagaaggaagctgctcttgcaaggaggaggcaagagaaggccatggctcttggagctgaacctgagaaaggaccacgtgttactcgggttctcataagattcccaactggagagcgcacagagcggagattctacagttctgcaaccgtcgctttcctctatgactatgtcgattctctagactgcatgaaagcgcagaagtacaccctagtttcgaattttccacgcgttacatatggtccagaaaagcaatccctgacgcttgaagaagcaagcttgca

SEQ ID NO: 294316 - DNA, 359 bp, Zea mays
  unsure (1)..(359): unsure at all n locations
cggacgcgtgggcggacgcgtgggcaatcctccttattgttccacacaaacagaaacacgcagggtctctgttctgttcatcctcacactgattgagttcttgtggtctctcaaccagcatctgatacccaattcctcgcacaaacctgccacacgcaatgtccaagaccgagagcaggaagctgtcggacgactatgaggttgcggaggtcctcggccgaggcggattctcgatcgtgaggcggngagtgagcaagtcagaggggaaggcggcccaacaggtcgccataaagaccctgcgaaagctgggcccggccaccacgaccggcgggagcacgccgtcgcagcaaggctcaaat

SEQ ID NO: 294317 - DNA, 235 bp, Zea mays
cccacgcgtccgggggcgaagccagaggtaactctgttggaggctcgaatcgatacttacgtgggaatcggtcgtctgacttgggtatagggactaaagactaatcgatccatatagtagctgtcaccctaataaggtttacttaggatagctggagcctacacgagtactatcgggtataagccaatgattagaggtatttggggcgcatcgccctcgacctattctcaaactg

SEQ ID NO: 294318 - DNA, 338 bp, Zea mays
ttgactttcacagacccactatgactgcctacgcccatatagatagagaggggttggcctaaggataataaaacgtttgaggaaggttaccgcttacgatatacctatatatagatagtgtagtgttgtagtgtgttaagtagatcggtcccatataaagttgcaatgtatctgcaatgagttcatctactccggggtgttctccgcacttctcaagaaagaaatagttggaaattccccggatcgtctgcgcttggcttggtattcttatactgaatcgctgttggataaaagaaagcataaagtttttaagcctgcgttctcgttggcgaaaccac

SEQ ID NO: 294319 - DNA, 435 bp, Zea mays
  unsure (1)..(435): unsure at all n locations
cgcacgcgtccgcccacgcgtccgctgtaaaaggattggctctgagggttgggctggggggttccggccccgaacccgtcngctgctggcggaatgctcgagctgctcgcgcggcgagagcgggccgccgcgtgccggccgggggacggaccgggaacggccccctcgggggccttccccgggcgtcgaacaaccgactcagaactggtacggacaaggaagaaaatgatcctgagaaaatgctttcacgtggaacagaaattactctttatttgagagatgatgacaaatatgagtttgctgaccctaccaagattcaaggcttagttaagaactactcgcagtttgtctcattccccatatatacatggcaggaaaaatcaagaacacatgaggttgaagaggaggaaagatcaaaaaggtgaagagctactt

SEQ ID NO: 294320 - DNA, 156 bp, Zea mays
tcaacaaccctcgccaccgactaatggttctactgatggaactggatatacgaaactttatgcagaaccctcagctgcacgagttccaattccacaactttccgacttcttacctacgctgagcttctcatcgtgctgcacaacattatggcttac

SEQ ID NO: 294321 - DNA, 270 bp, Zea mays
gttcggtttcgtgggtgagcggatcgagatggcagcgtcggatgttgagtaccgcggcttcggcggctgcctcgcctgggccacggacgaccactccctccacaacgccttcagcacctactgcgaggtcctcgagtccaagatcatcctcgatcgggagacgcagaggtcccgcagcttcggcttcgtcaccttcttcacggaggatgcatttgtgaacgtcatctatggtatgaactgcaatggatctggactgtcgcaacatcaccg

SEQ ID NO: 294322 - DNA, 149 bp, Zea mays
tcgagatattctgggccttgaggatcactttggtgacatggacttcaaaattgcagggacaagggaaggtattactgctattcagctggatataaaacctgctggaataccattggacataatatgtgaaagtttatagcctgcactta

SEQ ID NO: 294323 - DNA, 330 bp, Zea mays
tcgccactcgttcgggcaccaccaacgacgactaatacggccgtggcaccggctgcgggtagggcagcaagccctctggcgacgactcgtacgccggcggcggctgtggcgggtacggcaagcagtccggtggaggcgcggacgacgactgagagtacggctcctcccggtacgactcggagaagtacaggaaggaggagaaggagcacaagcacaaggagcacctcggcgagatgggctcccttgccgccggcgccttcgccctgtacgagaggcactaggcgaagaaggacccgtagcacgcgcagcggcacatgatcgaggagggct

SEQ ID NO: 294324 - DNA, 384 bp, Zea mays
cgggccgacccacgcgtacgcacacgcgttcgaccacgcgtccgtccactcttccggcaaccggtccaacactttgacgcgcagcttcagcaatggctgcctccaccatggcgatctcctccactgcgatggccggcacccccatcaaggtgggttccttcggcgagggccgcatcaccatgcgcatgaccgtgtgcaagcccaaggtcgctgcgtccggcagcccctggtactgtccctaccgcgtcaagtacctgtgccccttctacggctagccccctagctacctgaccggcgagttccccggcgactactgctgggacaccgtcaggctgtccgcctaccccgagacattcgtcaagaacctgcagctgtaggtgatcc

SEQ ID NO: 294325 - DNA, 237 bp, Zea mays
tcgcccactcgtccgtccacgcgtccggatagttagagagagagagagacaggatcgatcgagagacggtcatgtccttttggctgtttggtttattcatatcacaacttttgagtgtatacaagattatttatgtggcaaacctcaaagattgtaaggcgatacatgccgaaaaaaaaaaaccttgcggagttaggatattcacggttttaatgttcgtttgaaccttgtttttca

SEQ ID NO: 294326 - DNA, 393 bp, Zea mays
accacgcgtccgaaaaaaaaagaaggctttaagcgatggacctgttcatggctggacgacgcgctgcgtcgcctatgctgacggcgccggcactcatcatggcgtgtggagcataatcacccggtccatgttccagagcatgctgatccaccgtggctacagatggtgccagggcgccttatacacctacgacgcctttatcgaggccgtcagcaagttccccggctttggcaccaccggcgactagcaaacacgcaggcgggagctcgacgactttattgtccaaaagttccacgaaaccaccagtggatgggctactgctcctgatggaccgtttgcctggggatacttgccggtgaaggaactaaaacagacggacccaccctactatgg

SEQ ID NO: 294327 - DNA, 127 bp, Zea mays
gttatagatcgcgacagtcgtccgttgactctttttatcataaattagataaggtacacgaggttgactaattacttttgaataacttcacaaatcatatggaagaaccatagcatttcgcgattca

SEQ ID NO: 294328 - DNA, 415 bp, Zea mays
cccacgcgtccgatcaagggctgctgtgtgggtccaaagaagagggtggtgaccgtccggcagtccctcctgaagcagacttcccggctggcgctggaggagatcaagctcaagttcatcgacacatcgtccaaatttgggcacggtcgcttccagactaccgatgagaagcagaggttctttggcaagctcaaggcgtaaggtgctgcggtgcagcgaagtcccatttctcaaaatcatcaaactgagatactttggtttgtaaccttgctgtaccaagttttgtagccatggtccggtcgtctatggattgctccatgcttcagaactgcactgtctatgttttgcgctatctgggttgttaatggcccaaaaaaaaaattaaaatttttatatgttttcctacattaatatt

SEQ ID NO: 294329 - DNA, 159 bp, Zea mays
tcgggtacgcctggactgacccgtgaactgacgcgtattaataagcggaggagaataaacttacgaggagatctctagtaacggcgagcgaacctagagcagcccaacttgagaatacaacaggcctcgccttctaaattgtcctatgtaaaggcctcc

SEQ ID NO: 294330 - DNA, 457 bp, Zea mays
cggacgcgtccgacccacgcgtccgcccacgcgttcgcccacgcgtccgcccacgcgtccgcaaggctgtgctcttcgaccaggccacctacgataagctgctctccgaggtgcccaagtacaagcagatcaccccatccatcctatctgagcgcctcagggttaatggatccttggcacggagggccatcaaggatctgatggcaaaggggctcataaggatggtctttgttcattctagccagcagatatacaccagggcaaccaacacatgaggggtgttttgccgtctggggaccgtatctaatctaaacgacttgatggtgctattatatcaaggttaaattaatcggggctcgaacaatcttactggtgggttgaatggtgaaaatttttgagattattgtactattttaagatcatgtttttataacatttaagaccatggtgccatccc

SEQ ID NO: 294331 - DNA, 397 bp, Zea mays
  unsure (1)..(397): unsure at all n locations
gcgtcgccacgcgtcgacagcgcactctacattgcttctgagttgccgcgctacacgccactactaaaggccagccgactatggcggatcagcctctctacctacgcctgtactgagtgcgccgtgagcttgcatcccacggcgatctaccgctggcggggctgcctcagcgctgagctggcacggcgctgtctctcccctgcctaagctgccgttcctccgccgactgctgcggctcctcgccgcgtcgggcgtgtacaccgtcgacaagcagagcacggaggaggagcggtaccgcatcagccncgtgtcctacctgctggtggacggcatccctcacgaggaccacatgaaccacaccgatctggtgctcacctgcacctcgacgcgctacatc

SEQ ID NO: 294332 - DNA, 218 bp, Zea mays
gatcagcctttctaccccctgcgcctacgttgaacaggtacctttaggtacccacacaatgcctaaactaatttttgatattgataagagtgcttattataaagcaattcttgcaatttttttaagaattgatttttgcatttttaggtgtcaaaataaagaaaacccatcctagtggatccgtgtggtaaggaaaaatgggtaatctattccttaac

SEQ ID NO: 294333 - DNA, 459 bp, Zea mays
gcaaccggtccaacactttcacgctcagcttcagcaatggctgcctccaccatggcgaggtcctccacggcgatggccggcacccccatcaaggtgggttccttcggcgagggccgcatcaccatgcgcaagaccgtgggcaagcccaaggtggcggcgtccggcagcccctggtacggccccgaccgcgtcaagtacctcggccccttctccggcgagcccccgagctacctcaccggcgagttccccggcgactactgctgggacaccgccgggctgtccgtcgaccccgagacattcgccaagaaccgcgagctggaggtgatccactcccgctgggccatgctcggcgcgctcggctgcgtcttccccgagctgctctcccgcaacggcgtcaagttcggcgaggccgtctggttcaaggccggctcccagatcttcagcgagggcgggctggac

SEQ ID NO: 294334 - DNA, 355 bp, Zea mays
cccacgcgtccgcccactcgttttatcttttccaacctcggcaagctatactgcttattgatccgttttagcattaccaaaacacttgataggtatgaaaaaaacagatattgacgaccacatactactgcacagatcaaggagaactagttaatccacaccagtcttaatgaatactttaagctgaaatcaaagcttacaaaattacatacgactcatatgaatatgcttgatgaaaatctatattcactttctgtaaaataacttaagcaccttgagaagcagcataattcatccttaatgcacataatatccacatagtcacaacatatccttgatcagctaactgatcttc

SEQ ID NO: 294335 - DNA, 232 bp, Zea mays
cacacgccttcgtacccactgcgcctacgttgaacatgtacctttaggtacccacacaaggcctaggctaatttttgatattgataagagtgctcattataaagcaatacttgcgatttatttaagaattgaccaaagcatcattaggtgtcaaaataaagaaaacccatcctagtggatccgtatggtaaggaaaaatgcctaatctattcacttaacaaacatgaaaaat

SEQ ID NO: 294336 - DNA, 380 bp, Zea mays
atgtagcacgcgcgccctcgtgaacgcagcttcgacgcggtctgcctcgacgacttgcgcggccgggctgagacaatcacgcgcgcccttgtggccctaacgcactaacgtaggtagccgctgacggtgtgctgaagcctctgttactacctcgaatgctcaattagaggcgttcactaataaaccgactcactgaaccttcgctccactggcttttaaaccaagtgcgatgaccacttgtgcgaatcatccgttgctgtcctactatgctgaattactatcgcgcgccggtcataactaccgtaaaactaacatgtctaacgacggcataaacgcagcttacgttacctattgctccgttaacacatctacacttactg

SEQ ID NO: 294337 - DNA, 450 bp, Zea mays
cacataaaaccagtgcaagcagaagcagttcaatggcgagcagcaccatgtcggtctgcgtcacagtcttcggcggcaaggcagtgaacgtgccgtcgtctctcttcggcgaggcccgcgtgacgatgcgcaagacggcggcgaaggcaaagccggcggcgagctccggcagcccgtggtacggccccgaccgcgtgctctacctgggcccgctgtccggcgcgccctcgagctacctgacaggcgagttcccgggcgactacggctgggacaccgcggggctgtcggcggacccggagacgttcgtcaagaaccggtagctggaggtcatacactcccgctgggccatgctggacgcgttgggctgcgtgttcccggagctgctcgcccgcaacggcgtcaagttcggcaaggccgtgtggttcaaggccgtgtcgcagatcttcagcg

SEQ ID NO: 294338 - DNA, 458 bp, Zea mays
  unsure (1)..(458): unsure at all n locations
cccacgcgtccgcccacgcgtccgcttccgtaaagatggccataactggaagaaaaagagggatggcaagactgtccaagaagcccatgaaaaactaaagattggtaatgaagaaaaggttcatgtgtattatgctcgaggagaggatgatccaaatttctttcgcagatgctactggctacttgacaaagagttggagcgcattgtcctcgtgcattatcgtcaaacatctgaggaaagtgccttaccaccttcgcatgtagaagctgaagttgcagaagtgcctcggatcaatatgattcattacacctcctcaacagattcagcctctgctcatactgagctatcttcttctgctgctgctgcaccagaagatatcaactcaaatggtggtggngcggtttctagtgggtatacttctgtatcttctttgggtgagtttgcagaaaccgacaatc

SEQ ID NO: 294339 - DNA, 360 bp, Zea mays
gcgcggactcttggttcgacccatgctttcacttataaccgttgcagactcacaaagtcaggggaccatctggagctgaacatgtactagtgaattcaaaagcttaatataagtataactctatgctagtcaactaacatgacaacatgctattcgtacagtgcatttgcaactagcataagttattgtaaaagtcgcttatatcataagatatgccgcattacgagccattgctaaaagtgatgtacagctaatatgtatactccatatatcacctatgcagcatcatgtatgtaaacctcctaaacaaagacatctgcaagatataattataccgcatctacataaacttcgacatga

SEQ ID NO: 294340 - DNA, 319 bp, Zea mays
ctgccgcccctacgctccacaaactcttttcaaaacccactcccactccttcgaggtaggatctttatccccaggcgttcgacacctaagcctaccccgtctacgttcactccaagcctcaaacctacgacgcccaagcctacctcacacgacgtacacttattcccacaagtcttctacacctaagccgacccatcctacgtacactccaaaccctaagccaccggctaccaagcctaccacgctcaaaccgaccccgtcaacgtacaccccttcctcaaacccttcgacactcaagccgacctacacgacgtacact

SEQ ID NO: 294341 - DNA, 303 bp, Zea mays
gccacgcttgcgctcactcgtgcgtggacgcgtgggttcgaggctgcccgccatggtgcgtcttgcttgcggtctgatccaatgacaccttccattggggcgcgaacacgctatcgagcgtctaagcaatcagctagctgagtcaccatgcgctcacgcgtaatcagtcttagacgcgttcagacataatccagctcacgatagctatgcgccactggattacaaaccaatcgcgatgtccagttgtgtgaatcatcaggtcctctcgtactaggttgaattactatggcggcccgtgtataa

SEQ ID NO: 294342 - DNA, 396 bp, Zea mays
aacacgcgtgcgtgcacacttccgtagtctacatcgctccatgatccaaaagctgctcgactggtacacctgatgcgggtgtgaatacaacgcgtcgtataccgagttctctcctaccgattttcaagggccgccttggcgcacagtacaccgctgcgatgtgcgatagctgttccagtcgatggaccctacctgcggctgaaccgactccagggttggcggaccgttaagcataaaagataactcttcccgaggccccagccagcgtatccatgatttctaacatcgtcagctgcattcacgtgccggctctggaaatctcaacgcgactccctttaagacgacgcgcgttatcgctctatgtgcacagtttacctacatcattaagatctgctt

SEQ ID NO: 294343 - DNA, 316 bp, Zea mays
ccctcgcgtccgataaaaaaaaacatattaataaaacaagaggaaaaaaaacttacgggggggacacttagaatcggggtgcgaaccaagatcagaccatcttgcgattcgggcggtctcgccgtccgaattgttgtctggagaggcgttctcttggactgaccggtcctaagctctgtggaaaggtacgcctgcgacgcttagtgccccgtcctgcccggaccctgtctctccacgatgcgccgtcaactagtcaggtcgtttgcgaatgcaccctaaatcatgcgggcaactctgtccatggcttaatacatgc

SEQ ID NO: 294344 - DNA, 417 bp, Zea mays
aggtttcgcaggatcacttcacttaacttatttcatttcgagaaagagaacgattcttgtgcgatctagaaagaacgattcttcttcgaagcatgaaccaacccgcacctgccctcaaagcagatacgaatcacggaaactttgcctcttctgaagcgcagaaccagaaaacccacggcctgttgcttgattagaaaaaggagatccacggcctgtgagtaactacgccatgttacgaatcacagcctgacttgctctagatgaaagcataggtagtgacgacctattgttttcttctcagcggacccaatgagtaactacgccatgttacgaataaaagcgagggaaaatcggatgagcaacttttgcagctatatgaaatgcactttggaaaatcaggtcttgaggacgaaaaac

SEQ ID NO: 294345 - DNA, 390 bp, Zea mays
cggacgcgtgggcggacgcgtgggcggacgcgtgggaaaaaaaaaaaaaaaaaaaaaacggaaaaaaaaaaagagaaaaaaaaaaaaaacaatataaaaaaccacaaacaaataaaaacgaccatccatctaaaaacccctactttacggccccctacattcaatacactaaccttcattttgcccacctaaactagtacactcccccacttttccaacctaatcaccttgcaaaaccttcccctttccccacttattccccttgctaaaaatccccctttttccaacttccccaacagctccaaagtctgaaccgacagtgcttcccaccctttccccagccttaatgcccaataaaacccccccttaaacgcacctttaaacctgcac

SEQ ID NO: 294346 - DNA, 433 bp, Zea mays
gagagagaggatgggtggcagcggcagggctgctctgctgctggccctggtggtggtgggcgtgagccgggccgtggagatccaggccgacgccgggtacggttacggcggcgggtacaccccgacgccgacgccggccaccccgaccccgaagcccgagaagccccccaccaaggggccgaagccggacaagccgcccaaggagcacaagccgtccaaggagcacgggcccaagccggagaagccgcccaaggagcacaagccgacgccgcccacgtacaccccgagccccaaacctacgccgacgacgtacactcccactccgacgccccccaagccgacgccatccacatacactgccgaccctacgccccacaaaactcacaccaaaacccactgccactcctgcgacgtacacttcaagccccaaacc

SEQ ID NO: 294347 - DNA, 444 bp, Zea mays
attcccgttcgacgcacgcatgcggcacgcatccgcccacgcgtccgcccactcttccgggatatcatcaaaacctgcatgaagcaccattagtagaaattgtagcccatgttgcaaaagcttaatgttaccatgaaggctgatgacaaggagttgattggcaaagctttgatgaagcgtgttatgcaaacgtggctaccagccagcactgcacttcttgagatgatgatattccaccttccttccccggcaaaggctcaaaagtatcgtgtggagaacttgtatgagggaccccttgatgatgtttatgcaactgctatcagaaactgtgatccgtatggccctcttatgctgtaatgttcaaaaatgattccaacatctgacaagggcatgttcttttgtcctttggtcgtgtcttctcatggaaggttgctactggtatta

SEQ ID NO: 294348 - DNA, 262 bp, Zea mays
cggacgcgtgggcggacgcgtgggcggacgcgtgggatagagtactacagtacagtatatatatatatatgctgtactgcaggccacacatacatatataatagagtactacagtacatgatatagatgtatacatcgagttctaaatgctccacgaagcgggccgatattattgaccattcaagcgaaacatttacatagcagacgaccgattctactgcgagaaccatgaaacagaattttggagcgaatcctgtctcca

SEQ ID NO: 294349 - DNA, 430 bp, Zea mays
  unsure (1)..(430): unsure at all n locations
ggcgtggccgaggtgttctgcctcgtcgcgctcctggagttcctgtaccaggaggcgcccgacgcgatgcgcagcgtcgggtccgcgtacgccgccgtcgccggcgggctcggctgctttgtggcgtcggcgatcaacaccgcggtggacgccgcgacgcgggacgatgaggaggggcggccgtcgtggctggcgcagaacatcaacgtgggcaggttcgactacctgtactggctgctcgccgtgctcagcacagtcaacctgctcgttttcgtcttctttgccaagcggtacaagtacagggtcagggtcgacgtgccgaccacagttgctgttgataagcagtagctagccgctagcgccattacaaggatttgagtttggatgtgctgtaactattgattactgggaataccatanaacatagatc

SEQ ID NO: 294350 - DNA, 367 bp, Zea mays
cggactcgtgggcggactcgtgggtttgattattggttttgtcacagaatactacaggagcaatgcatacagtcccgtgcaagatgttgcggattcgtgcagaactggtgctgccactaatgtcatttttggtcttgctcttggatacaagtcggttatcatcccgattttcgctattgctgttagcatctatgtcagtttctccattgctgcgatgtacggcattgcagttgccgctcttgctattgatgcttatggtgccatcagtgacgatgctgatgctattgctgagatggctgacatgagccacagaatcgctgagagaactgatgctatcgacgctactggcaacagaactgctgctatt

SEQ ID NO: 294351 - DNA, 203 bp, Zea mays
ccacgcgtccacataagctctaatactgatctcactgatccactatgactatgccaaatgcaaactctccgagggtctctgttgcccagcttgttatctttctgctatcactcctcagcactgtcgcctgccctgacgacgcacaaaactgcagctgccaaccaaacgtatgctgcaacaagtttggctactgaggcacgacc

SEQ ID NO: 294352 - DNA, 348 bp, Zea mays
gcggagcgggaggccttcacagaccgtatcactcttctaccattatcttatgttaactgtgcgagtggtcacactcctgacgggacccgaaagatcatctactatctctgagcctatcaaatccatacgatactctcgtgcaggctcgaagccatacttacgtgcaaatcgctcatctgtcttgtatataggttcgatacactaatccaaccatctagtacttggttcactcctaactttccctcacgatagctgtagcccacactagttctatcggctaaagccaatgattatatgcatccttttctcaacgctctttacctatcttcatactttacctagctatta

SEQ ID NO: 294353 - DNA, 469 bp, Zea mays
tccacgcgtccggtcccgatgacgccttcgtcgtggtcgtcgtcctcaaccagccgctgccccgcgtcgctcccctcctctggtccagagcgtctgtgcgggtgtgcgcggacagtggcgccaaccgcgtcttcgacggcatgccggccctgctccccggccaggaccccgacgaggttcgcgcgagttacaagccagatgtaatcaaaggggatatggactcagtaagaccagaagtgaaggagcattattccaacttgggcaccagaattgctgacgagtcacatgaccagtacacgaccgatttacacaaatgcatagctattatagctgataattattctgccactaacaaatctaaccagctcagcatcttggttcttgtagcacttgggtgaaggtatgatcacgagatgggatacatcaatgggctccatctgtgtccaagcataaatatcttcctcctatc

SEQ ID NO: 294354 - DNA, 477 bp, Zea mays
cggacgcgtgggcggacgcgtggggtttaggcacttatagtgcaagggcttccacggtgccccctgcagcaattgttgcaacaaaagctatgttgtctgacccaagggcagagcctcggtatgcagagagagtgccatatgttgtaatccatggggaaccaggagctcgtcttgccgacatggttattgatccttatggtctgctagaagttggctccccttatagattaaatgaacaatattacataaccaagcagattattcctgcattgcagcgtgtttttggacttcttggtgctgacctgaacaagtggtttaatgagatgcctcgccccatacgatcaactcttgcgaaacgccaatttgctgctgctcatggttcattctctcgtgatggcagtttcatccgattaggattgaataataaaacctcagccaaaggaggcagaatagatacatactacatgtcaagccact

SEQ ID NO: 294355 - DNA, 246 bp, Zea mays
gacgtcttcatcctttaaccatagcaaattaccttgcttcctctcctttaattgttgcttatgcattggctttcacacttaatattgattcttaaaaaaaacctattgtcatctttaaagattgaaaaaatgtttacttcctatatgttttgccatccacattaaacatatcctaagttgtcaagtcaagttttctcccttacatgttcaatatcacttttaattcaatcaccaaaatgaaattct

SEQ ID NO: 294356 - DNA, 343 bp, Zea mays
gtgacgcgtccgacgtcctccgtctcgttgggcgcgttcgtgctcgcgacgcgcgtgatcacgcgcttgatcacgctcttctagaagctgatgcacgagcagacgatccgggagacgatccgctacccggtcaagttctacacgaagtagtacaactgggacgtgatctgcaacatgttgggcatcttcttcatcctctactgcatccagtacggcgtcgtgatccacgccttgatgcacaagttgaagccgaacgtgcaggagtacttgcaggagtactagttgctgttcgacttcctgtagagcctgcacaagagcctgttcatcttctacgacctgttcg

SEQ ID NO: 294357 - DNA, 432 bp, Zea mays
gagagagagagagcacgggatgggttgaggaacgagatggagggagaaagtgggcagcctgctggatcttggcatctcgccgccgccgctcacttccgctccacctgtttggtgcagtgtgggctagttatctactagtagtaccttcggccttcgggccagttcaagacttgccactggtgcagattccgttgatcccacatctgaaaagcaggggagtcgacgaccctcatggttttgaggataatatattgcatctctgcactgttctaagcgtgaggaagtaaagcattatttattggttggagtagtttctgttgctatccggcaccaatggcgactttggttcgtcatgattcaaggcagtactcttggtggtgggttagccatatcagccccaagaactcgaaatggctccaggaaaatctcagc

SEQ ID NO: 294358 - DNA, 216 bp, Zea mays
ataaaaacatcccatatagcgatgaacgtttctgttacttgaggaggggtgacaacatgctggcgaaggtcgatacttccctactcaggctttgaactgtgcatttaaggactgctttaagacgttgatcaacttcgccaatgatagggatcgctatagcaagtgggaagctggtgacctggcctttacaggtgctgctcatgcttactctatggt

SEQ ID NO: 294359 - DNA, 405 bp, Zea mays
ggccccgtcgcccgtccccacgaagccgcctttccccgccgcttccatcccaatctccgtctccgtctcccccgttcccgttcccgcgtccgtctccgtccccatcggcgccgacgggtttgggtctccgcccaacacgctcacggagccggtatgggacaccatcaagcgagacttagcacgcatcgtcagcaatctcaagctcgtcgtcttccccaatccctaccgcgaggaccccggcaaggcgcttagggactgggacctgtggggtcccttcttcttcatcgtcttcctaggcctcacgctctcctggtcggcttccgtgaagaagtctgaagtatttgctgttgcattcgcggtcctggcagctggtgctataattctgaccttggaatgtctgcttct

SEQ ID NO: 294360 - DNA, 343 bp, Zea mays
gtaaactccgtccaaggctaaatacaggcgagagaccgatagcgaacaagtaccgcgagggaaagatgaaaaggactttgaaaagagagtcaaagagtgcttgaaattgccgggagggaagcggatgggggctggcgacgcgcaccggccgtatgcggaacggctcctgctggtccgccgatcggctcggggcgtggaccgttgtcgcccgcgccggcagccgtcgtcggcgcggacggtatccgcgcgcctatggcgcgcccctcggagcgcttcgccgcaacggcctgcgagctccccatccgacccgtcttggaacacggaccaaggagtctgacatgcg

SEQ ID NO: 294361 - DNA, 420 bp, Zea mays
gcaaaagcaatcgcgaaagcgagcgcgaggcgagtcgggcggcgaacggggcggatggggcgcgagctgcgcggagtccgcgacgacctattcgagctggggcgccacctgctcgacatcggctgatctctgcacccggttgtcaaaccgggccacaccgactcacctgcacgtacccgcacggaccgccggcgtgcgaaccggtatcggggacagcacggtcggtgacgctgcaccacttcgtgcgctaggagcttggctgtctgatcctgaccagatcagaggctcaagtccctgggcgatgagcgcaatatggtgtggcgcggcatcagccagggcaagctcgtggaccccatgctagagcgcctcaaggagtgggacggcaagccgttgcccatcaacatcgagtcaaagaacgcc

SEQ ID NO: 294362 - DNA, 434 bp, Zea mays
cggacgcgtgggtttggaattaggaaagtgagcatacaacagggacaagagccagaaagggtggtggacaatgagctatgggggtaccaagttggcttattcggggaaaggaataacatctacacacaagattcaaaaattactgaatggacaagtatcgacaatttgacatatagcccacttacttgactacattttccacaccagtgggaagtgacgcagtgacactgaaccttagtggtatgggtaagggtgaagtatgggtcaatggagagagtatcggacgatattgggtctctttcaaggctcctagtggcaatccttcgcaatcactgtatcacataccacgagaatttctaaaccctcaagacaataccctagccctttttgaggaaatgggaagtaacccacagctaataacagtgaacacaatg

SEQ ID NO: 294363 - DNA, 292 bp, Zea mays
attccctgctcgacgcactcatcctaatccccctacctacctcaccttcaggtttcccatctactacttctattacaccgccagtctatcttccaaccccgagacattcaccaataacctctatctttaaattatccactcccacttaaccatactctactctctctcctgcatcttcccctatcttctctcccgcaacttcttctatttctactaaaccttctatttcaatgccttctcccatatcttcatccataccttatctaactacctctacaaccccatccttatc

SEQ ID NO: 294364 - DNA, 362 bp, Zea mays
  unsure (1)..(362): unsure at all n locations
cgggtcgaccggcgcgtgcggaccgaataaccacccgtctgccgctgtgcctcacggtttgcaccccgcacgagacccgtcgtggaggggcacgtgctagatgcggggcgcctgcctctcgccgccgatacggtgcctctcgcggtctcgctccccctcgcagacatgcagagccagatagtgtgccacgggtgcaggacccttctgttctacccaagaggtgctccgagcgtgtgttgtgcggtatgccatgtggtcaccaatgtgccgncttcagcaatggagatggctcgacttatatgtggtggctgccagacattattgatgtatgctcgcagtgcaacaactgtaagatgctcatg

SEQ ID NO: 294365 - DNA, 421 bp, Zea mays
tccacacgttctacactcgtgcgaccaggcttacgtttattcgtccgcccacgcgtccgggggggcgggcttctgctgatcgtacggatcaggttcgggatccagaggttctacgctgctcggtgttgtgggtgagccgatccagacggcgacgtccaatgtcgagtaccgctgcttctgaagcgacctgcgctggaccacggtcgaacactcaatacacaacaccttcagcacctaccgtgaagcgctcacgtggacgataatcctggatacgtacagacgcagacagacccgagggttcggttgaactaaccttgtccacgcaggagggctaacgcagacggcctcgatgtcatcaactgcaatggatcaagtacgtcgcagcatgaccgacaacgaggcccattcccgccgacgacca

SEQ ID NO: 294366 - DNA, 317 bp, Zea mays
ttttctcttttttccattcatgattattctatttattctgacctccatacctcgagcgagagtttacacataagaggccactctttaacatgaaaaaaaggaataatcagctctgacacaaaataaaacgaacccttttgtaactcctcattcattagcaaaaactcaaaaaagtcaatatcaatgacgagaaataaataattgcaacgtcgtccctagcatctaacattctacccccaatggttgtccatacaatctcgattcataatggaaaagaacatatacctatttacattaccaatcctatggtatatctc

SEQ ID NO: 294367 - DNA, 342 bp, Zea mays
cccacagcgtccgaaaaaacaaacatggattaataaaaaagacaacaaaaaaaacagattagggaaacaccaaactgtcgggcggcggcgccacataacgaccgcatcgtggcccggttcgggttcggattgggcggcaaggcgaagcctgcttcgaagaaggtggacaacacatcgaccttctatgaccgtccgatgcggttccccgtcgccgtgttgcccgactacctgtacggctcgctcgtcggagactacaagttcgacccgttcggtcttaggaagcccgtggagtacctgaagttcgagttgaactctctgtaacagaacctttccaagaatgat

SEQ ID NO: 294368 - DNA, 210 bp, Zea mays
cccacgcgtccgcccacgcgtccgcccacgcgtccgcccacgcgtccgaagtcccaaaggcgcggcgtcgtccgccagcccaccatggccgcgcagtccttcctcctcgccgacactgacgccgtcaggtcccccgcggtcttcgccgatacctattcctccgcacgccctttgcactcggtccacttcgtcgccggcccgtggggcgcc

SEQ ID NO: 294369 - DNA, 434 bp, Zea mays
cggacgcgtgggcggacgcgtgggcggacgcgtgggcgaagccgaaagccgtagtgaaggcgaagacacccgccaagcccaaggccaagccagctgccaaggcgaagcccaagaccgccggcgctaagccgaagccacttgctaagaaggccggccgccccgccaaggcggcgaagacgtcggccaaggacacgccagggaagaaggcccctgccaagaaggccgctccctcgaagaaggcggcgaccccggtgcggaaagcgccgtcccgtaaggccaagaagtaaagcggccaagaaggggggcgcgatgctgtaaatttgatatcggagaggctcgggtacactggtcattcagtatccgagaccgatagctgaggctagtggcgatggaggactgtgttattactactataaactggtggttgtgtttct

SEQ ID NO: 294370 - DNA, 431 bp, Zea mays
cccacgcgtccgcccacgcgtccgcccacgcgtccgcgagaggagactttgctcgctttgggtgggcatccgcgcggagcgtgaccagacggtgtagagactagatagatcggaagggggtctaggcatagagagcgaggaggatgaccggcgttgctgcaggcgccggagggggcaacaaggcggcgggcgccacgctgcggctgcaccactaccttgtgatggccggggtggcggcggcggtcgtactcgcctgcctccggtacgcgccggaccccgcggggtacggcttcctggccgtggcgccgcggacagtggaggccgttgctggtgcccggcgggacaccactcctccaccgcgcccgtcgtcgtcgtcgtcggtggtcatcttcaacttcggtgactccaactccgacacgggcggcatggcg

SEQ ID NO: 294371 - DNA, 299 bp, Zea mays
aaataaaaaaaaaaaacctaaacataggtataaccaaacatgatcaacggaacataacggggccaactcacaaacaaggcctatcaaaacataataacccaacccatgttccagaacatgctgagccaccgacgccacagtccatgccagagcgccttctacacctacgactccttaatcgaagccgccagcaagttccccggctttggcaccaccggcgacgagcagacacgcaggcgccagctcgccgccttcttcggccagacgtcccacgaaaccaccggtagatgggcgactgc

SEQ ID NO: 294372 - DNA, 356 bp, Zea mays
gcggcagcttcgacccgctcggcctcgccgacgaccccgaggccttcgccgagctcaagggcaaggagctcaagaacggccgcctcgccatgttctccatgttcggattcttcgtccaggccatcttcaccgggaagggcccgttcgagaacctcgttgaccacattgccgaccccgtcaacaccaacgctggggcctaccccaccaacttcgtccgcggcaagtgaggaaggcgccgccggagacctttatgtgtgcatatgcatgtgagcgcactctggttttcggtttgcaccatgatgtacactattgcacaatccacagggaataattgtgcacatgtgcaatatttttcc

SEQ ID NO: 294373 - DNA, 441 bp, Zea mays
  unsure (1)..(441): unsure at all n locations
cggacgcgtgggcaagcagcaagctccaggaacatgataatagttggattgaccctgtggatctccttgtcgatacccgcatactttcagcagtatgaacccagctccaacctaatcttgcccagctatcttcttccatatgctgcagcgtcaagtgggccagttcgcacagccagcagcgggctgaactatgcagtgaacgcgctcctatccatcaacgttgtggtggctctccttgtcgcgttgatccttgacaacacagtgccaggcagcagacaagagcgcggtgtgtacatttggacagatcccaaatccctcgaagtggatcctgctacattggaaccctaccgattgccggagaaggttttcctgctggttcaggtgggcaaagtgtgtcggcatctaaaagctcttangagtggcggtgaagattctatttat

SEQ ID NO: 294374 - DNA, 467 bp, Zea mays
attccgggtcgacgacgcgtccggccacgcgtccgaccacgcgtccgatgaagttctacttcttggatgtactcaacctagcgtggcactttgaaattacagctacaaattttggagctctagggccatccttgatttgctacctgcggcataatgcctttcctcaaagagatctgcatgactattcaggtgatatcagccatgatcctttggttgtcaagttgccgaatattgcgcgttggtatattgcaattgaaactgtcaacaaaacacagactaatgttacagcatcaacacctgttctagacacaacatgtatctcattgaaatggcaattaactggatgcttgaatggaaaaactggaaccaattgctcttgggaagcatatggtctccataagggttcccaagagatgccttctgtcacttagagtctatcatgttgctactgatggaacagcatcact

SEQ ID NO: 294375 - DNA, 284 bp, Zea mays
cccacgcgtgcgcttttatgtactaggggatagcccactggtatctggggagatgtcgagcgtcctatcaatgtcgtaaggattgtcacaggattacgacctaatgctggtactcctcagtcagcacacccacatgatgacataggtcgctgttactgatagctttgaaactggtaagaagattatggcagctgcagctcctatgggtaagccagatacactggaacttggtggaaaaagttctatattcgtatttgatgatgttgacattgacaaatctgttt

SEQ ID NO: 294376 - DNA, 444 bp, Zea mays
gcgagcgagatcagttaggcgtcgaagcaggaggagccgcagccacacgccatcagggaccagctgcatttggtctcctgctgcctcaccaacccgccccatggctgctggcgcaacgtctacgacaccatatcctaggcccagaggctctacctcaacggatggtccgtgttccacaccatccacctggtgcgtgatggccaccaggacatggcactcggcgacctgctcaggaggaagtcgcaggacggcgtgcaggtgttgttgctcgtggggacgatcccacgtcctggagcactttagcatcaagatggtaccaggcatatggttcaccgggtggctccaaatgaaaggttacatgggcacaagggatgaaggtgactcagagatttttttagcgctcttcggtcctaatacggctttgcccacgatctgctaggaaaa

SEQ ID NO: 294377 - DNA, 309 bp, Zea mays
ctcatcctcccacacctgctgcggctcttagtacgattttgcgtcaaccgaattcggtcctccggggtttcattggccagcgggggcgcacccgacacctctcgatgtgcggtgctcttccggccgctggaccctacctccggctgaaccgattccaaggttggctggcccttaagcagaaaagataactcttcccgaggcccccgccggcgtctacggacttcctaacgtcgccgtctgccgtcacgtccctgctcgggaaatcttaaccccattccctttcaggtgacgcgcgttattccgctatct

SEQ ID NO: 294378 - DNA, 447 bp, Zea mays
gccacgcgtccgcccacgcgtccgcccacgcgtccggcaaatcatcaaaacctgcatgagggaccaaaaggagaaattgtggcccatgttgcaaaagcttaatgttaccatgaaggctgatgagaaggagttgattggcaaagctttgatgaagcgtgttatgcaaacgtggctaccagccagcactgcacttcttgagatgatgatattccaccttccttccccggcaaaggctcaaaagtatcgtgtggagaacttgtatgagggaccccttgatgatgtttatgcaactgctatcagaaactgtgatccggagggccctcttatgctgtatgtttcaaagatgattccagcatctgacaagggcaggttctttgcgctttggtcgtgtcttctcagggaaggttgctactggtatgaaagttcggatcatgggtcccaactatg

SEQ ID NO: 294379 - DNA, 256 bp, Zea mays
cccacgcgtccgatcattcccttcttgcataacgtgaccattcccaaggattgcaacagggaccagaagtgctacatctatctctctggacaggtgatggacaagcttgccaagatcgacccttactttgccaagctcggtgacgccatggtcacctggatcgacgcctgtgatgagctgaacccggatggacccgcggctgggaaagacacggacaagtagatgggagtccctgacgatgcattcacttacctgc

SEQ ID NO: 294380 - DNA, 317 bp, Zea mays
tcgacgcacgcaatctggaagaaggctttagctatctgcctgtgtatgggatacaaccgaactgggtcgtctggggggccaacgaccgttcagcatacttccgttagtagcatcatcaccacatccatgttccacaacatactgagccaccgcagatacagcatttgcccatgcaccttttacacctaccacaccttaatcgaagccttcagcaagttacccagctactgcaccacctgcgaccatccaaaccgcctgcacaagctcgacagcttcttctgccagacgtaccactaaaccaccggatcatttaccac

SEQ ID NO: 294381 - DNA, 336 bp, Zea mays
cgcgcctggattcacgcgtcgaggcacgcgtccgcggacgcgtgggcggactcctgggttgccgtctcccttttgcgtgagcagaggaaagagggggagaagagcagtcgccatgtctgtcatcatccacaagatcgaggagaagctccacatggggggcgaccacaagacggaggatgagcaccacaagaaggccgacgagcaccacaagaaggaggaggtggagcaccacatgaaggacggcgtagagcatatggaaggcatcgtggagaagatcaaggacaagatcaccggcgagcacggcgacaagtccggcgaccacattgcaaagaagga

SEQ ID NO: 294382 - DNA, 264 bp, Zea mays
cgacgcctcggcagacgcctcggttggcttctcccttttgcgtcagcagagaaacagagcgagattagcaatcgccatgtctggcatcatccacaagatcgaggagaagctccacatgccgggcgaccacaagaaggaagatgagcaccacaagaatgccgacgatcaccacacgaaagaggagggggagcaccacacgaaggaccgctcctagcataaagaatgcatcatagacaagatcaaggacaagatcaccggcgagca

SEQ ID NO: 294383 - DNA, 411 bp, Zea mays
cgggtcgactttttcgtcctcccactcgtccggcgaccgtctccgcgtttctactcacccttggccgtctacgaggatctgcaccacgtcaggatgacgactctgatgaacctcaagatcatgacttcaacgtgcaagaggatcgtgaaggagctgctctcgtacgataaggatgtgtacaaggacgctttcaagaccgacgacatgaaggacaacggctctgatccctacgacctcaaacatcacgagaatgttttgcctgagtcaaggatgattgtcccagactgtcacaaacgacttgaaactgcactttcttactcgaaagcaacactggcttaactgaaggagtcaaatgatcaaggtacctatattgtacaaactgatagtacaatcgcacaagtttgaatcatt

SEQ ID NO: 294384 - DNA, 425 bp, Zea mays
gcatgctcggcgacctggacggcctccccgaggaggacaagatgcggatggccgccatgatcgaccagctccagatccgcgacagcctgagaatgtacaattcgctggtggagaggtgcttcacggactgcgtggacacgttccggcgcaagaacctggacaagcaagaggagtcttgcgtccgccggtgcgcggagaagttcctgaagcactccatgagggtcggcatgaggttcgccgagcttaaccagggcgtggccacgccggactaagaaacatgctgctgctggctgtggccgccaggtttctggctttgctggcacagatttgtagccgacaaaaggatttcagcactttcgctgcctgagatatatgcgtcttaaagccgaacgctgggtgtcagattgaataaaaactgccttgag

SEQ ID NO: 294385 - DNA, 345 bp, Zea mays
atatttagcaatttatagactaaaaaggaataaaataaagggactaaacattagtctctagaaagcaaacactccctaaaaatactaaatctttagatttagttaaaagttcaccatatttgcacccttacaacaaatgtttatacatcacgaagtcaagtgcacacctctcaaatttgctctataccactgcacgacgctcatctcgggacaggcaacaacgcatcatctcccagcagcacaaacagtgtcaacagaacggaacagcccaactgctgttcgccctcccggcccctgcccctgcccagtgatctgctgcccccgagccagccagtactgatccgg

SEQ ID NO: 294386 - DNA, 365 bp, Zea mays
  unsure (1)..(365): unsure at all n locations
cccacgcgtccgccgacgcgtgcgcttacaccgtgtgcaacttcaccgataacggcatgttcggagatggctgcctcaccagctactgctatgaccggctctcctgcaacgggtccgtgggcgccccgccggccacgctagtcgaggtgagcctgcacgaggacgccgcgaaggggagctcctacgacgtgagcctggtggacgggtacaacctccccgtggccgtctccgccaagccagccacgggcggcgcggactcgaacaagtgcgccatcgccggctgcgccaagaacgtgaacgcggtgtgcccgccgggactgcaagtgaccgctaccggcagcggcngcggcaagacggtggtggcg

SEQ ID NO: 294387 - DNA, 393 bp, Zea mays
  unsure (1)..(393): unsure at all n locations
ggcgaatcctgtactgtaatagccccgcgctgaactttgtgcatagtgtccgtcttcctgtgtgtattgattttttgatggattggtaagataattcatttggctccggcggctgctgctttctgctgtacacaagtccagagtcttatattgcgctgccttcagatgtacatggaccaaaaagaagtggtcgatgccctcttccaccactcgaagatagagccctgcattactgaacttgtttggcgacaacttgagcatcaaaatcctctggttttcaaggcgtattatatgaggctaatgcttaagactcanataatggtcttcaacaagcttcttcaggatcagtttgaggttatcaataaagaattttcttcagggatcccttctatg

SEQ ID NO: 294388 - DNA, 381 bp, Zea mays
gtgtttctgttggagaggtgatgaagagccctgtgttcagtgaggatgagtcatcggagaactgcttctgggttgatttgggacagagtccacttggttcaaaccattcagagcaatcaagcaagggaaaattgggctctccattgccagcatcctggttttctggcaggaagagtgctcagaaagcgtcacccaaagtgccattcaaactgtcaaggagtcctattcatgataaccatgttatgtcatttgatgcaaccgtgaagtctgtatcacaagagcccaggcccgataaaggggatctggatgaagataattcacatattaacatcaagaatactcctatcagcgagattgaagaagataataaagatgctaaag

SEQ ID NO: 294389 - DNA, 365 bp, Zea mays
ctactcgtacgcccacgcgtacgtttacgccttcttccacgcgttcggtcaagcgttccgtcacgccttccaaaggggccagggccaaaccggacccggccaactacaaccctttagccaaagcttccgacacccaagccaaccccggcgtcgaccaccctttttcccaagcctccgacgcccaagccgaccccgccgacgtaaactccaagccccaagccttcacacacgcgatgcccaagccgaacccaccgacgtacacccctttcccaaagccttcgacgcccaagccgtccccaccgacgtacaccccttccccaaagtctatcacacccaagccgaccccaacgacgtacactcccaca

SEQ ID NO: 294390 - DNA, 238 bp, Zea mays
ttcgtgttgccgacttcgtttgcctacatggttccattggccagaggctgttcagcttgcacacgctgatgcgggtatgagtgcgagcgagcgtggactgaattcggacctcatgagtccaagggccgtcggcggctcaccgcatacactgcgatgtgcggtgctcttcagagagctgaaccctacttactgatgaaccgattccaaggttgacgggccgttaatcacagatgataac

SEQ ID NO: 294391 - DNA, 495 bp, Zea mays
  unsure (1)..(495): unsure at all n locations
cccacgcgtccgcccacgcgtccgcccacgcgttcgcccacgcgtccgcccacgcgtccgtgatgcacgacttcctgataatatcatggcatatgacaatgctgtttcggcgcttggaaaaatatgccaatttcatcgggatggtattgacgcagctcaggttgttccagcctggcttagctgcttgcctataaaagacgacaaggttgaagctaaagttgtacatggacagctttgctccatggtggagaggtcggatgctgaaattcttggtcctcacagtcagtatcttcctaaaattgtttcaatttttgcagaggttttgtgcaatggaacagaacttgccactgatgaaactagaaacaggatggtgaatgtcttgaggcgtttccagcagactttgcctnctgattntcttgcatcgacgttttccaacttgcaaccgcagcaacagctactgctacagtccatcttgtcgacatagttgttttttct

SEQ ID NO: 294392 - DNA, 439 bp, Zea mays
cccacgcgtccgcacacacacagacaagtggtttccaaagccaagtgtgtgtactagcaaccagcgggctcgggcggcagcaggcagccatcatgtcggaggagaagcaccaccacttcttcaaccaccacaagaaggacgaggagcagcccgtcggcgagtacgggtactccgagaccgaggtggtcaccgccaccggcgagggcgagtacgagaggtacaagaaggaggagaaggagcacaagcacaagcagcacctcggcgaggccggcgccatcgccgtcggcgccttcgcactctacgagaagcacgaggcgaagaaggaccccgagcacgcgcacaggcacaagatcacggaggaggtcgctgccgcggcggccgtcggcgccggcggctacgtattccacgagcaccacgagaagaagaaggaccacaagga

SEQ ID NO: 294393 - DNA, 345 bp, Zea mays
cccacgcgtccgttggcttctcctcccactccgtatcgggttcgggttcgcgaggttctgcggtgtatcatttcaagggtgagcggatcgagatggcaacgtctgatgtagagtaccgatgcttcatcagcggactctcctgggccacggacgaccactccctccacaactccttcagcacctacggcgaggtcctcgagtccaagatcatactcaatcgcgagacgcataggtaccacagcttatgctacgtcaccttctccactgaggaggcgatgctgaacgccatcaagggcatgaactgcaaagagctggacggccgtaacatcaccgtcaactaggccc

SEQ ID NO: 294394 - DNA, 174 bp, Zea mays
cccactcgtccgcccacgcgtccgtttgttccggcctcgccgggccgatccgagcgggaggcattttcaggtggggagggtggctggcgcggcacatctgttaaaagataacgcatgtgtcctaagatgagctcaactcaaaatagacagaaatatataccgtatttgtcactg

SEQ ID NO: 294395 - DNA, 454 bp, Zea mays
aggccatcgacgaggtactcgaggaacgccgcagcgaccagctcgcggcgatgctcaagacagcggtgtggtgcttgacgtcgccggagaagcacttcgcggaggtgatccggaggtccatcgtcgggctcggtacggacgaggaatccctgacgagggtgatcgtttcgcgcgccgagatcgacatgaagaaggtgaaggaggagtacaaggtcaggtaccgcacgacggttaccagcgacgtcaacggcgacacttccggatactacaattccatcttgctcactctagtcggccctgagtgaatgagcatggccacgagtgatccttgttggctcaagttgagaccgtagtgcaagctcatcaaagaaggaggtgtggccaatttgacatctacaactatagaaggcactaaagctttaacttttctagtcattgttgattgtaccaaaaa

SEQ ID NO: 294396 - DNA, 360 bp, Zea mays
cccacgcgtccgaccacgcgtccgtttcgttcctggaggaatagcttcgcatcatattgctgcgggtactttgggcatattagcgggcctattgcatctaagtgtccgtccgtctcaacgtctatacacagggttacgtatgggcaatattgaaactgtcctttcaatagtatcgctgctgttctttttgctgctttcgtaattgccggaactattttggatggaacagcaactaccctaatcgaattatttgggcctactcgttatcaatgggatcagggatactttcagcaagtaatatatcgaagagttaacgattggttagccgcaaatcttaatttattagaaacttggtctaaa

SEQ ID NO: 294397 - DNA, 438 bp, Zea mays
ccgagctctccaaaaccctaacgcgccagttctggggcgtcgccaacttcctcgcgccagcgcccggggagacgttgccgtcaccctcgcactctccccaatcagcggggggtcaatccgccgatgcgaggacaccacccgagatcgccgggatccggaacgacttcgctgagatcggtgggaggttcagaagcgggatctcccggatctcaggtcacaaggccgtctctgggttctctaagatggcctctagtttcttcgctcctgatgacggccaggaggacgagtgggaagaggagcggatacgacagattaagcatgagatgggagaagaggcggtatggcacgaggaggctgatggcgactaggagtggcatcagtgggaggagagggtaagacttagggtggaagatggcgatacaaggcatgagttggaga

SEQ ID NO: 294398 - DNA, 408 bp, Zea mays
ggcttctcctccccctcttaccaagtccttttcgggttagggttacttagggttttgtggaggggcgatggcggcggctgatgtggagtaccgttgcttcgtcggcgggcttgcctgggccaccagcaacgagtcgctggagaatgccttcgccttctacggcgagatcctcgactccaaggtcatcaccgaccgggagacggggaggtctcgcggcttcggcttcgttaccttctccttcgagaactccatgctcgacgctatcgagaacatgaacggcaaggagctcgacggccgtaacatcaccgttaaccaggcccagtcccgtggcggtggctgtggctgctgtggctacggcggctgtcgcggcggctgcggctattgttgccggcgccgtgacggcggtta

SEQ ID NO: 294399 - DNA, 226 bp, Zea mays
tttccggtcgacgccacgcgttcgccacgcgttcgctacgcgttcgccacgcgttcgctacgcgttcgccacgcgttcgtccacgcgtgcgccacgcgttcgatttaagaaacaacaatcgaaacttaaattaccattgctgatggtttattcgaaagactcaaactcatatataaagtaaagtaatccaatttggattcttgtgtttgttataagaaaaataaaa

SEQ ID NO: 294400 - DNA, 421 bp, Zea mays
gcttcacaccgacacacattcttaatcattgcaacaagataaccaacccatatcactcagctgagttggatacccagcgcatgggcgtgttcgactaacgtgcctctggacaccagctcatgctcgtcgacgtccctgccagacacggcggccgcgacgacgcctccgcctacgtggggatgcttgcgctgctgcaggcgcagtttcaggcggcgctgcaagggaacgaccgctacgagctgcagatctgcatcgagagcggagacaacgctgtgcatacggaccaggccgtgcacatggtgtaccttcacgccggcgacaaccccttcgacaccgtcaccgtcgccgtcaaggcggtggagaagcacctgcatacgttccaccatcgttgacaagaataaactgccgtcgttccttgact

SEQ ID NO: 294401 - DNA, 396 bp, Zea mays
cacacgcgtaaatgcgcgatacagagcaccaatttagggatggacacaaacagacacggagagagaatccattcagaagctggctgcggagcaagaggctcagcaaatagagaatgccgctagagctgccaagtcagcgaggctcaggcaagcaaaagaggaggctgagcgggaaatagccgaataccgtgcccagatggaggctgagtttcagaggaaggttgcagagagcagcggcgactccagtgcaaacgtcaagcgtctcgaggaagaaacggcggcgaagatcgagcaactcacccagcaagccgcaagcatcttcccggatgtcatgcacatgcttctgcggcatgtcaccaccgtcaagaactgaagagtgctgttcccgaactatgc

SEQ ID NO: 294402 - DNA, 457 bp, Zea mays
cccacgcgtccgcccacgcgtccgcttcactgtttgggatgttggtggccaggacaagatgaggcccctgtggaggcactactttcagaacacacagggacttatttttgttgtagacagcaacgacagggaacgtgttgttgaggctagagatgagctccacaggatgctgattgaggatgacctgcgacactctgctctgtttgtattcgaacacacacaatatttccaaagctctgaaaatgctgctaaaatctactgacaatctgggtctgcattctgtgaaacaggcactctgctacatgcagagctcttgtacaacatgtgaaaaagggtattatgaggttcactagtgtttttccagcaacatctccagcaagtcttgaagcttttcggcagggctactagcgagaggatgtctgaacaacttatggctgctttttttatacatattatt

SEQ ID NO: 294403 - DNA, 457 bp, Zea mays
cccacgcgtgcgtctacccctccaatctattttttgccattgttctctccacaaccagaccgtaccattgcagacgcactcagcctacaatacactcctactcatttattccgtacacagcaacgacgcataacgtataatgcaagctccatatcacctacactggatactcaataatgataagctgactgactctcttctcctactatctccatacacacaacatcttcctaatgctatgaatgctgctaacattactgacaagcttgatctgcattccctgcgacagcggcactgctacatgcagagcactcgtgctacatctggtgaagggttgtattacgggcttgactggctttccagcaacatctacagctagtcttgaagctcttctgcaggacttctagcgagaggatgtctgaacaacttatggctgcttatttattacatattatta

SEQ ID NO: 294404 - DNA, 157 bp, Zea mays
  unsure (1)..(157): unsure at all n locations
gcgnggcgnggaccggaaggaccgcaactcananggnagccgccgnggaaangangaaggaaaggcaaggggaacgnacgcaaacaccangancgngaacaagcncnngaacggagaaccnggacccaagaccacgcaggggccgaccggggagaag

SEQ ID NO: 294405 - DNA, 312 bp, Zea mays
  unsure (1)..(312): unsure at all n locations
cggacgcgngggcggacgcgngggcgcagcagggccaanancnngcnaggngcnnnaacgagaggaaggangcngaagaaaacccngaangcccaanccgcancaggggagaaggccgccancgcgnccgccccnncagggaccggcagcggggccaanncgccccacnaggaggggagcaaacagcngcacagcngcccggggaccggaacnccannggccacagcncccagaggcgcnggnaccccgngnacgcaaccaaacaaancagcnggcgcacgaggaagcaggnggnaacagaccggacacgcc

SEQ ID NO: 294406 - DNA, 274 bp, Zea mays
  unsure (1)..(274): unsure at all n locations
gacccacgcggccggaagaaaccgacgaggannccccgagnaacggcgagcgaaccgggagcagcccancnagagaagggggcggccncaccgcccgacaagaanacaggagaggcgaccacagcgacagaccgggcccaagagcacgggaaagggacgccagggagggggagagccccagccggcccggacccngacgaaccacgaggcgccagcaaccaaccggggcgaccgggaacgcaccccaaaaacagcgagnaacacccggcaaggc

SEQ ID NO: 294407 - DNA, 458 bp, Zea mays
cccacgcgtccgcacagcttctttgtcgaatgcttcaggcactcggtaattcctagaaaaggttcggtaaagactttgccgagtgtagctctcggtgaactgtatatataatatcatgacatgtcgataaagttcatgattttctgacttcgtttgttgtttatacaattttaaaactactagatctcaagttcacattcatgttttgtgaccatgatactcaaaaattctggtctgtttttaaaataggtcgtaaactgtgctaaaataacataaatatcattttttgcattcactgttttctattttttgagtgacttacaattcaaatatgaattatctgaagaaattcaattaaaagaactaaatataatagctatagctaacactttgataattatgtcaagatggaacatgtatctctatatagtgtaagaacatagtagaaaaaatttgct

SEQ ID NO: 294408 - DNA, 273 bp, Zea mays
  unsure (1)..(273): unsure at all n locations
gccagncgccangggcgagagggagancggaancaacggcnncggaaggancggcaggcncgnggccaggggcgcccnccagagcgaggangncgagcccgncgccgncaacgaccccnncancaccacggaccacangaccnacaagnncaaggacgacaccgnccacggccaccggaagcacagcgacancacacgcaaggaccccaagacccnncncnncggngacaagccggncaccgncnnnggcancaggaacccngaggaaaaccc

SEQ ID NO: 294409 - DNA, 405 bp, Zea mays
aagtcagaatcagaacgagcttttacgctgttgttccacacgagatttctggactggctgcgctcatcttacgacacctgcggtatctgtcaacagatgggccgccccagccatactgtccacctgacaatgtatttcgcccggatcggaccgacgaggacgtgcctagtagcccatcggagggtcggtgcccatcttccgacccacgggataagttacatcaccgtaaaggtagcggtatgtcacttactgcccggaggctcccactcatcctacacctctgaagttattgcacatagtgcgactagagctacgctacacacggtattgtcttccagttgattccatccagcccgatcccttggctgtggcttcgctggatagtatacatggtcagtgggaatc

SEQ ID NO: 294410 - DNA, 408 bp, Zea mays
  unsure (1)..(408): unsure at all n locations
cggnccggaanncccggggggacggacgcgnccgcccacgcgnccgnaaaaaaaaaaaaaaaaaaaaaaaaaaaaaaaaaaaaaaaaagggaaagaaaaaaaaaaaaaaaaaaaaggaaaaaaaaaaaaaaggggggggcgcccaagaggacccaagcnaacgaacgcgggcaggcgacgacaaagcccnccaaaaggggcaccaaaancaaaagcacgggccggcgnnnaaaaacgccgggacggggaaaacccggggggaaccgaagagaagcgccgggaagcacaccccccnnncgccagcgggggaaaaagcgaaaaggccggcaccgaccggccnncccaacaanggcccagccggaagggcgaaggggacgcgcccgganacggcgcaaaaagcgcggcggg

SEQ ID NO: 294411 - DNA, 357 bp, Zea mays
  unsure (1)..(357): unsure at all n locations
cccacgcgnccgcccacgcagacggacccacgcgnccgcggacgcgagggcaagcacaggggcaggcnancaanggcggcggagggngnccccccaagcgacaccgagccaccaaaggcacaagccgacanaaggcggcacagccacaccaaccacacgccccagncacngaggagcgccgnggagcnaggcaaccccacggcgaacaaccgccaaggcggggcngccncagccgcagagccggacacggcgcngncncnccccnccacgaaacagccgagccaccgccggcagcngcggcaacaagccgcggcgggcgggggcaccgncgacaagcagagcacggaggaagagcgg

SEQ ID NO: 294412 - DNA, 346 bp, Zea mays
  unsure (1)..(346): unsure at all n locations
cccacgcgnccggctaaaccctnnggnccacacgagagnncngncncgnggagcggggcnnangacaccgngcggancnnnnaacagangngccgccccagccaaacnccccaccngacaangncnnccgcccggancggcccggcgaggccgggccnnggagccaaaaggaggggcggngccccgcnnccgacccacggaanaagnaaaanaacgnnaaaagnagngggaggncacnggcgcccggaggcncccacnnanccnacaccncncaagncannncacaaagncggaccagagncaagcncaacagggncnnncnnnccccgcggaaaccgccaagccc

SEQ ID NO: 294413 - DNA, 386 bp, Zea mays
  unsure (1)..(386): unsure at all n locations
cccacgcgcccgaggcgggaccacccgcngaananaagcaganaaanaaacacaggagaggaaacccacgaggacggcccgagaaacggcgagcgaaccgggagcagaccagccggagaancgggcggccncgccgcccgaaaaggagnccggagaggcggccccagcgacggaccgggcccaaggaccccggaaagggacgccagggagggngagagccccgcccggcccagacccaggcgcaccacgaggcgccggcaacgaggcagggcggccgggaacgcagcccaaaccgggcgcgaaaccccgnccaaggcnaaaaacaggcgagagacacgaagcgaacaagnaccgcgagggaaagaagaaaaggacgnngaaaagag

SEQ ID NO: 294414 - DNA, 337 bp, Zea mays
  unsure (1)..(337): unsure at all n locations
ccgggncgacccacgcggccggngacaannaaaaacaagaccgggcgcgnnagngncngggaannggaangagnacaancgagaggccnnaacgagganccannggagggcaagncnggngccagcagccgcggnaannccagcnccaanagcgnanannnaagnngnngcagnnaaaaagcncgnagnnggaccnngggccgggccggccggnccgccncacggcgagaaccgaccggcncgacccnncngccggcgaagcgcnccnggccnnaacnggccgggncgngccnccggcgccgnnacnangaagaaannagagngcncaaagcaagcc

SEQ ID NO: 294415 - DNA, 284 bp, Zea mays
cgctctggtcatgggcgtcttaaccgcttaggctaaagaaaatgccctcgttgagagcaaggccatctacatcaacccggtgcagctcaagtgctgcacacaactgcaacttctccttgtcggggctctacacctgcgacgacatcaaaaagcgactgccaccccgtctgcaagaagtgcgtctgtcgtcgtgcacgcgtactactatggcaacaacaagatcaggtgcaccgacaccttccgtggcatgagcggccccaactgcttgatcatagatgaagaac

SEQ ID NO: 294416 - DNA, 428 bp, Zea mays
  unsure (1)..(428): unsure at all n locations
gccggaancccgggcgaccacgcgtccgccacgcgtccggaaaagcttcaccaccagaacgttatcaagctcaaggagatcgtcacctgcccaggcccagagcgggacgagcaagggaagccaattgacggtaacaagtacaaggggagcatttacatggttttcgagtatatggaccatgatctcaccgggcttgctgatcggccaggaatgcggttcactgtgccgcagattaagtgttacatgaggcagctgcttacaggcctgcactattgtcatgtcaaccaagttctgcatcgagatatcaaaggatctaaccttttgatagacaatgaaggtaacttgaagcttgctgattttggccttgcaagatcattctcgagtgatcacaatggcaaccttactaaccgtgtgatcactttgggtat

SEQ ID NO: 294417 - DNA, 308 bp, Zea mays
  unsure (1)..(308): unsure at all n locations
gaaaaanggctggacgcacgcgtccgaccacgcgtncgcccacgcgtacggtgtttttctgctctccgacccctagctccaaaggccggatcattaggcgcggtccccctctcatgtaaccgacatggcgctgccgaatcaggggaccgttgattaccccagcttcaagctcgtcatcgtcggcacatggtggaactggtaaaactacatttgcgaagaagcatatcactggatagtttgagaacaaatatgaaccaaccattggtgtgaaaaatcattctttggatttcaccactaactgtggttag

SEQ ID NO: 294418 - DNA, 308 bp, Zea mays
  unsure (1)..(308): unsure at all n locations
ctgnaaatcacaatcaaacgatcttttaccctgctgttccacactatattggctgtctcttttaactcatcttactacaccttcactatcttttaacagatgtgccgccccatccaaactccctacctgacaatgtctttcttccagatctgccctttaatgctcttccttctaatctaaaagatgtgctgtttctccctttcgacccaatatataatctaaatatctataaaagtattgatatttaaactttctccccgttcgcttcctctttttccttaaacctttccaagatcatttttcacata

SEQ ID NO: 294419 - DNA, 254 bp, Zea mays
  unsure (1)..(254): unsure at all n locations
cccacgcgtccgcccacgcgtccgcccacgcgtncgtcgacccacgcgtccgccacgcgtgcgtcaaaagtccattcatacttgcgacttgactggttatttaggtgataacgatttggggaccattgtgccctgttgaactcatgtattaccttgtgaagtccgttgtgtctggtttctacctgaccgtttcgttatctgatgctgtttctttaataaacaagagaaaaacaccacctaaaaccatacaaaca

SEQ ID NO: 294420 - DNA, 403 bp, Zea mays
accttctccgggaagctggagcgccagctcacccacctggccggcgccccggaggtccaagaggtgcgaggagatgacgccgtcgaagacgccacctcccgcaccacgtccatgcccaaagtcgatcgcttcttcgccgcactggaaggccccgaactcgacaagctcaagacgtctgaggaactggtgctgccgtcggacaagacgtggccgttcctgctccggttccccgtgtcggcgttcggtatctgcctgggcgtgagcagccaggcgatcctgtggaagacgatcgcgtcgtcgtcgccgaccacgttcctgcacgtatcccacaaggtgaacctggtgctctggtgcatctccgtgctgctcatgtgcgccatcacggccgtctcgcgctcaagct

SEQ ID NO: 294421 - DNA, 376 bp, Zea mays
gccaaccagaagagcttgcagttactgagagtgtgtgtgagagagaggatgggtggcagcggcaaggcttcttttgttgttggccttggtggtggtggccttaagcttggccgtggaaatccaggccgacgccgggtacggttacggcggcgggtacaccccgacgccgacgccggccaccccgaccccgaagcccgagaaagcccccaccaaggggccgaagccggacaagccgcccaaggagcacaagccgcccaagagcacgggcccaagccgaaaagccgcccaagagcacaagccgacgccgtccacgtacaccccgagccctaaactcacgccggcgacgtacactcccaacccgaggccccccaagccg

SEQ ID NO: 294422 - DNA, 287 bp, Zea mays
actttgtgaaatgacttgagaggtgtaagataagcggagcctccgggcgcaagggaagaccactactttaacgttattttacttattccgtgggacggaagctgggcaccgcccttccttttggctccaaggcccgacctattcttgccaattctggcctatgacattgtcatgttaagagttcggcttgtgcctcacatgtcttaactgataacatatgagtcctattatgagctgagctcgttcagaaatcattcgtgttacataacattataagctcgcgcgac

SEQ ID NO: 294423 - DNA, 456 bp, Zea mays
cggacgcgtgggcgacccacgcgtccggcgcgttgaggccgagctccacgagcccaccggcaggagcggttcgcttatcgtctccgcctgcgggttcggcttcgtccccgccgagttcggcttcctgtttcactccaggcagtgggaagtgggaaccacccttcgcgccggccaccgtggaggcgtacgtgagcctgcaggtggtgtttggtttgatgaatcatattcctcaaatttggtagatgagcccattcatattagaaatttggtggatgagcctattcatattagtactaactaactatgagaaatgaggtgttgatggatcaacttattacattccacaaaccaaatgaaaaaaagtgaggagtgagaactagctcgttcatcaaagaacaccctataaaagaattgtcattgacatcagcacctacgaatcagccacgctcgaagtag

SEQ ID NO: 294424 - DNA, 211 bp, Zea mays
ggttccctactaaatttcactcatcatatttgtagcccacacgatttatatcgggtcaaggcaaagcttataggcatccgtgtcccaacgccctcgacctattctcaaactctaaataggtttgacggctcacttgcttcagtgagccgtgccaaccaatctgcagctccaaaatcgccatttcttacaagcacatctggctattcattat

SEQ ID NO: 294425 - DNA, 347 bp, Zea mays
ttcactctgtgcgctcctcggcgcgtgcccacgtctcccacgcctccctccctgcattcgccccttcagatccggtctgccccgccgccgccgatgtccgaaggtcccgtgggatcccgccgctggcggtgcgacctcggcggcgacgagcgctggctctcgggggccgctggcgacgaccaattcgaccgcctcccggacgcgctcctcctcgtcatcttcaaccgcatcggcgacgtcaaggcgctcggccgctgctccctcgtctcccgccgcttccacgagctcgtgccccttgtctactccgtcctcgtccgcgtcgactgcgttatccccgacgagccccc

SEQ ID NO: 294426 - DNA, 227 bp, Zea mays
cggacgcgtgggcggacgcgtgggcggacgcgtgggttcttttggggtccagcaccatatacacatatacttgtagcccccctaacgtctttgtcttgggtcatagttatagagatatattaacggtgcattacatggctgtaaaaaacaaaaataaacaaaaaaaaaaaaagaaaaaaaaaaataaataaaaaaaagaaaaaaaataggaataaattacaatatag

SEQ ID NO: 294427 - DNA, 277 bp, Zea mays
tcgcgctgtcgaaccgtaagttcgtaattgtataatgcagccgcgttggcgacgcgttcggtgagggtatcgtgcacggtttcggcctgtacggcctgaaacgtgccggcgtcgtcctccttctgagaggcccggctgacgatgcgcaagacggtatgccaacgtcaagtcgtcagccgcgtcagggagcctacggtacggatgctaccgagtgctgtacctgggcccactgtgcggctagacgtctagctacctgacaggcgagtttcctttcgac

SEQ ID NO: 294428 - DNA, 421 bp, Zea mays
ctgcgagctacagtccaacatcagcaagctgcagtactacatgaccaaggtacagccctagagatgctagctatagcacgacatgaacaagctacagcgccaccttaccagttgatagcccaacgttaccagctatacaggcccacatcaaccgcttacagccgcacatcgccgtcctacagtgcaacttgaccatgttataggcctacattaccttcatacagccgtacgtgccctttatacagccctacgtaccgctgatacagacctacctagcgctgctacagcccgacatgacctgcttacagcccgacattaccaggatacagcccaacgggaccgaactacagtcctacatctccgagctacaggcctacatttccgagctacaatccttcatcagtcaagtacaggcctttac

SEQ ID NO: 294429 - DNA, 290 bp, Zea mays
cggacgcgtgggcggacgcgtgggaaaaaattaaagaagaaacaacaaaaaacgggagacgggaaaactgaaacaataggacagaaaacttggggcacctaacgccctaccgtgggtcgttgcgggtgtctagcataggctccccttgcttgcttggatcctgactttaaatgccttcactaatattcccgcacacggtagcttttaaccactggctgttcaaccaaacgcgatgaccaactgtgtgaatcaaccgttcctctcgtactaaggttaaaatgctactcgcg

SEQ ID NO: 294430 - DNA, 284 bp, Zea mays
cccacgcgtccgaaacatctgtggtttgtgtgtcatgaatcgtggttgtggcttcgttggtttaatggacctgttgtgtcctctgtgttgtacccaaaactcttctgcagcagtatggcttgaatccttgtgaagttacgatgtttgaacttaaaagtctgctcattatgttctttttctggttatatctcctaataactgcctgggatcaaatttgattcactggtgtttattggaccaataataacccgacaacatgtcgcacctactactacaacgcgcac

SEQ ID NO: 294431 - DNA, 330 bp, Zea mays
tttgcttttcttttctatatcccgttcgtgaggaatctccacaacttggagtctggcgcccttacaaagatgttcacaaagaatcacggagtaagggagggattagcaactcacacaagacacaaagatcacagcatattcgcacacacaagactcagacttaagctcatgagactagcacactataacggaggtgttctttttagcttagctaggaatgcaaatgacttgattcgttggaaaaaaaacaaaaataaaaaaaatataaaaaaaatgactaatatgaaaaattaaaaaaagaaaattatttaaaaatgaaaacaattaaaa

SEQ ID NO: 294432 - DNA, 384 bp, Zea mays
cccacgcgtccgcccacgcgtccgcggacgcgtgggcatatatgatctagtctgtgtgtcggtgtgtcgaaaaacatgtctgtgattttgttatatgaatgtaacgcgcaatgaaacatacaggactagctgcttgcttgacgatgcgtttgcgtgtatccgtataaattaaaggctataagccacaataaaaaggattatgacttaaaagcgttcaagaaataaaaacacacaaaagaaaatataagccaatggcatttaaaaccaagcgcgatgaccaatttgtgtgaatcaacggaatcctctcgaactaggttgaaattactataaaggggcggccattttaaagggtcaaacttaactgtcttacgacggactatatta

SEQ ID NO: 294433 - DNA, 391 bp, Zea mays
ggccgtccggagctgcctgccagtagcagcaacagcaaaacatgaagcagccgtaagcggcagagagcatggcgagatcagggcgggaagcggatcccggagaggaggaacggaagctggtgctgggcaagtacgagctgggccgactgctggggcagggcaccttcgccaaggtttactacgcgagggacctgagcgccggcgccggcacggtccacagctgcagcgtagccatcaaggtgatcgacaaggcgcggctgcggcgtacggaggggatggtggagcagctgcgccgggagatctccatcatgcggatggtgctgcaccccaacgtggtgggcatccgggatgtgctcgacagccggttccgcgtctttcaagtcatggagta

SEQ ID NO: 294434 - DNA, 292 bp, Zea mays
acccacgcgttacgcgactcattgaccatactagccaaacttccgacttgacaatgtattccgaccagatcgagccggggaggctcttccttggagccaaaatgaggggcagggccacacttcctacccactgaataagtttaataacgatcaacgtagtgggattacacttgcgccccgactctcccacttatcctacacctctgaagtcatttcacaaattcggactatactcaaactcaacagggtctactttatgtgctgattgcatcaatcccgtttccttaaatgt

SEQ ID NO: 294435 - DNA, 454 bp, Zea mays
cccacgcgtccgcccacgcgtccgcccacgcgtccggatgtatgtttgctccctgcctgggatgccacacgtcgtcttcggattcgtcagctccctactggcgtcagctcccaactggcagtcctataaagtggatgatccgaatgcgccgagaatgattcttctcgttattttctacgcgaacgtcatcttgctggctgaaattaagaacgtcaggatctacatcgagacggcaactgccgtggtgatatcttacgtgtcactacttaaaatcagctggagttacatctggctcgttctcttccccattgtggcgatcggcttcatcgttgctctgtgcaaggagctcagtcacgaggacgaggccggtggatcacattcacaggagcagagcaatgaaggtgaaagtgaaagcgaagctactacgtcttcatgggaaaaagttcatgctggg

SEQ ID NO: 294436 - DNA, 370 bp, Zea mays
cccacgcgtccggtcatttatcgcgattttaaaacatctaacatactgctggatgcggagtgtaacgcaaagctctctgattttgggcttgcgaaagacggacctgtaggtgataaaactcatggttctactcaagtaatgggaacctatggatatgcagaaccaaattttgcaaggactggtcttttaccttaaagaatggtggctaccagtttcgggttggtgcttcttgagatgatgtcaggccgcaggtcgatggacaagaaccgcccgaacggggagcacaacctggtggaatgggcgcgccccctcctaggcgagaggcaacggttctacaagctaatcgacccttgcctggagggcaacttct

SEQ ID NO: 294437 - DNA, 116 bp, Zea mays
atatgtttagcagcagcaggtgtattgtgcgggtatgtaatggtattgcaactatattgggtgtaaaaccataataaatgtgggcaaatatgcaaggaaaaaaggcttctacttct

SEQ ID NO: 294438 - DNA, 386 bp, Zea mays
gcgtcgttcttcgacccaaaccgtaaacagccgatgactagcccggtggttaccctatgcggcctcccaccctaactggttctcttcacaactgattactgggtcgatgttgacctctagactgcagcatatatcctggcctatttgctcgctgggaggccaattatgccacgacgaacacaggttgaacagctacataaaatttttaatttgtattgctccacaacagaataatattggaaaaagtctaatctacctcatgctacaatatttaatcctcagcaaccgtacagaaagcgaataacatatacttttaacgattttccacaatcaacacttacattgatctagacactacttgcaattgatccatcatatcgcttaac

SEQ ID NO: 294439 - DNA, 366 bp, Zea mays
tcgagacatctggccaaagcataacgcgctcacaggatctgctgcggtctcctgacatgggaaggacattcatcattgggcccgaggcctgctagttctctgccatggactacacttaccctctgtcgatgccgctccacgacgcagatgagctcaccaagtggtccctctaccgctcggtcatcgccgagttcatctccacgctgctcttactctacatcaccgtggacaccgtcatcgtatacaagcaccacacggacacggcctcttaaggccccgacacggcgtacagtagcgtgagcatacacggcatcatgtgggccttcagcggcatgatcttcatcctcagctactgcaccgtcggcc

SEQ ID NO: 294440 - DNA, 419 bp, Zea mays
aattccctgtcgaccgactcttcaccccacgcgtccgattacccgatccacgaatttcaacatcaactaaatatcctctttctattgccgcattcaaaacttaggactttctattcaataatttcttaaatatattaccctatccccaaggcttgggtccccttctgaccattcaatccaatctttattcccaaaatcctgattccactaatcatttatttggtaccactcaaggaactggaactaccattctgacccttcttccgggattccatccacaaacacaaactttgttacttacctatatttctcatcatcatttagctatttcatttatttttctcattgccattcatatatatccaactaacttcacaattttgcacattattaaacatctttttataatcacatactcc

SEQ ID NO: 294441 - DNA, 213 bp, Zea mays
aagagacagaggcctatacagcagtctggtaaatgcacattcagctgtccaaagagatgcggacagagggttcccagctgggttgtcagaaatgctggtacagagccctgggaccgacttataccttctctctgctcttccacgccacacgtgagctcaacgctacgttaatggtccgatagctcaaggtggtgttactgtacacattagttg

SEQ ID NO: 294442 - DNA, 339 bp, Zea mays
  unsure (1)..(339): unsure at all n locations
cccacgcgtccgcccactcgttcgctggcttctccttcctctcttaccaattcctcttcaagttanctttacttagtgttttgtatatgggccatggcatctgctaatgtgtactaccgttgcttcgtcaccgggcttgcctgggccaccagcaaccattcgctcgataatgccttcgcctcctacagctagatcctctactccaacgtcatcaccaaccacgagacagcgaggtctcgccgcttcgtcttcgttaccttctcctgcgacaactccatgctcgacgctatctataacatgaacggcaaggatctcaacctccctaacatcaccgctaac

SEQ ID NO: 294443 - DNA, 400 bp, Zea mays
ctttaactatggtcctgaccatggctggcgcccagctgatcgcctcgactgacgccacccggacgcagcacttcctttggaggatcatcatcctggccatgttccagatcatgctgatccaccgcgcgcacagcaggtgccagggcgccttctacacctacgacgtcttcatcgacgccaccagcaagttcctcagcttctgcaccaccggcgacgagcagactctcaggcgggagctcgacggcttcttcggccagacgtcccacgaaaccaccggtcgatgggccactgctccggatggaccgtttgactggggatactgcctggtgaacgaacagaaacagactgacccaccctactatggacgaggacccatacagctaactcataagtacaacta

SEQ ID NO: 294444 - DNA, 441 bp, Zea mays
  unsure (1)..(441): unsure at all n locations
cccacgcgtccgcccacgcgtccgcccacgcgtccgcccacgcgtccgcaaaggggaaaggttcgcttcttgtggcatcttgctttccttcgagtgccatggccgatccggcggaggagaacgttgtctcgccgccaccgacccctgcggccccagccgtgggcgcctcagacccgcccctgcagcctgctgctgacagcgcctcaacggagaaggtgtctgctccggcgccggaggtaaggtcccggggattcaggcttcttggagaggacacttccgtgcacaaatcccttgggggcggtaaaactgctgacgttctgttatggaaagacaagaaaacttctgcttgtgtaatangcggcgcaactgtcatctgggttctgttcgaagtgcttgattaccaccttctgaccctgatatcccatgtacttgatggtgtgc

SEQ ID NO: 294445 - DNA, 409 bp, Zea mays
gcgcgtttcgaagcgcacctcaccacccagctcgtggatggaggcgcgcattttttccaccatgctgacgaggcggaacgtgccgatgtgcggccggctcagatacaggatgtcttccggcgcgccggccttgacgaattcgtccagcaccttgcggccatagtggtgcggatccttgatctggctgtacagcttgccgtcggaaaacgtcccggcgccgccttcgccgaactgcacgttggattcggggttgagcacgcttttgcgccacaggccgaaggtgtccttggtgcgctcgcgcacggccttgccgcgttcgaggatgatggggcgaaatcccatctgcgcgaggatcagccctgcaaacaggccacacggccccatgccgatgacgaccggacgcaagaaa

SEQ ID NO: 294446 - DNA, 457 bp, Zea mays
gcacccgctcatgaattttccaagaatttccttcggagtcatctttgtgtacctgtgatggtcgtggataagatttacaagatgaggatcaataacgataaatgaccttagcattagtcagacgacatcatgatccgtccattttgtacttccatagctttgaatcttgttcgccagggtcttgagcctattgtaagtttgagttggcttctctccccttatcatggtgactctcccaagctcgtcttccaccagttacatcttggaaatcatggtggcgtcattaccctcgtgagagatcttgaaggtattccatatttgctttgtattgtccaagccacagactttgttgaattcattccttcatagggatgcttacaaaacaagtgtatcttgtgcaattttatgaatttgcttaataatcaatacaggattatcagtactattcaaatgcatt

SEQ ID NO: 294447 - DNA, 410 bp, Zea mays
cggacgcgtgggatttcatgtgattcagtgaacagaatatggattccatgattgctatagtgatccgtgtggattgatgaagagtgagctgataatggaattattcttctataaataggaaacttaagattcaaatgctccggaatggaaatgagggaatgtccacattacccggatttagtcagatccaattcgagggattatgtagattcattaatcaaggcttggcagaagaacttgataagtttcccacaattaaagatccagatcacgaaattgcatttcaattatgtgcgaaaggatatcaattgctagaaccctggataaaagaaaggaatgctgtgtatgaattactcacctattcattcgaattatatgtattcgctagattaaattttggtttccatgtg

SEQ ID NO: 294448 - DNA, 400 bp, Zea mays
ctcccacgcccaagccgaccccgccaacgtacaccccttcgccaaagcctccgcacccaagccgaccccgccgacgtacaccccttctcccaagcctccgacgcccaagccgaccccgccgacgtacactccaagccccaagcctcccacacacccgacgcccaagccgaccccaccgacgtacaccccttccccaaagccttcgacgcccaagccgaccccaccgacgtacaccccttccccaaagccttcgacacccaagccgaccccaccgacgtacactcccacaccgaagccgccggccaccaagccgaccacctacactccgacgccgccggtgtctcacaccctcagcccgccgccaccatactactagaaagcgatgcctaccataccacac

SEQ ID NO: 294449 - DNA, 433 bp, Zea mays
tcgacccactcgtccgctgactcatgcgacgccctccaggccgtgctcaatggcaactcctctaacctcttactgagcgtctacaccatgggcctagatgtatatacaaaattacatcaactacatacataacacagtctacaccaccaagaacgagtcacctgacatgctcaccacgcacactactcacccagttagcttctaaccacacgacaagtactatcgccagcggtacctgttgaagaacacatttgtacttatgccaacacagaatccagcactgaactactgaagcttcaactttccaaccatggatgtgcaaattgtgtaactgattgatgcttggttgctgcaatgtacaaatagtatcttatgaaaccatttaaacactgctacgcactactatgacatctcagcgcatttaagcactata

SEQ ID NO: 294450 - DNA, 223 bp, Zea mays
cccacgcgttcggacgagttcaagaaggaggagaagcagcacaagcacgggcagcacctgggcgaggcccgcaccattgccgactgcgccttagcactctacgagaagcaccaagctaaaaacgaccctgaacactcgcaccgacacaagatcgaagaagaagtcccagcggctgctgccctcggcttcagcggctttgcctttcacgagcaccactagaaga

SEQ ID NO: 294451 - DNA, 441 bp, Zea mays
ccaacgactactaacacgaaaccgagtgagtattcgttaagctatattgatcatttgatgggtctcattcgaccgtggaaacctctatcttatactacatccaccaaacaatatactgaacacggatctgcatatgactaagggcacgacaatggcgcaccggacaccgtgcgatgtgcggtgctcttccggccgctggaccctacctacggctgaaccgattccatagatggccgaccgttaagcacacatgataactcttcctgaggcccctatcggcgtatccagacttactaacgtggccgtctgtctccacgtcccggctcgggaaatcttaacccgactccctttaatgtgactcgcgtgatcgcgctatctgccaggtttcctcaatcccttaagatcggcttacatatgtgcaagtgccattcacatggaacc

SEQ ID NO: 294452 - DNA, 431 bp, Zea mays
ccaacacggatcatgccaaccacaatccgtactccaaaccggccaccacagacccaaacagggtccatgatcgagtgcgatgcatcccgcatcatgaagacatcaacgagccccgttgctcctggctccagtgctcatcaccggcacctgcactgactgaagcacaacacgcccggcatctgcttactaggccgtaacaccagcgcttcattctaccactatacacaccggcggaacgccaggtcattccaactggcagaaccgccatttatgcctcgtatctcacagccaacccaacgctgctacaaccatgaaacctcggagcgatccaacccccacaaaatgcactgcgtggcatatacgctgaacagaaccagatgagaggacatgcattcgaagagatgcacaggcacggaaccccgctatacaac

SEQ ID NO: 294453 - DNA, 443 bp, Zea mays
  unsure (1)..(443): unsure at all n locations
atcagattctgatgttcattgggcaatgctacaaccttgagacactatgggtacttgacgcggtgcgcgacgaagggctcgacgccgtgggaatttcctgcaagaagctccagtctcttcgtgtgctcccgttgaatgcacatgaggacgccgacgagttggtgtcagaggttagccttactgccatctcacggggctgccctgctctccgttcgatattatacttttgccagaccatgaccaacgctgctgttgtcgacatgtcgcggaactgcccggagctgaaggtattccggttatgtataatgggacggcaccagccggaccatgcgactggngagcctatggatgaaggattcggtgccatcgttcagaactgcagcaagcttaccaggctatccacgtccgggcaacttactgaccgggcatttgagtacattggc

SEQ ID NO: 294454 - DNA, 321 bp, Zea mays
atcaatcagaatcaaacgtgctgttacccttttgcttcacaccacatttgtgtcctcggggagctcatcttatgacacctgctttatcttttaacagatgtgccagcctaaccaaactgcccaccttacaatgtcttccgcacggatcggcccagcaaggccagaccttggatccaaaatgagggacggcgccctgcttccgacccacggaatctgtaatataacgttgaaactagaggtgttctacttgcgcccggatgctaccacttatcctacacctgtcatgtcatttcacaaacttggactagaggacagctcaac

SEQ ID NO: 294455 - DNA, 461 bp, Zea mays
cccacgcctgctactaagtgctctccagcttttccgtcaactactaaaaccaactaacacagataaaacaccacgcggcatgctcacaatgtcgacctggacaggctcaacaagatgctacccagcatctacttcaagctatacaacatgaagggggacatcgccatgtggcataactccttcgactcctgctacgacaagctcatccttgtcaccacgcccacctagtgctactactgcatcgaccccaacaccgtctgatacgtgcccatgcgctcctgcgtaactgctcccagccccaaatacaggaagctggatctcaacgccacgcccaatctaccccagatgctcatcgtcacgccggatctcattatcctagctcctgtcagcatcgcttacaccttcaaacatgacgacgcccggattaagcttaaggtcaatcactacaagacgctaatgcc

SEQ ID NO: 294456 - DNA, 316 bp, Zea mays
cggacgcgtcggcggacgcgtgggctagctcttcagaacttgcggacgaaagactgaccgggcaccgctagcggatcgatcgaccatggcgtcgtcctctcttctcctcctcgccgccgtcgccctcttcgccgcctccgcagacgcggccaccttcaacgtcatcaaccgctgcaagaacacgctgtggccggccgccctccccggcggctgcgcgcgcctggacccgggcaagacgtggaccgtgcatgtgccgacgggcacggtgcacgcgctggtgtgggcgcgcacggggtgcagcttcgacggcagcatg

SEQ ID NO: 294457 - DNA, 357 bp, Zea mays
aatagttgcaaactgctagctcggtctgtacattctacagttgctatgggcgtactgcgatggtctcgtaagtttggcgagatgatcaaccaatatttgcatgatatatgtatcgtgttccataacgtaaggttatcacagtctgctatcattacctgaggtgactataacatcaccagactacttcaactcggctaccccaaattaaaaccactggcttttcaatcaaacgcgatgaccaattgtgtgaatcaacgagttcctataatgctaggccgatttactatatccaagcttaccttcactagcatgcaactaaattgctttactacagtctaacctacatctaatgtactg

SEQ ID NO: 294458 - DNA, 466 bp, Zea mays
  unsure (1)..(466): unsure at all n locations
caccggnctcggaatacccgggctcggacccacgtcgtctcgtcccatcgcgtctctgcccacgtctgtccgtgttacaatgtgtaggtgcatcaccgtccgggaccaagcatgcggcgtgagtttttgtccggtcaagcagcatcgaggaccggtgcgcacgtctggtccgactaccaacatttcagtaaggatgagcaccgctccacgttggtgcctgcgtctcaggggtcggcatggcagatcttcgtgaagacacattactggcacagacgatcaccgcttgagggtggagtccctccgacacacattgacatacgtcaaaggccatagatccaaggacaatggaggtgcattgcacacggaccacgcagcaggctgatcnttcgccggcaaagcatctggaggatggtcgcaccttggctgactacaacattcataatgagagcaccctccacctggtgct

SEQ ID NO: 294459 - DNA, 380 bp, Zea mays
cgaggccacgcggacgcccacgcttactttctgttcctgcttgcttttgatctcaacccaagtcgtgcctccgctcgtgtcagtcgtctctccacgcaaccatgtctaggaagaagaccagtgatcccaatgaggagaacgtcacccttggacccactgtccgtgaaagagagtatgtctttggtgtcgctcacatctttgcatccttcaatgacaccttcattcatatcactgatttgtctgggagggaaactctggttcggatcaccggtggcatgaatgtgaaagctgaccgtgatgagtcgtcaccttacgctgctatgcttgctgctcaagacgtctcacagcgcttcaaggagcttggcattactgcactgcac

SEQ ID NO: 294460 - DNA, 417 bp, Zea mays
ggggcgacccacgcgtgcgcccacgcgttcgtccacgcgtcctttcacttcttacgcggacgcgtgggccgccgggctgtgcgccgaccccgagacattcgccaagaaccgcgagctggaggtgatccactcccgctgggccatgctcggcgcgctcggctgcgtcttccccgagctgctctcccgcaacggcgtcaagttcggcgaggccgtctggttcaaggccggctcccagatcttcagcgagggcgggctggactacctcggcaaccccagcctgatccacgcgcagagcatcctcgccatctgggcctgccaggtcgtgctcatgggtgccgtcgagggctaccgcattgccggcgggccgctcggcgaggtcgtcgacccgctgtaccctggcggcagcttcgaccccct

SEQ ID NO: 294461 - DNA, 234 bp, Zea mays
acccggccgaccacgcgtccgcccacgcgtccgcccacgcgtccgaaaatatattatttaaaaaaaaaaaaaaaaaaaaaaggggaaagttaaatattagggtggccgttttaaaagatggcgggctgctttctcgtatcataccatttaatctcctttatgttacgtcacataaattctattgtgtggccgaaattttacaaaatagcgaccggtaaaaaactggcggaccgg

SEQ ID NO: 294462 - DNA, 212 bp, Zea mays
caacgtccaaaatccagaccgctggtaggagtatctcgtatacattgatcaacgggggcggggcgagcgcctgcgccacctccatccccctcgtctcggcgccttctgcatgcccttccaagaagaccaccgtcgccaggttcctgtgctctacggcgacttgcatggccatcagcggcggtggctgtggccgttgctgcgaaaatgatggc

SEQ ID NO: 294463 - DNA, 476 bp, Zea mays
gatcctcagccgcctgcatgtccgcgtcacccgccgatcccccgcctccgccgccgtccgggatgcggcaacgcgcgccttggcctccgcgggcctcttccgtggcctccacggcggcgcggcgggggacggcgcctcctccgagcacggccgcgaacccacaggtcctcttacgctctacaggaagctagtgagccaagggaagctcacgcatgatagttaccaggaaaatgtagcttccgaattagacaaccttcttagtaggcttcaacggtacgagatggaaatggaggattatcatgacaagctgtacttctgggagaatagcagggagaaagagcggcgcaggcttcttgtcgaagaagctgaagataagcagcgtggtggtgtatggattgatgagagaaggggatttcttgacaaattggttgcgcggagaagaagaggaagcatagaacctggagttggtaagtggg

SEQ ID NO: 294464 - DNA, 416 bp, Zea mays
ggcaggattccggcgtcgctcacgatgttcaccgagctcaagcacctctacgtcgccggcaaccggctcagcgggcgcgtgcctccggacctcggccggctccggatgctcagccgcgcgctgctggcgcgcaaccggctgtcgggccccatcccggcgtcggtggcgtagctgccccggctcgccgacctcgacctctccgagaaccagctgacgggcgcgatccccgagggtctgggtgccggccccgggaatagcggcgtgctcacgacgctgtacctcggccggaaccggctgtcgggcggcgtcccggcgagcctgcttcggagcggcgggctcgggatgctcaacctcagccggaacgcgctaggcggcggcggccccgacgcgttcacgccgagctgctacttcatgct

SEQ ID NO: 294465 - DNA, 416 bp, Zea mays
  unsure (1)..(416): unsure at all n locations
gttcgacgccacgcgtccggccggagctggtgggcgtcctcggcgcgtccagtaagccccccgaggcgcgggagatggcgggcgagtcgctgtgcgccctggtgaccgtgccccgcaaccggaagcggttcgtccaggaggaccgcgacgtggcgcgggtgctgcagctgctgggccccgacgaggagaaggagaagcccgcgccggcgaggcggttcctgctgtcgacggtggcgcacctcacggacagcagctccggccggaggaagatcatgtcctcggagcacgtcaggtaatacagtacgatacgaacaacacgcacacgtagccaatcatcacgtgctcatcaattatcgctgcagttctcagttnttttttttggaaaaaaacaaatgcttgtggtctcgtggcaggaa

SEQ ID NO: 294466 - DNA, 218 bp, Zea mays
tctcacataaccgtagtcactctatagctattactttcaacaaaccccaacttcctttagggactgattcattatataaaaggctgacgcattctctgccctccgatcctataattcatgataacttgaccgatcacactgacttcatacctataactcatcattcaaattactgccctatcaactttcaatggtataatatagccctaccatattat

SEQ ID NO: 294467 - DNA, 442 bp, Zea mays
cggacgcgtgggcggacgcgtgggcggacgcgtgggcggacgcgtggggtgagagagaggatgggtggcagcggcagggctgctctgctgctggccctggtggtggtggccgtgagcctggccgtggagatccaggccgacgccgggtacggttacggcggcgggtacaccccgacgccgacgccggccaccccgaccccgaagcccgagaagccccccaccaaggggccgaagccggacaagccgtccaaggagcacaagccgtccaaggagcacgggcccaagccggagaagcctgccaaggagcacaagccgacgcctgccacgtacaccccgagccccaaacccacgccgtcgacgtacactcccacccggacgccccccaagccgacgccacccacatacactcccggccctacgccccacaaacccacacctaaac

SEQ ID NO: 294468 - DNA, 358 bp, Zea mays
gcggcagcaaacaagcaagcaagcaatggagatagaatcggtcaagtgcgagtgctgtggccggaaggaggactgcaccccgcactacattgccagcgtgagatcaggcttccatggccaatggttgtgtgggctgtgctgtgaggcggtcagagatgaagcatgcaggaggaaggctcaccatggagtagaggaggctgtgagggctcacatggcgttctgcaacatgttcaagttgaaccccgccgtccgcgtggccgacggcatgcgccagatgctccggaggcggtccggtgatatgtcaaagccagaatcgggcaagaagtacgaatcatcagtgacactgtattgaagagtt

SEQ ID NO: 294469 - DNA, 323 bp, Zea mays
ctcagttcaaggctaaatgcatgctagagacctattgcgaacaagtactgtaagggaaagatgaaaaggactttgaaaagagagtcaaagagcgctagaaattgccgggagggaatcggatggtggcatggttacgcgcaccgtccgtatgcgtaacggatcctgctggtccggcgatcgggtcagggcgtgtacagctgtcgcccgtgcccgtggacaaagcccgtgggtgctaagcacacacggcagacgaacttgcgcggactgtatccgcgcgcctgttgcgagcccctcggagcactgcgctgcaacaggctgctagc

SEQ ID NO: 294470 - DNA, 201 bp, Zea mays
aaacaaaaacaaataacaagaaaaagcaaaaactacaaggcgaaaaactcaggggtaaggggacaaaacaaagcggcgtggctcgcacgcaatctgtcgtagcagtctccgtggtgggcgtagcgctgctgctggcaccggcggcgacaacctcggatgccggcctcacctgaagactctcgagctccggcatatcgccct

SEQ ID NO: 294471 - DNA, 278 bp, Zea mays
tcagcagtcaccacttccaaggcattaccgagtcctactagcagtcgcactcaatgttcaagggactaaacagggggcatggctcgcacgcaatctgtcgtagcggtcttcgttgtggccccggtgctgcttctggcaccggcggcgacgaccttggaggccgccatcacctgcgggcaggtgagctccgccattgcgccctgcctcttctacacccgcggcacggggtccggacccttcgcgttctgctgtagcggcgtcaggaaccctctgagcgc

SEQ ID NO: 294472 - DNA, 434 bp, Zea mays
aagaaaagatggataaggattgtattctttaattatttctctatgttttattacttaatgtacgaatttcaaaaattttgtattctattggattggatttgttcgataattcgaagaattacaacaaaatctttagaaatcacatttttagttaggaacttctatggattttattcttcttcttttctttggatccaaaatagaagaataaaagaataggtataagaattaagttaagtcgatccaaaaaggaaaggaggttcatggccaagggcaaagatgttagaatccgagttattttggaatgtattagttgtgttcgaaagggtaccaataaggaatcgacggggatttctagatatagtactcaaaagaatcgccacaatacgcccggacaattagaattaagaaaaatttgtcgttattgtcgcaag

SEQ ID NO: 294473 - DNA, 310 bp, Zea mays
aaaagtcaacagattcagagacctgagatgcgcaaggaagctgacaaagcggggggccgtggcaaaccgaaaccggtggacgaccctgatcttctgagaaaaggttcaagttgaagcacgcactgtgggcacccgtttgatggtgaactatgcttgatcggctcgaagccagacgaaactcttgtggaggctcaaagaaattctgacgtgcagatcgctcgtttaacttgggtatacgggcaaatgactaatcgaaccatgtaatatctggttgcctccgaagattcactcacgatagctggagccttca

SEQ ID NO: 294474 - DNA, 447 bp, Zea mays
  unsure (1)..(447): unsure at all n locations
gttaggattcagctatgtgcgagtagcaccaaaagcacctgcctccaattcagtgctcgagaagaagtcagctgctgcaaagggtaccactgtaactggcactgatgctgatctccgcagattgagcatggatgcagcccgtgagttgctgctaaaatttggcgtacctgaagagcaaattgataaattaacaaggtggcatcggatcgctatggtgaggaagctttcaagtgagcaagctgcatcgggaattactatcgatgaaattcctgttagtaagtttgcacgtggacaaaggatgtcttttctgcaacttcagcagcaaactagggagaaatgtcaggaaatttgggacagacaagttcagtcactttcagctntagatggtgatgacaatgccagtgacacagaagctcacagtgatctagactcatttgctggggatct

SEQ ID NO: 294475 - DNA, 370 bp, Zea mays
tctagatcgcgaccggccgccctttttttttttttttttttttaactttaaaaataagaaaggttaattataaaccaaggggcatcatatatattcatacatacgtacatgatcactgcatgtgacacatctaagcacataaagttagctatttactcatagacactcacgaaggctctgtctgcacccaaagcacagaattttaacaactaaagccttacgagacgaccaacatcattaaggacttcaacgagcctccgtttctggacccgatcagtctcttacttggccccaccaagttcatggtcatacaaggcgagcccggcgctgtcatccatgggaagaagggatctggaggcataactgtgaa

SEQ ID NO: 294476 - DNA, 244 bp, Zea mays
acgacttgacctcaacccgccacccttttttatttttctatagcataacattacaagaaagatatggttcaattttaaccactggacaggacatctaatcagacatacgtacatgatcacctcatgtgctacatctaaccccatcaacttagctcttcccacatagacaaccacgacagcaccgattgagcccaaaacaccgaatttccacaattcaagccatacgagataaccaacatcatta

SEQ ID NO: 294477 - DNA, 283 bp, Zea mays
acgcgtccgcggacgcttgggcggactcgttggcaaaggacctgagtgcgctgtggactggcgcaccgggctgttctgtgtgccaccggacagtgttcggtgcaccatgcccgtgcaaatccgaagcagccactctagggaattcaacgacgccctccgctataattcaccggactgtccggtgtgccagcggatcatcggctaactcgtgccaacgggcgactctgacggctgaacagtgttacgacagaagtcatagcagaaagtcacagggcaccggact

SEQ ID NO: 294478 - DNA, 323 bp, Zea mays
aaaaaggctagtacatacaactacaaaacatttacgttttccagtagatctgcaccgatcagaggtacggggtcatccgatcgagaagccggcctctaatgtcacctaccgctaattcattggccgcctctccataaccacggaccaccactaactctacaactccctaagtaactaccgttacgtcctatactccaatatcatcctggatcagtagacacaaagccccctcagatcccgcttcctaaccttctccacggatgaagcgatactgaacgccatccatggcatgaacagcaaggcactagactgccgcaacatca

SEQ ID NO: 294479 - DNA, 273 bp, Zea mays
aggacgcgtgggcaggctgcggccggcgggtacggtttgtccacctagtacacggacgccagggtgagggacgtcgcgtccacgggcgagaacgagtacgacgagtacaagaaggaggagatgcagcacatgcacaagcaggaccttggcgaggtcggcaccatcgcacgtgggcgccttcgcactatacgagaagcacgaagcgaagaaagactcggagcacgcgcaccgacacaagatcgaggaggaggtcctggaggaggttgtcgtcag

SEQ ID NO: 294480 - DNA, 447 bp, Zea mays
gaaagaaaaaaaaaaaaaaaaaaaaaaaaatttaaaaaaaaaaaaaaaaacaaaaaaaaaaaaagaaaaaaaaaaaaaaaacaaaagaatacaaaataactaactacacaataaagacaactaaattaaaaatcaattaaccggactttgacaacagtacacactggtaaaaccctgccttaacccaactaaatgtcttttcagaacattcgcctatcccaagatggtataatacctaacagacccgcacctatggaccttcccaaaacttgctcagcctcaatggctaatgcaacactccctgtacatgctcttcaaacccggctggagcggtagttactcccagagatgcacataaagttgccaatgacctaggaccaggatcttccgctcacttgccttacttaatcgccacgatcccattgctttccctaccaagctctaaat

SEQ ID NO: 294481 - DNA, 443 bp, Zea mays
cgcttttagcaaggctagtatctcatgtactgcaccagttgcaacttactaacttacgtcagctaccgtagtaggcgggcagtagcactgaataatgatcttatcacaactttttttttgcatggcaatgccttaccaggtatctatgttcaagaggacttatgatcatcttcctaaagatacttactttggcatgtataaggaagcgacacgaggaaatccaaattattttctcacctatggtaatggaaaatctgctgcacgaattcaagaccatctccgtactaatggcgcgcacaggtggcataattatgcaaagagcccaaatgagatcaagttggaagaagcttgcagtctgcattatacatacactaaattttcagatttgacatctagacgtgatcgctgtggatgcaagcctacgaaagaagatgttaagagat

SEQ ID NO: 294482 - DNA, 365 bp, Zea mays
cccactcgtccggggttggcttctcctcttttttcggttcgggttcgggttcgtgagggggtgctttgttcggcttcgtgggtgagcggatcgagatggcggcgtctgatgttgagtaccgctgcttcgtcggcggcctcgcctgggccacggacgaccactcccttcacaacgccttcagcacctactgcgaggtcctcgagtccaagatcatcctcgatcgggagacgcataggtcccgcggcattagcttcgtcaccttctccactgaggatgctatgctgaacgccatcgagggcattaactgctaggagctggactgtctcatcattaccgtcaactatgcccaatcccgctgctgtcgt

SEQ ID NO: 294483 - DNA, 396 bp, Zea mays
cccacagcgtgcgtggactcgtgggcggacttgtgttctgaccggctgccacgactacatcagttccggtctcgcgcggcggtcgccggagcgagcagagctggcgcaaggcccgttggatccgccggcgccaagattaatgacgccgatgtagccaaacagatccagcagatggtgcggctcatccgccatgaggccgacaagaaggccaacgagaactccgtcttcggctacgaggaatacaacattgagaagctgcagcttgttgaagctgagaaaacgacgattagaccagactatgaacgcagagagaagcacgttgaaatacggaagaaaaatgagcactctatgcagatgaatgcttctcgcataaaaagtcttcaagctcacgatgat

SEQ ID NO: 294484 - DNA, 450 bp, Zea mays
  unsure (1)..(450): unsure at all n locations
tctccgacccgaccgctacccgttggcggacgcgtgggcggacgcgtgtgctgtacgcgtgggcggacgcgtgggtggaagcccgaacgtgaactacaccgactggctgaagcagcacagccccttctacaaggacgactggctggtgttctactacacggcggggcaggcggacgtggtgcaggtggacgaggtgggctacaacaagtgcgactccaccaacgccatctacaactacagcaaggggcgcagcttcgccttccagctcaacgagaccaagacctactacttcatctgcagctacggctactgcttcggcgggatgcgcctcgccatcaaggccgagaagctgccgcnnnccccggggcgtcgccgccgccgtccgtcagcgaccgctccgccgncgccatcgccgncttcgccaggtcccacgcgcccgtcatctacgcc

SEQ ID NO: 294485 - DNA, 296 bp, Zea mays
gtcaaggccttcagatttccatacatctgattagggtctgaaattacaggtcttagtgaccagggttggcgggccgttaagcagaaaagataactcttcccgaggcccccgccggcgtctccggacttcctaacgtcgccgtctgccggcacgtcccggctcgggaaatcttaacccgattccctttcgggtgacgcgcgtgatcgcgctatctgccgggtttcccaccgcccttaagatcggcttacccatgtgcaagtgccgttcacatgtgaaccttttgcttttcggccttc

SEQ ID NO: 294486 - DNA, 287 bp, Zea mays
cggtccggaatacctcgcgcgaccctcgcgtgcagggacgcatacgaccatacattttaatatggtctgaaattacaggtcttagtgccgggtttgtctgaccgtgaggcggaaaatataactctctacgaggcctcagccgtcgtctacggacttcctaacgtcgacgtctgccgccacgtcccggttcgggaaatcttaacccgagctccctttccggtgacacgcgtgatcacgctatctgcctagattcccccgtcccttaagatcggctgacccatgtgcaa

SEQ ID NO: 294487 - DNA, 427 bp, Zea mays
  unsure (1)..(427): unsure at all n locations
cccacgcgtccgcggaagcgagtgtgaataaagggccgcgatggaggctgacagggcaggggcaagatccgaggttgagatgaagaaagagaaattgcgccagttgttgagttcaaccagtagatatgctgataacttatggtacatagaaccgaacacctaccgaagaagggaccgggttagaatggactatcacagaagcttaaggacacttattcattgacacttggaattgggatgcttggaggtaacaccaactggaatgatggactctcaatagctgaaagacttgtcaaatctcatgaaagggaaagtgattggtggtatgcaanaaaaaaaaggtttacattacctgaaagggcattngctgttgattgggtttttgctgatgggccacctgggaatgcaaggaattatgataacaatg

SEQ ID NO: 294488 - DNA, 278 bp, Zea mays
cggacgcgtgggcttactggttctgttgctatggttgacggatgtatataggatatgtgccttttgacgcgtgtaagcacaaacgtttagacagaccgagagcagcagccagtgaacctgttatggttttgcagttgttcagtacggcagaatgttgttaaaccgtagctcagagatgtattaccagtggcgctaagctgtactgttacggtgtataatgcggatacaaataaacaatctagcgggtcattaaagcctgaactcagataacatgttct

SEQ ID NO: 294489 - DNA, 263 bp, Zea mays
ggtggcgccatgggagggctccggcagcacacagtgctcatctctacccagcacgacgagacagtgacgcaacgacgagattggtggtgacctggatgagcacgttatagagcccgacattgccgatcagtaccattactagaagacaatgtgccagctaaacacgtctgggcgcttcatcattggttgacctgacaggcacgcccgcgtcactggacggcagatcattcgagacacctacggtggctgctgagcccactgac

SEQ ID NO: 294490 - DNA, 378 bp, Zea mays
ggcgatttggccaaggttgcttcttgtcgaatcctgctcgagttgggccttgggcgtgccgagggtgcgcccactccctgaggaggctctcgggcgagacgtaacttcgttcgggactacagttcccgcccgaggttgggctcgggtgaggcgagatcgcgccccttgggtagacgaagccttgacctgaatcgcgcccatcagtctctgcagcttgcgctgatggtggttaccagccgtgtttaggagtgttgggggtacccctaattatggtacccgacaaaaagatactagtatctccactatttgggtctattcggtggaccgaatagaccgaaccaaaattgtgagtctattcgggttcggttcctaaaatta

SEQ ID NO: 294491 - DNA, 294 bp, Zea mays
tgcctctgtacgacgccctcgtaggctcgaacaggcagaagttgcagtcctggtccgtgttcatgcctctgtacgacgccctcggagggaccatcagctccagatcgtgggggctgcagagagaggtcgaccaaggcatgaacgaccgggtgccggacttcgtgttcctggcgcacgtggtggacgtggtgtcgtcgatgcacgtgcctttcgccttccgctcctgcagctcgctgccgtgggccatgcgctcggtgctgctcccgctctggcccgtcgccttcgccttcatgc

SEQ ID NO: 294492 - DNA, 369 bp, Zea mays
  unsure (1)..(369): unsure at all n locations
gcgcggccggccgctgctgctgtttcggcgcgtgagatggatgattgcggcgggggcggctgcaagaggccgttccagctggcgcggtcgctgacgtaccaccaccacccggggcaccggccggcggctgtgtccaggtggcggcggcagcaccagcagcatcagctcgcggacgagccgcgcgctccccggccgcaggcggtggtgctgtacacgacgtcgctgcgcggggtgcggcgcacgttcgcggactgcgccgcggtgcgcgccatcctgcgcggcttccgcgtggccgttgacgagcgggacgtgtccatggacgcggcgctcncccgggggggcgggaggtccaggcgctgctggccgcgc

SEQ ID NO: 294493 - DNA, 256 bp, Zea mays
cggccgaccacgcgtccgcccacgcgtccgcggactcatgcgcggacgctagatccgacacgtggacagacaccagagcggggctttaaaaaaagatggcgggccaacaaaacagctacaccatcacaccctgcctctcctactcccacagcacggggaacggcccctccgcgtcctgcttcagcaacatcaggaacctcaagagcgccaacagcaccaccgccaacaagcacgccgacagcaactgcctcaagaa

SEQ ID NO: 294494 - DNA, 249 bp, Zea mays
cccactcgtccggccgttctagccaatcttctaacctgacaatgtcttccgcccggggcggcttttctaggccggggctgggagccaatacgaggtgctgtgccccgcttccaacacagtcaataagtaaaacaacgtcacaaggagtggtaattcacaagcgcccacaggctcccacatatcctacacctatcaagtcatttcacaaagactgactagagtcaaactcaacaggtactactttaaacg

SEQ ID NO: 294495 - DNA, 218 bp, Zea mays
ccacgcgtccgaccaggcgcacacaacttcccccgagccatcgttatccactcccccatgatcccatcaccgaagtttataaacaaccggggccaccacaaacaaactgaactggacaccaacatcctatcggttaaccccaactgcactctcaacacccgcaattacactgaagtcaacccctacctgaccaacataatctacgccagttaacctca

SEQ ID NO: 294496 - DNA, 293 bp, Zea mays
acccactcgtccgcccactcgtccggctgtttatccaattgtttcttgcactccctccaacaagctagggagggtttgttcataccacggcgagctcgtttcattatccatggatgatgagaagcaccaccaccaccacctgatacaccacaagaaggacgaggagcacgccgcagccgcaggatacagatagtccgccgagtacacagacgccacagtgactgaggtcagctccacaggcgataacgattactacgagtacaataaggaagagaagcagcacaagcacaagc

SEQ ID NO: 294497 - DNA, 418 bp, Zea mays
acgcgttcgaccacgcgttcttccactcgttcggactttcttttactcactccatcttccccccggtgactttttcatagatgcatcgggcccatccaacctgataggaaaagctagctagcatttaccatctctaggccggcggctgtagtctgcctgcagctgatgttagctacaaacattgggagctagccatgtggagggatcccctggagctaaaacagatcgagaacaagatcaaccgccagagcaccttagtcaaacgcctcaacggcctgctcaagaatgcttacgaacacttcgagctctgcaacacctaagtctcactcaacattctcttcaaccgccgaaagctctacaagttctgcatccgacaaaacattaccaaaacacttgataggactaaaaaaacattatt

SEQ ID NO: 294498 - DNA, 249 bp, Zea mays
acccattggcaatatactttggggggtttatacctaatgctgttaggagtacaacctctcatagacagtatactgtcctacggattttcaaggtccgaccatggcacaccggacacctcgcaatctacgtcgctcttccggccgctggaccctacctccagctgaaccgattccatggacgactgtccgttaagcataaaagataactcttcccgaggccccctccagcagtctacatactttctaaca

SEQ ID NO: 294499 - DNA, 419 bp, Zea mays
cccatgctatcagtctacttaactgactgtctacacaacacatctctcgattcgaaattacgcactcatttaacgtatgatgaatccactaaatactatcattacacttctgcatctaactctatcttaagatttattatcatctaaaataaccgatgaattatcaatttttcatatcttaaacttaaataaatgcttcaccaacatatttattgtatcaaaaaacatggaattgaaccccttcatgcttactataactagatatttcagctttctactggctgctctaactataaccccagctctatctattatcttcaacaaaatacgtctcatattaaaccaattgactagaataatcctacttttggattccttatattctaaactcttttccacactaatcaccaaatctattc

SEQ ID NO: 294500 - DNA, 366 bp, Zea mays
cccaggcgtacgcctcctacacctaagctttttacgcctacgtacactacaagccctaaggggggacctaccaagcctcccacgcgccaaccgaccccgccaacgtacacccctgcagcaaagcctccgacacccaagccgtccccggctacgtacaccctttctaccaagcctacgacgcccgacccgaccccgcctacagccactccaagccccaagccttccacacacccaactcccaagccgaccccaccgacgtacacgccttccccaaagccttcgacgcccaagccgaccccaccgacgaacatctattcctcatagcctcctacacccatgcctacaataccgacgtacactttcaca

SEQ ID NO: 294501 - DNA, 293 bp, Zea mays
gaccgacataagtgcactggtgtacgatgattcacttcacgctttcctgccgtatgaccgcgagtggataaaacagaagctgtttcagcacctgaagcggatggcgcagcagtagggtatccagcaccgctggcttttgacctgcatctggttaccggttcgggcttggattcaaatgcccgggatgtgtgtatagaaataagacctgtatcccgtgtttgatgtagaacatgtggacatggtgttgcttctgaagacgattttggctcaacaatgcagatttcatgtttgtc

SEQ ID NO: 294502 - DNA, 343 bp, Zea mays
cgacgagctccggcggtaccggagggtgcaggcgctgctcaagaggctcaacaagccggcgctgcggagcatccaggcacagccccgacggcgacctcatcgactgcgtgccggcgcacctgcagccggccttcgaccacccgaggctgcgaggccagaggccactggcgggcccgccgccggcgaggcccaaggggaaccgcctccgcgacccgataaggaatgacaccgcggaggccgtcggcgtccagcagctgtgggcggcgtccggggagtcgtgcccggaagggtccgtgcccatcaggcgtgtcacggaatcggacgttgctccggccagcttcgt

SEQ ID NO: 294503 - DNA, 411 bp, Zea mays
gaaagttgcccgcacgtctactttgttgggaatcaagataaatatgaaactcgactgggggaagggcaagaaaaacagaaagtgaggctaatctccatcccaaggttctcggagagtggagtcgctgtaatgctcaatctgaggaacttggaatgcagcacattgagtttctcaacaagctttgatgcctgaatatgctctgatgtttgtaagtgcagaagacttcaatgtagcatgttgagcggcatgagcacgagggaactacgtgaaccctttgtggggtgtgggggtgggggcatggaaggatgtatttgtaccagaacagttctttattagatgtatgatgatgaccttaggttttgccaaatagatcttttagaatgcagatgctgtaacttgtaaccacaaccg

SEQ ID NO: 294504 - DNA, 376 bp, Zea mays
cgacgcctggcacatgatccctcattgaatgatgttgaagagaccatggtagagacgattgccctctgccagagaaattcacataatttgaaccaacagcagagagaggcactctggtttccgttattggaggcaatgatggcccctcagaagctgtctagttcagcttcacctcatccacactctgaagctctgaaatctttgaccatgcaagttctcaacagtatggcagcatttattgcccttccatccatcctgcagcgaatcttacaggacccagtttattgaaaaggaaaacttggagaaatccaaggccttattctgggaatgttggatacctttaactatgaacagaccctgctggaaacgacaacta

SEQ ID NO: 294505 - DNA, 142 bp, Zea mays
caaccagcaagcaaaaattccccaatcctgtcgtgtccgaggctaagatgtccgggcgcgggaagggcggcaagggcctgagcaagggcagcgcgaagcgtgaccggaaggtgctgcgcgacaacatccaggggatcacgaa

SEQ ID NO: 294506 - DNA, 392 bp, Zea mays
gtgtacgtgaagctgggccaggggctctgctccttcaaccacctgctgctcccctagggcatcgggacattgccggtgctggacgacagggccctcacgcggagcttccgggaggtgagcccaccccccgaggcgtgaggcggagagtgtggccccatggtgtcccccacgctgctcgaggcgtgttcctccaagtggatgagctgttcctcgaagacttccaggccccgccccacgagctcttccaggagtttgactaccagcccattgctgcagcgagcctggcccaagtgcaccgtgccaggctgcacgatggcaccgtggtggccgtgaaggtgcagtacattgacctgcgggaccgctttgatggcgacattcacaccctgtagctc

SEQ ID NO: 294507 - DNA, 390 bp, Zea mays
gttcgctgcagtccaaggattgttgctgtagcacttgcagcacaaatctactgctttgatgctgttactcttgagaacaagctcagcgtcttgtcatatcctctgcaaggtgcacctggggtaaatattgggtatggcccgatggctgttggccccagatggttagcctatgccacaaatactcctttattgtcaaacacaggccgtctaagtccacagaacctcacaccttcaccaggtgtgagcccatctacttctcctagcagtggcagtttagttgctagatatgcaatggagtccagcaagcaattagcttctggtattattgacatgggatataaaacattttcaaagtaccgccaggaacttctaccagatggttctaacttc

SEQ ID NO: 294508 - DNA, 422 bp, Zea mays
cccacgcgtccgctgagtcaatgaagatggattctgtctgcctgaggtacaccagagtattttggaacttgatcattgcgccttggaagtttttgtttgcttttgtgcccccataccacattgcacatggctggattgcttttatatgctcactggtcttcataagtggtattgcttatggtgttactaagcttacagatcagataagctgcgtcacaggagtaagtccatatgttatcgcattcacagcactggccgctggaacctcatggccagatctagttgctagcaagatagctgctgagcgtcaagtcaccgcggactctgcaatagccaacatcacttgcagtaactcggtgaacatatatgttggcattggtgttccatggttgattgatacagtgtacaacttcttcggttac

SEQ ID NO: 294509 - DNA, 341 bp, Zea mays
cccacgcgtccgcccacgcgtccgcccacgcgtccgattccatccctggttaagaccaacccctccatctccatgcatctccaatgaacaacaactgacagctctccgtgatctatctatctccttccggtagctttttttgcattggccttgcaagtgctttattgctagagtagctgcgcttgcattattaactagataagttagtgatggatctcgcgacgaccccggcgcggctgcggcccatggagcctggactggcacggcgccttgtgcacgtggtggtcggcgtgtgccacatacttggaggcggcctgttccccaaacgcattatgatggac

SEQ ID NO: 294510 - DNA, 294 bp, Zea mays
gagtcattgtcaccaagaacctcaaaacccggctaagattcctgcgttctctagggagtgccttagacaaaaggttgctgttgctactggagcgctccctgcgacacctcttgttcttgctagggcacccatatgcatttctgcttgacatactacggaggacctgattcaagcccttgatgttatcagtcgagttggcgaccttgtgggcattaaatgctttcctgtccaaccaccacagattgctcgaactgatcatgattagctcgacttacaatcaacccttacttgccc

SEQ ID NO: 294511 - DNA, 271 bp, Zea mays
tgaacgacggcgtgaagaggttcaccgtcaacgcggtgttagggatcgatattgacctgaagacgctggaagcgtttgcggacgacaagttcgatagcacgggctgtcagatctggggaaggaaacgactttcagggactgtttggttgagatcaggcagctcacgaatctcctgctcagcagccagcctgagaacttcatgaacccggtgatcaggcagagaaactacgggtctctggactacaagaagctggccatcatttgtgaaaag

SEQ ID NO: 294512 - DNA, 369 bp, Zea mays
gaggcctacgacccacgcgtacgcgtgacgcagggaaccactgcaggatatttcactaatgaagttcaaggattgatgggggatcgaaatccaaagctcgcattaaggcaaagataacacatgacagtgttgtgatgcagacaaaatgaaaacattctatgaaggacattcgtagtcttgctgataacagtaaggagttccttgcataagaagaaagccagataccaatacatgaagtgatttgctacaggtattatcataatgttaccaatgttaaagtgaaacacaaaccgaacgaatattaagaatggatagaagatgtgtacgatgaggaattagaaaagatgatggacacatttgaagatgata

SEQ ID NO: 294513 - DNA, 435 bp, Zea mays
cccacgcgtccggcccccggccgatatccacaagatagagcatactctttggtggtattgatgatgaaggtttgggctgcatacgagaccaaaccggtgcgaaggttgtcggtactttatcgaagagtatcggcttcccgaagcttgaagcggatatcagccgctaccgtcgacaacatattgtcagcagtttattctattctaatttcaaggtaaacattttgagtctaactcttatttcctttggtacgaaaatattttctaacgaaggctatttgtccacagaacatgcttttgagcaaggcattaaaaatgcaacaagatttagaggataaaaggcaagaagttataattgaaaatttagaaaacaaaatataggagcaaactgctgctattgagaagaaagacctcgagctacaaacaggcaaagggtta

SEQ ID NO: 294514 - DNA, 271 bp, Zea mays
acgcgttgcaatgctggtactctcatggttctaaatttggccgtcactccaactgaactaagcgagatcgtccctttgttgcgtctggatgaagaccaaactggcaccgaacgcttcccctcgacatccaacacattgagcaatgcgatgaccgaacatgctttaaaggatgacctaatgagccttatccatgccatgctaggctaggctattgctgcgccaatagtactagtctaactgtacaccgcttcgttacctagaataaaggtac

SEQ ID NO: 294515 - DNA, 270 bp, Zea mays
cctttcgggtccgtttccattctaagcctgaacgaccagctcctgcacaccaacatcatcgacatgcagctcacgcacatgccctgcaacttccccagcctgaccatcacctttctcttccagcacagctccaaccccatgtacctgctcgtgctcatttaacacaacaacaacgactgctacctggtccacgcctacatcatgcataacaactccctccactgcgaacccattcacgagtcctggggctccatctgaaggatctacccc

SEQ ID NO: 294516 - DNA, 413 bp, Zea mays
gggtccaaaactcatatgggagtttcaattttccttggttcaaggaggacctttggccagggcactaactgcaaatctgctaaactgtattatgcaaccttccacatctctcaccactgtttccacaggagttttacatctgggtccctctttcaccacttgattgtctacggtagataaatcgtttgagttctgaactgccttaggtacggcaatgcttgctacgttgacgaaagacaccgccacagatacgaggtgaatcctgacatggtcccagaatttgacaaagcaaggctttctttcgttggcaaggatgaaagtggcgaacgcatggaagtatatatatgattgccaactattttcgtgaagaattaaccttcttctaatctggtctcatgtatttggtctggcac

SEQ ID NO: 294517 - DNA, 339 bp, Zea mays
gggccgacccactcgtgcgcccgcgcttactgaccttgcatttatgcattttaaaacggaatcatgggctacgagaacgaggtatctattttacagggactaaaccattgacagcaggtcaagcatcttctactccaaggccactattgccctcaacgaccacttcatcaaactcttctcgtgttacaacaactaatgagtctacagcaacctcgtcgactacctgatccgtcacatgttcaatacccactatgctactatagagatagatttctacctcactatcgagggtcgtcaccaatgtcctttgaactctgaccatctttgctgcttgtctat

SEQ ID NO: 294518 - DNA, 319 bp, Zea mays
ctctcgcctacgtacgccaagtattggattttgactatcggacccaacaggtggcaatgtgcggccggttactaaccttgcagccatcggtgctgtctgctgctgcactatgtgcaatgtcctgtgttactgtcatgaccgtgtcaagtacctaggatcattttgctcacagacgcactcgaacttgacctgaatgttccctggagactacagatgggacaccggcagtctgtccacaaacccataggcgttcgcgcagaacaagacgacagaggtgatccaatgtcggtagtcgatgctttgttcactcggctacata

SEQ ID NO: 294519 - DNA, 475 bp, Zea mays
gacccactcgtccgctacgttcttctgagattgcattctaaagcttgttgttcaaaaaattggtgccttatgggggaacttgttcaatatgcttcaactttacgtgaaagtggtggacccttatctccaagtagaatcctttctaatctgaggaatattggatgtcgcttgggtggtggaactcaggaagatgcccatgagtttctaaggcatcttgtgatgtctatgcaagcagcttgcttggatgggctggatggtgagaagcacgttgaaccaagtttgcaggaaacaacactgatacaacagatgcttggtggccgtcttaaatccaacgttaagtgcctcatatgctatcacgagtctgaaagatatgagaatataatggatcttactatggagattcatggctgggtagagtccttgcaagatgctttgacacagttcactgctcctgaagatttagatggcgataata

SEQ ID NO: 294520 - DNA, 321 bp, Zea mays
gagcgcgccatctccaaggagggctctctttacactttagagagcacggactgcttcaacggtgatgtgctcctattccatagccatagctcctagctctccttactcttcgatcgttcttacctcttgccatccattcagtcaccgacgccgaggctgactatggaggacgcgctcgcgaacgccgaggcccccatgttctactgcctcgactcgctattctcggacaccgacatcgacccacgccgcgatgtgcgcatgctcatcgtcaactgtagcctcttcaacactacgccatctctcgcgtccatggtagtgcac

SEQ ID NO: 294521 - DNA, 476 bp, Zea mays
tccggccgacgcacgcgtccggagggatatgagacgctgctagattcaactgtacattacatgaagatttgaaggaagctcgatctggttaaaaggtgaagtgagagctcgccacgaagattagtcgagaacgtatccgtcacgagattgacctcatgatgtcagacatacaccctgttaaagcaatgtgtgacatccgcgatttggggctattttatgttgcatgttcttttcctgaaaaatgcaacccttctgtatttgacaagcgtgattggcagagtctttcacatattgaagcagcttgagatcttgcatattctattggcagcttgttgctcagcagtggttctgacttcaagtcgcacgatgagcgaacaaagctaggcttgtctagtgcattattcaaccccctccgaagcatgttctacctggacaaaatatctaagaaagcttctgattctagctatattatcaaa

SEQ ID NO: 294522 - DNA, 351 bp, Zea mays
cagggaaggtcccatatgtcgtgtatctctttcctgatgaggataagcagcatatggtcctggccagattgagtgatgaaaagattctgcaatgcgatatgaagctaatgcagattacacaacagcatgatcaccatttaacgcctgctaacaccatcactcatgtggataacaacatgcaacttgtgacctccagagatgacacgtctatacctgtgtggaagccctgcatcccagtactgatacactatatcagtgagcctcacatgcactcaacgccatcaattgcactacatactaactcaaagtgactggctgcacacagcttggacaaatagatactgatataca

SEQ ID NO: 294523 - DNA, 198 bp, Zea mays
ccacccaggccctgaaaaacaataactaccttacacttgctgtaccacatcatgatgcccataccctactagttcactccattaatcctttttataacaactacaaccctaatacacttaaagatgatcccgtcgtcctcaaagccctctactatatatatatcctgaacgaagaaaccattgtgtactgctacaatt

SEQ ID NO: 294524 - DNA, 359 bp, Zea mays
acggccgacccactcgtgcgcatggtctatgggacgatgactttgacgattacgaccactcatgccgacgttctagctgagctacaataacaagtcgacggaggtgttccagtccgtgccgtacgtggtggccctcttcatcgtcatgctgtggatctactacgcgctgctcaagtccaaccagctcctgctcatcaccattaactccgccagctgcctcatcgacactctatacatcgccatgtacctgctctacacgcccaagaaggcaaagatgttcacggtcaagatcctcctcctccttaacgtagaccttttctggctcatcctccttctcacgctgttgctctccgtcagac

SEQ ID NO: 294525 - DNA, 460 bp, Zea mays
gaccggcatgactatcaccctcgacgtggtctcgtctgacaccattgacaaccttaaggccgagatccatgacaaggagggcattcccccagaccagcatcggctcatcttcgctgtcaaacagcttgaggacgggcgcacgcttgctgactacaacattcagaaggagagcaccctccaccttgtgctccgcctcacgggaggcatgcacatctttgtgaaaaccctgaccggcaagactatcaccctctaggtggagtcctctgacaccattgacaacgtcaaggccaagatccaggacaaggagggcatccctccagaccagcagcggctcatctctgctgggaagcagcttgaggacggtcgcacgcttgccgactacaacatccagaacgagagcaccctccacttggtgctgcgcctcaggggaggcatgcagatcttcgtgaagaccctgacc

SEQ ID NO: 294526 - DNA, 475 bp, Zea mays
gaccacgcgtccgctccgcgcgcctcccctccccgccccgccgtcgtttccatcggagctccctaccgactgccgggagccattgcatccgcatcagcgacgcgccgcggactctccgctctcctcctctccccttcctcccgtgcgctccgccgccgcctgggccccctcgccgcggcggcctcctcaccgcacgtcgccccgtggccccttctcgctccgcgcggtgccagaaccgcgtcgtccggcgggtcctggcactccccgctgaacgacccgtccccgaactggagcaaccggccgcccaaggagacgatccttctcgacggctgtgactacgagcactggctcatcgtcatggagttccccaccgaccccaagccttcagaggaggaaatggtcgcggactacgtcaagaccctcgcggccgtcctcgaagtgaagaggaagcaaagaagaaaatctactcagtgtg

SEQ ID NO: 294527 - DNA, 347 bp, Zea mays
ctagctcgcatacagactaataatctctttttcacttcactaacaccaactagcaactctgtctctgttacaataatgcccgctcgctcctactcctcccagccgcagctgatacacccggccgcggtcctggcagcgacgctgctgctgctgtcggcgtagcccgacacagcctctacccatgtgacctacagccaggtgacatcatccatagcgccatgcctagcgaacacgatgagcaacacgacatcgacctccgaagcgagctgcaacggtctgcgctcgctcaacaaccgcgcgtcgtctgctgcgcaccgacacgccacctgcaactgcctcaatagcat

SEQ ID NO: 294528 - DNA, 346 bp, Zea mays
  unsure (1)..(346): unsure at all n locations
gcagtctcnagttacaattcccaatccattaaactttaccagccttttgcaaactcagaggagnacgttattgtacccaaggcggagaagaagcctgtttttaagataccctctgaggacgagcccgtggccccggcggataaagcccccgctgtgaataagcctaatgcggataaactgctcccggcgggaaaatccgacggcaaggaatgccgtgttgacaagaacgtgcggaagaatgccaagaagagcgtggagacgtacaagatctacatcttcaaggtgctgaagcatgtgcacccagacatcggcatctcctccaaagccatgtccatcatgaactcct

SEQ ID NO: 294529 - DNA, 195 bp, Zea mays
catcgctggttcatggagatgaagtggaagaaggtgcaccgcttcgtagtgtacaagatcgacgagcggtcgcgcgccgtgctggtggacaaagcgggcggacccagcgaagggtacaacgagctcgtggccacactgcccggctacgactgccgctacgccgtcttcgacttcgacttcttcactgttgacaac

SEQ ID NO: 294530 - DNA, 356 bp, Zea mays
caaggaacgattccatttccttcctccggtcaaaagccctcgtgcccggcaccggcaccggcagtgtccaacttgctcctcgccacgcttctctcgtgcggcgcacgagccatacggacgcactgcggctatgtctccgcggtcggtgaccccggcatgctgcgcgacagcctccgtgtggcatgggaggcgtggaactgctgcaacgaagacggtcaggaagcccccggcatgggcagcccacgcagtgccaattgctacgatcttctcggaccgaccattccatctctaactatcctctatcaccgtagagagtgaatgggttgccaccaagattaggtctctgaggaagcgtg

SEQ ID NO: 294531 - DNA, 456 bp, Zea mays
aatagatgacaatgacaacattgaagtttaagatttagaatacgacgctgaagctggggctaagagaaagctcacctcagctgtttggaaagagttcaagagagtgaagttcaatggcacagtccgggcaaagtgcaactattgcttcaagcaactttctgcgtcaagtaataatgggacaaaacatcttcatgttcatttaaaaagttgtgtgcaaaggaagattaagttgaacgggaagacattggcacatgcttctttgagatttggtagaacggatggtggaacagtttcaatagagaattacacatttgatcaagaaatagctagaaatgaacttgctgcgatgatagttctgcatgaataccccttaagcatggttgatcatgtgggtttccgaaaatttgttggtgctcttcaaccacttttcaagatcggaaccagaaacattgatag

SEQ ID NO: 294532 - DNA, 469 bp, Zea mays
gaccgacccagacgtacgcgcgagctagggctctggcgtttgccccatttcggtgctcacctggactagactgtgcctgcccagctgggaattcactcgtcgagccttacactgctggccataacattctcctagcccacgctgaggctgttgatctttacaacaagcattacaagcgcgacgacacccgcatagggcttgcgtttgacgtaatgggtcgtgtgccatacggaacatcgtttctggataaacaggccgaagaaaggtcctgggacatcaacctaggatggttcttagagccagtggttcgtggtgactaccccttctccatgagatcattggctagggaacgactacccttcttcaaggacgagcagaaggagaagctcgccggttcctataacatgttggggttaaactactacacctcacggttctccaaaaacatcgatatctcaccaaactactc

SEQ ID NO: 294533 - DNA, 456 bp, Zea mays
cattgagcgtctcatcgtcttcgccttcgtttaatcgtatttattagggatcatcaggggtgagagccggtggctgcacggtgcagcaggcgctgtcgccggaggccgcggtggtggtgaagcaggccgtgagcctggcgcggcgccgcgggaacgcgcaggtgacgccgctgcacgtggccagcgccatgctgcagcagcaggcgccgacggggctgctgcgcgccgcgtgcctgcagtcgcactcgcacccgctgcagtgcaaggccctggagctctgcttcaacgtcgcgctcaaccgcctgccggcctcggcctcgccgctcctcggcggtcacggccacgtctactacccgccgtcgctctccaacgcgctcgtcgccgcattcaagcgcgcgcaggcgcaccagcgccggggcttcgtcgacacgcagcagcagcagcagccgcccgtgc

SEQ ID NO: 294534 - DNA, 460 bp, Zea mays
acactagctagctaggtcgtcgttcctaattatctgaccttgcagcaggcaccacagcagggggagcataaagctgggcgtgccgcaccggagcgccggcgcggacgagcgcggcgagagctccgcgccggcgatggccggcgtgcagcgggaggtgtactcgaagaagggcgtgatgcggcggctgatgcggtggagccggccgcggtgggccgcggcggagcaggcggagtgcgcggtgtgcctggacgagttccgcgcgggcgacgtgctggcgcacctgcgctgcggccaccgcttccactgggcctgcgcgctgccctggctcgagggcacctcacggtgccccttctgccgcgccgtcgtggacgccggcgccgccgtcgacggcgcctagaagcggccgaggctctggtcttgctggggctggcccgtgggacggcgcggggcgccttgtcgc

SEQ ID NO: 294535 - DNA, 262 bp, Zea mays
cggacgcgtgggcggacgcgtgtgtgccttatcagatccatgaaattaaatacgtcctcggcacacttaaaatgacgtatggcctatcatactaacccatcataaacatctccttgactaatctttatctacacctgcacaactacaagttcacatcgagataaacctgcctgatgaaaatgctacgcttcaaattcttcatattcatacatataatactaatgataattctctactatcaccagatattaatctacttgat

SEQ ID NO: 294536 - DNA, 315 bp, Zea mays
tcgcagacgcgtgggtagacacatggactgacttgtgatcgaacccgctgggattggtaaacgagatcgggagtttattgcagtggaacaaactgtgatggcacaagatgtccaagaccaaagtgatcaggagcgcacacattgacacaaaggtgcgagcagggagaaccatcccacggaggatctacatgttcacagatccaggatccccgggcaggaaacatgttgcgagagcatcacatgagccgaaagcagagatcacaacatctgaaggaaaacatatccatgaaattcctgtttccaggaatgcaagcc

SEQ ID NO: 294537 - DNA, 255 bp, Zea mays
cttactttgtgaacaactgtatcttcttctacgagccgaagtgcatcaagactggtttctacgacaatggctcgcactcaccgttaaggtgttcctcgtgccacttcttatgcaactccaccattgatccttaccttgtctcacaccatctcatcctttcttatgcttcttttgtcaagctatacctatacaagtctcatctttaccagaacgggaagattgtaatactactggatttcttgtggtactaacctt

SEQ ID NO: 294538 - DNA, 268 bp, Zea mays
cccacgcgtccgcagcctcgctgtcaagatccgcaacagcggacagacacgcgggtgtgcggtcttgatacacgtgcacgaagggatctaccaaaagctcgcacaagcactcatccaggctgagcacagattgaaggtcgagaacggtctataagagagtacacctcagggccccctgattaacgaaactgctgcgcaaaaggtggagaagaccacaaaagacgcaacctctaagggagcaaatgtcatgccaagacggaaaagacac

SEQ ID NO: 294539 - DNA, 290 bp, Zea mays
acccacgcgtacgcccacgcgtgcgcccacgcgtccggaggatttcgttgagatctaagatagagaatcgctggggacagtctgttgtctgctgcgtacggtggtgttgaaggggagaagtttaagatctgttccacagatcacgcgtgcgcgctcgcgaatcggaggttccacacatagcttcgtcgttttgaatttgatgtactaatggagtctaagggtggcaagaagtctagcagtagtcgttccatgatgtatgaagctccccttggctacagcattgaagacgt

SEQ ID NO: 294540 - DNA, 314 bp, Zea mays
cgaaccgacccactcgtccgatctgctcctccaaagatctgataagctgttatgtttgttgcaattcataacattgttcagacagggtaccacggcagaacacgtacaagcccagacgagcactgtacatagctacaataagtcttctgacatcaccaagatgacccacaaaacgggtactgacaagatatagtacaatgaaatcatttcgctggccctggaacttgtccacaatggtaaccttggtagggggctcaatattccatggtttgcatcttctgatgatcacatcacgaataataagcttctgacca

SEQ ID NO: 294541 - DNA, 447 bp, Zea mays
cacgcgtccgctgcgcacgcgcctcaacccttcctctttgcggcggcgccggcaaggcgggagccaagcggagctggagctgcgatgaagaagatcttcggcgccaaggaaggacaaggggcccggcccccttcattcaagacgcccccgaacgcattaaccaaccgggttaaaccggggccagaagatccaaaacttgaccaggagctctccccgtgcacagggcacatccccaagacccgtcccgggccgttccaagaagccatctaggcacccgccatacgactcctcaagcacaagcgcatgtaccacgagcaacgcaacatgttgtacaaccaaacctacaatctcgaccaaattggctttgctgccgatggcctcaaggatgctcaacagactatgaatgccatgaaggcagcaaacaaggagctcatgggaatgatgaaa

SEQ ID NO: 294542 - DNA, 351 bp, Zea mays
  unsure (1)..(351): unsure at all n locations
gacccacgcgttcgccgcgcgtgcgcccactcgtccgcccacgtttcctcccacgcgnccgcccacgcgtccggccacgcgtccgtccacgcgtgcgcccacgcgtccggtacttccaaagttccacagttccactgcacagatcgtcggcggcggcgcaggcaaggccacaatgtcttcggcgcccagcagcggcaagcgcgggagggttcccgacccggaggaagacgtctacgtcgacaacctccactcccacaagcgctaccttaccgagataatggcatccagcatgaatggcttgtccgttggagattcagttcctgacaatatcatggggtccccaatgagagt

SEQ ID NO: 294543 - DNA, 472 bp, Zea mays
ccgacccacgcgtccggctgcaccggcgccccagccttgacgagctttatgtcgacacggctgttaagaagttggagagcagagattttgttggtgctaaaaggattgcccttaaagcacagaggattttcccagagatagagaacataccccagctgttaactgtctgtgaagtacattgtgcagcagaagcaaaagtaaatggaatgttggatttttatggaattctccaagtagaaggaacagcagatgaggtgaccataaagaagcattatgcgaagcttgtcctctcacttcaccctgattaaaacagttatgctggtgcagaatctgctttcaagtttggtgcagaagcatactcaacattgtctgatcgaaccaaacgatatgcatatgatgtcaaatggagggctgcttccaaagttgcaccaaaaccagctacacaggcgacacaacccaatcaggctacaca

SEQ ID NO: 294544 - DNA, 417 bp, Zea mays
gaccgacccacgcgtccgcggacgcgtgggcggacgcgtgggggacgtttgtgttgcaaggcttccaggttggtgcagggcagggacggacaagcttcccttttgccagattctcggagagtacagaatggagttaccagagtacaacacgattgaaccttatgcgaaaatgaacgagaactgtccgtccttgcccccaacgtacaaacgacccgcacgctgctgactacgagattgtctactatgtatctttctgcagctgcttcgtttacacagttggcagtagagtgttgatgctatgttctgtaaataaaagacactatatatataggtgcttggtagatggtagttcttaccaggaatgtagctgcgatgtattcaggttcacggttttcaggcgatcaggtctgaagccac

SEQ ID NO: 294545 - DNA, 341 bp, Zea mays
caaaccctagctcccgatcttgatgtgtaaccctcgcgtcttcttcgagaggacggtcggctgctccccggtggacctgatcgtgatggagctgtacgccaacgaggtgcccaagaccgcggagaacttccgcgcgctgtgcacgggcgagaagggcgtgggcaagtccgggaagccgttccactacaagggctccaccttccaccgcgtcatccccgagttcatgtgccagggcagcgactttacccgtggcaacggcaccggcggcgagtccatctacggcgagaagtttcccgacgagaagttcgtgcgcaagcacaccgtccccggtgtgctctcca

SEQ ID NO: 294546 - DNA, 431 bp, Zea mays
agcaaagcacgctctggagaaatccttcgtttaccttcaccagttgaccgcactagtggccgtcgtccgaccacgatgagcacccgcgcggcaggatccgccctcctccgccacctgggtccgcgcgtcttcggcccagttttttctccggcggtcgcgccgccgaggccactgctggccttggccggcggcggggaacggggcggggcgctcgtgtgggtgcgggtgcggctactgtccaccttcgtcgtcgaggcgaaggaagaggtggcggcgtccaaggggaactcaggaagcaccgcggcggcgaaggcggaagcggtggaagccgctaaagagggtgacggaaagagagacaaagtggtgagcagctactggggcgtcgcgccgtcgaagctgatgaacaaggacggcgccgagtggaggtggtc

SEQ ID NO: 294547 - DNA, 408 bp, Zea mays
  unsure (1)..(408): unsure at all n locations
ctggagtgaagctttcatcatttgtgatttatcatttatgcaacttatgcattgtgtttgattgttgatcatggcaccttttcactgtgtatttacatcaatggttgttccttttcaagtctagcagctgtgctcacgcaacttcgtattatttgttcataataggttgagggaagttgaagcaaaagtctaacaaaaaatgttttacgggggatatgcttaccatggcaactcgtttgagcaaacatactctttgttatccagcatcgttttttgataagccacacctggaaggcggcgataaagtaataatgccaccttctgcccttgatcgtcttgcttccttgcacatcgagtaccctatgctnattgagctgcacaatgatgcaacccaacggatttcacact

SEQ ID NO: 294548 - DNA, 303 bp, Zea mays
tcacaggccttccctatttcaacaactcgcatagattatccacaaaacatgctctactgaatgctagcctaaatatactaactatcatcaataatccaacacatgctgctatacactatcatctttacaagaaaccaacccatgtcacagagaagcatcatctcattttcaaccctctactatgctcctacgatatcatcctacttacaatctaactaaatatcttccaagtcaatatcacaactacctacacccatctctttcatccagactctgactacagactggttaaccactacttcc

SEQ ID NO: 294549 - DNA, 396 bp, Zea mays
  unsure (1)..(396): unsure at all n locations
aagatgaagagtcagggcgtatgttctgcaagtcaagacgatgtaagcacgcnagctttatataggaagtcaatcgggatgtggctacgcacaccttgtacttactgctaacaattcgtaaaaaaatggttttgttcacgatcttgatgatgagtctggtgggatgcgaggatcatgctgcagaggtactaagcgcagccgcaccgctgaagtgcacaatttgtccgaaaggaggagaagggacaggatcaatgagaaaatgcgcgccctgcaagagctcatccccaactgcaacaagattgacaaagcctccatgctggatgaagcgattgagtacctcaaaaccctacagcttcaagttcacatgatggccatgggaagtggactgtgcatttc

SEQ ID NO: 294550 - DNA, 281 bp, Zea mays
ccgacccctaccacgagctttatccttttgtcatatcgacccctacaaatagcctccaggtcatctaccagatgtcttgttaatctttctttatggccaatcgatgtctctatcgcaaacctcaacacccaagcacgccttacacagcttcatgagtaccttcttactcacaactacatcactggctaccaagcaatcaaggatgacttggatgactacacatacgtttcatctgctacctcatccaagcatatcaacgtatcaaggtggcagaatcacat

SEQ ID NO: 294551 - DNA, 352 bp, Zea mays
tcccacgcgtccgcttaccttatcctccctctacgtttctcattcagcttcttgaaattctgcggggttcttattaacaagttatcggatctacatatcctcatcacatgtttattaccgctgcttcatcaactgcctcacctctaccacttactaccactctcttcacaacaccttcagcacctacttctagatcctctaatccaatatcatcctctattcttatacccatatctccctcaacttcagcttcatcaccttctccactgaggatgcaatacttaacgccatctaatgcattaactgcaaataactttacttcctcaacatcaccatcaactatgcccaatcc

SEQ ID NO: 294552 - DNA, 322 bp, Zea mays
cggacgcgtgcgctcacgtggttgagtctcctatttgcagcaaggttaagtacgacggcgacagggcatctggtctgatcaaggtggaccgtgttctttattcctctgttgtttacccacataactatggcttcattccactgcacactctgtgaggataacgaccccctggatgtcctcatactgatgcaggaacaagttgtccctgtgtgattcctgcgagctcgtgctattgggctcatgcctatgatcgatcaggtctagtgtcttcgtcacctgatcgcatagtgcttgctatgtttaccttaggccatatattttt

SEQ ID NO: 294553 - DNA, 455 bp, Zea mays
tcccaggcgttcgcccacgcgtccgcccacgttgcctatgttttgtgttcgttccacgtgtcgattgacatgcctagatctggaaccgctctctggagccctggcggccggcaacgccgtggtggtgaagccgtcggagctcgcgcctgccacctcggcgttcctcgcggccaacatacccaagtacctggactccaaggccgtgaatgtggtggatggcgggccggaggtgggggagaagctcatggagcaccgatgggacaaggttctcttcactggtaatgaactacgtacgtaatgcatgagcgtgtatctgcgttaccacctggtgtctctctcactctcaggcagcagccgcgttgggcgccttatcatggcccaggccgacaagcacctcaccccggtggcgctggagctcggctccaaatgcccctgcatcgtccactggcttgaca

SEQ ID NO: 294554 - DNA, 347 bp, Zea mays
ccgcctacacctacatacatgtattctaatgccagagcacaaactacattagcttgctatccttgaacattacccccagccatttaaacacctccactaccccacccataattcacgtaaactcctcaaccttctactccctataatgccatccctgaataatacataccaaaatctctccactctaacagaactacatatctatactgacctaccaatgttcctcatactctcccttaacacctacgacacaatcatttccagactcttaatgaactatctacatcatgcatcaccccttctctacattccacttgttataaacatactcttactatactcttcat

SEQ ID NO: 294555 - DNA, 393 bp, Zea mays
agatgaggaaggtataatttagaatgttaacatcttgatacatctggtgggtatagagcacttaaagatgggatgaagctttatatttcagacaacaaagtgatcttgacagaaggttttggttttgatggcgttgtccctgtgaaatactttgaaagaatcgaaacatggccaggacgagctccaataccgttccaaagataacaggccatgtttcagcattgctagttcgtacgtactgaaaaatgatttgtcatgatgtatcccggagaaccattttttttggtaattcacatacactattttggggggttggcttttttttttttggggggggggggagtcactatgattgtgttgggacctctcagatattcgtttgatgatttttgc

SEQ ID NO: 294556 - DNA, 411 bp, Zea mays
cggacacgtccgccttaatttctatatgaccctctgctccccatcaactctggacctgtcccaacgatccccaattcctccttcagatttcacattcaatgcaactcaagacagcaaagaaagcagacatatacgaatggggctcgtgtttatgaagctcttcagccatctcttcgtcgataaggatatgcatatccttatggtcagcatcgataccactggtaaaaccaccatcctctacaagctcaagcttgacgagatcgtcatggtcacctttagaggaacacattggacaaggactcggacactgttgcataccgatgatacagatctaaagtaagatggggatgtcgtgtgcttgagacgacaaggatggaaatcttttcaagtaatggctactctttttatcat

SEQ ID NO: 294557 - DNA, 150 bp, Zea mays
gcgctgactcgtgcggtcattttaactaatgactgcttataattcaaattggatgagatcaattaataagtaatgccggatatccaatcaaggcctttgggtcacaagtacagaaaagagaattctgaagctgataaagttgagcaggtc

SEQ ID NO: 294558 - DNA, 266 bp, Zea mays
  unsure (1)..(266): unsure at all n locations
cgcatggtttgttgtgtggatcgcaccagatttacaatttccccaggacttcatgtttttgtgacnatggttgatgtgtcgattaggccctctcgccgcggatcctccttgccagctgaatgtcctttggcatgatggtcacacgcttagcatggatggcgcacaggttggtgtcctcaaacaggccaccaaggcttgccgtaagtctgccctcaacactggtcgactgaagaatcctcaccggtaccgccctgtaactgttgccc

SEQ ID NO: 294559 - DNA, 207 bp, Zea mays
accactcgtcctaagactgaacatttggttgagctcactgacgaggagcgtaacgtactggctgttgcatacaagaatgtgatcgctgctcgccgcgcttcatggcgcattgaaccttccattgaacaaaaggaggactcccataagaacaacaagcatgtgaaccttatcaaagaatatcgtgccaagatcgaagctttactgaac

SEQ ID NO: 294560 - DNA, 190 bp, Zea mays
cccacgcgtccgcccactcttccgcagacttttaaacttacgcgtgcactgacaaggatgagccactcgatctacctcctcaccactggtgccacgaacagctctttcatgaacatcaaaaccattgctgagtgccttgcagatgacttgatcaactctgccaaaggctcttccaacagctactccatca

SEQ ID NO: 294561 - DNA, 222 bp, Zea mays
acgtgaatacgattgattcacagacactttgatgctcttaagtcctggaccaaccacaggtgatcggtctagatgataccggactgcctgagacagcataccattcaagcatgaagagccacgtagatctcatgaaacacctatacctgaccatactgctcagtggatgatcaactgtcttcccaataatctcactgcgtctcagcacagagatcacttgcc

SEQ ID NO: 294562 - DNA, 256 bp, Zea mays
cccacgcgtccgcccacgcgtccggctgatccttttccagatcaaccaccgcaacgtggggaagctgcttggctgttgcctcgaggtcgaggtgcccatgctggtctacgagtacgtcccgaacggcagcctccacgcgtacatccacggcgatggcgactgctgctgcagcggtggcgaggccaagctgaatctggcacccggcgcgcgccttcgcatcgcggccgagtccgcggacgcgctcgcgtacatgcac

SEQ ID NO: 294563 - DNA, 448 bp, Zea mays
caagcagcaagtcgatcgtgagcatctagttcttccctgctcatcgtcgccagctggtccgagggatgaggaagaagagatagatggacgacgtcggcggtgctgctgctggtggtggcgattcaaagcagctcttggttgaagcagatgggaacacacgcacgcttattttgaacaggccgaaccagctgaatgtactctcctctgcaatgattaagggactcctgagctgtttcactgcttttgtgaaagatgatggagttaaattgttgattatgaacggttctggaagagcattttgtgctggaggtgatgttgttgctggtgtccagtcaataaataatggatggaaatggggcgctgatttcttccgagatcaatattctttaaactacataattgcaacatgtatcaaacctcacgtttctcttcttactggaattgtcat

SEQ ID NO: 294564 - DNA, 437 bp, Zea mays
ccgggccgacccactcgttcgagcggggccataaaagaggctatgtgttttatgatggatcctttggtggggaagaaagtggttatgtagtgatcacagtccaagttcaataggtatggagcatttgataagacagcagatacacgtaccagtgcattcatggcaccagccttcttgtgatggttataacctggccttcccgatcccgaacctcttcccttgcaagaaccttgtgacacgtgaaggcagcgcctggttgtacagtcctgactccaaagcgttgagggaaaagctcaggcttccagtcgggtcctgtgagcttgccgttccactcaaagccaaatcgaggcttttctcggtagatcgacgaagagaagcgtacgcgacgatactgcattcagcgagcgaatacgtttgcggcgcaatctcggcagcgc

SEQ ID NO: 294565 - DNA, 274 bp, Zea mays
gatacgatgctcaagataaatgacttttatgttttcccacttcaattggatcttgagagaggggattgaaaatatctttctccatactcggatagaagtgtgcgtaacctatatactcttcatagtgtactggttcatagtggtggagttcatggaggacactattatgcctttattcgtccgaagctgtctgatcaatggtacaagttcgaggatgaacgagtgactaaagaagacatgaaacgagcattgtaggaacaatatggtggtgaag

SEQ ID NO: 294566 - DNA, 255 bp, Zea mays
gcgcttttactctagaagaagacaccttctcatattgcacttacattagaggcggtatgtgttagggaggtttttccaccaaaagttcttaatttcaaaacctttgaagaggcaatcaaagggccaggagaatttctcatgagtgatttcttcaagttcgaccgcccaccttttgtgcatttggcctttcaagctttggacaagtttatgactgaattgacacgatttcctattgctgggtcaacttatgatgtt

SEQ ID NO: 294567 - DNA, 277 bp, Zea mays
tcgcccactcgtgctccgactcgtgggccaggtttggctctgcaggaatgcatggttaagggggggcgggcgcgttcatgtgcctcatgagcaaccttatggtcctaatcttcgcgtcggactggacgaggagcagtctctgccggcacatccgccaccccggcgtgtgcagcgtctgcaccagcgtactcggccggctcggcaacaagggcgcggtgtccgtacggatcttgctacacggcacgagcttctgcttcgtctgctgccacctgtgcct

SEQ ID NO: 294568 - DNA, 361 bp, Zea mays
tcgctggggcatatcgccttagtgactcacgtttttgctccaagaaaccacctccgagcccgggcgcacatgcgctcgaggcatgatagagatagaggcggtgagcaaaactatggatgggaaagaggaggacgtgcgcctgggcgccaacaagttctcggagctccagcccatcttgacggctgctcatggcgctgctgacgactaggactacaaggagcccccgtcggcgccgctgttcgagcccggagagctcaagtcctggtccttctactgcgcgggcatcgtcgagttcgtcgtcatcttcctcttgctctacatcaccattctcaccgtcatgggcgtctacaagttcaccttc

SEQ ID NO: 294569 - DNA, 272 bp, Zea mays
gtccgcccgcgcgtgctcccactcgtccgctatatttgactttatgatcgagagcggatataccgtgtgtgtctttaatatcagcgacctgggcttctctgcgtacctttgttatatggctatgtatctcatttttgtggagtttggaatttactgcatgcacatacagtcgcatgacataaagccactatacaaacatctttatgcaacccaccatatttacaacatggctaacaccttgtctccgattgctggacttgcgtttcacccac

SEQ ID NO: 294570 - DNA, 392 bp, Zea mays
aatcaccgggccgacccactcgtgcggtcaggcaagaaacaacggagatttataattctgatgaagcttatgtgtatgacaggcttggcaagctatatgacaagtacagcgattatgtcacagtctgaggacaaggaacgtttgattgctaagcttcatgatgttgtagactgtctctatgaagatggctagcatgaaactaagggcgtatatattgctaaactactagaacttaataaagttcgtgatgctattgatgctcgctataaggaatgtgagattagaaattctgatgttagtcaactgatatactgcatcaatagcttcatagaatctgcacagtctaccgaccagaagttctgacacatagacatgtcataaaagcgaaaggt

SEQ ID NO: 294571 - DNA, 311 bp, Zea mays
tcgagagacttccgcatataatcgacttacttttgtcttccatgctcatactgcttgccagggccgggtcgatcaccctcaacgcacaggaggattgcacggccaacaacaccgggacgttggtggaccgcatacaggaaactccaggcagctagaacgacacttcagctccaggatctcgcccgtttctccgtcgaggagcacaacaagaaggacaatgctcttctggcgttcgagaagcttgtgaaggccaagacacaagtggttgctgtcacgatgtactatctcactattgaagtgaaggatggcta

SEQ ID NO: 294572 - DNA, 372 bp, Zea mays
ccgtccgacccactcgtccgatggcgcctgtgtgtcagagagatttgcacttaatcgtgaggatcagtgatgcgaggggcaacaagtcgagagatcaggcagggcaccatggggcgcgggaaggtggtgctgcagcggatcgagaacaagatcagccggcaggtgaccttcgccaagcgccggaacggcctgctcaagaaggcgtacgagctctccgtcctctgcgacgccgaggtcgcgctcgtcctcttctcccacgccggccgtctctaccagttctcatcctcctccaatctgcttaagactctagagcggtaccagaggtacatctatgcttcagtcgatgctgcagtgccatctagcgatcagatg

SEQ ID NO: 294573 - DNA, 357 bp, Zea mays
  unsure (1)..(357): unsure at all n locations
gtccgcggacgcgtggggtagagttggtggactcaaggtaagtgctgntgacacaagtggtgggggcgatgcctttgttgctggagtgctatctcaattagccacagacttttctctgctccatgatgaaggtcggttgagagaagccctgaagttcgcaaacgtctgtggagcttaaccggaccagaaggcgctattctgcgctgccaccgacaacatgctgaccctgacaattgtgctgaagtaccctgcaccactacttgtggggtatgtgattatgaaccgcctgagcgccatgtcgatagattacaggcgtgatttcgcttgcataccacttggcatttttgttggtgcgta

SEQ ID NO: 294574 - DNA, 413 bp, Zea mays
tcatggctgtagctttcttgccctctttctgtttgtcatatgatgatttcaccactcagtaggccttcgtctaaaaggcctctctggttcatcgtgttggttgcatttgtctgtgcagtagccattggagcctacctttatactccacggcattacacagcatgttatctggtaccatcagaagcctgcaattctcggcctcctccagaacctgctagggtatacactgatgatgagatcgctgctcgtgctatcatgagagacatcatccgggcacggccagtgcagtcaaagaatccaaaaattgctttcatgttcttgacgcccagttcattgccatttgagaaactgtgggaaaaattcttcatgggacatgaagaccgattcaccatatatgtgcatgcatcaagaga

SEQ ID NO: 294575 - DNA, 431 bp, Zea mays
gaccgactcgtccgcccaggcgtgctctgactcgtgggctcatttactttcgtcttcgtactcgcctatcttctcggccgatttcgttcccccttctgccattcttctctcatttctcaccaccgccgccgctaccccctttctacaacaccatgagggagtgcatctcgatccacatcggccaggccggtatccacgtcggaaacgcgtgctgggagctgtactgcctcgagcatggcattcaggctgatggtcagatgcccggtgacaagaccattgtgggaggtgatgatgctttcaacaccttcttcagtgagactggcgctgggaagcacgttccccgtgctgtttttgttgaccttgagcccactgtcatcgatgaagtgaagactggcacctatcgccagctcttccatcctgagcagctcatc

SEQ ID NO: 294576 - DNA, 413 bp, Zea mays
agacaggtcactagcaccactttcaaatctttgcgttgcgcgatacaccactggcagtgcactaatttcaaagaaagaatcaaacgatattattgctagtctttcgaacaaaaaaagaaggaatcaaaagatatgtatataaaaaacacaagttgcaagagttgtcttttaacagcatatatatgatgctctatatatgatcaacgggagagagagaaaactaacaatccttcctggttttgaaattctgaaccaggtgcctggatgaaggagctgacgagttctttctaaaacctgtgcggctatcagacatgaacaagctcaagccccacatactgaaaagcagatgcaaccaggaacagcaccagcaaagtgacaattgcattggctaacgcatgaaccccacaatcagc

SEQ ID NO: 294577 - DNA, 306 bp, Zea mays
cggccgacccacgcgtccgcagagcaggcgcatccacaacctgcctttctcgttccctggcggcgtccgcagcaggagagcgtaatctactgcgaggacggtgaacgatgtcaacccgcacgagatcgtcaaggcctactacgcccacctcaagcgctccggcaagatggagctccctgagtgggttgacattgtgaatactgcgaggttcaaggagcttcctccttatgatcccaactggagccaatgtgacgaaggctgctgccaagaagaaatgatctatctggctggtgacgaaagctgctg

SEQ ID NO: 294578 - DNA, 357 bp, Zea mays
actcgtccgcacggacacacatacaactggttcctaaatccaactatctgtactatcaaccacctggctcgagcctttgcacgcatacatcatgtctgatgagaagcaccaccacttcttcaaccaccacaataaacaccactatcacccctcctgctaatacggctactccgataccgaggtgattaccgacaccgactaaggccagtaccagaggtacatgaatgtggagaacgatcacaatcacaagcatcacctcggccaggccgtcgccatcgtcgtccacgccttcgcactctactagaagcacgaggcgaataaggatcccctacactcgcacaggcacaagatcactga

SEQ ID NO: 294579 - DNA, 326 bp, Zea mays
cggacgcttgagcttcctcgcccgatttatatctacatcttcccgagcaaatactagggtaaccgctaccttttcagaccacctccaaggctcttaatgtatcttaacactctcaccaatcaaattttcatgtctgatctcgacattcatatcccaactaccttcaatcccttcgcttagaccaatgctctggactctggtgcgtcatcagggtcaaaggactacgtacacgttcgcatccagcagcttaatgttctcaagagccttaccaccgtccattgattgaataataagttcatctacagcaagatcctcaaagatctcaa

SEQ ID NO: 294580 - DNA, 343 bp, Zea mays
ccgacgcgtccgcggcgcgtgggtgcattgtggtttctgtgtacatcaaatcgaaagaggctccggctaaagatgttcttacagatctcgttgaaatgtgccgtgggattcaacatcctgtgcgtggcctttttttgataagtcacctttctcaaataagcagagacaaattgtctgatattgggtctgagtacgaaggcgatgtggaaaatattaacgatgcggctgaatttgttcttcagaatttcatagaaatgaacaaactctgggtccggatgcagcatcaggggcctgcccgagaaaaggaaaagcgtgtgaaggaaagaaatgaactgcgtgatct

SEQ ID NO: 294581 - DNA, 398 bp, Zea mays
  unsure (1)..(398): unsure at all n locations
cttagccacacacacacacggctgctagtgtacacagaggcacagcagcaggaggatggccgtagtgccggctgcgccggtggttcttggagtggccatggtgctcgtcgtcctggtcgtcagcgccggcgcggtcgggcagctcaggatggggttctactccgagagctgcccggtcgtggagcgcgtggtgggcgacttcgtccggcagcacgtccgccgggtgcccaccggcgcgctcgcgttgctccggctgcacttccacgactgcttcgtcaggggctgcgacgactgcgtcctgctcaactccaccgcctgcagcgtggtcgagaaggacgcgccgncgaacctgacgctgcgcggcttcgacctcagcgaccgcgtcaaggcgctcgtcg

SEQ ID NO: 294582 - DNA, 369 bp, Zea mays
ggcaccccgtgcgtcggctgcttgctgccccagtgccgcccccgcgttcccttcggtcccgccgacaccgacgccggcactgccaccgccggcatggcgaccccgctccgcgccaccgcggtcctcgcgtggggttccggggaggacgggcagctgggcatgggcgggaacgaggagaaggactggccccacttcgttgaggcgctggggccctacgccgtcaccgccgtcgtcgccggcagtcgcaactccctcgccatctgcgacgacggccgcctgttcacatggggatggaaccaacgcggcacgctcgggcacccgccggagaccaagacggagagctccccgggccccgtcgacgctctcgcg

SEQ ID NO: 294583 - DNA, 449 bp, Zea mays
gacctttgggctggtttcagtgcttgtgtcggtgtcgctactttagaggttcgtaccaagcctggtgtcaatcgcggtttcgaggtcgctcggcctaagattggtgtgtcgtcttcggatggtaatatttctaatcatcctggtaatagtacttttactaattcggcggcggttgcgactgtggaggctacttctgctggtggtgttgagcatcattggactattaatggatcggattccgaggataagtcgtattttggcgggtttcctgatttttcgggttcggttagtgattttgattaggttgctacttctaaggcgaaggagactaagaatggttggtcggttacgcctcttacgcctgttcctcctacttaggttcatgctattggtgaaggttttgcggagaattctgttaagtattctagtgattttcctggtaataattc

SEQ ID NO: 294584 - DNA, 484 bp, Zea mays
  unsure (1)..(484): unsure at all n locations
cgggccgaccgacgcgtccgcccaggcgttctataactttcagncgcctaatagatcactcgacaaaccccgnccangggggagcgctgtttctaacgcaagcggaacacctaagcacgactcaaaaagctcgatgagtaccttctcactcgcagctacatcactggctaccaagcttacaaggacgacttggctaggtacacttcgcatacgtctgctccctcgaccaagtatatcaacgtagaaaggtggttcaatcacactgatgcgcacgagaggctgagcagaattactgcagagggccacggtgtgaaggttgaatcctcagcactaccttcagccccaactccaaaatgtgcttgaagcacaggccccagctgctgaggaggaagacgaggatgatggcgacccttttggtgaggagaccgaagatgagaagaaggctgcttaaaagcgtgctgcaactggcaaggcttctggcaag

SEQ ID NO: 294585 - DNA, 244 bp, Zea mays
cccacgcgtccgcccacgcgtccgcccacgcgtccgcccacgcgtccgtgaccgtagatgtgaaagcaaactcagagtcaaatatcattactacagttactgtcaatgagattgcaacaccaggactgaagactatcttaagctttgctgttcctgatcagagatctggaaaggttgagcttcagtatttgcatgattatgctggagttaatgcaagcgttagtctgacagccaatcctgtagc

SEQ ID NO: 294586 - DNA, 413 bp, Zea mays
tctaaatcatgttagaggtgcatactcatttgaggatttaagaacattgggtgacatcacatgctcaactttcagagaagcatgcgaaaaaagaggactcatagaggttgacatgtcacttgatgactgcttgagtgaggctgcaacctttcaaatgccaactgctctgcgaaggttatttgcaacaattcttgtattttgtgaggccactaatgtacgtggactgtgggacaaacacaatgactcaatgtctgaagattataaccgagacaatcctaaatcgacatgcgtacaacaaatggtccttaaagacattcgggagttggttcggtcgatggggaaggatatcaaatcttatgatcttcctgagattaatgatacaggtgaattttgcaatgatataatgagagagc

SEQ ID NO: 294587 - DNA, 407 bp, Zea mays
cccacgcgtccgctctttcccagccctctctctctccctctccacccggccgccaccatgtcaggcctctacagccagggcttctcccctgcaagaaccctctccccccagattaggagcaaccccgacgctgacagccagtacttggccgagcttctcgcggagcatcagaagctggggcccttcatgcaggtgctgccgatatgcagccggttgctcaatcaaggtgagagatccttttttttccacccctcgcttgctcactgttgcttgctgattggtgacaaatcctgtgcgctcgagcctccgagggtgttcctctgcaatcgggactggggaatcgcgaggcttcaatgatcggatggctgctgatcttttttctgcggcttttatgctggcgggggatg

SEQ ID NO: 294588 - DNA, 349 bp, Zea mays
attcaagccctgtggattttgtcagtgacttgggcactcgcttcctcctcgatccaagtgtcctgaagatgtctgaacctcctcgtgtcttgtcatggatgactaagggcattgcctcaggtcttgatgttcttttcataaacaaatttgaagaacaacgtaaagattattgggaaacactatactcatcggtgcattttggtccaatactaatactctgctcagaggatgatcaacttgctacatattcagttgttcaaaattttggccagcatctgctagagcttggtggtgatgtgagcctaattaaatggcatagttctccgcatgtcggccactacaagcacca

SEQ ID NO: 294589 - DNA, 437 bp, Zea mays
cggacgcgtgggcggaactcgaggcagtgtatgaggcagaaatcagcggacgcagccgcgctcggctcggccatgtccgagatccagcggctgaagcagcagctggaagcttcagcagagtctgacgcggcccgcgcgaagcagtgcgagtacgtggaagctgagatcgagggcttgaagcaggagatggagatccgcctagcgaccattgagggcctgaaggtgaatgtcagcgagagtgacagggctgcggctgaggcaaatgccacggtaaatgagaccaagcagcagctggagacagcgaaggccaccattgactcacttgtagctgagggcgtacgcatgcaggaatgcctgaggtcgaaagacatggagctcaatgagtccaaggctctcgtagcatcgctccaagaagatatggagaagtcacatgacac

SEQ ID NO: 294590 - DNA, 409 bp, Zea mays
  unsure (1)..(409): unsure at all n locations
ctcttcttcacctcactaacaccagctagctactttttcttttctgcaataaagggcggttggttcttcttcgacacccaagccgaccccaccgacgtacactcccacaccgaagccgccggccaccaaagccgccacctacacttcgacgccgccggtgtttnacacccccagcccgccgncaccatactactagaaagcgatgcctaccataccacactgctgtcagtctctggagcatttaggtggtctggatcaatggaagggttgtgtcctagccagccggcaaagatgagctgctgatggtaatgatgatgataagaggccactgctaccctactacgtaccctcctctttgtgtgctgccatccgtccccgttagacgatcgaggagagaataacgcagagc

SEQ ID NO: 294591 - DNA, 451 bp, Zea mays
ctttgggctgatttatgtgcttgtccgagtcaaaggaaatctctcttcgaccccgagccaccgaaacactgaatctacacgcagacgccctgaggtagacaccgacaatagcggccttactgatcacggagagccttcagtcgtaatcgcatactcgaataaagctgagtgagatgataattctcctgtagtacctctacatcccgacaaagatggtagtggacacaccatctacgacgagtcataaaaagtacgtcaagaacctggcacagaagacgtatattcagaagacactacttacgatgccgactaggataacgacggctggactgatcataatgagcccgcaataacgacgtagaagggaaacaatttatcagggaaaaaggggtatcgttagacgagtcccggctccatagaagtaccgaagtccggtcaaacggtacgacta

SEQ ID NO: 294592 - DNA, 341 bp, Zea mays
  unsure (1)..(341): unsure at all n locations
cccacgcgtccggcaggctccgggcttaagattgcttctcttctctcctccaaggtgtagggactgatcccgcgcgcggcgccaccatgcggcagaaggcggtatcgcttttcttgtgctacctgctgctcttcacttgcagtggggtggaggcaggtaagaaaaagtgctcggagagctcggacagcggctccgggttctggaaggccctgaccttcatggccgtcggaggaggactcgcagtcgccgggctgcccgcgctgggcttcaccggcgccggcatcgcggccaactcggtggctgnctcgctgatgagctggtctgcgatccttgatgggggc

SEQ ID NO: 294593 - DNA, 343 bp, Zea mays
ggcttgtattgttcattcatgattagttttttggtgctgggacccccgtggagggggttagtctctacaccatcactgctggaacaaggccccagcttcgccttctatgtgcccctggtggtcctcatctccatctcccttgtgctgcagatcggcgtgggggtgctgctcatcttccttgtcaagtacgaccttaacaaccctgacaagcacgccaagctggacttcctcaacaacctggccacgggcctggtgttcatcatcgtggtagtcaacatcttcatcacggccttcggagtccaaaagcccttgatggacatggcaccccagcagtatgacaccc

SEQ ID NO: 294594 - DNA, 371 bp, Zea mays
cccacgcgtccgcccacgcgtccgtccacgcgtccgcccacgcgtccgcccacgcgtccggacccacgcgtccgcccacgcgtccggtcagaggctctaagagttagggatgagatggttggctttggatgtctgccagatgtggtaacatacaataccctgttgaatgggctctgtaagcagcacaggttgcttgacgcggagaaacttttgaatgagatggaggagagaggggttacaccagatttatgcactttcacaactttgattcatgggtactgtaggcaaggtaacttcgagaatgcattgcaattgtttgacacacttgtgcgccagcgtttgaggccagatgtcgtgacatacaataggtt

SEQ ID NO: 294595 - DNA, 420 bp, Zea mays
gcatgcggcacttgcaggccaccgtcgagtacctggccggggtggccgccacgcccccggcggcgtccgcggggggcggcgtgcacacggacacgttcctcatcctggccgccgtgctctgcttcttgctctgcgtcgtcgggctggccttcgtcgcgcggtgctcgcgcctgtgcaacccctcgtcctactccgtggacgcgcgggggcccgtcgacgacgacgacgacgaggcggcaatgccggcgccgcgcaagggggtcgacagggccgtgctggagaagctgccgaccgtgccgttcgcgttcgaggacgaggacgctcaggacggcgagcggtcggagtgcgccatctgcctcgccgagttcgcgcccggggacgaggtccgcgtgctcccgccctgcgcacacgcctttcacg

SEQ ID NO: 294596 - DNA, 405 bp, Zea mays
cttccctggagccgcccgcttgcccttcggtcgctagctcgctcggagcgcgtcgggccggtccatggcgctcttcgggcgggtgctggctctcgccctggctctggccctgggccccgccgcgaccctggcgggtcccgccaagtcgccctaccagctggtgctgcagcacagcaggctccggggccgccagcacggccccaacgtgtgtgctgtgcagaacgttattggcactaataggaagtacttcaccaactgcaagcagcggtaccaaaggaaaatctgtggcaaatcaacagtcatcagctacgagtgctgtcctggatatgacatggtccatggggagaacggctgtccagcatccctaccactgtcaaacctttacgagaccctgggagtcgttgg

SEQ ID NO: 294597 - DNA, 399 bp, Zea mays
cacacgcatgccttgaaaatacacttttactctgatccaagcacacaaacagctcaggccgtgacacactattctgcgccaggcccatcttctctcctgccttacaacgccatggggagcaatctcaacccccaactctgcctgatgccctttatcttgggcctcttgtctggaggtgtgaccaccactccatggtctttggcccggccccagggatcctgctctctggagggggtagagatcaaaggcggctccttccgacttctacaagacggccatgcactggactacgtgtgtccttctagcttctacccgtaccctgtgcatacacgtacctgcagatctacggagtcctggagcaccctgaatactcaagaccaaaatactgtcaggaaggca

SEQ ID NO: 294598 - DNA, 441 bp, Zea mays
  unsure (1)..(441): unsure at all n locations
acgatgccagagagaacttacagttgtccccggagagaggtttgggaagctggcggggaggaacgctctctgcttccagcctctttccattgccgcagcatgacagacctccagcatcacgcatctcttggtcccaataactgcctctagatacatagccatactgctagttaacccagcgtccctcagacttggatggagtttctgggagggtacacccaaatgatgcagatacttgtatactttgagccccttagcgacctaaccaaattgtaaaaatactatttaccaaaggtgctattactctgtaaaacacttttttttggcaagctgactntattcttcaattattatcattatattattgctttttaatattntattttcttgactaggtattaagcttttgtaattatttttcagtagtcccaccacttcata

SEQ ID NO: 294599 - DNA, 454 bp, Zea mays
aaatactccatcagcagtgacaactctgacaccactgacagtcatgcgacatctacagccggatcaagatgctccaaactgcccagcagcaccaagtcgggctggccccgacagaacgaaaagaagccctccgaggttttccggacagacttgatcacagccatgaagatcccggactcataccagctcagcccggatgactactacatcctggcagacccatggcgacaggaatgggagaaaggtgtgcaggtgccttgccgggcagaggccatcccagagcccgtggtgaggatcctcccaccactggaaggcccccctgcccaggcatccccgagcagcaccatgcttggtgagggctcccagcctgattggccagggggcagccgctatgactgggacgagattgatgcctactggctggagctcatcaactcggagcttaaggagatgg

SEQ ID NO: 294600 - DNA, 444 bp, Zea mays
agccgcgccagggagctcgcggcgctcggcccctgtcctccggcccgagatgaatgctgcggcagaagccgagttcaacatcgctcctggccaccgactcctacaaggttactcactataaacaatatccacccaacacaagcaaagtttattcctactttgaatgccgtgaaaagaagacagaaaactccaaattaaggaaggtgaaatatgaggaaacagtattttatgggttgcagtacattcttaataagtacttaaaaggtaaagtagtaaccaaagagaaaatccaggaagccaaagatgtctacaaagaacatttccaagatgatgtctttaatgaaaagggatggaactacattcttgagaagtatgatgggcatcttccaatagaaataaaagctgttcctgagggctttgtcattcccagaggaaatgttctct

SEQ ID NO: 294601 - DNA, 269 bp, Zea mays
tattaagcaaaatgtaaagcacttttttttatagctatggttataaacaggttttagattgttcaaattacttgtccactgaatgtcacttgaccttgataagaggccgcctgcacacagagcccagttaattctccgcacctcggttgtgtgcttccgaatgggctcactcccgtggtggtgtttgagagccaacaacactacctcatagaccggtctttgggaaactttgggtctcactgttgcctggcttgagcactttggtttat

SEQ ID NO: 294602 - DNA, 455 bp, Zea mays
gcgaccgctccttcgaatacatattatttgatttatcctagcggcgatctgagtagcgcgcgggatgaatttgtacagtgtttggtaaactatgagtggaagggagcggctgtgaattctgcgaaagctgacgagctggttttgggcttgacgaatcatgacctattcctgtactttgggcatggaagtggaacccagtgtatttctagtaaggaagtcgagtagatagataactgcgcagctgctcttcttatgggatgtatcagtggcacacttcattgcacacgaagttatgctcctcgaggggccccattatcatatttataggctggttcccctgctatcattgcgaatctctgggatgtttcagacaacgacattgacacgcttagtaaggcttttctcaattgatggctgcatgacaaatctctagatggcaacaattgttcaaaatg

SEQ ID NO: 294603 - DNA, 434 bp, Zea mays
gggaccgcgagcacaggccgctccgtgggcgcttcggatcctcgcgggaccccacgctctgccagcctgcccagcccgctgcagccgccagcgcgccccgtcggcagctctccatctgcacgtctctccgtgaaccccgtgagcggtgtgcagccaccatgttcagctggctgaagcggggcggggcacggggccagcagcccgaggccatccgcacggtgacctcggccctcaaggagctgtaccgcacgaagctgctgccgctggaggagcactaccgctttggggccttccactcgccggccctggaggacgcagacttcgacggcaagcccatggtgctggtggccggccagtacagcacgggcaagaccagcttcatccagtacctgctggagcaggaggtgcccggctcccgcgtggggcctgagccc

SEQ ID NO: 294604 - DNA, 415 bp, Zea mays
gtgcgatcggcggcgggaggttccctgggaaccaggtggtcgaagggctgagctgggtgggcagacaagaggtccctgccctcccccagtgagccctgctgttcccgtgggagccatgaagctgaacgagaggagtgtagcccactatgcactcagcgactccccagcggaccacatgggcttcctgcgcacctgggggggcccagggaccccaccgacccccagtggcactggccgaagatgctggtttgtcctcaagggcaacctgctattctcctttgagagtcgcgagggccgggccccactgagcctggtggtgctggaaggctgcacagtggaacttgccctaagctcccgtgccccaagagtttgcctttgccatctgctttgatgcccctggagtgcgcccacacct

SEQ ID NO: 294605 - DNA, 354 bp, Zea mays
cttcctcaggcggtggctggaggcttcgcatctggggctttaaacatacaaaggtgttggggggacctgcggcggcggcggcggcagcgggggctggggcgcgggggccggaccatgagccgctgagccgggcaaaccctaggccaccgagccagcggaccctcggagcgcagccctgcgccgcggagcaggctccaaccaggcggcgaggcggccacacgcaccgagccagcgacccccgggcgacgcgcggcgccagggagcgctacgatggaggcgctaatggcccgaggcgcgctcacgggtcccctgagggcgctctgtctgctgggctgcctgctgagccacgccgtc

SEQ ID NO: 294606 - DNA, 385 bp, Zea mays
cccacgcgtccgcccacgcgtccgcccactcgtccgcggacgcgtgggcaaatgcgtgggtttgagacaatgtacaatggtcacactggaagaaaactgactgcgatgattttcctgggccccacatattaccaaagactcaagcacatggtggatgacaagatacattcgagaggacgtggtcctgtgcagatactcacccggcaaccagcagaggggcggtctcgtgatggaggtctccgctttggagaaatggaaagggattgtatgatcgcacatggagcagctttcttcctgaaggaaaggctgtttgaccagagtgacgcatacagagtccatgtatgcgagaaatgtggtcttatcgcaattgcttaacctaaagaaa

SEQ ID NO: 294607 - DNA, 441 bp, Zea mays
atcactgttctccttcctcctctccgcttttttgccgccggccctgcgcccccgccccggctccccgccacgccgaccgcgccctgcgcctctacacctcaaatctgctttgtagcataagctcgctgcttgttagggtcgatggcagagagggagcatcgaacagtatttgtcacggtggggaccacgtgctttgatgcccttgtcatggccgtagattctccggaagtgaagaaggctttactgcaaaaaggttacagtaatcttctcattcaaatgggccgaggaacatatgttccatccaaggtcagtacgcttgtacctctgtagtaaactaacaactatttaattcctgtctactagtttgcattatgacaatctgtactctttcttatagggatgttcgtaactggtgatttaagtcatcctaaatgaaaaggc

SEQ ID NO: 294608 - DNA, 216 bp, Zea mays
ccatactcgatctcatagatccctatggaattctttaaaaggccttgggcgatgaaagtcgtaagtacggcttgtagggagatctttcctatacttcgagatccaccctacaatatggggcctaaaagccaaaaaaataagcgattcatttttagcccttataaaatgataacggattcttgaacctattacacgctcatgtcacgtctaggtact

SEQ ID NO: 294609 - DNA, 339 bp, Zea mays
acgcaagattatagaatgacatattgtcttgttttccatcaaggaagatgctcttgatgccgggcgagccttatgaacctagtggatcatgctacgtatgctctgagaccccacttgtcctggaggttaatactaacacaacatagctacgggaagacattgaaaaccttataaaaagcaaacttggaatgaacctccctttgataatggttggtgccacgctagttttggaaagatggcaggatcgataagactatcagacggtagattatgctttaaacctcgaaaaggtcttggctgaacttccagctgcaggtctaaatggtacaacacttacag

SEQ ID NO: 294610 - DNA, 260 bp, Zea mays
acgcgttcgcccaggcattcgctgcagatgtttatgacattttgactgaaaagttgattgtgcaaataagtgttaactaaagcgttgaatgagatattccatctagccaatataccaggttttaatagaaaataactatgactccagcttccatcttaagggaagctggtcttgcaagatatggtcctggtacctgaaaaaactatcttgaggtcaggtcaaggaatactacctgtgaacctaatgtgatactggcttct

SEQ ID NO: 294611 - DNA, 362 bp, Zea mays
cggacgcgtgggcggacgcgtgggctgactcgtgctggtggcttggcttctcgtccccctgcagttcgggaccggattcctgaggctctcacgtgttaagcttcgatggtgagcagatcgatgatgccctactcggatgttgagtaccgctgcttcgtctgcggcctcgtctgggacacggaccaccagtcgctgcataacgacttgaacatctatggcgaggtcctcctagccaacatcatcctccatccggacacgcacagtgcccgcggcttcggcttcgtcaccttctccacggaggatgcgatgcctaacgacatcgagggcatcaacagcaaggagctggactgtcgcaacatcac

SEQ ID NO: 294612 - DNA, 434 bp, Zea mays
cgagttgatgacagacatataactggctatataatgaagggcaatctgcatctgtcattggatcgaccagatttggcagtgacagacttcaggggggctcaagaattgagggctgatcttcgttcttatcaaggattggtgcgtgcttatctagcactttctaaatgcaaagatgcattattcactgcacgcgaggcgatgaacgttatgcatcagtctgcaaaagctcttaagctagttggtgatgttcatgcaattagttccagtgggagggagaaggcaagaaagttctatgaatcagccattcgtcttgaacctggatttcttggagctgcactggctctggctgatctgcatgttgcggaaagacggaataaagaggctgctatgctactggaaagatatatacaacaatggtcagatgattctctaca

SEQ ID NO: 294613 - DNA, 385 bp, Zea mays
cccacgcgttcggactggcgagccaaaggtattgatattatatacgacaagacctataatggcgattatgagctagataacggggaggaaaacatgagatttactgaagaaacacgtcaataatatgtagacctagcttctgcagatatactgaccacagcaattaggtcgtaaatgaacgtatcgattgaaggctcgacagagttagtcgcaccggatctaacatcactgtaatatgataaagaccttgaactgctgatcagtgatctgactgtaattgacttggatgatctgaaggtcaacacagtgtatatagcatattcagatgaatcttcggtgatacagacgttattgaaaattgttagatcgtccagtacgtaggaca

SEQ ID NO: 294614 - DNA, 439 bp, Zea mays
cccacgcgtccgtgtttccagaggaagttattgccggtcttgatcgtgctgtgttgaacatgaagaagggcgaggttgctcttgtcacaattcctcctgaatatgcatttggttcaactgagtcaaagcaggatcttgctgttgttccacctaacagcacagtaatatatgaagttgagcttatttcatttgtgaaggtgcggacatgactgatattcgtgtctgttctaaatcattgacctgtgtgcaactgcacatgactgatattcgcgtctgttctaaatcattgacctgtgtgcaattgcaaaattgatcaatataatcttgtcacacaggacaaggagtcgtgggacttgaacaatgaagagaagattgaggctgctggtaagaagaaagaggaagggaatgcattgctcaaatcgggcaaatatgctagagc

SEQ ID NO: 294615 - DNA, 355 bp, Zea mays
cggacgcgtgggcggacgcgtgggcggattcgtgggtggtcttgaagttggtctgacgggctatgcagatgcctactgcactggccttctgttggctcgccgtgtgctcaagatccgtggcttggatcatgagtacgacggcaatgttgaggccactggtgaggacttctctgatgagccagctgatgagaggaggccttgtcgtgctctcttggatgttggccttatcaggactacaacagggaaccgtgtctttggtgccctcaagggagcattggatggaggcctgtatattccttacagcgagaagaggcttgctggattcaagaaggacgacaagcagttggatgctgat

SEQ ID NO: 294616 - DNA, 448 bp, Zea mays
  unsure (1)..(448): unsure at all n locations
gcaagattgacaactctgggttttggcgcctactcacagttcgtgagggaagatgtccaggggaagctgttgtttcacagaatgcagaatcacaaatatcagaagtcatgcttattgtgcaggtgtgttcgacaagtgttgatgaagctcttatgaaagaagagtttgacaagctgtctgctgccctggtacaaggagcagcaacatgctcacctcccttgccactgacaactattgtagtgcaagatcataaagggatatcaaatgctgcacctactgattgcccactgagcccgctattggtaccaaagggagataagttggatggcacatcagaagataaaacaagaatccatgatcacataagcaacttaaagttctctatatcaccaacagcttttttccaggttaatactcttgctgcngaaagattgtatacccttgctgg

SEQ ID NO: 294617 - DNA, 429 bp, Zea mays
  unsure (1)..(429): unsure at all n locations
ggcattcagcagctgccagcggacgtcctcgtgtcggtgatctcccgcgccgccgcgagggggagggatgcctgcatcgccgccacggtgtcgccggcgttccgcgccgcggccgactccgacaccgtgtggtcacgcttcctcccggctgacctcgccccgctcgtctacccgacgcctgcgccaagatccaagaaggagctcttccttcgcctctctgaaacccatgccctcgttgaagatggcctcatgagcgcgtggctggacacggagaccggcgccaagtcctatatgattgcggccagggctatggctattatctgggtcgacacgccggactactggcgcttgatagtgcgcgaagactcaaggatgctgtcaggtgacacgcgctatgcagnctacctggtattcaagatggccgatgac

SEQ ID NO: 294618 - DNA, 418 bp, Zea mays
cgctggaccgcacgttcggctgcgggttccattcccggcaccagtacctgttcgggaagatggacatgcagatggggctggtgcgccgcaacttcgccggcaacgtcaccggctactacctgtgcttgcaaggcggggcgcacgacgagatccacttcgaggtcctgggcaacgtgttcggcaagccctacacgctggacaacaacctggtcacccaggggcataggccaccggaggagcaagttcagcttttggttcaacccaacgtcgacttgcacaactacttcatcatctgaaccccagcacgtcatcttcatcgtggacgacatgctcatcaggtacttccgcaacctgtatagcaaggtggtgacgttccccaagagccagccgatgcggctctactccagcctgtggaacg

SEQ ID NO: 294619 - DNA, 442 bp, Zea mays
gaattcgctctccgcgaggtcggcacggtacgccaccttaccgttgaggagttggcccgctcacccatcgttcaggagctgatgcgccgccaagctttcagtactcccaactccaactgcacctcaaattcccaaagcggcacctccacgccgatcgagagatcgagctcaggttccagcaacggtgtggggcgcgccaagcggcgtagcagctggctccgcagcatccgctgcgtagctggctccttcgcgtcccactcacgtgaccgccgcagcagcgacgagaaggacgcgtctccagagaaaggcgggcaccactccagctccacgacggatgacagccaggacagtgttccacgccatggcccggcccgtgtcaaggtgcggcagtatgggaagtcatataaggagctcagtggcctgtttatgacacaggagatac

SEQ ID NO: 294620 - DNA, 194 bp, Zea mays
tccgccgactccttcagtcacactttgcacgtttactgacaccaacttccttacggtaacttggtgcacattaaaataaggcctatccttgcgaagaaaattatccatgatacttattaagatattccccatcagaattgcgccacatacggtcgccattattacacacgctattactatcataatatctattc

SEQ ID NO: 294621 - DNA, 285 bp, Zea mays
cccacgcgtccggagatctggcgcacgaactaccttgtgcagctgagaggtccacttaccggctacaaccattggcaatgcgtagagattcagagatactcatgttaggaaagatgctgatggtgctggaacatgtgaccgagatatacatcctagagctgaacctgagcaatacttgacatccgatgatgcagctgaactcgcctattctggagcgcatgaattgcatgcactatcgatgcggacagctagagaaagcgatgatcctgtgagggctaagaattc

SEQ ID NO: 294622 - DNA, 435 bp, Zea mays
gaaaagtttgaactttgatgcctaccggttctcaatctcatggtccaagatctttcccggtgggcaaagggaaatcaattccaaaagggtaacggattaccataatttggtaaaacttttggtttaacaaagggttgcttcctaccttaaaccttaaccctatgatctttctttttgccctggaaaaaaaatatggagggggttaaagcccaaaaatggcggacttgttacagactatgctgacttctgttttaagacctacggcgatcgcgtaaagcactggtttacattcaatgagccaaggatagtagcgctacttggctatgacacagggtcaaatcctcctcaaaggtgcaccagatgcgctgctggtgggaattcagcaaccgaaccttacatagttgctcataattttctcttttggggtcacatgct

SEQ ID NO: 294623 - DNA, 417 bp, Zea mays
cccacgcgtccgcccacgcgtccgcccactcgtccgcaacttctttttttccacattcttctgatcaagaagggaatcagtacctatgactacatcattgccctgcgagagcaagagcaagatgatctgagtgggcagcagagtccacagatgtctcgtgtaagctcctacaccggactcagcagtactagctcctttggtccacttcgtcgtggttcatggtgcactccgccaaggctgtttcttgaggatcagtttgatgttattccatcggaagctgcttcttcgcataattctgctacgaagaggaaagaagaccaggggaagaggaagaagggctcaagggccgtgaaaataagcccatgggcattagctcgtcttaacgctgaagaagtttcgagggttgctgcaaaagca

SEQ ID NO: 294624 - DNA, 382 bp, Zea mays
ggcgtctgcacatgcagcgctcgaatatttggcttatgatcttgagattgcttaaaatgccgtggtacaatgatgactggtgagcgacattcatagctggtgcaacactatgttcctttaccggaggatcttcggcagataaatttgggcggacaagaacattcatcctggatgcagccccactggctgtaggtgcattcttgagcgcaacagctcaagatatccgcaccatgattattggtcggttgcttgctggaatcgggattgggatctgatctgcacttgtacccctttacatatctgagatatcaccaactgaaattctgggaacacttggttctgttaatcaactctttatctgcattggaattcttgcaacttt

SEQ ID NO: 294625 - DNA, 488 bp, Zea mays
tggcttggaacctttgggctgatttatgtgcttgtggatgtgcgggtgggttcgatgggaagtctaccggcttcttcacgggaaacttacggacgcatacgcatttcgagggtccgaaggactcttccacgactacgaagaataaacatggaaatttattcactcatactatggagaatggaactggggacgccgacattaaggagatattctcatttacggaggacgttccaaacgatcataaaaggtcagaccatacttagtgttatactgtcatctccaaggaactaacagatccgggactaaacgcgtaaggtcatcctgtccggctctcgtcggataatcccgaacggcctgttggtcctattgaatgccacggtaccgctcatgctgattgtaataacaatcgtatgtgtcatacgaaggagctcgttaagcggccgaaatagcctaatgttgtgaagaagtttagtaagaagacctccatt

SEQ ID NO: 294626 - DNA, 452 bp, Zea mays
tggcttggaacctttgggctgatttatgtgcttggctctgcttatttgctgcttcttcagtcttctcatctgttagctgttacgggtaagaccaagactggaactaatggtcctggaaggactggtaggtctgcggttagggctgtttcttagagtgaggacgctgagtctgctgttgctaatgattttcctactattatggatcatacgattcatacgcctaagcatgatattgcttatggttatcggaagtatagtgatactatatctaaggatcttaagatttcctctcctggcgataagttggctattgctcccggtactaggaatttcgaggaaactttgcggggcgaggtcggtgtcgagcacgctgcggagcttattggtgctcctatcgataaggataaggtcgtcgtatactctaagggcggcgttaaagagggccgcactct

SEQ ID NO: 294627 - DNA, 223 bp, Zea mays
atgtaatcgccgtgtacgtgaatttctgattctggcacgtacatggttcgcattcggtttggcttccaaaactgggtgtgacataagtggtatcaaagctgtgctgactgtaggaccgctggcctagagtagaattggccgtgttaaggacttattgactattacttcacctcatccttgattttgattcaaaatattagtcacctcgactaattttatgttg

SEQ ID NO: 294628 - DNA, 378 bp, Zea mays
gatggcttttcctcccccttcggttcgggttcgggttcgtgaggatctgcggggttcggaggcgtgggtgagcggatcgagatggccgcgtcagatgttgagtaccgatgcttcgtctgcgggctaggctgggccacggacgatcacttgcttcacaacgtcttgagcacctacggcgaggtcctcgagtacaagatcatcctcgatcggcagacgcataagtaccgcggattatgattcgacaccttctgcacggatgatgcgatgcagaacgccatcgagggcatgaacggtaaagagctgtactgctcgaacatcaccgtgaacgagggccagtcccgcggaggtcgtggaagcgagcgcggcggagggtactga

SEQ ID NO: 294629 - DNA, 285 bp, Zea mays
cccacacgtgcggaagaagcagaactcaatatgctgagaaagagtttgaacttcaaggcaacaccaatgccaagcttctatactgaaccaactgctgtcaaggttgaattgacaaagatacccccaacaagagccaaatcgccaaagattggccggtctaaaaacaagtccacaccatatactgacgaaaatgctaccgcagaccagactgcccacctgaacctcgatgagaatgttgctcaaaccggagtgaaaaaaccaaccccgttgaatccaccaaagaag

SEQ ID NO: 294630 - DNA, 398 bp, Zea mays
gaccgacgcgtccggaggctgttgcaatatgcctcgctctagtcaattttcttgaagatcaaccaactgcagggaggcgtgtgttagaactatgtgccgtacataatctagtcatgtacagccagcgcagattagagagcaattgcagaatccggtcgtgtacaggtgctgctggatctgatcagctcaagcaatcctgacacttgtcttcggcctgcaacgttcgccaaacttctattcagtagccatactatacacgagtatgcaaccagtgcaacagcctgagctataactgctcctattgaaaatgatttatggtcgtaccgaaagtactaacgaggagtatctcagagcactcaatgctctgctgaataacttccgtcgtctgagggtcactg

SEQ ID NO: 294631 - DNA, 429 bp, Zea mays
aaacaagggcatgttcaggctgtcattgttggtgctgatcgaatagcagcaaatggtaaatgtccacatcatttctgtgatcaatgtataactaaatattcctactgttaaatttgtttcctttatgaaattgcaaggtgacacagccaacaagattggcacatataacctcgccatctccgcgaagcatcatagcgtccaggtctatgtggcagcgccggtaacttccattgatctctccctcccatctggggatgagatagtcatagaagaaagatcaccaaaggagttgctgaactctgaaggtggtctgggaaagcaagttgctgcatccggtatatcagtctggaacccagctttcgatgttactccagcaaatctgatcactgcaatcataacagaaaaaggtgtgatcacaaaaactgatgc

SEQ ID NO: 294632 - DNA, 468 bp, Zea mays
gccgccctttcttggatattggagttagctccattaaactggtatatcttattttcagcgtctaagacaaacacatcatcatggtttaatgatgaccgggcaaagggaacctctttaacccgaatagctctcttccctctgcaaatatacaaccgtgtttcaaacttctcctcttcaggctttttgaacccagaggcgaaaccaccctccaaaggtataatgcaaggcttgaagtatgacaagaatttgtcagattcataaccttggagttccctatgttggattgcacgacccccaaggatggcatcaagttcaactgtcttgattgctgcagtcccagcttcatcctgcaatacaaacagtcacaaggaaggctagaactagtacacataataaaacagaatttaagttcacaagtgtgtacttgactcggatctttcccaatccagaagtggatatcatatagat

SEQ ID NO: 294633 - DNA, 403 bp, Zea mays
  unsure (1)..(403): unsure at all n locations
gagatccgaaattcagaagcgaggatggctacgaccgcgactaggcggtggtggaggcggcacgaaggcggcgacgatgacccagacgacctcgtccccatggacacccaagagcaagaagagctggtccggtctctggaggctaagcaggcgcagcaaggccgccgttggaggcgcgtcttcgcggggttcctcctaggttacgcggccttccttgtctactccagtttccatcatgcttggtctccctgggagctgcggtaccatgcttacttcatggaagatttgcctgcaccaatggtcataattgcaggtttggtatttccttcaactatttagtttgagtttgcaaagttgtaaacaaatcatgtgttgatgcttctaactgaattattntggatct

SEQ ID NO: 294634 - DNA, 322 bp, Zea mays
  unsure (1)..(322): unsure at all n locations
cgacaccaacccagcggcgatccgggcctttctctcccgcctcctcgacaccacccggcgcgcgctgtcgggcgcccgcccctggtccgagctcgcggaccgctcggctctctcccgcccggagtccctcgccgaggccacgtnccgcttgcgcaagaacctggcctacttccgcgtcaactacgccgncgtggccgcgctgtgcctcgccgcggcgctcctggcgcaccccttctccctggccgcgctgctggcgctgctcgccgactggtgcctcctctacgtgctccagcccgncgacgcgccccccgtctccgcgttc

SEQ ID NO: 294635 - DNA, 382 bp, Zea mays
cccacgcgtccgcccacgcgtccgctcactcgtccgcccacgcgtccgaacaaactggtgcggagggaaagattgtgagcaaggtctacttgtgtgagaaactgtctctcactaatgagatgtattttgccattacccttgataggaaaactgctggtccgctcattattgcttgcagcaagggaggaaccagtattgaagatcttgcggagaagtatcctgatatgattatcaaggttcctgttgatgtatttaaaggaataacagacgaggatgcagctaaagttggtgatggtctagctctaaagtcagcggataggcagtcttctatagaacagattaagaaactgtatgaacttttctgcaagtctgattgcacatt

SEQ ID NO: 294636 - DNA, 480 bp, Zea mays
  unsure (1)..(480): unsure at all n locations
actcggttcggaattccgacccacgcgtccgcggacgcgtgnnggcgttggatcgctgagtgttactgcagggacagtgatgatcaatctgcagaggagaatggggagttcttcttctccaaactccttggtatgagcataatccaaccggagttcagtgacgcgaggatggtctcatgtcaaatcaatggatttttccgtgagtgcatgctctcacggtcaggggaaatggaagaccttgtcattgaactggccgacagatgcaacctaaccacccaacgcagcgggcgtcatcttgtcatatcggaaagctgggacagagataagattttattcgagagcatcgacttctcacggatacggtcaatgacagtgtttggaatgtggagatcattcttcatctccaaaagtatgaagctcgtccgggtgttggatctggaagatgcattaggtttaacagatgaaaatgttgatcagatg

SEQ ID NO: 294637 - DNA, 400 bp, Zea mays
gtagagagaaggaaaaatatccccaaaccttagctcccgatctcgatggcgaaccctcgcgtcttcttcgacatgaccgtcggcggcgccccggcgggccggatcgtgatggagctgtacgccaacgaggtgcccaagaccgcggagaacttccgcgcgctgtgcacgggcgagaagggcgtgggcaagtccgggaagccgctccactacaagggctccaccttgcaccgcgtcatccccgagttcatgtgccagggcggcgacttcacccgcggcaacggcaccggcggcgagtccatctactgcgagaagttccacgacgagaagttcgtgcgcaagcacactcgccccagtgtgctctccatggccaacgccgggcccaacaccaacggcttccagt

SEQ ID NO: 294638 - DNA, 297 bp, Zea mays
  unsure (1)..(297): unsure at all n locations
cttgagaggatctatgaatcggaccgcttgtaggaagaggtagagctgcttgctacatccgccatgcatgaattccagtccaacaataccggaagctatctggatgtcttcaagtcgaaagaattgaggctagctttctttgctggggctggtcttcaggccttccagcaatttaccgggatcaacaccgtgatgtattacagccccacgatagtccagatggctggtttctcctccaacaggctggccttgctcctctccctgatcgtggcggccatgaacgccgncggaaccatc

SEQ ID NO: 294639 - DNA, 405 bp, Zea mays
cccacgcgtccgaaaaaaaaaaaaataaattaaaaaaaaaaaaaaaaaaaaaaaaagaaaagaaaaaaaaaaaaaaaaaaaaaaaaaaaaaaaaaaaaaaaaaaaaaaaaaaaaaaaaaaaaaaaaaaaaaaaaaaaaataaaaaaataaataacaactaaaaacaaaaataatggtacaatgacaactgcatatgaaattacttaaacacataatatctgatgactgaccctcagccaatgactgaaaatttggcaaggctaacacctttaacatcattcctaacaacaccggtgctaacaaagcttttggaaaagtgcttcctaatctgaatggcccgctcactggcatgttctaaaaaattcctactgtggatgtctaaattgaacacctcactttcagaat

SEQ ID NO: 294640 - DNA, 216 bp, Zea mays
tacacctacgcgtatcgagagcccatgctgactcaatgcggtcacttcttctgctggctgtgccagtaggcgtcgtttgacattactgcgcattcatcagagcgtctaatgtgcaaggctcttgtggacgaagacaatcttgtacccctttattgacgcggcaaggatcgtgttgacccaaaggcaaatgacatgcccaacggtgacattccttaa

SEQ ID NO: 294641 - DNA, 457 bp, Zea mays
  unsure (1)..(457): unsure at all n locations
ggaaggaacaatcctagctccaatcagtgttaaatcctggggttctggcttgctcgagtggctcgagttcaccaaactaaatgggatagttattcaagggaacggcattataaatggcagagggcaacaatggtggacctactcagacccagaggatgaggatgatgatgacacgtaccatgtagagtttcaaagaatgccacagattaaacctacagcgttgaggttttatggtagtttcaacgttgtagtgtctggtatcactattgtcaacagctcacagtgccatcttaagttcgacaactgtcaaggagtgatggtccatgatgtgaccatatcctnccctgagaacagtctcaacactgacggaatacacctgcagaactccaaagatgtcagcattcatcatacaaccctggcttgtggtgatgattgcatctncatccagacaggatgc

SEQ ID NO: 294642 - DNA, 439 bp, Zea mays
gcaacaattagttcgaagatcattctgaacagtgcgcagtgccttctgtgctacggattggaaaatcattcagaacttgtgctttttgaataaaaccagctgcagccgctaggcaactcgcggtttcgacagaaattagatgtttgcagcagacaagttgggcttaaataattgcagggcgtaatcctaggttctttctagtagctcacagtaccgactaccgagttcaatcattggcatgcagctgctgcagcagcaagtccaacatctgctaccaacctgtacctgaaagagagccaggctctgggcggcacgagtggttcggactccgacagcgattcgctgctggacatcgaaggtggcccgtgcgagcagagcacgaacccacaggacgtgaagaggatgcgacggatggtgtcgaaccgtgagtctgctcgac

SEQ ID NO: 294643 - DNA, 347 bp, Zea mays
agttagtccgtgtgatgagatcatgtcctgttggcgccgacgccgtggtcgtcggcggcggatacataggaatggaatgcgcagccgctctggttgccaacaggatgaaagtcactgtcgtcttccccggaaaacacttgatggcaaatctgttcacaccgaagatcgctgagttttacgagaactactacgaatcgaaaggagtcacttttataaaaggaactgcggtttcatctctgcagatctcgtctgggaaggtgacggcagcaatcctgcgagacggcaggcgcctacctgcggacatggtcgtggtcggcatcggcgcgcgcgccaacacggagctcttc

SEQ ID NO: 294644 - DNA, 401 bp, Zea mays
gcggtttctattttaaatactttatttccttcataaatttaggatcgctgcaacagacatgcaactaaaactcgtaatgaccattttatgctatatactgatactaaatatgctacactgtgtagataattatgcaattcggtatactgcgtaaaaatctgctacaggctgcatgcacacgaatttatgatggaaagaatatgcaatgaaaggaaatgaattgcatgcatagaaacaaaaaatcacatttaatgttttatttgcttcataaatataggatccctgcaacagccatgcaactaaacgcattagaactagtttatgatgtatactgaaacaaattatactacacggtgtaggtaattatgcaattacttacactgcgtaaaaaaatctggcat

SEQ ID NO: 294645 - DNA, 355 bp, Zea mays
gcgcacacaccacgatctcagcttacttccacttcagctccaatcacagtcgtgaccggggcgagtgctagctagaggggcgtgaaaatgccgatcaataggatcgccctgaggagccaccagtatgtgttccactcgtgcgccctcaaggcggcgttcgctgagttcatctgcaccctcatcttcagattcgccggccagggctccggcatggtcttcaccaagctgaccggtgggggcccgactaccccggcgggcctgatcgcggctgcggtggcacacgcgttcgcgctgttcagtggccgtgtcggtgggcgcgaacatctccggaggacacgtgaaccccgccgtgacc

SEQ ID NO: 294646 - DNA, 376 bp, Zea mays
cggaattccgagggtacgacctcacgcgtccggacaaacattctctggaatacggaattgactcgatcgagatgcatgttggagctgtacaggcaagcaatcgagcgtcagcagatcatgatcttagtgggaagaagggaaacactctgcgcagcggtcaaacttattgaacgagttggagcaaaggttgttgaatgtgcttgcgtaattgaattggcagaacttaaggcgctacacgaacaaggggacatgccagcactgtgtctcgacgaaacacatgcttgaccggaacttgtgatttaatacctcacagagttagagctagagctggagatgctagctgtctggaaccaccagagtactcgatgtatgctat

SEQ ID NO: 294647 - DNA, 379 bp, Zea mays
cggacgcgtgggcgtacccggaggagaactcgcggttcctgcgcacgaacgggatccgcgttcaccagttcgccgtcgaagggagcaagagtggtccgacagtgctggataccatgtcggcgcaggaaccattcgtccacatccccgaagaaacgatccgagaggcgctcaaagttgtccttgacgtgagaaaccagccggtcctcatccactgcaagagaggcaagcaccggactggctgcgtcgtcggatgcctgaggaagctgcagaagtggtgcctgtcctccgtgttcgacgagtacctgcacttcgcggcggcgaaggcgaggaccaccgaccagaggttcatggagctgttcgacgcgtcgagcctgatgca

SEQ ID NO: 294648 - DNA, 308 bp, Zea mays
agctgacctcttacacgcgcagttatgcgagtcctgacggtacctgaaattcgtgcactggatcgcgaaccaggccatactagaggtctttgccggctgtcggcgcgtgcacatcatctacttgagaatctaacaggggatgcagtggccggctcttctgcaggcgctcgcgctgcagcctggctgcccaatgtcgttccggctcacccgcgtcagaccaccgtagcccgacgagaccgacgccttgcagctagtgggctgtaaactggcccagttggagcacaccatgctcgtggacttgcagtacc

SEQ ID NO: 294649 - DNA, 435 bp, Zea mays
cccacgcgtccgcccacgcgtccgcccacgtgtccgcggacgcgtgggcggagcaacgccgccgccgtcatcttcagcctatccgcgctggacggcaacaaggcgaggatcggcgagctcggcgcgatgaggccgctggtggagctcctcgagcacggcagcacggcagcgaggaaagacgcggcctcggccatcttcaacctgtgcacgctgcacgagaacaagtcgcgggccaccaagagcggggccgtcgacgtgacgctgagggccgtcgcctgcgccggggacggctctggctccggctcgctggtggacgagtctctggccgtactcgcgctgctgtcgggcgaccacgaggcggtggaagaggtcggcgagacgggctgcgtggcctccatgctccacgtcgtgaaggacgacccgtgcaagcgcaac

SEQ ID NO: 294650 - DNA, 403 bp, Zea mays
cccacgcgtccgcccacgcgtccgcaaatatatggccctttgcttcgaatatatgcataatggaagccttgacaagttcattattggtattattgcgctcttcttattctcgtatgatcaattgaattcacttgaagtaaccattcttcaaattcacattttgagagactgtttgctccaacagatgaaaatagtgtccatgactggtccacacgctatgcgataatcaaggggatctgtgagggtttgaaataccttcacgaggaattgaatcctcctatttatcatttggatttaaaaccagctaatattttgttggatgacaatatgatgccaaagcttgcagattttggcttgtcaaagatttttgacaggaacgaacacgaatcacacaaagttgtgt

SEQ ID NO: 294651 - DNA, 451 bp, Zea mays
aaagcccacgcgtccggggagacaagacttgtatttggattccaaaggctattgtaactaaccttgtaggacccaacaagagttgggtacctaaaacccaagcgtaaattgtcttgcaggtttatgcatctgggggctcaagctggattatcgacagcggatgcacaaaccacatgacggaggagaagaagatgttcacctcctacgtcaagaacaaggattcccaggatacgatcatctttggagatgggaaccaaggcaaggtcaaaggcttgggcaagatagccatcaccaacgagcactccatttcaaacgtatttctagtagagtcgcttggttacaaccttctttctgtaagtcaattgtgccacatgggctacaattgtttggttacaaatgttgatgtttctgtctttaagagtgatggttcattagcatttaagggtgtatt

SEQ ID NO: 294652 - DNA, 314 bp, Zea mays
cctaaatccatccccttgccaagctctctctttgctgcgggaggtcgaggccggggagggcttgttagaaaggatgcagagcacgctgcaaacccgatcaaggtcataactgtacgctgaaccagttgcccaatatcactacctaccatacttctacttgcaatcactagacctgccttggcaattccacgatgacaatgtagtcgaaaccatcctgcttggagacagtgaccccacctacatcatgcccaacttcggctcgtactggatcaacgactgccaggtcttgtgcgccttcctggaggacggtccac

SEQ ID NO: 294653 - DNA, 323 bp, Zea mays
gtttgtcatggcgcgatccaataccaacgtttcatttaagtcggccccaacaaatgcttcgagcaggtctattcctaatgtgccgcgcgtcatcaaaaagcctaccggttctactattgcctatcatctttacaaaaaagccaccaacttcagcgagaagaatatcctgacctattaccttacacgtggtaccctctatgtgaccctatttacaactgacgaacgtttctctcaagttaatgcctcagctcgcgactcccatctttgtacctatgacttacacaacacgatgacctaccactttatccaagactcccagacaa

SEQ ID NO: 294654 - DNA, 314 bp, Zea mays
ggcccttgagctcccctcccttatgacttccccatggtgcctctcggcaccgcccgcggccctaggcttctgcgcgtctgcctccaccctcgcgcgtgtgccggttcccggaagtaggcggcgcaagtggaacgcgctcgtggtctgcgcgggccccgatgaggagaagattacgaagcggtcgcccctggatttccccatcgaatgggagagaccaaaacctgggaggagacctgatatcttccctaagttcagcccaatgaagacaccattaccgcatccattggcagctgatgatcctctggatgatgatg

SEQ ID NO: 294655 - DNA, 385 bp, Zea mays
aaagcagcatatgccgaggaatctcatttcaatacggaacgaggtacacccgcgtctcgaacatgcaaattgtgcagctggtctttttgatgtcaagaaaatccctctacaaatggaactcattacgagcacggatgtggtcatgaatctcttgaagaaaatggctccccctcttgttactctttttgcagcaaatcctgaaattcaccatgtaatcttgaggaacattaatctgatagttcaaaagagggctaccatactccctcatgagattaatgatttcttttggaagtacaatgaccctatatatgttcagatggaaaagctggagactatgatgcagcttggctcagatcgaaatatacatcatgtgctcttggaattc

SEQ ID NO: 294656 - DNA, 362 bp, Zea mays
  unsure (1)..(362): unsure at all n locations
ggtagcgattcggaattcgagcgacgcgtcacgcgtgaacaggaacttcctgatggggtttgaggttatcgaccacattaaggcttctctgtaggctgcctgcccaggcacaggctcctgtccccacattgctacgcttgcggctcgtgattccaccgccctgtttgagtgaccatactgggacgtgccactcggcccgagagacttgctcggtgcaagcatccagagctccaacaatgacatnagagactgcaacaacacactacctactataatctcaaagtttaagcgccacggcctcaatgttagacgatgatgcatccctctcatgtggccacaccattggtatgtctcgttgcact

SEQ ID NO: 294657 - DNA, 322 bp, Zea mays
gcgcctctgaaagttcggagtttccggtctgttcgcctacgtctccgcctagcgtcccgaagggtaatacttgtcaagtggcaatggcggaccaaggtcaccaacccactgttcttcataagctcggtggccagctacagctgcgctcgatcatctatgaacgtgttctggcacgtaacatattgccatctggcttatcttatgaaaggagatgtgtcacaaggaactacaagaccgagagcctttggggcccttcaatgtgagctagcggtggcatgaatgtaccagcgatgcagaccccggtttgagctaatgctcctgc

SEQ ID NO: 294658 - DNA, 427 bp, Zea mays
atcatttcaatgctctctattacgattgtctagtctgcagcacacaatgaagctgctcggtgcctttgtacagagaagcggtgatgagttctcacagaaggtgacgcaaagtgtactgctgtcttatgagatgctgacttagacgaacattgtggagtcgaatgagtctgcaatcggtgagctgcaattcacaaccaattatctcatgccatcattcttttgctttcccctgtatattttttcaaccggtgtcactcgtatagtggtgttgggtctctttagacaaactcgggacggttgcttatcctaaaaattcgattgtactgcgtggcatgaaatgatcgattcgaagaatattttgaacatgctgccacctaatcaaaaaatttcatgtttaacttcataaggaataacttgtgcttattct

SEQ ID NO: 294659 - DNA, 430 bp, Zea mays
cactggcccggacctttgggctgatttatgtgcttgtcgtctcttgattctactaattctgcatctctgggttgtattgggaagactactgttgagcatactcgggccggtggccttgggacggatgctaggagtaaagttaggatgtcgcatggattcgccgacgattttagtaagtccttgaagcggaatcctaatggtcatagtattggttaagtcttgggtgatgatagtgaagctacttcccgtttctgggttactcctaaggatttgcctacgaaggggtagaatacatcggctacgcgtgatcgtcatgagttgaatggggagttgactttgagtaataagtggtatggggttgtgaagactcccagttatttcgatgctaaggtcgatgaattacggcctgggaccgagtaagagcatattt

SEQ ID NO: 294660 - DNA, 344 bp, Zea mays
gatatcactaggagggagaccttcaaccatttcgctagatgcttagaagatgcaaggccgggtgcaggtgctaacatgactgcgacgctgattggaaacaagggagacctttctcatagacgggctgtcagctatgatgaatgtgaacaattatccaaagagcatgctctgctcttaatggaggcatttgccaaaactgcacaaaacattcaagaggcattcattaagaccgctggtacacatatacaaaaccattcaagatggcctatccgaagcatcaaatgactaccacggcatcaaaggactctacacaggtcccaacttatctggacgtggaactggct

SEQ ID NO: 294661 - DNA, 233 bp, Zea mays
aataggactaggaagtagaacctacaaccatttcgtatgatgcgtagaaaatgcacggccgtgggcaggtgctaacatgactgagacgctgattggaaacaagtgatatctttctcatagacctgctgtcaattatgaggaaggtgaacaacaatgcaaagaccatgatcagctctgtatggccgcatttgctagctctgcacaacacattcaattggcatgtcattaatacc

SEQ ID NO: 294662 - DNA, 356 bp, Zea mays
cccacgcgtccgcccacgcgtactgtcattccgccctgatcacatcaacatacaggttcgggaccaatctgatgaagtgctggctcgtggtttcaatgatcagatttatgacatcttccagcttctgccatctaatattcacgatgcagtctcctctgctaccatgccacctgaggccattgagattacccgcaagtacatgaacaaaccagtcagactatcttgtgaagagagattagctcacccttgagggcatcaatcatatctatgagaatgtgcacaatgaatacttgaagctggacacactgtgtgacctgtatgagaccctgaccattatccatagtgtatatttgtca

SEQ ID NO: 294663 - DNA, 274 bp, Zea mays
cagacgcgtagcttctagcgccatcacccgaggaataagaccacaccatgctgcgttacgcgggcaggatgctttcggcttccgtcttctgacggcgcactcaggcagccgctaagggacctcttgacggagatcgcgccccttatcgggacgacgattgtgctttacaccgtaaaccaacactgcttttcatactctacatccagtatgcaactgccaggaggtcctctttaactgagacacttgtcccaggaaaccaagaagctgggctatc

SEQ ID NO: 294664 - DNA, 305 bp, Zea mays
  unsure (1)..(305): unsure at all n locations
gcgcccacgcgttcgcccacgcgtacgtttgcttctagcgccagaacccgggaaacaggggcgggttgttctaangttgggctagacacctcttattaatcgctgactggttatgggacatgtctctgtgtgatgctttctgtggtattattgctgcaatagccgtgtaatccatcgcttctgcaatgaagcgctcggaagcatgctacgtatgttgtgtctgtgggtgattgtatttctggtagtaacagtgattgttcctgaattttggataatacaagctcattcgcaggagtttctgttgt

SEQ ID NO: 294665 - DNA, 444 bp, Zea mays
attaatcttctgaaaactggtgatcaagaagcatatatgaggatggttgaagagagcaagaatgaacgcttgaaaatgctccttgataaaacaaatgagcttcttgaaggaattggaaaagctgtacagcgacaaaaagatgctgaacatgttagtaagccagaaggagggagtgaagtgccaaaagggtcagaatctgaggattgttctcaaatttcgggcatcaagagtgaatcagctgaggagtctacttcagatgacgatggagacctccctggccctgcagatgaaagtaaattcaatgcaggacgtagacttgatgttactgttcattctattgaagaaaaagtaacagaacaaccatctgctctcgaaagtggtgaattgagaccatatcaactagaaagtctccaatggatgctttctctatttaacaacaatttg

SEQ ID NO: 294666 - DNA, 436 bp, Zea mays
cccacgcgtccgcaaaagggcaacaacttatatatagtcgggaaattgcatattttgtaagcattgatttatcaggcaactacttaacaggtgaaattcctttgggtatcacatcccttgatgccttaatgaatttgaatttgtcatcaaaccaactgggtggaaaaattcccaacaagattggtgccatgatgtcgctggcatccctggacctctccatcaacaagctttctggtgaaatcccatggagcttatcaaacctgacatctttaaactacatgaacttgtcctacaacaatctgtcaagaaagatacccttaggccgtcaactggataccttaaacgtggacaacccgtcactttgtggaccttctcttcaaaattattggtcaagaaatggtagcttcatgcctgggtatcacagaagcaataagca

SEQ ID NO: 294667 - DNA, 292 bp, Zea mays
ataggtttgacttgtttgggatttaaactctccctatcccactcaatccacatggattgagagctgaccgaacaagcccacacatgtctagttggttcaactgtaccattactagcaggtgatggaccattgggtttatgacaaatggtgacaaatatcatatacacgctctcgcgctcgaaggtcagatcatttttgttgatcttatctagcgaagtgatggcttatatgttcaggatcatgagctcgttgagatgtattgagaggtctctgaatgcttaagttcagacaa

SEQ ID NO: 294668 - DNA, 369 bp, Zea mays
cttgcggacgccgtgcggttcctaatggtttgttggatgattgggaggagaatggagctgttattactgcaaacagaacgaaaggtgacgacctagtaatcacccatcttggtgactgtctctggaaagaaaaaaatgagattgcagctgctcattcgtgctatttagttgctgaactaaatattgattcatactcggaaagcgcaaggttgtgcctcattggtgcagatcacttgaagtgtcctcgaacatttgccagccctgaagccattcagaggacagaggtttatgaatacgcgaaggtgcttggtaattctcagtatatcctactaccctttcagccatataagctgatatatgcatacatgc

SEQ ID NO: 294669 - DNA, 439 bp, Zea mays
ccacgcgtccgcttgcggacgccgtgcgtcctcaagcggttcggcgcgctccggttcgccaaccgcgccggcccgctctacggccacctctccagcaccgactccacggccacatcgatgaggcttacctgggtgagcggcgacgggaggccgcagcaggttcagtacggaggaggcaagtccggtacttctcaagtggcaacgttcacgcggaatgatatgtgcagtagccccttgttaccaagccctgccaaggatttcgggtggcatgaccctggctacatccacacggccgtcatgaccgggctccagccttctcaatcctacacctaccgttacggaagtgattccgagggttggagtgacacatacacattcagaatgccaccagctgcaggctccgacgagacatcatttgtgatctacggtgatatgggga

SEQ ID NO: 294670 - DNA, 408 bp, Zea mays
  unsure (1)..(408): unsure at all n locations
gtcagacacgcgtccgcccacgcgtccgcctacgcgtccgcggacgtttgggcgacatgaagctcagggacgacctggagaggctcaagaagatcaggaaccaccgtggtctgcgtcactactggggcctncgtgtccgtggccagcacaccaagaccactggcaagcgtggaaaaactgttggtgtcttcaagaagcgantagctacatatctatcgacaaatctcagatgtactagtgtttgttcttgttcaaactgtcttgatgaagggtttctgttgggacagtttcctgaaattatgttttgccctaggataatctngcagttatggaaaccttgtatattgtatcctgcaatttggtttttgcaacttataagagtaattntatttgatgagtcttatgctg

SEQ ID NO: 294671 - DNA, 391 bp, Zea mays
gacctttgggctgatttagtgcttggtaaacaaagacaagaaagaaagacccggccgatcctccgagacgtatgtcaatagcgagggagacacattagccgtcgcgataggcgatacagcagtgtccgtcggctcgaaagatataaccatcggcgaaatatctcgcgatttagataagttcgcagcgtccgaatgcacggaacccttcgacttcgctaccaaggccgtcaccgaatttaagattaaagtcgacgttgataaaacggtcatcgggccaactaagtccgtctaagaagatttgctaccttatcctctcagagatgaggaaattaattagatcgccaccgaaggaacgggagaaccgtactccgacactaccgcagatagatca

SEQ ID NO: 294672 - DNA, 446 bp, Zea mays
ggacctttgggctgatttatgtgcttatttatgtgcttgtttatgtgcttggcgacctaaaccgagctttcgaataagaagcacggacgtaacgctttcccatcctcgacgaatctccctaatatttacgacgatatatagaagaccgccgagaagcaccttaatcttaatactgaaacctacatccctaactagagttagcacttctgtaccgccattgaggatcctccgttatcctttagtaaagggaaactcgggaaggacggtcggcacttcttcggctacggcgacgcgccctttctcccgaacaatagtggaaaatccgatactccaccggtctagggtaaggagcacgctcccgtcgtaaatctagataatccgggcgtcacagctgatactaagacttcaaattactcgactaacaattagaatgagcatcgtacgga

SEQ ID NO: 294673 - DNA, 482 bp, Zea mays
  unsure (1)..(482): unsure at all n locations
ggacctttgggctgatttatgtgcttggcgatggcggagcatgcgaatgagcggtggccttacggcgtttgcttgtgcgtatattgcgtgctactcttatttagtatgatgagattgctattaatgatgagactgttgttgattctaaggagtatgctactaagtttgcgactttcgagaagcattctgatgagaagattactccgtattctaatttgcttgggtgtcctgctactggtgggttttatggtgatgttggttctattggttgtaagactactactgatatccatggtggtcgccgagtttatggtggcggtgttcctcatggtaaggattttattaaggcggattgtagtggtgttcatgcggttaggtaagttgntaagagtactgcggttagtggatctgtttgctgtcgttctgcgtaggcgctgcatgttactggtgcgttggagttttcgcttgcgcctgctgatctg

SEQ ID NO: 294674 - DNA, 489 bp, Zea mays
ggctctggacctttgggctgatttatgtgcttggatccccgttctcggaacatccgcctttacaagtcacactcggttcgccatattagacaacgattcgtcgttccacatcctagcggccgacgacgtctataaagtaggatcagaaactcacgtcgtcgaccccgtaaacgatccaattactagtcacaatcatagtcccgacttaccagtggaacactcccctcctaccgacaatggcgttcctctcgccgacggcgcaccgatcgaccctttgaccatcttcctagaggtagccggccgtcccagcaattcgaatattagtaagaccgactacgtcaaattctcagccactctgtacaacggcgtcagcggcgatcatttagatcgtatcgattaagtccacgaaaaggtagccgttgacggcgtggacgctaccgatcgcttcgcctaagcgatcaaagacggtacatcgacacgtacgagtct

SEQ ID NO: 294675 - DNA, 441 bp, Zea mays
  unsure (1)..(441): unsure at all n locations
gggctgatttatgtgcttgactgtcttagtgtttctgttgctggtagcccggtccctgcatctttgtcattgagtcaggaggtacgattcctgttggcttaatacgggcaagatatgcggcacgggagtcgggtgtaagtctaagatttatagaaggaattagaggcgggtcgataaagttcataagaagagttactctggtaatgagcggaagaaatttcccgtcgggctactctatgtaaagggaactgcttccgagaagactggtaccgaggtcaagtagttcaatctcgtcacttgcaagcgtgtctgcgcatagtcggcgaagaatgggaagaagaccgtcgttcccgcgttaaatgacggccgtccgaatcatactgaggagaatgacgacgcgtcgaccgtcggacctngctgcaagggttacgtcgcgggaga

SEQ ID NO: 294676 - DNA, 341 bp, Zea mays
gccaggcgtctggcctagttgctcaaacatttcaacgccgccaagaagcacatcacgacgggtcttacgccagcttcgaaataccatgcctgatgacgtttctacacaccttagaaaactggtgtttcatttggaacccaacatcttgtagctgtactccctcgagatggtattgagcatactgtccagataccgcggctacaaacgcattggtgcaagttatgatgctctagcaatgcatgcaatgaatatagtgatgggaagcactgtcccaaaagctgaatttgttgaccttgaacccactgtcatcgatgaggtgagaactggcacctaccgccagc

SEQ ID NO: 294677 - DNA, 297 bp, Zea mays
  unsure (1)..(297): unsure at all n locations
ccaccgcgggatcctcctcgacaccgcacgttactactaccccgtccgtgacatcctccggaccatccgcgccatggcctccaacaagctcaatgtattccactggcacatcaccgactcccagtccttccccatcgtcctcccctcggtccccaatctcgccaacttcggctcctactnccccgtcatgcgctacaccgaccaggacgtccgccgcatcgtccgatacgccggggcctttggcatcgcgttaatccttgaatcgacatgcccgggcacacggggtcctgggccggc

SEQ ID NO: 294678 - DNA, 300 bp, Zea mays
gccgcgcgtgcttccactcgtcctggagcttatagggatgcgtgcttgatccgatccggggagggcacaccagctttgagcgactacgatcgaatggatggccgccaatggcgagaagaagatgataaccctgaaaagctccgatggcgaggagttcgatgaggaagaggccgaggctatggagtcggagaccatccgccacatgatcgaggatgactgcgccgacaacggcatccgtctttctaacgttaactacgagatcctatgcaaggtaatcgaatcctgctgcatgcacgtaca

SEQ ID NO: 294679 - DNA, 319 bp, Zea mays
gcgtccgaccacgcgtccgcatctttcttctttggctacatttccaacatctgctatacattctactgcaagttattataaatacatgccggacccaaaacagcattatgaacgcccacatacattgcacccaaggtgctatcacctcccgactatgatacaaagcttccatacaaatgaccctgtcttgagactcttcacatcatgcttataacatcatacccattttaatacccagctaaccccactaatatacacatcaccattcaccaaataatgcaagagcaatacaagataccacaacatgtgcacatatcta

SEQ ID NO: 294680 - DNA, 391 bp, Zea mays
cacgaccacgctagcacgcactctccgtctctccccttccggttccagtagctgcatccgctgcgccaagtcccaataatcccgcagcccggcggcatggcggtgagcaacaacatcacggcatgcatcaacttcctggtgcttctctgcaccatccccatcgccgcgacggggctgtggctggcctcgaggcacggcagcgaggactgcgccaggctggcccgctggcccgtcgccgtgctgggcgcgctcctcctgctggtcgcgctggcgggtttcgcgggcgcctactggaaccgcaggggcctgctcgcctgctacctcttcgcgatggccgccctcatcacgttcctcctcgccttcctcgtcttcgccttcgccgtcgcgcacg

SEQ ID NO: 294681 - DNA, 442 bp, Zea mays
ggagagcccagttgtggttctatgcctgttaggtattctttgtaattttttctcctgtgtctggttctgttatcatcattattttcctggtgtggggcaatcatgtcagagagcgagttagcagtaataaaaccagaggcattgaaaacttatatctggcttcagtgctttgatggctccatacaacaagtggaggaagaagttgccatgttctgccctatgatatgtcgggagataatgaaaaatgggacagggtcatctaagaatcatgctatagttctaccgcaaagagttaatccggcaagtttgagtttgattcttgattattgtcggtttcatcaggtccctgggcgctcaaacaaggagcggaagtcattcgatgaaaagtttgtcaggatagacacagaaaaactgtgtaagttggcttctgcatcccttggtc

SEQ ID NO: 294682 - DNA, 362 bp, Zea mays
ataaccgggccgacccacgcgtacgcggagctggtttgactattgtagccatatttgtattgcctgcgagaagcttggcccaaggttatattattatctgcagaaggccggcttacatccattcccaattgatctaattcgccggatcggacagcaacttttggaatctgttgcattcatgcatcgtcttcagctaattcatactgatctgaaaccagagaacatcctcctcgtttcttcagattatgtcaagttacctgatcccaaggacggatcattctcaaggaaactgccaaaaacaagtgccattaaattgattgactttggaagtgcagcataccattaccaggatcgcacttaca

SEQ ID NO: 294683 - DNA, 402 bp, Zea mays
gaattccggccgacccacgcgtcgccacgcgtcgccacgcgtcggttctttgagcctactacctgccttgttcgagtgggagaaggatataaacgggcaattgagtggccaaagagcagggacaaggtatggtacagcaatgttcctcacactaggcttgcagagtacaaggggcatcaaaattgggttaaggtctcaggtgactatctattgttccctgggggtgggacttaggtcaagaatggtggcctccactatattgatactattcaggacgcactaactgatattgcatggggcaaacgaaacccggtcatattcgatgctggctgtagagttgccagctgtggaagctacatgtttgataaagatgcgcttaccatgtgttttgctccaaaagat

SEQ ID NO: 294684 - DNA, 246 bp, Zea mays
cccacgcgtccgcccatcgtccgttgacttgtgggcggacgcgtgggctcccgggggggtgtcttgtcgcatccggcgggccaaagctctctctgctcgcaggtcgcagccatggcgaagaactacccgaccgtgagcgccgagtacagctaggctgtggacaaggccaggcgcaagcttcgagccctcatcgccgagaagagctgcaccccgctcatgctccgtcttacgtggcactacgcgggg

SEQ ID NO: 294685 - DNA, 426 bp, Zea mays
aattcgggtcgattacgcgtccgcccacgcgtccgcccacgcgtccgcccacttttttgcccacgcgtccgcccacgcgtccgctgggccctgaaggacaagcaagagttcatcgacattgtggagaccgtatacaggggcgcccggaaaggccgtggtctggtgattgctccaaaggactactccaccaagtaccgttactaagaaggcaggcattccccttatgcaatctattggggatgtttacacggacagttagtccgacaggtgatccctaactgtatcttggcataccctaataattcaagttgctggcttgagtgatgcttatccatggcttggcatgccatagtgaacatgtaaacctgtgatttgaggtgattattcgagtgtaaagaaaccaggattgcgttcggctatgactat

SEQ ID NO: 294686 - DNA, 404 bp, Zea mays
cccacgcgtccgcggactcgtgggccgattgctttttcggatgcggcggaattagttcagaagtgctaaggttgtcagagatgtgcaagagatcaaaaacaaccttcgtccttgacacagctcatacaacccatctggccattgcaaaggtggggccttgacttgttgggtccattaccaccggcccaagggaacttaagatatgttgtagtggctgtggaatatttttccaaatggattgaggcaaagcctttagccacaataacttcggccaccattcaaaagtttttctggaagaatattgtttgtcgtttcggggtaccaaaggccatcactgtggataatggaacacagttcgactccgaagctttcagagatttctgtgatcaaattggtacgaagat

SEQ ID NO: 294687 - DNA, 320 bp, Zea mays
ccactcgtccgcggacgcgtgggcggactcgtgggtgattttgatgggttcatccatttgcagattgaaagccaagatatgcctgggcttagcttcaaaacacacccaaatatcaataaggatttgtttaacagtcagcaaattttgggagcaaaagatccaaacaggccctttccgagtggtcaaaatgaaactcctctggtgaaatggagaatccaggggatggatgagtcgtctttacctctgtcagtcaattgctggccgtcagtatctggaaatgaaacctatttgaacattggattttgaaccttttagaatgt

SEQ ID NO: 294688 - DNA, 168 bp, Zea mays
atggccttgctctcccgcctcacctggctctacgtctccggccaattgtggcaggacgcacagacccgagctatcctgtacggcctcctctagaagagctctaccagcgttccgaaagtgctctctgtggaggacaagcttatgaacctcttgtgcaaggcaatttta

SEQ ID NO: 294689 - DNA, 336 bp, Zea mays
ggccggaccgacgcattcgtccgcccacccgtccaccttttttaggcactagtctttcaacctggacccattcctccagctcgacgagttcactgtcttcgaggccgccgtcttccccgaccacccgcacagaggattcgagaccgtcacccacatgtttgatggggccatgatccaccaggacttccctggtcacaagggcaccatcaggacaggggacgtgcagtggatgactgcggggcgaggcatcgtgcactcggagatgccggctggtgacagcgtgagcgagggcctgcagctctggatcaacctctccttcaaggacaagatgatcga

SEQ ID NO: 294690 - DNA, 302 bp, Zea mays
  unsure (1)..(302): unsure at all n locations
nccacgcgtccgnccacgcgtnncgccacgcgtncgcagatttgacagataaagatcagggggtgtattccaccttgcccgccgagttacaagcattggttacaaggttccaatctgtgtttgctcttcctgttggccttccacctgtccgtgattgggatcaccatatctctcttctacctggtgctcaaccatttcatgtgagaccatacagatatgcacccgcgttgaagactgaaatcgagcgccaagtccaagagatgttatcttcaagcattattcaacacagcaacagtgagttc

SEQ ID NO: 294691 - DNA, 321 bp, Zea mays
  unsure (1)..(321): unsure at all n locations
aaggganncaccaaagagggggngaagaacaagaagnaccnngcagnngcngggccagaggagggngcccagacccggcnggnncaggccanngaggcnnnnggngggaagngcaacccngaggcgccgaaggaggnncccgnngnccncaaagcccncaacgaaggagananccnggacgaggaaaccanngnggacnggnacaangangcngncgcagcngggaaggacncccaggnngncaagaangccaagcacgncgncgaggggcnccagagngccgagncngangaagaaggngacgacgagngaagaagccac

SEQ ID NO: 294692 - DNA, 356 bp, Zea mays
  unsure (1)..(356): unsure at all n locations
cgccgcncncncnnnccccgagcccncgaaacccnaggggcgngccgaccggcggcggcggcgaggnganggcgaaggacccggacgcggnggcgaaagccnncgnggagcacnacnaccggacgnncgacaccaaccgcgcggcgccggnggggccggaacaggagaccnncaagcncaccnncgagggccagaagnnccagggcccaaccgccanggccggcaagcncggaacgcnacccaaccaggccggcgagcaccagaacgncaccgncgacagccagccgncggggccccagggaggcaagcncgncnncgncnccggagccaaccgcaccggccccgaggagcacccc

SEQ ID NO: 294693 - DNA, 393 bp, Zea mays
  unsure (1)..(393): unsure at all n locations
gttcaagattcagatgatgtctggtttaagaaattggaatcttgtataacacctgcgatagaggcagcacagctaaagaagtttccagagagactatctgccattcctcccagaattctggagggtcaggtcccagacataacagaagaagtctatgaggaggataataagttgtggaagaagcatgttaatacttataagagggtgaacaagctgataggttcttcaaggtacaggaatattatggacatgaatgcaggccttggaagttttgctgcaactcttcattcttccagttcctgggtaatgaacgttgtgccctctatatcagaaaggaacactctnggtatcatatatgagcgaggtctgattggtatataccatgattggtgc

SEQ ID NO: 294694 - DNA, 392 bp, Zea mays
cccacgcgtccgcccacgcgtccgaaaaaaaaaaaaaaaaaaaaaaaaaaaaaaaaaaaagaaaaaaaaaaaaaaaaaaaaaaaaaaaaaaaaaaaaaaaaaaaaaaaaaaaaaaaaaaaaaaaaaaaaaaaaaaaaaaaaaggggggcccttttaaaggacccaagttaacgtacccgtgaatgcaacgtaaaatctctccaaaagggacaccaaaatcaaattaactggccgtggtttaaaaacgtaataactggaaaaaccctgacgtaaccaaattaaaccgccttgcaaaaaatccccttttcgcaaactggggaaaaagcaaaaaggcccacaccaaaagactttccaaaaatatgcgcaacctaaaagaagaatggaaccccccc

SEQ ID NO: 294695 - DNA, 363 bp, Zea mays
gttatgagcgaaataatccataatgtatcctacatgctttattactttgaaggaactcggggttccagatgcttttatctcatcagtgactgctggggtaataccatcttgtaaagcccttatctgtgttcctaatggcctgggtgcaatatgcctcaataatcaaggacttgaggctgtcagggaaacttcagcactgcgatttcttgtagataccttcactagcatgaaatacttgataccaatgaatgagggtgtggtccttctagctaatgcagtggaagagcttcttcgtcatgtgcaatccctgagaagtattgatgttgacatcattattgaaataatcaatagactaagttcgtc

SEQ ID NO: 294696 - DNA, 374 bp, Zea mays
cccacgcgtccggtgtcatccgcatattggatgatggggaaattaaagtcctccccaatcgggaggggagcttgagcatgtcaatgttttttccttgttaatgatggattgcaaaaggtacatagcaaggacaaaaagcaatggggacagtgggtcaccttgtctaactcctctttggcagcggagacctttccgggcaccccattaagaagcacttgagatgttcccgagtccatgatcatatttatccactaatgccattttggtccaaatcctttgtgtgtaaaaatgctcctgattaccggatgctccatcttgtcaaaagatttctcgaaatctagtttgaagataaccgacccttttttactgcttac

SEQ ID NO: 294697 - DNA, 299 bp, Zea mays
cccactcgtgcgccgacacgtgtgcggcgatatcacgtcgcggcaagggcatcagggggctgtgctaggtccgcgccaagcaccaccgactggtgctgcgcgacaacatgcagggcatcacgaatccggcgatccagatgctggccacgaagggcagcaataagcgcatctctggtctcatgtacgaggatacccgcagcgtgctcaatatcttacttgagaacgtcatgcgcgacgccatgacctacaccaagcacgcccagtcgtatgaccgtcaccgtcatggatgtcgactacgc

SEQ ID NO: 294698 - DNA, 307 bp, Zea mays
cggacgcgtgggctgacgcgtggtgtgttcgacgacccttggcaagaattcgtgagcacggtcgtctgcataaagatcctctccccgcaggaagtgcagcacaaggcgaagcagggcctggagctcctgagctcggcccccacgcggacgctcaggagcagctgtgactactacgtaaggacgcaggagtccataaggctggcctccgggatcacatcacggacatcagcaccggcgagcacgagcacacgatggcgagcacgcagcaacgacagacgccagttacacatactcaaacataaagcac

SEQ ID NO: 294699 - DNA, 424 bp, Zea mays
cccacgcgtccgcccacgcgtccgtccacgcgtccgcggacgcgtgggcaacaattatggtcactaaggtggatgaaccatcaaaatacggtgttgtggttatggaggaggcaactggcagggtggaaaggtttgttgagaagccaaaaatatttgtgggtaacaagatcaatgctgggatttacttactgaacccatctgtccttgaccgcattgagctgaagccaacatcaattgagaaagaggtcttccctcaaattgcagctgatcaacagctctatgcaatggtccttccaggtttttggatggatgttggtcagcctagggactacattactggcttgcgtctttatctagactcgattaggaagaaatcagctgccaagctagctactggagcacatgttgttgggcatgtgctggt

SEQ ID NO: 294700 - DNA, 419 bp, Zea mays
tttcatcctgcgagagacaagcccctcattaacccttgtcatcctgatcctgagatccgtctcctttaccccactggctggcgagcagcaaactccaggtgcagagcggacaagttcctcacgagcggttaattctacctagatgatgcgggatatggagcaaaactgggattcttgcctgctttccgtggtgtgagataccatataaaccaatggggcaataatcccgtacagaacgagacagagttggttaatctaaggcactcatctcttcgtgtcacagttgagcgtgcattcgggtcactgaagagaagattcaagattttagatgatgcatctgctttcttgcattttacaacacaagtcgattttgctggtgcttggtgtatcattcataattgggtcatacaagatgggag

SEQ ID NO: 294701 - DNA, 237 bp, Zea mays
cccacgcgtccgcccacgcgtccgctttttctccactccgattttgcttggttccatcgggccggagagggagaagctagctagctagcagcagctctgttggtgtgtgtgtgtgtgtgtgtgtggagggtagctgaagctggtgctcgctggaatggtcaggagccatggtgaggggccgggtggagctgatgcggttcgagaacaacatctaccgccaggttaccttacacaagc

SEQ ID NO: 294702 - DNA, 314 bp, Zea mays
tttggacatttgttattcaattcttatcgttctgacttgcacgtttacatctgtaggctatgcttttgtctactttgaggatgaacgtgatggcaatgatgccatacgggctcttgatggttatccatttggccctggcagacgcaggctttcagtagagtggtcacggggtgatcaagctggtagacgtgatggcaacaaaccagaagcaaatactaagccaacaaggacactgtttgtcattaactttgatccaatgaacacaagagtcagtgacatcgaaaggcacttcacaccatttgggaacatatcaa

SEQ ID NO: 294703 - DNA, 426 bp, Zea mays
ggggactacaaactagatgccacagtgactatagcttcaggggatgatatttatctgggtgacctcgtgtatgagccgtcaagagactggccgacgatgtgggagattggagtacctgatcgatctgctgctgagttttatgttccggatcctaaccccaactacgtcaatagattgtacgtcaaccaccctgcagatagatttagacagtatgggctctgggaacgatacgcggaactataccctgacagtgacctggtatacacagttggccaaagtgactatagcacggattggttctatgctcaagttaacaggaaaattgatgacaacacttaccagtcaacaacatggtaaatcaagttcgatcttgacagtgtcagcccaagcagcacctacaagttcatggtggctctggcgtcttct

SEQ ID NO: 294704 - DNA, 426 bp, Zea mays
cccacgcgtccgcccacgcgtccgcccacgcgtccgcccacgcgtccggaatccttctgtgaagatcgtcgccgtcaagaagatggagctgccgacttgcaagcaggccgacggcgagcgcgagttccgggtggagatcgacatcctgagcaggctagaccaccccaacctggtcacgctcatcggctactgcgccgacggcaagcaccggttcgtggtgtacgagtacatgcccaggggcaacctccaggacatcctcaacggcattggggaggtgaggatggactggccgctgcgcctgcggatcgcgctgggagcggcgcgggcgctggcctacctgcactccagcacggccgtcggcgtccccgtcgtccacagggacttcaagtccagcaacatccttctcaccgaccactacgaggcaaa

SEQ ID NO: 294705 - DNA, 434 bp, Zea mays
tcgcccatgcgtacgtttatccatatccctgctgtttcagatcctcatggatccagtcaagccagggatcgatcatgatgactcggacgagcaccgcttcgaatctaaggcctacgccagagctgttaagagctatccgtagcagggctgtcacacgggcagaagaacagctgcatcgtcatcaagaaccgcccctgcaaaggtgtgcaggtttatacctgaaatactggatagcatggccatgccaaatgccactttgatgcatagacatgttcaacaggaaaaagctagcagatatcggtacttggtcacacaactgcgatatttcgcatgtgaaccgaactgagttccagctgattgatatatcacaggatggatttgggagacgtttttactcaaatggcaacactaatgatgatcttagactcccaact

SEQ ID NO: 294706 - DNA, 270 bp, Zea mays
aaaacccgtctcgaccacacgcgtccgctcggaacgatcactgtatgaaagttttctctacaacggcctgccatatatcaaaggcaggctgcaatgtgtgcatgcagtgccagacgcccagttcgaagaagtttcggataaaggtcaagctgatgatcctgccttcactagatacttggccttgcatccaaaacgattttaaataagtagcataagcatgacctctgtcggactcatgattacccgcacaaaggacaaggccctagagta

SEQ ID NO: 294707 - DNA, 299 bp, Zea mays
aaaactcatacgacagtctacaaaatcagttttaaaacatcacgacaaagacaaaaaaggtgctatgctaggtcggtacaaagcaccacagaatggtgctgcgcgacatactgcaggggatcacgaatccggcgatccgtatgctggccactaatggcagcaatgagcgcatctctgctctcatgtacgaggatacccgaatcgtgctcgatatgctacttgataacgtcatgcttgactccatgacctacaccgagcacgccagtcgtatgaccatcaccggcatagatgccaactac

SEQ ID NO: 294708 - DNA, 302 bp, Zea mays
cccacgcgttcgcggacgcgtgggcggactcgtgggccgacgcgtggtcaagcacatcgggaagaagctcgttggcctacgacgattcatccacgcactctagctgtcgttctggatgaccgaccgtaggcacctacacctattggtcggtgacctcgggtaccggctggacctaatcagcaaggtgcacgggcttgataaagccgccgagtacttcgggatggtacccaagcagctgacgaagccgcagtgctacggctacctactgaaatgctatgtggaggcgaaagccgttgacaagg

SEQ ID NO: 294709 - DNA, 313 bp, Zea mays
cccacgcgtccgacgactccggattctttaacgatcacaggtagcatctggttcactttgactgagatcatgtccagcatgaactgcaagtgctactgcagctccagctggtcctgcgtcatgtcatgctactgcatcatccataacttgcagacctacttcgagagcagcctcaagaccatggttcttactgtgcataccaccacggccagcaccaccggcttcgaggctggcaccgacgtccgcgcctgccactgcaacacctgcaagtgcggtaccagctgcggctgcttctgctgcatctgcaactgat

SEQ ID NO: 294710 - DNA, 274 bp, Zea mays
tcgattcctaaaccaaacaagtatttcagactctaatttaaccccaactcctgaaccaagcaggcagcagctagctacccaatccaccatccttccttccttcctacccaatcttaggtattcttctaacctaaagacatcagctttaccacttaagcgaaccccttaccagatgacttaacagaggaagagaagttggagcccctaaaaaatgtaaatgatgatcctaggattcggctattgaaccggttgtacgcgaagaagcgggaagagc

SEQ ID NO: 294711 - DNA, 440 bp, Zea mays
  unsure (1)..(440): unsure at all n locations
gggaggactatgtgtacccagctacaagatcccagaatttaatagttgtatcatgtgaaccagtaacaactattaaattctgggatcttgtagctgggaggactatgtgtacccttactcaccataaaaagtctgtccgagctatggcgcttcatccaaaggagaaagcatttgcatcagcatcagcagacaacgtaaagaagtttaaccttcccaaaggcgaatttctgcacaacatgctgtcgcagcagaaaacaataatcaattcaatggctgtaaatgaggatggtgttttggcaactggaggggataatggaagcctgtggttntgggactggaagagtggtcataactttcaacaagatcagactatagtccagcctggatcactggaaagtgaggcatgcatatatgccctctcatatgacgtgaagcgatca

SEQ ID NO: 294712 - DNA, 452 bp, Zea mays
  unsure (1)..(452): unsure at all n locations
cccacgcgtccgcccacgcgtccgcccacgcgtccgcccacgcgtccgcccacgcgtccgcccacgcgtccgcccacgcgtccgcggacgcgtgggatcgtcttcctcccctcacatcctctggcctctggtcctccaccgtcctgctagccagagctgctcttgtacgcgcagctggcctctgtgcatatcaccagcacaccgcgcaggggaaggaaattaacaagagaaaaggcaaggagagcaggcaggcaaggaagctgcagaagccaaggaaggagaaggaggatcatcaatgagcatctcggtgaacgggcagtcgtgcgtgccgccggggttccgcttccaccccacggaggaggagctgctcaactactacctncgcaagaaggtggcctcccaggagatcgacctcgacgtcatccgcgacgtcgacctcaacaagctcgagc

SEQ ID NO: 294713 - DNA, 454 bp, Zea mays
gccagctactgcacggtgtacaaggcgaagctggcgagcggcggcagcagcatcgagctgcgcctgctgcgggaaggcagctgcaaggacgccgcgtcgtgcgcgcccgttgtgcggcgcatcggccgcgcgcgccacgagaacctggtcccgcttagggccttctaccaggggaggcgcggcgagaagctgctggtgtacgactacttcccgcgcagccggacgctgcaggagctgctgcacggtggcagcgagcccgcggcggggcggccggcgctcacctgggggcggcggcacaagatcgcgctgggcgcggcgcgcgcgctggcgtatctgcacgcgggccagggcgaggcgcacgggaacgtgcgctcgtccatcgtggtggtggacgacctcttcgtgccgcgcctggcagagtacgcggtggaccggctgctggtgcccgcggcgg

SEQ ID NO: 294714 - DNA, 419 bp, Zea mays
gagaagcagcacaagcacaagcagcacctcggcgaggccggcgccatcgccgtcggcgcgttcgcgctctacgagaagcacgaggcgaagaaggacccggagcacgcgcaccgacacaagatcgaggaggaggtcgcggcggcggcggccgtcggctccggcggcttcggcttccacgagcaccacgagaagaagaaggaccacaaggaggccgaggaggtcggcagctagaagaagcaccaattcttcggctagctgactgatcctcccatatcgatcgtcgtgcctgcccgcttgctacacctgcgtgtgagagtgatctcgagcgccggccggcctgcacacgcgacgtgttgggcgtacgtacggacggatacatgtatgtatgtatatgcgcacgtgtgatgcacgaataagcg

SEQ ID NO: 294715 - DNA, 409 bp, Zea mays
gacatgaccgtcggcggcgccccggcgggccggatcgtgatggagctgtacgccaacgaggtgcccaagaccgcggagaactttcgcgcgctgtgcacgggcgagaagggcgtgggcaagtccgggaagccgctccactacaagggctccaccttccaccgcgtcatccccgagttcatgtgccagggctgcgacttcacccgcggcaacggcaccggcggcgagtccatctacggcgagaagttccccgacgagaagttcgtgcgcaagcacaccgcccccggtgtgctctccatggccaacgccgggcccaacaccaacggctcccagttcttcatctgcaccgtcgcgaccccttggctcgacggcaagcacgtcgtcttcggccaggtcgtcgaaggcatggacg

SEQ ID NO: 294716 - DNA, 449 bp, Zea mays
cccacgcgtccgcccacgcgtccgcccacgcgtccgcccacgcgttcggcgagccaataaaatgtttgtggactacaatgagcctccaacagagagaatatactcatcttatcttgagctgaaccttgatgaggtggagcctagcatgtctggcccaaagaggcctcatgatcgtgtccctttgaaggaaatgaaatcagattggcatgcttgcctggacaacaaagttgggttcaagggttttgcagtgccaaaggagcagcaggataaggttgtcaaatttgactttcatgggcagccagcagaaatcaagcatggtagtgttgttatagcagcaataactagctgcacaaacacctcaaatcctagtgctatgcttggtgctggtcttgtagctaagaaagcttgcgagatgggtcttgaggttaaaccatgggtgaagacaagcc

SEQ ID NO: 294717 - DNA, 244 bp, Zea mays
aggccttgaagaattcaagaatgaggtcatacttattgcaaagttgcagcaccgcaatcttgtaagactactagggtgctgcatacagagggaagagaagatcctggtgtatgagtacatgcctaacaaaagtctagatgcattcctctttaatcctgaaaagcaacggcttctagactggaagaaacggtttgatataatcgaaggcattggtagaaggctgctatatcttcaccgggattcg

SEQ ID NO: 294718 - DNA, 438 bp, Zea mays
cccacgcgtccgcccacgcgtccgcccacgcgtccgcccacgcgtccgagcacctggcggtcctatcatggtgcgggcgctggagagcatcggcccccggccaggcacaggcgcgaggccccggcagtgcgagggcgcgcggccctggcggcacgcctgcccgatgcaggcaaggctcccccggcgcgcgtgggcgcgaggcgcggcggccaggccccgtcggcccctgcgtgggtgcggcagcgcggccccggcgctgacggcgtgggcgcggctgcacggcggctcggtgcaggccggctgcccggcctacgagggcggcatggcggtgcggcggccatggccccagccacgacgttggtgctgcggatccagccccgaccccggtgcgggagcgggcgtggcggcccggcccctgcgcacggcgcaactcgggcg

SEQ ID NO: 294719 - DNA, 284 bp, Zea mays
cccacgcgtccgcccacgcgtccgcccacgcgtccgcccacgcgtccgcccacgcgtccgctctccggcccggtgagggatctcagtaagctgcctaagtgtaactacgatgattgcaacactggctatgacctcggcgagtacagatagtttatcttgtacatacaggccatctttaatgacccatttaggatgttcaacaacatgcttgagatgtgcgattgctacacgcgatccaacgagcctgaccacagtaacaatatgtacaacgccgttaaaatcta

SEQ ID NO: 294720 - DNA, 345 bp, Zea mays
cggacgcgtgggtcctccccgagcgccgcgtcgtcgcctcctctgatccgtcgcctccccgagatctgctctcgtccttccgggggcttgcggcggaggtctggacgtacatccgggtcgtcgagcgctccgggctcgagggctcggatgagtcggagtactcctcggatgaggatgactcggacggcggcagcaaggacgaggacgacgacgacgaaagcggtggcggcggtgacggtgacggcagcggcaggggcggcagcggcggcagcaaggatggtgacggcggctgcagcaggggcggcaacggcggtggtggcagcagcagaggtagcaccaggggcg

SEQ ID NO: 294721 - DNA, 373 bp, Zea mays
gaattgccgggtccgaccacgcgtacgcccacgcgtccgctcaaggctgaccccaagaagtaccgcaagatgaaggagaggcttgtcggcgtctctgaggagaccaccacgggtgtcaagaggctctaccagatgcaggagaccggcgccctcctcttccctgccattaacgtcaacgattccgtcaccaagagcaagtttgacaacctgtatggttgccgccactcgctccctgatggtctgatgagggccactgacgttatgatcgccggtaaggttgctgtggtctgcggatacggtgatgtcggcaagggttgtgctgctggccttaagcaggctggtgcccgtgtcattgtgaccgagatcgacccca

SEQ ID NO: 294722 - DNA, 342 bp, Zea mays
acgcccacgcgtccgcccacgcgtccgcccactcgttcgcccacgcgtccgggctgttgtggctgaggtcccggtgaccgaggtgccagcggaggtcccggcggcccaggtggccgaggcgcccaaggcgaagaaggcgcccaaggagaagaaggcgcctaaggagaagaagctttccgcggcgaagaagccggcggcgcaccctccctacgctgagatgattgtagaggcgatcgctgccctcaaggagaggaaggggtcgagctcggtggccatcagcaagtacgtcgaggggaagcatggcggcaagctccccaccaacttccgcaagcagctcactgt

SEQ ID NO: 294723 - DNA, 322 bp, Zea mays
gccacgcgttcgcccacgcgtccgttccatgcgagccagcacgagctggcatgcgcgcgagctcctgagatttcagctcgcttctcctccagaggtcagagcagaccatactactacgaccgaagctcgtccacttcccagtgagcctgtccaggaactgactggccggacatccaaacgcacgtctgtgcaggggtgctccggagcaccttgcgctcgacggaggtttccgtcttaatggccatggggagactgctaaggaccatgggcggcatcctgatgccaaatctctgagctttatgaacatagccactcacatgtg

SEQ ID NO: 294724 - DNA, 308 bp, Zea mays
aaaaaaaaatataaataaacataaacgattctaattaaaaaataaaacaaaaaaaaggccggccggtttatcggatccaagtgaacatacgcttgcttgcaacgacgtctctttagattgaggtaacctaattgcattcaagtgaccgcttttttacaactacggatctggaaaacccctgacggtacccgacttaatctcttagcaacacattcacctttaagcacctggcgtctgatctaaaagcccatgaccgagcgcactttccagcagttgcacaccctgatgggcgaatggaacgccctctg

SEQ ID NO: 294725 - DNA, 350 bp, Zea mays
  unsure (1)..(350): unsure at all n locations
cccacgcgtccgcccacgcgtccgcccactcgttcgcggacgcgtgggctgacctcgttggcctcacctacctaccaatggttatcaaggaggttcttcggctgcatcctccaaaccctctgttggtcccgcgtgagtcgagagaggattgccaagtcatgggctaccacattcccaaaggcaccaaggtgctcgtgaacgcatttgcgatctccagggattcaaggtactggaacaaccctgaagattttagcccagagaggtttcagaataacaatgtcgactacaaagggaccgattntgagttcacccncttcggtgctggtcgtcgacgctgccctgcaatcatg

SEQ ID NO: 294726 - DNA, 298 bp, Zea mays
  unsure (1)..(298): unsure at all n locations
ctctgttatcagttgaggggatcgatgtttatgcagttaacaggtctggagagactgcatttgccattgccgagaaaatggacagtgtagaactcgtggacatcctgaaagaagctggtggaaaagccgcaaagcagcaagtacatcctgcgaattcggcgaagcaacttaaggaaacagtcagcgatatcagacacgacgtncagtcccagttcaagcaaacacgttagaccaagatgcaagtcaaccagatcaagaagaggcttgagaagcttcacatcggcgggctgaacaacgc

SEQ ID NO: 294727 - DNA, 343 bp, Zea mays
cccacgcgtccggttagaaacaagtatatcataagagtttccttgcgaaggaacacctcaagagtctaaagtctaaagggtgttgtcccaggtcagatgtctatcactattagtctattatcacctgccaattcatgcacatcatttccatcattgtctgtgcgaatcatacatgaccaagagttagcaaacagagaaaataaataatcagacattcagatgggtatgtgctgtgtgtagcaacaaattataggatgacgaacatagagtatttgcatgcttgttgttgagtattgttcatttaccggaccatctaaagcctttgtttctacactgctctata

SEQ ID NO: 294728 - DNA, 332 bp, Zea mays
  unsure (1)..(332): unsure at all n locations
cccacgcgtccgcttagtcagattcaagttattaaagaggcagttgagcttcccttgactttccctgagctatattaatacattggtattaggccttccaagggagtcatattataaggagaacctggaacaggaaaacctcttcttgccaagaacaaattttgagggtgagcatgatacagtcactgagaaggacctagaacatctnctgcaacttttagataataaggaaagcggggatacagcttggcagaatttgatggagcgtagaacctncaacatgacatacaatgcctggcggcgtgagcctgangagggacctataatgtact

SEQ ID NO: 294729 - DNA, 286 bp, Zea mays
gcggcgaagaagccggtggccaagaagctcgcttaggatgagcccgcgacagagaaggcggtgaacgctccggcggggaagaagcccaaggccgagaagcgcctaccggcgggcaagtccaaggagggcggctagggctagaaggggaaaacgaatgcgaagaagtccgtggagacctacaagatctacatcttcaaggtgctgaatcaggtgcaccccgacatcggcatctcgtccaagggcatgtccatcatgaactgcttcatcaacgacatcttcgagaagc

SEQ ID NO: 294730 - DNA, 434 bp, Zea mays
  unsure (1)..(434): unsure at all n locations
gccgccgccgccaccaccagcactgccactctcttcaccaccgtcccgaagccccctcccagcgccatcgacttcatctcggattgaagcaatgtcgtcggacgatgaggtcagggaggagaaggagctcgacctctcctccaacgacgttgtcaccaagtacaaggctgccgccgaaatcctcaacaacgctctgaagattgttgtgtctcagtgcaagccaaaagtcaagattgttgacctttgcgagaagggcgactctttcataagagagcaaactgggaatgtttacaagaacgcaaagaggaggattgaaaggggtattgctttcccaacctgtgtatncgtcaatgacacagtttgccacttctcaccgcttgcaaccgatgatgccgttctggaagaaaatgacatggttaaaattgatatgggct

SEQ ID NO: 294731 - DNA, 340 bp, Zea mays
  unsure (1)..(340): unsure at all n locations
cccacgcgtgcgatgcatacgaataagcatcgnctgaacctgactaacactcagctaagcaagctctttctctactgcaataatggccgctcgctcctgctgctcccagccgcagctggtcgcggcggcggcggtcctggcagcggcgctgctgctgctggcggcagtggccgggacggcgtcggcggcggtgagctgcggcgaggtgacgtcgtcggtggcgccgtgcctcgggtacgcgatgggcagcgcggcgtcgccctccgcggcgtgctgcagcggggtgcgctcgctcaacagccgcgcgtcgtcggcggcggaccggcaagccacctgcaac

SEQ ID NO: 294732 - DNA, 413 bp, Zea mays
cccacgcgtccgcccacgcgtccgtccactcgtccgcccacgcgttcgcccacgcgtccgcggacgcgtgggaggagatcttcattggactgaccctgggtctgatcgcgggaggcatgtggaagatgcaccactggaacgagcagaggaagactaggtccttctatgacatgcttgacaagggccagatcagcgttgtcgtcgaggaggtaagagttcttcccaggtattttcaaagaactctctcgagagcatgacaaagtgattgctggctgtggaaatttgtcctggaaataagcccaaccatttgggaccaccaaattttgccgaattttcctttcctttggatgaatatttgagcccgtccatgtaaataccaaacatttggcctttacttcatctcttttttcctt

SEQ ID NO: 294733 - DNA, 330 bp, Zea mays
acgccacgcgtccgctagttctagatcgctctctatctagaactagtgctcctgatgaagaaggaataccactcaaaaaggttatggatgcatgctcttcttgctttgagcaaagaacaatatttacccagcaagttctggcaaaagcactaaatcaactggttgaacagatacctctatctttgctattcatgaggactgtcatgcaagcaataagtgtttttactgcattggtggattttgcgatggagatcatgtcacgccttgtgagcaagcagatttggaaatattccaagttattggtaggacttctgaagtgtgctatcttga

SEQ ID NO: 294734 - DNA, 416 bp, Zea mays
agagcagcaatccagttttaatcagattgtaagggacgctccgaggcttggagatgagtcactgttcccccctttgactgggtctagtaacaagatgaagcagcctgtttttacgcctaagcgtcctcgaacttttcctgctgctgaggatatccatgctgcaaagatgcgctatgctctgggaatgaacgaggacatgtactctgcgttcaaagagattgctggtgaataccgtcgaggtaccatggatgcttttgagtatctttcatatgtcgagcagttcggactgtcgcaccttggtcctgagatggctaggctattgcctgattctcgaaaaccgaaggaacttgctgatgcgcactataccaatacaccgttgaaaaaccttcaagaaaatggaaattattagaaggggg

SEQ ID NO: 294735 - DNA, 335 bp, Zea mays
  unsure (1)..(335): unsure at all n locations
cccacgcgtccgcaaagatgctgtcttattagcagcaaaaaaggcaaaagaggctggaagcacccgtttttgcatgggagctgcatggagagaaaccattggaaggaaaacaaacttcaaccagattcttgaatatgtcaaggaaataaggtattcattggaatcttttgtttatatggcaaaagtatggtatatgacgcttgacctgcataaccatgcacaattgtctgtcacctatgatgtacaggtcattgacttaacagccttaattacatggaatatgaagatatatccagccagcaaaagttttatgcatgattcttatattntatttc

SEQ ID NO: 294736 - DNA, 331 bp, Zea mays
gctcgtcgccacctactagttgcttccttttccgttggagactcgctgactggtgaagatggttgtccaggagttcacagttgatctcaacaagccccttgttttccaggttggccatcttgaggaacggtaccaggaatgggttcaccaaccgatcgtcagcaaggagggtccacgctttttcggaaatgatgtcctggagttcttgactcgcacgaagtggtgggctgtgccaactatatggctgcctgttgtctgctgcctgctcgtgaaatctattctgatgggtcatactgttcaggacgtagctatgatggctctgtttgggata

SEQ ID NO: 294737 - DNA, 413 bp, Zea mays
  unsure (1)..(413): unsure at all n locations
gagagatgggatgtgctgcttccaggttttaagatgaggaggctgtcaagatgtgccgggacagaagggacttgatcaagcaggcactggagcagcgcaaccgatttgcatcttcccacattgcttacattgagtccctgaagcgtgtttcggtggctctccaacggtttgttgccggagatgatcaccatgagctaatcttcgatacattcatctcccctatcaagcaacagaagccagagatgcttggtctgccttatggttcatatgagaagagaactattcatgtttcaagatacctgaggtcagggcctaacccatcagtgtccattgaggagcacccacgtncggtggaaacagtccgtgtcgagtcaaattaccctatggacaacgacagtggcatggtggataga

SEQ ID NO: 294738 - DNA, 332 bp, Zea mays
cggacgcgtgggcaaatttcttctttaacttgcttctcagctcaacctgcgcgttaatcagtttgagattgtaaatttttatgttgttggagcttctgggctaaatatcacaatggatatagctccctatactggaattagctttgctgctgatcaagtcaaggcaatgaattattcacttactctgcatacagttcggattgatcctgtgttggtcggggactataatcttcttaatttaacttggttcaggtcattggctccagctccagctccagcattcacaatggcacctagggcctctccatctacagcatctacctttccaagac

SEQ ID NO: 294739 - DNA, 452 bp, Zea mays
aattcctactgggaaccatcctccgcggacgcgtgggctgacgcgtgggccgggtttgaggttgtttgggataaggatcttgctgaagattctcccttgccttggtacttgcccttggatccaagccgattctccctgagtagcttccgtttgacctctgtgggacgcatgattacccgcacaatggtcaaggccctggagtacgttggtcttgctccgcagggcagtgagagggtctctaatttcctggagaaggctgcagaagggctggtagagggcggaaagaaggagatcttcacgccaatgtacttctttcttgttcggaagcctcttctggaatgagctcttggatcaccttttcagagagagaaggcaagtggtcatttcgaagaagccgaggagagggaacctggaatcaagaaaaccttcagctctcctgtgtaggaggaaag

SEQ ID NO: 294740 - DNA, 169 bp, Zea mays
  unsure (1)..(169): unsure at all n locations
tccacgcgtccggcttcttgctgcaggtttcatctgctcggggagttcgataaggtgaagcggagctgcaggaagcgcctcgatggacacaaccgtcgncgtcggaagccgcagccggaccctctaaaccccgccggcttgtttggcaatcaccacggagtgacaagat

SEQ ID NO: 294741 - DNA, 442 bp, Zea mays
  unsure (1)..(442): unsure at all n locations
ctccgctgggccaccagctttgaccgccgtctcccttcccctccgctactgctcctgcggaccccactcccccgcaggagcggcggcggcggcggcgaggtcgtaccccacatcggcgagcggcggcggcaccgccggaggcaaaggcaagatgttcgggcgcgcgccgaagaagagcgacaacaccaagtactacgagatcctcggggtgcccaagtcggcgtcccaagacgatctcaagaaggcctaccgcaaggctgctatcaagaaccaccccgacaagggcggtgaccccgagaagttcaaggagctcgcacaagcctatgaggttttgagtgatccagagaaacgtgagatttatgatcagtatggtgaagatgcccttaaggagggatgggcggtggaggatcccatgttgatccatttgacatnctctcatcat

SEQ ID NO: 294742 - DNA, 369 bp, Zea mays
agattccataagcgcaatcatgtcaatactaatggtggtgtcatcaactgtgtgacctggggctaactgggaatgctgatcgacatttagaaattctacaacatgttgattgaggatctgcatgccaacttctatgaccttatgtgatcattttgaatataaacagaactaaaagaacggagctggggatcatcatctaaggattggtcttaccgatatattataggacatcagtgaaaatgttgtaattattgctatgtcaaattcgctgtcattatcaaaatgcgatttttatatatgctatgtcactgtaaagagtatatctgcttacaagttcaactgtcttgacatgtaattaatattaataca

SEQ ID NO: 294743 - DNA, 441 bp, Zea mays
tcgggatgagctacaggcttcgcaggattgttgacaccttcaaggaccttgtggaagaaatgagcacctttggattcaacaagcttgagcccgaggcaacaacgacatggaaggagtggcgtgagacggattctattatcgttgatcctgaaaatattgttgccaggtctagacatgatgagaggaagaaaattgttaacttattggtcaatggtcatgttaccgatggtgatcttatggtcgttcccattgttggaatgggaggactaggcaagaccacactcgctcagctcatctacaacgaccctcaggtcaaggagcactttcatctactaaagtgggtatgtgtgtcagatgatttcaatctccgtaatctttccacaagatatgcaatgtgtcagagacaatccctgaagatgccctatagaagcttcaggaaca

SEQ ID NO: 294744 - DNA, 266 bp, Zea mays
tgatctacatgcaatgagccatggtttgtatcgctactgggctatgacacaagatcaacggcttctcattggtgcagcttatgcgctggttgtcgtcatccagcaaccagtccttacatagatgctcaaaattcgctcttggcacatgcttctgtagcagctcgagaccttacgagagatcaagctgtttataatggttaggccgtgatcatcctgcacatcatgtgctactagtctctaacatacttaccaggtgaccaatcagc

SEQ ID NO: 294745 - DNA, 261 bp, Zea mays
gaagatcgtatgatgatgtctggaatgcatactgcttctgatatcttatgtgtaggctgtggatccattgttggatggaaatatgaggctgctcatgagaagagccatagatacaaggaatgaaagtttattctggataggtacaaggtgtatcacccttacggaagcctatactggattacacaagatcctgaattgggtggtagcgacgccgatgatatatgaagcgtcaagtaacaagttcaaaccatgttgtcattg

SEQ ID NO: 294746 - DNA, 464 bp, Zea mays
cggacgcgtgggcggacgcgtgggcgacgcttgccgccccgacgacgaccccgcctggttgtgcctacgagtcggttgcgaccagagccatgagcaggtcgaccctgaggccctggacaggagcttctttatgcgggtcatggcggcgagaagccccaacgtgaggctacagaaggctatcagcaagaagaaccagagctcgatgctgaaatgcccgcactctgcgccgccgaagcaaccgagagctcggttcgcgaggctgagcgcagagactgagactgcggggaaggcaccggcggagcccaagccaagggtcgagcggatctgcgccatgcaagcgtccccaattcgcaccaagacagccagggtcgaatgtcccagcgagaggaagaaggcactgaccacgccgcggagcaaggccgtccggccgaggcaggagctgtttcacagtgtgaagcaccaga

SEQ ID NO: 294747 - DNA, 459 bp, Zea mays
cggacgcgtgggcaccagacccctgtcgctctcgtgtgccggccggcgacggcgatgatggcgactggccgatcgctcgccggggtatactccgccagagccacccgccccatgcctctacgcgccggcgcacgggcgccctgcgccggtgccgccgcggccgagcctgcggccgagcacgtgcggaggctcgtggcggagttcgacccggcggtcccgctggactccgcggtcacgccgccgagcgggtggtacaccgacccggattttctccagctcgagatcgacagcgtcttcttccgcgggtggcaggctgtcggtcacatatggcaagtgaagaacccaaatgatttcttcacaggaaggtgcttacgtcttgtttcgatgcctcagtagttccagttagtagtaattttgctacgcctttcgtacatatataaataattttgctacctcaaa

SEQ ID NO: 294748 - DNA, 185 bp, Zea mays
cgggccgacccacgcgaccgggaaccgagcaaggatacaattccaggcaatgaaaagccgacaaaaaccgcgggagcaccggccaacgaaacaggcctacccagggcagacgacgaacgagaaaagagagcaaggacaatctactgcacaaacaaagacaagaaggccacacaagcagaactaaa

SEQ ID NO: 294749 - DNA, 203 bp, Zea mays
acggtgttggcttctactgccctttcggttctgtttctggttcgtgaggatatccggtgatcggtttcgtgggcgagctgatcgagatggccattttagatggtgattaccgctgcttgctcacagactcgcctgtgccacctacgaccactggctacacaacgccttcatcacctacggctaggcactcgagtccaagatca

SEQ ID NO: 294750 - DNA, 189 bp, Zea mays
cccacgcgtacgcggacgcgtgggcgagcggtgcctaggagatgacttgcggcaggtcgaagttgaccccggatgatgtgcggatggcggtaacgtatggctggtaaagtggctcgacactctgccgcccacatctaacagcgtagacacccattcaaaggcagagcctaatgctggacctttttagtg

SEQ ID NO: 294751 - DNA, 407 bp, Zea mays
  unsure (1)..(407): unsure at all n locations
ctccgagggatccaaatccagtcgtggaagaagctgagcgagctcagcctcgcggacaatggctgcaccgggtccataccgccggagctcggtgacctgccggtgctcaactaccttgacctctccggcaacgagctcagcggcgaggtgccgatgcagctggagaacctgaagctggaccagttcaatgtgtccaacaaccagctgcgtggcccggagacgtaccgcagcagcttcttgggcaaccctgggctttgcctggatgatgcgctccatcttcatgtttgcagctgccatcctggtcgccggagtggcgtgagtctatcggcggtaccggagcttcagcanatcgaagctgcgctcggaccgctcgaaatggacattgacgtctttccacaagctcttat

SEQ ID NO: 294752 - DNA, 334 bp, Zea mays
gaccggctggacggacgcgttcgttcgatctcgaccgtagctcaccggtaagttactctacgacgaagcatggcgtacgtcggcgggggcgccccggtcgcggtcctgcgcccgtcggcgtctctcaagtcgtcgtcgacgtcggcggcggccttccttggccactctagccgcctcggtcgcactgctaccgcgtcgccgactaggcgcagtctaaaggcggttgccaagggcgagtggctcccgggccttccctgccgcgcctaccgtgacggcagcctgccgggcgacaatggcttcgacccgttgggcctggctgatgacccggagaacc

SEQ ID NO: 294753 - DNA, 379 bp, Zea mays
cccacgcgtccgcttctcctaaatttctcatcttaataccgagcatgcaaaatcctgagcatttgtgagcactgaacatggcttattgctccagttacttgtacatcgtctaaagtttacgttatcttctttcacagatggacggcaaaacaataaaggctcagatctgggacacagctgggcaggaaaggtaccgtgcaattacaagtgcttactaccgtggagccgtgggagcactgcttgtgtacgacatcacaaagaggcagagcttcgacaatgttcacaggtggcttcgtgaactccgcgaccatgctgactccagtattgtgatcatgatggtcggtaacaaatctgacctaatccacctgagagctatctc

SEQ ID NO: 294754 - DNA, 399 bp, Zea mays
  unsure (1)..(399): unsure at all n locations
tccacgcgttcgcccacgcgtccgcccacgcgtccgcccacgcgtccgcaatgtttgatgactttgtttttgacgctggtgaagatgttcgagaggagcaagatggtgacaatcgccacggggctggacctactcagctactcgatctgcatcttcttgtcgtcggcctctctctacatcctgcataacctncacaagggcgacgaccatgaggagtgatgagagtgtgcaatataatgccgaatctgtaactctatgacagaagagataatgtgtaggcttgggttcagctgccatgtaccttactggacccacgtttcaatgagcatgggtgtcacctgacctgacatgccctttaaagcctggtcctgaacttagaccaccatgtgctttactata

SEQ ID NO: 294755 - DNA, 343 bp, Zea mays
cggacgcgtgggcaaacacctgggagctaatctgaaggacattctacgggtccctgatactttcttggaaccaggatccataattcttaatgggtccaaccttgccgcaaaaagaggtgaacgcctggctgttgctggcttttatggattcctgaaaaacctggccaaagccaaatggcttggtgactttagccaacaaaggactgtacttgctattgacggtggcttatccaagcactacaggaggttcagtgcctgcctataggcaaccctaacagacctgctcggcaaggaggttgcctaatgggttgttgccaagttggccaacgacggttcaggaatt

SEQ ID NO: 294756 - DNA, 350 bp, Zea mays
  unsure (1)..(350): unsure at all n locations
ggagaaggcggcctacgtgctgatggtcctggcgcaccggagctacggtgaccgcgccgccatggccgaggcaggcgcctcgtccgcgctcctgaagctaacgctcgtgggcacggcgctcgcgcagaagcgcgcgtccaggatcctggagatcctccgcgccgacaagggcaagcaggtcgcggaagacgcctcgggcgtcgtggcgacggtgtcggcgccgcaggagcgcgggtgccgcggggaggagtcggtggacggngagttcgccgacgccggcatgagcgcggagaagcgcgccgtgcggcagctggttcagcagagcctgcagagcaacatgcgccgtatcg

SEQ ID NO: 294757 - DNA, 377 bp, Zea mays
cagacgaggagccaacccgttcgcctgtgatagcggcaggagagtatacccgacgatgacttgataaacccaactgctctccctggtttttcgtcgtcttcagctactaaggagttcagcgaagatcttccaaaggctccatgggaggaagtacaggctgccgcagcaggttccctgccaccgcctccggagaggtatggtcagagacagcagtacttcgagcaaaacgtgtattctggtgggagcaacggaggtggatatgatgaactgttgacactgactgaaaacctctccctgaaccctgagaagaatgcttcatggccgacagcatcccgccaggctaaacccgaggactcactcttcaagggacctgtcga

SEQ ID NO: 294758 - DNA, 336 bp, Zea mays
  unsure (1)..(336): unsure at all n locations
tttccaatctttggatgtcatggactactccctttgggtcggggtcgccaaaaagaaaaaggacctgggggttggcataatcgatttcctgcggcagtccacctgggacaagcagctggagacatgggtgaaggcctcggggatcttagggggccccaagaatgagtctcccaccgtgatttcttcaatccagtacaaaaagaggttcangaaggccatgtcgaggtactttctcgncgtncctgaccaatggacctcgaaaggcggttaaatcttctcgctgntttttagctgcatcttttttgtcagcgaaagcttcactcgttcatccttggc

SEQ ID NO: 294759 - DNA, 269 bp, Zea mays
cgccgatcgacgccggcaggtacgtctgtttcggcctacgctacgactggtccgagttgggcgcgttcaagacgttctacgacccggcaaatcgcctccgcgtgctgtggggatgggtcttcgagacagactcgtagcgctcggacgtgtccaatgtatgggcgtcgctgcagggtatccctcggacggtgctactggacaccatgacgggtatcaacctgcttcagtggcccgtatacgatgttgagactctgagcaccagctgcacc

SEQ ID NO: 294760 - DNA, 416 bp, Zea mays
tggcgcttttacactacctatgctagtttgcctgatgctacatttccacgatggttaagctgactatgatagcgcgtgtcactgatggccttccattgtcggagggattagatgatagtcgggatctgaaagatgctgacttctacaagcagcaagcaaaactgttgttcaagaacttgtccagagggcagcatgaggcgtcaaggatgtcaattgagacaggaccataccttttccagtatcctaagacctttttctcatttgcaaaattctttgttccacaattaatcatttagaaatatatgtgattcttcatcatgatcctaaattagagtttttgtgaactggcaagtttaggcagcctaaccatataccgtaaacttgaccagtattgtgtatatattggattcaatatt

SEQ ID NO: 294761 - DNA, 287 bp, Zea mays
cgcaagggaccattcttttatgggggagattttaacaccggtcaccatgtggagaaaagggacgggggacaaaaagggtgggaggctaattggaacaagtatcacattgagctggaccctcaacttgaagctcttgttggaaggcatagtagaaaaccctggtcaaagttcatgaatgctgataaccaacatctagtatcacctgaggccatagattttctcgataagctcctgcgctatgatcaccaagataggctcactgcacgtgaagctatggcacattccta

SEQ ID NO: 294762 - DNA, 230 bp, Zea mays
ccacccgtccacacaacggaaaagatcctcaaaccctagctttcgactttaggcgaaccctcgcgtattgttctacagtgaccgttgctgcgccccggcagacccaatcgcgatggagctgtacgccaacgtggttcccaagaccgttgagaacttccacgcgctgtgcacgctctagaatggcgttggcaagttctggaagccgctccactacaagggctccacctttc

SEQ ID NO: 294763 - DNA, 385 bp, Zea mays
ctaacacttacattgtcatcagtcatcgcggcctcagctatctgaatcacttgtcccgctcggtacgtagtagtagtagcatgggctgctgtggcgccgccatgtccgccaggccgcggggcatccacgaggagacgctgctgcgcgtcccgggcgcgtccgtgcacctcctggccggctcatccgacggcccggtcgagctcgcgcgcggggacctcgccgtcgtcaggctgaccaaggacgacgtggccgtggccaccgcggtgcgcgtcggcagggacctgggctggccgctggcgcgggacgagcccgtcgtcaggctcgacccactgcactacctcttcacgctgccggcggcggacaaggacgggacgttcctcaacta

SEQ ID NO: 294764 - DNA, 421 bp, Zea mays
cccacgcgtccgagcaggagctggcaagggagtgtgattatgtgctagaagcaagtaaccggaagcgttacaaagaattgctatgtgatagtgatggttataatgtcccaaaggtcattgatcaattgtctagcaggaaagtgctgacctcggagtttgtttccaggcattcctatcgataaggtggctcagttaagtcaggaaacccgcaattatgttggttgtaaactgcttgagcttacaataaaggagttgcttgtcttcagattcatgcagacggatccaaattggagtaattgtctgtatgatgatgctacaaggaaattcaatctgatagattttggagcagaccgtgattttgcataacacttctgagatgattatctacgaatggtaggtgcctgtgcaaatagagatcgga

SEQ ID NO: 294765 - DNA, 256 bp, Zea mays
ggagaactgccagaagagcaagatcttcttcatcgcctggtctcctgacacggcgcgcgtggagagcgggatgatctacgccagctccaaggagaggttcaagcgggagctggacgatattcaagtggagctacagtccacctactatcgtgtggttggacatgacacaattccaggttaaccctgcatatgatgctcagagaatatttgcctatgttcaaacactgatgtgcgtcacagacccaaattgtgctgc

SEQ ID NO: 294766 - DNA, 393 bp, Zea mays
cccacgcgtacggatctcgatcgcgagcaccaactgttcgtcgttatgttcgacaccgacgggtgctcgactcgccctgcatatgcgtctctctgcctgccaggctcaagggctccacgctcgccaccaacggcgtgataacggccgggtctgacgagtgggccatctacggcggtaccggggtgtttgccatggctaggggcgtcataaggagaaggtatctcgacgacagggcccgcgggaacactgatgagctcaacatggatgtcttctgccggacgtttggctcacagtcacagctgcaagataagatgcaggtgcatgagcaggggcagggctctagcgtcaccaagattggactatggtgtggaccgggagggtcggcacaggaca

SEQ ID NO: 294767 - DNA, 293 bp, Zea mays
tcggtcagttctgctgctagctacagacaacggtttttatattgcactcatgtcaggacgcacggcatatacacagcagtcttataaatacagtgattcctttccatttaagccaatatacaacaattggagagcaagcttccatgtaactgcgatgtcaacatcatccaatcgatcggctatattcatgtcccgaaatactggattatctgaacactttgttgagttcgacttcttgtacccaaccgagggtatccatagacgcttagacaatggcttacgtattactgcaa

SEQ ID NO: 294768 - DNA, 344 bp, Zea mays
cccacgcgtccgggaaaaaaaaaaaaaaattaaaaaaaaaaaaaaaaaaaaaaggaaaaaagaaaaaaaaaaaaaaaaaaaaaaaaaaaaaaaaaaaaaaaaaaaaaaaaaaaaaaaaaaaaaaaaagggcggcagtttttaaggtttaaagtttacttacccgtgatttcaagatatttgtttttttatagtgtaactaaatttaaattaactggccttctttttaaatcgttttgactggaaaaaccttggcgttaccaaatttaatcgctttgaagaaaatacccttttcgccagttggctttttagcgaaaaggcccgaacatatggcctttccaaaaat

SEQ ID NO: 294769 - DNA, 396 bp, Zea mays
cggacgcgtgggcggacgcgtggggggcttaattaggcggaaagattataattgacaacattgacatctctgcaattggccttcatgatctgcggtcacggttgagcatcattccccaagaccctacattatttgagggtactatcagaatgaaccttgatcctcttgaagagtgcactgatcaagaaatttgggaggcactagaaaagtgtcagctaggagaggtcattcgttccaaggaagagaaacttgacagtccagtgctagaaaacggggataactggagcgtgggacagcgccaacttattgcactgggtagggcgctgctcaagcaggcaaaaattttggtactcgatgaggcgacagcatctgttgacacagcaacagacaatctta

SEQ ID NO: 294770 - DNA, 377 bp, Zea mays
  unsure (1)..(377): unsure at all n locations
caacgtgttcgacgccaacttcgacacgctggtgtcggcgctcaagagggtcgggctcggccacctgccggtcatgatcggcgaggtcggctggccgacggacggcgacaggcacgccacggcggccctcgcggagcgcttctacgcggggctcctccagcggctcgcggccaggagaggcacgccgctccggcccggcgcgcgcatcgaggcctacctgttcgggctcgtggacgaggacgccaagagcgtggcgccgggcaacttcgagcgccactggggaatcttcaccttcgacgggcggcccaagttcccgctggacctgcgcggcgacgggcggccggcgatgcccgtcccggcccggngcgtggagtacc

SEQ ID NO: 294771 - DNA, 398 bp, Zea mays
cccacgcgtccgcaatgtgctacaaataattaaattaaaaccaaaagaccccggcgcggaggtgatcgcgctgtcgccgcgcacgctggtggcgacgaaccggttcgtgtgcgagatctgcaacaaggggttccagcgggaccagaacctgcagctgcaccgccggggccacaacctcccctggaagctccgccagcgcagcagcctcgtcgccccgtcgtcggcggcggcaggctccggcggcaggcagcagcagcagggcgaggccgcgccgccgcgtaagcgcgtctacgtctgccccgagcccacgtgcgtgcaccacgacccggcgagagctctgggggacttgactgggatcaagaagcacttctcgcggaagcacggggagaagcggtggt

SEQ ID NO: 294772 - DNA, 346 bp, Zea mays
cccacgcgttcgggacttacctgacccctagccttttcgcgaagagatgatcgagacatacctcggtactatcgccaaggacgggggtagttctgatgaggccaagaagaggatgtatgatcatacgcccaccacccatgtttgactataggctgctaaaaccgatgacatgccataccgattactcggcatgacggccgttatccacattcagcctgacacatatctatagccattcacgaaggaatacggacgatacaaaaattacattcgcctcattactacgagtccagcacctgtggataataacatagcattgattactgacacgatccccaattaccca

SEQ ID NO: 294773 - DNA, 380 bp, Zea mays
ggacaatgatctatctgaatttgatgaatctcgagagataatagagagcctagttgatgaatacaaggcctgcgagtcgcctgactacatcaaatggggaatggaggaccctggagaggcaaatgttgtggcggcacttgactctaagttggtagtgtaaatataaaggtaccatctcacagtattaggcactttttatgcagaaacaatttgacgcacaatcatattgaattgattatccacttgaaaccttgaacacttgctttcttttgataaccatgtggactacaccaattattataaacgatgcacaatctctgctagatgttgaaaatgatactaaatccctcatttttcgtatctattgctggcaaataaca

SEQ ID NO: 294774 - DNA, 435 bp, Zea mays
cccacgcgtccgcccacgcgtccttggactcgtgggttccacgcgtcgatggcctcgggtatttatacaagctcaatgtaggagttgaccttccattacacactcaggcgcgattgggggggcgtgtcggagctagtccatcgctttcggcttggtgcgtaactactaccctaaacttcacatttgatataggagccgacactggtaagggacgaaaatttcctggtgttacggatgccaagggcctccttctcaatcacaatagcctgtctgggccacttccggcggaccttggctattccaaggtgagctacctagctctggctaacaacaggctgacagggccaatcccgcaatcgattggccacctccaggattccctcttcgagatgctgctccttgacaaccagctttccggatgccttccgcacgagc

SEQ ID NO: 294775 - DNA, 282 bp, Zea mays
acccacgcgttcggtttccacagtatggctcccgtttggctacaccattgctcatactcaatggggcctgcgatacgtggcagggcacgagcgcgctatcacctagaacagctgagccgaagaagactagcccccaatgcaagcttgacatcaagatctgctccgccatccaactcacagccagccaaattctcaggacatatgttctgaaagcacaccgtataactcatgctcaactcatgctcatcaactcatgcaacgctcactgcgaattacgatcta

SEQ ID NO: 294776 - DNA, 374 bp, Zea mays
cccacgcgtccgcccacgcgtccgcccactcgttcgcccacgcgttcgcccacgcgtccgcggacgcgtgggcaaaacagtacattgagaaccactacaagacccagatgaagtccctgcaagataggaaagagaggcgctggatgttggagagaaaattacaagatgccgaagttcctgtagaagagcaaaataacattcttaagcatttggagaaaaaagagactgaatatatgcgcttgcagagacacaagatgggagttgaagattttgaacttttgactattattgggagaagtgcattcggagaggtgcgtctttgtagagagaaggcctctaagaatgtttatgcaatgaaaaagcttaagaaatct

SEQ ID NO: 294777 - DNA, 318 bp, Zea mays
ggtgagaacaaatagctgcgggtctgggatttgatttgttggatgatatcttgttgggggataaatctgaatgaccaatggatattggcattacaatagacacactaaaaatatatgctgaaagtcagaaacaaaatacaatagagttgtgaagaaggtatttttgacaactatgcatcgtacctatcttggtggcgaaatcaacttcactgatggatctattaacccaaaatctacagtgggaactcctgcatacattgctcatgaggttcttctggagaaggaatacaatggaaaggttgctgatgttaggtcatg

SEQ ID NO: 294778 - DNA, 434 bp, Zea mays
gccctgatcacatcatcctgcttgtctctttccaatctagctccatctctctttcatctactcttccatcgatcgatccatcgtactgcgtgaggatggggaggggaaagattgagatcaagaggatcgagaacaccaccagccgccaggtgaccttctgcaagcgcaggaatgggctgctgaagaaggcctacgagctctccatcctctgcgacgctgagatcgctttgatcgtcttctctacccgaggccgcctatatgaatattccagtaacagcgtaaggtcgacgatcgagaggtacaagaaagcctctgccagcacttcaggaacagctccagtgacagatgtcaactctcttcaatactttcagcaagaagcgggcaaactgcgccagcagatacaaaccttgcagaattcaacaggcacctgatgg

SEQ ID NO: 294779 - DNA, 441 bp, Zea mays
attcagcggaatgtttacccttgctgtttttatgggtttgcagtttcctgttggacaaactaatattgatgggatacttcaccttcgggagaacgaattgaaacgacatgctggggagaaatctacggcaatagaagcatattgtgcctatgttgctgaagggttcgaaaacctgctggactggaatgatgttatgaagttccaagcgaagaatggatccttgtttaactctccttctgcaactgctgccgctttggtcgccaactatgacgacaaagcgctacagtatctaaatttgcttgtcacacaatttggcagtgcagtaccaacagtgttcccacaaaatattcactatcagctttcaatggtggacacgctcgaaagtgttggaatatcacggcatttttctgtggagaaaaaggctgtcctggacatgatata

SEQ ID NO: 294780 - DNA, 458 bp, Zea mays
  unsure (1)..(458): unsure at all n locations
cccacgcgtccgcccacgcgtccgtccactcgtccgcggacgcgtggggggcgtcttccacccgttcctctccggcggcgtcaccgtgcccgacgccaccgtctccaccgcccaggcgttcttcaccgagttcatcatctccttcaacctcctcttcgtcgtcaccgccgtcgccaccgacacccgcgcagtgggtgaactcgccgggatcgcggtgggagcggccgtaacgctgaacatcctcgtcgccgggccgacgacgggcgggtccatgaacccggtgaggacgctggggccggccgtggcggcggngaactaccggcagctctggatctacctgctggccccgacgctgggcgcgttggcgggggccagcgtgtacacggcggtgaagctcagggacgagaacggtgagacgccgcgcacgcagcgcagctttcgccgctgacgacgcacac

SEQ ID NO: 294781 - DNA, 430 bp, Zea mays
acgtctttgacgttgatgaaatattaataaatatattaacatctacaagtccaaataaatacacaataacattttcattgataattttataaaatggaatcaatttgatgttggagcatttttctacaaaccttgtcaaagctagagaagtttgacctatgacattgctaaagtgatctataatttggaatggaggatgtctttagtttgatctttattttatgcttgaataaaatcatggctagactcttgtagttagtaattcattatattgttctcttatttcaggtttgttctttctgcagatcgaacctatccgcaacttattcgctgctcttttccttgccagcattgggatgctaattaatgtccatttcttgtggaaccatgtggatatactccttgcagcggtaatttttgtgatcaccgt

SEQ ID NO: 294782 - DNA, 424 bp, Zea mays
ctgaagacaattcagttcctgattttcatttgagctgtgcagcagttaaaagaaaaaggccatactttgtaagaataataagcaagcagatggttggagtgtacctatcaatatgggtacgaagaagcctccgaaagcacattcagagtctgaaagtatcaactgtaggggttggtgctatgggctacattggtaataagggatcaatatcagtaagcatgtccatataccaaacacacttttgctttatatgttgtcacctaacctctggagaaaaggaaggagatgaactaaaaaggaatgctgatgttcaagaaatccaccgaaggacaatatttaatccagtttcgagagtcaacatgcctaaaacgatatatgaccatgaaaggattgtatggctaggtgatctcaactataggatcaa

SEQ ID NO: 294783 - DNA, 412 bp, Zea mays
cccacgcgtccggctcttggtccacaccatttgcattaacttcagggagctcggtctctgctccgctaccttcttgatcctcctcagaagagccagatgaaaggatgttgcgcagcgaccttccggagatggaaagcgagttcagctgcgactccacccttcgcatgaactccatcgcctcctgcagcttgccaacggtggcggcctcctcgacgcatgcgtcaaggcgaaggagccctcgtcgtcgtctccctacgcaggcgacgtcgaggccatcaaggccaagatcatctcgcacccacactactactcgctgctcactgcctacctcgagtgcaacaaggtggcggcaccaccggaagtgtctgcgaggctgacggacatagcgcaagaagtggaagcgcggcagcgc

SEQ ID NO: 294784 - DNA, 256 bp, Zea mays
cccacgcgtccgtgatgcgcaagtattggtttaaggcaaagccggcggcgagctcctgcagcccgtggtacggtcccgaccgcgtgctctacctgggcccgctgtccggcgcgcccccgagctacctgacgggcgagttcccgggcgactaccgatgggacaacgcggagctgtcggccgacccagagacgttcggcaagaaccaggagctggaggtcatccactaccgctggggcatgctgggcgcgttgggctg

SEQ ID NO: 294785 - DNA, 425 bp, Zea mays
ctgaaatgaagggtgggtgggtgggtcgactcactgtccgccgccgaagccgagctccctcgcaaatctctcgcatcgcgttcacagcagatggcggggaaggaggagaggaagcgggtgttggtggtgggcggcagcggctacctgggccagcaccttctcgcggcgtcctgcaccgtcgaccgcctcgacgtcgctttcacccaccacagccccgacccgacgcagccgctcctggagacgctcccctccgtgcgcgcattccgcgccgaccttcgctccggcgacggcttcgaggcgatctccgcgtcctttggccagccacacgtggttgtcaactgtgctgcgatgtcagtttctcgggcatgcgaattggatccacctgctgctatggctaccaatgtgccttcttcgcttgtgaattg

SEQ ID NO: 294786 - DNA, 431 bp, Zea mays
gttctagatcgcgagggccgccttttttttttttttttttttgacacgcatttagcttggcactatatgttgcatacaatccatttacattagctgaaacgctatacatcactctgaaatccagttaaccatacacatacacttgcgatagtgtggcacagcatgtgcaactgtggatatactcatcttgcacgcagccatcgtcgccgctgccatcgtgcatcacctgagcatgtctccaaagtccacgaatgggccgccgccgctcagaatcgatgaggcgctgaaattggtttcgccttcgtcgaacgcgatcctctggccgaacggctgcggcctgtccggcaggtcgggcacgtccatatccccctccagcatcctcagtgcctccggcatggtcgggcggaacgccaccgtgacgtgggcacaca

SEQ ID NO: 294787 - DNA, 320 bp, Zea mays
cggacgcgtgggcggactcgtgggcggactcgtggtcggacgcgtgggcgacccacacgggccagatttatttgttgcaggatagcacgtataacgctgaacaattcactttacctgctccaataaactgaacgatcctaagaccaataagacgtactgctagaacaaagagagcatgaagcacacacttcacaaggtgactcactatacgaagggcaatgatagcctgtatgaccagggaaaaccccgatttgaccacaagcagacattatatagtggtcagaccaagcctgtattccacaagaagaccaagaccacca

SEQ ID NO: 294788 - DNA, 438 bp, Zea mays
  unsure (1)..(438): unsure at all n locations
cccacgcgtccgcccacgcgtccgtccactcgtccgcccacgcgtccgcccacgcgtccgattcctatgtcaccttgaggaaaacataccaaagtagccttggtaacaacaataagagggttgagctctttgatatgggtgctggaagtagtgagcctgctgctgaggacaatattcaaatggcatcagccatgacaaatcaacaactcattgatacgggaaggaaccaaatggaccaaacagatcaagctattgaacgttcaaaaatggtcgtagcacaaactgttgagactggagctcaaactgctgcgacattaacacagcaaacagagcaaatgaagagaattggtaatgagctagatactgtccacttctcactgaagaaagctagccaactagtgaaggagattggtcgccaggttgcgactgacanatgta

SEQ ID NO: 294789 - DNA, 422 bp, Zea mays
  unsure (1)..(422): unsure at all n locations
tttcatatggtgggtgctaatctaatattttactctcgccgttctgactatgtattttccaggtatcgaacacccaaagatggcaatggcaaccttcacatcatccccagttctctgcagcttcaggaccatcgaacagaagaaggcccctctgctgaacaacagcacaaaacggccgcttcacttgggcttcccaaggagcgtgccgacgtcgccgagcttcagagcgaggctagacctgcgcgtcgccgctgtctacaaggtgaagctcatcggccccgaagggcaggagagcgtgctcgacgtgccagaggacagctacatcctggacgcggccgangaagccggtctcgacctgccctactcctgccgcgccggcgcgtgctccacgtgcgccggcaagctcctggagggctccgtcg

SEQ ID NO: 294790 - DNA, 381 bp, Zea mays
cggacgcgtggggtaatttcaggccgcttgtcctttcttgcgttttccttccttgcctggtcgttccgaaaccccgcaccttccccatttcatttcccccgcagagtagtagttttttactggaatttgtaccggaaccagggcttaatggatgctgtttgcttgttagttcagcttcaccaatttctcaacagtgtgtttgttcttctccaggacagtagaaaggaaaggagaaaagcttgttgtgtctgtgtgtgagctgcagaccccgagaggatggatcagtatgaggtgctggagcagattgggaaaggagcatttggttctgcactcttggtgaggcacaaggccgagaagaagaagtatgtgctcaagaagata

SEQ ID NO: 294791 - DNA, 379 bp, Zea mays
  unsure (1)..(379): unsure at all n locations
gcgagcgagaaacgaacttgagcgatagatagaatctcacaccgcaaccgagaaacaagcgaactcgacaaaaagattcagggaggctcttgctacatggccattgcggcgcggctgctgcgagcaaccgaggtgagatatcgattactatctgcttcccatggtttcggccagcgagctgcatacacagatggtgggatagtcgatgttggccaaccaacaccccagtctcatccagagttattagctgatggagagatcacaccaggcatcacaaacgaggaatacatctctagaagaaaaaaacttttagaggtgctaccagagaagagcttggccattattgcttctgctgatcagcanatgatgactgatgtag

SEQ ID NO: 294792 - DNA, 324 bp, Zea mays
tacttattcggttttcaaaacagacaccaatagagcaaaaggggttatctgacacaagcgtcatgtccacctatgcattttataaatcatcattctctgatccatctactctcaaacatatcactgagttctcacccaggacctactactcctggatatgacacactaacactccactaaccgtctatagtgcacctcagagcattggatatcgccctgaccgtgccaagtacttcgatgaatactctgagcataatgaatcatacctgaccggtgaattacatggtgactacggatggaacactcatgaactatcacctgacc

SEQ ID NO: 294793 - DNA, 444 bp, Zea mays
ccaagccttccgctgacacataccaccgaattttcacacatttgaatctgagctcgatatgtctaaacagggtgatataaatgtaaatcctcgtgttcttcacactgcacaattttatcacatgagacaacccatgcataatatatgccctctctgcaaatacactctctctatggtccccactctccatatgtgaaacgcacatactagactctctctgtgaacacacaccatattttgctctttgacaccatttctaaagagtgctttgacaccacatgggtacacatatatggcgaactatatataacacactccaaaacagttcacccacaatctcacttatatgccagacaccttaaaacctatcccaaagacatatttgttttcaatatatatggcaccgctctctataatattacattctacaaaacacatgtatat

SEQ ID NO: 294794 - DNA, 450 bp, Zea mays
gcggaatgaatactgtaaaggaagaggcggattttactgctgactgcgaaatgactgaatcagctatttgggcctgaacgttctggatacctgatgcgctcacttacatgaatattgatgtgcaattcgtacgaaatggtggctttactaatgatcactgactatagtgcccgtactccggtggttaagagacgacttggaggcttgctgacatagctcatgacatcgttctgtttgagaccattgctcacaagtgcgttgaatctgcaaagggatacatccatggtgaacaatatacatcatactgcaaaacagttgaccaacaagcttacttttatgccaaaaactctaaaatcgatcctaaggacacatttgcgttcaatatatatggtaccggaccctctaatatttcatactactctagttgcaactggaagtgaagacaaaagc

SEQ ID NO: 294795 - DNA, 442 bp, Zea mays
  unsure (1)..(442): unsure at all n locations
cccacgcgtccgcccacgcgtccgcggacgcgtgggcagcccgccgcgcagagcagcgcagcgcagcgcaggcgccctccaactccgggctccgcaaccgctgctccccctccctccctccctccagctcggcctgcctcagcccgcgccgcgcgatgtcagaggaggacgaggaccagccgccgcccaagcggccgtgcgcgtcgccgcccgcggaccaggtgctcgacaacgtgctcgagacggtgctccagttcctggacgccccgcgggaccggagcgccgtctcgctggtctgccgctcctggcaccgcgccgagtccgccacccgcgactccgtcgccgtccgcaacctcctggccgcctcggccacccgcgccgcgcgccgcttccccaacgcgcggagcctnctactcaagggcccgccgcgcttcgncgactt

SEQ ID NO: 294796 - DNA, 421 bp, Zea mays
cggacgcgtgggtctccctccgccactccttccatctgctcgctcccactccccgggtagctactaagcgtggcgtccgttaccgcccgcgccccggtcgcggcccttcgcccgtctgccgcatcgctcaagtcgtcatctgccttccttggccactctagccgcctcggtcgcaccgagtcacccacgaggcgcaacctcaaggcagaggccaagggcgagtggctccccggccttccctgcccctcctacctcgacggcatcctggcgtgtgacaatggcttggacctgttgctcctggcggaggacccatagaacctgctgcgtttcgtgcaggcggagctggcgaacggtcggaggtccatgcttggcgtgctcagtatgctcaatccggatgtgctgaccaaaggcggactgatca

SEQ ID NO: 294797 - DNA, 400 bp, Zea mays
gtttcggggatgctgctgatggtgtgccttgtggaggtttcttctgctccaaagagacaagaacaaatactggaagaagaactacattctcccgataacaagccacttattgtgagagacgggaacagatggctaatgcaggacatagattgtagcgggttgtgcaagacgaggtgcactgcacattccatacccaacttgtgcactaaggcgtgtggcacatgctgagtgaggtgtaagtgtctcccacctggtacatctggaaatacgcaactatgtggagcttgctacactgatatgactacccatggcaacacgaccaagtgcccttagagaaactacccattgcgaaatgtgtgcttcattgattatgcaccgaacttcaagtgtactagtatgt

SEQ ID NO: 294798 - DNA, 455 bp, Zea mays
gcgcccagcatacggccacacttctccgacgtttttatccggttctcataagactgactaagggcactgctggggaaagactacggactggtacggttgtgagacgaccgaacggtcggtccatgtggagccataggcgcctaacagagggagcaaaacccttgagcatccatcacaagcatagtaacaagatggtcaagttcctgaagcctaacaaggcagctatcgtactgtacggccgctacgcccggcgcaaagcggttatcctaaggaccttccaccatggaaccagggagcgcccctacggacactgccttatcgccggaataaagaagtacccaagcaaggtcatcatgaaggactccgctaagaataccgccaagaaatctagggttaaggccttcgtgaagctcgtgaactaccagcacctcatgcccacgcgctacacgctcgac

SEQ ID NO: 294799 - DNA, 421 bp, Zea mays
gcgcggacgcgtgggtgctccattctcagccgccgccaatcccttcccgtgctccgcaaccgctgagtgagaggaagagatggccggcaagggcgatggcccggctatcggcatcgatctcggcacgacgtactcttgcgtcggcgcgtggcagcacgaccgcgtcgagatcattgccaacgaccagggtaaccgcaccacgccctcgtacgtcgccttcaccgactccgagcgcctcatcggagatgccgccaagaaccaggtcgccatgaaccccatcaacaccgtctttgatgccaagcgtctcatctgcaggaggttcagagatgcgtatgtccagagtgatatcaagctgtggcccttcaaggacatctctgggcctggtgagaagccaatgattgttgtccagcacaagggtgag

SEQ ID NO: 294800 - DNA, 401 bp, Zea mays
ctatggcatttaacgcctacacaaacaccatctatcatgccactcatgatgtgggcttctgtcactgccaatgcactcaaactctcttctgtctccaaacctcatctcttgcctcctttatctttctccagatgcttatcttccgtcttggatggacttaagtacgctcattcacatgaatggctcaagcaccaatgctcagtcgcccccattgttatcactgaccatgcccagtaccatcttgtagaggttgcctatgtggagctgtcagaaccacatgacacagtttccaacaagtctggcttctgatcccgttaaactgttaaagcaacaagcgatataaacccttcaatctcgcatgagatcgcctatgtcaacaaaaagcttacaaaaactccttc

SEQ ID NO: 294801 - DNA, 452 bp, Zea mays
gcgcccacgcgtccgcccacgcgtccgcccacgcgtccggcgatgacgatgacggagaagatactggcgcgggcgtcggagcgcgcggcgctggagcccggggagaacgtgtgggtcgacgtcgacgtgctcatgacgcacgacgtctgcgggcccggcgccttcgacatcttcaagaaggagttcggggaggacgccagggtctgggaccgcgagaagctcgtcgtcatcccggaccactacatcttcaccagcgacgaccgcgccaaccgcaacgtcgacatcctcagggacttctgtgcggagcagaacatcaagtacttctatgacatcaaggacctcaccgatttcagggctaatccggactacaaaggcgtctgccacatcggacttgctcaggaaggccactgccgaccaggcgaggttctcttgggcactgattctcatacatg

SEQ ID NO: 294802 - DNA, 463 bp, Zea mays
ggcttggaagacccacgcgtccggctacttttacacgtagatgctggaggaggatgtggaagttccagtctcatctgcaaatgaagctccaaacgatactatgaagatggacacagatgatgtgccaagtgatcctgctgctggatctgatgtgactatgcaggagcagcctcctgcagctggaaatggagcacaagataatgaggaaaagtctgtttcgatggaaactgatgcaaaggttgagccgtcaaaaaagaaagttaagaaaactactgttccggtccatgagttggtctatggggccttggctgcagctgacctgcagaaggctgtagagaaagagtatgagatggctcttcaagacagagtaatggaagaaacaaaggagaagaagaatgcttgtgaagcttatgtgtatgacatgcgtaacaagctatatgacaagtacagtgattttgtcaca

SEQ ID NO: 294803 - DNA, 470 bp, Zea mays
gattcccggtcgagcacgcgtccgcggacgcttggccggacccttggccggactcttgggtccgattccaaacccaaatcaccgttccctccaaatcccattccctcggcccagaccagctcgcgaaatggacggcggcggcccgaaggcgaagaaggcggctgctgggcaaaagctaggcggcggcgggccgaaaaggaagccggtgtcgcggtcagttaaggccgggctccagttccccgtgggccgaatcggacggtacctgaagaaagggcggtccgcgcagcgcgtgggcacgggcgctcccgtgttcctggccgccgtcctcgagtacctcgccgttgaggtcctggagctggctggcaacgcggcgcgcgacaacaagaaaacccgtattatcccgcgccacctccttcttgccatccgcaacgacgaggagctcggcaagctgctgggtggggtcaccatcc

SEQ ID NO: 294804 - DNA, 421 bp, Zea mays
  unsure (1)..(421): unsure at all n locations
acctacgcgtgacgccgtacgctaaggctgtccacgggatctggtgttggcactgatccagatgctgcttgggcccgagcctgcggtgctgcagatgctgctgcccctgctgcagaggagaagaaggaagagcccaaggaggagtctgatgacgacatgggcttcagcctgttcgactgagagtctgagaccctcgctacccagccattagcaaattcgcttatgctgtccaagacttatcttacgttatgtctgtaggcttttgttattacaagtactcaagttttgagtttttgagatgtggctatgacaatgtgatgaagaatcctaaaccatcgtattagagtgaaacttggttctatataaagttccaaggttcttgaacctcaaaaaaaaaatanaaaaatattaaacttaaaag

SEQ ID NO: 294805 - DNA, 258 bp, Zea mays
  unsure (1)..(258): unsure at all n locations
ttgttcaagaaaagttgcttcaaaaaatgtttgctgataacattggatcgcagtttaacgtagcctgtataggttaaacgtttgcctgtangtgatggcatatggatcgctcgtcataaaaaaaatcttacagaatatgttctagattttattggtgaaaggaaaaatgttgcagatttaggtagttcaattagagacaatcgattcaaagatcagaaaacaaggctgcaggtactgtttggactttcattgactaca

SEQ ID NO: 294806 - DNA, 316 bp, Zea mays
gcgtccgcccacgcgtccggatacgcactcacctgcgtttctgctgcattctccactgctatctcgcaggcttgctctactggatttatgggatctcataacttgccctcccccggatccgccattccctcgtgccctctctccgtaccctcaaccttatggctcctttcttgcttgcctcaacaatcgccaaataacaggactagctggagccgctgaggatctttacgagcgtaagctatgacggccggttccctgcgggcaaaagaacagaaaaggaacctgtcttgatgtccacgacgtcgctaggctcgac

SEQ ID NO: 294807 - DNA, 189 bp, Zea mays
acatcctgggcctattccaagtgctccaccgcctcgtcgtcttcgacctcaactataccctctggcccttctactgccagtgccggtccaagacggatactccgagccttttcaggcacaccacgggcatcatgtacgccctcaacgagataccgatcgacatcgcgattgcttctcgcttccccaccc

SEQ ID NO: 294808 - DNA, 444 bp, Zea mays
cttcatggttttgctatttctcggttataattattgcttctcttcctctaaagaccaatgagaagtcagtgtggttcgtgatgattggcatgatcatatgaaaagtttgaagagatattcttttataatgacatgttccctcacatgcttggatgtttggcatttttcagtcatttagcagaaccaaagacatgacatggcgacctgatctatttagtgatagcatggcggctagtggaatagaaactggtacaaaattgtacatttcaaacttggactatggggtctctaatgaggatataaaggagctgttttcggaagttggtcatttgaaacgctttgctgttcactacgatggttatggcccgccaaatggcactgcagaggtggtgtttacacggaggagcgatgcaattgctgcactgaaacgttataataatgttc

SEQ ID NO: 294809 - DNA, 354 bp, Zea mays
gtcgaccacccgtccggaccgagcgaattgaccacagcttctcaccttcgctattttcgatggcacccaaggcggacgggaagcgggctgctaataaggcggcagaggatgagcccgcgacagagaaggcggataatgctccggcggggaagaagcccaaggccgagaagcgcctcccggcgggcaagttctccggtaaggagggcggctagggcaagaaggggaaaaagaaagcgaagaagtccgtggagacctacaagatctacatctttaaggtgctgaagcacgtgcaccccgacatcggtatcttgttcaagggcatgttcatcatgaactccttcatcaacgacattt

SEQ ID NO: 294810 - DNA, 285 bp, Zea mays
cgcgtcttccttaccctacgctactggtcctcctggccccacttccccgcaagagcggctgccgcagctgcgaggtccgtaccccacatcggcgagcggcggcggaaccgccggaggcaaaggcaagatgttcgggcgcgcgccgaaaaagagcgacatcaccaagtactacgagatcctcggggtgcccaagtcggcgtcccagaacgatctcaagaaggcctaccgcaaggctgctataaagaaccaccccgacaaggccggtgaccccgaaaagtttaagga

SEQ ID NO: 294811 - DNA, 284 bp, Zea mays
gctgatgtcaaatgctttagactgtaatgtctctgatacgcacaccaactacatgagggagtccattaggagtgactgaggttacgaattgatcataaaggatatcggataactgggactccattaccgaaagcacatcaccgcgtacggtgactgcaacgagcgactgcttacatgccgccacgagactctcgacatcaacacctgaagtctagtgcgtctggaatcagctctacgtctggtctgtacgacgatgacaccgagaaggaaggctgatgctactt

SEQ ID NO: 294812 - DNA, 424 bp, Zea mays
tcggtcctgcgccgtcggccgctgacgaggactggaaccgtttgtcggtcttgaagtcctgcgcgatctccggcaccagccgctggaagggcagcttccggatgagcagctccgtgctcttctggtacttgcggatctcgcggagcgcgacggtgccggggcgaaacctgtgcggcttcttcacgccgccggtggccggggccgactttcgcgccgccttggtggacagctgcttccgcggcgccttgccgacggtcgacttcctcgccgtctgcttcgtgcgcgccatcggagagagctgcgtgaggcgtacctggggggtctcttcgaggacaccaacctctgcgccatccatgccaagagggtcaccatcatgcctaaggacattcagctcgcgcgccgcatcatgggcgagagggcctga

SEQ ID NO: 294813 - DNA, 289 bp, Zea mays
tcgcccacgcgttcggtcattagtttctttgatttggatcagaacattcaaggatgcatgttgagcgactataaagtggtcgatgagctacaatagtacatgaccagtgctttcgaacacatgaatgccatgttcaattctcaggactgcgaccttaggatgtgagcctgtaccttaggagctaacagggttgatcgtgccatccttttgataggctgggaagcatgatatcattgaccgagcattacagattctacaggtgcattcaataattcttgtgcaacaacgt

SEQ ID NO: 294814 - DNA, 362 bp, Zea mays
cgacccactcgtgcgcccacgcgttcgcccacgcgtccgaccacgctcccggaagtataataactatgactttcgggggtgcccgggtgtctactgctggggtcaaccatgcctgacaattggacaatcagacatccatcgatctaacaccgtgaagatatactgacccaagagggaatacatttactacccacggtccaagtaccatgacattcactgtacatactttgggacaacgttccctcatctgttactgatgacttactatcacctaaagccacagaagctttccaatcactatgttccctcgagtttttcgctttaagctgcacacaccatgaacctcaagtatttgtccttta

SEQ ID NO: 294815 - DNA, 452 bp, Zea mays
  unsure (1)..(452): unsure at all n locations
gcgcgtaatctggtacgaactaatgacaaacagtancgattgacattgaagctaccaagagggcgcacgagtttcatgtaggatgggtcgcggacccgttcttcttcggagactacccggcgacgatgcgggctcgggttggagagaggctgcccaagttcaccgcagacgatgctgcccttgtcaagggggccctggacttcatgggcataaaccactacaccactttctacacgaggcataacgacaccaacatcatcggacggctgctgaacgacactttggcggacaccggaaccatcagcctgcccttcgacaaaaacgggaagcccattggagatcgggctaattcgatatggctgtacatcgtacccagcgggatcaggaagctgatgaactatgtcaaggagcgggacaatatcccaacggtttacatcactgaaaatgggatg

SEQ ID NO: 294816 - DNA, 350 bp, Zea mays
  unsure (1)..(350): unsure at all n locations
tcgattgctgaattcagggtggttgctcgagctttattttgattttggggggtgggtttcagtggcaattcatgacggtgcggccggggtgggtcgtgtgggtggcgcatggctcggcggaattnaagaaaaggctggcttgcaagacagactccctggccagtatacgggtgattaaccaaaacaaatgcacgtccaacacacccaaatacagatttgttgtgcgatttaccaacaaggacatcactggccaaatcatatctgctattatagtgggcgatatgggttttgcttctgcctactcccatgagctggcaccatatggtcttgaagattgtctgaccaactat

SEQ ID NO: 294817 - DNA, 402 bp, Zea mays
  unsure (1)..(402): unsure at all n locations
ggccgacccacgcgtncggccgctattagaagaaccctttttcaagactatgccatgtccgtcttcgggggacctgggaggcggtggcgcagctccgcaaggccgggaaggtcaccgtgagggagaccacgctcaagaggctgggcgccacgcacttgaggtacggcgtcgcagatggacacttcgaggtgacggggttcgcgctgcttgagacgatcaaggaggcgctccccgctgacatgtggagcctctagatgaagaaagcctgggccgaggcctacagccagctggtggcggccatcaagcgggagatgaagcccgatgcctagtagtggcgattgcgaccagtgtttaacccatgacgcagcgccgtcacagatgtcccgtgtggtcttgcgcttt

SEQ ID NO: 294818 - DNA, 229 bp, Zea mays
gaccgacgcgtgcggtaggacgtcatcgagatctgcgtttaccttttctccaccgtcgacacgtacgtgtccaagctcaattacctagggtccgggggcgccatactcgaatggatcggcctgtagggacacttctacaagcccaacatcccgatcatgagaaccatactcgacaagctctccaccctgtgcctgcccatcttgtttaccgaaatcgacatcatcaaca

SEQ ID NO: 294819 - DNA, 474 bp, Zea mays
  unsure (1)..(474): unsure at all n locations
ggaaaaaagggccgacccacgcgtncgcccacgcgttcgcccacgcgttcgggatgtttctcgccgaaaagatcggccagatgacgcgggtcgggagggaagacgccacggccgacgcgctggccaaatacttcataggtagcgtgctgagcggcggaggcagcgtgcctgctcctcaggcgtctgctcaggcttgggccgccatggtgaccgagatgcagaagggcgctctttctacgcgtctgggtataccgatcatctacggtatcgatgcagtgcatgggcacaacaacgtctacaaagctactatttttcctcacaacgtcgggcttggagctaccagggaccctgacctcgttaagagaattggagaagcaactgctcttgaagatagagctactggaattccttacgcctttgctccctgtatagcgggttgtagagatccaagatggggacgctgctatgagagct

SEQ ID NO: 294820 - DNA, 440 bp, Zea mays
aaaggggcgagcacgcgttcgtgaggttactgaccattttgctatggcttatgcaggcgcgccaagggggacgaccggcggaggggtgactgtcgggctatcactcctctgcgctggggccggcccgggcgccgcgcaaaaatgcggatggcagccaaacgtatgctgcagcaagattggctactgcggcacgaccgacaagaactgcggggacaggtgccagaccggcccgtgccgctcgggcggcggcggcagcaacggcggccgcggtgcgaacgtggctagcagtcgacaccggctccttcttcaacggcatcaagagccacgccgggagcggctgcgagggcaagaacatctacacccggagcgcgttgctgagcgccgtcaaggcgaacccaggcttcgcccatggcgggtcgcaagtgcatggcaagcgcgag

SEQ ID NO: 294821 - DNA, 460 bp, Zea mays
gacccacgcgtccggcctcaagggggtttaggatctccacctacttgtattggtggatccgtcagggggtttcagagagcattggccgacaactcgagatcgttcaggctccctacttatttgcacgagaggttggtagccattcgcggcgcaaagtacgcgtttagaagaccaaggaattgctccgacagtaaggaccttaccggggtccttcacattttccagaagaaagtgcacaacgcctccagaggctgtgcacaaggtaatttaactgaatcaacaggggttcccttcctaaaccggcttactggggatacacttcataggtacctagaggatcaaaacgttgcaaatgatccgtggcacggatttgaagaaaggtacctcaaggaggaagttaacagtcttataaattcaactctcaacgagcgcgagagggacattattcgattatatcatg

SEQ ID NO: 294822 - DNA, 368 bp, Zea mays
ccaacctgagcacaccatcgagtgttcgttttggagcagccatggctacatagggggtcggctgagctagcacatgccttggcacccgaatatcggaccctgcgacactgtacgcacacctagtgaacgggttccggtttgacatgtgcggtaaggccaaaactgctatgaagaacgtggccacgacatactgctcctctgaacgatcgacgtgagtcacctgagccgtggagcccgactacctggacggatgcctgatctgataatacggattagacacgtacaggctcacgaagcctgtcgagaacatcgagttagagttggactcgctggactaaagcctgtgcacgaatgagggctcaagtata

SEQ ID NO: 294823 - DNA, 348 bp, Zea mays
cgtcatcatcggggtgctcgacaccggcgtttggcccgagagccccagcttcggggacggggggcatggccctgtgcctgcgcggtggcgcgggagctgcgagaccaatgccaccgacttcccgtcctcgatgtgcaaccgcaagctcatcggcgcccgtgccttgttccgcggctactcgtcgggggccggcgacgggtctcgagtcggcgccgacctaatgtcggcgagggaccacgacgggcacggcacgcacaccgcgagtacggcagccggggccggtcgtggcgggcgcaagccttctcgggtacgcgccgggcacggtgcggtgcatgggccccggggcgc

SEQ ID NO: 294824 - DNA, 420 bp, Zea mays
tcgcggacgcgtgggcggacgcgtgttcaagcttaagcaacaaggcagcagcacaagcaagaacggcaccttctcccttcgcctgtgatcatgtcgtcttgctgcggcggcaagtgcgggtgcggctccagctgctcctgcggcagcggatgcaacggctgcggtatgtaccctgacgtggagaccgtcgtcaccagcagcgtcaagaccacggtcctcgccgcgccgaccaccaaggccagcgccggcggcttcgaggcggccaccgagggcggcggctgcgactgcaacacctgcaagtgcggcaccagctgcggctgctcctgctgcagctgcaactgagccggcccggctcggcgatggcgcacgagagtcgagaggacgacgacgaggaggcgtataataaatataatagcggcg

SEQ ID NO: 294825 - DNA, 355 bp, Zea mays
gccatgcgtccgcccactcgtccgaaccctattcaggtttttgattaatccggtgcatccatgagtagggtgcagtctgagtgtggctaggatgccatctcccagattgttggggaatccaaggagaagaataggaagattactgatatctgaggaactttatattgtgctgaacaattatgatccacagaagggcaatgcgtgtcagtggcgtctgattatttgccccatattccttcgtccaagatgaaagtgtgcatgcttggtgatgcccagcatgttgaggaggccgagaagatgggacttgactacatggatgttgaggctctcaagaaaatgaacaagaactagaagc

SEQ ID NO: 294826 - DNA, 387 bp, Zea mays
gcgcggacgcgtgggcggacgcgtgttccggtgtcgatggccacggagccgttggcgcggttggggttgatggtgaagcggtcggtgttgctgaactcggtggccagcgtgtgctggacggggttcacgatcgactccagcgacctcagcgggtagtaggagtggagcacgtggaagcggagcaccacggccttgctgtcgttgatgagcgacttgagccgtgcccccatcgtgaggcccgcgaaggcgtcgtcggtcggcgcgaacaccgtgatcccggccccgcgctcgtcgtcctcgaactcggccgtcacgcccgacgcctgcagcatggacgccgtcacgttgaaagcgcgcgcgtcggcgaggacgcgggtgatgttcacg

SEQ ID NO: 294827 - DNA, 373 bp, Zea mays
  unsure (1)..(373): unsure at all n locations
cccacgcgtccgcccactcgtccgctcatgcttccgcggacgcgtgggggttagggctgagccattcatcccacttgccgctagcanatctagttaaatttgtgatattttcgaacttgtcaattgttgggatgaatgtgagcttgatgtggaactctgtgggcttttatcagatagcaaagctgtgcatgatacctgcatcatgtcttctggaggttgtctttgatcatgtgcattattcccgggacacaaagctgagcataatggtcgtgcttataggagttgcagtctgcacagttactgatgtcagtgtgaatgcaagaggtctaatcgccgctgttatagctgtttggagcacagctttgcaacaata

SEQ ID NO: 294828 - DNA, 354 bp, Zea mays
gtccattagtgttctcttccgtggaaagtctgctgcttctactgtggtggaattttgtggcgggcctatgtgctggagcacccgtacaatttctgcatctgctggcggaggagcttattgtaatgggcaaaagattcatgtcagtcagacagacaaggtggaacaatcacttctcgtcacaggttttggatatgaacacgatgatgcctggacgaccaatatgaatctgttcaaggaatttactgacattagcaggggagtgcgaaggctagggtctgctgctgctgacatgtcccacattggacttggtattacagaagcttactgggaataccgacttaagccatgggatat

SEQ ID NO: 294829 - DNA, 378 bp, Zea mays
aacaacttatggatctttgcgcccaccttttggaaaacatcgtctgaagattgtagaagggatctctgtgctgcttacaagtggaaatgaaactgctgaaaaagagctaaaaaaggcgtcagcaataaaacgccccaatggtttggtctttgaagattcctataacaaccttttgcccccacatggtgggaatataaatggtggctggccggaggggaaaaaaacctgaagtggtgagcatgtccttcatgaatgtgataatgtgggtaaaattcttgcctcaaaaaggttttcatccttgtcgactgagtctaatgggcctactggtccctctgaagggaaaacccctccaagaattggaaatggtggtcacatgac

SEQ ID NO: 294830 - DNA, 321 bp, Zea mays
  unsure (1)..(321): unsure at all n locations
cgcgtncgcaatgactctgatttataaccgagtactagatgccaaattctttgtaataaaatcctgcacggatgaccatgtacataggggcgttaantataaagtttgggccagcacagccagtgggaacatgaagctggattctgcttaccatgcagccaaagagaaagaagagcattgccctattttcttgtttttctcggtaagaacagctcatctcctttggttttttgcttttcccttcgaggaaaaaaagagtaacagtacatagtgggtgtttgatcctttattagcatgtgctaaggtgtttccgattttggt

SEQ ID NO: 294831 - DNA, 366 bp, Zea mays
  unsure (1)..(366): unsure at all n locations
cttccgccaagggttnnntgtttccttggccggttccttttcccccgacctcaaactctaaccgggcggtttccgttgccggaaggggggccaaccttaacaagccggtccttcatccgccaccatggggaagacccgtggtatgggagctgggcgcaagctcaagacccaccgcagaaaccagatgtgggctgacaaagcatacaagaagagccacttgggcaatgagtggaaaaaaccttttgctggatcatctcacgccaagggcatcgttctggagaagattggtattgatgccaagcagccaaattctgccatccgtaagtgtgcccgcgttcagctggtgaaaaacggaaagaagattgc

SEQ ID NO: 294832 - DNA, 268 bp, Zea mays
  unsure (1)..(268): unsure at all n locations
acccacgcgtccgcccactctttcgccctctcgtccgttnatggtccacaagcgactattactggaatctagaaacattctattgaatgcgtcgatggctgcaacgtaatcagagcgtagctctgggtagtttgggatctgcaaacactctattgaatgtatcctggactcagcataaatgatagatatatcggaggatcactatatgatccacaccacgtgagatggcaacactaaggatgatcttaaactcccaaataatgagact

SEQ ID NO: 294833 - DNA, 426 bp, Zea mays
gacccacgcgtccgtctactccttctccgactcgtgcgctgtcaggatatcaaggacgcattctactaattggccagtattcttggtcttctctgcgaatgggactgggcactcctgtggcatggctgagatggctgctcctgttgactatcacaaggacatggacttctggtgtcaggataaacggaccggctgcttacctgtgagatggcacactgttaaagatataccgactggttttttgcagcatatcacactgcagaataatgaaaacaagcctgtgactcacagcagagatacacaggaaataccatacctgcctggaatatctgtgatcaagatcttcatagacctcagagtgagggactgcctgtctgatgatgttatgacatatgaggcagaacaggcgcaaatgaagccgcacag

SEQ ID NO: 294834 - DNA, 185 bp, Zea mays
cggacgcgtgggcgacatctggcgcgagattagcggcgccggcgaacgcgagcccggccgggccgacgtgtacatagtcagctggaacgaccacttcttcgtgctcaaggtggagagcgactgctactacatcatcgacacgctcggcgagaagctctacgaaggctgcgacaaggcctacatgc

SEQ ID NO: 294835 - DNA, 349 bp, Zea mays
cccacgcgtccgccacgggataatcatgattcacaagtacagtttgcattggagagaggggtccctgcatatattggtgtcctcggatcaataaagctgccatttccatctcgtgtttttgacatggcccattgctcgagatgtttaattccatggagtggaaatgatggtatgtacatgatggaagttgacagagtactaaggcctggtggatattgggtgctatcaagcccacccattggctggaagattcactataaagggtggcaacgttcaaaggaagatcttcggaatgagcaaagaaaaatagaatacttcgcacaacttctttgttggaagaaggtatctg

SEQ ID NO: 294836 - DNA, 421 bp, Zea mays
cccacgcgtccgcggacgcgtggggcctaccgctccatggccgagctcgaccaagccggcaggcgcacgccatttcgtcttaaccgcattaaggatcttcagtgcttccgtttcttcctctcccattattttctttggtaaccgacgccattgaaggcctccatgaatacccgccggcgcccccatgacctccctggccgacccttcccctctccctcctgctccctataaaaccgagctcctcctctctcctctctccctcgcctacccgagctctctctcattcctcgcactctctccctcgccgttcgtcgccggagttcgccgttcatcaccggagctaagccaccccaaagttgagcccctgctcttccacccggccgataccccgtcgagcccttcccgtcacacgtacgaacct

SEQ ID NO: 294837 - DNA, 438 bp, Zea mays
gttgtcatggccgagactgctgagacctactacaactcgagcttctcgatgcagagtggagaaagatgttgggaagggtgataaatcaggggataagggaactgctgagaagtttgcaatatatcagaagcatcgttcttcgttggcagacactgttcaattcaggaggccagctgctccaacttccagtgtgaatgctgatattgtgggaacatccactctgcagtctgcatctctaccgaaacaagaatcctcaacagctacatccaagagctatactttcagagaaggtgatagggtgcgttatgtgggtccagctcagttatcctcattgtcacaaaggctcctctccttttgctggcttcgctgttggaagcgagacatcatgtggtgtggataacgtccttgcagagcacgtgaactcaaatttcactctaa

SEQ ID NO: 294838 - DNA, 387 bp, Zea mays
  unsure (1)..(387): unsure at all n locations
agactacctcgactgggaggttggaaagtttggtttaattattgaatttacagctccagagtccaactcaaaacacagtgcgacctatttgcctgaagttgcgggccatgaaggtgaaaatttcctttttcatcgatgcgatgtacacttatcgtttctacagagttctttagtttctagaattattgcaggggataataagaagaaatgagttaagaaaatatgtaatttcatctttctaaatcatcatggaccaaatgcattataatgagcaataacggtaaaataaagagtcaactgatcagtacattccaaatctgtattgaatagtttgtaacttaggctttatcttttggcangttggacacatgtagaaactattgattc

SEQ ID NO: 294839 - DNA, 378 bp, Zea mays
aatcgaaatcgatccgatctacgcttgctctgaagcctgatctccaccgtggtcgcagcatgggcgcatgaccttgatcaccaagaggcaatggagcatgcatccacaaccacatgccatggcagtgagggccctcatactcacttacaactacgtcctgatcgcactcatcgtcgacatagtacaccgtgactggcttcttgattgccgactgtgtgcatgttgatctgcccatgaaaaccaactaccttgtcgtcgacatcaataccactgctaaacaaatcgaggatgcgtacaatgaatttactacgagggatgatatcgctattgtgctcatcagtcaggatattgccaacatgataaggtgtttggtgggta

SEQ ID NO: 294840 - DNA, 379 bp, Zea mays
aacactcgtccgcccactcgtccgtcgttccgaaccctgacctgtacacggtcgccagggggctcgcaagacctagatcactagtagacaaggatagcagcatccacaaacacaatccatatcagtgaaggccaacatatacaataacaactgcagactgatcataatgatattcgaccagatctccgtgactgacatcttgaaggacgacgatggctacgttgatctgagcaagaaaaccaactacatccacttcgacaaaaatacgacagtttaacaaatacaggatgcgttcaaagaatatactacgatggatgatattgctattgtgctcatgaacaagtataatgtcaacatcataaggtgtctggtggatagc

SEQ ID NO: 294841 - DNA, 375 bp, Zea mays
cacaagcttgaactcgaccgattcagtcgcgcttatgagataagaaactactagacgggctcggggaccattcaactggcgaccccctacatttacttgaccagaatacggtgctgttggctctcaaatcagctgcagggaataagagggctgcacccgatgacgacgaccagaagttcgaggtggaccctgaacgccgtataatcgtacgcgaagagcgccagaagtgcataacgaagccggcccctcgtgacgacgaggaggctgatggaaagagctctgtcacaagccaatccatcacgaagaggaggacatccggctctggctgggcctacactggtcacgagtacaccatcaagagggccagtggcgatc

SEQ ID NO: 294842 - DNA, 326 bp, Zea mays
atggatggtagggaaaatggcgagcggccgtcctttttttttttttttgaaataaggtaagaaggttataggttcggtatcaagaacaaaacatcaagtacaagaccaagtttgtaactagatcttccagaatgtgcaaatgagtgtcaacttcctcgtgtcgctcttgaaaaagaattggcataatgtgacatgcttgtacctgaagagcactatgggaaaggtgtaccggctgttctaaattttccaattaggcttagaattctcaggagactctaatgcttggacacttgccatttttcctaacattcatttttttgatccac

SEQ ID NO: 294843 - DNA, 157 bp, Zea mays
  unsure (1)..(157): unsure at all n locations
atcaccgaccggnatacaaaaacggctcgctttttaagttttnttaccttctcctcccaaaactccatgctcgacgctatcgagaacatgaacagcaaggaactcgactgcctaaacatcaccgttaaccaggcccagtcccgtggcggtggcaata

SEQ ID NO: 294844 - DNA, 377 bp, Zea mays
  unsure (1)..(377): unsure at all n locations
atcgctgactctggagggtgtggtatatgttgttgatagtggattttccaagcagaaatggggtggtccgatttcggacatagagagtttagttgtcgcaccaatatccaaggcatctgcaagacaacgagcaggcagagctggaagggtgcgacctgngaagtgctttaggatctatacagaggaatattatcttaatgaaatgcagtcagaaggaattccagaaatgcaaaggtccaacctggtctcctgcataatacagttaaaagccctaggcatagacaacatcctgngctttgattggccagcttctccatctccagaggcaatgattcgggctcttgaagttctattcttcctaggtatnctcgatgaag

SEQ ID NO: 294845 - DNA, 338 bp, Zea mays
  unsure (1)..(338): unsure at all n locations
ggaataatctcnttcttcactctcactaacaccagtctagctaactctttctctcctgcaataatggggcgcgcgctcctcctcctcccagccgcagctggtcgcggcggcggcggtcctggcagcggcgctgctgctgctggcggcggnggccgggacggcgtcngcggcggtgagctgcggcgaggtgacgtcgtcggtggcgccgtgcctcgggtacgcgatgggcagcgcggcgtcgccctccgcggcgtgctgcagcggngtgcgctcgctcaacagccgcgcgtcgtcggcggcggaccggcaggccacctgcaactgcctcaagagcatga

SEQ ID NO: 294846 - DNA, 348 bp, Zea mays
  unsure (1)..(348): unsure at all n locations
gacccagcgtccgcccacgcgtgcgcnnacacgtttatgcaggtttattccgtcagtgttgagactgttctcatgggaagatatattcaagtcatggaccatgactccttgacagntgtcaaacttaagatgacactgtgagctgatgacaatagtgataccagccactacaacgttgaaactaccataaaacctcaatgcctgcatcaagtttaatctgtggcattctttcaaactccacatcttactgcatgaaagcatccaaagctggtgtgtctatgccgctatatgccacaatcatgtgagacggaaagaacaagacaaagcaaggaacagattgaaacaaat

SEQ ID NO: 294847 - DNA, 416 bp, Zea mays
  unsure (1)..(416): unsure at all n locations
tcgtccacgcnnncnnncacgcgtncgnccacgcgtccgtccacgcgtccgcttttgttgagtttgttcgtgctgagggtgccatcatggctctgaattgcagcgggatgattttgggaactctgcctgtcagggtgagtccttctaagactccggtgaagccacgtgtaaatcgaatgggatctaactgactctgcctaagctcaaccggaaggcatggccataagctgaaggcttccgtggtcctgtgcatcatgatgcatttgcttacattcttacaaacactctgtttgtacccttttgcaaacctgttgngagggaacttggtaggtcaggcccttttgccttgcattttaaacatgatggaaccattgagaatgactattccgcaattaaccatcaaaagtacttctgtc

SEQ ID NO: 294848 - DNA, 381 bp, Zea mays
gggaatattcttggtttttcagctggagctagtggcgaatggcacaagtggtttccattgctaacgacaagagcatgctgtgaagcttgcggtaattcgaaagtagctttcttagttgcatgagtatttctttcgttatgtatgtctgttaccctgtacttcgctgaagagagcccactagatccaaaagatacacactgactatcagattctgctactctagtgaacggttctagaaatgctgcccatgcatcaaatgatccaaatgatgcaagattttctaatggcccatgtggtttaaacaatggtgcggctaacaacaacactgacgaatttaccaatgtgaatttcaactcagagaatggacgagtcttcaatgat

SEQ ID NO: 294849 - DNA, 392 bp, Zea mays
tccaagtagttgctgtgattctcagtgctagtatttcagcgggctgattgcaaatttgtgcgggtaggactttggccgctggacggtgcactctgcgggatccccaacctcctgctgagctcccgcacagagggcgggcatggctggaaagcataccatgattctcatgcaaccatcacagaacagatcgacgaggacatttatggactacgattcagttaaccacgcgctggatggaatatgtggtctatacgaaaggaaaatcaggaacataaacccaatggtcaggaacttgactcatgatatcggtgacctgtacaacttcatcgatggcctgaccgacataagtgcactgacgtacgatgattcacttgacgctttcctgacgtatg

SEQ ID NO: 294850 - DNA, 355 bp, Zea mays
cccacgccttcgtcgactcttgcgctttacttttaacgtaccacatctcaaacccgcggcggagtacctcagcacccaaactgcaactccacaatgaggccctcgctgatgagatccacctcccaactcctccatcgccactactactactccgcatcccttcagacccatctgaaactggccatcctatacacagagccagcatcgggcatcctctgtcgctcctcatgaagctcaacccactgatctacttcctctcactctactatatcgcttgcaccccaggagtcgctgccgacgtctcccacatcaacttcccctcactggttaaaagtttcatggctgatgagcaact

SEQ ID NO: 294851 - DNA, 328 bp, Zea mays
caggaccaggatgaggagatgctggttccgtatcatgatgccattgagggtctgcagaaggatgtgcttgagggtccgcagccgatggaagaatttgcatctgctgttgagaaccaaattataccagatacctccacatctagatttacatggtatattgaaaatttctccaaacgaaatgttagaaagcactactctgacaattttactgttggggggtccaaatggcaagtgctcgtcttccccagaggaattaacgtggactacctttcaatgtacctggatgttgctgattcgaacttgatgcctcccggttgaagtaggaatg

SEQ ID NO: 294852 - DNA, 422 bp, Zea mays
gatattcttgattttcatttatttttaaatacttcggccagtatcggtggattgcgtatgggtccatttccctcggatcttgctttgttgtcatcttcttgattggaaccaaagagccaggatcaattcggcactgtttggataagagtccttccagaatttcatgggactactggttcaagagagtattgtactaccaagttgctctagtctatactctgactagattggtgaccaatgtttcacaggcatttcttgctttctatgtaataaatgatttagaaatgaatcaatcctccaaagcattggtacctgctattatctacatctgcagcttgatagtatctgtaatattacaagagactagatggtcaagttggcgtcttaagctttacttttcagatggagcaatgctttggata

SEQ ID NO: 294853 - DNA, 368 bp, Zea mays
cccacgcgtgcggactcacttaacgcttatctaacttcgatgcatacgtgcaaattctgagacaggtccttgacaatacccacattgatgacttcaagcttaatattgatcttaacagctaactacgaagctatcagcaagaacggatcaactggcttgcattcctacgtcggtctaagttacatggaattccatgcgacgacatcgtgctcgctaagacgctccaagcatatactatcgcctcaagtgacattgctgaaccacgtgcacagaatgatgaacaaattctcacatctctgactatctgcacttctacattaatgcaccactgtgaatatgacatagagaaatacatagacagctctatc

SEQ ID NO: 294854 - DNA, 303 bp, Zea mays
cccacgcgtccgcccacgcgtccgcccacgcttccgcccacgcgtccgctcccagctgctcaaactgtaagtggtgggccaccatcatatatttgtcgactcagtggaaagagcgatgtggattggtctttctggttggaggcaaactcttctgaaagtctgagagtcgatgtcgcagtacttgatcagtaccttgttgatagtacaaagaaactcaagagcctcttcccaagttgggccgggctgtttgtataaatatggaatgcaaggtgccctttgttgggtctgccggaaattatccag

SEQ ID NO: 294855 - DNA, 309 bp, Zea mays
cattcacaatgcacgaattgaacgacaacttgattctcatattgttgatatcaaagctaggggtggctaattgaaataatcaccatggactgttcatgtagatactgcatccgctgctagtacaatattatatacttttacagttaaccgtgtaatttcttggaaattatcaaattcaatacttgtataaaggctctaagataaagcaagttcttctagtgatggattctatgagtccatataagaatggcccgccagaatacactttctgctagctttctaatgttcaactgaaagattgtacatagt

SEQ ID NO: 294856 - DNA, 261 bp, Zea mays
  unsure (1)..(261): unsure at all n locations
tcaacttcctgagctctcattcacacctcgttggatcttnctaacnanactaatcttcacaccaaaattaaatcttggcttgcttttgctgcccacaacgctgttgaagtccatgctcttgctaatgcattggctgctcaaaaagatcaagcttacttcacaccaaatgcttctgctcatgcctcgagcaaatcctcaccccgtgtgaccaatgtaaaaatccataacgctactgatcctatcaaagacctctaccacctc

SEQ ID NO: 294857 - DNA, 227 bp, Zea mays
  unsure (1)..(227): unsure at all n locations
ctttactctcttttctactctctctcctaccaaaaacccatgcccttaagaaattttaaattccttttcaacaccaaacaannttacacccacttcattggcctccccccttttgttgtctccttcctattctccctattaaacaagcaccaacttttccaactctacattaacaacccatctttcaactacgtctgttttaaaaccccccttttttttccaacaac

SEQ ID NO: 294858 - DNA, 434 bp, Zea mays
  unsure (1)..(434): unsure at all n locations
cggactctttcgcccacgcgttcgcccactcgtncgcacggaccgcgcccggatcaacgtcatcaatgacgagctgttccggcttcttcaacacgcggacctggatggcgcggtggtcctggtgttcgcgaataagcatgacctgaaggacgccatggcacccgcggagatcaccgatgccctctcgctccacagcataaaggaccacgactggcacatccaggcctcgtgtgccatcaccggcgatggcctctacgacggcctgggctggatcgcgcagaaagtcgccggcaaggcgaccgcgagctgacgtgcangagagcagtggttgtgtgttcatgaacggattggatttgttgaaaggtatgggtggtggcagggcgggtttgtttcttcctcggcgtcacgcccaatgcttatttatggttttttaa

SEQ ID NO: 294859 - DNA, 373 bp, Zea mays
ctcttgatgttgtatcgcttaaaatgtaaggcaccaagagagctgtcagcatgttggtcttccaatttcttcaccctgcctaatgtgctgggttctctgatcagaggagaggtggggaaatggatcgcgattattgctgttattctgcgtctattctttccacgccacttcccagattggttagagcttgctgggtccatcatcctgctcacagtggtcgcccctagcctgttcgcggacaccttcaggggagacctcgttggtgtcttcatatgccttgtgatcggatgctacctgctccaagagcacatcaaggcgtcaggtggattcaggaacgccttcaggaagggcaatggtgtgtcgaactccatcg

SEQ ID NO: 294860 - DNA, 199 bp, Zea mays
cctcggggaattccaattccactatgtcattttataaggaggcacaaatgttcatatatgggttggcattatttgtgatcttattaggcctatcctgaagccaaaggcaatgagatcggaattccttgcggaattgcaattccacattttcatgaaatactgaggcgaaaatggtcatatatgaccaggagctatttga

SEQ ID NO: 294861 - DNA, 402 bp, Zea mays
cctgggtgcattccatttgtcactaatttcaacgaaataatgatccaaaaacgttgatatattaataggaactatttgtgttcttattatgcctatcctgaagccaaaggaaatgagatcggaattcctcggggaattccaattccacattttcaagaaataaggaggcaaaaatgttcatatatgaattggaattatttgttttcttattaggcctatcctgaagccaaaggaaatgagatcggaattcctcggggaattccaattccacattttcaagaaataaggaggcaaaaatgttcatatatgaattggaattatttgatttcttattaggcctatcctgaagccaaaggaaatgagatcggaattactcgggggtaccgagcttgaattccctat

SEQ ID NO: 294862 - DNA, 348 bp, Zea mays
gcctgcagtcgctgtagagtatccttaggcccttgcgaattcctattccttttttaaggatacagaagcgaaaatgttgtatatgaattggaagtattcgtattcttattatgcctatcctgaagccaaagggaatgagatcggtattccttggggaattccaatttcacattttcaagaaaatacgaggcaaaaatgttcatatatggaatgggaatatttggtatcttattaagcctatcttgaacccaatgaaatgagatcggatttcctcggggaattccaattccacattttcaagaaatatggtgcctaaaaggttcatatttgaatggaaataattggttt

SEQ ID NO: 294863 - DNA, 179 bp, Zea mays
cctcggggaatcccttttccacttattcaagaaataaggaggcaaaggtgttgggctatgaattggcattatttgttttcttattaggcctatcctgaagccaaaggaaatgagatcggaattcctcggggaattccaaatccacatttttaagaaattaggaggcaaaaatgttcata

SEQ ID NO: 294864 - DNA, 341 bp, Zea mays
ctcgggatttgctaggcgttttctccttaccaaagtcgcagtcacagccgcatatctgtcggcaatatctggccgcggaaagaggcctaaggggaagcccaagggcagggcaccgcgctacctcaaggaactgcgagacaacattcacgggatcaccagacccgcgatacgcacattgtcgaagaggaagcatgtgaagcgcatctacgggctcatctaccacgagacccacgacatcctcaagatcttcctaaagaacgttatacattacgccgacacctacacccagcacgcgcgacatatgacatgtgaacgacatggacgttgactacgctcttaag

SEQ ID NO: 294865 - DNA, 240 bp, Zea mays
cataacgaggcacaaatgttcatatatgaattggaattatatgatttcttattaggcctatcctgaagccaaaggaaatgcgatcggaattccttggggaattccaattccacattttcaagatataatgaggcgaaaacgttcatatatgaattggaattatttgataacttattaagcctatcctgaatccacaggaaatgagatcggaatacctcgatgaatatcaatatcacattt

SEQ ID NO: 294866 - DNA, 325 bp, Zea mays
acgaggcaaaaatgttcgtatatgggatcggaatcatttgctgtgatattaagcctatcctgaagccaaaggacatgagatcggaattcctcggggaattccaatgacacatactcaagaaatctggtggcaaaaatgtccatatatgaacaggcattatttgtgctcttattaagcctatcctgaaaccaaaggaaatgagatcggaattcctcgcagaattccaattccacattttcaagaaataaggatgcaaaaatgtgcatatagcaatttggaattatatgggtttcttattatgcctatcctgaatccaaaagaaatg

SEQ ID NO: 294867 - DNA, 383 bp, Zea mays
  unsure (1)..(383): unsure at all n locations
ccaaccctaacagcaccggcaaacgtatcagatctgaccggagcctccaaancaggcgnccacgtctagccaaggaggacgaggaacttgcagagcagacaacacatcacgaggacactaatccacgccacactgagtaacaatcactttaccaatatgagaaatgcgtcaagagagttgacaatgacgatactgggcacaaacactgcactgggcaatactttgattaccggtcatgcatccacaaatgtggagcatcaaagctccataagaagctcaaatgatttgagcgaagtgatgcgacttctgacaaagtgaaacgaaaatgcataccctacacccttggaaagagtatgaactcacacatcttggaattaaacatc

SEQ ID NO: 294868 - DNA, 366 bp, Zea mays
  unsure (1)..(366): unsure at all n locations
cctcggggaatgcttattccactcnttcaagaaataaggaggcaaaaatgttcgtatatgaattggaattatttgttttcttattaggcctatcctgaagccaaaggaaatgagatcggaattcctcggggaattccaattccacattttcaagaaataaggatgcaaaaatgttcatatatgaattggaattatttgttttcttattaggcctatcctgaagccaaaggaaatgagatcggaattcctcggggaattccaattccacattttcaagatataaggaggcaaaaatgttcatatatgaattggaattatctggtgtcttattaggcctatcctgaagccaaaggaaatgagatcgga

SEQ ID NO: 294869 - DNA, 227 bp, Zea mays
taaggagcaaaaatgctcatatttggatttgtaataattgattaattattaagccaatccgccaaacccaaaggccttggatcggaattcctcggggaattccaaatcccattttcaagaaataatgaagcaaaaatgtgcatatgtgaattggaaatatgtgttttcttattaagcctatcccgaaaccaaaagagatgagatcgtgatatctcggggaatttcaa

SEQ ID NO: 294870 - DNA, 378 bp, Zea mays
gagcggtgcatcaacaccatacttgttaaatatgtccacagcatcaaaggttgtcaatttggatgcatagatgattattacactgcacactaccaatcaccaaggcagatgttgtgtttgtgggacaaactgcaggctggaaaagcccaatgctgcagtatgagatagcaagaatggatgtggtggtactggtaagcttttctgtggtggtagtgcccatcctaattcacgaaagagttgagaacctaatagccccaagattaacttcaagaatattggctggggataaattgagcccttgagatgactaacaaatggacatttaacggaattcttttggtataagtgaccagagagtggttgagctggaaatggaaa

SEQ ID NO: 294871 - DNA, 270 bp, Zea mays
gcttgcatgcctgcacgtcgactctagatgatcccctcgaggaattccaattgctttggtcttgaaataaggaggcaaaaatgtgcatatatgaattggaattattagacgtcttattaggcctatcctgaagccaaaggaaatgagatcggaattcctcggtgcatgccaattccacatttgcaagagatcatgaagccataacgtgcatatatggattggaattatagtgtttcttattaggcctatcctgaagccaaaggaaatgag

SEQ ID NO: 294872 - DNA, 253 bp, Zea mays
ctgcacggtttctgtctgctgagtgactgtacgtgtcgtgtcggtcatgtaaaagttcctcgctacacgtacgtcgtatcaaacgtcactcactgtaaaacgtcacggccacatacacgatgacgagttccctagacacggcaaggagaagcaatcagtgacagtatttgtgatatcatcgatgtgtttggttcaacttttttctgaccagcttttctgaaaatatggctgtggagagaatctagttgtgggg

SEQ ID NO: 294873 - DNA, 248 bp, Zea mays
ggttctgaactttaaaaggacgcatctggacaatggttgcaggtggtggtgctagtgtcatatacgcagacactgttggtgatttgggatatgcttcggagctaggaaatatgccaaggtcaatggagcttccaaggaagaagagggtctgctgtatgctagagtgcctttggattgcgcctactttgatcctgattgccgtaagaaagcccttttaatcggaagaaggattgcttactttacagatg

SEQ ID NO: 294874 - DNA, 366 bp, Zea mays
ctggcgttttagcatacgcgattttcacgatattagcatcacagaagtcgacgctcacgtggcacgttgcacatggcttcatgacgagtcagctacatgacgaagcgcactaagaaggcacgaattcgcggcaaagatggaaccatgtatggtgctagctagcagaagcacattatgactatggaggcatctcagcattcctagaacttacgctagatgtgtgggaagtttgcttgtaacaggaaagcaaatcgaatctgggggcgcaaagactgtgggaaaggcaaagcttgtggcgcatacaccaagaacactgctaagtccgacaccgtcagacacacgatacggccactggaggaacacact

SEQ ID NO: 294875 - DNA, 338 bp, Zea mays
cctcggggaattccaattccattttttcaagaaataaggaggcaaaaatgttgatatatgaattggaattatttgctttcttattaggcctatcctgaagccaaaggaaatgagatcggaattcctcggggaattccaattccacattttcaagaaataaggaggcaaaaatgttcatatatgaattggaattatttgctttcttattaggcctatcctgaagccaaaggaaatgagatcggaattcctcggggaattccaattccacattttcaagaaataacgaagccaaaatggtcatatatgaattggaattatttggcttcttattaagccta

SEQ ID NO: 294876 - DNA, 427 bp, Zea mays
  unsure (1)..(427): unsure at all n locations
gctagcatgcctgcacgcctactctagatgatcctctcggtgaatcccacttgcatancatcatgaaataaggatgccaagatgttcatatatgaataggaattataccgtatcttattaggcctatcctgtaaccaacggaaatgagatcggaattcctcgaggaattccaactgcacattttcaagacataaggcggcaaaaatgttcatatatcaattggaattatttgttttcttattatgcctatcctgaagccaacggaaatgagatcggaattcctcggcgaattccaattacacattttcaagacataaggacgcaaatatgttcatatatgactcgcaatcattcgatctcttattacgcctatactgataccgaaggaaatgagatcggaattcctcgggagtaccgagctcgaatt

SEQ ID NO: 294877 - DNA, 312 bp, Zea mays
tatcctgaagccaaaggaaatgagatcggaattgctctgggaatttcaaaccctgatttttaccaaataccggggcgaatatgtccatatatgaagcgggattatttgtcatcttataaggtctatgcatatcacaaaggaaaagggatcggattcctcgggaatgtcaactccacatcttcaagaaatacggacgctgaaacgtacatatatgaaatggaattatgtgcaaccttattaggcctatcctgtagccactggaaatgagatctgaatacatcagtggtacagagctcgaattccgtatagcga

SEQ ID NO: 294878 - DNA, 375 bp, Zea mays
tccattttatcaagaggcaaagatgcgggtatgtggagtatatgaataggagttatgtgatttctcataacgcctatcctgaagccatgggataggagatcggaattgcatgcgaattacaattcacatgatcaagagatacggaagcgaacatgttcatatatgaattgtaagtattcgtattatgactatgcctatcccgaagccaaagggaacgagatcggaattcctaagcgaattccactttcacatgatcaagagatagcgaagcagatatgttcatatatgaattgcaattatttgttatatgatcaagcctatactgaaaccaaatgaaatgagatcggcattcctgtgcggtaccgaactcgaatt

SEQ ID NO: 294879 - DNA, 419 bp, Zea mays
gagattagcttttcaactagtcgcgctgtcacggtgccgaacagcgtgtcatcgccttcccctccctacaagccaaacgcgaataccacccccgtgacttcccgatctccggcgatggccgcgcggcgcctcggatcccccgcatctaggtggctgcgcccgtccgcgctgctcctcctggtcgcctctgctctcctctcggccccgtcgccggcccgggccctccggttcgacctcgagtccggccacaccaagtgcgtctccgacgagatcaaggtcaacgccatggccgtcggaaagtaccacatcgtcgggcccgaccccaactcacccgacgcccagctccccgagtcgcaccgcatctccctcagggtgacgtcgccgtacgggaacagcatgcactacgcggagaacgtgca

SEQ ID NO: 294880 - DNA, 394 bp, Zea mays
  unsure (1)..(394): unsure at all n locations
cctcggtgaatgccaattccatattctttagaaataaggaggcaaacatgttcatatatgaattggaattatttgatttgttattacgcctatcctgaagccaaaggaaatgagatcggaatttctcggggaattccaattccacattttcaagaaataaggaggcaaaaatgttcatatatgaattggaattatttgatttcttattatgcctatcctgaagccaaaggaaatgagatcggaatttctcggggaattccaattccacattttcaagaaataaggacgcagaaatgttcatatatgaattggaatcatttggtttcttattaggcctattctgcagccaaagganatgagatcggaattcctcggnggtaccgagctcgaattt

SEQ ID NO: 294881 - DNA, 373 bp, Zea mays
aacacatcttttcgcatttcttcccatccgatccccccttggcaaccaaaaccccaactcgccccgcatcgatggcgcccaaggccgagaagaaacccgcggcgaagaagccggcggaggaggagcccgcggccgagaaggcgcccgccgggaagaagccgaaggcggagaagcgggtccccgctggcaagtccgctgccaaggaaggcggcgagggcaagaggggcaagaagaagggcaagaagagcgtggagacctacaagatctacatcttcaaggtgctgaagcaggtgcacccggacattggcatctcctccaaggccatgtccatcatgaactccttcattaacgatatcttcgagaagctcgctgc

SEQ ID NO: 294882 - DNA, 383 bp, Zea mays
cctcggtgaattccaattccattgtgttaagaaataaggaggcaaaaatgttcatatatgaattggaattatttgttttcttattacgcctatcctgaagccaaaggaaatgagatcggaattcctcggggaattccaattccacattttcaagaaataaggaggcaaaaatgttcatatatgaattggaattatatggtttcttattaggcctatcctgaagccaaaggaaatgagatcggaattcctcggggaattccaattccacattttcaagaaataaggaggcaaaaatgttcatatatgaattggaattatttgttttcttattatgcctatcctgaagccaaaggaaatgagatcggaattcctcgggggtaccg

SEQ ID NO: 294883 - DNA, 334 bp, Zea mays
  unsure (1)..(334): unsure at all n locations
ccgcattcgatgggcgccccaagggcccgagaagaaaccctcgcggcgaagaagcccggcggagggaggagcccccgcggccgagaaaggcgcccgcgggtaagaagctcgaaaggcggagaaaagcgggtccccgctggcaagtctcgctgccaaaggaagggcggcgagggccaagaggggcacagaagaagggcaagtaagagctgtggagaacctacaagatctacatcttcaaagtgctgaagcaggtgcacccggacattggcatctnctncaaggccatgtccatcatgaactccttcattaacgatatcttcgagaagctcgctgc

SEQ ID NO: 294884 - DNA, 428 bp, Zea mays
gagacagctggatgcctgcagtcgactctagagatcctttagcggaatcttattccatattatcaagacataacgatgcaggatgttcatatatgaattgggactatgcgatgtcttattaggcctatcctgaagccaaaggaaatgagatcggaattgctctgggaattccaattccacattttcaagacataacgatgcataaacgttcatatatgaacaggaattatcggatttctgatcacgcctatcctgaaaccaaaggaaatgtgatcagaattcctcggagaatttcaattccacatgttcaatacatacagaacgctaaatgtacgtatatgaattgcaagtatgtgttttactatcacgcctatcctgaagccaaaggaaacgagatcggaatttctggcgggtaccgagctcgaatt

SEQ ID NO: 294885 - DNA, 435 bp, Zea mays
agagacttgctagcatgcctgcacgtcgactctagatgatcccctcggggaatgcttattccacattctcaagaaataaggaggcaggaatgttgatatatgaattggaattatttgttatcttattaggcctatcctgaagccaaaggaaatgagatcggaattcctcggggaattccaattccacattttcaagaaataaggaggcaaaaatgttcatatatgaattggaattatttgttttcttattaggcctatcctgaagccaaaggaaatgagatcggaattcctcggggaattccaatttcacattttcaagaaataaggaagcaaaaatgttcatatatgaattggaattatttgttttcttattaggcctatcctgaagccaaaggacatgagatcggaattcctcggtggtaccgagctcgaatt

SEQ ID NO: 294886 - DNA, 388 bp, Zea mays
gcttgttctcttcgtgcccgacaagccaatcggagccgagatacggccatggactccaccggcaccggagcaaggggtaaggggaagaagggagcggccgtgcgcaaggtcagcggaccaaggcagaagtcggagtcgaggtccgtgaaggccgggctgctgctacccgtcagtcgcatcgaccgcaactggagaaagggccttaaccacaaggggttgggagccgtgcccacgatttacctaacggttgacctgaattccttggcgctgatgttcctgaagctagctgttaaggctaccggggccaccaggaaacccggatttattccgcgccacgtgctcctggcaacccgaaccaacaggaagctcgagaagctgttgggcggct

SEQ ID NO: 294887 - DNA, 358 bp, Zea mays
gcctgcagtctacttagagatccttgtgaatgttttgatttacaagagttggggcagcgtgtgctatatgaatggtaattatctgatttattattatgcctatcctgaagccaaacgagatgagatcggaattcatcatggaactgcaattgcacatcttcaagaaataaggaggcgtaaacgtacatatatgaatcggaaattatgcgttctcttattaggcctatcctgatgccatcggaaatgagatcggcatgactacgagaattccaattccacattctgaagacattatgatgcaggactgttcatatatgaatcgaaattactagttctctcattacgcctatcctgaagc

SEQ ID NO: 294888 - DNA, 424 bp, Zea mays
ttcggctcgagtgtatctatttttacacaaaccgttgaagatagtgctagacctagactcaatacgggctgtcagccgtcgatgactcggacccaaatatgctgcatatgtgacagatgatccggactgctggactactggtcttatggaggtcgcaatggatctattcgagatattcctatctatcaatctagaaatccatcacattgctgttttactggacagagttgaaacgaattaggccactactaactaaaactatgacttcctagaacctacattcaaaagcagcttggctactttaagcttcagatctctagacattttgactgatccaccagggatgactttgacttggtatctatggaatatgagtgtgcgactgggcagaagagctcctattgataatacatataacgggcct

SEQ ID NO: 294889 - DNA, 366 bp, Zea mays
caaacggagctatgggcatggctgtcaagtgcgtttcatcggacgtgcggttgatgcaagctgtaactgttcatcattctacgctgaatgtcaatagcgtagagcaagagatctctattggactgaccctgggtctgatcgctggaggtatgtggaagatgcaccactggaacgagcagaggaaaactagatccttgtacgacatgcttgacaagggccagatcgccgtcatttaagagtagacccgacctgtcaccctaaaagtttttccttatcaggagtttttgaaaactcactctggatagcacgactaagtgaatgctgtggaaatttggcttgaaaataagcataaccatttgataacac

SEQ ID NO: 294890 - DNA, 381 bp, Zea mays
ccaaactcgtgagcactatgtactagtgacgcacaagccacgatatagccattatacagacatggactccaacgacaccggatcatgaagccaagggaaagaagggagcggacggccgcaaggactgcaatccaaggaagaagtcagagtcggaggccgtgaaggctatacttcaattgcacgtatgccgcatcgtacgctacttgaagaaaggccgatacacgcaacatgtcagcacctgcgccaacgtctacctcgcagctgtactagaatacctcgccgctgaggttctggagctcgccggtaatgctgccagggacatcaagatgactcgcattattacgagccacgagcttatggcgatccggaacgacgaggagc

SEQ ID NO: 294891 - DNA, 345 bp, Zea mays
ctagcatgcatgcacgcctactctagatgatcccttcggtgaattccaattccacattttcaagaaacaacgacgcatacatggtgagatatgaattggaattattatgatgtcttattagtgcctatcctgaagccaaaggaaatgatatcggaattcctcggagaattccaattccacattttcaagatataaggatgcaaaaatgtacatatatgaattggaattatgtgtgttcttattaggcctatcctgaaaccacagaaaatgagatcctaattcctcggggaattccaactgcacattgtgaagaaatatggaggcaaacatgttcatatatgaatt

SEQ ID NO: 294892 - DNA, 434 bp, Zea mays
gagacatgctagcatgcctgcacgtctactctagatgatcctctcggtgaatcccaattccacattttcaagaaataaggaggcaaaacggttgatatatgaattggaattatcagttttcttattaggcctatcctgaagccaaaggaaatgagatcggaattcctcagcgaatttcaattccacattctcaagaaataaggaggcatacatgttcatatatcaatcgcaattatttgctttcttattaggcctatcctgaagccaaaggaaatgagatcgcaatcactcggggaattccaattacacattatcaagacatactgacgcacaaatgtcaatatatgacttgcaatgattcgctgtcttattaggcctatcctgaatccaaaggaaatgagatcggaattcctcggaggtaccgagctctaatt

SEQ ID NO: 294893 - DNA, 290 bp, Zea mays
aatgttatgcgatcggaattcctcgtagcattccaattccacattttcaagaaataaggaggcaaaaatgttcatatatgaattgcaattatttgtcttcttattaggcctatccttaagccaaaggaaattagatcggaattcctcggcgaattccaattccacattttcatgaaataaggaagcaaaaatgttcatatatgaattggaattatttgctttcttattaggcctatcctgaagccaaaggaaatgagatcggaattcctcgggggtaccgagctcgaatt

SEQ ID NO: 294894 - DNA, 386 bp, Zea mays
attccaattccacaattttcaagaattagggcggcagaactgttgatagatgaattggaattatctgttgtcttattaagcctatcctgaagccacatgaaatgagatcggaattcctcggtgaattccaattccacattttcaagaaataacgaggcaaaaatgttcatatatgaattggaattatttgttttcttattacgcctatcctgaagccaaaagaaatgatgatcggaattccttggagaattccaattctacattttcaagacataatgaggcataaatgttcatatatgaattgtaattatctgctttattattaggcctatcctgaagccaaaggacatgagatcggaattcctcgggggtaccgagctcgaatt

SEQ ID NO: 294895 - DNA, 395 bp, Zea mays
acccaaacttcttacaaaggaacccaattccgcaaccgtcagcctatttcaatagccccccttgcctatactataccctccatcaatgaaaccttcttatgatacacctcaagctaagaccgtcttcctatacaacaaatccaacgccgaaatactcctccctcatcacaagtccacaagcatagatggtggcgagaagaaggctaagaagaaggcaaagaagtcggtggaaacgtacaatatctacatcttcaaggtgctgaatcaagtgctcccggacattggcatctcgtccaaggccatgtccatcatgaactccttcatcaacgacatcttcgagaagctggctgcggatgcaatcaatctgtcgctctacaactagaagcctaccatta

SEQ ID NO: 294896 - DNA, 460 bp, Zea mays
tctatgacgtctcatgcacgctctcaaactcggaaatctgttctaggcctctaacctttcttaaaaccttgccacctacttcaactagagcctattgactcattatctgatttactctcttcacatggtttacgttcttctgatgatgcatcatggatcctgtaaaatacgagttaggatttgcagatccatgctggcactaccaccgttcacagagtgctcatctcctatgctcttggctcttgcaagtattaagtcgtttctaaaaccacattggcacaatggactctatggtgtttgatgttgctgaattggatgaagcaataatgatttgtcgcaataacagtaaaacaaaacgttacttggttctaaatggtagtaattactacgaagtacaataatttgtatggagcgcatcagacttagcaactattacatattttaatctatctcttttata

SEQ ID NO: 294897 - DNA, 412 bp, Zea mays
gataattctgggacttgggggcatggagggatgtttgatgctttgactagtctgtcgacatgcattccagatgcttatcaccgtgcttctgaatttgatgatctccacatgggcgatcttcacttgattcagcttgatgaaggcaactgtacccggagtttggatgcacctttatgggttgcactagctatcgttcagtcttacaatccgaggcgtaaagttccgagaagtgaaatctccatgtctgatttggagctctgtatatcaaaagcagccttctcagctgctcagcattctgcggctatccacatgccccgaattggttaccaaggtggctcccaacgatcagaatggtatacaatagaacgcctgctcaggaaacactcatctctccatggaatcgacatttttg

SEQ ID NO: 294898 - DNA, 389 bp, Zea mays
cacacataattgttgcgattactaatgcagactgatgactgataatgtctggctaatgaatcgctataatgcaatccatatatagctgagatgcagtatgcctaaaatgaatatctgctgcactatggagcacagaaataaaagagcaaaaaaagtaacatatatgaaaagaaatcataagatatcttattaagcctatcctgaagccaaaggaaatgagatcggaattcctcggagaattccaattccacattttcaagaaataaggaggcccagatgttcatatatgaattggaattattggttttcttattaggcctatcctgaagccaaaggaaatgagatcggaattcctcagaggtaccgagctcgaataccctatagcgagt

SEQ ID NO: 294899 - DNA, 327 bp, Zea mays
cgcatcgccaatgaacactgaaacccaaaggtttcaaatgatccaatgcctgtaagcacgcatctaacatatggtatctgaatgtgtgaagcttgatctgtactccaactacaaggtctgcctgatattcaaggtcacccacatattccgctagaacagcctgactgttactaaggctgagatgaccactctatacaagatggccgtgaacactttatacgtgcgctggttcgctgtagatgccgtctacccatatgcgattgactgcatcactgaggacatatgccacaggctccatgtgataggacaggccgatccgacgaaacc

SEQ ID NO: 294900 - DNA, 359 bp, Zea mays
agacctgctagcttgcatgcacgcctactctagatgatcctctcggtgaattacaattccacacactctagacaccatgggcatacatgttcatatgctgaataggaatcatttgctcatcttattaagcctatcctgcagccataggtaatgagttcggaactcctcgcagaatcccaattccacattttcaagaaataaggtcgcaatactgttcacatatgaatcggaattctttgatgccttatcatgactatcctgcagcctacggaaatgagatcggaatctcgtagcaaattccaattgcacattttcgagaactccggaagcagacatgctcatacatgaattggaactat

SEQ ID NO: 294901 - DNA, 365 bp, Zea mays
tgaaatatacacatactctacaaatcatgttgcactcacggggataggtatacaggaattagtatgatcatctcattaatgcactatcctgaagccataggtaatgagttcggaactcctagcagaatcacaattccacattttcaagaaatcaggacgcaaaactgttcacatatgaatcgaaattctttgatgccttattatgcctatcctgaagcctacggaaatgcgatcggaatctctcggcgaattccaattccacattttcaacaactacggaggcatacatggtcatacatgaattgtagctatatgttttcatataattcctatccttaatcctaatgaatttagatcgtaatccc

SEQ ID NO: 294902 - DNA, 377 bp, Zea mays
actaccattcctgcacgtctactctagcagatcccctcgctgaattccaattcctcattttcaagaaataaggaggcaaaaatattcatatttgaatcggaatgatttcttttcttattaagcctatcctgaagccaaaataaacgacatcggaattcctcggggaattccaattccacattttcaagaaataatgaggcacaaatgttcatatatgaattgcaattatttattctcttattaggcctatcctgaacccaaaggaaattatatcaaaattcctcgctgaattccaacttcacattttcaagaaataatgacgcacaaatgttcatatttgaattacaatcatctgatttcttattactccctattct

SEQ ID NO: 294903 - DNA, 325 bp, Zea mays
  unsure (1)..(325): unsure at all n locations
ggccggcttaggatagcccggatggttaggggaagcgccgttgttacgcggaagcagtctagatatggtggccagaacgagtctgttgtccacaagagggccgagaccaccatgactatcgtgttgaagctgcagcgccagagctgcatgcagtagtcacagcgcgcatttatgaggtgcaagcatnttgagactgatggagactataatggcacgggaacatatgtgttctgagtttcccatcggtcatctagatgctcgatcgaaggctgtggtgtactactagtgtacatactcgtcaaatttcaatgtgactagttattat

SEQ ID NO: 294904 - DNA, 213 bp, Zea mays
atctcggctctcgcatcgatgaagaacgtagcataatgcgaggcctggtgtgaattgcagaatcccgcgaaccatcgagtttttgaacgcaagttgcgcccgaagccttctggcggagggcacgtctgcctgggcgtcacgccaaaagaagacgaacaaagcaaaaaagctaaaaaactaaataaaaaaaaaaataaaagactaaggcacaag

SEQ ID NO: 294905 - DNA, 417 bp, Zea mays
  unsure (1)..(417): unsure at all n locations
gtgatcttctcccgtccagttggatctctgtatcctggtgggccatataccggataccaacaggacctacgctacaagatctagatgcttgctttttaacattccattcattgtcaacaacacctgatggtacgataagcggttgtcctgagacaaataacttacataacagtaaagttgcttctgttcctgggaagatcacactgcctctgatcggcctagcatcttacaaattaaatggttccttgtggacgtcaaatcagcaccatgagcagcagttgactacgtcgcttctgaaagctgctgatgactggctttgccagcggcaagtagatcacccagattaccgcttcttcctcacacactaaattggatgtccatccaaactacctacctactgaacatcacagntcgatg

SEQ ID NO: 294906 - DNA, 231 bp, Zea mays
ggcttacttgattgctaaggaccacaacattaagtatgtcttgatatcatccttgattttaacaacatcatgagatacatagtatatcttaatgttttggtacttagcgcttaattcatctacagagcgtactgtatttccatcatcaaggccaataactgctccaagtctaattacatctagagcgtcgatgtcatacttgatctcgagcgtgctattgttatcacattc

SEQ ID NO: 294907 - DNA, 426 bp, Zea mays
ttgcattcctgcaggtcgactttagaggatccccttggggaattccaattccacattttcaagaaagtaaggggccaaaatggtgggtatttgaattggaattaattggtatcttattaggcctatcctgaagccaaaggaaatgagatcggaattcctcggggaattccaattccacattttcaagaaataaggaggcaaaaatgttcatatatgaattggaattatttgttttcttattaggcctatactgaaaccaaaggaaatgagatcggaattcctcggggaattccaattccacattctcaagaaataaagaggcaaaaatgttcatatatgaatcgcaattatatgtcttcttattatgcctatcctgaatccaaaggaaatgagatcggaattactagggggtaccgtactcgaatt

SEQ ID NO: 294908 - DNA, 395 bp, Zea mays
cccttggggaatttccaattcaaaattttcaggaattaaggaggcaaaattgtgcatatatgaattggaattattggttttcttattaggcctatcctgaagccaaaggaaatgagatcggaattcctcggggaattccaattccacattttcaagaaataaggaggcaaaaatgttcatatatgaattggaattatttgttttcttattaggcctatcctgaagccaaaggaaatgagatcggaattcctcggggaattccaattccacattttcaagaaataaggaggcaaaaatgttcatatatgaattggaattatttgttttcttattaggcctatcctgaagccaaaggaaatgagatcggaattcctcgggggtaccgagctcgaatt

SEQ ID NO: 294909 - DNA, 400 bp, Zea mays
  unsure (1)..(400): unsure at all n locations
agattcccttggggaatttcaaattcaactttttaaggaattaaggaggcaaaatggtgcttatataaatgggaataattggtttcctaattaggcctatcctgaacccaaaggaaatgaaatcggaattcctcggggaattccaattccacattttcaagaattaaggaggcaaaattgtccatatatgaatgggaattattggttttcttattaggcctatcctgaagccaaaggaaatgagatcggaattcctcggggaattccaattccacattttcaagaaataaggaggcaaaaatgttcaattttgaattggaattattggttttcttattaggcctatcctgaaaccaaaagaaatgagatcggaattccctcgnggtaccgagctcgaatt

SEQ ID NO: 294910 - DNA, 393 bp, Zea mays
cctcggggaattccaattccacattctcaagacataaggaggcataaatgggcatatatgaattggaattattcgttttcttattaggcctatcctgaagccaaaggaaatgagatcggaattcctcggggaattccaattccacattttcaagaaataaggaggcaaaaatgttcatatatgaattggaattatttgttatcttattaggcctatcctgaagccaaaggaaatgagatcggaattcctcggtgaattccaattccacattttcaagaaataaggaggcaaaaatgttcatatatgaattggaattatttgttttcttattaggcctatcctgaagccaaaggaaatgagatcggaattcctcggatgtaccgagctcgtatt

SEQ ID NO: 294911 - DNA, 406 bp, Zea mays
  unsure (1)..(406): unsure at all n locations
ggaccagcttgaccagatggccgtgccggccgtcaacaacggccggacccctgaaaaggaccccccggccgaaccggctttcaacagctaccctggcccgctcaaccncaaccctaagcccgaggacgactccaaaccccaggtccaggcccagcccggcgcgccgccgccgccggcgcatgcgcaggcgcaggcgcagccgcccgcgcctgacctcaccgagcaacccaaggctatgagccgcgccctcgtcctcgcggccaagaagtttgatgcacttgttgcagcagtgccactatcatcagaagaggatcaagtgaaaagaatccaagagctacaggcagagaatgaagtcgtgggactggagctccagaagcaacttgaagctgccgaaagggagttgaag

SEQ ID NO: 294912 - DNA, 367 bp, Zea mays
tcaggatcgcaagcggccgcccttggccataagacttaaccaacggctagattttggttggtggctataaataccaccccaaccgaccacttcaatgggtgggagcccaagcaacattccaagtcatctagttgacatactcaagccctcccaaccacacacattcattgatccatcctatacacaagatttagaccactacaaccaacacaagtgccacaaaatagagagcaagcaaaagaaagctactcattgggtttaaaactaatgccttgggaaattcattggaaagatagtgtggctaaaatctttgggtcaatttgtgcctggagtttttgaaggggaaatgtgcccttgggccatttct

SEQ ID NO: 294913 - DNA, 366 bp, Zea mays
ccttggtgaattccaattccacattttcaagaacttacgaggcaaaactgtgggtatattaattggaatcatatgtactcttattaggcctatcctctagccaactgaaatgagatcggaattcctacgcgaattcctactccacattctctagacataaggccgcaaccatgatcatatatgaattcgaattatttcgcctcttactaagtctatactgaatccaaaggagatgacatcggtaacctcttgtgaattccatttccacatctttaagacatatggatgtcactaggttcatatgtgaattagagatatcagattatcttaatatgcctatcctgaagccataggaaatgatatcgg

SEQ ID NO: 294914 - DNA, 421 bp, Zea mays
tgaaagtttgtggaacaacatgatgattacttcgagcagaagagaaatgcagctcaactcatcaataagggataagttgttttcaaaaggttattgcagttttccgtgtgctaacttatagagtggcagctgatgctacagatgagtacgtacgcattggagaaagtactgcgctggaaagtctaagaatgtttgttaaagctgtaatagaagtttttggagttgagtatttgaggtcaccaaatgaaaaagatatcgaacaattacttgcacttggtaatgaaagatgttttcctggtatgctggtttcactagatggcatgcattggaggcggaagaaccgtatgccattgttgcaaggtcaatttttcgggcatcgccatacacctacaataattttagaagcagttgctttgctaga

SEQ ID NO: 294915 - DNA, 403 bp, Zea mays
attttgagcccatcttagaaagcgtttgagagttttttgggtttcagatttatcctgcaaaaagaatacccaagagaagcgggaatagtcatcaacaataacaagaccatacttacttcccccgatgctaagataagcaacggacccgaagaaatccatatcgagaagctccaatggtcttgatgtcgtcatcacgatcttgcttggatgacttggtcccacctatttccctactagacacgttgtacaaggtctgtctttctcaaaacagacatcggttagtcctaacacatgtcctctctttacaagcttaggaaggttcttcatcccaacatgtgctagacgacgatgctaaagccaacccatgttagtcttagcaattaaacatgcatctagatcggca

SEQ ID NO: 294916 - DNA, 420 bp, Zea mays
  unsure (1)..(420): unsure at all n locations
gttttcttttgtctcaaatgaaggtgcgatcgcattctgtggcatggtagcggtctcatgcagctgtcgtacgttcgcggagagtctcgcttctctgaccacagaccagtgtacagtatcttcatggccgaggtcgagagcatccggcacagaaggagaaacgcgggctatttcagctctaggatcgaggtggaggagctcttgccaaacccgtacagtcatccggcgtttacagcttccagtcagatggttgagaataatcacactgcacagaaactaacataaaggacagttgcccgattttgcagctaaccatttgcctgtggacagccatgcacgttgaaccaaggaccagccgtncagcccacacatctgtagctctgtacatccttagcgacacagctttcccttttcccttct

SEQ ID NO: 294917 - DNA, 393 bp, Zea mays
gcacggagaggtaagttcatgagacatcttgcagacgctgggacggcttctaaagctgttactgccaacaagggtgatgcctagacccacgccttgaaggttgccaaggctgtgtagtctggggcagcctagaagaagaccaacaatatccgcacgtctgtgacatttaaccgccccacagacgcctagatgaaggctagttaccccaagtacccacgaatcatcactaccgtatggaacaagctggatcagtaccaaattctcaagtacccacttaccacagattcagcgatgaagacgattgacgataacaacactctgatcttcattgttgacctcaaggcatacaagatgaagatcaaggctgacgtcaataagatgtatgacatccat

SEQ ID NO: 294918 - DNA, 363 bp, Zea mays
cttgcatgcctgcacgtctactctagatgatcccctcggtgaattccaattccacattttcaagaaataaagacgcaaaaatggtcagatatgaattggaattagttggtttcttaataaggctattcttgaacccaagggaattgaaaccggattccttgggggatttccatttcccattttcaagaaattagggagccaaaatggtcatatattaattgggattatttggtttctttattaggctcttcttaaacccaagagaattgatccggatttctctcggaatttccatttcacatatttaagaaatatggaagcaaaaatgttcatatatgaattttgaattattttgctgtctta

SEQ ID NO: 294919 - DNA, 393 bp, Zea mays
ccattgcctcgttgacgtattagcgccatagccctagacgcaagccgccatcgtcgaccagagaggaaaagagaggatccgccgccgacaagcacgtgaatcacggtcgctcaggcatccgtggggcattccagagctgcgccatggttcctgggagctccgtcagccatcaattccaccgtcggtatctctgtgcttgggcaattgctcgccgggtcgggcaatttgcagttgcgccgtgcctcaccgtggacgactgtcttgggggccaccatcacttcggtgaggccacgaggatctgaagaatcatcctggtacctggaatctcaagtcccaggtcaagaacaggtaccacaggatgaggcgcttggaggatgctgtgacgagttcgtg

SEQ ID NO: 294920 - DNA, 328 bp, Zea mays
cctcaccgttggctgaataaggccctttttgggggcgtaccagaagaatgggaaccaggagggtgctgggaatgactttctaccagcgagcgccggttatgaagccatacagcactctatggacctgtatgctacatacatcggtgagggcctgaggaggtaggattctgatggctaggaaaggtggggaggatgttgaccaaaaactggagacactttaccgcatggaacgagtgccgcgattatattatatgggcccgtatacacggataagtgagacctctatctaagaccgcgaaatcccctggagagtcagagtcggtagtag

SEQ ID NO: 294921 - DNA, 214 bp, Zea mays
attggaacatctcttgtggaagaagataaacttgaggttgcaacttcccttattgagaaggcaaaggcaaagggggtttctcttttgcttcccagtgatattgtagtagaatgtctttgtgccttctaaaatgtgtatgtcaacgtcctctttagggactcattctccacatatataacattgtcatgtgtgacatattgtgttttacttaaaa

SEQ ID NO: 294922 - DNA, 412 bp, Zea mays
gaatcgtgaagaaacatttgaatcgtgatccattaccacctctaattgtggggctaataaattcatatgaatataaataatgtgcacgatgtgactcaagtaccctttgagcacactcaactccgaacctctgcaaccacaccgttgatttgttagagagtgatttgagcacgttcttgagctatgactgtgtcgttttgattcgtgagctctctcttactccagatttgagcacgttcttgtgtgtgttttctactcccctccttactccaaatttggttgtaatcatttgtgtaaggtgggagagacttcaatttgttgagatttctcacaacaggatattgatataaggaagacatctgtggcactcaagtttgatatttggatcacttgagaggggttgagtgcaacc

SEQ ID NO: 294923 - DNA, 325 bp, Zea mays
cgatgtcctggcgattccagcttctgccgataattttgaggctgcgttaagtggtgaggcaaatgtgatacataagcaatggagtacattaagtatcaaaacaattgaggctcttgtatgtacccgagattgggtaaatagaatggtaagctcttcactttggttgttatgttgattttcttgtttcagttttgtaaggaagcattgcttttttggtttgtcttagttagcatcttaattgttaactaggttagtacccatgcgttgcaacgggaacatataataccatgataacttatatacaaaatgtgtcttatattgttat

SEQ ID NO: 294924 - DNA, 345 bp, Zea mays
cgaagctcttcattgagctggaatcgaccacaattgacctagttgattggcatccttccgagctgacggcacttccctagaccctcaacggagcctccattgtcaggatctacaaggcaactacggccggtgacctcatcggggagctttcatgaggtacggaggttgctgatctgattactaagcttcatgagattaaaaagtgttccggcagaggaattattgctacagggccagcgcctgctggatctcgctacgacttcttcacgcgtttttactgcccaaagtctgcaatagatgaagatcctcgttgtggcaatgcgcattggagtttatcaccgtact

SEQ ID NO: 294925 - DNA, 346 bp, Zea mays
atttaggttgaagtactaaaagaagatttgtacagaacgtaattcccaattagggcttgttcggttattttcaatccatatggattgaaagggattgatacggattgacaggtctatggtgtccaagcttgctgacgtgtcttacggtaccccttttgctggggaggttcatgttggtgttggtgttgtgtggcacaatggctgccagatactgtaattgttatggctgaacgaactgatgaaacaatgctggatttttcatgagcggagcttaaaaaaaaaaagtaaaaataaaatataatgtaaaaaaaaaaaataaaaagaaatgaaaaataaaatccgaaaa

SEQ ID NO: 294926 - DNA, 327 bp, Zea mays
gacgaaaattaatgctcgacacataagacaaccgcagacgggtatatctgagaaggacatggggaagaaggccaccatctaatggtctaccccacgggcctgcaatttgctgttctacgaatacaccgtcagctgatgcaaaagacttaggcaaatggccgcgttggtacctctgcagccgtctactctgccgtcattctgcagtacttgactgccaaggatctggaactggctgtgaacgctagcttggatctgaacgtgaagcgtatcacccgtcgccacctacagtttgccattctcggagacaatgagcttgacactcttatt

SEQ ID NO: 294927 - DNA, 332 bp, Zea mays
ctctactccacactctcgatctctaagggcagcaacatgagtctagctgacatggactcatagcgcagtcttgattccggctataagtgcgaaccaaaggcgcgtgacgatcgcaatgcctgcgggcctaggaagaagtcattgacgaggtccgtcgaggccgagctgcagatatctgaatggcgaatatgtcggtacctgttaaacgtatggtacacgcagcgcgtatgcaatggcgcttccgtctacctggccgacgtcctatagtacctggccgacgaggtgctggtgctgatctgtgactctgacatagacgacatgatgacccgcat

SEQ ID NO: 294928 - DNA, 338 bp, Zea mays
tggaatctggatttcccctctatctgatggaatctggatttggtgccagtctgttttcctgtgattttgggataccagccccattccccttcatggagggtatgcgttgctgttggtcggcacactggaatggaacagatatagacagaaccttcaggttcataagcaaggagttgcgcttgaccgatctatggatctctctagatgcactgactaaggtgaattgaaagcggaactagacatgatgtttgaattcgagggtgaattagtatctgcaaaccaaaactggcagattgtttataccgacaacgagggtgatatgatgcttgtgggagatg

SEQ ID NO: 294929 - DNA, 258 bp, Zea mays
agcacctacggccaggtcctcgagtccaagatcatccgggatcgggaggcgcagaggtcccgcggcttcagctacgccaccttctacaccaaggaagcgatgcggaacgccatcaagggcatgaacgggcaggagctaagacggccgcaacatacaccgacaacgaggcccagtcccatgtacaccgcggaaaccgcggcggtggccgagacccggatgtccgataaagcaccggctaccgcgagccgcaggctcccc

SEQ ID NO: 294930 - DNA, 251 bp, Zea mays
gccctctccgccgcatactcaaaccctagtccgaacctgacgctgattgacgggaggggagaagcgtccggcgaccacgctcggcgcccgatggcggagaacggcgaggagaagctgctcgccacggtgcagcacatcgtccagacccttggccgcaccgacaccatgacggaggatatactcaaggtcttctccaactatgacggccgcctctcgcttgacaagctatacgccacgcgcgccgctgctgc

SEQ ID NO: 294931 - DNA, 409 bp, Zea mays
gtgttcaccagatacatgtgtatagtgacgcactaaccagttcaactaaaagcttaagtgatggaagaggtagtcaattcacttatacacattaacaccctactcacgtgcagccagagagaaatacacaaacatggaaataaatgggtggaggcacaaataaagcctctatcaggattcaaactcgagacatctgtctttgatatcatgttagagtggacatactaaacagttcaacccaaaagtttaagcctttagaagaggatagacaatcgagttatacacttcaacacccccactcacgtgcaaccgagagaaaggcgcaaaagtagaaataaatgggtgaaggcataaataaagcatctatcaggattcgaactcgagacctctgactttgataccatgttag

SEQ ID NO: 294932 - DNA, 359 bp, Zea mays
cttcgccgaaaccctaaccctagtcgccccgcggccacgcttcccggcgacgccatgtcgaacccgaagggctccaagatgctccagttcatcaactaccgcatgcgggtgacgatccaggacgggcgccaacttgtgggcaagttcatggcgttcgaccgccacatgaacctcgtcctcggcgattgcgaggagtttcgccgcctcccgccctccaagtcctccaagactaccggtgaacgcgaggagcgccgcacgctcggcctcctcctcctccgcggcgaggaggtagtatccatgaccgtcgagggcccaccaccgcccgacgagtcccgcgccaaggccgcggcggcgggcgg

SEQ ID NO: 294933 - DNA, 336 bp, Zea mays
aattaaaaaaaaaatataccggaaaagtgctatcttcgactaaagtattcctctacccattaattcattcctgacccctacctgaatgcgatccaaatttccctatagatagccatttcacattttgaagaaataatgaggataaaatgttcatttatgaatttgaattatatgtccacttattatgcctattactgaaaccaaatgaaatgatatcgtaattcctaggggaatttcaattccacattatcaagaaataaggaggcaaaaatgttcatatattaattggtattatttgttttcttatttaagcctattcttaagccaaaagaaatt

SEQ ID NO: 294934 - DNA, 322 bp, Zea mays
cataacctctcgagctccagtattacatcaactagaagggtgacaaggtctacaccaccaagaaggagtcgcctcttggggtgccgacacaatctgctcacccagctcgcttctcaccagatgacaagtactctcgccagcgttacctgttgaagaggagatttggacttctgacaacgcaaaatccagcgctgcactactgaagcttatactttccatcctgggatgcgcatgaagggtcactgctagatgcttgttggacggactgtacagttggcatatctcgactgttatcgcacacttcttttcactacgactaata

SEQ ID NO: 294935 - DNA, 418 bp, Zea mays
gcgacgaaatcttcagactgctagatggcggtgcgcagatctacttctgtggtttgaaggggatgatgccggggatccaggacacgctcaagaaggtggctgagcaaagaggcgagagctgggaccagaagctgtcacagctgaaaaagaacaagcagtggcacgtcgaggtttactaggctataagatggcaaggattgtgattgtttagctactgagctgagaaactggacgtatgattgaacgactgtggctgctgcgatgtaatgtaacattgtagacttggattcataagcttctgctccaaatggtgaataaaatgaagcacgcggtttgtagctgctaaaaaaaaatattaatattaattatcctaaagaatttaatataaacttattattatttatattttctttaaatt

SEQ ID NO: 294936 - DNA, 365 bp, Zea mays
ctgcacgccgactctagcagatcccctcggtgaataccaattccacattttcaagacataatgaggcgaaaatgttcatgtatgaattggaattatttgatttcttattacgcctatcctgaagcccaaggacatgagatcgggattcctcggggaattccagttccacattttcaagaaatatggaggctgaaatgttcatatatgaattggaatcatatggtttcttattaggcctatcctgaagccaaaggaaatgagaacggaatttctcggggaattacaattccccattttcaagaaatacggcggcaaaaatgttcatatatgaattggaattatatggcgacttattaagcctattc

SEQ ID NO: 294937 - DNA, 410 bp, Zea mays
acactatagaagatctgcgatgcacgtatgactgtagacgataccctcggtgaattccaattccacattttcaagaaataaggaggcaaaaatgttcatgtatgaattggaattattggttttcttattaggcctatcctgaagccaaaggaaatgagatcggaattcctcggggaattccaattccacattttcaagaaataaggaggcaaaaatgttcatatatgaattggaattatttgatttcttattaggcctatcctgaagccaaaggaaatgagatcggaattcctcggggaattccaattccacattttcaagaaataacgaggcaaaaatgttcatatatgaattggaattatttgttttcttattaagcctatcctgaagccaaaggaaatgagatcgga

SEQ ID NO: 294938 - DNA, 394 bp, Zea mays
cctcggggaattccaattccacattttcaagaaataaggaggcaaaaatggtcatatatgaattggaattatttgttttcttattaggcctatcctgaagccaaaggaaatgagatcggaattcctcggggaattccaattccacattttcaagaaataagggggcaaaaatgttcatatatgaattggaattatttgttatcttattaggcctatcctgaagccaaaggaaatgagatcggaattcctcggggaattccaattccacattttcaagaaataaggaggcaaaaatgttcatatatgaattggaaatatatgttctcttattaggcctatcctgaagccaaaggaaatgagatcggaatttctcgagggtaccgagctcgaattt

SEQ ID NO: 294939 - DNA, 371 bp, Zea mays
tggctttccagtgtgtttatagaacttgccagtatggtttgggcacactgtaaaccggtcaagtgtagggctagacgaaatgctcgtgacttgatgactcactcgattcatggtcagtccggctcggctcaaattagctcgtttaaattttttcacgaactgagctaacatcatagctcggttcgttaacgagctagctcgattcgttaacgagccaactcgcgagctaccatattccagcaaaacgaaactatatgcatatcatttatagaataattgatgaacatattatttgtatgtgaggtgtctatgacctatgagttaaactaatgattaatgaactatatctatgtgttaaattggtttatgtg

SEQ ID NO: 294940 - DNA, 386 bp, Zea mays
gtgaactccagatttacaacaaatttagcagcagcaatggtgacattgactaggacatatttgatgtcttattcaggcctgatccttgatagccagcaggacaatgtggatcggaatatctaggtgaattccaacttcacacttgctaagagcaaagaagcagactgatcatatatgacattggaattatttgttttcttattaggcctatcctgaagccaaaggaaatgagatcggaattcctcggggaattccaattccacattttcaagaaataaggaggcacaaatgttcatatattaattgcaattatttgaattcttattaggcctatcctgaagccaaaggatatgagatcggaattccttgggagtaccgagctcgaa

SEQ ID NO: 294941 - DNA, 390 bp, Zea mays
agcttatgttcctatatgactactagctagaagttagagcctagatgatggctgcttctgttggcgtgaaagctcgagtgctcctaaatggtcgtcgtattagctgatacgacatcgaaccgatgcaatagataatattgtttacacgtattctcgccgagaagggagtagtagtattacctgatatctatgctaattcaggtggtgtggtcgttagctactttaattgagtgggttcagaacattcaaggtttcatgtgggccgaggagaaagtggacgacgaactataaaaggacatgagcagtgcttttcaacacatgaaggccatgtgcgaatctttggtgctgccgaagtgtgccgtgacattggaattgcgggtctagaaaaac

SEQ ID NO: 294942 - DNA, 381 bp, Zea mays
ctcgaataacgtatactaaatcatctctctgaaacctactatatgtcgtgtgcgcatataaaataatatatattttctatatcgtagagtcttcacggtgtgaaaccagaggagggcgagcgggagcaactaagctcttacttagattctatttggtttgagggactaaatattgatccctctattttagtctcatttagtccctaaattgctaaacggtgggactaaaacatagattacactgttttagtatctagtccctcaagggatgactaaaagagactaaaccatataaattctactttttgccctacctttatttcagttgtactagttaggagagaatgctaaagggtattttagtccttttatgatttaaaa

SEQ ID NO: 294943 - DNA, 422 bp, Zea mays
ggcattgtgtagtgtttgagaaaataaacagaaaatcgacccaactcatagtgtcatcctatcgatgagagtaagagtactgttgcttatattgtcaagattggtcaatggccatgctgttattcataccctatcaaatccttacatcttaataatgtccttcatgttcctcaagcccaaaagaatttagtctctgttcatcgttttcttctgacaataatacctcatttgagtatttccttgaccactttttaattaaagatctggtcacagggaaggtactacttcaaggtagatgtgaagatgggctctatcctttgcctatgtccagtcgatggtgagtagggatgaaaacgggtatccgaatggttaggacaaatttaatattttaaaatagatatgtatgaaatttgatgctaatt

SEQ ID NO: 294944 - DNA, 355 bp, Zea mays
cttcgatggccccagggcggcaagaagccgtcggctaataagcctgcagaggaagagcccgcgacagacaacgcggagaacgcttcggcgtagaagaagcccaatgccgagaagcgccttccggcgggcaagttcgtcgctaaggaaggcggcgagggcatgacggggacaaagaaagcgaataattccgtggtgacctacaagatctacatcttcaaagtgctgaagcaggtgcaccttgacatcggcatcttgaccaacgccatgtccatcatgaactccttcatcaacgacatcttcaagaagctcgcggtcgagtccggcaagctggctcgctataacaagaagcccaccg

SEQ ID NO: 294945 - DNA, 140 bp, Zea mays
acctctatgtccccaggaagtgctcggccggggacaggatcatcactgccaaggaccatgcctctgcccagatcaacattggccacttggatgcgaatggcctgtatgatggtcacttcacaacgtttgctctgtctggg

SEQ ID NO: 294946 - DNA, 347 bp, Zea mays
agcccgccctagctagctatcagctcttgaatctcatcggccgagttcttctgctagctatgtcctttttccttgtcagatttagaccttttgaatgcactagagctaaatagttagctagctaaaaattggtaatgaaattagcttactaataaatagctgacaagcagttagctagtcttagtggattgaatcagctaataactaatgtgtagttgaaggtgtagctaatagttagttggacgactatttgctagggtgttctgatgtctccaattaaaagtagctaataactaaactattagttaggttgtttcgatttctatagctaattttagcagctaact

SEQ ID NO: 294947 - DNA, 410 bp, Zea mays
gttgaggggcctaactttgagtttgctactgagacacacgaggaactactgtacgacaaggagaaattgctcgagaatggtgaccgctgggaaactgagattgctgagaacttgagatctgagagcctttatcgctgaatctgtctttcattgtggttgatatactgtgttctcccattttccatattttgctcaactacctgatgaataagtataaacgatatatcataacttatataccaggttccatgttattttacctcggcaccgtctgtctgttatgttcattaccttgctaaaagtggcaccgagttttctttaatgggaaagttccttctggactggagcactgagctggtttgagtcagacctttattttatataaaagattgtattatataaaaagggcg

SEQ ID NO: 294948 - DNA, 397 bp, Zea mays
  unsure (1)..(397): unsure at all n locations
tagaagacttgnacctcctgcactcgacattagactagaattccgatatatctcaattttctggtcactcaattacaggggcaccatgggtgaacttgaccagcgagacaattggaattgaggatcataagtctgtttcatcaatgaaaaaggggtcatatctggtcaacattgcccggggacgcctgctggactacaaggctgtgtttgatcacctggaatcgggccatctagctggtctggggattgatgttgcttggatggagccatttgatcctgaggaccctgttctgaaattcccaaacgtcattctaacgccccatgtggccggcgtcaccgagtattcctacagaactatggcaaagtctgttggtgacaccgncctttcacttcattt

SEQ ID NO: 294949 - DNA, 349 bp, Zea mays
cacagtcaaggccacgagtgctcgtcacctgcaatcaggaaattcgcgatgcgccggtttgcatgccgcgtttgccgttccattggcatcgaataccctatggctcccaatgccgagaagaagcccgcggagaaaaatcacgctggacgagaacgccaagacgaagtacagggcggacaagcgcgtgccgggctaggagggctgcgagatgaactggaagaactgggccatgaagagcgtacagacgtacaataccgacatctacaaggtgctcaagcatgtgcacccgggcataggtatctcgatcaaggccgtggccatcaataactggtttagcaacgacggcctc

SEQ ID NO: 294950 - DNA, 174 bp, Zea mays
cacacggtggtgtaatctgttactggtaaggtgcattgttgtatgaattgtttctcacccagaagaaccagaccatcggggattctagcatcatatatagtgttgaaaagatgagcaaagccgagtgcgtttttttaaaaaaaaaaataagaagacatacaacaaagtacatgg

SEQ ID NO: 294951 - DNA, 400 bp, Zea mays
gctgctgcctgcagtcgctctagagatcctcgggaatcattcactttcagaatacgagccaatggcaattgaatggaatattgtttcctataggcctatcctgaagccaaaggaaatgagatcggaattcctcggggaattccaattccacattttccagaaataaggaggcaaaaatgttcatatatgaattgggaatatttgttttcttattaagcctatcctgaagccaaaggaaatgagaaccgaatatcctcggggaagtccaaatccacattttcaagaaataaggaggcaaaaatgttcatatatgaattggaattatttggtgtcttattaggcctatcctgaagcccaaggaaatgagatcggaattcctccggggtaccgaactcgaatt

SEQ ID NO: 294952 - DNA, 327 bp, Zea mays
cgaggcggcatatgtgcatatatgaacgggaattatttgtcttcttattacgcctatcctgaagccaaatgaaatgagatcggaattgctcgcgcaattccaattccacattttcaagaaataacgaggcataattgttcatatatgaattggaattattcgtattcttattatgactatcctgaagccaaaggaaatgagatcggaattcctcggggaattccaattccacattttcaagaaataaggaggcaaaaatgttcatatatgaattggaattatttgatttcttattacgcctatcctgaagccaaaggaaatgagatc

SEQ ID NO: 294953 - DNA, 222 bp, Zea mays
ggtctcgtgtgtctgctgcaatggctggctggcccagtcgctgctcgatttatcggcgtcgtcgcggtgtatccgcgttagaaccttttggtggtgaacaatattatcgtgggacgcgttttaagtaatacgggattctggatcggtttaaaataggaagtggaaccaaaactgtctgtaatgccggtactaccaaagttgcctagacactttgaacgatca

SEQ ID NO: 294954 - DNA, 312 bp, Zea mays
caaatcgaagcatgcgtcttgatgatggcgatcgattcaccctggaaatttggggaaatacactgtgtagcgcattgtgcattaaaaaaaaaaaaaaaaaaaaaaaaaaaaaaaaaaaaaaaaaaaaaaaaaaaaaaaaaaaagaaataaagaagaaaaaaaagaagcatatatgaatcgaaattatttgaattcttattaagcctatcctgaaagcaaaggaaatgagatcggaatttcttatggaatgtcaatttcaaagtttgaagaaataagggggtaaaaattttcatatattaattggaattattt

SEQ ID NO: 294955 - DNA, 385 bp, Zea mays
gtcccccgacatggtgtccgtgctcctcgaccaccacgccgaccccagcgcccggacgctggacggcgtcaccccgctcgacgtgctccgcggcctcacctccgagttcctcttcaggggcgccgtgccggggctcacgcacatcgagcccaacaagctgaggctctgccttgagctcgtgcagtccgcggtgatggtgaccacgcgcgacgacgacgccggggcagggggaggaggaagcgatgccgccgacgacagcttggtgagcctcaccatgaactccacgctcatgtaccagggccaggagatagcgggggcgatggccggcgaggccaggaaagggagcggcggcggccgagggagcccgtccaacttgtactttccc

SEQ ID NO: 294956 - DNA, 381 bp, Zea mays
ggtggatgggctaatcacagatttccctgctacggctcgaaggtacaaggtgaacagctgcatgaacatggggaacagcacaccgaatttcatggcccctgctcgtccgggtgatctcatgcaaagcatcagcaagagcgcgcagccaccagctttggctcccgttccacccttgactggttccgacgtggcggagccgcctttacctcctgcgagatcgaacagcagcacagctccgacgcaatcactcgcgagcaggacgcgtgcttgcgctgctcacatcccagccctggcctcactggcaatgctttgcgcctggctttccctggtatgagcttgcagtgcaggccgtcctagctccgtcgctcgactgctcgagct

SEQ ID NO: 294957 - DNA, 266 bp, Zea mays
cctcggtgaattccaattccacattttcaagaaataaggaggcaaaaatgttcatatatgaattggaattatttgttttcttattaagcctatcctgaagccaaaggaaatgagatcggaattcctcggggaattccaattccacattttcaaggaattagggagccaaaatggtcatattttaattggaattatttggtttcctaataaggctattcttgaacccaagggaattagatccgaatttcttggggaatttcaatttc

SEQ ID NO: 294958 - DNA, 346 bp, Zea mays
caaggacatggtcgcactctccggcgcgcacaccatcgggaaagcgcggtgcacttcgttcagtgcgcgccttgccggcgccggcggcgtctcggaaggcggctcgggcgccttcaaggacctgaccttcttgcagtcgctgcagcagctgtgcacggggtcgtctgggtccgctctggcacacctggacctcgccaccccggcgaccttcgacaaccagtactacatcaacctgctctctggcgacggtctgctgccgtcagaccaggcactggcgtcgtcggctgccgtgcctggggtagaggctgacgtcgtcagcctcgtcggcacctacgccttcgacgcc

SEQ ID NO: 294959 - DNA, 414 bp, Zea mays
  unsure (1)..(414): unsure at all n locations
catgagcttaatgactcaaggaatgaattagcttcgatggatgataaccgaagaaaaatttctgaaagtatgtcccttgcggacaatgaagtggtggatgtccgagagatgatcaagagttttgataaagaaataaaagtctcaactaaagggataaatgataccaaggcgcaaaaggaaggtgttgagaagaggcgtactgaagctctgaaggtagttgctaagattgaacttgatttgagagatataaaagataggattgtgaatgagaagcgagcaaaggatgaggcagcgagggatttgcagagtgtgaggagagagagtgaaaagtctgaagcttgccaaattccaggaagaggaagagttttacgatttgtaagttccaaaaaaaataattntttttatatttttaaa

SEQ ID NO: 294960 - DNA, 377 bp, Zea mays
  unsure (1)..(377): unsure at all n locations
cctcggggaattccaattccacattttcaagaaataaggaggcaaaaatgttcatatatgaattggaattatttgttttcttattaggcctatcctgaagccaaaggaaatgagatcggaattcctcggggaattccaattccacattttcaagaaataaggaggcaaaaatgttcatatatgaattggaattatttgttttcttattaggcctatcctgaagccaaaggaaatgagatcggaattcctcggngaattccaattccacattttcaagaaataaggaagcaaaaatggtcatatatgaattggaattaattggtttcctaataaggccaatcttgaagccaagggaattgaaatcggatttcttgggg

SEQ ID NO: 294961 - DNA, 219 bp, Zea mays
aagtcaccaccctgaatcatgaaatctttgatcactctatggaattggcagccctgataaccttgtggcaaagcattttttctatgctccccagtgcagaactgccggaagttctccgcggtcttgggggcgatgtcggcgaagagctccatcttgatgcggccggcggcgatggacccgatggtcacgtcgaagaacaccacggggttcttcgggttc

SEQ ID NO: 294962 - DNA, 340 bp, Zea mays
attcccggatcgacccgcgcgtacgcagacgcgtgggcttgagaggaatatacatatgcactggaatcaagcagttcatggtctcgctgcgaatgtacgcaagaggtggctggacatggacagtgaactatttgaagagtgccagcagcagtatatggataaacaagcaaaagccaaagagatgcatgagcaacgagaatcatcatggagacaattggaagctgttgttgctgccaaggctgctggggatgacatggttttggtcaactagatccatgttccttgcatcactgaaaaacatgtgtgccaagtttgaacacatattttgcccctacagcca

SEQ ID NO: 294963 - DNA, 423 bp, Zea mays
  unsure (1)..(423): unsure at all n locations
ctctgtcgtgcttctgggaagggagacgagttctctacagcttcttgcgcctctactgctgacgggagggaagggagtagatctggtgatctgcggcaacgtagttctcaacagtttaaatccgcgagagtagagatgacaatgacccgcgtgtagatggttttcaaacccgtacaagcggatttaatactaaatccatccgtacacattatccattgtgataaagatgcacaacattttcatagtgtaaaaattttatattagtcgtgttcatagtcaaaagtgacttangacactcacacgattaatttatggaactaaacttaatctgtcatatgcatcgtattttgggtgttattattaattgtgatctcttacttaatngtgttggtatctacttatacttagtaactggtnataaaa

SEQ ID NO: 294964 - DNA, 249 bp, Zea mays
gaggccaccgtataccgaggcccacacccgcatgagtcctcagcagcacggcgcgtgactgtgaccacactccgtgggaagcaccgccgcggtgagcccatcaccgtcgtcaccgtctactactaccccttggcagtccacgtccactccgtcggcatcgacttctgcctcgtctgagactccgtcgtcatgttcgtccactgtcacgacaccactcttcccatcacgcttgacatcatgctccagcac

SEQ ID NO: 294965 - DNA, 418 bp, Zea mays
gaattcccgggccgaccgcacacgtacgggaggtaagaaagttgagttagatgatgtacctgtcgagggacctgttctaaagtgggaagcactgattgtataggttgctagtccaaatgcatatcatcccaaaaacagaaaagtcaagctcaatgtgactgtgaacgaattgggactttcactacatgctttccgtcagttgcgtcaagttgttagaaagaggtataattctcctaaagatgatctcacaatcatcagtgaactgttttaacaccgggaatacaacataaaatactcgtttaagacactctctactctaatataatacccaatgaaagctgacaaacttgatcaacattccattaattcttatgataaatgaagacttaacgctaatccacaatttatggaactattt

SEQ ID NO: 294966 - DNA, 364 bp, Zea mays
cccgggtcgacccgcgcgtacgctccccttcccctgcttctcaagcactctctctgcctttccccagccacccccgtagcgagagggagggcggaagaggatgagcgcgtgcagcttcataaagtgcgtcacggtctgggacggcgccgtccgcaagacctgcatgctcatctcctacacctccaacaccttccccaccgactatgttccgacagtgtttgataacttcactgccaacgttgtcgttgatggtaacactgtcaacctcggcctctgggacactgcaggtcacgaggattacaacagactgagaccactgatctatcgtggagctgactgttttcttctggctttctcactgatc

SEQ ID NO: 294967 - DNA, 255 bp, Zea mays
tcggtcctgtattccctggtcgacccactcgtccgatatgggtgtgcccgcagcatcatcgttgctgaaagggttgtgctaaatttcatgcagctgatgagtggcatttctaccctaacagatgctatgtctgatgctgtccgtccagcatgcatattggaaacaaggataactgcttcaggtttacgtctgattgacatgtggtcagtactgattgttggctgaaagaaccacatgcttggtacattacgatat

SEQ ID NO: 294968 - DNA, 505 bp, Zea mays
ccggaattcccgggtcgacgccacgcgtccggcgcttgtgaaccgcaggcctcgggcgccgctccgtccagacaccagtccactcccacggacgggcccgtggcgtgaaagcgctggcgcctgccagtcgggcaagccaaggccgccactcgtagggccctcttctctgcgcttgctctgctggagcgcgccgccgaatagcacaatgccagcggcagcctctcatccgagccccacagggccacttgtcgctcgcccgcccgcgtcgtcgtctccgccggccggccggccggcctcccaaaccctagcgaggcgagcgagagagaaactagacgccatgttcgggtacaggaaggcggacccggacctcgaggccggcgggtcctcgctgctgtacccggggatgacggagagccccgaactgcggtgggcgttcgtccgcaagatctacgtcatcctcacggtccagctcgccatgacggcagccgtctcggccttcgtcgtc

SEQ ID NO: 294969 - DNA, 322 bp, Zea mays
ggatcaggatgtccgacttcatccccgtctcatcgttcaccagaccgccgctccggtgcaccgtgtagaccagctcgtgcttgccgggcgcggcgtcgatgtagaccgtgcagttctcgtcgatctcctcctggatcagcatcttcgacagctgcgtcaccaccctcttctcgatccacctactgattggccgcgcgccgtacacctgttgctgaagccacacaagatagaaagttcgcatcatcaggtgtcaccgaccaattcagatggatctaatcatggatggtcacataccggatcgtatgagagagacatgatgatg

SEQ ID NO: 294970 - DNA, 412 bp, Zea mays
ggcctcacgggcacgacagatgaagtaagacaagttgcacgtgcttatcgagtttactatatggggacagaggaggagggttctgactaccttgttgatcactcaattgtcatgtacctgatggacccagagatgaagtttgtcaagttttatggcaagaactacgacacagattcccttgctgacggtatcgttaaagaaattaaagagcacaagtaaacagtagttggaatgccactttgcaacgtcagccttgtttctgaatttctcccgagagttttgttaaatcaagcaaaaaccaaatggcacacgagatcatgtggcaatagctgatgacatttgaatctcgcggcggcttttatttcagcagattcgggtgcacatgttgcgggtttgtgcacgtttttgtcac

SEQ ID NO: 294971 - DNA, 237 bp, Zea mays
cggacgcgtgggcggacgcgtgggcggacgcgtgggccggcaaattggccggaccccagacggcaagcgagctagtttttgtagatctgctatggtgtgctttattccgttagtcgatatatgttgcattgtttctagtttcgaagtccatttatttacttctctatgatttctacacacggcctaataatcttgctaaggccctgattgaatggaaaatattttttgggagttttt

SEQ ID NO: 294972 - DNA, 403 bp, Zea mays
tcgccaagctgaacaacagccagctcgcgaaaataatgaagagccgcagcatggcatcatcggccgggctcttgttgctagccctcgcgctagtgtcggacaccgccccacatgtagcggacgcaaagaagaagagagcggccgacagcgtctagacctctgaagctaatactaacaggtatactacagctcgatgtgcagctggtatatacgtcatgcgtgctaaaatgagcgttatgttattcatcttattctcaaggtggtactccacctgttacagaattagaatgattctcgcttcttgagaagtcaaagttaatataaaacataattagttacactaggtgaatattcgaatgtattttcataattaagttatttggagatataaatgttgataata

SEQ ID NO: 294973 - DNA, 260 bp, Zea mays
agtatttgtgggcgggctcgacccagatgtcagtgaagaggaccttaggcaggccttctgcgagtacggagaaatttctaccgtaaagattccagttgggaaacagtgcggcttcgtgcagtttgctcagaggaagaacgcggaagacgcgttgcaagggttgaacggcagcactattggcaaacaggccgtgcgtctctcatggggtcgcaacccagcaaactagccgtttaagggcgacaatggcaacatgcaatgga

SEQ ID NO: 294974 - DNA, 192 bp, Zea mays
gtttcgtctccaccgaggccgagacgaaggcgaggaacttgcctttgggcgcgacgttgtaggcgtaggagcatcagaacacgtacatgtcggatatgtgctatagatgtttactggggaggatgatctgcaccgagtgctagtccttgacagacgggatagagatgcttcatgatgcatattacgcgggcc

SEQ ID NO: 294975 - DNA, 278 bp, Zea mays
tgcgcttctcgacatgtccaccgacgacctcttccagctctttcccgcgcgcgcctacacaaggttccggaaacatctgaaaagggagcccattgcactcatcaacaaacttcgccaagcgcaaaatgatcctcctcctggtcaaaaacctgagccagtcaagacacatcttcctaacatgatcattgtccccgaaaagaatggaagcatttgtggggtctacaacagccatacccatcaccacgtttagatcaaacctgacatgatacgtcactacc

SEQ ID NO: 294976 - DNA, 302 bp, Zea mays
cggaattcccgggtcgaccgacgcgtccgatcacgacaagatggcatgcacaaacaatgcgatgagagccttgttcctcctggtcctcttgggcatggtgcatggtgagaaggaagagtcaaagggcatcgatgcgaaagcgttcggtcctggtaggtccttcgacatcaccaagctgtgcgcctccggcaatggcaatgacagacagcactaatgctgtgcaagatgcttgggcattggcatgcggacgtactgcgaaacagacaatgctcatacccaagggcgaattacttgtcggacaa

SEQ ID NO: 294977 - DNA, 230 bp, Zea mays
ttgagagctcttatttattagctttgattgcaattaaccaatatgaccatagccctgttaaggtttgctgtactaaaaaataaaacaaaaaaaaaaaaaaaaaaaaaaaaaaaaaaaaaaaaaaaaaagggcagacgttataaaggatccaaccttacctactcgacaatgcaacatcatagctttcctatagtgttacctaaattcaattcacattcacgatgttttac

SEQ ID NO: 294978 - DNA, 440 bp, Zea mays
ctctccgtctctatttgtaatctgatagctgacatgatcatatcaatgtatcatgcactgctgtgtcgggttgctaagactgcggtgctggcgttcttgctgagctgcgcatggtgcggtcctaccaaagtacccccaagcaagaacatcactgccacctatggcaaggactggctggacgctaaaccgacatggtatggcaagccgacaggtgccggtccctactacaacggttgtggctgctgctacaaggacgttaacaagccccccttcaatagcatggtctcatgccgtaacatccccatcttcaaggatggtctgcgatgtgggtcctgcttctagatcaagtgcgataagcctgttcagtgctccggcaagcccgtgttggtgcacatcacggacatgaactatgaacctatcgcggcgtaccacttcgattt

SEQ ID NO: 294979 - DNA, 467 bp, Zea mays
  unsure (1)..(467): unsure at all n locations
gaattccccgggcgagcgcacgcgtccgggatccccatggatccatgagagaaaggttgaggagatcaggcgacgtacgctcgtggcggtctgcttctgaacgctgtcaggtgaaccgacccgtgctcccatgggcgcgccgcgcgcaatggcccgacgacggcgccccctaccgtcgccgctgctcgtctggctggccggcctgttctctgcggtggcgcccggtgtctccaagaccgacaagtctcacgctgctgcgctcaatgtgatgttcaatagcgtgaacaagccatcgcaattgtccggttggaaatccagcggcggtgatccctgcgatgacgatgacgagtggaaagggatagagtgcagcggctcatctgtcacataaattaactngtcagggcttgaactacagggctcgctaagacatcagctatcaagcttgaaatcagtgaccaaatttgatc

SEQ ID NO: 294980 - DNA, 214 bp, Zea mays
ccggtcctgaattaccgggtcaacgcacgcgtaccccaaataacttaattatgatgaccgctcacgtttttggccacacccctgatagaccgttgaggccctttcacgttcgagtggaggttcttaataatgcactctcgttccaaactgaaacaacactaaaccctatctggatctatacttttgatacataaagtattctgcacctatacca

SEQ ID NO: 294981 - DNA, 420 bp, Zea mays
atccgctccatcaaccggagcgtgctgcagtacgcgccctgctccgtcgccatcctcgtggaccacggcctcgcgtccgggtcggcgtgcgccaccgccgccaacagcctgctccagcgggcggcgctctacttcctgggtggcgccgacgaccgcgaggcgctggcgtacgcggcgcggatgccggagaccgggaccatgtcgctgacggtggtgcggttcaagctccggaactgggtcgggatgggcgggcgcgacgaggcgagggacgaggagctgctgcaggagttctggagcaggcacagggacaacgagcgggtggtgtacgtggagaagacggtggaggacgcggagggcacggcgtccgtggtgcgcgccatgagcgagaagttcgacctgctcatcgtgggtcggcgcggc

SEQ ID NO: 294982 - DNA, 407 bp, Zea mays
gctgatgcagtttggtctcgctttatacagctaaccaaacaaaggctgtcttttagtcaacgcatgtgttgagactggatagatgtgcgcacgataccaatcagaaggataatgtatacaatgggttgtttcaggacagtggcgcttacctggagcaccgtctggccggcgtcgacagggtgcagatcaagggcctcaacgcgggcacgctggacctgacgaataacggctggggccacatcgtcggcctcgtcggcgagcagaagcagatctacaccgataagggcatgggcagcgtcacatggaagccagccgtgaacgacaggccgctcacctggtacaagaggcacttcgacatgccgtcgggagaggacccgatcgtgctggatatgagcacaaatgggcaa

SEQ ID NO: 294983 - DNA, 427 bp, Zea mays
gttgctgctgattggagtatatgtcgatgatctggtaattactgggtcaaacaagagaatagttgatgctttcaagaaggagatgatgagaagcttcagtatgagtgacttaggactattgagttactatctgggtattcaggtggaacagaagtgtggagtgactacattatgccagagctcatatactctgaaaatactcgagcaggcaggcatgaaaggctgcaatgcttgcagtgtaccgatggagaacagactaaaattgagcaagaaagatgagtcaccgcctgttgacaagacaaaatacagaagcattattggaagcctgaggtatctagtgaacacaaggccggatatagcctttgctgttgggattgttagcagattcatggaagatccaagagcaaaacactgggcagcagtcaag

SEQ ID NO: 294984 - DNA, 348 bp, Zea mays
tctacctgtactcgctgtccgtcctggagcaccagatcgtggggaccctcgttccagtgcttaaggacgtggtgatgaatatctcgcgcgtgcagaagctgacccccgccgtgcagtgctcgcttttcaaggccttcgtcgatgtcggcgacaggtactgacacctatcgctcggcgtcaagtgctccaatgaggtcatcaccgacattcgaggcgccatcatgctgcccaagctgtcgagagtgcccagtacggatgcgctactggggaaacttgatcggacatccggacactgtgctctgcaaggtcactcggcaaatgctggtccaacatcgtgcgcattgtgcc

SEQ ID NO: 294985 - DNA, 463 bp, Zea mays
cccacgcgtccgaccgcgagtatgccgcaccctcccgctctcgctactaggccacgccgtccacccccttgacctccgcctcgcacaccaagtgaagcacgcgccaccacattcatccgttcgcgtgatggattcggaggcacatcgcacgcatggagatctggggcaatccactgtcagtttgatgctccggcatgtgcttcctccaataagatttgaaggtcagatgctagtggatcagcccgatggcaatcgaattgcccttgcttgagttgtgatgagcatttggaaatgctgctcttgcaaggacgttgaccatgaacacaaggaaaatatgttttttttctttgcttattaatctgcagattctagggcgccatgtttatttctttgcttctatctttgtttagtcagctaggaattacaatcgggccaggaaaacaattagacaagtcccacggtc

SEQ ID NO: 294986 - DNA, 453 bp, Zea mays
ggaacagagaggatgcctccaccatcgattgaagacttcgtcgtcgattctacctctgcacggggacatggaacgccaccgggagtacctgtgcatgggcgaagatgttccaggcaagaagatcctcggtggcatgtcaattgctcaccggagttgggcgggtatgataggtctgcaccgttgcgtggccgacccttgcaccgttgtcgtcatctgggtactacaggataaggcatatgaaggatgtcgcgatgagttcatgagaagtctagaccgccgtctcccagtcaactatggttgctggatcgttgtctatgcatgatgtaattatttagttattttgtacagaactcctattatgtagtaaagacattcgtttctattccatgagtcatcatatgtgtgagacttgatcctagcacacatttgattcgcgcccgggtttgtccctta

SEQ ID NO: 294987 - DNA, 330 bp, Zea mays
gacgacgcggaggcggagcgtccggcggcttcgcgtacctctccgcggcgtcccccgcctacgacgctgcgtgccgccgcatcggcaggtacgccggcgcggcggtgctgtccgtcgactaccgccgctcgcccgagcaccggttccccgccgcctacgacgacggcttcgcggcgctccgcttcctcgacggcgggcccgggcccgaccccgaccccggcgcgatcgcgggcgccccgccgatcgacgccgcgcgctgcttcctcgcgggggacagcgccggcggtaacatcgcgcaccacgtcgtccgccgctacgcgctggaccctt

SEQ ID NO: 294988 - DNA, 275 bp, Zea mays
gccggagcttggctatacacctgatgttttcttctacaatgctcttatcaaggggctctgcgtcgagaaaaagagtcaagaggctcttgagctgctgcttaatataacggccgatgccggttccaactgtcttcccaatgtggtgtcgattagcacaatcattgatggcttctttaaagaaggtgaagtcgacaaagcttacttcctgtttgatgaaatgattggccaggggtttccacctgatgttgtgacatacagctcactcattgatggcc

SEQ ID NO: 294989 - DNA, 373 bp, Zea mays
ataaataaaatcccatatacatatggcacagttctttcagctctttgatgcgcgcatgcttgctaccagacatctttcctaaaaaaaatttcaataatacccatttcaaattattgtagctgataccattcatcacctgtgactggcagcataaatgctaccaccctcatgactcgtaccgcgcacgcaacaatcaaaaacacaaactatctatgctacatcgtgaagacaactcttgaccaccttctcttatataaagacagaaaggcttgcagcttatactatgaagtcagatgcacggaaaaacctgactgctcaggcaatccattcacggagtacataactgacatgaactacgagcctatcaatccct

SEQ ID NO: 294990 - DNA, 246 bp, Zea mays
ggcatcctgacggcgaacatgaccaactacctggcgtccaaggtctcgggcggctggggctggcgcacccccgtgacgttcggcgccatcccggccgccgtcatcgcgctgggcgcgctcgccatcccggacaccccggcgtcgttcgtcaagcgcggggacacggccacggcgcgcaagacgctgtcccagatccggggcgtcggcaacttgcgcaaggagttcgacaacctggccgccgagagc

SEQ ID NO: 294991 - DNA, 336 bp, Zea mays
ttcccgggtcgacccacgcgtacgatcgatcgtcacagccaacatcacccgccgaggttacgcgacagtcgacaggaggaaggaataagctcagtgacagacagcgaagggtgagaagcgtactgctctcgtgaccagagcactgcaccgacagacagagctcgttaatctctgacgacgaccagtggattaatacgcatggcagctatggccacttagcaggtcgttgtaacgcccgacggactgggcgtacatgacgcatccacgtttcgacgtggcgcctcacagggcctgaagggggtccaggcatatgtgacggttgacactcttattatg

SEQ ID NO: 294992 - DNA, 450 bp, Zea mays
  unsure (1)..(450): unsure at all n locations
agatcgtaggcggcgagcgcaccgccaccggaggggatggcgcggagacggggcggccccgcgccggcgacagcggtcgcctcgccggccgtgctcggcactgtggccgtcatggtgttcgtgtactactccacggtgttcgtcttcctcgatcactgggtcggcctcgccacgccgatcggcgccgcccacgccgccgccgtctcgctcgccgtcgccgcgtgcttcctcgccttcgtctgcgccgcgggcgccgacccgggcgccgtcccacccgccttcgcccccgacgccgaagccgcgcagggacaggggttgaaatcaaggtattgtgataaatgttgcatgttcaagccttctcgtacccaccactgcaaggtctgcagaaggtgtgttctgaaaatggatcatcactgtgtctggatcaacaactgtgtangatacgcgaac

SEQ ID NO: 294993 - DNA, 453 bp, Zea mays
cgctgttgcagtggccaagtaacgaatcactgtctcgttctcaatgggacacagtttcttttcgatgcacaggataacatctcgctcgatgttacagctctgccgtgaagggaggcacctcgatcgctggcgtatgtgacatcattgctgtcgcatctgggaaaggcggcgtaggcaagtccaccactgcagttaacattgctgtagcacttgcaaaggagtttaagcttcaggttggtttgctagatgctgacatctatggaccatccattcccacaatgatgaatctccatgccaagcctgaattaagtgaagacatgaagatgattccaattgagaaccatggtgtgagatgcatgtccattggttttcttgtagacaaagacgcaccaattgtttggagaggtaatgagtgctcttgagaagatgacaaggggagttgcttggggggac

SEQ ID NO: 294994 - DNA, 327 bp, Zea mays
gcataggtctacaagacgagacaagagaatgcctgtgagcaagatcgccgtgggcgctgcgggcgagctgttgcaaccagacaccgacaagggcgccgaggccgagttcatgtccatgctcatgttcatcttcagcggctcatgatcatgcatggccttaagtaagctcacggacggtggcgcctgcactcctgccggccatatcgccgcgtctgtggcagcacgcactatccctattactggccgtcttcgggggtgccaacatctgctgcggccacgtgaaccctgacgtgaccttaggtgcctttgtgggcgggaacatcagac

SEQ ID NO: 294995 - DNA, 418 bp, Zea mays
ccggaggccgtcaacctgctctgctctgccaagatcccatgcaccggcgtcaccatggacgacgtcaacatcaagtacagtggcaccaacaacaagaccatggccgtatgcaagaacgctaagggcagcgccaagggttgcctcaaggagctcgcatgcttctagaaccaccatcgacccatctctctagttatacaatgtgtttggttgttggatgctgagagattggttctcagctcagatgcaagctgcgcctagcctgtgtaggtttgtgctggtacattgagagctcttatttaaaaaaaaaaaaaaaaaaaaaaaaaaaaaaaaaaaaaaaaaaaaaaaaaaaaaaaaaaaaaaaaaatataaaaaaaaaaaaaaaaaaattttttatggattgatgttgtatattagtgat

SEQ ID NO: 294996 - DNA, 424 bp, Zea mays
tgttgctgaaggcaatgtaaaaaaatcggagcaagtttttaataggatgaaggatcttggattcccagttacaacattttcttccaatcagcttctgctactctacaaaagattggacaagaaaaagattgctgatgttctcacaatgatggaaaaggaggatgtgaaaccatctatctttacttacaaggtccttgtagacgccaagggaatggttggagatgtagaagctatggagaaagtggttgaatcaatggtgaaagatggcattgagccagatctcacgtttaatgctacaattgccagacagtacatatttaatggtcagcgtgataaagcagagacacttttggagtcaatggagggtgatgatatccagaaaaaccgtgctgcttgcagtttctattacctttatatgcttttc

SEQ ID NO: 294997 - DNA, 288 bp, Zea mays
cggacgcgtgggttttataataacacagttgagcgcgacgatgggacccctctctaataacatggtgggcgtgggtgcctttcttgcatctcttccggggggtatgttgggcccccaaagtggcggccggttccaacattatcaccaactactaacgggagtggcttaccgccagggccacctggtacggtcagaccaacggtgccggcgctcctgacaacagcggtgcgtgcgggatcaagaacgtgaacctgccaccctacagcggcatgacggcgtgtggcaacg

SEQ ID NO: 294998 - DNA, 442 bp, Zea mays
  unsure (1)..(442): unsure at all n locations
cccacgcgntccgcgccacaccggagcccatggagctcgccggagctacgccatccgccatccaaagccgagcggtgctcttctccacccggccgaacccccgtcgaacccttcctgtcacacgtacaaactcaaggttgaagacgacccaaaatattttatgtatttttgaaatttcttttgattcaatttgtgaattgtatatttattatgttgtaataagagcatgttgcgattcgaaattcacgtgtatgcgcgctatggaatttctggtagatatatgcggttagtagtgcaccgtgattattcttgttattcgatgcgatgacttttagaatgttggattagagagaaatatgacgaaaatttagtagtcacacgttggtgataaaaacactagatatgaaattttatagttaattttggtcacatttgacttttg

SEQ ID NO: 294999 - DNA, 341 bp, Zea mays
  unsure (1)..(341): unsure at all n locations
cgtncgcgccggaccnnatcccattgagctcgccatatctacgccatccgccatccaaagccgagcggtgctcttatacagccggccggacccccgtataacccttcctgtcacacgtacaaactcaaggttgaagacgacccaaaatattttatgtatttttgaaatttcttttgattcaatttgtgaattgtatatttattatgttgtaataagagcatgtttctattctaaattcacgtgtatgcgcgcaatggaatttctggtagatatatgccggtagcagtgcaccgtgaatattcttgttattcgatgcgatgacttttataatgtttcatttt

SEQ ID NO: 295000 - DNA, 435 bp, Zea mays
cggacgcgtgggcggacgcgtgggcggacacggtcgagaacgtcaaggccaagatccaggacaaggagggcatccctccggaccagcagcgcctcatcttcgccggcaagcagctggacgacggccgcatcttggccgactacaacatccagaaggagtccacgctccacctcgtcctccgcctccgtggtggcggcggccagtgatctggtctgctgatcgcctcccgccatggggactggctagctcttgccgctgcctgccagtgcgtgctcgtttcgtctttcattacgttatgtcttgctcaggccgtctcatgcatcttcatcagtctcttgtcttaggtcgtcgtttcttcttcacattggtaggaacgcacgttgtgcagtgctttgttaaaacaacttggagtaataaatcttgcatatgggtcct

SEQ ID NO: 295001 - DNA, 279 bp, Zea mays
cccacgcgtactaaaataatgaagagccgtagtatggcatgatcggccgcgctcttggggctagccctcgcactagtgggggtcaccgtcccacatgtagcgtaggtaaagaagaagagagcggccgttagcggcgaggtgtgggacgcgaagaacatccaggacgacttgtgctcgacgctgtgcgagggcaacaaggagaccgacctggacgtgtgcaaagagtgctgcgctctctacgaggaatcaacctgttgctgtactgcaggatccaacaca

SEQ ID NO: 295002 - DNA, 366 bp, Zea mays
  unsure (1)..(366): unsure at all n locations
gccgaggccattgacgatggcaagattggaccaagggatgaccccaagattcgctccaggatcttgtcagaagagtttggttgggacaaggatctcgccaagaaaatctggtgctttggccctgagacccttggacccaacatggtggttgatatgtgtaagggagtccagtatttgaatgaaatcaaggattctgtggttgctggattccagtgggcatcaaaagaaggtgctttggccgaagaaaacatgagagccatttgctttgaagtatgtgatgttgttctgcacgctgatgctatccacagaggaggtggtcaaatcatccctactgccaagagagtcttctatgcttnccagattact

SEQ ID NO: 295003 - DNA, 322 bp, Zea mays
ggatgagctcagtgaagatgacaagttgacatttgctcgtgctaggaagattcaacggttgggtagccagcctttccatgttgggctaaattttacacgtgcacacctgaaagacactttgctctaagagagagtgaaaaaattcaccacggctttgatgatgacaattatgaccactcttaacaacagtcattctacatggttggaggaatagaggaggtcatcgccaaggcagagaagattgccaaggaatctgcatcataaggggtctacaggcaacgcaaaatttaacttttggaggtcaacgtgatgtgctttttat

SEQ ID NO: 295004 - DNA, 409 bp, Zea mays
aatgatcgacccactcattcgttcataaatggatacctgttctttagcagcattctttttgcgtgccaattatactcgcaggggcagagctagatcttatagacgacgagcatctctttgtggtccattctggtgctgtccttatcactactgctcacggagaggagctaataaagcaaatatgcgctccatactacatcgaatgcatctcgaagacccaactaaacgtgatgggcgtcttccatgcatcgataaaggttgtgctgcagacgactaaggcgaataagaataaacacgtcacaatagggcatgctccattctgcgatctaatcatagggtgatgaagatacattggcaaaagtgccatatctttataatctcagcgactctcttaaccataacggattta

SEQ ID NO: 295005 - DNA, 420 bp, Zea mays
cggacttccatagccgatgtgcatgtgatgtgcatggatctaagcccaaagaaacccaacaaggccagcgccagcgacggcggagcctactacgactggtcccccgccgatctgcccatgctcggcgttgcctccattggtgccgccaagctctgcctcaccgccggaggtcttgccctacccagctactccgactctgccaagatcgcctacgtcctccaaggcaaaggtatcttcggcgtggttctcccggaggcgaccaaggagaaggtcatctccgtcaaggaaggcgacgcgatggcgctccccttcggcgtcgtcacctggtggcacaacaacgccgacgccgctatctccgacctcgtggtgctcttcctcggcgacaccttcacgggccacaagccgggccagtttacaaac

SEQ ID NO: 295006 - DNA, 459 bp, Zea mays
ctgaaccacaccagtaaaagcatcgtgttcttgtcgcaggcggcagagagagaaattgagaagagagggatgggcgaggaactccaccacgccaccgcaaccactcgctgcgccgtcgccatagggcttcacgtgcgggctcgctcgagacagtggatccagcgcgggattccgttggaattcggtcggttcatcgcggagcatcgaaggagagggcatcgtcgcaattcaccccgtgccatggccaaagacctccgcgccattattcctggcgcgaagacacgtgtcatctgaaaggcaagttggtacctggaatctcaagtcccaggcaagttgtgcccttgaccacttcttacccaataatgttctttgatgtcacatgttcatgcataggtttaattttgatggaacccaataagttactctagattgtttatcccattaccttgtttacccctg

SEQ ID NO: 295007 - DNA, 459 bp, Zea mays
cggactcgtgggctcgtaggagagttcggcatggccggagacctgccgacttgatggagagttgatgcagatctgatctcgcagcatcgttgaggtagagcgtgctgataacgtgttgagaactacgttaccacggatcaccagatccgctcccttctcttccgtcagcagtagaggcgcaagaagatgtagagaacccgtctccattcccataagcacgacagaggaaacacacgagacactggatatagggttggacctctggcctctttctgatctctgtattatgagggggtgtacaggttccttatatagagatatgagacccctcatgggcaaagcaggtatttgcccacataaccctaattagggttacttaacaaatataacaaacaaatatcacgagaaagagggcatcactagtagaaaaaggctcaacacctgcgggacgatatattt

SEQ ID NO: 295008 - DNA, 465 bp, Zea mays
tagttttgtctaataacaagggattgaagtgatgatcatcatgacaactcatttggtacatcgtctattgaatttttagaaagatccagcttcaccacatcacttgtctcccacgcggcagctggtacactggtcactccaaggccactcaagtccagttcctttgaagataaggacaagcgccttgctgcatcaacttggtcatctttagatggcgtgcttctggatcctgatgcttcctcatcagatgaaagccggctgcgcagatactctagcgctgccgacgttggtccagatgccatggaacttctatgcgtcctgattcgattgccagtaggcatcatctacgtgaatgaaaacattatcctaacacttactgcttgcattattgattggagcctacagatacagccgtagtctcaatctggattgacagatcaatcagtaccatctatgatgacttct

SEQ ID NO: 295009 - DNA, 367 bp, Zea mays
  unsure (1)..(367): unsure at all n locations
attggtttcgacaacagcagctcagcggcgctgaatagctttttcgctattgggtgcgccagtggatcatttctgggtggtgtgatagcagatgtcttatctagatactatccagattctgctcgcgtcatgtgcgctcagttcagcgccttcatgggcatccctttttcatggatcctcctcacagtcattccccagtctgttgattactggtctgcctatgccgtcacactctttttaatgggaattaccataagctggtgcgctacttgtgcaaacaaccccatgttcgcagaggtagtccctcccaagcaccgcacaatgatctancgccttgaccgcgcatttgaggggtcatttggctcgc

SEQ ID NO: 295010 - DNA, 461 bp, Zea mays
attcccggtcgacgacgcgtacgcgttgtgctcacgtcatccgaccgtaactcggagtactgggcggagcgcgcggaggcggagcacgcgtacaaccgcgcggcgtaccagaccgaccccgtggccgtcgtgcagcgcttcaacgacggcgtgcacagggcgacggcgacgcggtcgcggtccctggcgcacagggcgcggggcccctgcacggcgaccaaccccatcgaccagtgctggcggtgccgccgcgactgggcccgcgaccgcaagcgcctggccaggtgcgccatgggcttcggccacaggaccaccggcgggctggccggcaagttctacgtggtgattgaccccagcgacgacgccgtcgacctcgtcacccccaggaagggcacgctccggcacgccgtgacccgggcccgggcgctgtggatcaccttcgcgcgcgacatggtgatcga

SEQ ID NO: 295011 - DNA, 152 bp, Zea mays
ccgtgctctttgagctagccctcgcgctcgaggcgggcaacgccccacacgtagcggaggcaatgaatactagagcggcaggaagctgccaggcagctgcggcgaataagatccaggatgacttgtgatcgacgctgtacgaggacactaac

SEQ ID NO: 295012 - DNA, 462 bp, Zea mays
cccactcgtgcgcttacacagactgtgagtacatcacggagatcgcggttgcctgttgcaaggcatgatcataatcatgacatcatattgagatgcatcaaataaaatctaggatatatggatggcaaaccagctgcagcatgtatcatttacaaatgtctattgcactgacgtgcttttgaatcagagcgaactgctatttttgatcacgagattgatgccatacatgatgtcctaatgcagaacgaagctactgatatattacctgattgggcgtccaatacctctgcatcgctatgcctggtccatagaaatgtgagatcaaatggatcattcactaccgcgcttcgtcgttatgctggagctctagggaacatagcacaaacattgacgactacttcaaagttaataggccgcagtgatactataccacatgttgatgcacggtatccagtcatacta

SEQ ID NO: 295013 - DNA, 342 bp, Zea mays
  unsure (1)..(342): unsure at all n locations
tccggactagaactagttctctatttgctgaggagttgntnangcggaagaggacaggaaagcctaacgacaacctgcggaagccgatccaggacgtcaacggcaggacgaagaacttggacgacattggagccggccacgtgaacccgaagaaggccatggaccctggcctagcgtacaacatgactgacatgggctacgtgccgtacctgtgcgggctcaactacacggacgacaaggtgagcacgatcatctacctagagacggctgtgccgagcacgaagcaggcgatcattatcaggacgaccttaactacacgtccatcaccgtcatcctgaacca

SEQ ID NO: 295014 - DNA, 431 bp, Zea mays
ataggcgtcttcgtactcgcctacctacgcggctcatacctttcccccttctcccaattcccgccgtcgctccatcccgtaacgcgacaccatgagggagtgcatttcgatccacatcggccaggccggtatccaggtcggaaacgcgtgctgggagctgtactgtcttgagcatggcattcaggctgacggtcagatgcccggtgacaagaccattgggggaggtgatgatgctttcaacaccttcttcagtgagactggtgctgggaagcacgtgccccgtgctgtttttgttgaccttgaacccactgtcatcgatgaggtgagaactggcacctaccgtcagctctttcaccctgagcagctcatcagtgggaaggacgatgcagccaacaactttgaccgtggtcactacaccattggcaaggaga

SEQ ID NO: 295015 - DNA, 458 bp, Zea mays
ctcgccggcgggacggagaccacgtcgtcggccgcggagtggatcatgtcggagctgatgaggaacccggaggcaatggccaaggcgcaagccgaggtccgccgagtgctcgacggcaagagcccgcaagaccacgaagggcaaatggacaagctcagctacacgaggatggtggtgaaggagggcctgaggctgcacccggtgttccctctccttcttcctcgtctctgccgggagacgtgcgacgtcggcggcttcgaggtggcccagggcaccaaggtcatcgtcaacgcgtgggcgttggcgaggagccccgagcattggaagcatccggaggagttctggccggagagattcgccgacgacactagcgtcgccgcggcggcggactacgtagggtctcagtttgagtatatcccgttcgggagcggcaggaggatgtgcccttgaaacacctt

SEQ ID NO: 295016 - DNA, 426 bp, Zea mays
ggtccggggttccggcgacgacgtcacgcgcttcgcatgcgcctggagaactgttaaagcttccatgtgactgggcactgatatcagatccggaattgaggctctatgcgcagctctatgcataggatgaatatgcgttcctcaaagattatgctgaatcacacaagagactctgtgagcttggcttcactcattcgcagcacacgaccatccaaatcagatcttgcaaccgtcgtcgtgcttgcacagattgcctctggcgtagcagttgctgcaggcacagttatggctggctacttgtacgaggcttccaagatggtcaagtacagggcgacattcttctccacatagactctgctttagtaagtatgaagatcgaataacaggaccatatctgaggatcgaatagcgcatcatataaatgag

SEQ ID NO: 295017 - DNA, 406 bp, Zea mays
acacacacgttcaaaccgcgagcacacacgtttcactttcacgacgactgcctgacacacgggccacgaacatgctggctcgctcctgcgggcacctactctcagcccccagctagagccctatgtctacgagggcgaagaatagaccacccctgctggcatttttgcgagaggttcttattctgccaaactaaagttagttgatgatgatggcaagtgcttcctggagatgagttactactttgagattagaaaggactggccaggaactcaatgatgtgtggaccagcatggctgactcgtcggagtatgttagagctcatagctaagccaagcacaagatgtggactcatcttcaagaatgattttcattcgctacttcatcttaaatcgcatttaatttgtt

SEQ ID NO: 295018 - DNA, 470 bp, Zea mays
  unsure (1)..(470): unsure at all n locations
gagttggcggcggtagttatcgcttccggcgatctcgcgcgtggagtcccgagtcgccaaggctgccgaaccctacggccaggccaagatttagtagtagctactataaatctgcagggtcgccagcactttggcctctcaacgcacgccccccgcccgacgtttccgatctcgtttctctcctcccgagtagcgaaatcttcgtacattctgagatgcagatcttcgtgaagaccctcgccggcaagagcatcaccctggaggtggagagctcggacacggtcgagaacgtcaaggccaagatccaggacaaggagggcatccctccggaccagcagcgcctcatcttcgccggcaagcagctggacgacggccgcatcttggccgactacaacatccagaaggagtccacgctccacctcgtcctccgncttcgtggtggcngcggccagtgatctggtctgctgatc

SEQ ID NO: 295019 - DNA, 421 bp, Zea mays
gcgggcaggaggtacaagggcctcaaaccagcgccgctcatctacgtccaaggcgtgttcgaagacggcgcgctcaacaccgtcgacgtccgcggaaagatcgtcttctgcgaccgctccgaaaccgccaccatgcgcggcgagatggtccgcgctgccggcggcgtgggcatcatcatgttcaacgacgcctccgagggcggtgtgacgaggttcctggggaacgtgtccatcgcggcggcgcgcgtcagcgaggccgacggcgccaagatcatgtcctacatcaactccacggcgaaccccaccgccaacctccacttcaccggcgttatgctggacccttcctaccagccggccatcgccgaatactcctcacgaggccccctgcacatgtcgaacctcggcgtgatcaagcccgaca

SEQ ID NO: 295020 - DNA, 308 bp, Zea mays
cggattcccggtcgactcacgcgtccggaggtcgccaaggagaacgcggacgtgatcatcatggacgacaacttctcgaccatcatcagcgtcgccaaatggggccggtcggtctacatcaacatccagaagttcgtgcagttccagctcacggtgaacgtcgttgccctcatggtgaacttcgtctccgcgtctttcacagggagcgcccctctgaccatcgtgcaactgcttggggtgaacctgatcatggacaccctgggcgccctggcgctggcgacggagccccccaacgacgcgatgatgcg

SEQ ID NO: 295021 - DNA, 472 bp, Zea mays
accggttcggaattcccggcatgattgtgtgttcgatactacgattacgaacttcgttttcccttcttttttgttaaaaaaaaaaaaaaagaaagaaaaaaaaaaaaaaaaaaaaaaaaaaaaaaaaaaaaaaaaaaaaaaaaaaaaaaaaaaaaaaaaaaaacccaaaaaaaaaaaaaagggccgccctttttaaagaatcaaactttacttccccttccttgcaacttaatactttttttttagggcccccaaaattaaattcattgcccgccttttaaaaacgtcgtaattggaaaaaccctgccttaaccaaatttaatcgctttgaaaaaaatccccttttccccagttggctaaataacaaaaaggcccgaaccaatcccctttccaaacatttgcccaccctaaatggcaaatggaacccccctttaaacggcccataaaccccggcggttttggggtttacccc

SEQ ID NO: 295022 - DNA, 359 bp, Zea mays
gagcgatgtgctgtttcgatctcagccttggcggagatcgagagagcgatgtgctgtggcggcggcggtggagcagccccaggacgcggtgaaactcttcaaccgctggaccttcgacgacgtccaggtgaacgatatctcgctgaacgactacctggctgtgactgcggcgaagcacgcgacattcctgccgcactccgcggggcgctactccaagaagcggttccgcaaggcgcagtgcgccatcgtcgagcgcctcaccaactcgctcatgatgcacgggcgcaacaacggcaagaaggtcatggccgttcgcatcatgaagcacaccctggagatcatccaactgctcactgacg

SEQ ID NO: 295023 - DNA, 318 bp, Zea mays
cgccgatctgcccatgctcggcgttgcctccattggtgccgccaagctctgcctcaccgccggaggtcttgccctacccagctactccgactctgccaagatcgcctacgtcctccaaggcaagaattcgtttttttaatcctataaaaaaaagcatctccgtgtcacatgcatgcgtgcgtcttgatgtatgcacaggcaaaggtatcttcggcgtggttctcccggaggcgaccaaggagaaggtcatctccgtcaaagaaggcgacgcgatggcgctccccttcggcgtcgtcacctggtggcacaacaacgccg

SEQ ID NO: 295024 - DNA, 325 bp, Zea mays
ctgcttcttctagctcatggcctggccattccatgtcgcgctggctgcgtttcatttcatgggagaaagcaagggtggatcacagggtggccgtctgctaaataaactacatacctttggctttaaagactgggttgggggattggtacacatcacaagacacattgggcaaatttttttttcacagaaggagtaggggatgggttaaacattgggttaattccccaccccggggttttccgtttcccgttgtgttaacatgaccaacttttgttggcaatggggctaaaaataaatttattcctcttttattgaatggttttgc

SEQ ID NO: 295025 - DNA, 446 bp, Zea mays
tgctgttctggttgttttggggattgtttagcggagccacttccttgcgcttgtgcgagagaaactggcggagactttgcttatacgagagatggcctgcttaaagaaggatttctagatgcgtgtgtctcaatgctccgggaaccacttaaacaaccgcacttctactgtaagggtgtctgtcctattgagcaaataatgaagggagtcagctcagcgaaacctgatgcttgtaaagggcaccttattaagaagtttatcaaggaatgctggataaaatgcggctgcaccagaaattgtggaaaccgtgtggttcagcgaggcattactcgcaaactgcaagtgtttttagcttctcggaaaaagggatggggcttgcgttctgctgaaaatcttcctcgtggtgcttttgtatgcgagtatgttggtgaaatattaacaaacac

SEQ ID NO: 295026 - DNA, 383 bp, Zea mays
gtgtttatgcccgaactagataaatttgtggtgggggtcattggcgacatcttaatttgattgcgagaataaggaaaaccttcaaatcatcttcgaattgtgctgactcgacttcgggaacacaagttgtatgctaaattcagcaaatgtgaattttgggtggaccaagttcccattcttggtcatattctgtcagctgaaagagtagtcgtggatcctaggcaagtgacgaatattatagagtgcaaaccatctaccacgggtcacctagttcgaaagtttctttgggatgtctagatattaccatcaattcatccccaactttttcaaaatatccaaacctattactaaactattgaagaataatgtgaagtttaattgga

SEQ ID NO: 295027 - DNA, 369 bp, Zea mays
cggacgcgtgggcggacgcgtgggcggacgcgtgggctgccgtcttctgggcaagttcgacctcaatggcattccgtcagctccgaggggcacaccccagatcgaggtgaccttcgaggtggacgccaacggtatcctgaacgtgaaggcggaggacaagggcacgggcaagtcggagaagatcacgatcacgaacgagaaggggcggctgagccaggaggagatcgaccgcatggtgcgggaggcggaggagttcgcggaggaggacaagaaggtgaaggagcggatcgacgcccgcaaccagctggagacgtacgtgtacaacatgaagaacacggtgggcgacaaggacaagctcgcggacaagct

SEQ ID NO: 295028 - DNA, 282 bp, Zea mays
gaccgccggggatgtcgaggtgctctggtcgagagaagggggggtcggagatgtgagcagagatccgcggcgcttaaccggtcacgccgtcgtaaaccctgggaattttccccggaatcaagccgccacgagtacccgcgtggcatggtcagaattagtgttgtgccgtagctgcgaggttacgagtcacttgaagaccaagttggtacctgggaatctcgagtctaaggtcaaggacaggtaccacaggatgaggcgcatgaaggatgatatgatgagttc

SEQ ID NO: 295029 - DNA, 400 bp, Zea mays
  unsure (1)..(400): unsure at all n locations
tgataatcctgaacccgaaagctgaacttccacacacaacaaataactgacgcaggcgatccatcactccacacaccggtcggaaccgaggccaaccaacgacgccgccgccaatgtcgtcccctgcagcgccggtgcagccgccgccgccgcgcgcggtgcgcttcggcgtcctgggatgcgctgacatcgcgcgtaaggtctcgcgcgcaatgctgatgctccctccgggcgccgccaccatcgccgccgtaggcagtcgctccgatgacaaggcccgccgcttcatctccgaaatcggcttccccgcggcgcgcgtccacgggtcctacgagtctctcctagaggacccgtacgtggaggccgtgtacctnccgctccccaccagtctccatgtgcc

SEQ ID NO: 295030 - DNA, 371 bp, Zea mays
cggacgcgtgggcgagctcctggttgaagggcaggtacttgcgcttcccctgcgtcgtgccggagctgagggagatggaggtgatgggcttggcggtgagcacgggggacgtgtcgccgtcggcgatgcgcgcaatgtagggctcgatgtcggcgtgcgtggcgagcggcacgcaggcgcggaagctggcggcgtcggtgcggcccgcgaggccccggcagcggaggtactcggcgcaggcgttgtctgccaggatccggcgcagcgtgtcgcgctgcacggcggcggcgtcccgcgtgagggactcgaactcggcgatcaccgtctcgccgcagaacgcggcggcctgcgccttcttctccggcatggcg

SEQ ID NO: 295031 - DNA, 344 bp, Zea mays
catgagggagtgcatctcgatccacatctgcttttccggtatccaggtcggaaacgcgtgctgggagctgtactgcctcgagcatggcattcaggctgatggtcagatgcccggtgacaagaccattgggggaggtgatgatgctttcaacaccttcttcagtgagactggcgctgggaagcacgttccccgtgctgtttttgttgaccttgagcccactgtcatcgatgaggtgaggactggcacctatcgccagctcttccatcctgagcagctcatcagtggcaaagaggatgcagccaacaacttcgctcgtggtcactacaccattggcaaagagattg

SEQ ID NO: 295032 - DNA, 398 bp, Zea mays
aagttccactccttccatcctgtctccactattctgagctacctcagcaaggctcctcttgtacctcctggcacaccagtggtgaatgctctagccaagcagagggccatgctggaaaacatcttgcgggcctgcattggccttgcccctgagaacaacatgatgcttgagcacaagtgaagagtttcacgtcccttaattaactaccgcaagataggatgaatggaaaaggagggatcaagcgaaggtgtgggaataatcagtgactcctctgagcccaacgaagaaatgtcaggaggctacaggaaggagaagtgtaaggagagaagaaccagcatggatatatcctcttttcgaaagctatctatctattcttttttggaaaattgactcgtttt

SEQ ID NO: 295033 - DNA, 409 bp, Zea mays
gagaaagtgaaggcacttttgaatacggtaactactataaagaagtggacgatttacgtgatgtgatcctacatttcaaaaaacacaaacgtgacacccatgctattgctggccacagtaagggtgggaatgtggttatcctctatgcatccatatatcatgatatatctaaagttgttaacctgtctggaaggtttaagctggaacgtggtattgaagatcgttttggaaatgattacatggaaaagattgatcagcatggtttcattgatgtggaagacaaaacaggacgtatcatctaccgtgtgaccaaacaaagtctgatggaccgtcttaagacagatatgcactctgcatgcttgtctattgacccaaactgcaagggtgtgactgtacatggtgctaatga

SEQ ID NO: 295034 - DNA, 246 bp, Zea mays
tcccggtcgacccactcgtctctgtttcgaattgtagctctactactcttttttggatagatacgccttcttcgacgggaggataggacatcataagtggtaggccgacgcgaggaagacctacaacctgatggacaccgtcagccggcacaagaaccaaatgtacgcgacttcattgaccgaaatcatgctgaacttcgacaacgcggtcatgtggatcttgcattccaacatctgggaaccgta

SEQ ID NO: 295035 - DNA, 400 bp, Zea mays
  unsure (1)..(400): unsure at all n locations
ctggtgtgggcatccgtgtcttggcagctcgcttctctcggagttgtgggcttggtttttgaggtatcggcgttgttctcgaatgtggtcagcacttttgctctaccaattgtccctctttttggtgtgatggcctttcatgacaagatgaatggagtcaaggtcatagctatgctgatatcgatatggggttttggctcgtatctctgtcaaaactatctcgatgctaagaaagctggaagtgcatatggggattcctagtgtctacaattttcttgtgatagattgctctttatcggtttagtttggttcttgcgagatgataagtgtttattacttatgttaatttaagtatgttttgtgaaagtgctttcagctgtggttgttangtggtgtgagt

SEQ ID NO: 295036 - DNA, 237 bp, Zea mays
cgggccgacccactcgtccggctctaccaagatcccattcacctttgttttccatggacgacttcaacatcaactggaggggctccaacaacaagaccatggccgtatgcaataacgctaatggcaactccaaagtttacctcaatgaactcgcatgcttttaaaaccaccatcgacccatctctctagatatacaatgtgttttgttgattagatgctaatagattctttctcaaa

SEQ ID NO: 295037 - DNA, 186 bp, Zea mays
  unsure (1)..(186): unsure at all n locations
gaaanaccgggccgacccacgcgtncgccagattcatgtacgacaagttcgtattttatctaccaccaacgattggctttgagtcgctgtcaaaaacaacgtatctagaacaccgatctgtacgtctacaactctgggatactgcaagacaagatacgtttaggactcctattccaagctacatca

SEQ ID NO: 295038 - DNA, 385 bp, Zea mays
accacgcgtccgtccacgcgtgcgcaacatcaacaacaagacgggcttcaccaagcggaccgactacggcaagggcgagcgagaggcgcagtggtccacggcacacaggacgctgcacggtctcaaccaggccaccgtcagctgcgacctcttcggtgacaaccagggctaccgcgagctgtcagagctcgccgagcatgcagccaatcgcgccgagggggccaggctcagggagctgcacacgctgaaaggacacgtcgagtacgtcggctagctcaagggcctatgcattgacaccattcagcagagctacaccgcgtatactcgactcagaagactagctgatatgttgtgcaaacttattcaatgcacacacatctatata

SEQ ID NO: 295039 - DNA, 458 bp, Zea mays
  unsure (1)..(458): unsure at all n locations
cggaattcccgggntcgaccccacgccgtnnccgctacnncttgnacaactnnntaaaggcgaaagggatcttgtttcatncagagcaagggcgatgcttatttgtttggtgaatgcagaagtgtgacgaaacgtttactctttgcttgcaccctccaaacattgcgtatcattcgatcatgnagaagaaanagaacacttttgtcgtgacaaanagaagnggcttcctgatgctgttgtttggaacccttgggacaagaaggcaaaagcaatgcaagattttggggatgcagaatacaagagcatgctgtgtgtggagcctgcatctgttgagaggcctattactctgaaacctggtgaagagtggaaaggaaggcttgtgctctcagctgttccctcgagttactgtagtggacagttagatccattgaaggtccttcanggctgaaaatccttac

SEQ ID NO: 295040 - DNA, 448 bp, Zea mays
ccgtttgtctaagatatgcttgcaagatatcagcatatttgaccagatttcatttgaaaaatggtcttaccccttgcccacattgattaaagaggaagttttaccaaagatatgtgatttgcaagacagattcgaccagctcaatgcactaaacattcagctggaaactgaagttgcagtcctcaaggatggcatgaaagagctggatgaagatcttggaacttcgcgatctgagcttcagaaaaaggtttctgaacttgaacagttagatcagaaattttcatctgtgaaggaaaaacttagtattgctgttgcaaaaggtaaaggtttgatagtgcagcgtgacagccttaagcagtctttgctggagaagtctggtgagatcgagaaactcacacaagaactgcagttaaaggaaacattgctgaaagagttggaagccaaactc

SEQ ID NO: 295041 - DNA, 291 bp, Zea mays
caatgagccatctcagcttgacatggacctgtacgctcaggggctggctcgctatgccgttagctgccaggataatggcctggtgccaaatgttgtgcctgaaatccttgttgatggcactcatgacattgatcgctggtcttacgttattgagaccgaacatgctgcctgcatacaatgtgctcaacgagcaccatgtgatcctggatggtactctcctggagctccaacatggagacatacaggctccgactctaagtacgtgactcatgacgtgattgctgatgacac

SEQ ID NO: 295042 - DNA, 288 bp, Zea mays
aagagatggcgtgtatagacatttcttttagagccttgttccttttatcgctcgtgggggtcatgcatggtgagaaggcaaagtcaaaggacaacgatgcataagcgtccggacccgttggctccttctatttcattaattttatcgctttttgttttggcatgactgatagcacgaacgctgttcaggatgcgtgcgcattatcgttcttgttatttttgtagcagacgatcctcattcccaatggcgacttcctcgtcggaccactcaacttcacaggcccatgca

SEQ ID NO: 295043 - DNA, 243 bp, Zea mays
gcggaaagacggcgtacgacaacttgcttatcttcaaggacggcaagggctgcggctcatgctactaggagcgatgcatggaaaaacctgcatgctagggcactgctgtcacggggttcatcacaaacatgaactacgagcctatcgctccctaccacttatgctagagcggaatggcctgtcggatacatggcaaactcgggtatacaacgacaagcttatgcactgcggcattacagacaa

SEQ ID NO: 295044 - DNA, 421 bp, Zea mays
cagaatccacaatttttttgtgatttccagctagacgatgatgggaaaatagttagtattttttggtcacacgcaagcatgcagggggaatacgcagattatggtgatgctgtgacatttgatacaacacacaagacaaatatatatgataaaccactgggcatgtttgttggagctaacagccatctgcagtgtacaatgtttggatttgttttgttgggagatgaaacagtacagacttttgaatgggctttcaattcattcaaaacatgtatgggaggcgagggtccaagagttatgcttacagatcaagatcctgcaatgccaattgctctgagaactgtatttccaaaaacagttcacagactgtgcttatggcatgtacagaacagatttatgccattccttgatgagatatatg

SEQ ID NO: 295045 - DNA, 433 bp, Zea mays
  unsure (1)..(433): unsure at all n locations
tttcacggcaattgcagctatcatattcggatcgatattttggaatgttgggatgaaacgagacacaacagaagatttgatgcttgtcatgggatctctttacgcggcatgcctgtttcttggtgtaaataacgcctcatccgtgcagcctgtagtatcaactgagaggactgtctactaccgggaacgtgctgctaaaatgtactcatcgttcccatatgctgcagcacaggaaagctgcttctgtatcttcttttcatgttccttactttcacctacttcacgttctacgggatggtggcggtaggcttgaccccaacacaacaagttgcagcagtagtgtcatctgctttttactccttgtggaatcttctctccgggttcctcatnccccagtctaggatccctggcttgtggatctggttctattaca

SEQ ID NO: 295046 - DNA, 320 bp, Zea mays
tgcgtccaaattctacgaggggtttgctttgtcatcaccggcaagagaaaccttggcgggcaggcaccactcgtgtggagcaagaactactgcaccaagaaatacgactgctagcaccttcccaactcgctggggatggacttcgtgaacaacgatgatgcttccgttgtcacgctgctcaactacaatttcttgcacatgaacatgtaccgctacaaggacatactgatcaatgacgtgaccttaacacgaccgcaagacagcccgaacacagataacatccacatagccgactcatgacggatcacgatcactaacac

SEQ ID NO: 295047 - DNA, 375 bp, Zea mays
atttagtaaaaactcaattattggataaaccacgaattaacatgtccttaacctactggggtttcatgtagactgtcttaatccatagaagtcattgcatagcattattattttttcctgctgaattatctttgtcaaaatgttcagtgtgacaatcgttgttgcatatctcatgaagaagcatcaaatgagcctcgaaagtgccttgtcactagttagaagtaaacgacctcaagtggctcctaatggggggtttatttcccagctggagaagtttcagaaatccttgcaaggtaaaacacaaatagttgcctttgtcctcctttatgttaaaatggtttcagagcaaggtgacatgtgtatcttgcttaatga

SEQ ID NO: 295048 - DNA, 381 bp, Zea mays
cacaggacttactgacgaaaagattaggagtaacttgaatcaacggaaatgtgtcttaaaagcattggatgatcctctaacaagtgttgtaccatgctgggtgcgccaggaagacgatccggaaggctagtacctggacatgctggattgtggtcatgactgtgaaacagcatgtgtcaaacaatggctggttataacagacctgtgctgaatttgcaagaatacaggactggacacctagaaacattgatgcctttacccttatgaataagcctaccgactctgggcaagtaggttacatgtaacatacacgctgccatgactagcatagtatgttacagctttcccatgatcatcatacatgttggaatctatactata

SEQ ID NO: 295049 - DNA, 390 bp, Zea mays
ctttgttctccattacaaagatatattattgaagtgttaagccttatatgctgagggagagctgataaatttcagttgatgcaactagctaactagatgcaatactgattacacgtatactggatcgaggcacatcaaccttaatgggcctcttatgtacgaaccaatgcttgacttattggaacgctatggttcctgtggtctaaactatatttaatggaaatcgtgcaacactcatagctaaggagaatgaccgcttattgaagcatattgattttcatcttttgcgaataggctgtttccgaaacgatttgattagaaaaagaactgttgatgggctacagattcttcgtatgaactcattcaactattgcaaaaacactacaaggt

SEQ ID NO: 295050 - DNA, 403 bp, Zea mays
ggagttgctcttagggttggtcttgtgcatgtgggcaggtcttgctgttcccactaaatttctctcggtgcttccacattctgatgagaataggatcgtctcgctcccggctaacctggatttcatgatcttcaaccaccgtggaagagtgctgccgtcagactcagacctgaaactccgtacatagacatgtcgtcccagaatccagatcttttttctttattttccctgctgtaacctgtagggatgaaaacggtcggaaacggtatttattcggtaatcagttttttagtcgtttttctttgattgcgaataaataggatatataatctacaatacaaatttgtattcttgtttttaacatccagcttgtaaagattcataaaaggtaaaccttaaattc

SEQ ID NO: 295051 - DNA, 414 bp, Zea mays
agcaaatcggtctgccctggtttaccccgtcgtgaagcagaaacctatctgctgccattaccgtgctgcgcgccgtcgcggtgaggcttggccacaaccgtggaactgtctccatatggcgtaggcggcgtaccgagcttcgcctgatggatttgcagtccagtgggcccataatttctcgccggaccgcgagcagcaacaacctctactcgccggccatgacctctacgcactccaagctctcctccgaggaccgtcatcttcgtgcatgtagtcgagtaaggtcacgaggatctgaagaatcaccctggtatctggaatctcaagtgctaggagaagagcaggtggttcacgaggagccgcctaacactgaggagttcgatctgatctaggtggcgtttcccagtcgacatt

SEQ ID NO: 295052 - DNA, 321 bp, Zea mays
caacagtgaacatcaagctcctgattttttcaacataatgttagaatggccaaagggagactgagatggacatgactaggattaagatgatgcgatgcacaaggccaactacgctagtaaaatctgtcactcctgcaacccaaactgctaagcacaagtgacagcagggaatggtaaataccatattggagtatacacacttcgaccaattgcacaacgcgaggaaatcacttctgattacaactgtgtaactgacatcaaacaagagcatgaagcattactctgactttgtggaaatcaagtatgccatcacagccattt

SEQ ID NO: 295053 - DNA, 289 bp, Zea mays
actcggatcggaattcccggctcgacccacgcgtacagccgacgcgtagggaactagatcgcgctgctctcgaccctataatatacaaggagctggccgtatggatggtttacgctttggacgcaaggttggtcagccagtggaaaatggtggactggtcgaatacttctttggcaaggatgggaatgaacatttacactatgataagttctctagatttttgaagaaattgcttgatgagatggcccgctagaagttaagcccctacaaggggaaatattccacacca

SEQ ID NO: 295054 - DNA, 309 bp, Zea mays
gtgtaattagaggagacccctcatggcacaccatgccagactcggagctggcggggaagattgtttaaaccattcaacacaaagcatttaaaggaacctcaatggaatcactggacaaagacttcattggatatgctaagattgaccatagtctcgcaaaattctggactatcttttagcaataacatgaagattccaattgtcaaattgaacatatggaacttaagcattgaattcaaaaactgggccttgaatcgaccgatcaggatatcaaagatgtgtttcaagcatttgacatatattaacaca

SEQ ID NO: 295055 - DNA, 394 bp, Zea mays
ggaattccgggtcgacccacgcgttcgggcgcgtgggcggacgctgggcggtgtgggttgcctcctttcacctactgtggggcagggccgggagggcgtggcgaacgtggcgcgcatggggctcgccgcggacgggtcggcggacaccgcccacctcagtaataatgaaaatgggcggttcatttatggagttgcgagttctgctggtaaaagagcatcgatggaggacttctatgaggcaagaatagacgacgtttatggagagaaaattggaatgttcggcgtatatgatcgtgatggaggattgcgagcagctgagtcatgtgaagcagcagcttttcaggaagttaatcaaacacgccaaagaagatcactgatgccaaagctggtatag

SEQ ID NO: 295056 - DNA, 371 bp, Zea mays
gtcgacccacgcgtacgcggacgcgtaggcggacacgggggcggttcgggttgtctgcttttacacctactgctggtgccagggccgggaaggcgtagcggaagtggcacgcatggggctcggcggagacggatcggcggacacacgccagctcagtaataatgaaaatgtgcggttcatttatggagttgccagttctcctggtaaaagagcatcgatggaggacttctatgacgcaagaatagacgacgtttatggagagaaaattggaatgttcggtgaatatgatggtcatggaagagtccgagcagctgagtatgttaagcaggatcttttcagcaatttaatgaaacacccaaagttcatcactg

SEQ ID NO: 295057 - DNA, 241 bp, Zea mays
ggatctgaattaccggctcgacccacgcgtaagactcagcatccttagcacacactttcattttgagatggcaatgctatggtcacaggtgcggacttaccttatcaggatcaggagtctgtgcaattctaccctacagacatccatggttctgaaatcctgagcactgaacgttctggtggtgaaagtggtatcctcagaaatagcgaatgtgaacagaacacggaacgatcctgctttt

SEQ ID NO: 295058 - DNA, 348 bp, Zea mays
cccacccgtccgcggacgcgtggtggtataaaagttgcttcctactaattttcaactttaacatgtattcctcgagagatcgtgtataatgttgctaaaatccaccttctacatcttccacggatcatcgaaggtgctacagatggaaagggcacaggaagacacggtatcatcacagctaggacatgcaacgatattttgattgctcttgctgccgtataaccaataactcacaagcgtcttattgagaaggagctcgaaggatttgccattatgttgaacaaaacaccacccactttgacttttataacaaaggacaagggtggaatcaacttctcatcaacagtg

SEQ ID NO: 295059 - DNA, 454 bp, Zea mays
attgaccgatccatccacgcgttcggttccagtttactgtagaaagtttcttgcctattcctcatactcgttcaattcctggaactccgggagattaaatctatacaccttctccttctttacctgaacatatataaaacctcttgttttgtgaaagcaaaggtgagtacacatcaacgtactcaccaaacgttctgtttagctaaagcgtactaactttatgtgttgtgaagctccactagttgcttttagcttgtcagatatttactattagcataagccaaattttatcaataaccaacccatgaaccgttttcttatcgatgaacatcattatcattatcgtatgcaaatccattaattgaaccatattatcttgaaccattcttatctctaaccaaacaatcttacaatgctgctcataaccgtgagcacgacttatatattcttttct

SEQ ID NO: 295060 - DNA, 428 bp, Zea mays
gtgccagctgactgggggaggtcgctagcctaatcctcgaactcgttgaagtccttgaactcctggagattcgcctcgacaccttctccttctttacctgagcatatgttgcacctgttgttttgtgaaagcaagggtgagtacacatcaacgtactcagcaaatgttctgtttagctaaggtggactaactttatgtggggtgaagctccagtagttgcttttagtttgtcagatatttattattagtagaagccaaattttagcaataaccaacccatgaaccgtttcctcatcgaggaacatcattatcatcatcgtaggcaaatccataaatagaaccatagtatcttgaaccatttgtatctctaatcaaagaagcttacaaggctgctcataaccgtgagcacgactgatatatcggcttct

SEQ ID NO: 295061 - DNA, 375 bp, Zea mays
caagaggagatctgcgatgtggtgctggcccggagccccaacccggggtgcgcggagatcgaggagttcctggaccgtgcccgcgtcccgctcacctccaacaacggcataaaacaacagggcgttcgttacgccaaccccatggccttcttccgtaaggacccgataaacgattgccgcgccctactatagacgaacgatctaaaagacgcctccgaaacaccatgatcagcctgcgcgctgggcatacctgtatccattgctgccctgcccgctcacccaagaattgaagatggtagctgcactacgcgccatctgtatagtgatacactatgcactgcatgcgaaggcatgagataatgggtctgacctcat

SEQ ID NO: 295062 - DNA, 402 bp, Zea mays
  unsure (1)..(402): unsure at all n locations
cagaacggnattcaatattacacaggtgagcgttacgatgggatccctcgataataacatcatgagcgggggcgccgttcttttggcgctcgacaaccaagggtcggaccgacccccgaaggaaccacccggccccaacatcaacaccaactacaacggcaattgactcaccgctagggccacactggactgtcagcccaacggtgccggttctcctgacaactgcgtaacgggcgggatcaagaacgcgaacctgccatcctacagaggcatgactgcgtgcggccacttccacaatttctaggacgacaatgactgcggctcatgctacgatgagtgatgcgaggaacaacctgagtgctcgggcactccaatcacggcgtacataactgacatgaacta

SEQ ID NO: 295063 - DNA, 447 bp, Zea mays
gtttgctctagattatgagttctacaggtgccaaaggttcacaacaaaccaatacaaagtcaaaagaaagggttcaaatcaaaggagcaaagtaacgcaccggacagtgtccggtgcactaggaagatcgactctgaacttgccagtttcgggaatttgagaggccgctcctctataattcaccggactgtctggtgtaacactggactatccggtgtgccagcggagcaacggctacttcgcgccaacggtcgtctgcagagaacattaaatgtgctacaatgcgtgcctgcgcgcgcagaagtcagtgcaggcgtcagaaggcgaaccggacagtctacaggacctgtccggtgcaccaccggactgtccggtggccccaattgtcagagctccaacggtcggaacccaacgaccaagtgatgtggctagcgcaccgcacagtgt

SEQ ID NO: 295064 - DNA, 492 bp, Zea mays
ggcccggaattcccgggtcgaccgacgcgtccgcggacgcgtggggcaaagaaaaacaatgttaatacttctgcactgacacaatctgaaatgcgggatatcattcttggcgctgaaattgctccaccatcacagcagaggcaacagattgctgaaattgagaaacagtcaagagagactactcagttaactgctgtaaccacaaggacgacgaatgtgcacggagatgaactcattatcacaaccacaagtccatatgagcaacaagcattcgcatcgaagactgattggcgtgtcagagccatctctgccacaaacttgtatctacgtgtaaatcacatttatgtcaattctgatgatataaaggaaactggctacacttacattatgccaaagaacatattgaagaaattcatatgcatagcaaatctgcgtacacaaatcgctggattcttatatgggctgagtccacaagacaatcctcaagtcaaa

SEQ ID NO: 295065 - DNA, 444 bp, Zea mays
  unsure (1)..(444): unsure at all n locations
ccggaattcccgggtcgaccgacgcgtccggacatcttanataagtagtaaggctctaaaatccacaaggccctcaagtagtagtagtaggtggggtacgctagttagcacgaactggatagatcatgcgagggcgttgacgacgacggggcttctgacatagtgggtcccgtctgtccagacgagcctcccaaagacgtagcccatcccgagcttgtcctgctgcgacgtcaccgtcaccttgaactccttttcctcaccgaccttgctgaactcaagcaccctcggcttcacctccatggtgatcccaaccggcgcgcgccaggacgcgcccacgcgttcgcaccttaccacgcagcgttaccggccgtactactatatctacatacgaccgtgggacaacgtcgaccggagctcgatcggcgcagttgccgcatgggcgtg

SEQ ID NO: 295066 - DNA, 434 bp, Zea mays
cggacgcgtggggtgctcaaggcggccatggccatcaatgccaactgcctcatggagatgagcatcccggacacgtatatagacacgctccctaagaacgggagagccagcctcggggacgcgctgtaccgaatcatcacagatgtggagttcgacccggacgacttcctgtcgacggtggacctgacgtctgagcacaagatcctggacctcaaggaccggatcgaggcatcggtcatcatctggaacaggaaggtgcacaacaaggacggcaagtcctcttggggctccgccgtcagccaggagaagagggagcagttcgaggagcgggcgcagacactgctgctcatcatcaagcacaggttccccggaatcccccagtccacgctcgacatcgcaaagatccaagagaacagggacgtcgggtttgcgct

SEQ ID NO: 295067 - DNA, 448 bp, Zea mays
cccgccccagccctaggtcccggcgtcctggcgtccagccggcgcggcaagccggtgcggccagcccagcgtggcggcctgacgcggctcgccagcatggatgcctcaccgacgcgtccccgcacgcgcccgatcattgcgtggaggagttgcacagcctcgccatcggcacgccgatcatgccccaccatgcacggccgtcgtcatcaggaggagagacgcggtgagcatgcgcatcaccttcgtcgtgcgtccaagcctcgccatcatcgagctcgtcgacgccttcgccctctcgccatcgaggagggagccacgccacgttcaccttatggtagtttgtcgcggaggactgcgatccatttccgagcttcgaggaatcgaagatcaaacttcggcgaccaaatgacctagttcttcgagttccacgagattgaagaccctaagc

SEQ ID NO: 295068 - DNA, 394 bp, Zea mays
cagagccagtacgtgcgaagcagcacgcacgctgctggtccgcgtacgcgagacgacgggcaggtcggccggtgcctttgagtttggaataatgacggcgacgacgacgacggccgtcggcggcggcaaggtgcagccgcgcgggctgcccgcggcgctgtccctgctgctgctcctggtgttggcagcggggctgggcggtggcgccgaggcgcatcagacgtgcgcggggcagctgcgcgggctggccccctgcttgcgctacagcgtgccgtccttgccggggcaggttccgtcggcgcccgggcccgagtgctgctccgcgctggggggcgtgtccagggactgcgcctgctgaacgttcagcatcatcaacagcctgccggtcaagtgc

SEQ ID NO: 295069 - DNA, 412 bp, Zea mays
gtcatcgatctcgtttcaaatccatccatcctcgtttcctccgtcccgcagcatctcaggcccatggccaggatcaagatcgggatcaatgggttcggcaggatcggaaggctggtggccagggtggccctgcagagtgacgatgtcgagctcgtcgccgtgaacgaccccttcatcagcaccgactacatgacctacatgttcaagtacgacactgtgcacggacagtggaagcaccatgaagtcaaggtgaaggactccaaaacccttctctttggtgagaaggaggttgctgggtttggctgcaggaaccctgaagagatcccgtggggttcggttggtgctgaaatatgtgttgagtctactggtgttttcactgaccaggagaaggctgcagctcacttgaagggtg

SEQ ID NO: 295070 - DNA, 450 bp, Zea mays
gttccccatggtcagaagccgagccaagaaccacccttcaaaggggtgtcccaaagccgtgaccaaacacctcaagatgacctcttctcaaagaatacaagcatcgccaatctcttggcatccattagtgacaggaatatctcagtatctctcacgaagtctattcattccaccaccaactcattttccttgtttgcgtgttttttacttctcttcttttgctgaaccccctcagtaggctctggtctcttctttggctctttgccctgaagaagatgtgcaaggagggcgcatattgggggactgttgctggcgtctacgtgggcgtggtgtatggcgtggagagggtccgtgggcgcagtgactggaagaacgcgatggtcggaggcgccttgtccggcgcgctggtctccgccgccagcagcaaccacggagacaagatcgtcaagg

SEQ ID NO: 295071 - DNA, 459 bp, Zea mays
tcctgcacgtaccggtcgggaattccctggtcgacccactcgtccgatcacgacaagatggctttctcaaacaattcgatgagagccttgttggtcctgttcctggtctgcatggggcatggtgagaaggaagagtcaaagggcatcgatgctaaagcgttctttcctggtgggtccttcgacatcaccaagttggtctcctccgtcaatgtcatgacatacatcacgaatgctgttcaggaggcatggtcatcagcattcgtcgtcactgttaagcagacaatcctcatacccaagggtgacttccttgtctgacaactcaacttcacagtcccttgcaagggctacttgaccatccaggtttatgtcaatctgctggctaccactgacctaatccagtacatggaccatggtaattggatctagattctacttgtggattacctggtcatcaccttc

SEQ ID NO: 295072 - DNA, 235 bp, Zea mays
cacgactccaagttcggctccgccgtcatccgctactccggctccagcggcgccccgccggggcccaacatgaccgatccgccgggcggctgggcctggtccatcaaccaggccaggtcatttcggtggaacctgacagccagcgtcgatcgccccaacccgcatggctgctaccactacaggcacatcaacatcacccgcaccatcgaggtcatggtcatccgaggacacatcg

SEQ ID NO: 295073 - DNA, 441 bp, Zea mays
  unsure (1)..(441): unsure at all n locations
gggcttcctgctgctggccctcatctggcggttcgacttcgcgcccgtcatggtgctcggcatcgccgtgctcaacgacggcaccatcatgaccatctccaaggaccgggtgaagccgtccccggtgcccgacgcctggcgcctccaggagatctttgccaccggcgtcgtcctcggcacctaccaagctctcgccaccgtcctcttcttctgggccgtccgcgacaccgccttcttcacgaatacgttcggggtgcaccacatcggggacagcacggaggagctgatggcggccgtgtacctccaggtgagcatcatcagccaggcgctcatcttcgtgacccgcgctcggagctggttcttcgtggagcgccctggcctgctgctggtggccgtcttcctggccgngcagctggtggcgacgctgatcgccgtgtacgc

SEQ ID NO: 295074 - DNA, 239 bp, Zea mays
cacaaaagcaaaaagcatcatcacaataatggccagtgcgtgagtgtgcatcatggcgccattcgcggccctcttcgtggtagcccttgctctagtggcggccaccagcccacaggtagcggtggcgaaaaataaaagagcggtgaacagcgtgctggacgacttggcgaagaacatccaggacaacatttgctcgacgctgttcgagggcaataaagggacggacctggtcgtgtgca

SEQ ID NO: 295075 - DNA, 260 bp, Zea mays
cctttatatgtcatgggggacacacctgctattgaggcactgcagaaaatgatccaaggtaagtttagacaccttccagttgtagaaaatgggtaaggttttggcgtggtgggcctttccaaatggccttttggtgccatttccagacttggaaaggccgcagaaccagaaggtgcgcttgccgcttgttgtaaaaggggttgaccaacagttaggtggcaacttcttagttccacacattctcttgagactattagaga

SEQ ID NO: 295076 - DNA, 253 bp, Zea mays
cggacgcgtgggaacaccctgaatttgagggtattacaccgtcgatcatagtactggacccgggcgccggcgagttcattcccgtggaccccgtctcgggctccttcctcgtaaacatcggcgacgtcagcacggcgttgagcaacgggaggctgcacaacgtgaagcaccgggtgcggtgcgtcgcacccgtgccgtgcatcttcatctgcatgttcctgctcttacccaatgactacagcgtgagcgcacc

SEQ ID NO: 295077 - DNA, 261 bp, Zea mays
gtcttcttcatgcccgacttagcgcacgctaagttcggcgcggccaccgccaccgccgctggcgctgctgggagcaacagcgcccaggccaagggggccgtcaccaccaccgatgttgcacagaagattgttaagcaggttgagtatcagttcagtgacatcaacctggtggcaaacgagttcttgctcaagattatgaacaaggacacagaaggctatgttccgttgtcagtcattgcatcctggaagaagatcaagtct

SEQ ID NO: 295078 - DNA, 379 bp, Zea mays
  unsure (1)..(379): unsure at all n locations
cacatcctctcttttctaccaatactgctctagccgtcgcaaaacctcctgacttcccccagatccagatcgtttccccagatccagatcgcaggcgtgaagggcaactgttaccagattatgatccgttttcgagcttcgaggaatcgacgatcaagcttcggtgaccaagtgacctggttcttcgagttctgcaaggttgaagaccctgagcatctatttggtgaagaaattgctgttttcacgtgggaacatggttggtaaagatcatcctgtgcctacaatttccaaatcagagttcactggtatttgtgacttcccatcagagataacattgatagcanatgaaaatgaaaaccgacttgatatattggaagct

SEQ ID NO: 295079 - DNA, 341 bp, Zea mays
ccggtcctgaattcccgggtcgacgcgcacgcgtccgctcggcgtgcgtgctcgtgctgctcttgatcttgcacccgcgtgtccatgccttctacctgcccggcaccttcatgcacacgtgactcccctggagaggtgatctcggccaaggtcaactcgctcacctctatcgagaccgagctgcccttcagctactacagcctgtcatactgcaagcctctggatggcgtcaagaagagtgctgagaaccttggtgagatcctcatgggggaccagatctacaactttgcataccgctgccaatttaatgccattgagcaatgatacctttgccccacgga

SEQ ID NO: 295080 - DNA, 281 bp, Zea mays
ggacttcggaaagtcgactgtctccaaggctgatctctccaagatggtgaagtcgggttattttagtgagaatgagaagaagctacttcgcttcgggggggaagaaactaccccgaagccaggaaaggatgaaatagtcattttcaagagcttcctaaaagctgggttgagatttcccttaaataggataatctctgatgtgctgcaaagatttggcatctattttcaccaactgactcccaacgcgattgtcaagctcagcgtctatatctgggctcttc

SEQ ID NO: 295081 - DNA, 318 bp, Zea mays
gcctgctgcaaatcagagcatgggtgcttgcgcgcgtaccattcaatgacactcgatcacacatattgtgaacggagtacgtggccactacatggtatgcagctccagaatcatgtgtctcctttttttcaaagtacactacatccattgatattatgagcaggaggggcatatctgctgaattagctacagtgaagccactctttccagggaagaatgttagtgcatcaggtggatcttatgactgatctactagctacaccttcagcatagtctatccgcatgataaggcatgagaatgctcgacgatgcatgaac

SEQ ID NO: 295082 - DNA, 438 bp, Zea mays
cgcgtgacagcatgtgggagcaaagttgggaaaatggatatcgtcggtggtccggaggttggtcctctaagatgttggccaggtggtttgtgtctatctagatccataggggatcttgatgttggtgaatgcatcattgctgttcctcatgttaagcaagtgaagctttctaatgctggaggcagaattatcattgcaagcgatggtgtgtgggatgatttgacttgtgaaatggctcttgattgttctcgtgggttctcatcagatgtagctgccaatcgaattgttaatgaagcaacccggcctcgtggaatcagggatgatactacttgcatcgtaattgacattctaccaccataaaatatagtcccgagtcctcgtaagagaccccgcaggattacattcaataatgggtttcgcataagacatctagacgtc

SEQ ID NO: 295083 - DNA, 365 bp, Zea mays
cggggcgtctgtcatcatgggcgtttctccgggacccctgtccgtgctgtagcagctgtgcatcaccaagttctcctactggctcaccccattcacggaccacaagaccagcccggtgatgttcggcgccatggccgacctgggcaagtacaaaaccacggtgaaggtgcagactatcccgctgctgaagaacccggtggaggacatctactactacgtgcccatggtgggtatctccatcgggagcaagcggctcgacgtgcctgaggccatcctcgcgccgaggcccgacagcacctgcggcacggagcttgactctgcgaccacactggcataacctgtggagccggctttcaaggagctga

SEQ ID NO: 295084 - DNA, 194 bp, Zea mays
cgcctgcaggtaccgatccggaattccagggtcgacccacgcgttcgctcatggtggaagtatgggaccatgatacatttggaaaggattacatatggaggggcatcttgacactgacgagagctatactacaatgtgaattccaagatacctttgtcttgcaaggtgccaaatcggtaaaactaaacttgcat

SEQ ID NO: 295085 - DNA, 365 bp, Zea mays
ccggtccggaatttcgggttgacccacgcgttcgcccacgcgttcgtggacgcgtgggtcaattgtagaatctagttaaaaattgggacggtacaaaatctcttgtgcatgggaggtcataccaaaggaagcttggtgtcctaaagggtggagcacctccaacagtggataaaccaaatcgactatcaccagcatttacaggaagaagttcttgacaagataaatttcatcgttcaagaaacatgttcactatcccacatcgttcacgtgttcgtggaaggtttccagccttcaaatatgtaacttttgcctttgagaacacgagctattccatgaaaccttttcaccccttcccccctgttgtg

SEQ ID NO: 295086 - DNA, 322 bp, Zea mays
tagaatgaactgaaaacatcctatcgatctactttagctatacctctgcgatccattggggagcgcaacgaatgttacatgggcgaccgggcagagatgtcgcgacaggcttacgattgctatcacctgttttgcaagatctatatgccaccacctctcggcatcatgcatattcgttcacgacagctacggctgttcgcatatctcggcgttacactagttgaagaccatggacatggtcaacatcacaaatgtcttagacgagccatagcacctaacgccgactggtctgttaatcggacctactaagtacatggtgata

SEQ ID NO: 295087 - DNA, 369 bp, Zea mays
tgaggccgtatacggaggaggaggaggcctttacgacggccgactgcggttcggcgtcggtgcattcctcgaggagggagacgaggccttcgaccttggacttgacgtactccgccgggttcttcatggcataccgcacgtctgtctgcgccgcgaggtggatcacgtgggtgaagggcacgacgtctaatagcttggccagtaagcggccgtccttgatgtctccctccacgacgaaactcatcgtggctggccatcaacgcgcgctgcgcctttttgagcgatgggtcgtagtaggagttgaagctgtcgatgcctaccacacccttgccgcgtttgctgagcgccagcgagcaatgctctcccact

SEQ ID NO: 295088 - DNA, 449 bp, Zea mays
ggacaagtgacaaatgaatctgtttgaggcttgcttgaatccagattcattggatggacaagtgacaaatgacctgaagaaagctggcagccttagattttacaaaccaaaattcaaatatattttttgtgatatggatggtacgctgctcaacagtaaaagtcaagtttcagcaaggaatgcagaagctctaagggaagctaggtcaagaggagtaaacatagttattgccactggaaaggcacgtcctgctgtaatcgacgctcttagtatggtggacttatctggaaggactggtattgtttcagaatcatcacctggtgtattccttcaggggcttgtggtttatggtttggaagggagacggatttataaaagaaatttggaccaagaagtatgtagagaggcactctcatattctatagagaacaagataccattagtagcat

SEQ ID NO: 295089 - DNA, 288 bp, Zea mays
cttctcctccccctcttaccaagtcctcttcgggttagggttacttagggttttgtggaggggcgagtggcggcggctgatgtggagtgccgttgcttcgtcggcgggcttgcctgggccaccagcaacgagtcgctggagaatgccttcgccttctacggcgagatcctcgactccaaggtcatcaccgaccgggagacggggaggtttcgcggcttcagcttcgttaccttctccttcgagaacttcatgctcgacgctatcgagaacattaacggcaaggagctt

SEQ ID NO: 295090 - DNA, 393 bp, Zea mays
cccacgcatgcgtggactcatatgccttgtccgaatcgaggctatcagagtatacgcgcagggcagagatcacgacctgggggacgactaatctactgttaacgagggctcgaatgcttgagctagctgcaagactgacactgcctttaagttcagcgaaggaatctggtgggacgctaagcttgcccggtacgcaatcggcgccaaactgaagcttgtcggatgagaggtctgcactgaacagcttactatggtaacctaaaaatcagtggcatatgcgataaatgataggtgaaccgagctaatctaacgcgaaggggcacgagtactactccacatatgaaccggagcgttctatgaccacgcttgacatgtgcatggcagagcttgacg

SEQ ID NO: 295091 - DNA, 444 bp, Zea mays
attttcttatacaaactcagcattcagccggtcagttgaggaacaggaagaattctaattctggtagagcaaaagtttctgaaagtacagatatagttacatttgctgatgtggctggagtagatgaggcaaaagaagagcttgaagaaattgtggagttcttaaggaacccagaaagatatgttcgtcttggtgctcgccctcctcgtggtgtcttattggttggttttgcaaatgctatcagtaatggcaattactgcttgacaattgtgtttgttaccatattgttattctttatctacaggtgggtcttccagggactggaaagacacttcttgcaaaagccgtagcaggagaagcagaagtcccgttcataagttgctctgctagtgaatttgttgagctatatgtaagcatgggagcagctcgagtacgtgacctatt

SEQ ID NO: 295092 - DNA, 386 bp, Zea mays
cccacgcgtccgcccacgcgtccgcccacgcgtccgcggacgcgtgggcgaagctggaggtgtggctagaggtggagtcgcaccacttctacccgaacgcgtcgccgctggtgttccagctgctcgtgaggccgctcctgggcggcgcccccgacgcggcggtggtggacaagcacgcggagcagctcgccaaggtgctcgacgtgtacgaggcgcacctcgcccgcaacaagtacctcgccggggacgagttcacgctcgccgacgccaaccacgcgtcctacctgctctacctcagcaagacccccaaggccgggctcgtcgccgcccgcccccacgtcaaggcctggtgggaggccatcgtcgcccgccccgcgttccagaag

SEQ ID NO: 295093 - DNA, 458 bp, Zea mays
  unsure (1)..(458): unsure at all n locations
gtgccgtaccgaatcgccgggtcgacccaggcgacccgtagaagtggaattgttgctcttgatagagcagaagcagtaattgagataactgaatgggttgaagtgccaaagaagatattgactctagagagtaacatcaccaatctgaattcttcttctgaagtaggagcagctaatagcacaacagatagtaaggaaaatctgagttctggcagtaatactaattcgagcactcccattgatgagagtaatgctcaagaaattattacagagaaggtgctaaagaaaagaacttttagggttccgttgaaggttgtggaaaaaacaactggtgctggaacaattctttcgaaggagttgtattctgaagcanaaaataggttagaggcactcgataagaaggatgcagaacggaggaaaactgctgaacttaagaataacctagagtcatacatata

SEQ ID NO: 295094 - DNA, 240 bp, Zea mays
agcaaacctgcagtcatttgctgcagcaccaccaccaagctcaacaacagccagctcgcgaaaatagattaatagccggaccatggcgtcatcaggcgcgctcttcgaactagcccgtccgctagtggcggccaccgccccacaggtagcggaggcaaagaagaagagagcggcggatagcggcgaggctgcagaagcgaaaaagatccaggaccacttctgctcgactctgtgccaggg

SEQ ID NO: 295095 - DNA, 384 bp, Zea mays
gaataacacacgtgagcacgaccatcaggatcctatagctaataacatcatggacatgggcgcggcccttgcatggctcgttgggggcagctcttgctgctcccccaaggtctcaccccggccaaacatcaccaccaactacaacgccaagagactcacccctagggccacctggtacggtcagcccaacaagaccatccactactgacaactgctggaacctgcgcgatcaataacatgaacctgccaccctacagcgccatgacggcgtgccgcatcttccacatcttcaacgacggcaaggcctgcggatcatgctacaaggcgagatgcaaggaaaaacctgcatgatcgggcaatctcatcacggtttacatcactgac

SEQ ID NO: 295096 - DNA, 352 bp, Zea mays
aataaatgcaccactgatacgaaaaactttttttgcattgcatagcaaagaaaaaaatgagcagcagcaacacactgcacagggtgtcgtggcaaaacgtacgtcgatgagcaccttatgtgcgagatcgagggccaccacctgagctctgccgtcatagtcggccacgacagcgccttttgggcccagagcaccgtattcccacagttcaagccagacgagattaccaacattattaaagactttgaccagccttggtttttggccctcatcggactattccattggcccaccaagtacatggttatccaaagcgagccctgctcttttatccatgggaagaagggattct

SEQ ID NO: 295097 - DNA, 295 bp, Zea mays
cggacgcgtgggcggacgcgtgggggcgtccgagggcgacaacaagaggatgatcacgctcaggggctccgacttagaggaggtggaggtggacgaagctgcggccatggactcgcatactctccgccacatgatcgacgacgactgcgcctacaacggcgtcccgatccacaacgtcaactccaggatcctctctaaggtcatcgagtactgcaacagtcacgtgcacaccgtcgtcatacccgatgactactctgtcttcgagggcggcgaggacctcaagagctgggacgcg

SEQ ID NO: 295098 - DNA, 431 bp, Zea mays
tggtacctttggggaggcgaggaaggacacgaggtcggcgcgttcgtgcgtgcccttctcactgcacgccgatccccctctccgaaccccgccgcctgccgcagatccgagggtcatcggcagccatgatctcgtccagcaagctcaagtccgtcgacttctacaggaaaatacctagggatttgaccgaggcatcactatctggcgctggattatccattgtagcagcattagcaatggtttttttgtttggaatggagttgagcagttacttagcagtcaatactaccacatctgtgatcgttgataggagttcagatggggagtttttaaggatagatttcaatatgagctttcctgcgctttcatgtgaatttgcatcagttgatggtagtgacgtgctgggaacatacagattgaacataacgaaa

SEQ ID NO: 295099 - DNA, 251 bp, Zea mays
gtgagagaaaccactgatctgacctgctgttgttcatctgaccacatgcgttcattgaggcggacgattacctggacccgacggcgcccaaaaccttccatggaaactgcctcttacctcaaaccaactgccaaatactatgtattccacccatatttgggcacaacacagcccataggtcccataacaccgcattttcacagttcaagccagaggagattaccaacatcattaaagacttctactagcct

SEQ ID NO: 295100 - DNA, 273 bp, Zea mays
cgcacagctgctctaaaccctaggagcgtgcttgaacagtggcggatatgttatagcgagggaccctttcgccgtatcgaaggtctttgtatatcattactaccaaacgttcgataccaaccgtgctgggcttgatgggctgtaccatcagactctcatgctcacctttgagggtcagaatttccatggcccgtactacattgacggaacgcttggatctttccattaccaggcctgtgagcatcatatctttaactgttgactgccatccat

SEQ ID NO: 295101 - DNA, 319 bp, Zea mays
caaacgcgatcgatgcatgaaattccattctccgatctcggatgcgacgacaccacacgctgcgatggtggcgcgctcgaggcgacgtcattcgtctcggcagacatggcatgatagccacgagaggggtggcagcttgatgacaagcagtctgacaagaaaatgtaaggcatattaactggagacttctttacgtttatatgatgatgaatgagaaaggatggacagcatgggactgcacgagaaccatcagacaggcatctatgcctattgattaatgaagcgatgagatatttaccaaaaagctataatttcctta

SEQ ID NO: 295102 - DNA, 287 bp, Zea mays
gctggctttttcttcctctcttaccaagaactcttcgggttagggttacttaaggttttgtggaggggcgatggctgctgctgatgtggaataccgttgcttagtcggcggacttgcctgggccaccatgaacgagtctgtggagaatgccttcgcctcctacggcgagatcctagactacaaggtcatcaccgaccggaagacagggaggtctcacggcttcggcttcgttaccttatactactagaacttgatgctagacgctatacagaacatgaacggtaagg

SEQ ID NO: 295103 - DNA, 356 bp, Zea mays
cggacgcgtaggcagacgcgtgggccggtcttaggccgacatctggtcctgctgcttaagggtgttcgtgctactcgccgggtgcctcccgttccacaacgccaacctgatggagatgtaccgcaagatcagcacatccgacatcaagtacccatagtggttatcccctgaactccagcgggtgatgcccaagcttctttaaccgaacccaaacaacaggatcacgatcgagaagctactcgagcaccccatggtcaagaaggagtacaggccggccgtcatgctggcacatccgcacggcttcagcagcctcaatgatgtccaagtctgcttcagtaacaccgaccacaaagaca

SEQ ID NO: 295104 - DNA, 438 bp, Zea mays
cgaacggtgagatgcgggtagaactgcacacgacttggatcacgaggatgctggaggacgtggtggccgtagcgcttgacatgagggcctccgatgcttgacggtagggcctctcgcttgaagagggcgggcaggacctacgtgcttgagtaattcacgtgcactacattaaccatccgataatgtccagcaggctttcatagcctcatcgccaaactgcatgttgacggcagcacgtgtaacattggcctttgggacactgttaggtcaggaacgttacaacatactgagaccactgagctatcgtcgaactgatgtgtttcttctggctttctcactgatcagtattgccatctttgaaaatgtttcgaagaattggatacctgaactgaagcattatgcacctggtgtgccaattattctcgtagggacaaagct

SEQ ID NO: 295105 - DNA, 413 bp, Zea mays
cttgtcgtcgcacagcctcgcggtgctcgcgggcggcgcgctcctgggcctccttctcgcggcgctggccgtggccaccacggacgccaggtcccctccgcgcgggcggaggcggcgcgtgccgtggctcgccgcggggttcgtgatgagcgtgctgtgggcgtacaccctggcgcgcgagctggtggcgctcctggtggccatcgggtacgtggtcgggatcaagccgagcgtgctgggcgtgacggtgctggcgtggggcgactccctgggcgacctggtgtcgaacgtggcgatggcggtgcacggcgggcccggcggcgcgcagaccgtcgtgtccgggtgctacgcgggcccgctgttcaacacggtggtgggtctgggcctgtcgctggcgctggcggctggcgcgc

SEQ ID NO: 295106 - DNA, 411 bp, Zea mays
  unsure (1)..(411): unsure at all n locations
cccacgcgtccggtcgtgttttccgctgtgtaagcatctccaacaaacaccagacgtcgtatagcggcagtccagtccacctcctccgaagccggcggtcgccgccggccatcgccgcggaggatatggcgtccctccgtgtggtgtcggtgctagtgttggtggcaatggcggcgagcgcgggcggcgtcgcggcgcggcctctggtagggggaggcggngcgtgggagaacagggcgccgctgcagacgtcgcgccccttcaacatcgcgcaccggggctccaacggggagctccccgaggagacggcggcggcctacgcgcgcgccatcgacgagggcgcggacttcatcgaggcggacatcgaggccaccaaggacagccacctcgtctgcttccacgacaccacgc

SEQ ID NO: 295107 - DNA, 352 bp, Zea mays
cgcctgcggtaccggtacggaattcccagttcgacgtacgcgtacgcattggaacagctaccgatacacacaggactcttataacaggtctggatacatatgtccggggcctattgttgaatgctatcggtaaccaactgcgctatccaaattgccattcacactaatactccttgatcactctgtatctattctccgaggctacccaagaaattacccaccatcaaaatacaagggttcatctcgagcgtcttatattgaaccagccccatccttgagaggtacttattactttgatcgaattgagtatacaatccagttacaaccttttggagccgttctcttacacact

SEQ ID NO: 295108 - DNA, 340 bp, Zea mays
cacacgctgagctactgatcatggcgctgaatgcgggggatgacatgagtgacgtggaccgcttaaaatacgcatcgggtggcaccgctcttattagagcacgacgctgtgcctgctcaatgagtgccctctctggagctgggggaatggtctacatggtgtacagaactgtcaaaggaaactggcttcacaagcaacacactgacccgtcacagaggcatcatgtgttcaagaaacgctatgcgtatcctgttgtgctttgctagaaacgatttgggtcatgactacctcgttttggcatcaaaagcgttggtttacacacacaagcccatgttatgca

SEQ ID NO: 295109 - DNA, 435 bp, Zea mays
ctcataaaccctatataccgccgactcgccgtcttcgcctgccgccggatctctgcaccggcggtagagaagcccgtgctgcccctcgtgtatcaccggaacttgcagcaaagacacaattccagtttggtggatgcgagtggaggattcagcgagatgcttgcctctacacggaggtgctatgtatttggaggcaaaggtggtgtggggaaaacaagcatggcggcgtcgcttgctgtgaagtttgccaaccatggtgaaccaacagctattgtttcgacggaaccatctccgtcactcggtgatttatttgaacaagacatgggtgttggcggcaaaactgtacgcatcactggatttgactctctttttgcagttgaggctggtcagttcaagataaagggagaacctgaagatcttggatcttttatcaac

SEQ ID NO: 295110 - DNA, 337 bp, Zea mays
tacgcctgcacgtaccggaccggaattcccgggtagacccacgcgttcgctgacgcgtgttcacgtggataactctggtcatcaccggcaagggaaaccttgacgggcagggcccagctgagtggagcaagaactcctgcaccaagaagtacgactgcaagatccttaccaactcgctggtgatggacttcgttaacaacggggaggagttcggggtcacgctgctcaactccaagttcttccacatgaacatgtaccggtgcaaggacatgctgatcaaggacgtgaccgtgacggcgctccacgacagctccaactcttattgcattcacatggg

SEQ ID NO: 295111 - DNA, 368 bp, Zea mays
tagcaagtcgcagcaggtttccgcgagttccatcaggcactcgttgcaggacaggttgagtaaggtttccggcaaggggcggccggatgagatcactgtgaaattgtgcactagcacagcccctccattaaaactaattgacataccgggcgttgaccaacggagcacggatgaatcaataagcaactatgctgcacgcaacgatgcaattctactagttatcattccagctcttcaagcgcccgatgtggcatcttctcgagctctaaggattgccagagaattggactcagaaggtactagaaccattggtgttctaagcaaaatcgatcaagcttctggagaacagaaagccctgggtgctgttc

SEQ ID NO: 295112 - DNA, 383 bp, Zea mays
  unsure (1)..(383): unsure at all n locations
gagtcggatggctcgtggctgccctgctcatacgtgcttgccgctcgaccgtatgcgtaacactnccgtcaactgtctcaaggtatggatgtctcattggtcccgacgaatcagctcgggcaccgcttggacgcgtcggacatacaacggactgtagcgcggctgaaccgatgaaccgaccgttcaccgtccaggagctagtccgattcgccgtctatgagcacaacttgaaggccaatgctcttctggggttcgagaagcttgtgaaggctcaagacacaggtgggtgctggcacgatgtactatcttagtttggaagtgaaggatggcgaagctaagaagctctacgaagttaacgtctgggagaagccatgggagaactt

SEQ ID NO: 295113 - DNA, 269 bp, Zea mays
  unsure (1)..(269): unsure at all n locations
ncttatcatacgcagcatatttgtcgacgggatggcgtgcgtaagcgggggcttcgccatcagccagacggtggcggagaggctggagcggatgcaggacgcgtgcatacggctgaacccgtctctgtacggcagcgactaccgcatgcaggcgtgcatgggctagctgggcgtgccgttgacgaggcagcccgtgcttcaccagtacgacgtgtacggtgaccttctgggacttctcgcagcgcaccgcgacgtgccgctcgtgtcgc

SEQ ID NO: 295114 - DNA, 330 bp, Zea mays
cggacgcatgggccgtggtctcgaagaaggcagcctctaactcgtcaccggcaacggcaccatccagggctatcacggatgccgagcaggctggtagataccgacacgccttactctcagacctacgcagggcaagaagcaaatactggacacccatgtcctcctagctgctcactcttaagagctggaagatctattgctgggactcagaatgttacaagcctgcacaaggatgaagcatggaacgtgaatgtacacatccatggctgagatcttgaacagggtcatacatgtggaacgatcgacgcgcttaatgttccattagcagat

SEQ ID NO: 295115 - DNA, 388 bp, Zea mays
accacctggcaactacctgacggtcctcttgtagctaaagggcccctgcatgttctacatgggcatctctctcgacggcaaccggctctgcaccggctacctcagcgcgttctataggaactggatcgagatcgagaacgtcaagaaccttctaatgaaccgtcactgttccatctacgggcatgtagccctggtgtggagcaagaaccagttccatcgttcttacaattgcaagatacttccttatagcttgctgctggatcttgtgactaacgtccagatcctacgcatgactctgctcaacagcaatttcttccacctcaacatctttgagtgcaataactatctgatcgacaaattgacggtcaatgtcatcagtgacagttcc

SEQ ID NO: 295116 - DNA, 247 bp, Zea mays
acattggcgccttttagatgacggttggcgtcagagccatgaacgcgccgatactggagatcgtcatgagcttcgacctcgtgtacacggaaaacgcgacagaacgtgaccccaagaagggcgactctggcatcataaagcccatcgccatcggcttcatcgtcaacgccaacatgctgtctcagagcgccttcaaacgggcctccatgaaccccggcgtctccttcggcccggacagagtcaccgg

SEQ ID NO: 295117 - DNA, 343 bp, Zea mays
gcggaagtccggtcggaaaaactgccatgatatatgctgaactgggacttatcagaaccgcggacaacatgatgtattcccacgggctgatgtttcttccagtcttgaccttttcgctcatctgtgctaggcaagtgagcttcaacgtctttttctcatacgtcttgaactctcagaagctcaccggtttgatcatgaactccgtggtgctgctcaccttggctgctgtactccttgtagccaaccatgaaactcatggacctattactggtggtgtctaaagacgaaagtaccttctgggtttcctgttgacagtaggagcatcaggcacctactcactcat

SEQ ID NO: 295118 - DNA, 321 bp, Zea mays
cgggtcgacccacgcgttcgcggacgcgtgggatccaggctctcgttaggccattcctgttggatgatatggcagatgtaatgcatggctgtactctgagagatcacatggatgacggccttaccgatgaagatgaaggcaatgggtttgaacgcttgaaggagatcgatcctatggctgcgcagaggatccatccaaacgaccatagaaaaatcaaacgctacctcgagttgtatgcaaccgcgggtgccctacccagcgagctgttccaaggagaggcctctgagaaatggtgtcggcctagtaactccagactctact

SEQ ID NO: 295119 - DNA, 326 bp, Zea mays
cgcgttccacgtcgactgcatcgacacgtggctgctgtcgcactccacctgcccgctctgccgccgcagcctcctcgccgacttccccacctgcggcggcgcctgcagcccgctggtggtcgtcctcgagtccggctccgagggctcggtctccgatcgccacgacgcggcgtcctccgcgcgcctcagctttggcatggagcaggagcaggcatggcaggatcggaaacacgtcgccgctgcagaggcagcggagaagaatgacgaggtggtcgttccggtgaagctcggcaaggttcgaaagccaggccacccgaaggagccgg

SEQ ID NO: 295120 - DNA, 327 bp, Zea mays
cctgcagtcatctcctgtactatcttcaccatgttcaacagctgccagctcgcgaaaatgatggagagccgcagcatggcatcatcggctgtgctcttggtgctagcccttgcgcgagtggcggtcaccgacccacaggtagcggaggcaaagaagaagagagcggcggagagcggcgaggcggcggaggcgaagaagatccaggacgacttctgatcgacgcgtttcgagggcaagaaggggacggacctggtcgtgtgcgaggagttgctcgctcttttccagcagtccaacctggtgctgtacggcaggatccagtgcaagggc

SEQ ID NO: 295121 - DNA, 327 bp, Zea mays
agacgctccgcgccgagctgccgttcttgattgttcccgccatccggatacgcaccgtctgcagcatcttcctgaagcgcgctggcgctgccgggctctgcctcgccgacatcggtgacatgatgacccgcgagttcacggctcagcaggatgggctgagcacactcgaggcgctatgcaagcaagcgcacgactccgtcctcccacacccctcgtccgacggcgacggcgacggcgtcgacgagagtacaagcgtctccggcgggcggaaacacgtgtcgttcggcgacctgagcctcgcggagtggacgtcgttcctggagaggt

SEQ ID NO: 295122 - DNA, 484 bp, Zea mays
gggtcgacccacgcgttcgtggacgcgtaggcggacgcgtgttcagacgcgttggcggacgcatgggccctgggccaagtatatgaatgtagcgaggtggtttaatcacattgatgcacttctgaggctgagtggagttaccgcatagggcctaggtgttaaggttgagccatctgcagttccttcagcttcaattcttgatgttgctgatggacaggccccagctgctgacgaggatgacgatgatgatgttgacctcattggagaggagactgaagaggagaagaaggctgctgaagaacgtgctgctgctgccaaggcttgtggcaagaagaaagaatctgggaaatcgtcagttttacttgatgtgaagccatgggacgatgagactgacatggtcaagctcgatgaagctggtatgagtgtccagatggaaggactgctttggggcgcattcaagcttgtcccatttggatatggcatc

SEQ ID NO: 295123 - DNA, 354 bp, Zea mays
tttccaagctcctcctcgcgattccaatccacgcacgcctcctccgcttccgcctcgctcaggagattcggatttgattatattaccctgattcgtttaaaaggatgggttgagctcttatagtcagtgatggaacacaaggaggcgggctgccagcagccggagggcccaatcctatgcatcaataactgcggcttcttcggcagtgctgcgacgatgaacatgtgctccaagtgccacaaggagatgataacgaagcatgagcaggcccagctggctgcctcctccatcgatagcattggcaatggcggtgacggcgggaaaggaccttgaattgctgcatctgtaaatgtg

SEQ ID NO: 295124 - DNA, 253 bp, Zea mays
cccacgcgtccgtaccatcccgacaaagatggagcatgtcttctacacttactccgacaaccttcccggcgtgctcatccaggtgttcgaaggtgagtgggccagtaccaaagacaacaatctgctcgtcaagttcgagctttctggcatcccttcggcgcccaagggcgtcccccagatcaccgtgttgttttacatggatgctaacggtattcttaacgtgttatctgaggacaagacctccggtcagaat

SEQ ID NO: 295125 - DNA, 376 bp, Zea mays
ggtcgacccacgcgttcgcggacgcgtgggcggacgcgtgttttgtgtttctaatcagagcttttctcctgaatatgagcatggaaatgacatttctcctaagaatcatgttgggactaatacgatgatggggttacggaatggcttatttacttgtttgatcggtgctgctattagtgcaaattttacattgtcaaatacaaatatttgctatggtcttattggcgaagaaattttaccagaactagattcttcaaactcctttataaaaattatttcatcttcattaatgtcaatattggactcgttttctactctacaaaggatgtctgtgtcaactggttagcgtaatatttggcattcagttaaaatattt

SEQ ID NO: 295126 - DNA, 279 bp, Zea mays
cgggccggaattgccgggtcgacccacgcgttcgaacaccaacaatcggggggagaacgagaatgccatcaaacgccgtggagaagcggacgcacgcaagatggagaggattccgaaacctaaggaaggcgagggtgtgaaacgtctgaagctggaaacaggagcgggagcagcaattagggtcttggaccatgccatggatatcaacggaccaaggggccgctgcctaccaaggaaggcgacatgagattggcagctaggacagacggaactatatac

SEQ ID NO: 295127 - DNA, 400 bp, Zea mays
atccaaaaagagagagtggaaaagatggcgcggttgatcacagtggtgtggtgcgcggtggcggtgctattatgcgccgcggccggtgcgtcgtgggtggaggaggcggcgaacccgatacgaatggtgtctggcgtggaggcggaggtggttcgggtgatcggggagtgccggcgtgcgttgaagtttgctaggttcgtgagcaggttcgggaagagttaccaaagcgaggaagagatgaaggagaggtacgagatattctcgcagaatctcatgttcatccgctcccacaacaagaagcggttgccctatactctttttgttaatcattttgctgattggacttgggaggagttcaaaaaacacaagacttggaactgcccaaaattggtctggcact

SEQ ID NO: 295128 - DNA, 401 bp, Zea mays
ctcagatgttcttattttcaactcagggcattggtggactgccagcaaattatttgacatgggttgctattttgaggctggaggtgtgcttaaactgggaacatccattaacgctgctttcaaaatggcattggaaacttgggcttcatgggtgaaagagagaattgatttaaggcgaacacatgtattcttccgtacatatgaaccgtctcattggagtggcttaaatcaaaaggtgtgtgaagtaacacaacaacctaccgctgaggccaatggaaatgacaggagagaatttggggatatacttgctggtgttgtggcaaatatgaatggtcctgtcacaagactaaatgtgactttgatggggcccttttaagtggtgcttatattggactttggag

SEQ ID NO: 295129 - DNA, 331 bp, Zea mays
gcggcactcgctcgtttgcccattgccctgccgtgtcgacgcagattgatccggtccgagccatcaccgtggcgtagcccagctccgtcttgtcgtcgtgggcgcgttcatggcggtccgaactatcaaggtgaccaacgtgcctctctcggcgaccgcggagaacatgaaggagttcttctccttctccggcgagatcgagtacgtcgagatgcgaatggactcggagacgtttcaggttgcttatgtcaccttcaaggagtttcatggagccgatacagctctgctgctctttggatcaagcatgtggtggcaatgtttccgtgaacat

SEQ ID NO: 295130 - DNA, 370 bp, Zea mays
ggccggagatctctgaagccttcgacgcgtttagcatccatcatgttggcatactgcggaaagatcaaggatgagctcattacgaatgctgtctacattggcacccatggcaagggtatccttgctgatgatgagtccactggcaccattggcacgcgcctattccagaatcaataggcagaacgtcgaagagaaccgtacgaccctccgtgagctactattctagcagccctggtgctatacagtacatcacccatgtgatcctcttagatgacactatgcaccacaagaccaaggatggctatccatcttgatgatgtcctcaaggacgcaggcatcactgcatggacatcaaaaggggggggttttt

SEQ ID NO: 295131 - DNA, 447 bp, Zea mays
gcttcgcggacatgagctgggaggagttccgtgcaacccggctcggcgcagcgcataactgctgcgccacgctcgccggcgaccaccagatgcgcgccgtcgtcgccggcgtgctgccggagacgaaatactggagggaggatgggatcgtgagcccagtgaaaaaccagggccactgtggatcatgctggaccttcagcactactggtgcgcttgaggctgcatatacccaggcaactggcaagggcatactgtctttctgagcaacagctttgtgactgcggttttgcattcaacaattttcggatgtaagggggggcctttcatcccaggcctttgaatacatcaaagacaatggtggtctttgacactgtggaggtgctacccttaccaggggtcaacgggatcttggcagtcaaggcttataatgttggagtaaggtttgga

SEQ ID NO: 295132 - DNA, 337 bp, Zea mays
cgccggtatggtgatccgcaggggttcttcgtacgccgtcgcggcacttctcgcgctcgcctctgtcgccgtcgtcgccggcgagggattcttccaggagaagttcgaagattgctgggaaagtcggtgggtcaagtcctagtggaaaaaggacgataacatggctggtgaatggaaccacacctgggggaaatggaatggagatgcagaggacaaaggtattcaaacctccgaggactacaggttctatagcatttcagctgaataccctgaattcagcaacaaggataagaccctggtgctgcagttctcttggaagcacaagcagaatcttgac

SEQ ID NO: 295133 - DNA, 307 bp, Zea mays
atgaccgcaaaggattgctgcatgatgtgtttcacatactatctgatctggagctaataggccacagggtgaaggtggcgaccacaccgtacggaagagttgttgaccttttctgtatcactgatggcatggaactgctgcacagaatggagaggcatgaggagacctgctcggagctaacatgtaccctgggcccttacatcaactgctaggtcgtaccagcagaatggatccagcatgggttttctttcctgccgcctgagatcggctaggaactgttcatggcggagcttgctgacactgacag

SEQ ID NO: 295134 - DNA, 251 bp, Zea mays
tgaaactctggttccgacatacttataccacgctcatggaatcaatcatcatagaaatcctacaagagactacctgtttggcccatccctggagcatactcgtcgtgcagtggatcatatccattgtaatgaagtgcacggtcgaagcacctgcgtccactgacaggctggaaggggacgaaacaccaatataggtctgcgtttgttgatcacttacagagatcttactcctgacgtagctttgcatcatg

SEQ ID NO: 295135 - DNA, 454 bp, Zea mays
taccggtccggaattgacggatcgaccacgcgtgcgtgtcgccatgcacgatcgactatgtctgctcgccacaaggcctgcaactgtctgttgaaatgccgtgtccagcgggagcgagaggctctgcgcgacaacatgaaggcattgcgaatcctgatatccggaggctgcttaagatgggcggtcttaacctcatttgggggctcatgtacgaggagaaccgagagaggctcatgatcttcctcctgaacttaatgcgaaacggcaagacctactcggagcacagcccgctaaagagcgttagcgcatgaacgcagctacagaatgaagcgccaaggtcataccctgtacagattcagcagctgacaggcgctaccgtcaatagtattcgtggcaaaaggcttagatcgccgtcaagaaattgtgagtcatctggatgacgtgcttaatttcc

SEQ ID NO: 295136 - DNA, 444 bp, Zea mays
attgggactgtacaaaatatgttgtgcatggctgttgataccaacggaagcttggtgtgctaaagggtggagcacctgcaacagtggataaaccaaaacgacgaacaccagcatttacaggaagaagttcaggacaagataaatctcatcgttcaagaagcatgtccactagcccacatcgtccacgtgttcgtggaaggtctccagccttcaatatgttaacttctgcctttgagaacacgagcaataccaggaacctttccacccctcccattgttgtgagaaagcctttctcaaaatctggatgtcctgaacactcaagggtgtcacccaaaaaatcagctatcagttccctcaccaggtcttttgaaggtcacatgaaaagtacaataccaaattcagtaaaagtgagccctgagctaaagaaggcgacacaggaagaag

SEQ ID NO: 295137 - DNA, 432 bp, Zea mays
cccacgcgtccgcggacgcgtgggttctcaaactagcggaactttggaaaggccttgtagtgctaccctgcctctcttcctcggtagaggtgtatggggtccgatcaaccccatggcaaatgggtaacacgacttgtgggtaaagatgcgcaacctctacagagtgtaaaactggtatatcagacatgctcacgtgcatgagcgactcagacactcacatggttaacttatagaattaaactcaaattgtcatttgcattgcattgtgggtgttattatcaattgtgatctcatatttaattgggttggtatctacttataccaggtaactgctaatacaattttgacgaacactaaaagcaatgctcagctttaaccatctcctttggtaagccttacacttacatgagttcccaccttttttgagttcat

SEQ ID NO: 295138 - DNA, 337 bp, Zea mays
tcgcctgtcaagtaccggtccgggatttccgcttgagccaagcgttcggctataaggcggtacgctgtccatgggttactatcggcccgacttcaatggcttccagttctttatcaccaccgtatactaaaaccggttgcccaagaagctgtacgggcgccacgtggtgttcggcaaggtggtgaaagggattgacgtcgtgcgcaagatcgaagcctagggccagctcaccggcgtgcccaaggccaaggtcgtcatatccaacagcggtcagctgacagcgcctgcctccgccggccatcgtgacctgtgatcgatgacgaggagaacgacttac

SEQ ID NO: 295139 - DNA, 229 bp, Zea mays
ccggaattcgacggatcgctccaggcgtccgcagcaaagtcatgagatgaatgaggtcattgagcttgcaatcaaacatgcaggactgtctgagagactagctcttgcacaaccaaagggtgtccgtctttatggacctacggtcacaggatcgacattgttggcacgtgcggttgctcatgacactgactgcaccttaatcagggtgtctgcttctgagttggttcat

SEQ ID NO: 295140 - DNA, 369 bp, Zea mays
tcggtcgcctgcagtaccggtcctgaatgctcgagtcgtcccacgcgttcgtgcccgcgtgcagtgccgtccaggccacggcatgagcgtcggcagcttgggtcgctactccagcgagggagacgtgacacgggggcacgttcgcgacatgaccttcacgggcaccatgaacggcgttcgcatcaagacatgggagaactccccttacaatagcaacgcctctcacatggtcttagagaacatggtcatgagggactgtcataaccccatttatcataaatcagaagtactgagcctactacaactgcgagcgcaagtacatggccggggtgactttcaatgacattgacttcaagaacatcaagggca

SEQ ID NO: 295141 - DNA, 426 bp, Zea mays
  unsure (1)..(426): unsure at all n locations
gaaccttggccggaaatcactaacattccattgctcttttaatcctgccatagacaaggagcatgccaagtgcatggccgggatactggctcactcaccttgtctgaaccggatatcccttgctgggctcacagagctacctgactcggctttgagcacgctgagagtgtctggatcatctctaaaatccttttcattgtactgctggtctggcataacagatgatggtctagcacacgtggctattgcgtgcccgaacannnnagaggttgaacttcaaagctgctttaacactacagatgctgccttggaaagtctttcaaaaggctgccgtggtttgaagagtctaaaccttggttcttgcatgggcattacagaccaaggggtttctgccatcttcagcaattgtccaaacatctgcacgct

SEQ ID NO: 295142 - DNA, 338 bp, Zea mays
cttggaaagagggggtaacaaaacacgggtgctcattcttgcactaccacaccatgtaagggcgtggattcatttttggccgcggggagaccctcatcaatgatctatactagctccatacgaatggtgataatccacaaatagcatttgtattatgaagaatgtatgtgaccactgacctgtgagacaaatactgatatgtatttaaacacggttgtgatgcccaaatgcttggagaaacaccctacaaattcaaaagtgcactagaaggaagaaaaaacactgagagctcaagcaacaaccaatgatcactacttgcccccacttgatatatttta

SEQ ID NO: 295143 - DNA, 316 bp, Zea mays
  unsure (1)..(316): unsure at all n locations
ctgaccatcaacggacacaggaccatcgtctggcaaggatccctggtgttgatcaagagcgagggccaacattcttacgggggcgagatcctcccgaattgcttggtgctggattttgtgacgaacgtccacatccgctggatcacacttctcaacaaaaagttcttgcacctaaacatcttcgagtgcaagaacatccttatcgacaaaatgactgtcttggtcccgctcgacaggcccaacacagactgcatgcacatcnncnncnccagcaacgtgaccatcatgaactccaccatcggcatgcgctactact

SEQ ID NO: 295144 - DNA, 448 bp, Zea mays
gtcctctcataccgtcgactgcggagacgtttcagttggccctgaaactcttcagctgcgggccaaaagacaggtcgatgacctgttaggagacaacccgatgaagatgtcgtacatgatcgggtacggcgaccggtacccgcagcggatccaccaccgggcctcgtcgttgccctcgatcagggaccatcctcagccgatggcgtgcaaggatggcacgccgtacttcaactcatccggtgcgaatcctaacccgctggtcggctcggtggtcggcgggccgggggaggacgacgcttacgaggatgaccgtgcggatttcaagaagtctgagcccactacctacatcaacgctcccttggttggggtccctgcgtacttcgttggcaaccctaatcctggtcataacaccagacattgagcggtgcagcctctggatctttcttgg

SEQ ID NO: 295145 - DNA, 238 bp, Zea mays
tccgtaattcccaggtcgacccacgcgttctgttgcatggacatgatcatcaaggacgtcaacctgtcggtgcccgatgacagcctcgacgctgatggcatacacatggtcggatcatacgggatcaccatgaccaacaccgtcatcggcagctcgcgactactgcatccccatcggcccgaaaacctccatggtgaacatcaccgtcttgacctgcggccctggcacacagcatcac

SEQ ID NO: 295146 - DNA, 275 bp, Zea mays
cttctgctacccctcttaccaagtcctcttcgggttagggttacttagggtttcgaggaggggcgatggcagcggctgatgtggagtaccgttgcttcgtcggcgggcttgcctgggccaccagcaacgagtcgctggagaatgccttcgcctactacggcgagatccttgactccaaggtcatcaccgaccgttagactgggacgtctcgcggctttggcttcgttaccttctactccgagaacttcatgcttgacgctatcgagaacatgaac

SEQ ID NO: 295147 - DNA, 368 bp, Zea mays
gacatgcctgtctactgtggacagcttggacagaccgacgtgaataggctaacgctggacagtacaatggatccctctgtcaagaaccatgtcaaggagttcgagaagaacttatgctgttaagcacccatcttgctcaatcgccggaaatcaccatatcgaccagatcacaacaattcttgacgtgcaaggagtggggacgaaccaattcagttaaccttcaagggagctcattggcatgcttcagaagattgatggcgacaattatccaaagaccctgtgccgcatgtacatcattaatacaggccacggtttccggcttctattgggcacccttaagagcttttttgacccaaagaccactgcat

SEQ ID NO: 295148 - DNA, 289 bp, Zea mays
atcgatcacgacaagatggcgtgcacagacaatgcgatgagagccttgttcctcctggtccggttttgcatcgtgcatggtgagaatgaataatcatagggcatcgttgcgaaagcgttcgggcctgggggtgtcttttacattaccaattttgggcgccttcggcaatggcatgacatgacagcacgaaagctgtgcatgatgcattggcatttgcgttcggcggctctgggtagcatacaattcttataccctatggcgactttcttgtcgtacaactcaactttac

SEQ ID NO: 295149 - DNA, 145 bp, Zea mays
gagatagataaatatccccaaaccctagctcccgatctcgatggcgaacccttgcgttttggggacatgaccgtctgcgtctccccgtctggcctgatctttaaggagctgtactccaacgttgtgcccaataccgctgttaact

SEQ ID NO: 295150 - DNA, 341 bp, Zea mays
  unsure (1)..(341): unsure at all n locations
ctgactcttgggcgatcacccgccatgcacattgcagtcgaatgttctttcaaaggtgtttggtgggactgcaaagagcctggccacatggctaacagctgcccaaatgaagggatatgccagaactgtggcaagtccggtcacattgcaagagactgcaccggtccaccattgccggcaggagaagtgatgctttgcaggaactgctacaaaccagggcattttcgtgaggaatgcacctatgagaaggcctgcaatatttgcgggttgancggccaccttgcccgtaactgcaccaatgatcctgttggcaaccagggcaatagtggtggccattttgc

SEQ ID NO: 295151 - DNA, 364 bp, Zea mays
ccgaaccctagccccgggcccacccttagcgccaaccccgccgcgctcaacgccgtcaagctatacctgcacatcggcggctcctccccctgcgccaagtggatcgtcttcgacagcctcgccgccgcctccttcgtacgcaccggcgacgacgaggacgacgacgcgcccgccggcgggccgtggtgcctcgtcgtgggctcgaagatccaggccagggtcgggcccgagctgcagctcaagaccttccccgcgcagcgccgggtggatttcgttgccgacggcgtatgggcgcttaagttccgccacgctgacggcttcggtgacttctgcgcgaagtaccacagctgtatgtttgagaaca

SEQ ID NO: 295152 - DNA, 388 bp, Zea mays
atctgaacgagtgcccgcacctgtgcgcgctgtcctacgattacctcaagaagaccgagggctacgagcagaacctgctcgccttcttgcagaacaagatgaacccggacgccctgctcgtgcagctcatcgaggagatggacaagtgcatcctcggctacttcttcttccactggaaatatgcgacccacataatcacgcaggttctgacgcacgagcagcctagaagaaagctcagaagaatggttatggaggccactaggaagatgaggtttgagagggtgacgagagagctgaaagttaccaggctgttcaccacgctggtggaggagctcaaggccatcggtgtgcactgtcagcacgaccacaaacgggcgggcacggacgt

SEQ ID NO: 295153 - DNA, 256 bp, Zea mays
gattatacgtgtggattagcgggggagtaccgggtcgggaaacctccacgggcatggcccacgcgggtggagcaagagctcctgtagcactaattacgactgccacattcttcctaacttgctgttgatggacttcgcgaacacaggtgaggtgtgcggggggacactcctcaactgcaaggatgccacatgaacacataccggagcgcggacatgcttgtcaaggacgtgaccgctaccgcgcccggggacagcc

SEQ ID NO: 295154 - DNA, 286 bp, Zea mays
aaagcatcgatcacgacaagatggcgtgcacaaacaatgcgatgagagccttgttcctcctggtcctcgtctgcatcgtgcatggtgagaaggaagagtcaaagggcatcgatgctaaagcgtccgggcctggtgggtacttcgacatcaccaagtagggcgcctgcggcactctcatgacatacaacttctttgctatgaacatgtcccggtccacgggcatgctgttcaatgacgtgacctttactgttctttgcgacagtcccatcacggttggtttcacatg

SEQ ID NO: 295155 - DNA, 343 bp, Zea mays
cccccagcgatctggacaaggccactgaaaatattaagatggacgaagatgagcagaatgcatcgagtctgacagaagatggaagcacattattacctctaccagtaccagtaccactaagcaatgatattgtaattatcccaaagatagtgagaaattttgatcaagaagagaaacagatccaggatttgaaaagtaacatgtccactgttaagtctttcatggagcagttaaaactgctgtactctgaagaccttaaaaagcttggtgatcatttgcgtattatttctcatgcggcttctgggtaccgcaaggttgttgaggaaaaccgcaagccttacaa

SEQ ID NO: 295156 - DNA, 245 bp, Zea mays
cggacgcgtggggatcacactcgcagagagaaggaaaaatatccccaaaccctaagtcccgatctggagggcgaaccctcgcggctgctgcgacatgaccggcaagggagccccagggggccggatcgtgatggagctgtacaccaacgaggagcccaagaccgaggagaactttcggcgctgtgcactgacgagaagggcgtgggcaaattccagaaggcgattcactacaagggctacacctt

SEQ ID NO: 295157 - DNA, 307 bp, Zea mays
  unsure (1)..(307): unsure at all n locations
ctgcatacaggcgcatagtaggtgctcttcggtacctggtgaacacaagaccggacatagcatttgctgtgggatttgtctcacgttttatggagaagcctactaccgagcatctgcttgctgtgaagcgagtgctgcggtacgtancatgtacttcggactatggctgctactatcagagaaggaagaaaccagcaggcttgaccgggtacagtgacagagaccatgcgggtgatgttgatactcgcaagagcacgacaagagtggtcttcttccttgtgggcagtctcattactttgcaatcaca

SEQ ID NO: 295158 - DNA, 328 bp, Zea mays
cagacgcgtacggaagccaggacatggaaataaaaccgtgatacctgcctactgatgcaagaaaaacaccgagataccacggtgctgaacggagtgatagacgtgctcgaataccaccttgttcaatgcaccgccaggggcaagtaccaggtcttataccttaaaatgaatgatgactaccacatggaccttgctgagttcaaaactagtgcaaagaggaaagatactttttacagcaccatgaatgcctacacaaatggtcacgacattggtcttggaaaaatgggtgtaaccacaccccatcaagcttggccttggtttcaactta

SEQ ID NO: 295159 - DNA, 412 bp, Zea mays
ggcgagcaggatggaggacctggaggccattgtgatgctggctgcgctattcgttgttgggttgtgcaccacccccctcacgttccaggtcggcaagggatccaagcctggccacctgatcctcacccccaatgttgccaccatatccgacgtggagatcaaagagcacggtggcgatgacttctcctttacgctcaaggagggcccgactggcacctggacgctcgacaccaaggccccgctcaagtaccccctttgcatccgctttgctgtcaagtccggcggctaccgcatcgccgacgacgtcatccctgccgatttcaaggccgacaccacctattagaccacactcagcatctaatcaatctctggtgatgaattagatttcaaaagagctcatctagcgcacatg

SEQ ID NO: 295160 - DNA, 229 bp, Zea mays
aaaaaacataaaaaaaaacatacgaaaacacaaaaagatggcttgcacaaacaaagcaaatgagaaccttggggctcctggtggtcttctgcatcgtgcatcgcgagaacgaagagtcaaacggcatcgatgcgaaagcgtacgggcctgctgggtacttctacatcacctcgttgggcaccttcggcactggcaagacacacagtacgaacgctgaacatgaggtatg

SEQ ID NO: 295161 - DNA, 324 bp, Zea mays
cgcactgcagagagaggaagtattgaaacagacggttccagatgagaaaaacaaacatgtagaagcaattggagcagttgagatggcaaaaaatgcatttacacacgagacctattccaagcaccaggctgagaatgctaaggctgtggatgcccttttatcaacaggcaaaagttgcaggcggtactcgaaacatgaaatagagctcgccactgattacttttctgatgcaaagaagattggtgagggtggctatgggaatgtatacaggtgtacccttgaccacaccgaagtagctggtaaagttgttgaacaaagattcga

SEQ ID NO: 295162 - DNA, 275 bp, Zea mays
accggggcgggattcacgcgtcgacccacgcgactcgaaaatgctaacaacaagcctcttgctccttaacaacctaaacactgtggggcgcgacggaacgatcgggggccccaagttcttcaacatgccgctgatgctaatgaagaacatccggatgacgcgggctcaagatcagcgcgcactccaacagacccaacacggatggcatccacatcgagcgcagcagcgggatatccatcatggacacgcacatcagcacgggcaacgactgcatc

SEQ ID NO: 295163 - DNA, 429 bp, Zea mays
ggagactgcaattagtgcttctttcacaaatttagcaaccactacattcacagatttcgtcttccaggcagctgtgccaaagttcatccagttgcgtttggacccagcgagcagcagcactcttcctgccagtggaaatgggtcagttacacaaagcctcagtgtcaccaacaaccagcatggccagaaaccacttgcaatgcgtatccggatgtcttacaaagtgaatggtgaggacaggctggaacaagggcaaatcagcaactttcctgctgggttgtagggccacctgtgtctatagggtttgggttgctctttcagacttatgcttgcctgctagtgagttgtgtacactggtagttggtttttggccgtccattatctctttatatatatagtgtacagtagatggcagcgattaatgatata

SEQ ID NO: 295164 - DNA, 416 bp, Zea mays
ctctcgtgtatcttccaggtttcccatttctccttttgtgtttaaaggataaactagattgctttgtttcaggaaccttgctcaaattgcaaaagtaaagatcatgaaaagagctggtagcctctgggaggaacttcgcattcatcacagcattcggtccatcgtgtgtctgaatttgcctagtttttctggaggtttgaatccttggggcacacctggcacgaggagagcagaagatagggagttcactgcaccttttgtcgacgatggacttcttgaggttgttggcttccgtgacgcctggcacgggctggtcctgctggcccctaatggaccacggaactcgcattgcccaggcccataggatccgctttgaatttcacaaaagcgcaacataccacacgttcatgagggtt

SEQ ID NO: 295165 - DNA, 409 bp, Zea mays
  unsure (1)..(409): unsure at all n locations
atcttcggggtgatcgattacacagcattatgggtcgcgtgaagctacagatcaagaggatagagaacaacaccaatcggcaggtgaccttctccaagcgtcggaatggcctcatcaagaaggcctatgagctctccgttctatgcgacatcgacatcgcgctcatcatgttctcgccctccaatcgcctcagccacttctccggcaggcgcaggatcgaggacgtgatcacgaggtacatcaatctcccggagcacgacagaggaggagttgttcggaatagagagtatctgatgaagatgctnggtaaactcatatgtgacggtaacatagccgtacaactcacacctaattaagagccaatctatttcaacgtaaaggagcttcagcaggagattaagacgtacca

SEQ ID NO: 295166 - DNA, 345 bp, Zea mays
ggctaaatgcgatggtcattgcgatgatcagatctgagattgcagcaccttactacactgcgaacatccaaaaggagagcaccctccaccttgagctccgtctgcgaggtggtcagtaagtcatgggtcgtttaatctgacgatgtgcctgcatgccatggtgtactgtccatatggaggttgtcaaagtatctgctgttcgtgtcatgagtcgtgtcagtgttggtttaataatggaccggttgtgttgtgtgtgcgtactacccagaactatgacaaatcatgaataagtttgctgtttgaaattgaaaaaattgaaaatcaataatgtgttgcacagttctt

SEQ ID NO: 295167 - DNA, 360 bp, Zea mays
ctagcttgctcttatccgcctgcagtccatggccaccgtcagtctcgcgctctcgctgcgattcgcgccgtcgtcgcgaccgctgagtctccaccgcaggaggcccgacgccgtgacctgccgcgcgaccaccaccacgttccaccggctcgacgccgtcgcagtgagagaggaagagtctaaatttcggagggccgcggcggagggctgtaacttggtgccgatcacgagaagcattttctctgatcatcttactccggtgctcgcgtaccgttgcctagtcaaagaagatgatcgtgaggcgcctagctttctgttcgaatccgatgaacaaggctcagatagtacatatatgggaag

SEQ ID NO: 295168 - DNA, 247 bp, Zea mays
accacgaacgctgttgtgtcatggagtgccgccaacaatagctttgttttgggatcctcatatctttggcacggtgctgctgccaaggtacttcaagcacaacaacttctccagctttgttcggcagctcaatacttatggcttcagaaaggtggatcctgacagatgggaatttgctaatgaggagtttctgagaggtcagaggcacctcctcaaaaacattaagcgtcggaaacctccacactca

SEQ ID NO: 295169 - DNA, 305 bp, Zea mays
cccacgcgtacgcccacgcgtccgcccacgcgtgcggtggacggagatgaagcgcaactgggggcaagtgtggcagaccggggaggaccttacctgcgagtagctgacgttacgggtgatgaccagcgaccaccgtaaggccacctcatggcacgttcttcccgctgactggaagttaggtgtcacgtaccacgcatgcaacaacttgtaacatttgagaacaagtttccaacattggcgcccacctttagtgaacttacttccacttgtgatctgatggctatgttcaacaaccaacgtgtagc

SEQ ID NO: 295170 - DNA, 276 bp, Zea mays
catccgcgtgctgatcacggtcatgaacacgttcaagcgcatgctcatgcgcatcctcgagaacttcccagacaaggtgcgcgccgaggtccacttcaacgcgacgctcaaccaccacatcatggaccacatcatcgtcctcgccgacatcatccgcttcaagacctgcttcctgatctagctgcatatgatgctatacgggacgccatgcgcctgggcgttcacctgtggactcatcgacaccatcatcgacagcaagatcggattccacatcgg

SEQ ID NO: 295171 - DNA, 419 bp, Zea mays
gctccgctacgcttctgtgctcgtagtgcagactgcgctgcgagcgatggcggcgcggaacgagttcagattcaagaagcaggctacgggagcagttacaattcaggctcgctacaggtgctatagggctcataagtaccacaagaagctgaaatgcgcagccattgttgcacagtgcacatggagaggaaggatcgcgaggaaagagctcaagaaactcaagatggaagcaagagaaacgggtgcgctcaaggaagcgaaggacaaactcgaaaagaaagtggaagagctcacatggcgcgtgcagttagagaaacgactaaggacagacctggaagaagcaaaagctcaagaggtgtcgaaactgcagaactctatggaagcattacaggctaaactggacgagacaaacacaaagc

SEQ ID NO: 295172 - DNA, 279 bp, Zea mays
cgactacttactgtcgtggtactagcatattctgctggagcacggcgaccgcatactgtggggcgccacaaacgggttcggggcggctcccgtctaggactgcgtaaacgtggaccgcatccactggcactacggcagccggttccacgccccggagctcaccgcaggctactacaacacgctgtgccactaccggtacctcaccatcgagcgccttctggcgcgccagggcgcctgagctaacttcacctgcatagagatgcaggaccacgagctgcc

SEQ ID NO: 295173 - DNA, 275 bp, Zea mays
caactatagtagtgattggctcgatgcccatgcgacatggtatggtaagccaacatgtgccagcccggacgacaattggggcggatgtgagtacaaagacgtgaacaaaggcccttttaacaacatgggcgcatgtaggaaccgccccatcttcaaggatggtctaggttgtggatcctgattcgagatcaagtgctacaagccagccaagtgctctggcaatcccctagtggtgtacatttcaaacatgaactacgagcccattgtggcgtacc

SEQ ID NO: 295174 - DNA, 282 bp, Zea mays
aggtgcctgatacgaacgcggtcctatactttgtgtacgtgaaggcctatacgtgcaaggagttcgaaaccgtgggccgaccccagacgaacgtggccttaatcggcgacggcgccgattagaccatcatcacggggaacatgaacttcaagatgaacctgaccaccaaggacaccgtcaccattctggcgatcggttactgcttgtttatgcaggacatgcctatggagaacacggcggaggccgagaaccaccagatcctggctctgcttttacaaagcg

SEQ ID NO: 295175 - DNA, 431 bp, Zea mays
  unsure (1)..(431): unsure at all n locations
cccacgcgtccgcccacgcgtccgcccacgcgtccgcatttgccaagattgctcctgcatgccctgccatggcacaccccatcaccgtccgtaacctgttcgacgcgatcaccaactccaccggaggacggctgcatttccttatctaccacaagtatctcagaatcctgaacgaggcgttctgctctgcgaagcgtgtgctaggggggcacagagcccctgccctccagctctccgacgacgaagtgatccttgacatccacggcgctgcgacgaccaagccagttctccagcacatcggcacatccacatggcctgngaggctcacgctgacgaaccacgcgctctacttcgaggctatcggcgtcgatttctcgtatggagaggccgtcgtgtatgatctggcaagggacttgaaacagtcggtgaaa

SEQ ID NO: 295176 - DNA, 227 bp, Zea mays
caacgccatttagcacctacggcgaggtcctctagtccaaaatcatcctccatcgggagacgcacaggtcccgcggctttcgcttcgtcaccttctccacggaggaggcgatgcggaacgccatcgagggcatgaacagcaaggagctggacgggcggaacatcaccgtcaacgaggcccaatcccgctgctgccgtggaggcggcagctgtggcgggtacagtggt

SEQ ID NO: 295177 - DNA, 425 bp, Zea mays
cggacgcgtgggctacaaacacgtgacaccttcgcccaccctcgccccctccctaccggcggcgcccagatggcctgctcccgcgtcgtcgccgccgcgggggtctcctcccccgccgcagcggcggctcgttccccggcgcattctcccgctgccgccttcgcgcgcctccggtcgacgcctcgtttcgcgagcgctggcttgtcggttaagggaaacggagcggcgttcccgttggtcgccgccgcggggccggccgcggcggcaccggtggccgacctggacggccgcccggccacggagaagcagcccatcatcgtcatcgacaactacgacagcttcacatacaacctctgccagtatatgggggagcttggattgaacttcgaagtataccgcaatgatgaactgaccatagaagatgt

SEQ ID NO: 295178 - DNA, 358 bp, Zea mays
  unsure (1)..(358): unsure at all n locations
ccgggccggaaaacccggggcgacccacgcgtnccgaggcaaccacacgggcgacncacccgggttcacgatcaccaacaccgtcattggcgggggggactactgcaggggcatgggggccagaaccatcaaggggaacatcaccggcgagacctgcggccctggccacgggagcagcatcggcagcctaaggcgggacaaggacgagaaggacgccacggacaacaacgtcaaagatggcactctgaagaagacgacgatcggcggccgcatcaaggcgtacgaggacgccgcctacgagctcaccggcggcaagatccactacgagaaaatcaagaaggaagactcagccaacccc

SEQ ID NO: 295179 - DNA, 368 bp, Zea mays
  unsure (1)..(368): unsure at all n locations
aaaagatggaaggaagcgagaacagtgaatagcaacttatgaagagttttgaggagaaaaaagatgccatgcttagctcgctgtggaaaattaatgtggtcgatattgagtcaacactttcacgtgtctgccaagcagttctgagagataacacggtctccaaagatgtcctgaagctgcgagcgaaagcgttgaaaaagctcggaacgatattccaaggcgcaaaatctatgtaccgtcgtgaaacagcctgcgcgttgaaacgagccanatcagcagctactcgccactgagccatgacaccggtacagggatcgattgtgatttttgcgggttggcttgtaattgttgctgtacatacatcgaaa

SEQ ID NO: 295180 - DNA, 273 bp, Zea mays
cggacgcgtgggctccgctacctgtggggcggtggccgccactagcgcgagggctagcaccaagagcgcggccgatgatgccatgctgcggcggaggcgaagaagatccaggacgacttctgctcgacgctgtgcgagggcaagaaggggacggacctggtcgtgtgcaaggagtcctgcgcgctctcccagcagtccaacctggtgctgtacggcaggatccagtgcaagggcaagtgcaccgagcagaagggcatcacggcgccggccatg

SEQ ID NO: 295181 - DNA, 372 bp, Zea mays
cccacgcgtccgcccacgcgtccggccttcatggcctacgaggagaacgtggcgggcgtgttggcgcgcaccatggcggccgtgtcgccgtacgcgacgatgcacgacgacgtgacgtccgccgcggaggagcagcactcggcgctcatcctgctgccgttccacaagcaccggtcggtggacggagggctggaggtgttccacccggagatccaggcactgaaccagagcatccagcgcttctctccctgcaccgtgggcatcctcgtcgaccgcggcctgggcggcgtgccgggcgccgggtgccgcgtggcggcgctattcttcggcgggcgcgacgaccgcgaggtggcagcgctggcgatccgtatg

SEQ ID NO: 295182 - DNA, 448 bp, Zea mays
ctcccggctcccctgcctgcgcgccgtctcctccaggctccagcgcctcgcggccacggcgtgcgtaccacggctgcacggccgatggcgtaccccgcggcgccgcacacgagcgcggccttcctcgccagcttcgcgacgccgctccccgcgcgctgcgcctcgcccccgacccggcgccgcgcggtgtctgccgccgtcatcgccaccaccaccacctgcgtattcgccgacgccccccgggggatcaagggggaacaagccgactcgggcgcccaagccgcggcggctgcggctgcgccgaaggacctcagcccggacaccgtggccttcatcatccttggggggggcgccgggacgcgcctttttccggtcaagcgtacaagggccaagcccgtggtgcccgtcgggggatgctacaggctcattgacattccgatgagcaact

SEQ ID NO: 295183 - DNA, 432 bp, Zea mays
tgcttctgctacctttaaggaactattgacatgacataaagcaaccgttgctgaatttctgtccaacaattatgattggttttttgaagaattcaactctaggttgctgtcatcaaccaacttgatagcttgcctttttgcgccgctcctcagccatcctctccatctcggtgtcacacactccgcatacgcacctacgagagtcgagtgacagcgagcgagcgagcgagcgaagccatggctctccgcaccctggcatcgaagaacgccctatccttcgcgctcggcggcgcggcccggccgtcggcggcgtccgcgaggggggtgacgacggtcgcgctccccgacctcttctacgacttcggcgcgctggacccgccatctcgggggagatcatgcgcctgcaccaccagaagcaccacgccacctacg

SEQ ID NO: 295184 - DNA, 373 bp, Zea mays
tcccatttgaaatcaacccatcctcgtttcctccgtctagcagcctctcaccctcatggccgggatcaagatcgggatcaatgggttcggcaggatcggaaggctggtggccagggtggccctgcagagcgacgacgtctagctcgtcgccgtgaacgaccccttcatcagcaccgattacatgacctacatgttcaagtatgacactgtgcacggacagtggaagcaccatgaggtcaaggtgaaggactccaagacccttctctttggtgagaaggaagttgctgtgtttggctgcaggaaccctgaagagatcccatggggttcccgtggcgctgaatatgttgttgagtctactggtgttttcactgac

SEQ ID NO: 295185 - DNA, 430 bp, Zea mays
attaatgtgccgatcgacgcatgcgtccacgcacgcgtggtctccaccgacacgcttggactcaagccgagaagagtgcctggccgggagagcgtacgataatagatccgcatgcatattcttgtttggcggagacgggagacatggagcggatcttctagcggttctacaccaactgcgaacgtaagatctcgctgctcggagctgacagaagcgctactgactctggggtccacctctgacgacgaagtgcagcgcatgatggcctaaatcgacaccgaccgagactgctgcatctacttgaacgagttcatgaccttctgcaacgccaaccctgatctgatgaaagacgacgcacaggtcttctgatccattacatcttcgtccatacgattgaatagatgatgaacctgcttatatacacacacac

SEQ ID NO: 295186 - DNA, 320 bp, Zea mays
cggacgcgtgggtacaaaaataaggaccctgatcatgtggagtgggcaaaagccctaaaagagctgtacattcccaatttacgtgactacgtgaagaggtattacccattgggtcctgtgtggcaaccgccaggaagcgcagccaacaaggcaccttcagctccgtctgttcctcctccatgtctttccatctcttcagcctcgtcgtcccaaccaaaatctggaatgtcagctgtctttgctgaaatcagctctgggaaaccagtgacacaaggcctcaagaaggtaactgatgacatgaagagcaaaaatagaacaga

SEQ ID NO: 295187 - DNA, 436 bp, Zea mays
caccgccaagaagtctcaagtgttcgctgttgccttcgctgtattagctgctggtgctatagttctgacactcaatgttctactgctgggtgggaacataatcttcttccaaagcctcagtcttctcggatactgtctgttcccgctggacgtgggggctctgatttgcatgcttaaggacagtgtcatactaaagatggttgtggtgacggtaacattggcatggagctcttgggcagcataccccctcatgagtgctgctgttaacccaaagagaaaggccctggcgctgtatcccgtgttcctcatgtatatctcagttgcctgtctcataattgctataaattaaaggcggcatggtttctacagaactatcaaaagaattaccagattttggtttctaaggggatcatcaaaatgcatattcctttttttt

SEQ ID NO: 295188 - DNA, 386 bp, Zea mays
gggccaccgtcataccctacactttcgcgccatgcgtagcggtgtgccgtgacccgaggtggggtcggtgctactagagcttcatctaggacactaggctggtgcatctcatgacctccaacatggtggccggcctgcagggcgacgtcccagcgatgcacctgaagggcgtacccttcgtcggcgtggccaagaaggtggcctgttgcgccaagcactttgtcggcgtctgctgtaccaccatgggcatcaacgagagctacacggtgctgagcttgcacgacctcatgcagattcacatgctgccctacgacaactccgtcattaacggtttatcctccgggatgatctactacttcagcttgaacggggttaagatgcacgag

SEQ ID NO: 295189 - DNA, 330 bp, Zea mays
cgttttagatctctcaaaagaggcttttgcattttgtattgcatcgtttatattccagccttggaaggctgaagatggaaggagacattcttgcagttcaaatttggaggacactgaggctaattgttgcaggccttgattgtacaactagctgtctgcttcaggtcaatagcgaccttaaacttgtcgacccacctacagtgtctactgcgactttttttaccggcaataaccttcccttgttatctaattggactaacaatatatcttcttctgactaataaacgtctgatatattactctgaatcgttaaaccttttctttttaaat

SEQ ID NO: 295190 - DNA, 367 bp, Zea mays
aagaggatcctcatcgcctcgctcctcgtagtcttcgtctcggccaccgcaatgctggcctgcagggatgccatcatagtcgggtccccatccgtttcctagtcctccgcgtgcacccaaaccctcagtagttccacatgcgcaccctcacccacgtgctcggtagcgaacagaatgccaaggacgcattgctctaccactacaagaacgccgccagcggcttcttcgtgaatctcaccctccagcatgtcaaggatctcaaggagcaaccacgtgttctccatgttgtgccgagccagacttaccaactacatggtcctgggtctggcactcaccagggcacgacacacaccttgggccttatgtg

SEQ ID NO: 295191 - DNA, 326 bp, Zea mays
gcgtgcgaatttatttatgctgatttatgcgatgccaaagctgtgaacaaaattgaagccttccgggtgcgggaggcaaccggggaagaactctaccatctccaatgttctctctggatagcggatccacaatggttcttcccagaacccgggcaggctctaattgatatatgctgagtcaggcgacgccaatgctgttaacaaaatagtctactagaacccattcgatgctcttatgcactttgatgctgctgcttatgttgaacagagcacactgtatccactcaggctctaccacaccgtaacgcttaacacgttggcagttc

SEQ ID NO: 295192 - DNA, 283 bp, Zea mays
  unsure (1)..(283): unsure at all n locations
caagatgtcatgcacaaacatttcgatgttagccttgntcctcctggtcctaggcttcatgtttcatgttgagaaggaanaggcaaatggcatcgatgctaaatcttcctgtcctgttggttccttctacatcaccaagttgttcgccttcggcaatgtcaagacatacaactctaatgctgttcatgaagcatggtcatcttcgttctgcttcactgtgaatcatacaatcctcatacccaatggcgacttccttgtcggacaactcaacttcacaagccct

SEQ ID NO: 295193 - DNA, 442 bp, Zea mays
taatccgggggtccacccactcgtccgtctccttatctctaacgatcttctttttcctactttcgctcccttttgctcatcgctagtgccttgcggtcttttacctcctgctctagcatctgctatccatacttacagtcttcgtttgatgctggaatcctgattggcaggttcaatcacatagctcgatcgccatgtctttcactgtctctcatgacaagtgctaagcctgcgactagactgtccacatcatcgacctgctctccgcctactgcttctcgtaccacatgacattcttcaagtgcatccactgcaatgacgtcctctcaatcagcagatactctctcatggacggagtccttttctttatgactcactctgtacagcttttcaactatacaggtaccctctcataaaacttttaacgttgagcatattcaaa

SEQ ID NO: 295194 - DNA, 443 bp, Zea mays
gcaacctaccatttacagatgctagacgcaatgggtaggtggcaaagctattacttcatcggctggttcccaatgcgcgatattcaatttggattgattggaaactcaagctagtgagggatccttatcaggtattacaaagggtcttgcgcaggcagagtgttagctttgcaatttccaggcattacagacgcttcgatgttttcgaggaagctgactccgacaaggcattgggaactgtgagaacacctttcgtaagggacgtagacgcgacaggtggtttcatttcatagatcagacggaagcagagacaaggcgcttaaagctgcgccaggttccggggctggcagttgaagcatagctaggaaacagctttccctctcttaattcgttgtgttcgtggtgacataatctgtgtgcggaccgaatttagaataaagtac

SEQ ID NO: 295195 - DNA, 370 bp, Zea mays
gtctagaagcatgcaagctccttgaggcaacccttggtgctgcccttggcgttcgtgcatatagcccctccatcgactgacccatctctctagttataatttttctctcgtccttgcattgcccattagatgctatccattggtaacgcacaacagtaaaacgacagacatccgacagctatattatgttcgacggtgtaacaccctgaatttgagggtataaaatttcttctccaaataccaaccaaatttaggggtttaaaaaaaataaaaaaaatatataaaaaaaatatttttttttatttaatataaaattaaatttaatatatttaatttttaatttataataatattttataaaaaaaattat

SEQ ID NO: 295196 - DNA, 449 bp, Zea mays
gtgcgcgccgcggccggattcccggtcggcgcacgcgtacgggccaaggagcatgctatgcggatccctttatttggaagcgctatgcttttatcactgttgcttctattcaagtttctctcaggagatgtggtcaacgctgagctcactgcctactttttcattctaggcattgttgctctctccgcaacactgcttccttctataaaacgttttcttccaaaagagtggaatgataatctcatcgtctggcgggctccattctttcactcactctcggtggagttcacaaagtcccagattgttgcctcaatacctggatttttcttttgcttgtggtatgcgtcaaagaagcattggcttgcaaacaatgtcctgggattggctttctgtattcaagggattgagatgctgtcattgggatcatttaaaactggagccattctctt

SEQ ID NO: 295197 - DNA, 331 bp, Zea mays
cccacgcgtccgggaaatccactcgttgatgagcagctagtgctcctgatgtactgcctgggtacagtggctctgtacatgcggtttgctacatcacttattcatgagatcaccaatgcactcgggatccactgcttcaggatcactaggaaaaaggcatagttcctccgtccacgggcatcaacgttgccctggattgtgtaatcaatcacaactcacaaggtggagcctgacagacaagcaatttttcatatttaatggatgctgcttcctgaatactcacatggatgacgcccccccccccgtccctgtggggcgttataatttaaat

SEQ ID NO: 295198 - DNA, 259 bp, Zea mays
accggtccggaattaccggggcggcccacgcgtgcgcactactggtggattggaagctggtatctataaagatggccagacccgtgaacatactgggggtgcgttaaccctgggagggggggaaataatttgctgctgcaacaagatggatgcaaccactcccaaatactccaagggacggtatgaagaaattgtgaaagaagaatcattctaccttaagaaaggtgggtgcaaccctgataaaaatgccttttttccc

SEQ ID NO: 295199 - DNA, 355 bp, Zea mays
gatggacatcgccattggctctggggcgcgggacgagctgttcggcaagggcaacatcccggcgttcggccttgccgacgtgttcgtcttcaccgctggccgcgcatggatcattatgctgccaaagccgcccacgaccagcttccggtccgtctccatgggaggaggccattgatgatcacaactgtaggatgcatggtccactgtggttcacgattcttttacctttgtgaggtggacggccaggtgtttgttgtcaaggccgcttccgaggcctaaaccggtgggcttatttctaggccggatcatgacgaacaatctgattcgctgggttgcaaaggaaaagttttacacg

SEQ ID NO: 295200 - DNA, 316 bp, Zea mays
caaatctcatctcctagctagcaacttgattcttcatatgtatatatattgagcgggccgggcgtgaattattcagtgcatgatgatgatggtcatcagtagtctgctgccgtggttggcagctgctggtgtgggcgctgcccgatgaagatgatgttgtagacgagcgccgcgatggccgcgcccgcgagtgggccgacccaatacacccagtggttcttccagacgccggtgacgacggtcgggccgaaggagacggtggggttcatggaggcgccgttgaatgcgcccccctgctcggacattggggcccttt

SEQ ID NO: 295201 - DNA, 309 bp, Zea mays
cgcacgccctcgcccgagccatcttcgaaggcggaccacatgacggaccagctcatcgacgagctcaacgaggacttcaaggtggtctataacgatggcgacagcggtgtcaatacctacgagcttgcaactgagatgcgctctgttgggcacaaccttactgaaaaacagcttgaagacatgatcaacgacatggatgctgatggcgatgctaccattgacttgaccaatgacctgaacctgatggcgaagctgatgaaagacaccaactacgacgacgaccttaaggaggaccttaacgaggtctac

SEQ ID NO: 295202 - DNA, 143 bp, Zea mays
gcgcctctacatttcttctctctctgctccttcgcctacggctgatgcattcatgagagggatcgtcgtgtcggactcggaggagcaccactttcgaatcgattgccgacgctgaggcgtgcaagacctacccgtagtaggct

SEQ ID NO: 295203 - DNA, 253 bp, Zea mays
gcgtaagggaaatcaaagcctgtcgcgtaggacagttcggctaagccatagacctgccagtttaacgaagagttgatgcagatctgatcacgcagcaacgtctatgtagagcgtgctgataacgtgttgagaactacgtcaccacggatcaccagatccgttcctttccctgccgtcagcagattatgcgcgagaagatttggatgacccgtatccctttccataagcacgacagattgcacatgagacacat

SEQ ID NO: 295204 - DNA, 279 bp, Zea mays
  unsure (1)..(279): unsure at all n locations
cccacgcgtccgaatttttcttatctgattgtctaaaacctataacgggtgtatcgtagtgggtgttatcgttaaacttttaacggtcattctatttcaaaaaaaaaaaaanaataataaaaaaaaaaaaaaaaaaaaaaaaaaaaaaaaaaaaaaaaaaaaaaaaaaaaaaaaaaaaaaaaaaattnnggggcggccgttttaaaaaatccaagcttacttacccgtgcatgcaacgtataatttttttataagggaacctaaaataaattcactggc

SEQ ID NO: 295205 - DNA, 321 bp, Zea mays
gttttctatcaacatggacatgaactctgtcactatgtaaattctggacacccatcgagggctcgctgtttactgttaagtgctggatgatcttgagatgtgactcataatgttgtaggcctgcggaaagatagaatcatggaaagagaatgtgcgcatgcatgggagagatcgtgaacagggtcatttatgtgggacgatggaagcgcttggtggttcatttgcacacacacctgacgcgactttttgggagggggagatagactgtgctgaagacatcactgatttcactggagagcgggaggcatggcctgatgatca

SEQ ID NO: 295206 - DNA, 250 bp, Zea mays
catcgatcacgacaagatggcgtgcacaaacaatgcgatgagagccttgttcctcctggtcctcttctgcatcgcgcatggtgagaaggaagagtcaaagggcatcgatgcgaaagcgtccgggcctggtgggtccttcgacatcaccaagttgggcgcctccggcaatggcaagacagacagcacgaaagctgtgcaggaggcatgggcatcagcgtgcggcggcactgggaagcaaacaattcttata

SEQ ID NO: 295207 - DNA, 423 bp, Zea mays
actatatattgtattcctattaatctggttatcgcatgcgtggccagccggtgacgacgtacgtatagactcgctcagcgcctgagctgaacgccacgtcaccccggcgcatgcatacatgcatgcatgcatggttcattcatttcaaggggcttcgcttcaagaagtgtggagtgactacattatgccagagctcatatactctgaaaatactcgagcaggcaggcatgaaaggctgcaatgcttgcagtgtaccgatggagaacagactaaaattgagcaagaaagatgagtcaccgcctgttgacaagacaaaatacagaagcattattggaagcctgaggtatctagtgaacacaaggccggatatagcctttgctagtgggattgtagcaaattcatggaagatccaagagcaaaaca

SEQ ID NO: 295208 - DNA, 324 bp, Zea mays
gagaaattgacgctacatatacagattgctggaaaaatgaacaggtgtatcagggagtatgggctacgtgatattgggcgattggagcatgatttggcttttggagatgcgggagcgaacgaagtcatcactatgctcaggtcaaagcaggatatgagcccagaaaacaaaatgaggttgctaattatatatgcaatggattatccaaagaagtttgaaggtgacaaagggaaaaagtcgatgcacttagcgaagcttccacatgatgatatggatatattaaatggcttaggatacttgaatggttcaaatacaaaaaaatca

SEQ ID NO: 295209 - DNA, 332 bp, Zea mays
tttcgaattccctcctcctccgcctctcccgcagtccctctcctcctttccctcccccgtcgcgatcgctctgtgctccgcctccgtccgtcaaggcctgctcttgcgccgttcctcctcgcccaatccgccaggttctccgcggtgtgttcctgacgctgttgaggcccggcgtgtgcgttgcatgcaggggatggccacattcgagctctaccggaggtccaccattggcacctgcctcaccgagacgctggacgagctcgtctccagcggggccgtcagcccggagctcgccatccaggtccttgtgcagttcgacaagtccatgactg

SEQ ID NO: 295210 - DNA, 256 bp, Zea mays
gacaattcttgacttccaagcagtgcaaaagctgctgacctccccaaagtttacattcggttatgatgcactccatggtggtgcgggagcttattctaaacacatctttgtagaagagcttggtgctgatgaaagctcactgttgaattgtgtaccgaaagatgactttggacgtggtcatgcggatcctaaccttacctatgcacaagagttgcttgaacacatgggtcttggaaagtcatactcaaatgttgag

SEQ ID NO: 295211 - DNA, 222 bp, Zea mays
gccacgcgtacgggcgcttttcctcgtcctcgatccattccagtgccgcttgcaggtaggatcgatctgatccatgcgagcaccacgcccatggcgcgaccaactcaccgacgaccacatcgacgacttcaaggaggccttcagcctcttcgacaaggacggggatggctgcatgacgaccaaggagctgggaactgtgatgcgatcactggcgcaaaaccc

SEQ ID NO: 295212 - DNA, 505 bp, Zea mays
tacacggacctgaatctcccggatgcgaccacgcgtacggctgcaatgaagcaactgaagttggagctgattgcccataaatctcacattgacatgttaggtagcaggttggagcaggttactaatgacgtgcattcgcagtataaaaatgagatccaggatttgagggatgtggattctgttgaacaagaggagaaaaaggacattcacaggaagcttcagaatgtggaaaacgagttgaggatcacgaggatgaagcaggcggagcagcaaagggattctgtctcggaccagcacgtggagacgctgaagcataaggtcatgaggctccggaaggagaacgagttcctgaagaggacgctggcgagctctgaagtctgaactggagtgcacatgaaaactgcaactgctttccttcacgccgtagttttatctcataactgaggatgtagaaaaatccactgctccaaatacacatatgaccttcagatgctttaaaactagc

SEQ ID NO: 295213 - DNA, 341 bp, Zea mays
ccgtacaagagcctagaacgtccgcatgcacccacacgtacgcacatacaacagcaagagatgcgggaggctgttgaattacccttgactcatcatgagttgtgcaagcagattggtattgatgctgcaagaggggtgcttatgtatggtactaccggtactggcaagaccatgcttgccaaagcagatgcacatcataccactgctgcttttatcagggtcgaaagttcatagttcgtacaaaagtacttgggtgagggccctagaatggtgcatgacgagtgtcgattggccaaggacaatgccccagcaatcattttcattgatgaggttgatgctat

SEQ ID NO: 295214 - DNA, 255 bp, Zea mays
  unsure (1)..(255): unsure at all n locations
ctctcttgttggcttttggtttgtaggatatcgctcttgctgatctggctccaacccaccccatcaggctcgggcttgctctcaacttgtcagtgttctactacgagatcctcaacttccctgaccgtgcttgcaagcttgcaaagcaagcctttgatgaggcaatctccgagctagacagcctgagagaggagtcctacagtgacagcactctgatcatgcagctnctgcgtgacaactggacctatggacttt

SEQ ID NO: 295215 - DNA, 457 bp, Zea mays
gcctgcacgtacacggatccgagaattcccggatgcgacccacgcgtacggtggagcagccccaggacgcggtgaagctcttcaaccgctggaccttcgacgatgtccaggtgaacgatatctcgctgaacgactacctggctgtgactgcggcgaagcacgcgacattcctgccgcactccgcggggcgctactccaagaagcggttccgcaaggcgcagtgcgccatcgtcgagcgcctcaccaactcgctcatgatgcacgggcgcaacaacggcaagaaggtcatggccgtccgcatcatgaagcacaccctggagatcatccacctgctcactgacgccaatcccatccaggtggtcgtggacgccattatcaacagtggaccacgtgaggatgccacccgtattggttcagctggcgttgcgagaaggcaggctgtggatatctaacccct

SEQ ID NO: 295216 - DNA, 277 bp, Zea mays
cggtgaaggacttcaaccgctggacctttgacggggtccaggtgaacgatatatgggtgaacgactacctgtttgttactgatgagaatgacgcgacattgctgccgcacttcggggagcgctactccatgatgcgggtccccatggcgcagtgtaccatcgtctagcgcctaaccaactctgttatgatgcacgggcgcaacaacgggaagaatgtcatggtcgaccgcatcatgaaacacaccctggagatcatacacctgctcactgacgccaa

SEQ ID NO: 295217 - DNA, 415 bp, Zea mays
cggacgcgtgggattggtggcactaacatcagaaatgaggccaatcagcttctgaaaggggtcaatctcttagttgcaactccaggcaggcttctggatcatctgcgaaatactaaaagtttcaactacaaacggctacagtgccttataattgatgaagctgatcgcatacttgagcaaaattttgaagaggatatgaaacaaatatttaaacgactccctcaggataggcaaacagttcttttttctgccacacagaatcaaaaggttgttgaatttgcgaattttacgtttgggcaaaatgaagaaagacaaaagaaacttggttatgttggagtcgatgattctaaattaaagcctactgttgagggcttgcagcaaggttacttggtcattcctaagcagaaaagggttc

SEQ ID NO: 295218 - DNA, 319 bp, Zea mays
tgacggccgccgcgccgctcgcgccggacctcctggcggcgttcgagcgcaagttcccgggcgtgcaggtggaggaggcgtacgggctcacggagcacagctgcatcacgctgacgcacgctagcggcggcggcgaggacgtggggtcggcggtgcaggtcgccaagaagaagtcggtcgggttcatcctgcccaacctggaggtgaagttcgtggaccccgacacggggcggtcgctgcccaagaacacgccggtggagatctgcgtgcggagccaggccgtgatgcagggctactacaggaggaaggaggagacgga

SEQ ID NO: 295219 - DNA, 349 bp, Zea mays
cccgaccacctagctgtattcccaaaacgttttcccctggaaagagaaaaacggagattgcttgcccccttttcccttacgcatcgtcgaaaccctagccccgcctcgccgacggcacgccggatcggtcggcgccatgtccaaggccagggtctacgcctgcatcaacgtgctgcgacacaacgcgtactcggattacgaggcgctcacccgagaacggggcgagcaagatgactatgaagttgtcacgaacgtcacgagaggaaaatacagtgaagtatttgaaggcattaatggtaacaataatgagacatgcatcatcaagatccttaagcctgtgaagaaaaag

SEQ ID NO: 295220 - DNA, 360 bp, Zea mays
cggacgcgtgggctcgtggtgtcatcgtggggtggcgcggcgacttctgggaattgcctcggcgaggattgggcgtgaggtcacgaggatttgaagaatcaccctggttactggaatctcaagtgccagccttacacttcacatgaactcccacctttggtgagttcatgcatattattccccacaacttgttgagtgatgaacatgtgtgagctcacccttgctatatcacacccccccataagagaagaacaggtggttcaagaggagccacacatttaggagtttgattcagtctaggtggcgtctcccacttgactttctggcgccaaggatggattttagatccctttatatttt

SEQ ID NO: 295221 - DNA, 359 bp, Zea mays
cccgggtcgacgcacgcgtccggcgaccgggtgaacgagacggcacccagatcacctatgtaaaagccagtgcattcggatgtcacggagagacctatggccgcaaggcactggcgtcacagcaacaggaccatgcgctccaaccaatgcaggctattgatcatatgatgaaggcactcatcatcacacatcgtatgtccgtcggcatgatatctgaccttatgggcctcagaggacccatcgtcgctgatgctgaagttggtgctcaacactcacagtgttatgcagattggtttgcacatgttccaggacttaacgatctcacaccatactcttcagaacatgcccctaggcttgct

SEQ ID NO: 295222 - DNA, 192 bp, Zea mays
caagagcgggcagtacttcgaggtcaccgtcttcaagtccgtgcagtccgacgtggaggtggagttcgcgatcggcgacctaagcaaggctgagcggttcaaccccaggtggctgaccgacctgcaggcgctgtgcatgaagcggtgcgcccgggagacgggcgaggtggggccgttcgttctgtgggtgct

SEQ ID NO: 295223 - DNA, 177 bp, Zea mays
cggacgcgtgggcggacgcgtgggcctgcattcatctcctccaccaccaccaccaagctgaacaacagccatctcgcgaaaataatgaagagccgcagcctggcatcatcggccgagctcttggtgctagccctcgcgctagtggcggccaccggctcacaggtagcagctgcaaag

SEQ ID NO: 295224 - DNA, 214 bp, Zea mays
ctcaaggcggcgcgccccgagtggagcctcgccgcgatgcgctccgcgatcatgaccacggcgcgcacccaggacaacacgggagcgcccatgcgcgaccacgatggcaaggaggccaacgccttcgcctacggcgcctgcaacgtgcaccccaaccgcgccgtcgacccgggcctcgtgtacgacgccaggcccgactactactttacattcc

SEQ ID NO: 295225 - DNA, 197 bp, Zea mays
gcggcgcagcacggaggcgaatgaggaggaccagcagcagcaggcagcgccaaggagcggcatcccactcaatgcttgcagccatggctagggggttgaagaagcacttgaagaggctcaatgcgcccaagcattgcatgctcgacaagctaggcggagcttttactcccaaggcatcttctggacctgacaaatgc

SEQ ID NO: 295226 - DNA, 133 bp, Zea mays
gagacgcgttcgaagacacatacggggactcttggtctttcgtgtggtccgactactgcgaatcgaagccgagatacgacggtgggcttcaccggcaccggatcaaggggtaaggggaagaagggagcagcct

SEQ ID NO: 295227 - DNA, 303 bp, Zea mays
gtgacctgcggccctggccacgccggtgatgttcaccttggaggtcccggggccgatggagatgcagccgtcggcgtgacctgcggccctggccacggcattagcatcggcagcctagggcggtacaaggacgagaaggacgtcacggacatcaacgtcaaggatcgcactcttaagaagacgatgttcggcgtccgcatcaaggcgtacgaggactccgacttcgtgctcaccgttttcaagatccactactagaatattaagatggaggacttatccaaccccatcttcatcgacatgaat

SEQ ID NO: 295228 - DNA, 273 bp, Zea mays
ggggaggcaaagccgcgtagtgctggacgtcggctgcggcgtggccagcttcggcgggtacctgttcgaccgcgacgcgcttaccatgtccctggcgcccaaggacgagcacgaggcgcaggtgcagttcgcgctggagcgcggcatcccggccatcttcgccgtgatgggcacccagcgcctaccgttcgtcgccaacgtctttgacgtcgtgcactgcgcgcgctgtcgcgtaccgtggcacatctactgctgcatgctcctcctcgagct

SEQ ID NO: 295229 - DNA, 253 bp, Zea mays
catattcctaagctatcatggtgcaccggtcttccatagccgatgtgcatgtgatgcgcatggatctaagcccaaagaaacccatcatggccagctccagcgactgcggagcctactactactggtcccacgccgatctgcccatgctcggcgttgccttcatgggtgccgacaagctctgcctcaccgtcagatgtcttgccctacccagctacttcgactctgccaagatcgtatacgtaatgcatggctt

SEQ ID NO: 295230 - DNA, 232 bp, Zea mays
cggacgcgtgggtgtgaatctacatggatcagccaaaaatttaccagcttcatgtgcctgaaagccaaagcattcacctgagctgtggatgttcccacagcatgtcgtgccgactatgcgcacaccattgtgcatacttaatgcatcctacgattcgtggcaagccaagaacgttctaacacctagttcagttgatccgaataagacttgggcccaattgcaagcttgacat

SEQ ID NO: 295231 - DNA, 222 bp, Zea mays
tccctggtcgacccactcgttcggaagaagcataacttcatcaagctctatgtgctcagggtgttcatcatggacaactgcgaagagctgatccctgagtggctgagcttcgttaagggtattgatgactctgatgaccttcccctcaatatctctcgtgtgactcttcatcagaacaagatcctgaaggtgatcatttagaaccttgttaagaagtgtgtt

SEQ ID NO: 295232 - DNA, 446 bp, Zea mays
cggactcgtgggcgagtggccgaacgagttccagaggctgtacgggaccattgacctgtactggatcgtgagggacgggggcctgatgcttctgctgtctcagctcctgctcgccagagacggcttcgagagctgcaagatccaggtgttctgcatcgcggaagagggcacggaagccgaggagctgaaggctgacgtcaagaagttcctgtatgatctgaggatgcgagctgaggtcatcgttgtgaccatgaagtcgatggaagcgcactctgagatcagccccaacgctaagaaggatccccaggaggagtacgcgagcgcccaggatagaatcagagcgtacctgtcgcagatgaaggaggatgcgcagagggaaggtcggccattgatggatgatggcaggcaggtcgtggtcaacgaagagaaggtcgagaagttcctct

SEQ ID NO: 295233 - DNA, 450 bp, Zea mays
tgacgtccgcatgcgtcgcatacgtaagctcggtacacgtctcgagctgccagatccaattcgcgagttcttgctactactgcgccaggtcgctgtgtgagaggaagacctccactggacaggagttccaagtcaaggatctcgtgcacgcggactatggtcatcctcgacattgagctggccgaggactaaatgccctgactgatcgcatgccgctactagatcggaccgtccaagcatttaacctactctaggatctactaggatgctgacatgaccattcataccgtcgtcctaatcgagactctcaccgatctcggcgccaatgtacgatggtgctcatgcaacatcttctccactcaagaccacgccggcgacgtcatcgtacacgacttgatcggcgggttcgcctggaatgtggagacccctgatgattactggatgtgcacc

SEQ ID NO: 295234 - DNA, 338 bp, Zea mays
aacgattcgaacctaatctatcgaacgaatactgcacagtttctaaccatcgatacctgagatggcacataaggcaggcctgaagctggttgtataaaatccagtacaggaggagcccgagacctagacagccgcaatggctcctaccgagatgaagcctatggccgacatgcgcctcccgacgggcaagtcccactgtaggacggccgtcagagccataaggggaacaagaaagcgattgaacgtcgtggagacactcgagatctacaactgctacgtgctgcagcagcggcacctctacatctgcatctagtccaaggccatgttcattcatgaac

SEQ ID NO: 295235 - DNA, 265 bp, Zea mays
acgacactacacctgtcacatgcttccccgacgaccagggcggtcagctgaaccatggcagactcctaaggcaccgtaggtagtcacccgttcgcaccctcaagttcatgaccaaccagctgctggcccgaagcaatacgcgcttgaggagatccaccccggccgcaccaacgtctacaaggcggagttgaaggacaggcttgccaaggcctacgaggtgaaggaccacaacaccatctttgtctacaagttccgcacccacttc

SEQ ID NO: 295236 - DNA, 449 bp, Zea mays
ctgataatggggctaactctaaggctgcaggtatacttattatggagaaatatccaaaggtttattggaccccttgtgttgcacattgtttggatcttactccttcctttctttcttatttgttgccgtttagttcaaaaatgaacaagcaggcgacaaatatttgagaacggaggtagtatgttacaagacattgcagacataaggtattttaaaagacgtgttaaccaagccaagcaagtgacagacttcttttaggcatgggaggcttctcaatgcaatgagggaaaagacgggaggaagagatctactgaggctgacagtaacaagatttgccactttatttctgactttgcagagtttgtacaagcataaggatgctttatgtcaactcttattgtgtgaggattggaccagatccaaactggtagccacagatgcagggaaga

SEQ ID NO: 295237 - DNA, 341 bp, Zea mays
accggtccggaattgccgggtcgaccgactcgtccgacgctaagcaggcagacgatatagccgctgcagtcatgagtaaggagcaatctgagtgggtcaaggatgccatctgcgatatagatggggatgccaaggctacgaataggaagttcaatgagactgcggaacttcaaattgtgctgaagaattatgatccacagaaggaccagcgtttgagtggctctggtcagttgccccatatccctcgtcccaagatgaaggtgcgcatgcttggtgatgcccaacatgttgaggacgccgacaacatgggacttgactacatggatgttcaggctgtcgag

SEQ ID NO: 295238 - DNA, 357 bp, Zea mays
cccacgcgtccgcccacgcgtccgcccacgcgtccgcggacgcgtgggcatcgagttgggattccatgtatttggtaccatcgtgagagttccttgaaggagcgggctaacaatttacagtcttttcgggaaaatggtggtgtgcttgtatgcactgatgctgctgcccgtgggcttgatgttccaaatgtttctcatgtcattcaggcagaatttgctgcctgtgctgttgattttttgcacagggtgggccgcacagccagagctggccaatctggtatagttactagcctatacacagaggcaaatcgtgaatttcccttttgggggggtttaaagcagcccaaggggtttttt

SEQ ID NO: 295239 - DNA, 257 bp, Zea mays
aattcccgggccgacgcactcgtccgcatggccgccataaacatctctttcaaagtctttatcttctggttccgatcgcgcacatgatatgatatcaagggggctggggctaatcatgaactctttgatgcatatgacgattgcatgaggatgcatccacgatcttcattcatggccttctttgaggtggttaaatggattaagtgttacctgctaagatgtttaaatgtatgctatccattctttgctgttaatat

SEQ ID NO: 295240 - DNA, 342 bp, Zea mays
accggtcttgaattgccggatcgacgcacgcgtccgtccactcgtccgcccacgcgtatttccatttatgtggatctgaggatctccagggtcatggggaaccagcaccgggccgagcacgagcttcagtctctctgagaatacgtgaaggagatcctcataccagagtgcaacgttcaacccgtgaatagccctgtgacggtttgcggcgacatccatgggcagttccatgacctgatgaaactcttcgcgactgggggccactttctatagaccaactatattatcatgggtgatattgagtaccgtggctttaacagactggaggttatcaccatcctg

SEQ ID NO: 295241 - DNA, 440 bp, Zea mays
gaatgaccggacgcgaagcaccctattacttaactgaagcacaagttctttataagcttgaatcattcggtcctcttagcgggtttggtcttatgaaagggggggcagctggtaactcaaaaggctatgcattctgtgtttaccactacctcaccgtcactgacatcacttgtgctgcactaaatggtatcaatatgggtgacaaaacccttactgtcacacgagcaaaccaaggggcatctcatcccataccagaacaggaaagtatcctattgcaagcacaacaacatgtgcaattgcataaacttgtgtatcaagttggagcgctgcctacaaaaggtttttttggggttttaaatttgccccttaaaccaaaccccaaaaggggggtttttttttgggggttttttataataaaaacccccttttttgggttctcc

SEQ ID NO: 295242 - DNA, 347 bp, Zea mays
accggtccggaattcccgggtggaaagtgggtgacaccgcacaagtctcaccattccctcatagctacagtgcatctgcaccttccgaacaaaacggtgatcagtcaaacagctccaggtattgcttagttgccagcaaacaaatggtcggcatatttctcacggtctgggtgcgcaatgaaataagagacgacgtcaggaacttgaaagtctcttgtgtgggtagaggattgatgggttatctcggaaacaagggttcgatttcagtgagcatgtgcctgcaccagacgagcttctgcttcgtatgttgccacctgacctctggggagaaggaaggcgactagctt

SEQ ID NO: 295243 - DNA, 323 bp, Zea mays
aatttccgggtcgacccacgcgggcgcccacgcgttcgtccacgcgtgcgcacgattcacgcttagccgcagagatccgtcacactgcaaggtttgaaaactgaacggggagagggcattagcagagctttcccgtgaggaaaatgtgtacatggcgaagctcgcctagcaagcagagaggtacgaggaaatggctgagttcatggagaaggtagcgaaaactgttgactcggaggagctcactgtggaggagcgcaacctcctgtctgctgcatacaagaacgttattggagcccgtcgtgccctatggcgcatcatcttct

SEQ ID NO: 295244 - DNA, 366 bp, Zea mays
gatattataaaggtcaccttgatagggttgtctgcatcggactttgctctggaagagaagggtttctctcatgtgcgcttggtcgtaccattctcttatgggaccatccggctgaaaaaccgcaaggcttactgcgcgcgcaaaggaggcctacagtttcgtacgacgcccaaggcatggtatttgctgtcgcctatggtggccgcataaagatgtttgatattccgaaattcggaatggggccttttgcgaccttctctgtctgcactgatgattccgaagcccatgtcgtacagttcaacggtgattgcaagcggattctgttaaccactaaagctgggcgtgttcatgtgctagaatcttttg

SEQ ID NO: 295245 - DNA, 376 bp, Zea mays
gtaccggctctcggaattcccgggtgcgacgccactgcgtgccgatctccgcatgtcgttaccatactgcttgagcgactttctacctcgtgcccagacaagtccatatcgagagcgcgagatactgaccagtggacgtgcacctggcacctggagcagcggggtaatggggaagaagtggagctggcctggcgcaaggtgctgcgggccataggaagaagtcaggagtctaggtccgtgaaagccgtgctccagttccccgtcggccgcatcgtgcgctacttgaagaatggccgctactcgcagtgtgtatgctccggctcccgcatctacctcgacgctgtactagaatacctaggcgatgacgatttttagc

SEQ ID NO: 295246 - DNA, 421 bp, Zea mays
gaattcccgggccgacccacgcgtgcgaccagcgctcgtgacctccagtcaacagattcccaatccggcgcttctcatcccgggtgggccgctccatttggtcgaatggccgatggcgcccaaggccgagaagaagcccgcggagaagaagccgacggaggagaaggccgagaagaagcccagggcggagaagcgcgtgccgggcaaggagggcggcgagaagaaggggaagaagaaggccaagaagagcgtcgagacgtacaagatctacatcttcaaggtgctcaagcaggtgcacccggacattggtatctcgtccaaggccatgtccatcatgaactccttcatcaacgacatcttcgagaagctggctgccgaggccgacaagctcgcccgctacaacaagaattccaccataacc

SEQ ID NO: 295247 - DNA, 327 bp, Zea mays
  unsure (1)..(327): unsure at all n locations
gtaccggttcggaattccctggtggacgccactcgtccgcggacgcgtgggtgcgaatggggagttctggatctgttgcgatatctgcgagaagtggggccatggcaagtgtggcctgggcacccctgcaaaggcagagcacatcaatcagtacaagtgtcccagctgcagcaccaagcggagcctggaatgacatgctccctggggcaagactcgcttccacttgactaagcatttagaatcattaggatcattgaaagtgtgaaactgtgtcattagaatcacttcctctgtttagtggaccantattttttctatttttttaat

SEQ ID NO: 295248 - DNA, 424 bp, Zea mays
gaattgttctgttatataaatcttctaaacattttaacaaattatatgttttgtaggtccgaggttctatgccattcttgtgggagcagattgttgatttgacatacaaacctagttttgacattgttagacaagaggaagcgcctcgtgtacttgagaggcacttccatgatttgcaaaagaaatatggagctgtcttagccgttgatcttgtcaatacaggtggcggtgagggccgcctccgtgaaagatatgcaaaatctattgaacctattcttagtgaagatctaagatatgtgcacttcgacttccaccgaatttgtggccatattcactttgagcgtctgtctcagctgtatgatcagatcaaggactaccttcagaaacataagtactttcttataaatgattaaggagaggaaat

SEQ ID NO: 295249 - DNA, 470 bp, Zea mays
ctgcacgtaccggtccggaattcccgggccgctctacacgatccaatcttacgcacgcatgcatgcattttcattcctcctctatccattcacctatcggcaattcattggccgtaattccacatcgcgcccactgccaaaaccaagccctcacccaacaaacccaccttggagaacgcccataagaagcccactgccgaaaaactcatgccgcgcaaggaggtcggcgagaagaacgggaacacgaacgccatgaagagcgtcacgacctacaagatctacatattcaacgcgctcaatcaggtgcacccggacattggtatctcgtccaatgccatgtccatcatgaactccttcatcaactacatcttcgagaagctggctgtcgatgccggcaatctcgcccgctacaacaagaagcccaccataaccttcctggagatccagacttttgtgcgcctcgtacttcc

SEQ ID NO: 295250 - DNA, 335 bp, Zea mays
gaattacgggccgacccacgcgtacgcggacgcgtgggcggactcgtgggcggacttttgttcagatagagaatgatggagatggggtttgggaaccagatgtgagggaaacgcatgatgctgtcttattgaggggtatgaagtttatggactggttgtggacaagagaagagaaagagatagctattgtcagtcacagtggtttcttgtttcacaccttaagcatgtacagtaaggagtgccatccaaccataagatactaagttagcaagcactttgcaaactgcgagctacggtcgatggtgttggttgtcataagcatgcttgggtcatat

SEQ ID NO: 295251 - DNA, 314 bp, Zea mays
taggctatagctagcctctcggagttcaatgtcagccagtactctacctatgatgacaacgtgccaattgacagggtggcagagcaaatccatgaggaaccatggaagatggcctaccagactggattcagaatcttagttgcatatggtggtgcacctataactaaccatctgagagagttagagagatgcttggaaatcttcgtcataactacttatctcttctataatcttattactagacctcgagtcttaatctacttgtttatgagtttatctcctgatgcaacctgatcaatgctttatactgagta

SEQ ID NO: 295252 - DNA, 292 bp, Zea mays
gttggcttctcactacccctccggttcggattccggctcgtgaggttctccgggggtcaggatcgagggtgaacggagcgagatgacgcagtcggatgctgagtaccgctcattcctcagcaggcctcacatgcgccacggactaccactccgtacacatcgcctacatcacctacggggaagacctcgagtccaagatcatgctcgatccggacacgcagaggtacagatgcttcggctgcgtcaccatcttcacggacgatgcaatgctgcacgccatccagggcatgaa

SEQ ID NO: 295253 - DNA, 345 bp, Zea mays
gccgccgtcatgtcgaagcgaggtaggggaggttcggctgggaacaagttccgcatgtcactgggtctaccggtggcggccacggtgaactgcgcggacaacacgggcgccaagaacctctacatcatctccgtcaagggcatcaagggccgcctcaaccgcctcccgtccgcctgtgtcggcgacatggtcatggccaccgtaaagaagggaaagcccgacctcaggaagaaagtgatgcccgccgtcatcgtccgccagcgcaagccgtggcgtcgcaaggacggtgtctacatgtacttcgaagataatgctggagtgattgtgaatcccaaaggtgagatg

SEQ ID NO: 295254 - DNA, 399 bp, Zea mays
  unsure (1)..(399): unsure at all n locations
acgcgttcgcgttattgtagcccgtcgtgcctcatgtctcatcatttcctccatcgagcanaaagagggggttttaggaagtgaggagggctttactctcatcaaggactaccgtggcatgattgaaactgagctcaccaagatctgtgatggcatcctcaagcttctttaatctcaccttgtgccgtcttccaccgatcctgagtccaaggtcttctatctcaagatgaagggtgactactacagataccttgctgagttcaagactggagcttagagaaaagacgctgctgagaacaccatggtgggttacaaggctgcccaatacattgatttggctgtgctttgttccaactcaccctactaggcttggactggcacttaactttctcagtgttt

SEQ ID NO: 295255 - DNA, 316 bp, Zea mays
gccaaggccgatgccaagctggcggtgaatagcaaggtggcggagaagcccgccaagggggggaaggggaaggccggcaaggaccccaacaagcctaagagggctcccatcgctttcttcgtgttcatggaggaatttctcaaggagttcaaggagaagaaccctaagaacaagtctgtcgctgctgtgggaaaagctgcttgcgacaggtggaaatccctgatcgagtctgacaaggctccctatgtatccaaagctaacaagctcaagctagagtacaacaagggcatcgcagcctacaacaagggctatagca

SEQ ID NO: 295256 - DNA, 271 bp, Zea mays
gccacgcgtcctatcacgcgtccgtaaggtgcatacggaactggctatagaagctgtcaggaaatcacttgttgtgtcaaagaattgtaactctcccgatcatcaattcctacctctccctaaaagagctagaactatccttgtcactagaattcatgctagcaatttgtggtaccagtgtagatgatggtcaaaccaatggatagagtacacgtgtaatatcacaactgcaattcaatatccctgacgaggaccacaatttttgatgcga

SEQ ID NO: 295257 - DNA, 358 bp, Zea mays
cggacgcgtgggtcctaatggtgatgttgtcaactgtgaattcttagtgttgaagtttcattacataaaaataagttccctagctactggttctggtttattcaggttttattacttcattagggagctgatttttttttttgaatcgaatagccctgctattcaggagaatagggttgctaccgtgcagtgcctatcgggtactggttctttaagagtcggaggtgaatttcttgcaaggcactatcacgagcgcactatctacattccacaaccaacctggggaaatcacccaaaagtcttcaccctatctggcttgaacgttaggagctaccgctattatgatcctgcaacatgc

SEQ ID NO: 295258 - DNA, 407 bp, Zea mays
cggacgcgtgggtgcaggtcgcctccatcgccggcctgttccgcccgcgggtcctcgccgactgcggcgggaagggcggcgctgccgccgcgtccggcctcgccgcgctcgccggcgaggacagcctagcggcgaggctgtcgccgccggcgctcgtacccaagagaatttacaaaagcaatggctacctgctagtgacttgcaatggtggcctcaatcaaatgcgagccgggatatgtgatatggtgactatagcgcgccatctaaatctaacgcttgtggtccctgaactggataaaaggtctttttgggctgacccaagtgattttggagatattttcgacgtggaccacttcattaattccctgagagatgagctgatgataggtaaagagcttcctttgaaa

SEQ ID NO: 295259 - DNA, 378 bp, Zea mays
atttgggtgtgttctgctataatttacggtaagaattgaagacaatgatgtcggcatccctccagacactggcatgcttctcaattctgtctgcccttatgatccgatctgtggagggaagcataccaatgccttgaaggagatgagtgagccattgaaggtgcgtatcttgagcctgtcgtcaggtattgaggcctccaccatgcacacgagagagacccattggttcctgttgactgagtcgcccacaaacaccattctcttgtttctcagattttcaagcagcttgatggcatcaaatctgttttggaaaaaaggaaccatattaaaaaggggaatttgtcatgatgaatttggcctttctgttcatgtacttag

SEQ ID NO: 295260 - DNA, 402 bp, Zea mays
gaaaactagaaaaggctcctcccgaccgcaacgcccctcatctccctcgaccccgacatccccgacccgatggcgcccaaggcggagaagaagccagcggagaagaagccggcggccgaggagaaggcggagaagacgaccgcagggaagaagcccaaggccgagaagcggctgcccgcgtccaagtcctccggcaaggagggcggcgagaagaaggggaagaagaaggccaagaagagcgtggagacctacaagatctacatcttcaaggtgctgaagcaggtgcaccccgacatcggcatatcctccaaggccatgtccatcatgaactccttcatcaacgacatctttgagaagctggccggcgaggccgtcaagctggcgcggtacaacaaggagccc

SEQ ID NO: 295261 - DNA, 235 bp, Zea mays
ctaagcacagcaacctcatctctaacggtcacttcaagaagcactggcagaactatcccaagacatctttcaaccagtcctacctcaagcagaggcgcctcatcctacttcaaaagaaggctgtcattatatttccaagaccaactgcttaatcactttactctcattgcacaatgccacaatatttaatacaatatgaagtcaatgccttgaattatactggctcttgacgatt

SEQ ID NO: 295262 - DNA, 216 bp, Zea mays
aattaagagaattgaattttgctaatatagtttcattagctcctgaagtattatggatactagtacacgagatataggtcaaagaaaaaattagtatattctgtctcacagtatattctaaaaattccaaaatttaagaaaaagggaaacctggtgattaattgaatatttagagggacctaaaatttgaagcctatgggctaaggacactattgc

SEQ ID NO: 295263 - DNA, 401 bp, Zea mays
cggacgcgtgggcgcaagaaggtcgacagcgccagcacgtcgctgctgtccccgtacctgcacttcggcgagctcagcgtccggaaggtcttccaccaggtccggatgaagcgcctcatgtggagcaacgacgacaaccacgccggcgaggagagctgcaccctgttcctctgctccatcggaccacgccggcgaggagagctgcaccctgttcctctgctccatcggcctgcgggagtactcgagggtggcgaggcgggagaggagtacgcgggagcggtaggcgagccgtggaggaggatatggaggtcaccgaagaggaagaaagggaagtcgtggactctgatgtggagggtttcattggtttgatgagtttacattacaggttgcttttcttaaat

SEQ ID NO: 295264 - DNA, 330 bp, Zea mays
tgccgtaccgtgtcccgggtcgccggacgcgtccgaccactgctacccaaccctcgcttccccattccctatccaagggacacggtggccggcgatggacggcgacggatgaggcgctggtgggctgcaccaccacacgcgctcacccgaggacgtcttccgcgatttccgcgcgcgccgagccggcatcgtcaaggcgctaaccacggatgtggagaagttctatcagcagtgcaatccaaagaaggagacctgggcccttaatggtttgccaaatgagacttgggaggtcacttttccagctgaggaagtccctcctagagtttccaa

SEQ ID NO: 295265 - DNA, 438 bp, Zea mays
  unsure (1)..(438): unsure at all n locations
cccacgcgtccgcccacgcgtccgcggacgcgtgggttttggcacgacgggactataggattgatcaagatcggcttggcatttcagttccactaccaacatagttaaccatgtagtccgtggactgtattaatctaacatagttgatgaaaaaaaaacaacgacgtattacaagttaaccatgtacgaagaaaataaaacaggcaaaaatcaacatggcttcattagccacggtaccactctaccaacggttttccatccatcgtgacttgtgcaattaccgcagtacacttctggtctttgagttggtgactgtcttgataagctggnttnaaacccatccaccggtcaagcattcctgtcatggcgaatgtgccaccaagaactgcacatagacgagttacaaaatgaaggaagttccttctttcctctttgatg

SEQ ID NO: 295266 - DNA, 333 bp, Zea mays
  unsure (1)..(333): unsure at all n locations
ggtgggctggcttctactcaccctcttaccaactactattcggattacggttagttaaggtgtttgtggaggggagatggcggccgatgatgaggcctaccgtcgctcaatccgctggcttgcctaagccacaaacaactcatcgctggacaataccttcacctcctacggcgagatccctcactccaacgacattacctaccgggagactctgatgttatcccnagttccgaccttcattacctatctacaccggacaactcactacatcgacactatcgagaacatcacaccgaaaggatctccaacgcagtaacatcaccgttaaccact

SEQ ID NO: 295267 - DNA, 336 bp, Zea mays
gtcaagtggatcgacaagtcgagttagacatggagcagatccagtactccaggaagtacgacgacgacacctatgaatacgggcacgaaaaccttccggccgaggtcgccaagctcctccccaacaacatgcttctatacgagaagcagtggccgttgatgggagtgcagaagagccgcaggtgggagcactactctatccaccagccagagccgcacataatgctgatacgccgcccgatcaactaccagtagcaagaggaggaagcggctgcctagcatgtgctggacaagtgaaacctctgctggcgaccatgaatgataaaaaccgattttt

SEQ ID NO: 295268 - DNA, 444 bp, Zea mays
aattgacggacgcatccacgtgtctgcgtatccgcctcggcaccaaacttctacgcatggagttgattgatcgattgcggccatcagtcagttgcattcggagcttggcaaggattgcatatcccatatagttcatgatgccaagtaacaataggaagttcactgagactgttgaacttcagattactctgaagaattatgatccacataaggacaagcgtttcagtggctctgataagttgcctcacattcatagtccaaagatgaaggtgagcatgcttggtgatgcccatcacgttcaggatgctgagaagatgggacttgactacatggatgttgaggccctcaagaaaatgaaaaaaccccaagaacaagaagcttgttaagaagcttgcctagaagtaccatgcttctttggcatcagagaccatcatcaagcaaatt

SEQ ID NO: 295269 - DNA, 388 bp, Zea mays
cgtccaccctgcacccctcgcgagttctccacttcgccatcgcccatggtgccctggtcatctgttcaacgtctaaggtggccaagcacttcgctgctgggtcgtcggcgccgtcccaagctggtgcttggcgccgcacgccgaccgcggacctcgtctggatcctgcatcaacgggtgcgaagaaaataaaaccatttgggtcggtgacctccactactggatggatgaaaactacctacataactgcttcgggcccagcggctacgtggttacaataaaagatatccgcaataggcatacacgacagtcagaggcgtatggatatggagagtcgtttctcatgcatctgcataaacagctcttgatattttaactggtcatgtgat

SEQ ID NO: 295270 - DNA, 425 bp, Zea mays
  unsure (1)..(425): unsure at all n locations
gccgagttcatccgctcgggggactcggatcaaaacggttatccggatggctcagagaggccgtatgagaggttgtctattatcagcaaaggcctgcaatttcaagaggctgacggtgacggatcaccatcacctgaatcatctgctcggaaggatacaaacccaatcttagtatcctccaagtcgaggagagtgaggtttgtgctcccagaaaatgcgcagatcaacagccaagtgcgcaacgagctgcaagagctgactgaggcaagagaggcaggcatgtccttcatcatggggcgctcgtatatgaaggcgaaaagtgggtctagccttgatngnaaaaaagcggattgccataaacttcatctatgagttcctgacgaggaatagccgaggtcccgnctacgcggctaacgtgccacatg

SEQ ID NO: 295271 - DNA, 387 bp, Zea mays
cactcgtcctgtctgtacttttaagaacattctcaaaagttcatgtcaaagccatgtctacctgtaattttataaatatcatcttgccactgtcaaatccaacctctcattcttaatgtactactaataaaacatataactctactcaacgacgaataatattctccactatcaatccatttgaccactaatactactatccaaaagtatttctaccttgacactctaacaactcctacattatccctacatatttccttcctcttattatctctatatccatcacactccactattacatgctacttaccaactcataagcactagctactcatgccacacatgaaaacttttacaatatatcaatcttacctcccttcaccaaca

SEQ ID NO: 295272 - DNA, 330 bp, Zea mays
ctgacgcgtgggctctgggacttcctgctttaggaggtgatccaagatcacggggataggaagaatctgaacggcaacagggagaatgaatcagacgacttcatttacatattactctacagatactaagagtactgcttcaccatagataacgttaagtgccttctcatgaacttgttctatgcaaccatcgagacctcatatctggtgctggaattcgccatggccgagcttatgaaccacaggaccgtcatgaagaaactgcaagctgaagtacaggcgtactgagcttataacaagctggacatgatcagtgaggactaccttagc

SEQ ID NO: 295273 - DNA, 294 bp, Zea mays
taccggaccggaatttcggggcagacctacgcgtccgcacccactgtagcacaaggccttgcaaggcactctccgctgggtactcagcaactgtgctgtggacaagcgccaccagctatgatgccccctcagtcaggatttgctttccagcgacagcttggtccaggcatgacgcctgagggggcccatatgccaaagtattatgtggcggctgtacaacacggacaacagggtccacgcccatgtattacgcgtggagctggagaccaatgtcagcaacctgtgccaccattt

SEQ ID NO: 295274 - DNA, 393 bp, Zea mays
cccacgcgtccggtttccctctttgaataacagcggaaacacatcaccatgaccagctcggggccaggcatatttctctgatgcaaactcacacaaacttggtgctatagtctacatcacgatcctaaaccatctgatcaataaccaaaactagtactgcatggaggttactccaaagactctggctgactttaatcggtggcactctcatctattacgaatgaagagtttatcttttgatagattgccctagtatccgatgagcatgtgaatgaattcaaatcaatctataagtttaagaaattcaacactatacaactcttgggtgaaccttaaagctttcaattagacttttagaggctgaatcacttaaaactgtattcttttcaaacc

SEQ ID NO: 295275 - DNA, 459 bp, Zea mays
gcttcattgctctgttcatggaccctctgtacttctatgtgcctgaaatcgattacaggcaaacctttcattgtgtcaggaaggatacacgcctagccatcatcgttactgtgttccgatcaattgtcgacctcttttatgtcatccagatgatgataaagttcaggactgcatatattaatccaagctcaaacttaggggtttttggtcgaggagatctcatcacagatcctaaggaaatcgcaaagcagtacttgagatctgactttgttgttgatttggtggcttctttgcctttaccacagatcattatttggtctgtgataccagctatcaaatattcttcgtctgagcatgggctggctgctagcatgctcggcttgggaagttggtgaagaacaaggtcttcgtggcaagagacgacttgtggtacaacaagaatattgacccctcgagcga

SEQ ID NO: 295276 - DNA, 430 bp, Zea mays
cggacgcgtgggcgcgcgttcgacggccacgaccgcgtccacgtcatcgacttcgacatgaggcaggggctgcagtggccgggcctcctccagagcctcgccacgcgcgtggctcccccggcgcacgtgcggatcaccggcgtcggcgagtcaagacaggagctcgcgacgcaccggcgcgcggctggggcgcgtggtcgccgcgctcgggctcgcattcgagttccacgccgtggtggaccgcctcgaggacgtccgcctgtggatgctccacgtgaagcgcggcgagtgcgtcgccgtgaactgcgtcctcgcggcgcaccggctgctccgcgacgagaccggcgccgtggtggccgaacttcttgggctcacgcgcagtacgggcgccggcatcctacttctgggcgagcactaggacgccctcaac

SEQ ID NO: 295277 - DNA, 242 bp, Zea mays
ccccacaccacccttaacataacaatttaacaaattttcaactacatttccttccatcacctcattaaatcccccttcatacatattatcaatacaaccactatccaatttaaacttttcaataattacaacacccatcatttccacaacttccatatcaaaatcccactaatctaccataaaatcaatcctccttccttaaaattccataccacctttaacacttacaaacccaacctttt

SEQ ID NO: 295278 - DNA, 322 bp, Zea mays
caagtccaaccccagctacagatggatggtgcaccacggcgccaagttccgcaaggccacgtccatcttcgcaaactccttggacgccgccaagccgggccccgccaaggtcctgcgccagccgaaccccggccaaccgtcggtgcgcaccatcggcccgttcgtccccgccaaggacggtggcgtcagcaaggacaacccgccttgcccgtccttggagtgcctgtaccggctgccggccaagtcggccatcttcgcgtccttcggctccggctgcacgctgcccgccgaggagatgcgggagcttgcactaggcctggag

SEQ ID NO: 295279 - DNA, 443 bp, Zea mays
cccacgcgtccgagctattcttcatatatctacattgagtgggcgattggagtctgataggagctagaaccttcatatgtgacaccagaatgaatgggtgattggagtcgaatgtacagacttgtaggatattccggaaatgttttagcatgccttttgatttaagcatgtacctgttaaaagtcttctgtgttttccaggttaatggagttggaaagaccgcagttacagtggagtacccagagcgtcctggacagcctctctgtgagtactatgcaaagaatggcacctgtaaatttggttccaattgcaagtttgatcatcccagggagggtggttttgtacctgtcacattgaacagcggtggattccccctgcgtctgggtgaaaaggaatgttcctattacatgaaaactggacattgcaagtttggagctacatgt

SEQ ID NO: 295280 - DNA, 409 bp, Zea mays
ccggtctcggaattcccgggtcgacccactcgtccgtcaatatattacttcgagtcttattgatccttctgtttctacttgatctcaaaggtggcaggttatatcgatctgctggatgtctgcccaagtccatctgagatgaaggtcactattgcacttgctgatacgggcatcaaatatgaatacatagacgaggacttaacgtactatagatctctactcctacaaatgtacccggttcacaagaagattccttctctcattcacactgacaaacccatttgagaatccctcatcactgttcactacatagacgaggttagtgatgacagaaatcccttgttgccctctgacccttaccacatagctcagcctagattcttggctgattatcctgattagatgatat

SEQ ID NO: 295281 - DNA, 477 bp, Zea mays
aattcccgggtcgaccgcactcgtccgtcaagtcattacttcgagtcttattgatccttaattatcttcttgatctcaaacgtttccgaggatatcgaaatgctggatggctactcaagtccatctgaaatgaaggtcactaatgcacttgctgaaacagatatcaaatatgaatactaagacaaggacttaacgtactatagacctctatttctccaaatgaacccggttcacaataaaactcctattctcattcacactggcgaacccatttgttaatccctcatcactgttcatttcattcacgaagttaggaatgacagaaatccattgttgccttatgacccttaccacatagctcaggcctgattctagactgattatgcagatccgaagatatactatcttggaatgaagatctggtcattaataggaaaagaacatgaagctgccattaaagagtacatagaatccctt

SEQ ID NO: 295282 - DNA, 447 bp, Zea mays
cagactcgtgggtcaagatcgcgctcaccatcatccgcgactggctcaaggctgaccccgggaaataccgcacgatgaagcagaggcttgactgcgtgtctgatgacaccaccacggttgtcaagaggctctaccaaatgcatgagaccgacgcccgcctgttccctgccattaacgtcaacgattccgtcaccaagagcacgcttgacaacctgtatgggtgccgtcactcactatctgatggactgatgatggccactgacgttatgatcgccggtatggctgctgcggtctgcggatacggcgacgactgcaagggtcgcgctgctgggctgaagcatgctgacgcccgtgtcattgagaccgagatcgaccccatctgtaccctacatgctctgatggacggtctcaaggtacttgcctcggaggacactgtctccgaagctg

SEQ ID NO: 295283 - DNA, 246 bp, Zea mays
ttcctctccaaaagtcacctatctaatgtttctatctatctctttattacacatttcataaatacctttcttctatcgatagttcattcctatcccttaagcttttctcccattccatattgcacgattatatcattctctcactcattatccacaaaatcctacaatcatgagatattcccatcccatcttatttgtaattacctttatctatcttcatccccactcgatgctatcttatctcct

SEQ ID NO: 295284 - DNA, 358 bp, Zea mays
gaattgccgggtcgacaccactcgtccgtcagatcatatgttaggtaggttatcactctttttcatcatcttcgatttggagcgcttggtccatacacaacgggagctaccattcttggtcttcacgatcgacacgcaccaccgtaagtgcactgcacactttccgagcctggactttcacgagcgcaattgctacctaaatgtcatgctcaccgtcatcattcatgatcctgccccaaacccaactattgccaaaatcgccttccgttaacctatcagatacaataagcatatccagctattgatagcctgccagggactctacacctgtcacatcatataatgctgcaacaaggcc

SEQ ID NO: 295285 - DNA, 340 bp, Zea mays
gtgagccggagagcttagagctaagtcctcgtgtgaaagatggaaatggcgcgaagcccagctcatgttgctctctgctcgcttgctctgctcctcctcctcctgcttccagccgcgcggtcggcgacgttcacgctgaccaacaactgcgggtacacggtgtggccggggctgctgtcgggcgccggcacggccccgctgccgacgacggggttcgcgctggcgcgcggcgcgtcggcggcggtggacgcgccggcgggctggtcggggcggatgtgggcgcgcacgctctgcgccacggacgccgtcaccggcaggttcgtctgcgccacgggcgact

SEQ ID NO: 295286 - DNA, 181 bp, Zea mays
ccaaagccatggctctccgcaccctggcattgaagaaggtcctatccttcccgttcggcggcgcgggccggccgttgacggcggcggcgtctgcgaggtgggtgacgacaggtcacactttccgacctctactacgactttggctcgctggtacctgccatctcgggtgagatcatgcgct

SEQ ID NO: 295287 - DNA, 321 bp, Zea mays
caatgctaactgcaccttaaactgttttgctccccttgctaaagacaggcacaacgtccatttcataatggatccctcgatcacaactgttcatgccatcactgccacccaaaagactgttgatagaccctcaaccaaagactggacaagtggcacctctgtcagctttaacatcatacccagcatcacccttactgccaacgctttcattaaagatcttcctcaaatgaatgccaaactcactggcatgttcttccggaatcccaccccagatgtatcaactgtatacctcactgccagaatctagaaactgtccttcta

SEQ ID NO: 295288 - DNA, 445 bp, Zea mays
ggccgacgccaagggccatggtgaagccttgaaagagaacgagcagggggcgccagaaagttgagatccgccgcatcgacaacaaggagagccgtcaagtcacccagtgcaagcgcaagggcgggctcctaaagaaggcctcggagctccatctcctctgtggtgcccaagtcgccatcatcgtcttcaagagaagggaccccgaaagaaaggaggtgcccgttccgccccgcggccaacgcgacgacggcggccttgccttcgcgatgggcaccctctccgtcgaccacgtgctccaccgctgtggcctgctccacgccgacgagggcctcaccgcgatccaggatgtgggcgccatcgtcgcatagcgtgccgctatggacgcgagagcggggcagaccgagcagaccatggcgctcgtggaggcggagaatgcgctgaatga

SEQ ID NO: 295289 - DNA, 476 bp, Zea mays
cggttcggaattcccggctcgacgcacgcgtccgggacgcgtgggcggacgcgtgggcggattcgtggggagcggttaagaatcgagtacgagaagaggctgacacatttgaggaaccaagatgtgaaaggcgaagaacctacctctgttgataagacttgtgcagcattgagaagcttgcatactcggctgaaggtgtcaatacacacagttcagtcagtatcaaggaggattgaaattctaagggatgaggagctgcatcctcagcttatggagttgattcaagggctatcgcggatgtggcgcgccatggctgaacgccacaaagctcagaagcgcaccatcgaggacgctaaacttctcttcctccagcaccacccctcggccgccacggctatctcccttggtccgctggaggccgcaactccccctccggctgccttggcactggaatccgagatccaggcctggcgagg

SEQ ID NO: 295290 - DNA, 383 bp, Zea mays
aactggctcttactcacccactccttcgttttcaattagctgagactatcgcgtaatagaggcaaggggggacacccaactcgatcatccttcaacattctgaatatccatgtaacccaaatattcactatcagactactcgacctcaaatcttgaacgctacaatcacgaaaaaatgctgactcttctatcatctataacgtacagagacgtaccatcaccttgtactcggcgatacctcagatagctaaatcctaatatcaagctctattgtatggacccagtatagagcgctctttacaatggtccataacctcaaccatacaccattcactgaatagcaactcgttttatcccttgagacttggacttgagatctcctt

SEQ ID NO: 295291 - DNA, 355 bp, Zea mays
cacggcttgagccacgcgtccgctaataacactgttcgattaggattccctgcaaacccttctacaaaccgggtaactgagaagagcgcaagatgttcgatttacagcaccacggtcacacacagacagaacccgtcggctcactgaatggtgcaccagcccaccttgaagatcttctgcaaggcctacgaggagtactggcttacctgtcgcaacggcaacgtagggctaccccctggcaacccgcgcgactagcaccatcactagtactagtacatgcgcttcaacacccatgtcaaggactaggaggccaaccctgcgtttaccctgaactacaaagccactgggctcgcca

SEQ ID NO: 295292 - DNA, 257 bp, Zea mays
atctccgaacatctgctcagaccttttaagttctgctccggccatggacgccacgggcactggtactttattgaaggctaacaacgtatccgccggtcgcaaggccggccgtcccatgaagaaatctgtgacgaggtccgtcaaggccgggctccagtttcccgtctgccgcatcgggcgctacctcaaaaatggccgctactctcagcgcgtctgcagctttgcccccgtctacctcgcggtcgtcctgtaatacc

SEQ ID NO: 295293 - DNA, 363 bp, Zea mays
cggttcggaattcccggctcgacgcacgcgtccgcggacgcgtgggtccgtatcctccgcttccactccttctccgtcgccttcctgctactagttctacgtcttctcatgaacgcatcgcccctctccacctgctgatccttcgccatctctccatctctctttctctctgagatagtctttcgaatccatctctagggctcttgtttctccccatcctccccccaccctaccctccaccatacacaagtccccttgttcaatcctacaagacaagcatccatgtcatcgtcacgcccgagctcgagccccgacagcaactacacgactgacgagcgcaagcggaagcggatgctgtccaac

SEQ ID NO: 295294 - DNA, 354 bp, Zea mays
atctcccggctcgacccacgcgtgcgcccacgcgtccgcccacgcgtccgcccactcgtccggggttggcttctcctccccctccggttaccgttgggattcctgagggtctccggggttccgcttcgtgcgtgagcggatcgagatggcggcctcggatgttgactaccgctgatttttcagaccgtctcgcctgggccacagacgaccactctctccacaacgccttgagcacctacggtgaggtcctccagtccaagatcatactcgatcggcgagacgcagaggctccgctgcttcagctacgtcaccttctacacggacgacgctatgctgaacgctcatcgacggcat

SEQ ID NO: 295295 - DNA, 347 bp, Zea mays
gttgccaatgctatctgtttcacacactttcttgctccccttgctaaaggcattcattgcaacttttgcattctagaaggctcgatgacaactgatcatgccatcacttacacccacaatactattgatggaccctcagtccattacttgatagctcgcagtgctgccaactttaacatcattcccaacagcaccgctgcttccaaaactatcggaatggatcttcctgaattgaatcgcaatctcactggcatatccttccgtcatcccaccaccaatctgtcatatgtatacctcactctaacaatcgagaatgtgtcctcctaccaataaatcaataactctat

SEQ ID NO: 295296 - DNA, 403 bp, Zea mays
ttccgaattcgaggcacgagtcacgcgctgatcccgcatctcgtgccaactaccatagcactttcatcgtcgtacgacacaagcacaatgcgaaggggaaatacgacgcactgactccaccggcaccgtgagcatgggctaaggctaagaacgaagcgggccaacacaaggtccgccttccaaggaagaaaccagggtcgaggtccctgaaagccgatcttcaattctgcgtacgacgtatcgggcgctacttgaagaagggccaatactcacagtacgtcggtaccggcgcccatgactacctcgacgctgctctcgaatacctcaccgctcaggatctggaactcgacggtaatgctgacacggacaacatgaagactcgtattattccgcgccacgtgct

SEQ ID NO: 295297 - DNA, 295 bp, Zea mays
cggaattccaggctcgactcacgcgtgcgtcggcattctcttcaactgctaagcactttctcgtcgatacgatacactccaagagaaggcgagatacaactatggactccaccggcaccgcatcaaggggtaaggtgaagaagggatcggcaggacgcaaggtaagcaggtcaatgaacaagtcaatatcctggttcgcgaaggccagcttacaattccgaataagtcgtataaggcgctacttgaagaagggcagctacacgcagcgtatcagaacggacgcaagggtgtacct

SEQ ID NO: 295298 - DNA, 378 bp, Zea mays
cccacgcgtccgcccactcttccggatctccagcattgccctatctgtggaaaaaaaaaaaaaaataaaaaaaaaaaaaaaaaaaaaaaaaaaaaaaaaaaaaaaaaaaaaaaaaaaaaaaaaaaaaaaaaaaaaaaaaatggcatacgtttaaaagtatccaagcttacatacgcttacattcaacaaaatagctcttcaatagtgtaacctaaattaaattcacataccatcgttttaaaacttcataacttgaaaaaccctgacgatacccaactaaatcacctttcattacataccccttacaccagctgccgaaatacctaaaaatcccttacagaacgcctttccaaacatttacccaacttaaattccaaa

SEQ ID NO: 295299 - DNA, 327 bp, Zea mays
ctggcttctcctccccctcttaccaagtcctcttcgggttagggttacttagggctttgtggaggggcgattgcagccgctgatgtggagtaccgttgcttcgtcggcggacttgcctgggacaccatcaacaagtcgctggagaatgccttcgcctgctaccgcgagatcctcgactccaaggtcatcaccgaccgggatgacggtgaggtctcgcggattcggcttcgctaccttctgctacgagaactccatgctcgactctatcaagaacatgaacggcaaagagctcgacggtcgtaacatcaccgttaaccatgcccagtc

SEQ ID NO: 295300 - DNA, 428 bp, Zea mays
cccacgcgtccgaagaaagcctaagcagataatcatcttcagggatggtgttagcgagggtcagggtagccaagtactgaacgtagaacataatcaaattataaaggcatatcagagtatgggacagggggaccttccgaagttcacagtgatcattgctcaaaagaatcaccacacaaaactcttccaagctgattcaccagagaacgttccacctgggactgttgtggactccggcatagttcatccaagacagtatgatttctacatgtgtgctcatgccggaccaattggtacttcaaggccaacccattaccatgtgttgcttgatgagattggcttctctgcagataatctccagaagctagttctttcactgtcatatgtgtaccagaggagcaccactgcgatttctgtggtggcaccta

SEQ ID NO: 295301 - DNA, 335 bp, Zea mays
acgcgtcccatgactgtcctaataagcggtacacgtttctaaatacttattgacactactaaggcaccgagaaaattattactgcttttactgcatatgtaatgcttatgaaactatgaatgaatctacatgctctacacctcatcttataagtatactaaataaactacaggccctcgctctagatgatccaatattacctactcatgcatactacttcataactcttctatactgtcacgtaaattcaattcactcaccgtctgattacaacaacgtgactggcaaaaccctatcgtaccccaactcaatctatttgcagcacatatccattt

SEQ ID NO: 295302 - DNA, 371 bp, Zea mays
caattcccaattccacccacgcgtcacgcgacccatgctactaaagcctccacatataatctttcacaaccatcactgaagccatggtcacggtgaccatacactgaacgtataacataatcaaactataaacgcatatcatactatgacacacggagaccttccgaagctcacagtcatcatctctcactagaatcaccacacctaactcttccaagcttattcaccacagaacgttccacctgaaactgtatttgactcctgcatacttcataccaaacattattatttctacattgacactcatgccagaccaattggtacttcaaagccaacccattaccatgtgcaacctgatgagattggcttct

SEQ ID NO: 295303 - DNA, 398 bp, Zea mays
  unsure (1)..(398): unsure at all n locations
gccacgcgtccgaggcgcgcgcctgttacggcttccaaatcgccatagagaacatccagtcgcagatgtactcgctgctgctcgagacctacatccgcgatggcaccgagaaggaccggctcttccgcgccatcgaaaccgtccgcgccgtacgccgcaaggacgactgggccatgcgctggatcgacggctgtgagcgctttgccgagcgcctcgttgccttcgcctgcgtcgagggcatcttcttctcgggctccttctgtgccatctgctggctgatgaaacgcggcctcatgccgggcctcactttctctaatgagctcatctcccgggacgagggcctncactgccacttcgcctgcctgctttatgacctncttcagcgcaagctcgatgag

SEQ ID NO: 295304 - DNA, 440 bp, Zea mays
aacagtttggaccgtttatgtattcctctacgggcgcctgtatcttgtcctaagtggcggtgatgaagcattagccactggaaagaggtttatacacaacgagcctctccaggttgctctagcttcacagtcttttgtgcagcttgggttcttgatggcgctgcctatgatgatggaaattggtctagagagaggattcagaactgcattgagtgactttgtacttatgcagctccagttagcatctgtgttcttcacattctctcttgggaccaaaactcactactacggaaccacactgctacatggaggagctgaatatagagctacagggcgtggatttgtggtgttccatgccaagtttgctgagaattatcgattgtattcgcgaagccattttgtgaagggcattgaactgatgattttgcttattgtgtatg

SEQ ID NO: 295305 - DNA, 361 bp, Zea mays
atgaaatcctaacatctaccaatctctatatccgcgttacatgttcaagctatgaaaggggactaaagaatatggatggatgtcacttggtatactcatgctgtgtatgacaggatctgaagcaatgcaggctgatcttgaacatgtgtcatacattgcactccatattgctatcaatagtctagtttaccccgcactgatttacgtcatacatgtgtcaagctgcttacttatcaaaacatcatgacttttactctagctcacaatctggatactacatctcagttctagataagatcacatgtccattgatgatattgacatattatctactacggcgttcataagccaagcaataatc

SEQ ID NO: 295306 - DNA, 298 bp, Zea mays
ctgaaatcttcacttctaccaatctgtatatccgactaacatgtaaactttctgaaacggtactatttcatatggatggacgtcaaatcgacgaatcatgctctacatgacaggaccacaaccactgctgtctcaaattgaacatttcttatacactgcaatccatcttgctgttacatttgtagttcaccccgcactgattttcgcatacctgtgttaagctggttacttatcaacacatcatgactttcactctatcttacacgatcgatactacatcgaagttccatataatatc

SEQ ID NO: 295307 - DNA, 358 bp, Zea mays
gacccacgcgttcgctgacgcgtctgcggacttatgattgcctgcaaaccctgccccatctcgggagatcggagataagcgcaagatgttacactttatgcaccactgccatcatggtctgaaccctgcggcgcacggtggcgtgcaccagcccaccttcaagatcttctgcaaggacgacgatgggtactgccttaccgtgctctacagccacacggtgctggaccctgacgaccggtgcgactagcaccaatactggttcatggacatgcgctttagcacctatgtcaaggactaggagggcaaccctgcgttcgccctggtctacaaggccactgggctaggcttcaagcactcc

SEQ ID NO: 295308 - DNA, 435 bp, Zea mays
  unsure (1)..(435): unsure at all n locations
cccaagccagtgccgcggaccgcgagggttttaagagaaggcggcggctccgttcactggggtgggtcctgatctcgcctcctacttcccgagccacacacgctgccgccgtgagccgccgcccacaaggctaagcaccaaccatggccttcggagctctcgtcacgtcgaggctggccaggtccggccgcacccttgcatctgccgttgcccagggtcccgttgcccagcggatagcacctgctctgttctccaggtttggagcagtagctcgtcttctcagcacaaagccagccgcaacagatgtcataagtatcgatctaggcacaacgaattcctgcgtctccgtcatggaaggaaagacaccacgggtgattgaaaacgcagaaggcgcgaggacaacaccctncattgttgccaagaatcagaatggtg

SEQ ID NO: 295309 - DNA, 430 bp, Zea mays
  unsure (1)..(430): unsure at all n locations
cggacgcgtgggcggacgcgtgggcggacgcgtgggcaaaaactcttaatccgtgttggagtgcctacaatattgcagacaggagagctcctccagtctatgttaatctttttactggtcaagcaacaacacaatttccaagtatgactgagactgtaagaggagggatactagcagacgcaatgggtcttggcaaaactgtgatgaccattgctctgatactttccaatcctaggggggagttctctaactgtataaaaggagacacaaggtatctaggagatcgtgcgaccagaggatacacttcaacatcctctgttagaggaggtacccttgttgtttgccctatgtcattattgggccaatggaaggatgagttggaagcacattcggcaccaggagctctntctgtgtttgtgcattatgctgg

SEQ ID NO: 295310 - DNA, 361 bp, Zea mays
cccacgcgtccgcgtgggccacggacgggggcaagtacaaggtcaactacaagcacgcgccgttcgcgtccgacttctccgggctggtcatcgtcggctcccgcgccgacgatccggtgctccgggaccaggaggacctcctcgggctcgtgacggccgactactacgccgccgtcatgacgccgcgggagcgcgcggccatgcgcgccttcagggcgcgccggatgacgtacacggtgtgctacgacgccgtgcggtacgcggacgggccgttccccgagtgcgacaactcggacgaggagagggagtccttctcggcctggggcgagtccaagaccgtcgtcgtgaggccccgcgcccg

SEQ ID NO: 295311 - DNA, 230 bp, Zea mays
gaacgcccccaatttcccggactgttgacccctcgacaccgctctgtcttcctgacggcttctaaaagttcaccgagatcgcgtggcccaatcccaagcccatcgcggaggacgccaagggcgtcgggaagactcaccacttccgcctgggcaaccttatctgctactgctccgacatctacgaactgctgctcataccccagctcatgctcaacgatacgcctgcgcat

SEQ ID NO: 295312 - DNA, 415 bp, Zea mays
acttggtgagctccgctctcctcttaagaagtcgttagtggattcttgtggcaaggactggggtcagtctttatatgcttcatggcgccactctccgatggctacgataagtttatgtttacttgctcaggcatacaatcacgcaagctgtgttattcagtcactgggagaagaagacataaatgtgaattttttggttcaattagataaattgatccgtctcttagagactccagtatttgcttacttgcgtttacaggtaacttggtctgataatccgttcctgcaaatttatctttctgtttctcaggcacatttgaattccgaaacttggagagttctacctggcttttttaatttgatttctagtgctacattaatggcatgataagcctggaccaatctttgtctcatg

SEQ ID NO: 295313 - DNA, 381 bp, Zea mays
ggtgttcatgctcctgtgggtggcgctgcacgacgccaacatcatcccggctgcccggcggatgacggagcgccccggagggctgacacatgtgcagcgcatgggcgtagggcggctcctggtggtactggccgtgacgacagtcgagcttgtcgagaggcgcctgatacgctccatccacagcggtagctgcccgatgagcatcgtgtggcaagtgccgaagttcgtgctgatggcaggctccgacttcttctgcgacatcgcgcagctggagtccttctacagcgaggcccgcgccgagatgcgcagcatgtgctcggccgtgtacttgctggcgctgccgctggggttctacgtcaactagctggtggtgacgcttgt

SEQ ID NO: 295314 - DNA, 310 bp, Zea mays
gacgcacgcgtccgccggggcttccgtctcctcccatccgctatcttttcacgaactctacataccgtctagcagccggattttaaacagtcttgggaaccataaatcgctactcaagcccctcctgtccagaatggtgatgctcaggcccaggccttgaacgtggcccctgctgacaagtctgggccatgccctcagaaaaccatacatattcgtacatctgtaacattccaccagcccaagaccctgaataaggccatctacccgaagtacccaagaatcagcactactgcaagaatcaagcttgatc

SEQ ID NO: 295315 - DNA, 404 bp, Zea mays
gaagtgcttgcgcctgaatatcgcacatgtttaatccaataacttggctggtgctgggggtactgacaacagcttaagacggatttcacatgacaacttcataggccatcgtggactctgcggatatcggctcggctctacatgcgagtccactgagaatcgctacataccgtccatctaaaacgctgacataattgtcatcactgtgcgtgaaatggtgatgctcctgatgatcttagtctctgtctgcttgtcagacaactcactggttgacaatgacgacagtgtgaacaacccagagatcaacggtccatgcatgatcgtgatccttcatatgaacatggctcttcacgacttcgacgatataatgaggacgactgagaacttcagtgagaaatgcatca

SEQ ID NO: 295316 - DNA, 336 bp, Zea mays
cacaaccatcatctgctgtctctaagcatgttttcacaccactcgccctactccctcgaggcgggctctatcccgcgctaggaccgcgccatgaccgttctattccccgaccgtcacctgttccaggtccagtacgctcgtccaggacgcccacaaggctcaacgctcgtcgcgcgcatacgcggcacggacaccgaccaactcggagtactgaacaagtgcacacacaagctccaggaatacatgttcgtgcgcaagatcgactgcctagacactcacatagctctggtacgcgcacagccgaaagcggacgcgcgcgtgctcattaaccgcgcg

SEQ ID NO: 295317 - DNA, 371 bp, Zea mays
ggaacgaccgcactcgagcactcatgcgcccacgcctacagaacaagggtctgaagctttaacagcacctcaagaacagtgtatctcgcagcattccacacttggctaccagcgcctgtccatgtcttcacgaggctgaagcacacttttcccgattcatacagattaggattcaagcggagaccaccagaatgatagcgaacagaaggtggttcatgggggtaatcatgacgaaagaaaatatcgaagaaaaaacgattgtcatggtaaggtgttccatgtgccccaacgatgcaagcccttagaagatccatgctttcctcataaactctcacatgaataccatctggtacgtcattttgcaagatgtt

SEQ ID NO: 295318 - DNA, 296 bp, Zea mays
caaacacttgcgccgccactgtctaacgtttcaggccgacatggtctggggttcgggcgtgtgcgcgaagcgcatcgtggtggactcgcgccaccgcatgctgggccggctatcctcgatcatagccaaggagctgctcactgggcacaaagtggtcgtcgcccgctgcgagtgagatctgcatgtcgaccggactagtccgtgacaagatgaagtgcctccgctgtcgcgaaagcggacgaacaccatgccttgccacaggcgcatccacttccgcgccactggcaagatgctgt

SEQ ID NO: 295319 - DNA, 418 bp, Zea mays
tctctctctcccctccaccccctctccctgtgataacatttccttttttttaacagaacgtggagacagagtcgaggctgatgaacctatagcgcagattgaaactgataaggtcactatagatgtcgcaagtcctgaggctggtgttattgaaaagctcattgctagtgaaggcgacacagttactccaggcactaaagttgcaatcatatccaagtctgctcaacctgctgaaacacatgttgctccatcagaggaagcaacttcaaaagaatcatctccaccaaaagttgaagataaaccaaaggtagaggaaaaagccccaaaagtagatccttccaagatgcaagcaccaaagccaactgcaccatcaaaaacatgcccttcagaaccacagctccctccaaaagaacgagag

SEQ ID NO: 295320 - DNA, 493 bp, Zea mays
ccggtccggaattcccggccggatatccgggtcgacgcacgcgtccgcggacgcgtgggcactggttgagtgaagttagcctcaccgctaccgccctggaactgttgccctccgtgagatccgcaagtatcagaagagcactgagctgctgatcaggaagctgcccttccagaggctcgtcagggaaattgcacaggacttcaaaactgatttgcgtttccagagccatgcggtgcttgccctccaggaggctgctgaggcataccttgttggcctgtttgaggacaccaacctgtgcgccatccatgctaagcgtgtgaccatcatgccaaaggacattcagctggcaaggaggatccgcggccagagggcctaatcgccacctcaaacatcgtgacataaacatgaaatcctggggttattgtaaatctggtgccattgtagggacatatgagtagggtttgttttgggatcgcaagtttctctctggtac

SEQ ID NO: 295321 - DNA, 371 bp, Zea mays
tgccgtaccggtccggaatgcccgggtcgacgcacgcgtccgcgtgcgcgtgaacactgtttgactgcagttttctgaacgctaccttcggggaactttggcgctgatatagagccgaaagagtcagaagagcactactctgatgctcaggaagctgtcctctcacaggctctgtcacggaaatccgcacagcactccaaaaccgatgcacgccatcacaaccatccggtgctgagccctccaggatgcatgatgaacataccttgctggcctgtctgatgacaccaacctgtacgcactgcatgctaatcatgttaccatcttgcccaaggacattcacgtggaaacgataatcccactacacacaggct

SEQ ID NO: 295322 - DNA, 268 bp, Zea mays
cccacgcgtcgggaccaatgacgcagattttgccctgaaacttgtcgccgacgcaaacgtttacattaatgacacgatcggatctgtatacacggcacatgcaataagtgatggagttacaaaaatcttgaagccttgtgttacatggttccttttatagaaggagcttgactacctggttgaagctctcatatgcactgcacgcagatatgctgacatagaggttggttcatacatgtcatccgatatcaggggcattgaatccttg

SEQ ID NO: 295323 - DNA, 307 bp, Zea mays
cggacgcgtgggctcggcctgttcacaaacgcctgcgcttactctcgcccgagcccgagggatctttaggtccctattccggtcaccgatcgaccttcacaccagtctcggtctcttccgaaagcgtcgcgcgcggttgtttgagaggagaggaggaagatgagggagtgcatcttcgttcacatcgggcatgccgtcattcaagtcgttaacgcgtgctgggaactttactggcttgagcacggcatccagtctgatggtcatatgcctgtagataagaccgcgggacattactatgaatgccttt

SEQ ID NO: 295324 - DNA, 381 bp, Zea mays
ctcacgcgtgcgatgtcttctctgtctgttcgtgctcctccgactgatccatccaagacgggaatcgccatgctgtactcgcaggaacaccacttggaatccaaggccctcgctgaggcatccaatacctacccgcagcttgctggcaccattcgttacaacggcttcatcgtgatcgacagccatccctgctcggttgctgaggcttctacatccatgactggtactcatggtcactcgagatgccgaatcagctccatctacatattgcaatggaaataacttgactatattcgtccttcatctcacaactgctacattccgaatgtgaactggactgagtatcagctgattgatatatccgaagacggattagtgagc

SEQ ID NO: 295325 - DNA, 432 bp, Zea mays
agagtgccaatctaagggatggcacaaatctctcactccagcagctgatgtagaaagagagattcatgaatcacagaaagcaggattttttgaagaaataaattttccttacccgatcgtctcggtgattggtgggggtaaaagagagatcgatctttatgcatattattttggcgccgacttggcagttttcttccttgttgcaatgttctatcaatctatcctaaaaaataagagtgaattcttggaagtttaccagctggaggatcagttcccaaaagaatttgttttcatccttatggttctctttatcttgatagtggttgaccgcattatatatctttggtcctttgctaccggcaaagttgttttctatctttttaaccttgtgcttttcacgtattctgtcactgaatatgcttggggaacgga

SEQ ID NO: 295326 - DNA, 312 bp, Zea mays
cacacgcgtacgcggccacaacatcttcttttagaaccagcacgcgacgccggggtgggggaagaacctgacggcggacgacctccgcgccgtcgtcaacacgcgcatccttagcctcatgacctgctaccgcagcgagttcgcgcactgtgacgtgagcaacgagatgctgcactacaacttctacgagcagctgctggggcccaacgcggcctctgagttctatagcctcaagcacgacgccgagcccttggtcacgctcttcatgaacgagtactacgtcatcgagacctgcgactaccctttatccac

SEQ ID NO: 295327 - DNA, 388 bp, Zea mays
cggacgcgtgggcgaggaaggagggagtgtgcacggcggcttgatcgaacatggatgccggatcaatggtggtgaagaaggccgctgcggcgcttcgaggcgggggcggccccaagaagaagcctgtctctcgctccgtgaaggcctgcctccaattccccgtaggccgtataggacgctacctcaagcacggtcgctactgccagcgtgtctgcaccggctcacccgtctaccttgctgccgtgctctagtacctcgccgccgagctccttgagttgtcggggaacgcagcgcgggacaacatgaagaaccggatcatgccgcgacacttactgctgtcgatccgcatcgatgaggatctctggaagctactgtccggcttgaccat

SEQ ID NO: 295328 - DNA, 453 bp, Zea mays
cagctacacgaactctcaagggaacccttgagggttccgggtcaggttttgaggtgagatattgtgatctcattgaattgaacttatttctattgtgaaacccttccttagtacatcactatccaatgattagtctcagtgtaacttacatgtttgattttgtagtggcttaaatggcattctcggggacatttgataatcgcaggatcagaggattgtaatgtatggatgtggaatgccgaccataatgccattctgaatacctttgctggacatagtaacacagtgacatgtggtgattttactccagatggtaccatcacggttccttgattgctacacatctgcctatttataaagttgtggtttggtcgcctatgtaggtgtacctatgaatgctgtgttccttgtgaaggtaaacttatatgcactggatcggatgatgcgtctttg

SEQ ID NO: 295329 - DNA, 440 bp, Zea mays
  unsure (1)..(440): unsure at all n locations
cccacgcgtccgaccacaaatccaaaccctcttatcgtcctcgtcgccgcgacagagcccctgtctcggccgcccttcgccgcctccgcggagcaggcatcgcaggagaccaaagatccggccagctctgatgtcaggagctagtggctcaaccgggcgcgcggccccgcggtacgccccggatgacctgacgttgctcaagccgtggcgcggcctcgtcgacggcaccaccggctacctgtactactggaacccggagacgaacgtcacgcagtacgagccggctatgccccctgagaatcanctgcccccgcccccgcccccgttgcctcccccgcctccccggagccgcgaccggcgcgacaggtccagatcccgatcccgcacccctcccaggcgcgaccgccgcgaccgcgaccgtgacgacgagcatgcgtcct

SEQ ID NO: 295330 - DNA, 463 bp, Zea mays
ctgccccccaagtgaattcagcatcatttgtaagccgaaggataggggtgaaggcatcaatcggcccggctaagttagaaataaaccttcgtaaataattcaccttgccgagaaacctctgcacttcgaccttacacgtcggaggccccacattccgaatagacttgattcggtcagggtctatttctataccatgttcatggatgacaaatcctaaaaacttaccagccgacactccaaaagcacatttacgtgggttcatttttaaaccataccgacgcattttatcaaaggctttgcgcaaatcagctatatgagaactaaactcagccgatttgactacaatatcatcaatgtagacttccacagtgtttcctaacaactcatggaagatcagattcatagccctctgataagtagcaccagcatttttaagaccgaatgtcatgacaacccattcaaa

SEQ ID NO: 295331 - DNA, 442 bp, Zea mays
  unsure (1)..(442): unsure at all n locations
cggacgcctgggacatcagcgaaaacgcgcttataaagatcactgatacaatggccatcangggcagcatcaacttcgtagtgctctgcgtcgcgctggtgctgcacgccgcgtcgcctccgccgcctattgcctctgccgccgaggcctcgcgggcgacggagacgttggtggtcgacgagagggtcgcctcacacgtggacccgttcctcgtagaggcgctcgacaaccctcgccaccgcctcatggttctacggatggaactggatatacgaaactttatgcagaaccctcagctgcaggagttcgaattccagaactttccgacttcttacctacgctgtgctgctcatcgtgttgcacaacattatggcttagagactatagtggcagatagtttagtagaaggctcagttagcaggatcgttgcaagaaaaacacc

SEQ ID NO: 295332 - DNA, 265 bp, Zea mays
accttactttcctatttgcactcattcaaatctgatcacaaacacacactcatctaaaacacaatactttcagactttatcataccctaaattcaactaaaactctccctcacgaacctattaataatcgtagaagctacactctttttccactttcagctaaattccactccatcaaagatacacttcataactactaacataatgttacagctcctatagttactaaccccctcaactacccacttaaattgatttctaaaaa

SEQ ID NO: 295333 - DNA, 402 bp, Zea mays
  unsure (1)..(402): unsure at all n locations
actccactcatctcnnnnaaccacaagtcttgattcttcttcggcgatngngacccacacggannagtgttaataaagcctgtgtggcgctcatatccattgcaaaacccctcgctggaaagaagctctgcaagcggaccctcaagctcgtgcaacgagcctccgaggcgaattgcctcaagcgcgtagtcaaagaggtagtcaagagcattctccgcggtaacaaaggattgtgtgtgatcgctggaaacatttctcctattgatgtgattacacatgttccgatactatgtgaggaagctaatgttccttacgtatatgttccatcaaaaaaggatcttgctaccgcatgaaccactaataggccgacttgttgcgtcttggttctgaccaaaccaaaca

SEQ ID NO: 295334 - DNA, 210 bp, Zea mays
ctcatctactgcatacggcatcgtgaatacttctaggatgattggtctgataaacaactatagaactacttatatgattattatcttgtgttttattgccctttccatatttaactctttacacatgttccagttcttcttaactttttctagcaccttaaactaataaatatcaacttttgctctgtctaccttctttattcacaattt

SEQ ID NO: 295335 - DNA, 458 bp, Zea mays
  unsure (1)..(458): unsure at all n locations
gaattcccgggccgacgcacgcgtccggnggcgtcntgagatggctcgtaccaagcatactgctcgcaagtccacgggagggaaggggcccaggaagcagcttgccaccaaggctgcccgtaagtctgcccccaccactggtggagtgaagaagcctcaccgctaccgccctggaactgttgccctccgtgagatccgcaagtatcagaagagcactgagctgctgatcaggaagctgcccttccagaggctcgtcagggaaattgcacaggacttcaaaactgatttgcgtttccagagccatgcggtgcttgccctccaggaggctgctgaggcataccttgttggcctgtttgaggacaccaacctgtgcgccatccatgctaagcgtgtgaccatcatgccaaaggacattcagctggcaaggagggatccgccgggcgagagggcctaatcgc

SEQ ID NO: 295336 - DNA, 389 bp, Zea mays
atacccgtgccgaccgcactcgtccgataagctctcgacatgcctcttaccaagcttactactctcaactccacagtaataaaacctgccacttttcaacttgccaccgacccttcccttaactctcaccccaccacttctagactgaataaacctaacctctaccgtcctcaaactcatcccctccatgacatccgcaagtatcataacatcacttacctactcatcattaacctgccctttcacattctcgtaactcaaattgctcacgacttcaaaactgattctcgtttacaaaaccattctatacttcccctccatcaagcatctaatgcatactcttcttcaactgtttcaacacactaactctttctctattcattctaaac

SEQ ID NO: 295337 - DNA, 419 bp, Zea mays
cccacgcgtacgcccacgcgtgcgcccacgcttccgctggacagccgcatagcaatggttggtcctagtggcattggcaagtccactatactgaaactaatttctggggatctgcagccaacttctggaacagtatttcgctctcccaaggttcgcatggctgtattcaatcagcatcatgttgatggccttgatttgacggtgaatccccttttgtacatgatgaagtgctatccgggtgtgccggagcagaagttgaaggcacatctgggttcgattggtggttcgggaagccttggccttcaatctatgtacactttatcaagtggtcagaagagtagggttgcattcgcgaaaataaccttcaagaagccgcacatcattcttcttgacgagccttctaaccatcttgatctgga

SEQ ID NO: 295338 - DNA, 280 bp, Zea mays
aaaaaaaatacaaacataaatagaatctaattttattttaaaatatactaaaaaatgctcagtggatgtttaatttccctacttactttactcaagcattcgacatgaatagcacactattagggaacctaaattcaacactcttgccgaagcttaacaaccatgtgactggaaaaaccctaacattatcaaagttaatcgtctagaagcacatcaccctttttctaactctcgcaataacgattaaaccctcactgatcgcctttcccaacattatgct

SEQ ID NO: 295339 - DNA, 435 bp, Zea mays
cttccaattaagcaaattccttttcctgcatggtctgtgctccaccacttcttcacctgcggtcaccgctaatgcctaagactggttgcttttcttaaatcaagaaaaggttttgtcaagatagctatacagtctggatgtcctttagtcccagttttctgctttgggcagagctatgcatacaagtggtggaggcctggtggtaaattgtttatcaagatcgctagagcagttaaatttactcctattatcttctgggatagatttggcacaccattccccttcccaaaacccatgcatgtggtcgtgggtaaaccaattgaagtcaataagattccccatcctacaattgacgagattaatgaagtccatggacagttcatcattgccatgcgggacctctttgagagctgtatcatcagtgtctgaatcacc

SEQ ID NO: 295340 - DNA, 366 bp, Zea mays
  unsure (1)..(366): unsure at all n locations
gaaaaccgggcgggcggggcgtgcgggcgggcgtccgcccactcttccgccttctctttctgtggcggcctgcactgggaggaagaaatcttctcattcgccgtgcccanncttccccccngttcatcctcctgggccgggatgtctgtgctcgtcacgggcgccgctggcttcgtgggcacccactgctccctctccctccgcatgcgcggcgactgcgtggtctgcgtctacaacttcaacgcctactacgacccgtcgctgaagaaggcgcgcagggcgctgttcgccttccacggtgtgttcgtcgttgagggcgacatcaacgacggtcggctcctggccaatcttttcgatgtcttgccc

SEQ ID NO: 295341 - DNA, 184 bp, Zea mays
gccttccttccccacttcgttttaccttatgggggacataaaccttctgggacagtggtagattttttttccctctccttattttaaaaccttttattatttgggagtgtataataggagcttatgtcacctctgcggcttcccccgcggctgatttggtttaaagggttagaccaggaccctt

SEQ ID NO: 295342 - DNA, 366 bp, Zea mays
  unsure (1)..(366): unsure at all n locations
gaattcccgggtcggacccacgcttccgcccacccttcctcccacccttccgaagcctttataccatggcggaccagctcactgacggggaagtcgccgagttcaaggaggccttcancctcttcgataaggacggcgacggttgcatcacaaccaaggagcttggaactgtcatgcgttcactgggtcagaacccaacggaggctgaactccaggacatgatcaatgaggtggatgccgacggcaatggcacgatcgacttccccgagttcctcaacctcatggcccgcaagatgaaggacaccgactccgaggaggagctcaaggaggcgttcagggtgttcgacaaggaccagaacggcttca

SEQ ID NO: 295343 - DNA, 379 bp, Zea mays
  unsure (1)..(379): unsure at all n locations
accggtcaggtaatcccggggccgacccactcgtcccggggtggcttataatacacctactcctcgtgttcagggttcgtgagactctacagagggcgatttcttgggtgagcggatcgagattgccgcatcngatgttgagtaccgctgcttcgtcggcggcctcgcctgggccacggacgaccactccctccacaacgccttcagcacctacggcgaggtcctcgagtccaagatcatcctcgatcgggagacgcagaggtcccgcggcttcggcttcgtcaccttctccacggaggaggcgatgcggaacgccatcgagggcatgaacggcaaggagctggacggccgcaacatcaccgtcaacgaggcccagtcc

SEQ ID NO: 295344 - DNA, 425 bp, Zea mays
accacgcgtaccgcaacaggcccttgaagctcgacactcggactgagactgacagtctaggggcgaatggtgctgggtgtggaacttatcctctcattcccttgctttgaagggtaaggggctagggcgggccgaactgcacaacgagcgggcgccaggcggacgacgaagcgacgaggcagacactccggagagaatgtcgtcggcactaggaagtggcttgtactgagcctccccgtgtcgaggtcggattcgctcggaaaacttggccctgccttcagcatccgcgccggctgcagcgtgggtcttgacttctgactcataggacgtgcactcatcggagctggattccttggtttacaattgaagattggagcttgaactggatgtggaataagaataggttctggttacggcttttgaaa

SEQ ID NO: 295345 - DNA, 203 bp, Zea mays
accacgcgtacgcccacgcgtgcgcccacgcgtccgtccacgcgtccgcggacgcgtggtgtagaagaaggttctcgaccccaagaaatcacaaaacatcgcgataatgctgagggcgctcaatgcgaccaaggaagaagtgtgcatagcactcctagatgggcaggcagagagccttggatctgaattcttggagatgctgc

SEQ ID NO: 295346 - DNA, 272 bp, Zea mays
tttaaccttatcaatgaataccatgcgaagggcgaatctgaactgagcaatatctctgatggcatcctgaatctgcttgactcccacctagtgccttcttctactgctgcttaatcaaaagtcttctaccttaagattaatggtgactatcataggtatcttgctgaatttaatactgttcctgaaattaaggaatcttcttataactctattatttattactttgcttctcatgacattacccttacttatctattacctacccatcctat

SEQ ID NO: 295347 - DNA, 250 bp, Zea mays
attccggggtcgacgccacgcgtccgcggacgcgtgggggcccggaagattaggttccctaccacaggcaccgaggggctgctcatgggcattcttgatgaaggaactattgactcaccataactattgcgtgctaatgtaaccacgctactcaaattgcgagaggagtcatctaatgttcttgggaaattacaaatgctctactatattcccatgcatgcaccatttacagaatcatctcaacgagccc

SEQ ID NO: 295348 - DNA, 409 bp, Zea mays
cgggtcgacccacgcgtgcgcccacgcgtccgcccacgcgtcctttgacgcttgggcaagaccgcagctatctggataatgttctacgttgttggcctgctcataattaccacctctgccgtcataccgtccctacggcctgcctcgtgtgaaggcggttcatgtccacctgcaacagggtttcagtattttgtgctctttggttcattgtacctaatctccattggtacggggggcgtcaagtcagttttacttcctttggaagcaaatcattccattgatccaacccctaataaagttaaagcaagcaactggtcttcagatggttcttcatggctgtcaaccttggagtgttcatattccgcactgttcttggctggatacagcaaaatgtgccttggtctcttgg

SEQ ID NO: 295349 - DNA, 296 bp, Zea mays
aaaaaacatacgaatacagcacccaacaaaataggattatccttctcatagactacttctcggacttggtcaaacttttagaatggctaaggatagaaaacaaaccagggcgtaccaactcatcaagtcctgtatgcgagcctttttaaccaaggatgtaatcccttacatgtgcttctaaatccattgcttttggaagcactgcaaagtgtggaaaagctaccttctgggtctggctcatttcaactgtcccattttactttgcaacctgggaacacttttttacaaatacactt

SEQ ID NO: 295350 - DNA, 327 bp, Zea mays
  unsure (1)..(327): unsure at all n locations
gtatgattcatctttatttgggtntggtttctatggtttgttgttttttttttttttttacaacccaacgatttttttaaaaaagcatccaattacattttgcatgcccttaaatccatggccatccatgaatactgtaaagcacacccaccctttttatttatttatgacatgggcattccaaaacccgcaacccatatgcatacatatgtatgtaaatatatatttcacggattgactttgaaggcaacacaccgaggtccaaattcctttaagatcttgtattccctgaaccctgttttggtgaaaagctgaccccattttttt

SEQ ID NO: 295351 - DNA, 476 bp, Zea mays
actcggtctcggaattcccgggtcgaccgcacgcgtccgctgacgcttggggtcttcgcttgcctcttattaagggaaatcagttctagaacttgtggcgtgaatctgacactgtactggagatctggcaaaagaagctgcgcacgttctggctctagacttcattgaaagtgtgattaagaacaaccaaagcataaatgggcatcacaagaacataaccttcatgtgtgccgatgtgacatctaacgacttgaagattgaagataactctgttgatctgatattttcaaactggctattaatgtatctttcagatgacgaggtccaaaaaagcttgtggcgaaaatggttaaatggttaaaggtctgaagccatattttctttagagaatcatgtattcaccaatctggagattccaaaaggaatgtgaacccaacacactatcgagaaccaaggttttataccaaggtatttaa

SEQ ID NO: 295352 - DNA, 370 bp, Zea mays
cggacgcgtgggctacactactggatatctttaagcttcagcctcatcagaattttggccttccattttagcaaatactatcggtgtacccattttatttgcagtttgtcttcaaattttatttcatgtaatataaacactgtctataatattttcaatcctttttatgatcaacaatatatccatctcaaatatggaagctaaggcaaaggaatttaatgaggtcatacaagaacagtattatccttggtttgcacaatacatggtcatgaaaagggcaagcattgaaccaaatttccatgatttgtatctgaagttctttgataaagtaaactcaaaatccttgaacaaggaaatactgaaagccaca

SEQ ID NO: 295353 - DNA, 251 bp, Zea mays
cccacgcgtccgcccacgcgtccgcccacgcgtccggcttggcactcctgtatacagtatgcttgccaaggtaaaccctgccacgttccgaacatgattcagatgatgtgcggaacgtggcagggtttaccttgggaatgatggaatgatgggcagtgggaaggcttggcataggattgtgtcgcatgttcagactgagttgtatgagaatactgagtatgcttggcactcctgtatacagtatgcttgcc

SEQ ID NO: 295354 - DNA, 196 bp, Zea mays
accacgcgtacgaccacgcgtacgctgagactgtggaacttcagattggtctgaagaattgtgatccacagaaggacaagcgtttcagtggctctgttaagttgtcggatatacgttgttccaagatgaatgtgtgcatacttggtgatgcccaggatgttgaagaggacgtgaagaggggacttgactacatgga

SEQ ID NO: 295355 - DNA, 312 bp, Zea mays
tgctgatcacagtaaagcaaagatttttatttatcatattgcgaagacactgagagcggggtacaaaactgtcccaaactgtgagcattgactgtattactaaaggtcacttatagaaggttgctatatcactggagattacacagagcagaattacctgacttatatggaaggtgcaggcctatctggtaagctctgcgcccagtgcattgggcctgattatcgcaggcttgaactaaggagcctgaatagcctacaatcaggagacggtgcagtaccttcttagtcgcaactggacttagatattggaat

SEQ ID NO: 295356 - DNA, 224 bp, Zea mays
gcgacgacatgcctgctcgtcgtgctcaactgcctcagcagcttccaaatttactccatgccggtgtttgacagctttgaggcctactacaccggccgcaccaaccgcccgtgctcggcatgggtacggtcagggttcacggtcttttactggttcctctcgctgttcatcagtgtgggcctgccatttatctccagccttgccgggctggtgggctggcctca

SEQ ID NO: 295357 - DNA, 454 bp, Zea mays
  unsure (1)..(454): unsure at all n locations
cccacgcgtccgccccgatctcgtcgagaggaagcccaatcccgaaaccgtcgccgtattccaatggcgcccaaggccgagaagaagcccgccgccaagaagcctgcggaggaggagccggcggcggagaaggccacggcggggaagaagcccaaggccgagaagcggctccccgcgggcaagtccgcaggcaaggagggtggcgagaagaaggggaagaagaaggcaaagaagtcggtggagacgtacaagatctacatctttaaggtgctgaagcaggtgcacccggacattggcatctcgtccaaggccatgtccatcatgaactccttcatcaacgacatcttcgagaagctggcggcggaggcggccaagctggcgcggtacaacaagaagcctaccattacgtcccgcgagatccagacctncgtccgnctcgtccttcccggcgagc

SEQ ID NO: 295358 - DNA, 451 bp, Zea mays
  unsure (1)..(451): unsure at all n locations
gcctcacgcgggttctcatccagggcgttgacatgttcgggaaacgggtgggctttctcaagttcaaggctgatatcgtggacgaggaaaccaaaaccaaggttccaggaattgtctttgcaagagggcccgcggttgctgtgttgattcttttggagtcgaatggagaaacatatgctgtgcttaccgaacaggttagagttcctattggaaaattcctgttggagctgcctgctgggatgctagatgacgaaaaaggtgattttgttggcaccgcagtccgtgaggtggaagaagagactggtataaagctgaatatagaagacatggttgatcttacggcactgctggaccctgctactggaggtcgaatgctaccatcaccggtaactggccaaaacttctattcacctgngtggctgcgacgaagagattggcctgttcctgtaca

SEQ ID NO: 295359 - DNA, 431 bp, Zea mays
  unsure (1)..(431): unsure at all n locations
cctcaatcagatatagagtacaccattccttctttattcttctataagcccaacttgtggtggccaaatggcatgggaaagcaatccttatacaacattgagattagtgtggatgtaaaagggtttggagaatctgattcctggagccattattttggattccgcaagattgagagtacaattgatgattctacgggtgggaggatcttcaaggtaaatggtgaacctatttttatccgaggagggaactggatattgtcagatggccttcttagattaacaaagaagcgatatatgaccgacatcaagttccatgctgacatgaacttcaatatgcttagatgttggggtggtgggctagcagagaggcctgactnttatcatttttgcgatgtctatggtctgatggtatggcatgaattttggataac

SEQ ID NO: 295360 - DNA, 257 bp, Zea mays
tgatcggttgcttagcactgcccgtagtctactgtccactgcgctgcgctgctaacgagggcgggagatggagctgtcggcagctcgtggattcttgttcccgtggtgtttgttgttcgtctcggctgacgccgttgctgttgatgtggcgttgttgatgtgcaggtaatgagaggaagaaggcgaaatggtgaagcacatcaacgtcatccccaacgggcactttcagaagcactggcagaactatgtcaagacat

SEQ ID NO: 295361 - DNA, 389 bp, Zea mays
  unsure (1)..(389): unsure at all n locations
aattccctgctcgacgcactcaacctnctattgtcatcgaatatccctctttcatttatcttattaagactatatttaaggacacgacnatttattaaagatgaggctcactacttcttccaccatcttatttcatcaataatctacttccattcaatacaagtatcccaccacaatttgaatttgtaaaacacacttctacattccacttactctactcactttaatattttcaatttcaattattccaaatcatctattcttcattcccatccaaaatccactcttcaaacacctacttatatttcacctaaaatcttatttacaaactaatattatggcaacatatctaactttatttcatgtaatttaaccctctattttactac

SEQ ID NO: 295362 - DNA, 399 bp, Zea mays
  unsure (1)..(399): unsure at all n locations
tgatcagattaaatcaaatattctgatttatcatattgtgaagacacctatatctcgttacgttttctttcccaagctgtcagcctttccatcctctccaaatgtcacctatctaatgtttctatctatctcttaattacacaaatcataaatacctatcttctattaaacgttcactcctatccttcaatcttttctcccattccatatttcaacattatatcacactctcactcaatatccataaaatcctacaatcaatataacttcccttcccatcttacttttacatacctttatctatcatcatccccacttaattctatcttatctcctattttaataacaacccacccaattttcattttttatacaacaccctttattntcctttaacca

SEQ ID NO: 295363 - DNA, 367 bp, Zea mays
  unsure (1)..(367): unsure at all n locations
tcctgaattcccggttcgaccgacgcgtactgtcgcacatggctgttctgtactacatggttgttacgtatgcatattccatgaactcttgccagantgctttgccgggttgcgggccattgctgaaaggaactcggcatttttcggcgttctgctgaaccagatggggctagcttgcgtgcagctattcaagatagaccatgctgcacagttgtttgaacaggcatgggcggttcttgaacacgagtcttgcgcttctcattctgatactcttggtgtgtacagcaaccttgctgcaatctatgatgctattggaaaagttgaagatgcaatcgagatcctgcagcacgtgctgaaagttacggaa

SEQ ID NO: 295364 - DNA, 389 bp, Zea mays
gaattcccggctcgaccgacgcgaccgcccacgcgtccgggccacattgcactagacattgctgtgtttcctaatgggacgacagggcatggtcttgatattcgttcaggagcaccactctggagagagggtcttgactatcggcatggtacaggccatggaattggatcttatttgaatgtccatgaaggtcctcatctaattagcttcagaccttctgctcgaaatgtaccgctgcaagcatcaatgactgtgacagatgagcctggttattatgaagatggggcctttggtataagattggagaatgtacttatttgcaaagacgccaatgctaagtttaattttggagataaaggttatttggcatttgaacatataacatgggc

SEQ ID NO: 295365 - DNA, 326 bp, Zea mays
  unsure (1)..(326): unsure at all n locations
atctcgtcgagaggaagcccaatcccgaatccgtcgccgtattccaatggcgcccaagggcgagaagaggcccgccgccaagaagcctgcggaggaggagccggcggcggagaaggccacggcggggaagaagcccaaggccgagaagcggctccccgcgggcaagtccgcaggcaaggagggtggcgagaagaaggggaagaagaatgcatagaagtcggtggagacgtacaagatctacatctntaaggtgctgaagcangtgcacccggacattggcatctcgttcaaggccatgtncatcatgaactccttatcaacgacat

SEQ ID NO: 295366 - DNA, 362 bp, Zea mays
gaatacccggctcgacgcacgcgtccgcccacgcgtccgcccacgcgtccgccgactcgtccgcctcggcctcgccgccgcatctagatctgtagccgccggccgccgggtagcttcctctccgatcgcttccgcaggctactccgccgccgcgtccaggggctccgtctccagcaccaggcccttctccacggctcttaactaccaccttgattccccggagaacaagccggacatgaaatgggagttctcacaggcgaatatgaagaaggtcaatgagattctgtctcactatccaagcaactacaagcaatctggtattattccgctgcttgatcttgcacagcatcagcatggtggat

SEQ ID NO: 295367 - DNA, 316 bp, Zea mays
gaaatcccggcgggagccacgcgtccggtgacttcgccgcggctcctcactagctatgctgcgcgtggtggaccgggctaccgaagtaaccactaatgcaatgcgcaagcaggtgagagcctgaacatgagctacctgagcccgaacctggaggcctgaggctccgacttcacgggcggcgccaacttcaccatctccagctcctacacgctgccccgcaacgtccccttcgcgctccacgaccaggtccagcagttcctccacctgaagcagagctcgctcgacctcgacgcacacggtgggacggatcccgtct

SEQ ID NO: 295368 - DNA, 409 bp, Zea mays
ggggaggcatcgtcctctccgtgctttctcagaggtgggttggcttctcctgccccaccggttcgtgttcaggttctggttcgtgggcgagagggaagagatggcggcgtcggacgttgagtaccgttgcttcgttggcggcctcgcctgggccaccgacgaccactccctcaacaacgccttcagcacctacggcgaggtcctcgagtcgaagatcatcctggatcgggagacgcagaggtcccgcggcttcggcttcgtcaccttctccacggaggacgcgatgcgcagcgccatcgagggcatgaacggcaaggagctcgacggccgcaacatcaccgttaacgaggcccagtcccgcggcggccgtggaggcggcggtggcggatacggtggcgggcgccgtgat

SEQ ID NO: 295369 - DNA, 448 bp, Zea mays
cccacgcgtccgggctggtcggcatgatgcttgagggcggcttgaagcccagcctggtgactttcaattcaatggtgaatgggatgtgcaaggctgggaagatggaggacgcacgcaaggtgttcgatgaaatgatgagggagggtttggcgccggatggggtcagttacaacaccttagtgggtgggtattgcaaggcagggtgctcgcatgaggcattgtctgtgtttgcagagatgacacagaaagggatcatgccagacgtcgtgacatttacgtcattgatccatgtaatgtgcaaggctgggaacttggagcgggcagtgacattggtgaggcagatgagggagaggggccttcagatgaatgaggtcacttttacagccttgatagatgggttctgcaagaaaggattcttggatgatgcattggttgcaataagggggga

SEQ ID NO: 295370 - DNA, 184 bp, Zea mays
agaaaacttcccagtactctggtccgcgtcagagaggcggcggcgatgtctgggcgcggggagggcggtaagggtctgggcaagggcggcgcgaagcgccaccggaaggtgctccgtgacaacatccacggcatcaccaagccggcgatccggatgctggctatgaggggtggcgtgaagcgca

SEQ ID NO: 295371 - DNA, 278 bp, Zea mays
agaaaaattcccagttctttggtccgcgtcagagaggcggcggcgatgtctgggcgcggggagggcagcaagggtctgggcaagggcggctcgaagcgccacccgaaggagcttcgtcacaacatttatggcatcaccaagccggcgattcggatgctggctatgacgggtggcatgaagcgcatctccgcgctcatctaccaggagacccaccgcttgctcaagatcatcttcgagcacctcatgctccaccccttcatctacacctagcacgtgct

SEQ ID NO: 295372 - DNA, 186 bp, Zea mays
ctgtggctcctttcttctcaacggcagcggccgcggcatggcggactactgcggcggcctaaccgtacccgtcgtcaggacctgtctcatggcgggctccggcggactcatcttcggctacgacattggcatctcatgaggtgtgtctgagatggaggattttctgaacaagattttccccgggtt

SEQ ID NO: 295373 - DNA, 410 bp, Zea mays
ggcgacctccgccgccacactaaaccctactccaggtgcccaggtctgcgtcgggcccttgccggcgacgagcacccgctaggtaccattggccatgtggctcatggaaagtctactgttgtgaaggctatatccggagttcagactgttcggttcaagaatgagctggaacgtaacattactataaagctgggctatgctaatgcaaaaatctacaaatgtgaggatgacagatgtccacgaccaatgtgctacaaggcctatggaagcggaaaagaagatagccctctatgtgatgtgcctggatttgaaaacactagaatgaagctcctgagacatgtttcttttgttgattggcccggacacgacattctcatggctacaatgcttaatggagctgctatcatgga

SEQ ID NO: 295374 - DNA, 265 bp, Zea mays
tgcaacacccagcacctgatgaatgccgttttctcgctcccggagctcacagagcgcatgaggatgatcgacatgcacactaatatcgcgacagcgatgcttgggcacatcaaggagagatcgctggatggatactgtgactgcgggaacagacatgctcacgaagggcaccgtggacaggagcacgctactgggccttctacgagggaagggcacctaggccgacaagcttcgtatggctgtgacctacctactatgtttcgag

SEQ ID NO: 295375 - DNA, 303 bp, Zea mays
gccacacatgcgagcacagagtcacttcattccttgcatgatgtaatctgagcacctgtgcggctagcaagacacaagcattacacatgtaagattatcaggaagcaatccttggaacatggacaagcttctccttccggcgaagcgtgaacccagaggactcgttcatggacacccatgctgcagagcccggaacctctcaatcaaaatggtacatgatattgggcaccatgatctacatggtcgcgaatactaagatcattccggggcatatcctccggccggagccctacgggatgaacc

SEQ ID NO: 295376 - DNA, 422 bp, Zea mays
aatttccggctcgaccgacgcgtccgcccacgcgtccgcggacgcgtgggcggttcttgccctttccccgccccaagggtacacggtctccggcacctgccctagccgcaggagggagcgttcgccgccccgccccgccctccgtctcccgtcgcctcgccccccgcgctccgtctgccgcccctctccggagaaatgtctgagcatctctttgaggacaccttcgtcgtcactagactcgaccctgatggcaaaaagtttgatagagtttctcgtgttgaagctcgcagtgagcagttagatatgtatatgcagctagatgttgccacagatgtttatcctatgcatgcttgtgagataattaacatggttatagcgcccactctgaatttggatggcaccccagatactggctactatac

SEQ ID NO: 295377 - DNA, 397 bp, Zea mays
aattcccgggtcgaccgacgcgtccgcggacgcgtgggcggacgcgtgggcggactcgtgcggtcaggattgcattgtggtgcgtggctacccggggatgcctgcactcgagctaatgctaattcaataaggaaatacgccgtctttgtgaacacccgaaatctatcacgtctttggctgttgacgatgatgcccttgagctggtgctgtcagcgtccatcgatggcaagattttgatctggagctactggcactactaccgcgcacgtataggtagacgtagtacctggcatttggaaaaaacatttgacgcgggaagccagtgtctgaagcaagtcgcgtttattgctccaagtgtccatcgcaacagcagcactatcatcgctactgctcgaga

SEQ ID NO: 295378 - DNA, 371 bp, Zea mays
  unsure (1)..(371): unsure at all n locations
aatgcccggtcgaggagttacgcagcttgtcggaccactacacgttctgcttgatttcgctctcgccgctggactggcgantctatgcgcttgttgaggagctgatgccctttatcagcgagttcagcctaatcagataccgagttctcatcgagatcaagtggctactgaaactttctcaaattcctgagatcactgaagtgcctcagttcatcaaggaagcacattccttgttaaatgccattattgataatttttacattagatgaatcaaaagaagttaataaaatctaaaaagttaccaaccatgaagtgaaaaccctaaaataccttcttaaacaaatggtacatttcaaattcataaattgcaa

SEQ ID NO: 295379 - DNA, 343 bp, Zea mays
cccactcgtccgcccacaccgtccgagaacttgaacttaaattgaaggatcgtttcaagagatactgtcaaattgcccacaaacgagttgtagataaaccaattactgaagtcagagaatctggaatatgcatgcgtgaaaattctctctatgtacacacattgcgtaactttcgtgatagaagatatgaatacaaatgtcttaacaaaacatggaaaggaaaactcgcataatctaatgccaatggaaattctatgaaaattcatgaagcgcatgatatggttgttctatatgattctttgcaacttgctcacaattgcatattgaattctttttatggata

SEQ ID NO: 295380 - DNA, 450 bp, Zea mays
ttccggttcggaattcccggctggacgcacgcgtccggttattcagcaaggacgattggtttagcataaaactgtcaataaggatgaccggctgcagatggtgcggtttggtgctgaaatggttttcagttctaaggacagcacaataactgatgaggacattgaccgtattatagctaaaggagaggagacaacagctgaacttgatgcaaaaatgaaaaagttcacagaggacgccattaaatttaagatggatgataatgccgaactgtatgattttgatgatgagaaggatgaaaacaaggttgatttcaagaaacttgttagtgataactggatcgagccacctagaagagaaaggaagagaaactactctgagtctgattactttaagcaagcgctttgccaaggtgcaccatccaagcctaaggagccaatgatttcaagaaa

SEQ ID NO: 295381 - DNA, 241 bp, Zea mays
gtcgccatgaaccccatcaacatcgtcttttatgccacgcgtatcattggcaggaggcttgttgactactatgtgcggagtgatattaagctgtggcccttcaaggtcattcctgctcccgatctgaagccaatcatagatcttcagaacaatggtcaggagaaactgcttgcattctaccagatcccctttacggttctcatcaacatgcgttacatctcttaagcttacattgacagca

SEQ ID NO: 295382 - DNA, 450 bp, Zea mays
gaattaccgggccgaccgactcgtccgcccactcgtccggttattatcaacattggttatgctacattgatgaagacggacaagaacgcgaaatataatgtgtcttttaaggatgtacccgcttgtgacgaagcaatacaagaaataatggagttcgtgcatttacttatacaccctaagaactatgaagatttcagagctaatatacccaaaggtgctctacttgtatgccctactttgacagcgaagactttgctcaccaaagctacagcaggacagtctggtgtgccatttttgtctatttctgcttcagatttcatggaaatgttagcagttgttggaccgtccacagtaccgaacttgttccaagaagctaggcagtgtgctcctagtatagtattcattgaccaaatcgatgctattggtcatgccacatgacgctgacgtttt

SEQ ID NO: 295383 - DNA, 312 bp, Zea mays
gaatttccgggtcgacccacgcgtgcgctcctccgcccaaagaaagacgtcaactccatgatactaagatagtgagaactgaagagaaggatgggcttcgataagcagatcctgagatcctgcacctgccccaatccgattaatgtccagaatgtcaccgttcactgcaccggctactgtaaggatcgtgatctgtccaagaaatcttggagcaccaatgaccctgagctgcatccattcagttcatcatcgttcatggttcactgatcaaaggatgggactagggagctattaccatgcaagtgggtgaag

SEQ ID NO: 295384 - DNA, 364 bp, Zea mays
tcctgaattcccgggtcgacccactcgtccggcaaaccctgctgctagcgctgcgcccctctctcactccgactccccatccgtcttcagggggtcgactctttctttgcgcgctcagggtatcggaatggaagccgatgcttcattccaaaatgactctgtagagcgtggaggactccgacgcggcggtgatctccgtctttattccaaggatggctctacctgatcagccccatgtggccctgtgaggctcactcttcgatggtggagaaggttctgttccaatggatgttagactaccaaaacgttatagtactttagtcttctactttcggtaaggtgctcgttctttatggatctattc

SEQ ID NO: 295385 - DNA, 380 bp, Zea mays
aaaacccggcccgacgcactaatgcagcagaacgttcccctctttttacctcgaatagaggcccacacgcctatccccactggcgatgattttctaactgtgatgagtcaccaaatcacaacacccatcaatgcaataatagccctttcctccttgcttttcgaaactgaccttactcctgagcaccatctaatggtggaaacagtactgaaaagcaccaatctgttagcaacactcatcaatgatgtgctagatctttccaaactcgaagatggacaccttcaactgaacattaaagcattcaatcttcatgctgctttcaaacaagtgatgcgtatcattaaaccaattgcatctatcaagaggctatctgtatcagt

SEQ ID NO: 295386 - DNA, 336 bp, Zea mays
ggtctggaattcccgggtcgacccaacccttccgcggccccttggccccacgcgttcgccctgttcgtggcggtgtcggtgggcccgaacatgtccggcgggcacgtgaacccggccgtgaccttcggccccttcgtgggcggcaacatcaccctgttccgggggctcctgtactgggtggcgcagcttgctggggtccaccgtgggcgtgctttcctgctccgcttctcgacgggcgggcaagccacgggcaccttcgggctgacgggcgtgtccgtgtgggaggcgctggtgcctgagatcgtgatgacctttcgggctgtgtacacggtgtac

SEQ ID NO: 295387 - DNA, 308 bp, Zea mays
cgtcgcttccagccgccgccgcgtccgcctcgccaagcgcagcagccgccgcagcacatcgctctcttgatctcagccatggcggaggtggagcagcaacaggacacgccgaagctcttcaaccgctggaccttcgatgatgtccaggtgaacgacatctcgctgaacgactacctcgctgtgaacgcgacgaagcacgcgatgtacctgccgcacaccgcggggcgctactccaagaagcggttccgcaaggcgcagtgcccgatcgttgagcgcttacaaactccctcatgatgcacgggcgcaac

SEQ ID NO: 295388 - DNA, 406 bp, Zea mays
  unsure (1)..(406): unsure at all n locations
cgcgtacgctactgcattcacggcaagttatggccagtcatggatgtttgtcgtccacacgccctccaggaacacgagagcgatgtgcgtgctggagtgcnnttttaagaggaagagcgcaagcacatgcggcattgcttgcagaataccatccagtgggtgaaacgcaagtccacccacgcgttcgcaaccgtccgtggcagccagctaggagaacgggggaacctaattaacagcagtcgcgtcggcagcccgcggcgacatgaaaatgaaaaaaaaaacacatccatctgtagctacgcgtaaaaactgatctactggacgctttgactaatgctagtgtaatgtaggtgtagtagccgtgtaggaaaagaaatgcagtccatcttgcatctggtgtgtacgt

SEQ ID NO: 295389 - DNA, 410 bp, Zea mays
cccacgcgtccgcccactcgtccgtttacgcttgggctcagccaagctcgtgagagcagaggtactctcttggggaggcaccaaagcatcagtggcaaagctgcgctagaggccatcaggccataatagcccagagagcagacgaggcatggcgacgtccgtggcctgcgccttcttcttcttcgacgcggcggagccgctgggcgagaccgggcggcggcaagcgctggacgcctgcgcgctctgctccaagccgctggcccgcaacagcgacatcttcatgtacaggggcgacaccccgttctgcagcgaggactgccgctacgagcagatgcaccacgacgcggctgccacggcctacgcgcggcagcaggccatcagccggcggaagcagcaacggagcatgggcg

SEQ ID NO: 295390 - DNA, 378 bp, Zea mays
ggtttgaattccgggtcgacccacgcgtacgtcaagcccgcgttcacggctgttttcttcaacgtccactaccattactccaccgggggtgtgtgcccctaggcgtcggcgccgccctctctttaatagacccccctcaccctcaccttctctacctcccgtacatcctcatcctaaagaacctcgatggcacccctgaccatactgatctcatgcctggcctcatctttgacaaaaaggctagccatgctactgggggcccaactcaaatggagaatgctaaaatcgctgtcatacaactacaaatctgaccacccaatactgacattgaccagagagtcattttattcgactactcacacatggaccgcattctac

SEQ ID NO: 295391 - DNA, 370 bp, Zea mays
gaattcccgggtcgacccacgcgtgcgcccacgcgtccgcccacgcgtccgccccactctcgcttcgatgagggacgcggtggtggtgatggcgttgcccggagccggaggcgggggcggaggatcggcctcgtcggcggcggcggcagcggcgccgtgcgcggcctgcaagctgctgcggcgccggtgcgcggccggctgcgtcttcgcgccctacttcccgcccggggagccgcacaagttcgccaacgtgcacaaggtcttcggggccagcaatgtcagcaagctgctccaggagatcccggcgcagcaccgatgggacgcggtgagcagcctggtgtacgaggccaacgcgcgcgtcatggacccg

SEQ ID NO: 295392 - DNA, 349 bp, Zea mays
accggtctggaattcccggctcgacgcacgcgtccgggcgacggttgcatcacaaccaaggagcttggaactgtcatgcgttcactgggtcagaagccaacggttgctgaactccaggacatgatcaatgaggtggatgccgacggcaatggcacgatcgacttccccgagttcctcaacctcatggcccgcaagatgaaggacaccgactccgaggaggagctcaaggaggcgttcagggtgttcgacaaggaccagaacggcttcatctctgccgcggagctccgccacgtgatgaccaacctaggcgagaagctgaccgacgaggaggtcgacgagatgatccgcg

SEQ ID NO: 295393 - DNA, 210 bp, Zea mays
agccaaaccgagcggactcctccatggatcgctagtggggctccaagcccggcagctgcggcgccgtctacacacataatgagaccatcgacccgctgtagcgccttcgccgactggccctgtataccatcgaccttatcgaggacccctattttatgcgcatccacctcatcagctactagtgcaagctgtgcctgacactgtacaaca

SEQ ID NO: 295394 - DNA, 269 bp, Zea mays
tcgacccacgcgtgacgctttctgccacaccgaaaaccctatccttcttcaccttatcaacctgccaagtaagcactatcatcgagccctcctccgccaggaagcgcaatccccgcgtcactatctcccacctgaagtaccacatggcgcactttaccgcccctccctccgtccgccaccttctcatgtccatattgctgtcgactgaactccaacacaattacaacttgcgctccattccgatcccaaatgacgacaaggtgcatgtc

SEQ ID NO: 295395 - DNA, 348 bp, Zea mays
aattaccgggtcgacccacgcgtgcgcccacacgtccgcctccccctccggttcgtgttcgggttcgtgaggttctcctgagttcgggttcgtgtgaaatcggatcgagatggcggcatccgatgttgagtaccgctgcttcgtctgcggcctcacctgggccacggacgaccactccctacacaactccttcagcacctactgcgaggtcctctagtccaagatcatcctttatctggagacgcaaaagtcccgcagcttctgcttcttcaccttcttcactgacgatgcgattcataacgccatctaaggcattaacggcaatgagctttacagacgtaacatcac

SEQ ID NO: 295396 - DNA, 367 bp, Zea mays
gaattcccgggtcgacccacgcgtgcgctgcccgttcaacggcccggcgaggctcaagctgggcccgatcagcctcccgctgggcaggaccgggcggcacgtcggggactgggagcacttcacgttccgcgtcagcaacctcaccggtgagctcatgggcgtgtactactcgcagcacagcggcgggcactgggtggacgcctccgcattggagtacatcgacggcaaccggcctgtggtgtactcgtccaggaacgggcacgcgagctacgcgtaccctggcgtgtacctgcagggctcggcggcgctcgggggcgggatccgcaactacgccgctcgtagcaggctattcgtggactccagcgcc

SEQ ID NO: 295397 - DNA, 237 bp, Zea mays
gaattcccgggtcgaccgcactcgtccggacgaactacatgtctgctgggcagatatttgttcctattgtcgttaggggtggaaatggtgctgctgctgtagagggtggccaacactcacagtgctatgcaacttggtatgcacatgttcccggattgaaagtattatctccatattctgcagaatatgctcatggctttctgaaagctgcaatcatggatccatatcctgttgtgt

SEQ ID NO: 295398 - DNA, 340 bp, Zea mays
cacaggcgtatagccatcgccgtcgacctttccgactagtccgcctacgccgtgcgctgggccatgggcaactacctccggggcggggacgccgtcatcctgctccacgtgcgccccacctccgtgctctacggcgcctactggggcgccgtcgacatctccctccccaaccctagcgccaccgccgactacgaggacggcgactgcgactgcgactgcgaaaccgccgtcgccgcgcgcacgatggaggacgactacgacgccttcacggccaccaatgtcgacgacttcgtcagcccgctcaaggacgccggcatcccctacaagatccacattgtca

SEQ ID NO: 295399 - DNA, 268 bp, Zea mays
  unsure (1)..(268): unsure at all n locations
cggacgcgtgggcggacgcgtgatgaccgcgtaattcaatgctctgagaaaccataaattgcgtccttcgaatacatgaaagtgcttaccagctttctcaatttcgacattgtttccacagctgtatattcctatatggcttcaatgtgatgctacgttttcaaaatagatgatgctctagaccttctaaagtcacggaatgctctactgcatgactntagctctgatattatatctaatgctttgtatgaacaccatgtgcatgcat

SEQ ID NO: 295400 - DNA, 427 bp, Zea mays
ccggtccggaattgccggatcgactccacgcatacgtccatgcgttcggcgtttcctaatgcagcactcactttcagcgctaaccctacggttaaggccatatcgaatgaccgaaatgtgcgaaagatggcaaggatcgcatgctcatttggtttgatctatgacatgatgctcaacaacatcctgatctcttattggacgttcaaagataactggcttatactccaatgaagcgatctgcggcttatctttgacgaaaactgggatgaacatgaatctacaaagctgaatgtggaagatgtgcagttattaatggatgatctagagatgattcaagtcattggcaaaagaagcccgtgtgttgtccaactagtgaggcacaaatgggtgggcacattatttgccttaaaaggtatttaaatgaaca

SEQ ID NO: 295401 - DNA, 295 bp, Zea mays
  unsure (1)..(295): unsure at all n locations
ccggtccggaattcccgggtcganggacgcgttcgatgagatctgcaagtacctttttatgaggtcgtgctggatgccaagaatgactgcaaccgagctaatcacccggagggggatgtgcccaaccttcatgtgatcaagctcatgcagagctttaagttcaacgagtatgttacggagaccttatactggcagtactactactggtatctcaccaacgatggcattgatcacctactcaactacctgaaccttccgtctgagatcgtgcctgccacgctcaacaagtctgtca

SEQ ID NO: 295402 - DNA, 242 bp, Zea mays
atacttcaagaagtgagtgagaagttaggcgacaaaattcaagttgtgaaaattgatactgagaagtgcactagcattgcaagtcgttacagaattgaagcattgccaacttttatcatattcaaggatgggaaaccttgttatcgctttgagggagcattacctgttgaccagatgatcgaacagattgaaaatgctttggcagtcacaaagtagcacatatggtgatgagcagggcagaa

SEQ ID NO: 295403 - DNA, 329 bp, Zea mays
cactgagagagaagaatcatgtctctggtgtttctacctgcgtggtgtctccccttcaaggtgtgccctcttccctgtggttctccctgattctcacagcgaaaacagtaggggaagccctaaacaaaccagttcttgaggcatttggcaatgcaaaaactatcaggaacaattcaagtcgttttggaattttttgttgagattcagtttgatgcaaatgggaagatatcaggagctgctataagggcctatcttgttgaaagatcccgtgtctgtcaaatatctgatccagaaagaaactaccactgcttttgcatgctctgttctgc

SEQ ID NO: 295404 - DNA, 373 bp, Zea mays
cgcctacgtcgagacacgtgctctctaggtgtacgactttgggcacgtgctgtagggccttgcgacgaacctgattgtggagaccgccctaaaggtgatagagtgcgaacagatgttcctccaaatgtgcatgatgtcagtcttccggggctctgcgaagctcatcgacaaacatagggcgctgtttttgcagcactacttaccatggtcaacacaagctggtctcacgtgtactgatctgatgtctgtatattacgataagcactttcacgaagacctgcatgaagagagaaggaactgatgaatcctttcttgccctagtcccaaaaagagcactgtatatgacggcattgtctgcgtgaactatctatct

SEQ ID NO: 295405 - DNA, 331 bp, Zea mays
cccacgcgtccgcagttttccttctatgatgattacaagtcacctagagaattctcaattgcccttgtgtgatggttgaactgtctaacttgtctgcaatccatgaagttggacatgacggtcttcatacagtacttgagatgacagatgcattccctatgcaacgaagtactcttgacgttccccatcaatttaagcatcttgggctttatattggatgcagttggcttgaagtaaatttaatctttgttgcaggccttcgatgaggcgatctctgagctagacagcctgagagaggagtcctacaaggacagcactctgatcatgcaac

SEQ ID NO: 295406 - DNA, 451 bp, Zea mays
  unsure (1)..(451): unsure at all n locations
cccacgcgtccgcactaatcaaatgggaggtctaataacatctttgagtagcaggactatgcggccagtcttcacatcatacatgagttctcacggatcattggtgagctcccctaaagatgttattagtaaaaggaatacatatagaaggtcattttccatctagggtgaatgagcgttctatatgtttgcatagtgtgccatcacacttatcttctggtgctctaaattctgggaacttgttagttcacgatcagctcaggattcccttggctccttgagggcaatgtaatgttagttgaacaacacctttacgccgaaagtttcagcccacgcgtccgctttgaccgccgnctcccttcccctccgctactgctcctcctcaccccactcccccgcaggagcggcggcggcggcggcgaggtcgtaccccacatcggcgagcggcggc

SEQ ID NO: 295407 - DNA, 357 bp, Zea mays
  unsure (1)..(357): unsure at all n locations
acccactcatccgcgggcaccttgacggactccttggactttttgtaccttaacctcctaaacacgtanacgtacactttatatcagaagtggcacaccctcaattcaactattctgcacttcctgttctctattcaagctttggtttttaattcaaagccttatttcaataagcctttctactctatgcatgctaacacatcccaccttgataacaaatccctgacatataatcaagacacattcctgcactcctacacgactattctctatactcttccaaatccaccaaataatctccatgatctttttactagccatttcctctaatattatctcaacatactcatctctttc

SEQ ID NO: 295408 - DNA, 300 bp, Zea mays
gtgggttggcttctcctccccctccggttcgttttcaggttcgcgaggttctcctgacttcggtttcgggggtcagcggatcgagatctcggcgtctgatgctgagtaccgctacttcatcagcggcctctactgagccaccgactaccacttcctacacaacgccttcatcacctacagcgacgtcctttagtccaagatcatcctggatcgctatacgcataggtcccgcggcttctgcttcatcaccttctacacggacgacgcgatgcggaacgccataaagggcatgaactgcaa

SEQ ID NO: 295409 - DNA, 254 bp, Zea mays
cccacgcgtccgggcaaatgtttcttgcaagtcagcaatgtgattatcttgctgtgagcgctttactatcatatcaggaagataagttatcacattcctgcctatttgagaataaaggacattgtccttcattctactgaaactatctccagcattctctaacccctcactcattaacatgcatcaatattcgccattatcaattattacgtctttcttatgcttattgctcgctatcatccatatctgatgat

SEQ ID NO: 295410 - DNA, 467 bp, Zea mays
accggtttcggaattcccggctggacgcacgcgtccggcagcggagcaggtagaacgctgcacaatccccttcgccgccgccaagatggggaactggcctaataccaagaagacgtagtgcaagaacaaagagtgcaagaagcacacactccacaaggtgactcagtataagaagggcaaggatagcctgtctgcccagggaaagcgccgttatgaccgcaagcagtcaggatatggtggtcagaccaagcctgtcttccacaagaaggccaagaccaccaagaagattgttctgaagctgcagtgccagagctgcaagcactactcacagcacgccatcaagagatgcaagcattttgagattggtggagacaagaagggcaagggcacatctcttttctaagcttctcgtccacctgtctggttgttgagttgaagctgtgggtctactactactgttataaaaa

SEQ ID NO: 295411 - DNA, 417 bp, Zea mays
ccggttcggaattcccggccgacgcacgcgtccgcagcccacagctacaacgcttcacatttccattcctcgccgccaagatggggaaccgtcctaataccaagaagacgtactgcaagaacaaagagtgcaagaagcacacactccacaaggtgactcagtataagaagggcaaggatagcctgtctgcccagggaaagcgccgttatgaccgcaagcagtcaggatatggtggtcagaccaagcctgtcttccacaagaaggccaagaccaccaagaagattgttctgaagctgcagtgccagagctgcaagcactactcacagcacgccatcaagagatgcaagcattttgagattggtggagacaagaagggcaagggcacatctcttttctaatcttcttgttcacctgtct

SEQ ID NO: 295412 - DNA, 267 bp, Zea mays
  unsure (1)..(267): unsure at all n locations
cccactcgtccgctccttcccttctcggttcgtgttcaggttctggttganttggtagatttaagagatggcggcgtcagacgttgagtaccgttgcttctttggcggcctcgcctgtgccaccgactaccactccctcaacaactccttcagcacctacttctaggtcctcgagtcgaagatcatcctgtatcggtagactcatatgtccctcgtcttctgcttcttcaccttcttcacggatgactctattcgcatctccatcta

SEQ ID NO: 295413 - DNA, 291 bp, Zea mays
cccaaacacgttttaactgaggttatcaacctactatcaagaaaaccttcaaggagtactttaacgctttagcatcatcacacttcactacacaaggtgaggatacaatttaagtcaattcttttctgttcctgctacaatgaaggaagatataactgcttatattacgaataccaataatatcatactatatgttaatcgtgtattcatatcatatgactttgatggagaattgttcccaacatattcgagctttgtcaaaggtgttgttgactcaaatgaccttccatt

SEQ ID NO: 295414 - DNA, 408 bp, Zea mays
cggacgcgtgggcctggccatcagttgtagctgtaattccacttctattattgaacattgggtacaggaatctctatcttgcaacctgacgggagttaactcgacttgaaggagtgacaaaggcaccggttattgatcacttgtctgaaactgttcttggtgtcacaactataagatgtttcaaaaaggagaaagaatttttccatgagaatttagacaaaattaattcaagtttgcgcatgtacttccacaactatgccgcaaatgaatggcttggtttccgactggagctaattggaacacttctattgtcaataactgcatttctcatgatcagcctgcccaggaattttatcaagaaagaaatttgtggtatgtctctatcttatggtctctccctcaattctc

SEQ ID NO: 295415 - DNA, 419 bp, Zea mays
cggacgcgtgggttcaggagcactcttgaactagaaatcggaattgatgaggtttcccagtcgacgaattatacacccacgaccatgaataacaaccaacaacctgctgccgacccaaatatcaagcctgcacctgcaccttacaccagcgatgaacttgtgaaagtaactgaagaacaaattgctgcatcagctgctgcagcttggaacccgcaacaacctgcatcgtcgcaacagcaagaagtgtacactactccgagtgaggacgctcctacatcaggaggaagcgatggtcctgctgctccagctcttgctgcgagtgactcggatccaaagcaagtgaatctggacaaggcggaaacacagagatgactccgcttaacagcttgacactggatgggatgagcacactgaacacg

SEQ ID NO: 295416 - DNA, 219 bp, Zea mays
tttacatccaacatgctgtttcggtctagtgcacctttctaaacggtggtgcaccatacaatgtccggtgatgcaccagacagtgttcggtggaccatgctgcctcgtccgaacaatccgctctcgataattcgtctacgacttactgttaaaattcaccggactgtcctgtgtgcaccgtactgtcctttgagccaactgtccatctggccaacattt

SEQ ID NO: 295417 - DNA, 397 bp, Zea mays
  unsure (1)..(397): unsure at all n locations
cttccgaccccgagcggtcggtacctcgcaagcaaaactacaagctcgcttttaaattgtgttgctgcaattctctcctctgtttcccactcgtagatcccgccgcctcccgcgtctagccgccgacgagcaccgcagcctgacactgccgcgggcgaaccatcgcgtgcggcctcgcccgggatggcgaccatggagagcctgatcgggctggtgaaccgtatccagcgcgcgtgcaccgtcctcggcgaccacggcggcggcggcggcggcgagggctccctctgggaggcactcccctccgtcgctgtcgttggcgggcagagttccgggaagtcgtcggtgctcgagagcataatggggagggacttncttgcccgtggatctggcattgtca

SEQ ID NO: 295418 - DNA, 198 bp, Zea mays
agtcacgcgtccgcggacgcgtggggttggcttctactttagctatggttcggggtcaggtgcgtgagggtcttctttgttcggtttcgtgggtgatcggatcgagatggcgtcgtctgatagtgagtaccgctgctttttcggcggcctcgactgtgccacggacgaccactccctccacaacgccttcagcaccta

SEQ ID NO: 295419 - DNA, 252 bp, Zea mays
cgtcgacggcattcgtccgccaccaggtaaaaatatgtcctcgatccgattcgacgagtgcacaccggcttttttcactgcgatcgaatcgatggccgccgagggcgagaagaagatgataaccctcaaaagctccgatggcgaggagttcgatgtggaagatgtggtggcgatggagtcgcagaccatccgtcacatgatctaggatgactgcgccgacaacgtgataccttttcctaacgttaactccaa

SEQ ID NO: 295420 - DNA, 328 bp, Zea mays
aattcccgggtcgacctacgcgtccgcccacgcgtccgcggacgcgtgggcgggcggccggagaccagcgacggtgacggtggtgctggacgggaaggagggcgtcgcggtcaggatgagcgtgcacagtgacgtgctcgcccagagcagcgccttcttcgcgcggcgcctcgccgccgccgccgccgacggccagccctgcgtggagatccacgactgcgaggacgcggagatctacgtggagacggtcggcctcatgtactgcgacgacggggccaacaagcaccggctgctcaagcagagcgttccgcgcgtgcttcgcgtcatg

SEQ ID NO: 295421 - DNA, 233 bp, Zea mays
gggtcgacccacgcgtgcgtccactcgtccgaccacgcgtccgggagaatccgctgtagtagctaatacaatgttccggggaacgggcatgaccttcaagatgcatatctttgagaagacgctgacagggaagaccatctccctctaggtcgagagcatcgacaccatcgacaatgtcaaggccaagatccaggacaaggaaaggatcccgccggaccatcagcggctgatct

SEQ ID NO: 295422 - DNA, 437 bp, Zea mays
cggacgcgtgggcggacgcgtgggcggactcgtgggattacatgagcttgatccggtgttgaaaaagttttctttctcagagagtgttgcaagcttgttctcttctttaggctacaagaggcctgcagtcattcaatctatgtacatatttaagcaaccaggtattggtggtgaggtcgtgccgcaccaggataatacattcctttacacggaacctcgtacatgcacagggctgtggcttgcacttgaagatgcaacaatcaacaatggttgcctgtgggcaattccaggatcacataaaaagggtttggtgagacgtatggtcagagatgaaaatggtacacattttgatcggtccttcccagtctatgatcagaaagaatttgtaccgctggaagtaaaaatctgtgctttggtggttatacatggagatctta

SEQ ID NO: 295423 - DNA, 360 bp, Zea mays
tcgacccacgcgtgcgaacgcattcctgccatctcccaagacctcctcagactttagaatcgcatctgcgtccatgggcgccgggggcactggaactggagggaaggcgaataagggagcggccggtcgcaaggcctgcgggccgatgaagaagtcggtgacgaggtccgtgaaggccgggctccagttccccgtcggccgcatcgggcgctacctcaagaagggccgctacgcgcagcgctttcttcagcggtgcccctcgctacctcgcggcctgcctggagtacctcgccactgatgtcctggagctcgccggcaacgctgccaaggacaacaagaagacgcgcatcgtcccgcgcc

SEQ ID NO: 295424 - DNA, 388 bp, Zea mays
ggtcgaccacgcgtgcggtacaagttgatgctgctccattcaagcagtggtaccttactcactatggagtggacatgggtagggggaagaaggtgcctgttgctaagaaggatgcgactgagggacaagagggtgaggctatagctgaggaaacaaagaagagtaaccatgtgcagaggaagattgagaagcgccagcaggaccgtgcactcgacactcatattgaagagcaatttggcagtgggagattgatggcctgcatttctgcccgtcctgagcagtgtggccgagctggtgggtaaggactactggaccatttcacctagcttcagtagcttacagtttccacctgaaatttcctagcatttgctgggcattattttttatt

SEQ ID NO: 295425 - DNA, 477 bp, Zea mays
accggcccggaattcccgggtcgaccgcacgcgtccgcccacgcgtccgcacaatcacaaacgcatgctcagggatgcgagtgcgggcatggccagagtgggagcggcggcgaagggcgagctgtaggccgaggaggaaaccctcgcgcgcgcaagcggatgtcgacggcgacggcgacgcggtacaccgcggcgcctaaggcgggcgccctccgccaaagggacacacaactgccaccggcagcggcgggtttttctgctgctacctgctccggtccctctgcccgcgcagcaagagccgcacctacatcggcttcacggtgaacccgcgccgccgtatccggcaacacaacggcgagatcgtcagcagcgcgtggcggacccggcgcggccggccctgggagatggtgctctgcatctacggcttccccttcaacgtcgtcggccttcagttcgagtgggcgtggcagcacccga

SEQ ID NO: 295426 - DNA, 354 bp, Zea mays
ctctctcgttgtttcggatcaaatacactttacacactcctactgtaccttcggtgcggggtcaatccgattgatcacacgaagcacactgggctcaagtgcaccggatgcaatgcgccacagaagcagatggcgaccaatgcagcacgcacgtctggcccgtcatcctgcggcgtgaagaagccttaatgtttacgaccgggcacacgatgcgctccgagagatccgcaagtaccagaagagcacgcagatgctcatgcgtaagctcggcttgaagaagactggccgtgtgatcgcgcatgacttcaagaccgacctcagattccaatcctgatgcgtcatcgatctgcacga

SEQ ID NO: 295427 - DNA, 369 bp, Zea mays
cgagcctcaagcgggcaggccacccagcactcaggctagatagctcatcacagccacagcagctagaccctagtagctcactcgcgctcgtgccatgatgaatacccgagcctgtggcagcggcagtggcggcaggaacgaccagaccatgatgggcttctccgagcatccgaagccggcggcgtcggggcaggcgcagccgtccccgccgtcgtcgccgagcgagcgtccgccagcaggccgcgggcgccggcgcgcgcaggagcccgggcggttcctcggcgtgcggcgccggccgtggggccggtacgcggcggagatacgcgaccccacgaccaaggagcggcattggctgggcacgttcgacac

SEQ ID NO: 295428 - DNA, 407 bp, Zea mays
cggacgcgtgggcgtcctcgggccagtgaccctctcctgcctgaacgaggggaagaggtgcctgaggcatcatagatggatataccaggtcggcctgaaaggcgagtcgctcggcctacacaccgtgaccggaagctccgccgtggaatgggccggccccggcggcggcacgcagccgctgacttggcacaaggccctgttcaacgcgccggctgggagcgatccggtggccctggacatgggcagcatgggcaagggccaggtgtgggtgaacgggcgccacgcctggcgctactggtcgtacagggctcactcccgcggctgctgtctgtgcatctacgcctggacgtaccgcgaggaccagtgcacgttcaactgcggcgacctctcccagagatggttccacg

SEQ ID NO: 295429 - DNA, 422 bp, Zea mays
gattaagacccgttctagtgctgcagggggatctgttgcaacttaaggggggcaagggtctatgcaagggtggagccaatcgccaccggaaggtgctccgcgacaacatccatggcatcaccaagcctgcgatccttatgctggctctgatgggcggcgtgaagcgcatctcggtgctcatctacgaggagacccgctatgtgctcaagatcttcctcgagaacgtcatactcgacaccttcacctacaccgagcacgctcgccgcaagaccgacaccgccatggatgtcgactacacgctcaagctccagtgccgtaccctctacggcttttgatgctaggcgcctcttcttaactggggaatgcttatggtgatacgtatctgtcgctgtgggtcgtaatgtatcttcattccttgatat

SEQ ID NO: 295430 - DNA, 293 bp, Zea mays
ctcctcactctagcctccgcctcttcccctgcgccccgagccaatatgaatggggaatgggtcaagaagatggcaggtgctgtgcgcactgtggggaagggtagcatgcgcatgatgaatatggctgttcacatgactacgaccacagatgattaaaggctttagagcaccctgtattgaatttgagtgatcaccattcctgatattgtagaggtcaacatttttaaggatgattttattattcagtttgtgaatcctaaagtgtccagttttaatttgtgctaatacatgtg

SEQ ID NO: 295431 - DNA, 283 bp, Zea mays
aattcctgggtcgacccacgcgttcgggcgtacttccgcctcccggctctcctctgcctcgccgtcgtcgccgtcgtcgtcacggcggatgccggcgccttcgtcagagaaggtggcctccttctgccccgtgacgccacgttcccggcggcgcaagcggagcggctcattctcgcgctcaacctcctgcctaaggagaaggaggctgcgccggccgcaggcggctgctacgggcccagcgtggtgcccggggagctcctatagcgtcgcgtccggctgcccg

SEQ ID NO: 295432 - DNA, 391 bp, Zea mays
caatgtcaacagcttatgacatggaaagaaaatattagaaacggcagcgtcatgatggctgcacgtaaatccctggggcgatgttgaagctgatgaagcacatcaaagaaaagtacgggaatccgcccgtgatcattactgaaaacggcatggatgatgcgaacaaccggttttcgaaattagaggatgatctgcaggatgataaacggatacagtaccacaaggactacatgtctaacctcctagacgcaattaggaatgaaggctgcaacgtccatggctacttcgtctggtcgctgctctacaactgggagtggaactcccggtacacggtgcggtttgggctctactacatcgactacaacaacaatttgacactgttacccaaagc

SEQ ID NO: 295433 - DNA, 347 bp, Zea mays
  unsure (1)..(347): unsure at all n locations
cccacgcgtccttccactcatcctttcactcttccgcggacgcttggacacacgggccgggtgcattttagaggggggccggcaccacacctccaanaatccacctccacgactgagttgaccgctcggcggcgccatggcagttcaccggctccaaccttcccccttcggactacagtgctccaccgaccggacgccagtgctccttcatgagccacagctgaccggtgcacgcaccgatggatggtgcatgcatgataggtggatttggttgacctagattcgatgttctaaaagcgacttggaggtggctgacatcttcaacactgcaaccattcagttacaac

SEQ ID NO: 295434 - DNA, 335 bp, Zea mays
cccacgcgtccgcccacgcgtccgtccacgcgtccgctcttttcatttcccatctctctcgtcgccgtcccgtgctccctccgctagttctcccatttccttccccacctcggtcgtcgcctcccccagagagcaggagccgcctcgtccctgccggtcccgaccccgacccccatcccgtccgcgtccaacgccatgaatcccgagtacgactacctcttcaagctgctcctcatcggggactccggtgttgggaagtcttgcctgctgctcaggtttgcggatgattcatatctggagagctatatcagtactattggagttgattttaaaat

SEQ ID NO: 295435 - DNA, 428 bp, Zea mays
  unsure (1)..(428): unsure at all n locations
ccggnntggaattcccggggagcccaagaagtgctgtatgcaaaacagcactgatgacttgtgctgacatctttaaggtctatggtgacgtactggttgagtctattgatgcactggtgagtatcgctattcatttaaaatttcttgtattagctaaaaggtctttgaaaacatctttctgtcaactgctgcattcacagctagtgcagctgtttctaaaggcttcacaagataagcgttttgtctgtgaagctgctgaggcagctcttacatcgatgacaagttggatctccccattactactgttaccaagaatgcagccctacctcaagaacaggaatccgcgggttcgagcaaaagcatcagtgtgtttgagcaagagtgtaccttgcttagatgtgcanggaatcagagaatatggaatggat

SEQ ID NO: 295436 - DNA, 335 bp, Zea mays
  unsure (1)..(335): unsure at all n locations
accccgcgtccgcccacgcgtgcggcaaccgattgcctatcttcctcttaaccaaagaccgatggcccccagggccgggtggatttccgcggcgaggaagcctntnnaagaagaccccgcggccgagaagacgaccgccgggaagaagcccaaggcggagaagcgggtccccgctggcaagtccgccggcaaggagggcggctagggcaagcgttgcaagaagaagggcaagaagagcgtggagacgtacaagatctacatcttcaaagtgctgaagcaggtgcacccggacatctgcatctcctccaaagccatgttcatcatgaactccttta

SEQ ID NO: 295437 - DNA, 302 bp, Zea mays
gccgccaactacccccattctcggaaggatccttccagaagcacaagaggctaaataccgtcaccttgccattcttcctcgacctcaacgtcgactgatatcacatagacaatggtgaaagctgtcgctctgcttattagcagcaatcgcttcaagatcaccatctttttcacccaacagggagatggccctactctctgtcaccggaaacgtctctggcctaaatcctggcctccataggctccatgtacatgcacttggtgacaccaccaatggaagcatgtcaactggaccacactaca

SEQ ID NO: 295438 - DNA, 317 bp, Zea mays
ttaatcgtcatttcgtgaagtttgattcatcgattatcaaggttccttatcgagacttttaaatccctgcacgatctcaacttgtaacactttctactgttgaacggattattatgcgatctgtttatgatctgcattctcttcaacatgaacttaataaagtctatcctcataatgcctaatctatctatcaatttttactgaactttacatctcttggatcaagatattcttcattcacttttattcttgattatccttcatgaaacatctttatctaaaatccgcattctccgcttttatatcctatactatct

SEQ ID NO: 295439 - DNA, 210 bp, Zea mays
ccgtcctcttggaaagctcacgatcgatgtctagcgcgccaatagagcggtcatcatcgggcaccttatccgtgtagatatcgattccctatttgactggaccgatttctcgcatcctcttactcgtgccagctttgatgagcctaacaaccacctatttctcaagaccatgtaccctttcaagaaggtcatgaacgatgctgtccttga

SEQ ID NO: 295440 - DNA, 371 bp, Zea mays
ctcctcaagccatggtattgggcgagggtggcgccacctcgcatgcttgagttcgccgagcgcgccgctagggtgctcgagtgaagaggtgagggcaccgagctcgagctcgccatgaatctccacaacgctgctggcatccactgcggactcagccaccaagccctgacattgtagccagtttcctgcaattagaacgaatgccagttggtaaccatttaacatttcttttgctgtgtcaacttattggagttggagagaggctatcactatactaacctttatatcatcaggattgacataaatgtgatttacacgtagatacaagtttgtggcagagattgctctgacacaccaatcagtcttcgatg

SEQ ID NO: 295441 - DNA, 321 bp, Zea mays
agccctgaacttctgctgaatccggtactgatatgccgcaacgaagcagaaaaatgcttgatagagacttcaatcaactccatacgtataaacatgaaggttaagcaggcagatgaattggagaacattcttgccaagaagttccttaagtttttgtcaatgagggcagaggcattccaagtgttgaggagaaaaccggttcaagtttccaacttaacattgattaccttgagcagtgttttatgtctccaataggtcctagtaaacatgaactacctgtaaggcacagggatacatcgttgtggacaactggatgatgga

SEQ ID NO: 295442 - DNA, 405 bp, Zea mays
tccgcaacaaagatacattataaaagtgcgaagatatggcaagctgtcatgggcgacctgcttgccaaagggatggacaaagctgaaaatgctccaatttcaagctgttctgctggtggtttaacctccaaactacactgtgacaaatttcatgaccttctgccgccggctgcgaaggttaagtgcctttctgatgctgggttcttcattaatgaaaaaaacgttgcaggagttgggtacattgctgcctttttcaacgacgtcgttacaacacatgtacacatttttacttcacactttgtggtactaataatagatgaatatcatgtggggggtaattgcaacacatccagtacaagacaacgagaggattcctacgcctcagttcagctgattaaatgaaac

SEQ ID NO: 295443 - DNA, 342 bp, Zea mays
  unsure (1)..(342): unsure at all n locations
gaattaccggctcgacccactcgtactataagcttcaagatcatctttaccaaagtttatatcatctatttntcgggacaactcagaatttttccgacattcgtacacgcatcctttgctgacaactgctgttcttgatgaatatatttctgacgctattcttttctaggagaccctttatcaatcaactacagactgcaagaactttgttgactgcttaaaggatcataatatcattcctggcatcaaggttgacaaggatttgcttccatttcctgaatccaacaatgaatcatgttgccaaggtcttgatagaatgactttaaagtgttctaatttcta

SEQ ID NO: 295444 - DNA, 283 bp, Zea mays
attcccggttcgacccactcattcgtccgcgctctatctagagcatccaagctttcttacgcatgcttccgaagtcataactacggtatcttatcgcgtctattaaattcactgaccatcttatcacaccacagtgactactaaaacactgactatactcaactcaatcgattatcagcacattcctctatatccacctaacatagtagctcctactaacgcaccgatcatcgatccatacatactcaaaacctgaattcattaatttaactcactctgtatt

SEQ ID NO: 295445 - DNA, 267 bp, Zea mays
gagagaccaggctgcagcacgatcttgcattgacattgaggacaaaaatttgccgcgcctttatgggactcatgcatcatgatatcatcaatgatataccgactcaccttcaaagaatgcaatacgttgcatttgcctcgtttcttgagccagtttgctacctactctggaatgtcataacacttactacagcttggatcaaggtggaaagtgttaatatctggctatcggcaataatttacttcatatctgacgacactggtgcat

SEQ ID NO: 295446 - DNA, 465 bp, Zea mays
gggtcgacgcacgcgtccgcgcagagataggcgtcttcgtactcgcctacctccgcggccaaacctttcccccttctcccaattcccgccgccgctccatcccgtaacgcgacaccatgagggagtgcatttcgatccacatcggccaggccggtatccaggtcggaaacgcgtgctgggagctgtactgccttgagcatggcattcaggctgacggtcagatgcccggtgacaagaccattgggggaggtgatgatgctttcaacaccttcttcagtgagactggtgctgggaagcacgtgccccgtgctgtttttgttgaccttgaacccactgtcatcgatgaggtgagaactggcacctaccgccagctcttccaccctgagcagctcatcagtgggaaggaggatgcagccaacaactttgcccgtggtcactacaccattgggcaagagattgttgacc

SEQ ID NO: 295447 - DNA, 280 bp, Zea mays
aatgagcagagcgctagttctgatcttaacgggtgcttagaaatgatacgcctgtttttgttggcccttttgttctcaggcaggaagacacagttgtcttttgacaggacaggggttagcaatgtcgttgtcaaaaatttgtctgagtctaccacaaaggaagatttactcaaaatctttggtgaatatcgggatattacaagtgctgttgtgatgaatggtatggatggtaaatcaacgtgctttgggttcatcaattttgagaacccagatgcagctt

SEQ ID NO: 295448 - DNA, 359 bp, Zea mays
ggtggaagagctctagaggactggatccccgggaagcaggaattcggcacgaggggaaagttgaggatgttgatcaggatcaagacaatgaagaaaagaattagaagaagattaaggaggtgtcgcacgagtggtctttggtgaacaaacagaatcccatctggatgaagaagcctgaggagattaccagagaagaatatgctgctttttacagaagccttacacatgactgggaagagcatttggccgtcaagcacttctcagttgacgggcaacttgagttcatggctgtcctcgttgtctccaagagggctccttttgatctctttgatacaacgatacaagcccaaacaacaatt

SEQ ID NO: 295449 - DNA, 272 bp, Zea mays
gggagctttactgcctctagcatggcattcaagctgatggtcatatacccggtcacaacactattgggggtggtgatgatgctttcaacacgttcttcaggggagactggtgctgggaagcacgtccctcatgcggtttttgttgaccttgagccaactgtcatccatgatgttcggactggtacctaacgtcatctcttccaccctgtacatcttatcaatggcaaggacgatgcagccaacaacctctcccgttggcactacaccattgg

SEQ ID NO: 295450 - DNA, 313 bp, Zea mays
ctctagacgactggatcccccgggcagcaggatttctgtacgaggtcactgtcggtgagtgcgcagtggggatcacttgtccgctcagttcagacacgagacggaactttcccagctgattatgttccaacagtatatgggatctttagtgccaatgtagcgatggatggcattagattgaatcatggactaaggtacactgccggacaagcttagcacactacgctacagtcactgagttacaaaggatccgatatgcttctgttgggcttttcgcataactacaaggccaattaacgaaacatctacaaaa

SEQ ID NO: 295451 - DNA, 397 bp, Zea mays
gaattcacgggtcgaggcacgcgtaggcccacacgtcggcccacgcgtctgcacttcttcagcggcagcgtggcaacgagaggaacgaagtattcagaccgaagacaatggacccggtgcggaacagcgtgtgcgtgaccggtgctggcggcttcgtcgcgtcggatctggtgaagctcctcctctcccggagcgaagacgcggtctgcgggaccgtgcacgagtctggtgctaccacgaatgcccagctcaaggtgctggcaggagctgaggaaacgttgcaacttctcaatgctgatctgatggactacaacagcgattgcatcagcacttgccggctgtcatggtgtcttccatgtagccaatcctgtcgtttctcatcgaccctccaaccctg

SEQ ID NO: 295452 - DNA, 335 bp, Zea mays
cgagcccgcgtccggagagagcaagggacggggcgactattagctagtactagtagcgaaaaattaaggggaaacgacaacgacgcacggcggcatggcggccggccaccacgggcagccgccggacggggacgacgggcggccgtcggtcgtcggcggggagcatgaccggctgctgcccatcgccaacgtcggccgcatcatgaagcaaatcctgccgcccaacgccaagatctccaaggacgccaaggagacgatgcacgagtgcgtgtccgagttcatccgcttcgtcaccggcgaggcctccgacaagtgccacaaggagaagcgcaaga

SEQ ID NO: 295453 - DNA, 259 bp, Zea mays
gttggcttctcttccccctccggttcgggttcgggttcgtgacgttctccggggttcggtttcgtgggtgatcggattgagatcgcggcgtcggatctggggtatcgctgcttcgtctgcggtctcgcctggggcacgggctaccactccctccataacgccttcagcacgtactgccacgtcctcgagtccatgatcatcctccgatctggacacgcatacgtcccgccgggttcggcttcgtcaccttctccactgt

SEQ ID NO: 295454 - DNA, 397 bp, Zea mays
cgacacacgcgaccgaagcaatttgatagcttaagtcaagtggctgctattgttcacaatgacttttaccatttgtcccaagaaattctgggccttgcatttcagtaccgtgcagattttcctagtgatctacagaaacaggttgtttttgtggatttagccccaatcttctcccagatggcggatgctatattgagaagacaaatacaactcactgttgatactataagtgaggctatagatggtgctgaaggttttcagaacacacaccaacctcagcattatgaatccgcaaaatttagtattgagcaggtcgtgtttattttggaaaagatacgcatcatgtgggagtcgatactgccaagatcaatttacaggaaaagtatgtgcaatgtcc

SEQ ID NO: 295455 - DNA, 467 bp, Zea mays
  unsure (1)..(467): unsure at all n locations
ggatccccggacagcaggaattcggcacgaggtgacttcctccagaactactatgtcaaccctctacttaaccatgcctatactccagaccagtacggctcattccttattgataccttcacaaacttcgtcaagaacctctatgggttgggagctaggaaaattggggttacctcacttccaccgttaggttgcgttccattagcaagaacattgttcggttaccacgagaaaggatgcatctccaggttcaataccgatgctcaacaattcaataaaaagctcaacgccgcagcagccaatctccagaagncagcatccctgggtcgttaaggattggttggtttttttttccgacatattcaaggcactttacgacattgttaaatctccctcgaactatggttttggttaagcaacaaaacggtgttgtggaactgtaacagtatagaaatcgcatttttgtg

SEQ ID NO: 295456 - DNA, 379 bp, Zea mays
gtcttggagggggtgacccttggagaggggccagatcagcatgtgtggaagtttactcaggccgattgctacactagctaatcagcctactctgctttctttgaggggtctgtcaagttcagaccttggagattaatttggaagagttgggctcctctccgctgcaagttctttctttggcttgccaggaacaaccgatgttggactatggatcggcttgccaaacgaggcctttctcacccagattcatgtcccttgtgtgaccaagccggtgagacccttcagcacattctaattggctatatcttctctagacaaatctgggccttgattttgcaatccttgcatctagaggccattacgcccaatgggggcagag

SEQ ID NO: 295457 - DNA, 266 bp, Zea mays
gggtttcaagatcttccggtttagcattctagcaaaggcagcatccatgtgggtccgcgtactttaccctaaggccgaggatctcaacaagttgtcagctcttcacatgaacatcaacaccgccaagggccttcatgacttgctcaagaccaacctcttccccaaggtcaccatcaagatgcttgtggttggagctggttacctgaatcttactaaagatgtgaacaccctcttgaatgaaatgcatattcataacccaacttcaa

SEQ ID NO: 295458 - DNA, 401 bp, Zea mays
cccacgcgtccggtttgtttcggcaactacaatgaacttcttcagaactatagattcacgtgcattgggactcctaaagattttggaagaatcaaagatggaacatcaaaagcaactcttccagcttcagaagaagtttgaggccgttgttgctgacgaagagaagtacttgatggagaaggttgcagggttgtttgcagaatcaaacgctcgaaagaaaaatatggttcaagatgacatatgcagcctcaataggactgtttctgagcgttcgaacaatttacaaaccgaaactaccaagctgcatgattttacatcttctatgaaagagcaatgggaaggctacatgaagaaaactgaagaggcattccagcaaaatgtatcatctattgaacagaaaa

SEQ ID NO: 295459 - DNA, 293 bp, Zea mays
  unsure (1)..(293): unsure at all n locations
gcgtccggngagactggtcacagcagataacataaattcagcttatgcaattgctcgacaatgacgtgtactggacaaagatcgcgtagggaatagaaggaccaaacttcatagagaaaagcctagcgtgaactctattgaactgcttccaaaactacagggaatggccccatcataagcacttgacgagcatgcacttagtaagcatttgcgcacaacattcaatgatgttgctgctgatactggtgacggaacaaatgatgcttccgcattgtataaaacatatattgaac

SEQ ID NO: 295460 - DNA, 255 bp, Zea mays
  unsure (1)..(255): unsure at all n locations
cggaanncccggggcgaccgcacgcgtccgatcaaacacaactttgaatctcttgacaattacgattacacgttcgatacactctgtgaggtttatgattcactgagcgtgacccaagctcttattttctgcaatactcacataaacgtggcctggctcactaaaaaaatgcgcacacataacctcaccgtatcatctatgcacctttacatgccgcatcaagaaagggatgacaacatgggtgacttcaagtct

SEQ ID NO: 295461 - DNA, 472 bp, Zea mays
ctgaattcccgtctcgacctacgcggtcgctcacgctacatcactacatcacgagctaccagagttatacatgacgtgcgtgaacatcattgaacggatcgtttccaaagtgctaatggccaaacttcaaatgtcccttcgaagactgaccaatacatgccacaacaccctcaaaaagagagttcacaacatgtaattgctgattctcatgataacttcgaagctaagttgaaagaagttgatgttaaagtcgaaactcctgtgaatcaaaagaaatcacaggagcaaaatgctggtactccacaaacggtagtccaggaccaacttgatgaggctcaaggactgcttaaaaccaccaattctactggtcaatcaaaagaggcaagactagctcgggtttgtgctggactttcatcccgtctccaagaatacaaatccgagaatgcacagctttgagagcttctaattgctt

SEQ ID NO: 295462 - DNA, 444 bp, Zea mays
ccgaattcccgttcgaaccactcgatcccccactcttcacgaattccgcacgatactatgcgtttttgctacgtgggcttactaacaaaagtttgttttcctttaaaggtaaaacggcaaaatattcatatatctttttttcaactaatactgatcgagaacaatattatcatacaagtaacattctcaaatacacgaagttttttattaaacaaatccaatgatatctcagatttatgcgatgctcatgttgctttaattgttttctctaacaaaggaaaactctatgagttctcttctgatcccatcatggacaggatcctagaacgataccaacgacaaatatatgccccaactggttctgaatcacacgcaaatttgtctttggaatcttccaaactcatgtcaactattgaagtctttcaaaagaactttaagaacttt

SEQ ID NO: 295463 - DNA, 273 bp, Zea mays
tctagaagatccaagcttacctacgccttcattcggcgtcattactcctctattggggcaccttaattcaattcacttgccctcgttttacaacctcctgacttggaaaacccttgcctttcccaactttattgcctttcaacacattcccctttttccaacttgccttattaccaaaaagcccccaaccaatggcctttccaacaatttccccaccctaattgccaattggaccccccccttaaccgcgcctttaaccccgccggttttgtg

SEQ ID NO: 295464 - DNA, 363 bp, Zea mays
  unsure (1)..(363): unsure at all n locations
ggggggggagttatgctgtaccggtccggaattcccgggtcggcgggcgcgtccgcgatggcacgctgcccggcgactatggggtcnacccgctgggcctctcggacccggaggggagcggtggcttcatggaggccaagtggctggcctatggcgaggtgatcaacggccgctacgccatgctgggcgcggtgggcgccatcgccccggagatcttcggcaagatgggcatcatccccccggagaccgcgctgccgtggttcaagacgggcgtcatcccgcccgcgggcacctacaactactgggccgactcctacacgctcttcgtcttcaacatggcgctcatgggcttcgccgagcacc

SEQ ID NO: 295465 - DNA, 322 bp, Zea mays
gctctaccggtccggaattcccggggcgaccggcgcgtacgggctgtcggcggacccggagaccttcgcgaagaaccgcgagctggaggtgatccagcggccggtgggccatgctcggcgcgctcgggtgcgtgttcccggagctgctcgcccgcaacggcgtcaagttcggcgaggcggtgtggttcaaggcgggctcccagatcttcagcgagggcgggctggactacctcggcaacccgagcctggtccacgcgcatagcatcctggccatctgggcgttccaggtggtgctcatgggcgccgtcgaggggtaccgcgt

SEQ ID NO: 295466 - DNA, 201 bp, Zea mays
  unsure (1)..(201): unsure at all n locations
attcgcaagttgaggacttctacctcatcacntatacttcccccaatgaacacatnttccaaatgcccaccaacctctccagcatcattctagatggccccatccttcttaaagcttgcactcaaataccatttcctgtctctccgcaccatattactctccaagtacaagatcacctaccagttctaccccgtcttcccc

SEQ ID NO: 295467 - DNA, 344 bp, Zea mays
tgaattcccgggtcgaccgacgcgtccgcaccaacatgtatacttacatctcaatggtcgctctaattggtggcattccacctgcataggtctttgaaaatccgaagctaatgcactatgtatatattgataccattgcaaaagttggattgacaaagtatgtcagcgacctattcttgattggactgatctaccatctgtataaccagattgctacaaacaccttacaacgagtgtctcctcttacacatgctgaccgcaatgcgattaaacgcgtttataccatctgtttctcaatcattgatactggcaacagaattagcacacaaactggaattggcacg

SEQ ID NO: 295468 - DNA, 355 bp, Zea mays
acccgtccggaattcccgggtcgaccgacgcgtgcgcggacgcgtgggcgaggcccagtcccgcggcggccgtggaggcggcggcggtgggtacgggggtgggcgtggaggcggcggctacggcggtggcgggcgccgtgatggcggtggcggctacggcggtggcggcggctacggtggcggcggcggctatggtggtggtggcggcggctacggcggtggcaaccgtggcggcggctacggcaactccgacgggaactggaggaactgagcggtggggcccgcgcggccaagttatcctgttcgctaccgtgatgtttaccctagtccagagggtttatcttcgttcgtgtcg

SEQ ID NO: 295469 - DNA, 390 bp, Zea mays
  unsure (1)..(390): unsure at all n locations
taccggtcctgaattcccggggcgaccgacgcgtccgctgacgcatgggcacgtttgccggatcgtactgcgggccggccgagatcatcgtgcgcngggtgtctagcggcggcatggacccttaccagggctacaaggcgtcggccctgctcgtggacttcttcgacaagtgccaggcggacccgagccactggagcaagatctcccatggcgggctccagcgtatcgaggagaagtacacctggaagctctactcggagaggctgatgaccctcaccggcgtgtacgggttctggaagtacgtgtccaacctggagaggcgcgagacccgacggtacctggagatgctgtacgcgctcaagtaccgcaccatggcgagcaccgtgccgc

SEQ ID NO: 295470 - DNA, 462 bp, Zea mays
  unsure (1)..(462): unsure at all n locations
tgctgtaccggtccggaattcccggtcgacggcgcgtccgggaataccctgggaccgaagaagagaagatgcgagctgctgttggcaggtttggcctatcgggaaaggcgcaggtgatgccaatgaggaatctttctgatgggcaaaggagccgtgtcatctttgcatggttggcatataggcagccgcaactgctactgctcgatgagccgacaaatcatttggacattgagaccattgactccctggcggaggcactgaatgagtgggatggtggtttggtcttggtgagccatgatttcaggctgatcaaccaagttgctcaagagatttgggtgtgtgagaatcangcggtgacaagggtgggaaggtgatatcatggatttcaaggcacacttgaagagcaaggctggtttatctgattagaggggcttttncagcaaccatgagctttttaactct

SEQ ID NO: 295471 - DNA, 392 bp, Zea mays
  unsure (1)..(392): unsure at all n locations
gaattcccggntggaccgacgcgtccggaaattgatagagttgtccatgaggagacaattgctagaggtggatacccatctccggtgagttaccatttgttgggcaagtcatgttgcacgtctgtcaatgaagtcatttgccatggaattccagatgccaggaaacttgaagatggtgacattgtaaatgttgatgtaactgtatactataaaagtgttcatggtgatttaaatgagacatattttgttggaaatgtcgatgaagcttccaaacagcttgtacgttgtacctatgagtgctttgagaaagctattgcaataattaaacctggagatcggttcctagaggtctcggaaatcataaatagacatgcttccatgtcagggttatc

SEQ ID NO: 295472 - DNA, 309 bp, Zea mays
ccggtccggaattcccgggtcgacgggcgcgtccgctcgcccgcaacggcgtcaagttcggcgaggccgtgtggttcaaggccgggtcgcagatctgcagcgagggtgggctggactacctcggcaacccgagcctgatccacgcgcagagcatcctcgccatctgggcctgccaggtcgtgctcatgggcgccatcgaggggtaccgcgtcgccggcggcccgctcggagaggtcgtcgacccgctctaccccggcggcagcttcgacccgctcggcctcgccgacgaccctgaggccttcgcggagc

SEQ ID NO: 295473 - DNA, 299 bp, Zea mays
ggaacatttcaaaataaaatattctccagtgtggttaaatggtggtgggcactgcgacctcgagctatatccagagtacattaagcacttgaagcagtttgtgtcaagcgttagcaaaaaaacatcaaagccggaccagaaagagataatggcaaaggatggcactaccagtaaagaaagagaggaagcatactcggagaaacctcagccggcagctaagtgctcacagtcacagatctcacgtaagagcatagatagccgagttgggaaatccaaaacagtggatgttcctgataaat

SEQ ID NO: 295474 - DNA, 411 bp, Zea mays
  unsure (1)..(411): unsure at all n locations
ccggtccggaattcccgggtcggaccaagccgtccaatcaaggtggaggccatggatgggccctttgtgccaaacatcacaattggaccctggggtgttgatgctctgcgtccagtgactgatcttccgttggatgtacatctgatgattgtggaacctgagcagcgagtccctgattttatcaaggcaggtgctgatattgctagtgtccactgtgaacagacatcgaccttcatttgcaccgaacagtcaatcagattaaaagtctaggagcanaggcagggattgttntgaatccagcgactccactcactgcaattgattacgttcttgatgttgttgacctggtgctgattatgtctgtgaatcctgggtttgttggcagagctttatcgagagtcaagtaaggaa

SEQ ID NO: 295475 - DNA, 458 bp, Zea mays
gctccaccggtccggaattcccgggtcgacccaagccttccaaaacctgcctaaggtttggttccaacctttggagacattgtgtccagtggaggaaactggtgtccgtgataaagcagttgaatctctgtcccgtattggtgcacaaatgaatgaaactgacattgtcgactggttcattccagtagtaaagaggctagcagctggagagtggtttacagctcgcgtatcgtcctgtggtcttttgcacatagcctatccaagtgcgtcggaccaattgaaaacagaattgaggactatctatggtcagctatgtcacgatgacatgcctatggtcagaagagcaacagcatcaaatcttggaaagtttgcagctacagttgaacagaatcatttgaagacagaaataatgtcaatatttgatgatttaacccaagatgatcaagattcagtgcgtc

SEQ ID NO: 295476 - DNA, 419 bp, Zea mays
cgcactcgtgcggacagcctctatgttcgctcttcactcgctccttgatggtctggggagggctactgacgcgatgatcgccgtaaaggttgcctgcttctgacgataccgtgatgtcttccagggtcgcgctcttagctttactgaaggtggtgcccatgttatctcgatcgacactgacagcttttgctctctcctagctcttaccgaggccgttgatgtctgtccgtagtatgacgtagctcgtatctcctacatactgctcacgagctctatcgacgctgatttcttcatgcgacacgtcatgccgagtacttatacatacgcacttcgtcgtgattgcgcagattttatccatggccgtagtcttctcatgtcacgtaccaaccaagcctgtgagtgcatcactgtccagtcct

SEQ ID NO: 295477 - DNA, 270 bp, Zea mays
attcccgggtcgacccaatccttccgcccgccttaggaaccaggcaccaggtttcacgatggcggaaaagaaccatatccgagtaggttataggaaagacggggcgtacatctactgattgatgctgccagatgcatgtctgtcttatgtttcacgctgcattgcataggcaagtccagatgatgagttcgcgttgtacactaagatgaaccatgtttgtgcaatagtggcggtttctgtttcctgctggttaattgctgatatccaaaa

SEQ ID NO: 295478 - DNA, 314 bp, Zea mays
ccggtcccaattcccggtcgcccacgcgttcgacccatcgtttcgattgaagatcctttcgaccagtatgactgggttcactatgctaagacggctgaataaattggacagcaagtgccgattgatcgcgaagaccttctcgtcaccgaccccactagggttgctaaagctatcaaggacaaatcatgcactgcccttctgctcaagggtaaccaaatcggatctgtgaccgatagtattgaggcctgcaagacgccaaagcctgcccactgtggtgatacgactattcataggaaatgggagactgaggacac

SEQ ID NO: 295479 - DNA, 453 bp, Zea mays
ccggtccggaattcccgggtcggcccaagccttcggaccacccatagggggccaggtggtttccaaagccaagtgtgtactaccagtctagcgacgagctagctcgggcggcagcaggcagccatcatgtcggaggagaagcaccaccacttcttcaaccaccacaagaaggacgaggagcagcccgccggcgagtacgggtactccgagaccgaggtggtcaccgacaccggcgagggcgagtacgagaggtacaagaaggaggagaaggagcacaagcacaagcagcacctcggcgaggccggcgccatcgccgtcggcgccttcgcactctacgagaagcacgaggcgaagaaggaccccgagcacgcgcacaggcacaagatcacggaggaagtcgctgccgcggcggccgtcggcgccggcggctacgtattccacgagcaccacgag

SEQ ID NO: 295480 - DNA, 407 bp, Zea mays
agcttttggagattgcccaagtacccgatgagcatgtatgttgctgtttctgtgtggcttaagtttcataatctgttccatgatttcaccaccagccttttgtagtaagagctacacaaccttttctaattttcttgtatctctatccaggtgaatgaatttaaatcaatcgagaagtttaagatattcaacactaacaacttgtgggtgaaccttaaagctatcaagagactcgtagaggctgaggcacttaagatggaaattattccaaaccccaaggaagttgatggtgtgaaagtccttcaactcgaaaccgcagctggtgcagctattcggttcttcgacaaagcgattggaattaatgttccccgctcaaagtttctcccagtgaaggctacatctgatct

SEQ ID NO: 295481 - DNA, 365 bp, Zea mays
aattcccgttcgaccgactcgtccggctcctctacccccgcccaacactcccagccgtcactccgtctccgcctcgagtccttcaggcgccattagcatctccaataagaacctactcgagatctgcaagtacatcttccatgagggggttctatatgcctagaatgactacaacctgtccaagcaccccaagcttgacttgcccaacctgtaagcgattaatctcatgcacagcttcacgtacaaggtgtatttcactgagacctatttctgacagtactactactggtacctgaccaactatggcatttagcacctccgcatcttgcttaacctgccttcagaggtttagcccaacaccctca

SEQ ID NO: 295482 - DNA, 403 bp, Zea mays
accggtccggaattcccgggtcggaccaagccttccgcggacccttggccggacccgtggggtttttggagacttgcaaagtgcaacaatatggatttacatcaaatcaagtggcgccttctcttgactgggagcaatatgtgtctgaaatagcaactgatatacttacagaacaaagccctaaaaggctatttgctgtacgccagaaattctatgaattactcgtcaattggatcccacccgaaagtattttgaagaagttgttggcagaattactgaggaagttagatgcggatctgaaacatgagatctgtcactgggccggacattatgaacacaagatgcgcctcggatcaaaagctatttttcatctaaaagctttcggggccaaattcatgagcgt

SEQ ID NO: 295483 - DNA, 345 bp, Zea mays
ctcaaataaattagaacaagatgtaaacatagaaagaaaaaagataagataaaaaaaagggagtacaactaataaggaagaggagtaaaaaagatttagaacacaaatccagaggtatctattggtgtgaagaagatcagatggtcatcatggactgtgcggtcttttgcgatggtagagctgtatgcctagtagattaggtaccgtaccacaggcgccgaattgctactaatgggcattattgtctaaggaactagtggagctgctggacttttgcgtgctaatggtgccacagttctcaaagtgcgtgtcgaggcaaagactgttcttggctaatcagatatg

SEQ ID NO: 295484 - DNA, 452 bp, Zea mays
ccggtccggaattcccgggaccaacgcgtccggctggaggtcatccactctcgctggtcaactcgagattatggagccctgctgtagcgtggaggacaggatagggtacagtatgataaatgatgctgaacagaagggcttgattactcctggaaagagtgttttggtggaagcaacaaagtggaaacacacgcattggtcttgctttcattgctgcttccaaaggatataagctgatactaacaatgccttcatcaatgagcatggagagaagagtcctccttagagcttttggtgccgaacttgtccttactgatgctgcaaaaaggatgaaaggggccttagataaggctacagagattttaaacaagacaccaaattcttacatgcttcaacagttcgataaccctgccaaccctcaggtacattatgagactactggtccagagatc

SEQ ID NO: 295485 - DNA, 388 bp, Zea mays
aaaactactgtgaccgatgaaatcaccaccgttctggttaagacctaccgagacactacgcgggcattttaacagatcgacagcgcgccagaaaaaaaagctatgggaatcaccatctacacttattacgttccatacgactccactaccggtcactacacacacatacactaacagaagcacgcagactatcttaaaaacataatcaccgctgatgactcaaatggactagccacatcatgctactagctgtgactgacggataaacgacgtaaactgttgagcaaatccagctgagtcgtaactcttgccgtcctaacatcatctggatcctaaacaaatgctacatggctgatgacgaataactgatcgaactgattgaaatata

SEQ ID NO: 295486 - DNA, 329 bp, Zea mays
taccggtccggaattcctgggagccaccattccgctgggctttgcccccaaccaagctaagttattaaactctagacccccgctgtagcgtcgaggacaggatagggtacagtatgataaatgatgctgaacagaacggcttgattactccttgaacgagcgccagggttgtatcatccagccgggcaactggttcaactcctgtcaccataggttcgtggatcaaaggttcactggttccacgcttgacatgaccggtatcgtagttgaatccggggagtgggctattgtagggggcaccgttcagtttgtcatggcaaacggtgtca

SEQ ID NO: 295487 - DNA, 407 bp, Zea mays
cccacgcgtccggcgcgccgttcatggtgaacgcgtacccgttctacgcgctcgccaggagcggcagcctcgacttcgcgctgttccgggtgaacgacggcgtcatggaccagggcaccgggctggtgtacggcaacatgctggacgcgcagctcgacgccgtgcactcggccgtcaggcggatgggcttcggggacgtcgacatcgccgtgtcggagaccgggtggccatcggccggggaggactgggaggtcggcgtctgcgcggacctcgcccgggactacaacagcaacgccatccgtcacctcggctccggcgtcggcacgccgctcatgcccaaccgcaccttcgaggtctccatcttctccctcttcgacgagaacctcaagccaaggccggtgtcggag

SEQ ID NO: 295488 - DNA, 419 bp, Zea mays
ctcaagtcgagcgggcgcaccggcgtgatcgcctcggaggaggaggacgtgcccgtagcggtggagcagagctactccggcaactacatcgtcgtgttcgaccctctcgacggctcctccaacatcgacgccgccgtctccactggctccatcttcggcatctacaaccccaacgacgagtgcctcgccgacgtcgacgacaatgacaccgtgagtgctaattaatctcatctcccttaccttctttctgttctgactggctcattacgtgacaattctatctccaacactacactacgtacgtacgcgcgcgcagcttgattcggtggagcagaggtgcatcgtgaacgtgtgccagccggggagcaacctgctggccgccggctactgcatgtactcgagctcggtgatcttcgtgc

SEQ ID NO: 295489 - DNA, 338 bp, Zea mays
gattcccgggtcgacccactcgtccgtccacgcgtccggtgcacccctagccattcaagcctcctgctccagaagcagctcaatgatcttgcgaagaatcccgtggatggttactccgcagatcttgtaaacgattgcaacttccttaagtctcacttcaccatcatctgcccgttcaacaccaattattactgatacctcttctatgcattaatgtctttatcccattactataccatcttttcttcatcttcactaccaacttcagttatttagcatactattgtctattcagactgacgtctactcattaatatatgacatgcattattaatatt

SEQ ID NO: 295490 - DNA, 419 bp, Zea mays
catgctcgagcccagaagcgtgaacggcgacctcatcttcgccagcatcttgctcaccggcaccctcaccgggtaccctggtggcctctgtgctgacccgttcgtctacggcatcggctcgcccaagaagatcacggagctgagcaccaaggtgatcaacaacggtcgcctcgacatgctcgtcgtcatgctcgcctggattcacgcctagtacaccggcacctgcaccatcgacaacctcttcgaccacctcttcgaccatgtccacgacactatcttccacaccttctcccacaaatgaagagtcgaacttattattagccttattaggagtgctaccacacatgcttcgacacgttcatggccaatatatatgacactttacatgaaacttgacatggaatgactgctgagtagac

SEQ ID NO: 295491 - DNA, 337 bp, Zea mays
cccacgcgtccgaccactcccttgagcttaccttctatctctgcacgtgaccgtaccggagcatagatcgccagaactaccgacgcgacatcatggcgcatgcctgagacaaggtatactacatattcaaggcggtgctgacctaagacttcattgcgggcaacatgcagatcctcgcacggtaaaaccgcaacaaggtcaacctatactccaacgccaccatcggagtatagatgcaaatgcgcaccatctttatcaagcacaggagcgtgcaggctcatacctggaacacctgatgccacaacaggtacaaacccgtgactagtgctgagtatag

SEQ ID NO: 295492 - DNA, 374 bp, Zea mays
tttcatatatgcttaaaacacttccgtaccacaattttggaaggttggatttaacacttgattccaaccaaataattgccaatgttggtcttattggaagaggcaagagcactataatcaatttactacttagattatacgaacctacaaatgggcaaatactaattgatggtgtcccgctcactgagcttgatatcagatggttcagggaaagaattggtttcgtcggacaggaaccacgcttattccgaatggatatcatctctaatattaaatatggttgcccaagagaagtcagtcatgaagaagtgatatgggctgcgaaacatgcctatgctcatgactttttaatggctttgcctgatggttataac

SEQ ID NO: 295493 - DNA, 213 bp, Zea mays
gcatactgactgatccgatagtcggttacggcttcaaaaacgacgaggtcgtttctgtcaaggtcgtatccaatatctacagggactgcagaattgactacctggataacccgaacctgatccacgcgcataccatcctgtccatctaggcgtgccatacgacactcatgaccgccatcgaagagcaccgcatcgctcgtcgcccgctctaaa

SEQ ID NO: 295494 - DNA, 361 bp, Zea mays
  unsure (1)..(361): unsure at all n locations
cccactcgtccgaccactcgtacggtggcggctacagctgacggcacaagggtgatggcatcctctactgaggcggtggaggatactgttgtcggatctagggtgttagctgaagctacctaggctgcaccagatgatgtagtaactgatgtatgtgcccatcctgtcttctgtcagaatatcttatctatctataggattgtgataccgctcgcttctgtcaccctgctagacgtccgttctaactttggattacgtgttgtgacccctgnagtttccttagaatgctcccgctatgaaacgagacgacagaagaatgagcaaggttttcggtcgcaaatatacaagatccaagcttacg

SEQ ID NO: 295495 - DNA, 370 bp, Zea mays
gagatgctgacgaggaaatggcgaacgctgttgaaagacgagagcttactgaactggagcttatggtcatgtggaatcgacttgatattgataggcgtgacgatgagcgggatgccatcataagccttgatctcttgtatagaagggtctagacagagattctgaagagtgaagcaactgctgccatgagattgctcaatgatcttcttaatcttcatgatggatgcgacaatgagaagcggtgtaaagaaactgataaagcgcatgcttgaagtctttacaagaaaggacccattcaatgtggtcttgtctgctgggatcaacatggagaatcgtgaagggcgaactgagctaccggctcaagatgatg

SEQ ID NO: 295496 - DNA, 322 bp, Zea mays
ggattcccgggtcgacccactcgtccgtaaagcgtgaggcccgtttgaacggcctgctctattatatcccatacaccaacctccgtgtggtcgtctacataaatggcatggacatcaagcatctcaacaccaactacatctcccaaatgaagctatacatacacagcccatacgcccattacatccacaagccctgcgcaaccatcactatgcacaactacggggacaataacgtatactttgacctcgactacatcaaccacaccacctcacagtgctacctctacagatctgactcgccctcttactacaaccctctaca

SEQ ID NO: 295497 - DNA, 419 bp, Zea mays
cggaattgccggctcgacgcacgcgtccgctgacgcgtggagctgacgacggtacatcggctcagaggtgcgacgtacgacgacgaggacgggggcgccacacatggcatcggagctctccgccgccgtgccccggttccacggcctccggggctacgccgcgcccaggtccgcggtggcagcgctgccgtccgtgagggtgggcaggaagaggtcgtcgtcgcagggcatccgctgcgactacatcggctccgacaccaacctgatcatggtgacgacgacgacgctgatgctgttcgcggggcggttcgggctggcgccgtcggcgaaccgcaaggcgacggcggtgctgaagctggaggcgcgcgactccggcctgcagacgggtgaccccgtcgggttcaccctcgccgacacgc

SEQ ID NO: 295498 - DNA, 410 bp, Zea mays
gtcaccttccgcgtgcagcacggctccaaccccatgtacctggccgtgctcatcgaggacgcgaacatggacggcgacgtggtgcatgccgacatcatgcagaacaactccgggtactgggagcccttgcacgagtcctggggcgccgtctggcggatcgaccccagccgcccgctctgcggccccttctcggtgcgcatcaccaacgagtccggcaagcagctggtggcccagaacgtcatcccggccaactacatcgccgacgtcgactaccgctccttcgtccagtatacgaattaacccgaccggccgggcggtgcgcccactgcatgagctagctcgatcggtcacctctgcgaccgtcgtacgtccgagatagctcgttgcttaagtgttcgtgtttagtggct

SEQ ID NO: 295499 - DNA, 411 bp, Zea mays
tgctgctcatcggctccgctcagaacttcctcggctacggctggctctggctcatcggcaccaggcaggcgccggcgctgcccctctggatgatgtgtgttcttatctatgttgggaccaactgcgagacattcttcaacacatccgcacttgttacatgcatacagaacttacccaagagctgaggtcatacagtgggtattatgaaaggatttgcgggccttagcagtgcaatcttgacgcagctgtatgcagtaatgcacacaccagaccatgcaacacttgtcttcatggttgcagttggtccatcgttggttgctcttggcctgatgtttattattaggcctgttggaggtcaccgtcagtccaagatttcatgcatctgagcgacaatgtgaggctctccttttt

SEQ ID NO: 295500 - DNA, 443 bp, Zea mays
  unsure (1)..(443): unsure at all n locations
cccacgcgtccgctcgctatgcacattcaccactgcccatgctaggctcgctgcggtgccgcgtcatgccgcgcccgcgcaccgccaccagtgtctcatcacacatcaccgagctccgtcgagcgctggagaatggacatcagccacccccatccgaaggcttgcagcgcccgaagctacgccagagcaccacggacatcgacgcctctgactgcgatccattttcgagcttcaaggaatcgacagtcaagcttcggcaaccaagtgatcgaatttttcgagttctacaaagttgaagaccctgagcatctgtttggttgcctttggtgcaatctatgctgaggtaaagaagaagacgtcgaggtggatctccaggagttccaggacgttgatgagttcgaggattaggctagcgacctnccccagtcagctgcctgtggtgg

SEQ ID NO: 295501 - DNA, 431 bp, Zea mays
  unsure (1)..(431): unsure at all n locations
ccgacgcgtccgcccacgcgtncgcttcgcgtgggcgccgcctctacagcccgcacctcgtttcctcggccgggttcgatatgacgaagcgaaccgagaaagccggaattgttggcacatatggaaccaggtatggtgctaacttgcgtaaaccaaatcagaaaaatggaggtttctaacacctccaagtttttttgggaagtctgtgggaaagtttccttgaagaagaaaacggttgggatttggggatgcaaggactgttggaaagtcaaggcccgttgtgcttacaccatgaacacttgtaatgcggtcactgtcaagagcaccatccgtcgcttgaaggatcctactgtagcatgatcggtcgcttgtcaagcatactggggtccactatatttgctgtgtatcccatacattctccaacatttttg

SEQ ID NO: 295502 - DNA, 391 bp, Zea mays
gcgagagacagactcgtatacccaggcttctgttgacgaggaggacaataatactagggatatggcttcctgcgcgtacgcctcatggtccaagctagtggatccgtccctaggtgtacccgatgttcgtgccgatggacgtggccctgagtatctgctagtaccagcttgagcgcaacatcacaacctacctcaaagtccggttgaccaaacaaatgatggcagtcgtcgtacatgacatccacaactagggcgacacttactccatgcacggactcaggaacttcgtcatctggcacgaagccctgagatcatgtattgcatcaactgcttcttctgagactctcttaaggacgattaatctagagtccgtcatggatggatgcatatg

SEQ ID NO: 295503 - DNA, 229 bp, Zea mays
accggttcggaattcccggctggacgccacgcgtccgccgagaatgattaccaagatagaaggcctttgtaatggtatcaagacaggggttgttaagatggtttacatagcaaaagcgcttgccaggccagcttcctacacaaccaagtactttggatgttagcttggtgcacagtccaaatttgatgagaagacagggatttactatgttaatgtgactcatgatact

SEQ ID NO: 295504 - DNA, 248 bp, Zea mays
caagcgggcaggccctagatgtagaggttcaagctaacgagatattgacgaacaagaagaatgtcattcagatcgtatcaggcttcacaggccgcactcctgagcaggtagagaaagacattgacagatatcgctacataggccctatcgaggctgtcctatattgactcactgatagctatatctatgaaaacagtgtcatgccagttaagcctgactcggactgaactattctaacattcgtctta

SEQ ID NO: 295505 - DNA, 442 bp, Zea mays
attccctttcgacccacgcggtcggccacgcgtccgcggacgcgtccgcacggtgtacgcgacttcggtggacccgaagaagggcagcctaagcaccatcgcccccattgccatcggcttcatcgtgggggccaacatcctggtgggcggcgccttcgacggcgcgtccatgaaccccgccgtgtccttcggccccgccctcgtcagctgggagtggggctaccagtgggtgtactgggtcgggcccctcatcggcggcggcactcgccggcgtcatctacaagctgctcttcatctcccacacccacgagcagctccccttcaccgactactaaaagccgtaaccgaccgacccaggggtgcgcagctagcatccagctctctctacccgctcgccgtcgatcgtttagtttctctcgggcacgtgcatgcatcgtcgact

SEQ ID NO: 295506 - DNA, 413 bp, Zea mays
gggagcgcatcctggtggccatatgaagagaacgaaggccgtggagcacatgatggtgagcagagccaagcccaacatagcagacgctgaacagaaagacatgctagactacctatacacatggtagtacaagatgcgagggatactcccggactcgctaggccgcatcgaggaccgaagcagggacaacttcacgcacgctgaggtcatgcgtgctcagcacaagcatgacatgctgcgagatcagagtaacgtagtactactgcaaagttgtcgacgagcacgtaaagccccgttgctatatatcgagtgcgcagtggaagacgacattatacctgtgtgtccaacgggagagactgcgtctagagaggcaacggacgacgcattagagtctatggacacgtagatcagac

SEQ ID NO: 295507 - DNA, 444 bp, Zea mays
  unsure (1)..(444): unsure at all n locations
ccccgctccgcttctgcaggccacggctgggcgacaccctgatggcgtcgcctcctcccgtggcgaccgcggggcctcacagcgtcttcgtgtacggcacgctgatggaagaggaggtggtgcgtgtgctcctgggccgcgccccgccctcctcctcccccgcgctcctccccgaccaccgcaggttcagcctcaggggccgcgtctacccggccatcctccccgcccgcgcccacgcggtgagcggaaaggttatccaggggctcaccgacagggaactccatgtgttcgacatgttcgaggacgaggagtatgtgaagacaaccgtcgaggtctcactgactgatgcatcggagaaatcactcgcctacgcctacatatggggtaaccagggtgatcctgacctctacggngaatgggattttgaggagtggaggaaggtgc

SEQ ID NO: 295508 - DNA, 415 bp, Zea mays
caagcatataccagcgactgagcgagcgttatgcagtacacactgtacgcagctcgctgtgagcatctgcggcggctctgatggcggcctgcatgatctgctagttagctctcgcggtggcgctttacggcctgcccggcttctgacaccgcgactgctgacttcacgtcatctgctcccagaagaagatcaagaccgacaagccctaccggattgggggtggcctgaccgtcgtacttcacgccaactgcataaagggctaggtcaagtgcttgtaccacttcttcgaccaatactgcccgaacgtcgacggattcagcctaatctacaacgaggatgactgggctcccaccggacacatctacctctggggaactactgggcttctgatctgggccgttaccctttatgggat

SEQ ID NO: 295509 - DNA, 426 bp, Zea mays
ggtatggcagctaccctcgccggtgtatgcaaggtgcctctgacatctgtcctactaggttttgagcttacacaagactatcgtatagttctacctttgctcggggctgttgggttatcatcctggattgcttctcctcaaaggttctctaaaagaattaggagtaagctggattcttgggaggataaatcgagtattcctcagcaagcaaacgacatgctcactgaaaacaaagaggccacttccatggatgcagctgatttgtcgttagaattatataaaattgaaagctccctttgtgtctatgatgccaacgacagcaatatgttcaaaaatcttactgttggtgaggccatgaaaactaactacttctctgtctcaatgacaaccccattaattgaggcactagatcttatgcttgccgag

SEQ ID NO: 295510 - DNA, 311 bp, Zea mays
  unsure (1)..(311): unsure at all n locations
acccacgcggtccncgaccccttggccgaccccttggttgtaaaagtggctttaacagttaccaaggatttgggccactacaaatctggatggtccaaccccataaccggtggcattttgggtggccatgccgtcaagttgattggatggggaaccagtgatgctggagaagattactggcttctggcaaatcagtggaatagaggctggggcgatgatggatacttcaagatcataaggggcaaaaatgaatgtggcatcgaggagggcgtttgtgctggaatgccatccacaaagaatatggttccaaa

SEQ ID NO: 295511 - DNA, 459 bp, Zea mays
gctctagaacgagtggatccctcgggctgcacgaattcggcacgagtttatattatctagctcgttgtctattccttctgctagggttatatccacataccgtgcgccaattccatataggccctgtatttacagattatcagggattatgtcatctgctatcatcctatgataccttaaaggagtgctttctaactatatccatctagagctgcgtcaaatgctcttcaaacacattcccataagcctcctacctcttcatctgcttctattttcagattataaccatcacagcctttttcatgaaattcaattcaagggatgtcaagagattttcaataaattagctttcttactgtctctgcacgcctaaagacagttcctgcttatattaatactctgatccgttcagatagaatatgcatttttagtgccatagtaaactaatctctatcaata

SEQ ID NO: 295512 - DNA, 396 bp, Zea mays
gccactccttcacgcgatctgttatggtatgtggtaagatgagcaccaaggtagggggggaacaaatgcttaacctgctgatcaacatctattactacttctcttactacttcctcaacagcatgaagtccagcgtgtgtgacattgcaccaatcgttctgacaatgtccttcacattcgtcggcaactcaacctgcatctaagacatgatccaccacatgatccagcacttcacggacatgttcacgagcatggctatgttgcactgttacacacactagggcatagatgagatgatggttaccatggcatagagtgacatgaacaacctcgtgaacgaccatcagcactaccatgacgccactgacgacgatgatgactacgatgaggaggacg

SEQ ID NO: 295513 - DNA, 343 bp, Zea mays
cccacgcgtccgtccacgcgtccgcggacgcgagtgcggtcccgccatccaaccagaggggaagttgagcacacgagcataggtagaagagagcagacgatgatggctcgtacgaagcacaccgcccggaagtccacggtaggcaaggcccccagcatgcagctcgccaccaaggcggcgaggaagtctgcgccgacgaccggcggcgtgaataagccccacaggttcaagcccggaacagtgtcgctgcgcgagatcctcatgtaccagaagagcacggtgctgctgatccggaagctgcccttgcagcgcctggtgcgcgagatcgcgcatgacttcaaga

SEQ ID NO: 295514 - DNA, 322 bp, Zea mays
cgctgcttcgtcggcggcctcgcctgggccacggacgaccactccctccacaacggctgagcacctacggcgaggtcctcgagtccaagatcatcctcgatcgggagacgcagaggtcctgcggcttctgcttcgtcaccttctccacggaggaggcgatgcggaacgccatcgagggcatgatcggctaggagctggacggccgcaacatcaccgtctacgaggcccagtcctgcggcggtcgttgatgcggcgtcagtgggtacggtggtggccgtagatgcggtgtctacggcattggtaggcgccgtgatggcggtgg

SEQ ID NO: 295515 - DNA, 447 bp, Zea mays
taccggttcggaattcgaggcacgcgtcacgcttgtttcattgattcttgaagagatcgagcttcttttgcaccacaaggtcgaggatgtcttgcaactgcggatcaagctgcggctgcggctcaagctgcaagtgcggcaagaagtaccctgacctggaggagacgagcaccgccgcgcaggccaccgtcgtcctcggcgtggccccggagaagaaggccgcgcccgagttcgtcgaggccgcggctgagtccggcgaggccgtccacggctgcagctgcggtggcaactgcaagtgcgacccctgcaactgctgatcacatcgatcgacgaccatggatatgattattatctatctagcttgtggtggtggttgaacaataataagcgaggccgagctggctgccatacataagtattgtgtggtgtgtgtgagagagagagaaa

SEQ ID NO: 295516 - DNA, 389 bp, Zea mays
gccacgcgttcgcccacgcgtccggcgagagcggatagagagagtgagggaggcgccgacgccgggtcctttcttcatcctgcatctgccgctgtttccgacaggatgtttctcacgaggacggagtacgaccgtggggtgaacaccttctctccggaggggcggctgttccaggtcgagtacgccatcgaggccatcaagcggcggcatgcttgccagccaataccttttttcaaagcactttggcatttcttgatgcctctacggatttgaaggtgtaccaattcttggcgtagttgcagtactacggtggcggctgcatggcctcttcctgctgtgctgcagctgctcttggagtatagctgtagccccttcgtactgttcggatc

SEQ ID NO: 295517 - DNA, 389 bp, Zea mays
cacaagcacgaaatagagattattacagactgataggttaccaggaagaaaatggacagctcgagagcactgaaagttatctaacatacgtcgttgcatatgttaaattgtacgcagcaatgattcagacggaaatcaaaggtgttcgtcatcctcatggtttagctgagggatggaagtggctcgccatgttcctcaattctctcccagctactacagccactgcatgtgcccttcacgctttcctcaagatggctggttttgcacttcacaagaaatatgggtcacagttcatgaaaatcctggatgtaatatcacggtgctttttaccagctttgaaggaacaaggcaacaagatgcaaactgaggctgtcaacaatctacagaat

SEQ ID NO: 295518 - DNA, 249 bp, Zea mays
aattcccgggtcgacccactcgtccgtcgactcgtggtctgacgcgtgggcctccaccttaacccacgaacagagcgagtcgacgccggggcaccttttctccggcgaagggaaatggcaaccgttccacgggatctgatctggcaggttttgaggaagaacaactccttccttgtgaaccacttcgccaacggcaatgccaaggtgcagttcaccaatgagccaaacaacctctacaacttccactcc

SEQ ID NO: 295519 - DNA, 452 bp, Zea mays
ccggtctcggaattcccgggtcgacccactcgtcctcccactcgtccggtttctacagaggaagcagtatatttgacaaaaggtgctcgacatgggcatttactagttagaaaggatcaactacctgcttccaaagctatgcacgacaggttgataattgcgaatgtttcatagttctaaacgaccttaacatatcaccatactgcattacacttgccttttatgataatgacaatgtctacagtcagacttttgacgctgatcttattagctgcgacacgtgcatgacctaatctgcaacaaaggatgccttacaccttcgcatccgagttcaccccttccatgtgcttcgtatcaacaagatgctttcgtgtgctggtgctgattagctccatactggaatgatgggtgcctttggcaagccttatggcacctgttcttaggttgacatt

SEQ ID NO: 295520 - DNA, 283 bp, Zea mays
cgcattcgttccaactcctgagcactttctcctcgtcccagacaagccaatcgaagccgagatacgaccatggactccaccggcaccggagcagggggtaaggggaagaagggagcggccgggcgcaaggtcggcgggccaaggaagaagtcggtgtcgaggtccgtgaaggccggtctccagttccccgtcggccgcatcgggcgctacttgaagaagggccgctacgcgcagcgtgtcggcaccggcgcccccgtctacctcgccgctgtcctcgaatacc

SEQ ID NO: 295521 - DNA, 341 bp, Zea mays
cgcatccgccggcgcgtgccctgtcgcctcgcgcgcctaggaggccctcgccggggtcgccggcgcggtagccaggaagctacccgcagccagcctcgcattcccggcgaaatccttcttcggcgcgccgctggccgtcaccgcggcctccgtcgcgtcgccgctcccgcgcaagccggccaccttcaccacctcgctcgaggtcgtcgcggcggggaagaagggctacaagatgaagacgcacaaggcgtcggcgaagcggttccgggtgacggtgaagggcaagatcgtgcggcggtgcgccgggaagcagcactggctcgccaagaagtacacccagc

SEQ ID NO: 295522 - DNA, 421 bp, Zea mays
aattcccgggtcgacccactcgtccgtgcacgcgtccgcccacgcgttcgtcgacccactcgtccgatcaccgatgaacctgcgggtgctgcttcacacggaataagtgataggctgtacgaataccatctaagggatggcaaccggtagtgaagcctcgaaagcagctgaagctgtggttgactggcataaacacgacagcaagaggatgctacatgctgcttaccgtgatggggatctgaaccgcacaatcaagtactacacggaatgctttgggatgaaactgctgaagaaaagggatgttcctgatgagaagtacaccaatgccttccttggctttcggccagataacaccaactgttcagttgaattgacttacaactatggcgttgacaagtatgacattggaacaggctttggg

SEQ ID NO: 295523 - DNA, 293 bp, Zea mays
gccgaccaggccgccatcctcaacgcgaaggctatcaagaacggtcggatcgtcatgtggctccatgttcgccttcttcatccaagcctacgttaccggcgaaagcctcgtcgagaacctctccaagcacctcatctaccccttcgtcaacaacctgcttaccgtcatctccggcgccgccgataggacgcccagcctgagaagactcgccacaaggccggcagttatgccaagtcatgcgctgttaccgtacttgattttaccggggaaagatctgtgtgtgacggtctgaa

SEQ ID NO: 295524 - DNA, 254 bp, Zea mays
cggaatccgggtcgaccacgcgtccggcggcagcgtattgtatctacgctaattggcatttaggaaaccactatctactatcacgttggggatggatcatcacatcaaggaaacgtatcatcaatggaagaaaacactgatgcttatttactacattatcctcaagaattgaaagactcaactgaacctatgcataatattgctgatcctggaaatgctaacctcagacccaaacttgatgaagtcctccctaa

SEQ ID NO: 295525 - DNA, 373 bp, Zea mays
cccacgcgtccggacatttttttcgctgtcaaggcatttgcagccggtgtcatcctggccacgggcatggtccacattctgccagcagcatttgatgggctgacatccccatgcctctacaaaggtggcagtggtgggaacattttcccctttgcaggactcattgcaatgtctgctgcaatggccactatggtgatagactcactagctgctgggtactaccgccggtctcacttcaagaaggcacggccaatcgacatcctagagatccatgaacaaccaggagatgaagaaaggtctgggcatgcacaacatgtgcatgtgcacacccatgcaacacatgggcattcacacggaaaggtggatgtcatca

SEQ ID NO: 295526 - DNA, 395 bp, Zea mays
gtagtacctattactcaagcaaatttccttctactttctaaggttgatcgatgctctggaactgatgaggcatggagtgaagcgctttcttgttcgcaagagtgggagctggaaaggcattaccaagagattttcagtgctttataatggtaagtggctgaagaacatggaatcaacatctccaagtgcagccagcagcagcagcacgcagctatccccacgttctggttctgcagaaaagttctgctgcctatcaagggaagatgttctccggtttctcattggatgccttggtgctcttgctcccatcccgctgactcagatatcttcccttggagccatcaatccgcagtacagttacgtggaagcatctgcgcctgcgatggaagcaattc

SEQ ID NO: 295527 - DNA, 274 bp, Zea mays
tggaaagccagtacctagtcctacgagcagtcgaacgcaagtgtcaagagacgaatcggtcgacatggctcgcacgctatctatcgtatcggtcgccgtggtggccgaggtgctgctgctggcatccgcggcgacgacctcggaagccgccatcacatgctggcaggtgagcttcggcatcgcgccctgcctatcctacgcccgctgcacggggtccgcccaatcctcgtcctgctgtaacgtcgtcaggaacctgaagagcgccttcagcacc

SEQ ID NO: 295528 - DNA, 419 bp, Zea mays
cggttcgacccaggcgtcaggccacgcgtccgaccacgcgttcgcccacgctggtcgcggacgacgtggtcgagaaagaggcataggtgctgagaacatgcacagcaacagcttgaacagggggatcagagaggcccacgacaccattggctttggcataaacgccggcgtcaaagacgacctcgactcggcgcacccgctccagtctaccatccaatctgataccaagttctgggcggacatgaagaagatcgggacagatgccatatacagatacgtcctcaatatccgcaaggatctcgatgccctaatcctctacaggatccaaaggctccctgtagctttgacgttatctgtgctcggatacgaggcactgtcaagttccctggatgatgttggacttgaagactatcctaaca

SEQ ID NO: 295529 - DNA, 151 bp, Zea mays
cccacgcgtccgggcggaaggatccggtgcatgcaggtgtggccggcctacggcaacaagaagttcgagacgctgtcgtaccttgccgcgcttgtcacggacgacctggttaagcaagtggactacctggtgggcaacgggtggataccct

SEQ ID NO: 295530 - DNA, 313 bp, Zea mays
cttccgaaggtccgcgaaggcgtgttgtttaaaggccgcgccccaatctttttggaaggccggcttgaactacctgggaaacccaaacttgttgcacccacaaagattcttggcattttggccgtgcaaggggtggctaatggccttctccaagggctaccgcttcggcgggggccggttcggggaaggcttcgacaaggtgtaccccggcggcgctttcgacccgctgggcctggccacgacccgacacccgcgcgactcaagggaagagctcagaacggcgcttgcatgtctcatgtcgctttcggcagca

SEQ ID NO: 295531 - DNA, 358 bp, Zea mays
actggaacaagggagaaggattggagaggattgcatgaagaatgtaaagcattccgtgtaccacattaagggacttcttatcaaacgtgggcttgcaaaaaatcctggtttagcccatggaaattgggacagatttcttcccaaggtcaagaaaaaaaatgtccagccgaaaaaggcctaaacttaggggaagaaaccggtcacacccttttcaacggcttaacaggcttaacagaatgatctttgacttgggaacggtgagtatttcatgagtgacaaaaagaaatcagcaaagaaatgggcagagaagctggacaagcaatctgggagagctgaagaaaataaaagaaaaagagag

SEQ ID NO: 295532 - DNA, 244 bp, Zea mays
cgccaacccgtccgttttccccgtgcttttcccccgtcgaggccggttcccatggcaaaaagactccgactaaaatggccggccgttggttccggcccgaggtgtacccgttgttcccggggacggccatggccgccggcatttgcgggtttaactttttccggaacataactggaaacccggaagtcagggtaaacaaggccgggagggaacctggggtgcttgaaaaccatgaggaggggag

SEQ ID NO: 295533 - DNA, 195 bp, Zea mays
cccacgcgtccggcacaaggagcacctcggcgagatgggcgccctcgccgtcggcgcctgcgccctgtacgagaggcacgaggcgaataacgacccggagcacgcgcagcggcacaagatcgatgagggcgtggcggcggtggctgccctgtgcagcggcagcttcgcgttccacgagcaccacgacaagaagga

SEQ ID NO: 295534 - DNA, 374 bp, Zea mays
cgcggaactggggccagaactggcagttcagcgccatcctcgtcggccaggcgctcgcgttccgcgtcaccggcagcgaccgccgcacctccacctcctggaacgccgccccgcgggactggcgcttcggacagaccttcgagggcaagaacttcagggtctgagctcaggccgcgagtggcggcgagaagaagccagcgctcaaggccttcttccgccgtactattatatataccgtgattactgctactagtagtcggtataaagcgcgtgttagggtggtgggaatgtacgtgaatgcccgtttagggtcacgccgtctcgccctggttcaagtactctctgaaaaaaaaggagcctttttcttctgaaaa

SEQ ID NO: 295535 - DNA, 439 bp, Zea mays
  unsure (1)..(439): unsure at all n locations
ggnccggaattcccgggtcgacgcacgcgtccgaccacgcgttcgcccacgcgtccggttgtgttatcttttgaggttgtcaactgcaatggcggtgaggtccaatgggagggtacgtcaccgaccatatcaattgacaacacatctggatgtcaattatacttaatcaaaaattcactgggagcttcaattacttctgctaaatctaatgaaatcaatgtgatggctccaagtggcagtactgactgtgattgggatgagcatgcattgcctaagcagtacatccataatttcaaagattggcaattcaccactataccaagctcacactctggggcgtaaataccaattgttactgatgtgtttgctttttatttcacgtttgccttgtttttgaaaatgaacgtttgatgaggtttgtaacagctttgggtctctc

SEQ ID NO: 295536 - DNA, 402 bp, Zea mays
cccacgcgttcgatgcaccacacctcttcttcttcttcctcctcctcctagcacagctagcggctgctccccttcgcctgtgatcatgtcttgcaccaacggcaagtgcgactgtggctccagctgctcctgcggcagctcatgcaactgcatgtcccctaatgtggagaccgccgccgccagcagcatcaagaccacggtcctcgccgcgccgaccaccaaggccagcgcctgcggcttcgaggcggacaccgagggcggcggctgcgactgcaacacctgcaactgcggcaccagctgcggctgctcctgctgcagctgcaactgaaccggtcaagcgatggcccacgagagtcgagaggactacgaccagtcgtataaatataatagcggcgtctaaat

SEQ ID NO: 295537 - DNA, 351 bp, Zea mays
  unsure (1)..(351): unsure at all n locations
ccgaaaagannnagtaaataataaaacatgagtctctttttcataattctcaaataaagntgttttttttaatattactcctgactaagatgtatatattaatcatcctattttaatatatattaatcatcctattttaattaggttctaatccaattaatactaactattttcttttttatttaataaccatctgactatcatataataaagggtagaacaattctttcttctacagattctacaaaaactgaaacaaaatgcatcgaaaaaattttctttgtataaaaattatctctatatcatatctaaataaaaaggaaatcaaaaagaacggaagttgggattaca

SEQ ID NO: 295538 - DNA, 341 bp, Zea mays
cccacgcgtccgcgcgcacatcgaccgcctccgccgtgccgtccacgacgtccgtggccgggctacgcctggcgccttctaaaggacgggcgggcgtttcataccgcgcattaccggctctcctctcgctacatcacggcgcagctcacaactttcacttcgtcgctaactatcataatatccacttccctgccaatattaaggtgacgaatgaccacgcataactgccagtcgatgaccagggctatattctagagaatgaagccctgaaccatgcactggaaaaccttaagacctaactctatggaaaggaagggcttgcctacgggacactcaatctt

SEQ ID NO: 295539 - DNA, 292 bp, Zea mays
cactttaataaacactctcctaactatttcaacacattcttcaaccacccccccctcaagcacaagctccgcatctttcttcaaaaaaaaactctgaaaatattcccccgcccgacttcttgtcctctaccccccattgttcaattccagactttaaagtacaacattaagtcaatggcttggagaagctttaccctttaggaacttaaagctgcttgcatcccaaagaaacttgctccaaccatttgtatttctgttgatcacccccgcaaaaacaaattcctttaaggac

SEQ ID NO: 295540 - DNA, 363 bp, Zea mays
  unsure (1)..(363): unsure at all n locations
gtccgcccacgcgtccgacatcacttcanccattttatttttctataaacatagatctnaacagtcgtccgaatttttaaaatacctagcctcaaaacgncttcaaccttcctgggaccaaccttcttatatcacatcttctgaatttttatctccaagatgttgttccatgatactgtcatgattgtcgatacacatcctgacaagactgatcatgattttgtacccatgctattaaagattcctccgatgtttgatccatgtggtggatacaacatcataggctctggtgatatccttcttcctgagctgttggttgctattgcattaacgcatgattgggctgccaagaagacctttcaa

SEQ ID NO: 295541 - DNA, 240 bp, Zea mays
gctacctgaccggcgagttcctctgcgactacagctgggacaccgtgttgctgtacgtttaccctgagactttggcctagaaccgcgagctggaggtgatccactgcctctgggccctgctgttcgcgctcaggggcaactttgcggagatgctcgcccactacggcgtccagttcggaaacgccgcgtggttcaaagacgggttccagatcttcatctaggacggacttgactacctaa

SEQ ID NO: 295542 - DNA, 193 bp, Zea mays
taccgtttcggaattcccgggtgggacccacgcgtccgcccacgcgtccggtcccgctgaagttgtcagtcaagcaggcattgtatgttgcaccggtgatgtcctatgtgcatgggcgtgcgttcattcatatagatcttacatcgcacaacctcctgatttctgctgataaagccattactattgctgactt

SEQ ID NO: 295543 - DNA, 532 bp, Zea mays
  unsure (1)..(532): unsure at all n locations
accggttcggaattncccgggtgcgacgccacgtccgtccgaaccctattgcaaaagaaatttgtttgtatttcctaaatttaatgtgtgnnatgatatcatattgtgggtgctgactaacaagatcgtaatgtgtggagatagtttacgtagggaatcattatatacagnnaaattcgagaatgctcttatgatgcgnngggagctctgaagtnnatttccttaggagtttcaaggtgcaagcaacttccaagaatggcgaccttcatcatgccaaacaanaatacatacaangacataccttaccaagttntggaataaanggatgccaaancccatcaagacacctcatgggaaccaatgtgcatctcgacctcgacacgggagattatatattctacaggtgcataaaggttcaacacaaaccaataaaagattgaagttagggatcaaattcaaaggagcaaagaaaccgagtatgccctagtctggcgcaccggactgttcggtgtgccacccgacattgttcggt

SEQ ID NO: 295544 - DNA, 375 bp, Zea mays
attcccggggggagccaggcgtccgcaagaccgccgcattgctcgaggcctcggttgtgattggggcgatcatcggaggcggcgctgacgagcagatcgagagggtgtggaagtacgcgaggtcgatcgggctgctgttccaggtggtcgacgacatactcgatgtcaccaagtcgtcagaggagctcggcaagacagcggggaaggacctggcaagcgacaaaacgacgtaccctaagctgctggggctagaaaagtcgcgggagttcgcggaggagttgctctctgatgccgtatagcagcttgcttgcttcgacaaggagaaggcagcgcctctgttgcatctggccaactatatcgtccatatgcacaact

SEQ ID NO: 295545 - DNA, 400 bp, Zea mays
ccggttcggaattcccgggtggaggcacgcgtccgccacacctctggcaaggagtacaagctgaaaccaattggtgatgctggccctgtaatggaggcgggagggatctttgcctacgcccggaagacaggaatgattgcgtcgaaagctgctgcatgagggaaaggccttagactgcaggtctgatcaactacggtggttggcgtggtgagagatctgcgagcggtatcgaactagtggattggcagggagaggttgagaggaaatgcactaacttagcagcttttgcgttttgggaggtggatccaccagtgggcagactgcccaaaatgatggattggcagaaagaggttaagaggaaatgcactagcatagcaggttttgcggtttgggaagtgga

SEQ ID NO: 295546 - DNA, 452 bp, Zea mays
gtaccggttcggaattcccgggtggacccacgcgtccggttatttgttctttccgacgaaggttcatggccaccggcgccaagcgcaagaaggtggggggcgccaagcgcgggctcacccccttcttcgcgtttttggctgagtttaggccgcaatacctggagaagcaccctgagctcaagggcgtaaaggaggtaagttgcttcttctcaccctacgcatgtagctgggtttcgcttaggtggctggtatatgcctttgctcgtcggtgactttgcttataggtgagcaaagcggctggggagaagtggcgctctatgtcggatgacgataatgcgaaatatggcggtagcaagaaacaggatggctaagcaagctagaaggagaacactagctgcaagaaggccatagctgatgttcgggaaggagatgacacacaatgttctaacaag

SEQ ID NO: 295547 - DNA, 428 bp, Zea mays
  unsure (1)..(428): unsure at all n locations
cccacgcgtccgcatcatcaagatcttgacaaattctctcgatgttctgaaatcaaattacgtgcgtcgtcagaatctcagaactgcagaaacatatacgcctctcttttttttctctctatctctctctctctctctttattagaacgcgcctgattccatcagggctggtcgcgttgcaggtgcctccgttcctgatctgcaagatgttcacgcaagtcttctcgtttatcaatgtgcagctttttaacagccttctgctgcggcgtgagtgctgctcgttcagtaacggagagtacgtgaaggctgggctggatgagctagagcattggtgcttttggctgactgaagagtacgcaggatctgcatgggacgagctgaagcatatcangcaagcagttaccctcttgatacttgacgacaagcat

SEQ ID NO: 295548 - DNA, 436 bp, Zea mays
ccacgcgtccgcagagccccagctactgcagtgcccctgaagatttcatcgtcgacaactgcaagaacatctactttgctgggcatgaaactacagcggtcactgccacctggtgcctgatgctccttgctgcacacccagactggcaggaccgtgctcgggctgagattcgagaagtgtgctgtggacagacagcgatggacatcgacgtccttcgtcagctgaaaatacttacaatggtgatacaagagactctccggctgtaccctccagcatcactgatcatgcgtgaggccctgacaggcatcaggctcggtggagtcgacgtccctcgcggcaccatcatccaagtagccatttcattgctgcaccttgacatggaagcctggggtccagacgctaacgagtttcgtccagaccggttcgcgaacggagc

SEQ ID NO: 295549 - DNA, 401 bp, Zea mays
gcacagcaggtttggttgcggaaaatgggaggagccaagcctgtagtgagtgagggggataggaggataattacagcaggacgagcaaaacgctctaatgctcaaccagctggagaaaggtttaggcagctaaaagaagaggagagcatgagaaaagtcaacaaagcactcgctgcaggagactcaaatgcatcgtcatcaacgtatgacatggaggatgaagagtcggatgacgagaccacagaagagggagggcccgtggaggaagcatccagtactggcagtgacaagaagcctccaagttactcagggaagaagggcaaaagatccaagaggaagcgcatggtgcagtgatcgtcacagctcaatcggatgcgattttcgccacaactggttgattc

SEQ ID NO: 295550 - DNA, 433 bp, Zea mays
  unsure (1)..(433): unsure at all n locations
ggcgtgtggaagaacacggaggacgagatcctcaaggcggccgtgatgaagtacggcaagagaccagtgggcgcgcatctcgtcgctgctcgtccgcaagtccgccaagcagtgcaaggcccgctggtatgagtggctcgatccgtccatcaagaagaccgagtggacaagggaggaggatgagaaattacttcatcttgctaaactcatgcctactcagtggaggacaattgcacctattgtaggtcgaacaccatctcagtgtcttgaacgttatgaaaagctgcttgacgccgcatgtgcaaaggatgaaaattatgaggctaatgatgatcctaggaagctgcggcctggcgagattgacccaaaccctgagtcaaagcccgcacgtnctgatcctgttgatatggatgaagatgaaaaagaaatgctt

SEQ ID NO: 295551 - DNA, 413 bp, Zea mays
cccacgcgtccgcccacgcgtccgcccacgcgtccgcgctcctgccctctgcctggtggacacgctcgccctagcccccagcgtcgaccgcccctgctcccttctgcagcctcaactccctcacggctgctcccatgacctttcccatccatggccatcacccatctgaagtcgtggagcacgccatggcctccaatgtcgtcagtctccggagcgccgcgtggccgctgctctaccatttcctggtagattggaccggaacagactaacggagcggagttctgctattaatcattataggtacgctagatgattatgcgatatgaagggcatgaaccagactgaaccacaagatggatgatctgacccagtgccaggatgagagatgctcaccgagtggtcctcgttttgac

SEQ ID NO: 295552 - DNA, 375 bp, Zea mays
cggacgcgtgggggcgcatcggcgacgacggcgttgcgccctggtccatctaccgaactcgcctacccgcggtcctcgtcgttcacaggcggcgcgccctcgtccaggtccagtcgtcctcgttcacgaaggcggcctcgtccagcctactgttccttctgctacaaattcatagtcactgatggggaaggcaaagcgtgcctcgatcttcatcaggctggtttctgcagccggcactggattcttctacgtgaagcgcaagaatcctcgtcgcatcaccgagaagcttgagtttagaaagtatgatccccgtgtgaacaagcatgttctggttaccgaagcgaagatgaagtgagatcttggttcttcacaatg

SEQ ID NO: 295553 - DNA, 416 bp, Zea mays
cccacgcgtccgcccacgcgtccggctcgacatgttcatttactagttagaaaggagcagctacgggcttccaaagctatgcaggacagagtactcaacaaccccaacataacagtacatttcaatacagaagccatggatgttgttagcaatgacaaagggcagatgtctggcgttcatctgaagagaagagatacaggagaagaatcagttcttactgtgaaaggtctattttatggcataggacatactccaaacagtcagctgttgcagggccaaatcgaacttgatagtgctggctatattttagttaaagagggctcagccaaaacttcagttgatggtgtattcgctgctggtgatgttcaagatcatgaatggagaccagctattactggagctggatctggatgcat

SEQ ID NO: 295554 - DNA, 379 bp, Zea mays
atttccagcgaggctctagctggtactcgggcaagagggaagacaagggcagatgagtttcaaatcggtcaggatttgcttctaagtagcaaagaggacatcgaattcactatagtacgggacagcatcaagaacaagctggagatgatctgtgatgaggtggttgtccatcccagcaaggctctgcggaaacttccaagagtccagcatctgtcagcgcagttagctgcgcgaataaggaacgaagatgatgagtttgagattctaaacaccctccatccgagtccagctgtttgtggcttgcccactgaagaggcacgccaattcatacgggattgtgaaatttttgaccgtggaatgtatgccggtcctggtggct

SEQ ID NO: 295555 - DNA, 379 bp, Zea mays
attcccggtccgacccacgcgtgcgggcacgcattcaaatgtttacagatctaattgcactagctttccatctaaccactttcagagactatcagtggttatcaggtcctacctaaatgctgaaatactttctacagatgacactcatacaattctagaccatgatctactatacatgaatgatgacttgacaaacatgctttaaggcacttctcaaatctcgccatcttaaaagctgcttgacaatatatcaaaagctccagaacaaacttctgctgactgatatttcaggactcaacactctctacataaagatgactaggatcttgctccagaatcactttaacagcctaaatcatattctgactatgcaagctcc

SEQ ID NO: 295556 - DNA, 247 bp, Zea mays
gccacgcgtgcggccacgcgtccgcggacgcatagtgcgggcgaggtgcctgcccggcgacggcatcctcacggtgtccgagaagaggcacccggacttcaaacggatgggcgacgacctggtgctcaaggccgaggtgccgctgatggacgcgctcactgactgcgccttatcgatccgactactatgcggatggaaggtgagctgctcaatcccagacgaggtcgtgcggacctgctacgagaag

SEQ ID NO: 295557 - DNA, 365 bp, Zea mays
cggacgcgtgggctccgtgataggcaactcgctgcgcaatttcatgaaatgcctctggatcttaagatgatccgagcagaaaaagctggatttgaaatcctgaaatctacaacggtagataaactccccaatgatcttgaaggaatcgcttactgaatggagaagctctacattcttattgatgagatctacagatacctggatgatgctggacaaagacgcgcggcacctgatcacaaaatcgaacggctgctatctcaatcctgtgcttcaatgccaagattcgccccaggtgctgacgatcagcttttaaatgacaagattcaggataaccttgcgctagtatacctgtcaagcatcacaag

SEQ ID NO: 295558 - DNA, 446 bp, Zea mays
tgccgtaccggtccggaattcccgggcaaccccgtctgcctctgcgagctcctctccggcgccgccgactcctacggcatcgccgtcgactacggccgcgcgctcgcgctccccggggtctgccgcgtcgccacaccgtccgtctccacccggaccggctgatcgaggtgaaggtcacggcggacaacagcagctgcatccgctccatctccttcatctacatcggagccgatggcaaaccgtacgaggaggggccatggggtttcggccatgctggcacggagtacaagattgatctgtgcaggttcgacgagagcttgacggagatctccgggaccacgggcccagcctacaacattgacaatctggtcaagtctctcaaatttgtcagcaacaaacgtacttacggaccgtacggcagggacgagggcaccccgttccgtgtc

SEQ ID NO: 295559 - DNA, 426 bp, Zea mays
cccacgcgtccgcccacgcgttcgcccacgcgtccgcccacgcgttcggtccagaagagcaagatcttctatatcctatggtccccatactccgccaaggtgaagagcaagatgctttatgcaagctcaaaccagaaattcaagagtggcctcaatggcattcaagttgaactccaagccacagatgcgagtgaaatcagcctcgatgagatcaaggatcgggcacgctaggcgcaccgacatcgcgagtttcatggtcacgcatcatggactcgcctactactgcggatttgtacgccattatagactaggtgctgctaaagactgctgtggtgatttgtgggacagatgctgcgtaaaaagatcctcatggctttcagatgaccatgaaaggttggatctatcatgtaatttcatgttatctgc

SEQ ID NO: 295560 - DNA, 392 bp, Zea mays
gccacgctgaggatgcatacaagaagatccgttccggagctacacttgttcaactttatactgctcttgcataccgtggtccagctcttatacccagaataaaggctgagctagcagaatgtttggaaagagacggattcaaatctgtgcaggaagcagtcggcgctgatttccgatgatccctggcggatcgctgacaaggtctgaataaccgttccggtaaagttcatgtgattttgatgagaagcaagcaactctttttttgtgtgtgtgggcacgatgcttgccaattccatttgaccggtacttgaaaagaaataccgggttgaaactttgctgggggtgagttgagtaatgagcggctgtatcacgcgcgcgtacatgagcttttg

SEQ ID NO: 295561 - DNA, 373 bp, Zea mays
cccacgcgtccgcccacgcgtccgcggacgcgtgggactggagctgctgaagaagaacggagacatgacctttggcgagggagcaggggccgtcttatcccgttggaaaaccacgtgatgtttggagtaactcaacttgcaatattaggatagatagataagggccctatcctacacgtgtctactgaggttatacatgcttaaaaaacggttaagcttaccatcatgattgaggaccctagagatatagaaagaaagagaacactcgggatagaggatcctgatgaaattactagggatgatttagctgacgctttggctgaggttaacgaaagaaagattccagagaatcgtgttgcacttcagttgcttg

SEQ ID NO: 295562 - DNA, 422 bp, Zea mays
cccacgcgtccgcccacgcgtccgcccacgcgtgcggtcttgccaatgcagggggtggggaggccctgagattagaagacctggaaactttcagacctgaagaagggatgatccttgctaatgcaacatcattggggatgtacccaaatgttgatggtactcctattccaaagaaagccttgggtttctatgatgtggtatttgatgccgtatatgccccaaaagttactcggcttcttcgagaagcagaagaatgtggagttaaagttgttagtggtgtggaaatgtttattagacaagccatgggtcaatttgagcatttcaccggtggtatagaagctcctgaaagcctgatgcgtgagatagcagcaaaatacacctagcaggctaatggcgaaaacctatctttgatgaatatttgc

SEQ ID NO: 295563 - DNA, 286 bp, Zea mays
ccggctcgacccactcgtgcgacgcaaccttcacctacaccagaaaaatcttcagttcttttgtccgcgtcagagaagccgggccgatgggggggctccgcaaaggccgcaagggtctgggcaacggcggcactaaacatcacccgaaggggcttcttgacaacatccagggcatcaccaagcctgcgattcggaagctgtcttagatgggtggcctgaatcgcatctcggggctcatctacgaggagacccccggcgttctctaaatctttctcgataacctcat

SEQ ID NO: 295564 - DNA, 355 bp, Zea mays
gctcgaaccactcgtccgtgctcgacttcgtccccgatccagatccagggtggaatagggaacggccatacaccatggcggatttctccaagctgagataacattgtttgatggttatattgtcgtttacaagtttgtacatgaccttcacttttttgtcaccgctggagatgatgagaatgagctcatcttagcaagtgtactacatggtttttctgattctgttggtcttctactcaggggtgatgttgagaagcggactgcgcttgagaacttggatttgatacttctctgcattgatgaaattgtagatgggggaatcatcctggaaacagatgcaaacaccattgctggt

SEQ ID NO: 295565 - DNA, 232 bp, Zea mays
agtccatctactgccgtcttgtccctgaccccaagattacgatctactatgttagcatgaatagaaagggtgttgatgagttcccctactgtgttcaccttgtctcttgggagaaggagaatgtctcctgtgactctcttgagactgcccttattgactgcaacaactacatgaccaattctgcaggaaatgatgccttccaccttcaccttccggttcaccccttgaatgt

SEQ ID NO: 295566 - DNA, 377 bp, Zea mays
  unsure (1)..(377): unsure at all n locations
gcaaagacaaatccttagaattattgtatatgcctnctcgccataatcagtgcaaaagcgtactcaagccagcgaatagatgagttgaacaataagagagcaacaagaaaaggattccttttttttatgatgacagaagaaggaatgcaacccaacatgacgttcatcatgtcacctcttccttatttaagggatgtttagtagcagatggaacgatcaaaagaactcaaatgccaatcatccatggagaaggatgtggtcatgtcatgtgagagcgacatttgctgcagcacaaaaatgatccgagcgggaccaaacatattctaggcagaatcgtatcaccaccagcaccgaagcttggatagcgcctggatata

SEQ ID NO: 295567 - DNA, 442 bp, Zea mays
gtccggaattcccgggctgaggcacatcgtgcacagagcgtaccatgctctcgaactggtggctgacgtgccgggccacatccacgccgatggctcccacgctggtaatctgctatgaccgggttacgacaccgaacgcttcctctggggctcctactgctccttgcgcatctactacgatccttccccctccgacggcggcagcgagatccggtgggacgggccctacgcgctcgagcggcaagagccgtatatctggccatgcccgtgcttagccatggaggtcaacgtcagcagggacctcctgatctggctgtgcgagtggatcacactacagcgactgaccgggctcgagaccgtcgatggcggatgtatccatacaaaggggaccaacgtgtttgcttgggacgagcagctgggctctctagacgacagtcgacag

SEQ ID NO: 295568 - DNA, 425 bp, Zea mays
gcgcatcaagggtgtggaggattacatcatgtctataaagccagaactgatagtacaagtggagcctattgaggacccttatggcccattcataactgatgataagttggatgccattattgacagtaaggatacattaaatggtggactggctgcaaataggaaaagagaagagaaagggttcccactgttgaaggatgaggttgatgatctcctttacggcggcgaggagggggaaaaattgactacttctgctttaaggaaacttgaggcataacaagctcaacagagtgatacataatctggtagcctcgaagctttttagggaggaaattgaatacttcgatctggctagctgaatgcacatatactggggcgatctgctacaagctcagtgtgaacaatgaatgtgatcaggagctgac

SEQ ID NO: 295569 - DNA, 394 bp, Zea mays
gctgcaccatctgcgaaaagatcagcggcctcggctgtttctcagacccaacattacgtgatgctaaatgctccttaagtgcctcttgaccaccacttcacgctcaagtgtgcatcatactacatgatatcaccgcgaaagttcaattcagatcacctcttgctgtacgcattgacacactcttgaatgaacatgatgtgggggctacctataaaacatgccgtcaaagctgtcattgaaagtctcgctaccatggcccatctgatagaacaagacgcccttactcgggacttcgtggaatctgacgatgccagtgtggatatctacgatctcaatcgagtgcctgtactgatcaacgaccacgttgacgttgctatggcatgctactcatata

SEQ ID NO: 295570 - DNA, 384 bp, Zea mays
taccggaccggaattcccggcggcgacgccacgcgtccagtcctgcgcgcggagccttcatggccaaccacttctgacctaccactactgccgtaagggagggctcagatacggataccaccagccttattgggaagcccctactttgtcacggtaccgaacatggcttgtgtctctaagaggacctcacacccgttatgctcagccatgatggagacgtccaagaagtctttgaacataacacctgaagctgtccagatcactcgtaggttgaatgaaaacatataatgctaatatacgccctgtaagacactggagcctattactgaggtcagcaatgatcctgttctaggggttgacgctgacaacgtccacgacttccgc

SEQ ID NO: 295571 - DNA, 438 bp, Zea mays
gaggcggtgtcgctcatcgcgcaccggctgggccggatggacccgccgctgcggcgggagtgcatcgagcacctctgcgaggcgcactcgcaccggtggagcatgcgccgcagcaaggcccacttcttccgcctcatggcggcgctggcgcccctgttcacggggctcaggtggttcgtcgacgtctgtcactggaagaacccgtccaccaccgtcgcggtccacatcatctacgccatgctggtgtgctgccccaacctcatcatgcccaccttcttcatgtacaagttcctcatcggcctctggaactaccggcgccggccgaggcacccgtggcacgtcgacaccaaggtgtcgcacgccgagatggcgcacctggacgagctggacgaggagttcgacgacttcccgacggcgcgtcgtcccgaggtgatccgc

SEQ ID NO: 295572 - DNA, 412 bp, Zea mays
  unsure (1)..(412): unsure at all n locations
acggctgcgacgtggggccggacgggcgcctcctccgcgggtatgaccagtacgcctgcgacggcaaggattacatcgccctgaacgaggacctgagctcctggaccgcggcggacaccgcggctcagatcacccagcgcaagtgggaggcggcccgtgtggcggagcaggacagagcctacctggagggcctgtgcgtggagtcgctccgcagatacctggagaacgggaaggagacgctgcagcgcgcggaccccccaaagacacatgtgacccaccaccccatctctgaccatgaggtcaccctgaggtgctgggccctgngcttctaccctgcggagatcacactgacctggcagcgggatggcgaggaccaaactcaggacaccgagcttgtggagaccagaccagc

SEQ ID NO: 295573 - DNA, 399 bp, Zea mays
taccggtctcggaattcccggatggacgcactcgtacgcccacgcgtgcgcgaaaaccctgctaaacttatgtatctgccaaaccaacgcagcgcacgaaccgtccttcacgatatcaggacaccacacttaaactactcggatatgctatgtcaatgcaatggactgtccattacattaggaagtacatgcgaatcttgcactactctaactgatccatctgtgcacttacaatcacgacccatatcatagtcacttcattatgacacattacctgaatgcactaatataaaccatctatgaacaatatgaccacgttaccaactttcgcaagataagagcacccgaatctaacttcgcgcaatatctatgatacaagctcaccctctcatacattca

SEQ ID NO: 295574 - DNA, 441 bp, Zea mays
  unsure (1)..(441): unsure at all n locations
cccacgcgttcgggcgtcatcgcagggcggttgtcggggcgccggtggaaggagccccggaccgggcggtcgtcggccgtggcggtgtctcggaagccgatcccgctggaacagcgcgttcgggagaagtctctgaagcgcgcgtaccaggcccgcaaggcggagctcaaggaggagatccggcagaacaaggttgcgaagcggaaggcccgcgaggagcgggagaagcggaagcaggagaacgtgctccgcacgggcaccaagctgcagcgggtcaccaacccgaagacgatccagaagatcgccaagtccaagaagcgcangcagctcaaggtcgtcccctacgagttcttcggcggcnagaggtcggaggccatccggcgcatgcaggtgcctggacttgagaattgaatctcaattctcaatctctggttctggggt

SEQ ID NO: 295575 - DNA, 272 bp, Zea mays
ggaattcccgggtcgacccaggcgtccgcccacgcgtccgacggcgcacaaggagcagctggaggcccgcgtcgcgcgcatgaaggaggacccggcgctcaagcccattctcgacgagatcgagtccggcggccccgccgccatgatgaagtactggaacgaccctgaggctctgcagaagttcggccgcgcgatgggcgtcggcttctgcccgttcggcaaggcctgcttgctcatagcacgcctattctgtttcgactctcggataggat

SEQ ID NO: 295576 - DNA, 443 bp, Zea mays
ctccgtccaaggctaaatacaggcgagagaccgatagcgaacaagtaccgcgagggaaagatgaaaaggactttgaaaagagttatggggagtgccaaaaaaaaaaaaaaaaaaaaaaaaaaaaaaaaaaaaaaaaaaaaaaaaaaaaaaaaaaaaaaaaaaaaaaaaaaaaaaaaaaataaaaaaaaaaaaaaaaggggggccctttttaaaggaccaaagttaacttcccggtcattggaaagtaaaacttttttaaaagggcacctaaattcaattaaatggccctccatttaaaaacatgtaaattggaaaacccttggtgtacccaaattaaacgcctttgaaaaaaatccccttttcccaaattggattattaccaaaaaggcccaaacgaatggcctttcaaaaaagtggccaaccttaaatggaaaatggacccc

SEQ ID NO: 295577 - DNA, 421 bp, Zea mays
gagcttcttaactcatacttacgtgactagcctccagacagacagagataactagggtgagtgcacttgagagacagctgctccctcagccaagtatataaacctaccacggcggttaaatcacattcatgccctcgtgaggctgaccggaattactgcacatgcccaatgtgtgaaggtcgaatcgtcagcaggtccttcagccccaactgcagatgttgctgaagcacatgccccagatgctcaggacgacgactactatgatgttgacctttttggtgaggagaccgtatatcaaaagaatgctgcttaatagcgtgctgtagctgacaaggcttctggcaagaagaaagaatctgggaagtcatcagttctacttgatgtgaatccatgggacgatgagactgacatggccaaactt

SEQ ID NO: 295578 - DNA, 347 bp, Zea mays
cgcaagttcatgaccaaccgactgctgtccctcatacaatttgagcttgaggttatgcacgggggcttcgccaacgtctgcaaggtggagcagaaggataggcttgccaagatgtacgaagcgcatgactccaacaccatcgctgactcaagttactgaccaacttctgtggatgcaagtcgactgagcttcacctcatttactattaccttcagtctgccaagaagatcaagcccaaatatcctgatgatcacgaatggtattgctacgaacgttgagaagatccgaacgcatatgatagtacggatgatcaagaccaagatgatccttggagtgattatgaccaa

SEQ ID NO: 295579 - DNA, 438 bp, Zea mays
gggatctacgggtaccccagggacaagaagagcaagaacggcaagctgcggcttctctacgagtgcgcccccatgagcttcatcgtcgagcaggccggtggcaagggctctgacggccaccagagaattcttgacatcacacctacagagatccaccaaagagtgcctctgtacattgggagcgtggaggaagtggacaaggtggagaaattcctggcttgaatgtccctgcttcatgccagagctctctcatcagatggactccccaagacatcaagtttagggagggaatatgtactctctctttcccaccccatataagtcttcttcgtctcatatttcgataaatcaaacaatcttaattttgacctaatatatacacacaacattaatatttatagtattagaataaaatattactagattgatcatatcata

SEQ ID NO: 295580 - DNA, 270 bp, Zea mays
cccactcgttcggacacacgcgtgctatcgctcggttactcaaggccgccaagtactccgagctgatgatctcctgcgtccctggctacatcgccgctttcctcgagtacctcatcgctgaggtcctggagcttgctggaaactcaactagggataacaacaatacccgcatcgtgccgcgtcacatacagctctccgtgcgcaacgactacgagctgaccaagctgctttgaggtgccaccatcactagacgctgcattatgcccaaca

SEQ ID NO: 295581 - DNA, 338 bp, Zea mays
caccagcgtcgtacaacaggagggagaaaggcttggcgtgccgtctcggtgggagctcggcttggccgccgtatcggcctcgaagacccattttggggaaagggtagaccttggggaaacacgcggaggcaccttcgagctttgggatcacctgctgttgccttaattgctcaccggagccaatagttgctgcggtgccagcttgatccgtgggccggtgacgccgctgctccatcaaagctgggaggtaacgagaatttgaagatcatgctggtacctggaatctcgagtcccaggtcatgaacaggtatcgcatgaagaggcgcatggaggatgct

SEQ ID NO: 295582 - DNA, 362 bp, Zea mays
cccacgcgtccggatctacctaccacggcatcatcatgaactaccctgatcagattgacggtatcggtgcactagatcaggactgccgcacctcacacatagatgtcaagccagctgaactcgttaccaagattgatctgcgatccgtcaaggagctggagaaagagcccaaatttctcaggagctgcgatgctggtatggtgaagatagttcacactaagcccatgatggtggagacctaatctcagtatactcctttagttcaatttagctgccatgacatgatgcatactgtgactggcggattcatcaagagtgtagaaaagaatgacgcaactggatccaaggtgacgaaagctgct

SEQ ID NO: 295583 - DNA, 314 bp, Zea mays
aatacccgggccgacgcacgcgtccgccctgttgctgcaaatctttctcttaattttgcatctccgacaattgcggcactggctcgatccaatattatgggcacccagctcaacttcacggactcctaccgctactccaccgcagcgcccaccgcagcagctcataagattgtctcccttttcagcaagaagcctgcccataatcccaagcccgcttctgtatcttcctcttctacagacatcatctacgagctctccaagtgagtatggtcctgacaggaagatctaccttcctgatgggctgttgcaccttt

SEQ ID NO: 295584 - DNA, 319 bp, Zea mays
  unsure (1)..(319): unsure at all n locations
tcccgggtcgaccgacgcgtccgnccacgcgttcgnccactcgtncgtccactcttncgnccacgcgtccgccaacgtgttctgcaagcccaaggcgagcacggagtacatcgcgtacagcggcgacggcttcaagctgctgatcccgtccaagtggaaccccagcaaggagcgggagttccccgggcaggtgctccgctacgaggacaacttcgacgccaacagcaacgtgtccgtcatcatccagcccacgtccaagaagaccatcgccgactacggctctcccgaggagttcctctcccaggtcgactacctgctc

SEQ ID NO: 295585 - DNA, 327 bp, Zea mays
acagagctacctgactggcgatttactctgcgactacagctgtgacaccgcggggctgtcggcggaccactagacgttcagccaagaaccgtgatctggatgtgatccactatggctgggccatgctgggcgcgctcggctgcgtcttccacgagctgatcggccgcaacggcgtcaagttcggcgaggccacgtggttcaagggcggatctcagatcttcaacgagggccgactggactaccttgggaactccagcctcatacacgcgcagagcatccttgctatctgggcctgacaggtcgcgctcatgggctgatgactagggc

SEQ ID NO: 295586 - DNA, 251 bp, Zea mays
gaaggacttaccgtgttttcgcaccagagatttatagaaaatgcggcgagtagaccgtgagacaagtggatgcgtacgtgtgataggcgagatacatcgaaatttggacatgtaacattatcgtgaactgcgcaccgctcgggatactatgatgaaactgacgaagaacatgctcaagttgctacagacactggagatacacttaatggcgctcccagaataaacgcgcttcaaagcgctgaaaaagctag

SEQ ID NO: 295587 - DNA, 340 bp, Zea mays
cccacgcgtgcggtgactgtaagccgctggagtacaagctctcggcctggcacctcataagctgcgggtgcatgtgccaaggccgcgacttcacccgcagaaacggcaccggcggagagtccatctacggctagaagttacccgacgagaagctcgtgcgcaagcacaccgtccccggtgagctatccatggtcaacgccgggcccaacagcaacggctctcagttcttcatctgcaccgtcgcgaccacttggctcgactgtaagcacgtcgtcttcggtcaggtacgctagggcatggacgtcgacaaggccatctagacagtgggcactcgcaacgg

SEQ ID NO: 295588 - DNA, 250 bp, Zea mays
cccacgcgtccgctttaatggcaattctgaatacgctgatcaccttgagcccgttaatggggtggaacctatgaaagctgccggtctactgcaccaccttgagactactgatgagggacaaaaagatctaactaagtcacagatacctgctcacggggcaattggtgcttacaggacagcttattatcaatcccatgcaccggcaggatgtcgcgctctgctctgtcgggataatctgcatacttatcgt

SEQ ID NO: 295589 - DNA, 414 bp, Zea mays
  unsure (1)..(414): unsure at all n locations
cccacgcgtccgcccacgcgtccggtcccgcaccacgcccgcgagcacacggtggtggccggctacgacgtccccgccggtgcgcgcgtgctggtgaacgtgtgggccatcgctcgcgaccccgcgtcatggcctgacgcgcctgacgcgttccggccggagcggttcttgaacggcagctccggcgccagcgtcgacgtgcgcggcgcgcactttgagctgctgccgttcggggccgggcggcggatgtgccccgcgcacggcctcgcgatgaagctggtgaccgctggcgtggcgaacctggtgcacgggttcgcgtggcggctgccggacggtatggcgccggaggatgtgagcatggaagagctatttgggctttccacgcgccggaaggttccgctcgtcgncgtcgcg

SEQ ID NO: 295590 - DNA, 324 bp, Zea mays
gaatacccggctggacgccacgcgtgcgcccgctcgtccgcccacgcgtgcttttctttgccggcgcgcagatcttctcggggggctgtctgatctacctgggggacggcaacctggtgcacgcacagagcatcctggccatctgggcgtgccaggtggtgctcatgggcttcatcgagggctaccgcgtcggccgcggcccgatcaaagaatggctcgacaagttgtacccctacggatccttcgacccgctgggcctcgtctactacctggacaccggcgacgagctcatcatgaatgagctcaagaacggccgccttgcca

SEQ ID NO: 295591 - DNA, 292 bp, Zea mays
agcgccactgtgcagtgcgcgcagcaagcttgcttagctagccgccatagactgcctcgggggcgtaatacataaactcgtggtcatgaagggtactggcgtctgatccatctacggaaggaatctcgtcggcttcagaacgtcacgccgattcatcctgaggcacctctcatacgacgagatggcaatgtcggcgacaagatgcgttactactgacctcgaccacatgcagatcacctgcgcacagtgagacctctacagatctgactcgcccatgggctacaatccgtta

SEQ ID NO: 295592 - DNA, 235 bp, Zea mays
gtggattgctacattccagtgccacagcggtagaccgacctaacgatcttactcgctggggaagatgtcttgttcatcaccggtcctggtacagatgccactggtcgtatcgagcgtgtctacggccatattgctgacacagttgatatcgttgaaatctgggacaccacgcactgctccgtgactggcgtcgaaatgttccagaagaccatggacgataccatggctgtagaca

SEQ ID NO: 295593 - DNA, 449 bp, Zea mays
caagaaccgggagctggaggtgatccactcccgctgggccatgctgggcgcgctcggctgcgtcttcccggagcttctcgcccgcaacggcgtcaagttcggcgaggccgtgtggttcaaggccggctcccagatcttcagcgagggcgggctggactacctcgggaacccgagcctcatccacgcgcagagcatccttgccatctgggcctgccaggtcgtgctcatgggcgccgtcgagggctaccgcatcgccggcggcccgctcggcgaggtcgtcgacccgctctaccccggcggcagcttcgacccgctcggcctcgccgacgaccccgaggccttcgccgagctcaaggtcaaggagctcaagaacggccgcctcgccatgttctccatgttcggattcttcgtccaggccatcgtcaccgggaagggcccgctcgagaacc

SEQ ID NO: 295594 - DNA, 228 bp, Zea mays
cccactcgttcgttcgctctcaacgccgtctagttccgcgaggccacgggggtcaatgggggctctcagaggttcagagagggccttctgaaatacctcgataacccgagcctcattcacgcgcagagcatccttgccatctgggcctaccacttcattctcatccgcgccctccaggctacgccatctccttttacccacatcctcgagctctgctaccaatctacc

SEQ ID NO: 295595 - DNA, 459 bp, Zea mays
accggtccggaattcccgggcagcatgctgcgtcgcatgtatgaaactgttcaagagcctgttctgaatgctacaacaatgggtagcgagggtgagcgaaattcgaatccatttgctgcacttctaggaaatcaggggtctaaccaagcaagagactcatctgcaaatggaacaactacagcttcagacaccacatcaggggctccagctccatatactaatgcacttccgaatccttggggtccaaatgcaagatcccctcctgctaccaacactaggagtactacagcaggtggcccaggagggttgggttcagcagattttggaagtactattggtgccagtggtggtggctatgatgctaccttcttgactcaagttttgcaaaacccaactatgatgcaaatgatgcagtacattatgtctaatcctgagttcatgaatcagctgcttaatatg

SEQ ID NO: 295596 - DNA, 346 bp, Zea mays
cggacagcgtggggctgaaagtacttatcgattcgaacggattccaacatgggttacggatgtcggatgcagacccgcaattgctgcgatgaacctatacctctcctcagcagataatagctctaataatcgctacttctcgattatcaatcctaagaacgcactgtcagacaggaacggtgtctgtaccaaatgcagcacatgccttatgggccaatttcaaagaatacatctctcttatactcgtcacactcgagctttgccaaaacgtgcaggccacgttgcgtcttcgagctgtgtcatgcctgtgactgaagagaacgtggagagagtgctcgacgaagta

SEQ ID NO: 295597 - DNA, 454 bp, Zea mays
cccacgcgtgcgtggacgcttgggtgagatgtgggttggcttctgctcctgcaccggttcgggttcaggttctagatcgaggacgagacggaagagatggctgagtccgacgtctagtaccgctgcttcgttggcggcatcgactgggccaccgtcgaccactccttcaacaactccttcaacacctacggctaggtcatcatgtcgaatatcatgatgcatcggtagactcataggtgctgcggcttctgcttcatgacctactccacgcacgacgcgatgcacagcgtcatcgagggcatgaacggcaaggagctcatcagccgtaacatcaccgataacgaggcccagtcccgaggcggtcgtggaggctgcggtggcggataccgtgacggacgccgttacggaggcggctacggaggtctcggtggaggctacggcggttgtcgtggaa

SEQ ID NO: 295598 - DNA, 353 bp, Zea mays
gatcctctgagggtggactgctgacagacgcagatggacagccgtgatacacacttgtagtgttgggtgagattgagaaagcagcaccctgatgtcttcaacatgatgcttgatagtctgggagatgggagattgactgaccgcaaggtaaggacggtggatttcattaacacacttctgatcatgacctcaaatgtacgaagcagtgtcatcgagaatggtgcacggtagatcggatttcaccattgctctgatgagaatgacagtgagttcagcaggatcatgagcctgcacatggacgagatgaagcattgtctacgacctgaagtccttaaccgtcttgatgagatgat

SEQ ID NO: 295599 - DNA, 464 bp, Zea mays
gccgacacggcggcttactatccagatggcacacatgaaggtaaccctgagcaccatgggccgccgttactccgctggacagctcctcagggtgaacatatacagacaccatctcgccatgcccgcagccatcatcatccgccagcgcagcgccagggtctatcctgaatataacgtcggaatggtcatggatcacacactcttctctttgatagacggactcctcaagttcgagatgtatcggcctatcatgaagaacgtttgtgtttacccatatgagaaggtgcctgataacccatactggtacagagcaaggaatagagagtacttccgcatgcagagtctacggatgaacgcgacatcctaaggcgccgctgatcctgagttgatactagctgctgccgatgaaaactctgaagtcatcgcgtactgttgataagtttcctgtgtggtgcttctctttt

SEQ ID NO: 295600 - DNA, 265 bp, Zea mays
cggaattcccgggtcgacctacgcgtccgaccgctgactatcgatcacatggacgctgtttacagcgccttgatcgagcccgatgactccgtgaaccgcagaggtttgacctacgccaaggacaagctggacgaccacatcacggtgtacgagtggctctacacgcacggtaccaacgaccagacggctctgcatgggctcaagggtgaccccacgtacctgctggtggagcacgacaagacgctgtgtcactacaggatcaacg

SEQ ID NO: 295601 - DNA, 420 bp, Zea mays
gtcaagcttgctgagctagccgccatggtctgcctcgccgccgactccttcaaggccgcggccatcaagggtcttgccggtagctgcatcttcggaaggaagctcgccgacgccaggccgtgcggaccgctgcatgcgcaggccccgcgcagccgccgtggtggccaagtacagtgacaagagcgactactatgacctctgcgacatcagcaacgccaccggacagtgggacctgtacggctctgacgcgccctcgtcctaccacccgctacagagcaagccattcgagacgttcgctgatccgttcaccaagagaggtctgctgctcaagttcctgctgctgggcggcaggctcacttctggcctacgtgagcacgtatgcgataccggaccttctgtcgatcatgaagggacctaagg

SEQ ID NO: 295602 - DNA, 330 bp, Zea mays
agcgactcagcgagcgagagcagcacacactgcacgcagctagctaggagcagcagcagcggcggcgatggcggcctccatgatctcctcgtcagctctggcggtggcgcctcagggcctgccgcccctcggccgccgcgcctcctccttcgccgtcgtctgctccaagaagaagatcaagaccgacaagccctacgggattgggggtggcctgaccgtcgacgtcgacgccaacgggagaaagggcaagggcaagggcgtgtaccagttcggcgacaagtacagcgcgaacgttgactgatacagcccaatctacaacgaggatgactg

SEQ ID NO: 295603 - DNA, 255 bp, Zea mays
tccgattgacccacgcgtctttttactcgtgcagttgtgcatgctccgactctagttgacattgtaatgacatgcaaccgtggaccatggaattgcacgcaggttgaccaacaccttcacatctgctttgcctcatgtccacaggtatttatccaccatggataaccagcctaacttcaagaaactcattggtgaagtcaagcagtcagagtaaagacctgatataccccaaggagctcctcgttgtaacgatcc

SEQ ID NO: 295604 - DNA, 310 bp, Zea mays
ttcttttctggtattctttctgcaagaattctctgtgatctacctactacctgcttagtgagcttgggttcttctaatggcggggcgagctgcttactcttggcttattcaattgttcaactagtaccgcaaaattgttaattctacggctgtctatgattgagaaacctggcgctcacgaagattccgttttgtaaccattgtgtctaatgaggaacttgactaccctatctctgccctggattgacaagaattggaccggcggcctcttcgggtgaacctttcatcaaaacgaccacagaagggcttt

SEQ ID NO: 295605 - DNA, 213 bp, Zea mays
gccacgcgtccgccgacgcggccgtccacgcgtccgaggaaacgtgtgactgcacacatagtcctggctgggctaggctccaccatggtcgacacaagcatggtgctcgagctacttcatctggtctcagaataaatctggttttgtcgtgccggaactgtgagctcacagagatgaacaaataccataacgatgttgctagctgatgtggtg

SEQ ID NO: 295606 - DNA, 303 bp, Zea mays
gcccgcgacgcctgctgaaaggggaccgctactggggacaaccggatcgcggacagaagctagttgctgctgtaccggttggtgcgccaggagctcggctgcatgttcctcagcggctagaagctctaattcaactaggagtagtgcaacatggcgtttatctgcatcagccacggctggcttgatgaacccatgctggagtggctaatggagtgagacagctagccgatgcccagcagcatcagcttgtagacgctatgagtcagcatgcattctgacagcctggcatggactgacgacgag

SEQ ID NO: 295607 - DNA, 363 bp, Zea mays
cggtccggaatttcccggttggaccaaggcttccgccgggttttccaacgttacttaagccgttagtttggaactccgccagtccccaacagcaggggagcttgaactacggccgcggcccttggcgattttcttaagcggcaaacagggccaacaaaatccggcccttgcaatggagtccgtggggaacccgaaggcatacccgctggctgatgcgcagctgacgatggggtatctcgatatcattcagcaggccgccaactacaaacagcttaagaagggagcgaatgaagcgacgaagaccctgaataggggcatatcggagtttgtagtgatggcggcggacacagagcctctcgagat

SEQ ID NO: 295608 - DNA, 297 bp, Zea mays
tcccgggtcgacgccacgcgtccgcggacacgtgggcactcaggctgaccccagattctcctgtacctcagtttcaagggcgatggtcaccattgacctgtccgaggacgacgtcatcaccctccgctaagaggttgacacgtacatgatcgatgcagaccttcaaccttgcacccatgtggcgattgagaggctctatgatattatgtgctacatgggcattcagctctagcttggactcccagctcggggcccgaggacaatgctcaactgcctgacactttaaggaacgagggc

SEQ ID NO: 295609 - DNA, 419 bp, Zea mays
cccacccgtccaattgggaacaggggattggaataacttgagggcattccaaaaaggcctgtgagggagggattcaagctggaacgaaaaccccttctttaaaaaacttctattgggctttaaaaacttgctacaagcgtaatggggtgcccgcattgattgctgaagtcaagaaagcatccccgagtaggggtgtgctcaaggagaactttaatcctgttgaaattgctcaagcttatgaaaagaatggagctgcatgtttgagcattttgacagatgagaagtactttcaaggaagctttgataatcttgaaaaggtgcgcagctcaagagtgaagtgccctcttctctgcaaggagtttgtcattgacaagtggcaaatctataatgctcgctctaagggtgctgatgcattttac

SEQ ID NO: 295610 - DNA, 356 bp, Zea mays
gcgagtgcggcttctgcgcgtctggcgccggcaggctcctcccgggcgcgtgcctggtgtgcaacaacacggtgcgcgacgcgtgccacggcgagggccggctgtggtacacccgcgggtgcccgagccggtacggctggctggcgctgctgggcctggcgctctacatcttcttcttctcccccggcatgggcaccgtgccgtggatcgtcaactcggagatctacccgctgcggtaccgcggcgtgtgcggcggcgcggcggccaccgccaactgggtgtccaacctggccgtggcgcagtcgttcctgtcgctgacggaggccatcgggacgtcgtggacgttcctcatcttc

SEQ ID NO: 295611 - DNA, 194 bp, Zea mays
cccacgcgttctcccacgcgtccgcggacgcgtgggagaaactccaaaggaggcccggaagccaaaggtggttgaggtaccagcaaaagaagaagcaccaaagcctaatccaaagaattcttttgacttgctgccaccaatcaagatggtgcttgatgactggaagaagctatactcaaacacaaagaccaact

SEQ ID NO: 295612 - DNA, 245 bp, Zea mays
attgctctctggcgactgtagattccgtataccatgatgaagcctgcttgctttgagaccatcggggagctgatctacaagcatgctgtgcctgtaccaaagtctgactgctacacgactacccagttggcgattaactgagctggtggttacattgcgaggagtattgtgagctattgattataacccgggtgacaacctcgggtatgtgatgaacaatgccgagggagctacagggtgagatg

SEQ ID NO: 295613 - DNA, 428 bp, Zea mays
ggtgatttagacaggaggagatctctttcaggttatgtttttactattggagattgtgcggtgaggtggaaagctcgtttacaggatactgttgctttgtctaccacagaagctgagtatatggcaattgcagaagttactaaggaagccttatggttgaaaggtatatattcagaactatgtggaattaagtcttgcattaccatctattgtgatagccagagtgccattcatctcaccaaagatcagatgattactgagaaatccaaacatattgatattcgctatcacttcattcgtgatatcattgaaaaagggttggtaaaggtatgcaagatcagtactgataataatccagctgatatgatgacgaagcatgtttctgttgctaagtttgagctatgctcaaacttagttggtattataaa

SEQ ID NO: 295614 - DNA, 353 bp, Zea mays
gcgagtacgtcgtgataactcgaccctatggacttctgacatctggtaggaccctgatgaatagatgagggaggaacccaagcgctactctagtgaggggcaagtaagccggctattatgtgcctagagactagtctctagagcttgatgctgatgaatgacactatgcattgagatctggaacctggtgtattgggtgcaaagcttgctatgactggcggcagtaaaatatgtaggcttcccgaatgagatgctgtctatcaacgcgctggggttctagctcgattgacacgctgggcgctggagaccgtactgtaacagttgctaagcactatatactgcagtcaattgca

SEQ ID NO: 295615 - DNA, 354 bp, Zea mays
cccacgcgtccgcccacgcgtccgcccacgcgtccgccctgctttctccgctaggccgctcggcttctcgcttcgtctcaagccgtcgcctgccatggccgccgccggcgtcggcggcaacggcccccctaccgcacatggagactcaataggatcttctaggattggagaggttaagagggtgaccaaagagacaaatgtgcacgtgaagatcaaccttgatggcactggtgtcgccgagtgtagcacagggataccgttcttggatcacatgctcgatcagttggcatcacatggactctttgatgtctacgttaaagcaacaggcgacacccatattgatgatcatcactc

SEQ ID NO: 295616 - DNA, 293 bp, Zea mays
cccacgcgtacggcgctatactttgtcttagatggcatagagaaccggacaacggatttgtcggacatgctgacatcccaagagtctatagccgcaccaatgactaacctgtatctaacataccaggataaaggtcttgtctatcatgcaaagggcttcttcagtgcaccttacgtgtgctggatgcatagagtgtacggacactacatactctatgtactatacgtctgtctgattcagacgcaagctattgtgatcaacgccacatacgcacattacctgactatgactca

SEQ ID NO: 295617 - DNA, 387 bp, Zea mays
  unsure (1)..(387): unsure at all n locations
tttttgattaagcaaaacaaggttactggacaaatatgcgtagctcaacattggaaaaatagaagcgcgcacacacagaaaaagggcggcccggacgcgtgggcggacatcgattattngatatgcttnacttgcactcttttnttggacacacagcttgaggtcacatacttcaaccatggaggcatccttccctacatggtccgtaacctgtcagcacagatgaaataatgtaaaaagcaagctagcttattggcgcggtgggaataaattaaaaaggtactcagtgccccacgtatttgacgtatgtctgtaaataagtggcacattcgagcgctcttcgctctgccattgaggtggatcgaatctgccacatattttcttcgt

SEQ ID NO: 295618 - DNA, 326 bp, Zea mays
cggaattctccgggtcgaacccacgccgtccgcccacgccgtccgaaaaaaaaaaaataaaaacaaactagaacaaaaactacaataactaaaccgaaaagcaaaactacccaaacagcaaagaacttacacccgctcaagactaaacgacaccgtcaaggacagcgtactacatccccgacgtcgacaagctcgagcggatcaagctagccgagatcaatcacgcgcgcatagccatgcttgccatgctcgccttctactttgaggctctacagggcacgacgccgatatacgcgctcggcctatgaaaagcatgctaccgggaa

SEQ ID NO: 295619 - DNA, 327 bp, Zea mays
ccgaaacctggtgcacgcacacagcatgctggccatctgggcgtgccaggtggtgctcatgggctgagccgagggctaccgggtccgacgctgctcgctcgattaagggctcgaccaggtatacaccggacgcgccttagagccgttgtgccgagactgcgacccggacaccggcggcgagctcaaggtgaaagagctcaagaacggccgccatgtcatgtaattcatgatcggcatgttcacacacgccattgagagctacaaggaccatatcgagaacctctccgaacacgtcgcctacccagtatcctacaacgcctgggcata

SEQ ID NO: 295620 - DNA, 432 bp, Zea mays
gtcgccgagttcgagaacgtctacaactcgctcacgggcaccgaggtcgccaccgtcacctccgtcgtgcagctcgagtcgcaggacctggcgcagatcgcgcagcacgtccagaagatgaccggcgcccagaacgtccgcatcaagacgcagctcgacccggagctcatcgccggcttcaccgtgcagtacggccgcgacggctccagcttaatcgacatgagcgtccggaagcagatcgaggagatcgcgtccgagttcgagttgcccgccgtcccgctcgaagtctgaccggcccgaggcgtcctctatcctcgcccatgagatgctttggtgcttcctgctgcctctctccctgctcttcatgtgtaccattctctgattgaatatttgagtgaatggtgaatactgcatacctggatttcaggattc

SEQ ID NO: 295621 - DNA, 390 bp, Zea mays
cgcacacgttcgcgccaaccatatcgctgtggcgacgactcacacgcaggaccacgcggggagcgacaagtactgcgtgtggtacgcgctggacttcgtcgacggcgagctcaaagaggagatgtttgctattcgctttggatctgtcaagaattgcgagactttcaaggacactgctgaacagatagctgagcaccaaggaaagagcgatgataaagaatatgatgaagtctccactgccgcttatgatttgacacagaagttaacagtggcagagcccagcgcggaggaaaatgcagataatgaggacgctgatgcatacgatgataagaaggatgctaaagagtgaaagttgaatgcaatcaatggtcaaatggatgccattccatt

SEQ ID NO: 295622 - DNA, 416 bp, Zea mays
cccacgcgtccgctcttgataatattaatgtggtgcctttaacaacagagtcagaagtaggccacaatgagcattcaaatgaagcacctacaaaaacttttgcagaagagacagccaaactacctaatacttttaagacaccagaggccaacaatgaaagcacacatagaaatatggaagtgcttgtagacaagcctgaggagaaagttgttgtcaatgcgtctaatcttggtaattttgttgggaagcctgtgttccaagcagagcgcatatacaatcagactcctgtcggagtggtcatgggtttagcttggaatgctatgggtggttcgaccttgtacattgagacagcaaaagtagaggaaagcaaaggcaagggaacactttttgtgacaagccagcttggcgatgtcatg

SEQ ID NO: 295623 - DNA, 376 bp, Zea mays
gccacacctcctgtctcaatctgacaccttacatccgttgctcggtgagtcgtggccaggcgcacacatggcctatgtcgagcttgcctgcacctgctcggctctcattctcagcgaccatggcatcgacatcacggtcggcaagatcggcacgagcgataaggctgtcaacatcaatgtcgagtactactgaccgggactgtttgacaagctactgaataagcgcaacgtcgatgacacaatcctgtccgttggagctgagggctaaactgctacagttgctgatgccgaaactgatagcagtgctgatgctgcagctgatcaagctgtcaagaataaaaaggaatatgtcatcgaagagtcagatgactacatg

SEQ ID NO: 295624 - DNA, 356 bp, Zea mays
gtctgactgcaaacatgcacagcgacactgtagcgatccctatgtgtgaaggagctgcgactgcaaagtctgcgtgtaatgcacctgaactgaccaatatttacatatttgccagtgagtctatcagaaaatcgttggttattgacaaacccacgtggtcatctgatagatgctatcgtaagcagcggctcttgccatactacggctgcctttgatagcatgaatctacgaagcacgcgatgaacgaccgtacgggtgtgtacacgtgctataacatcgattcacagtcattccacaacttctaatgggacctctactaatattacatcaacgagtgcgatacttttgccctatat

SEQ ID NO: 295625 - DNA, 252 bp, Zea mays
tgtgagcggggtcatacagttccagcacaacgacgaactcgacccggcgaagaagctctaccctggcggctcctactatgacacgctcgcacttggcggacgaccccgagaagaaagagcggatgcagctggccgagatcaagcacgcgcgcatggccatggtcgacttgctcggcttctccaagcaggccgtcaccatcggcaagggggcactcaacaactgggccactcaccgtagcgacccactccata

SEQ ID NO: 295626 - DNA, 442 bp, Zea mays
cccacgcgtccgcccacgcgtccgcccacgcgtccgcgctctcgccctcccgctcgctgcgagtgcactcagcttgcttcttgcgtgctcagctcgctctgcccctcatttctgttgcgtgctagagctcctccagtggtcccttgctcactgacgtcgaggatcgccgcagtcgtccctgcgtcgtctgatcccgtcaccacgcagtagttgcagattgtcacgtcatcaccgacacagttcagctcaccaaaatccaacgccgtcgcgccgtcgctccagggaccccttggcgaagcccgccagccacttcgtcgaagcaattccttgcacagttcgccgtcgtgaagctcgttgccggaccgtctgcatccgtacgccgttcgccatccgtggagcctcgccggagttcgcgtctcgccttaccgcgatcgaatccctc

SEQ ID NO: 295627 - DNA, 256 bp, Zea mays
aattgatgttctatgttggttgtctctgtttcaaggtggattggattggccaaaagaagcaaattgatgctgctaagagcatcggtgcatagcacatagttttggtgggatccatgggaggaacagacatcaagcacccgctaaacaagttatgaaatgcaaatatactgctgtggaagcacaaggcagaacatgacctagcagactccggtctttcatatacaatgataatagccggcagtttacaagataaaga

SEQ ID NO: 295628 - DNA, 311 bp, Zea mays
gccgatcctaaacttcaaaggcttcatgtatggaaatgcggtaattgacgatgaccaggactttatcggcacattcgagtgcttgtggacgcactggcttatctgctacgtaacctacctgatgctgctgcttgcctgcctagacgactgtatcgacgactccgtcctaatgtacaccgattggatcctctaccgctgggcgcgccaccagcagctccacctccgcgaccttctaagcccggacctatggttcccgtcgctcgtcatggcggcggggatcttctactgccttctgctcctcgcgggttact

SEQ ID NO: 295629 - DNA, 323 bp, Zea mays
attcgttgctcgcgatcctcgcttcgggatccggaagagatggccaagtcgaagaaccgcacggggcacaaccagtcgtacaaggcgcacaagaacggcatcaagaagcccaagcgccaccggcagaccttcaccaaggggatggaccccaagttcctgaggaacctgaggtattcaaggaagggcaacaagaagagtggtgaggctgaggagtatgaaggaaagcatgggtgtgtttcctatgttttagctcagttgtatggtgggacttatgaccttttgctgccgtaatgtttttatgataatcatgttttgaagagttt

SEQ ID NO: 295630 - DNA, 307 bp, Zea mays
ccggattccattcccgggccgacccacgcgtaagatccactcccagttataaagaggggttttttgtggtctgcacaattcacttgacatccgcgggttataacccctagggttgcggggtaagttaatattttaggaccaaaaggactgttgcctaacccaaaagcgggcactgttttttaaaatattactcaggctataaaagagttcaagaaggggaaggtggaatacagggtggataaacaaggaattgttcatattccatttggcaagggggactttccataggaagatctcattgcaaact

SEQ ID NO: 295631 - DNA, 325 bp, Zea mays
gaagacatggcttgttgttcatgccacagacaggatcctaggctggctcgcattcaccatggccgtgcatatcaaggggatgaatgagcccccttacactcccagagtgcacacgggagctcttgcccttgctgtcaatgccgattaaggagctgcatctggtcaaaagcggccaccaaagccttattggaagcacctctgaaggcctgtaaggacgaatgaagaaacttttgacctacttctaaacaaattccatagagaatgacttgacataccgttcgtggcatgctccccatatgcaggcttgctaaaatattatttaccc

SEQ ID NO: 295632 - DNA, 276 bp, Zea mays
gacaagaagaggctgaggaccattggcaccttctttgcgcgcgcctactccatagagttcggcaactgacatttgcattacaacttcactgggtgccaggacctctgcaagcatgaagaaagtccgcttcattagcgacgaccttgatattgagtgcgaggggaaggagaagattaattgcgagcgtccacgctctctggaaatggtggagcatctagcaccgaccgttgatgggaatggaagagatcatcacctgtcgtggcgaacctaaatatg

SEQ ID NO: 295633 - DNA, 341 bp, Zea mays
gtcgcttcctgcggtacgcactctctgtccgctgcgttcctccagctagcaactggccatcggggctgctatagcagagtaagtggcgatggctccagctcatgataggctccgccgcctggtgctgctcctcgtcgttgccaccgcggcggcggctttgcttctggcgccgacgacggcggatgctgcgctgccgcgggtgcagcacacgcccaccaaggccgacgggtcgctcgccatcctcgtcgtcggcgactggggccgccgtggacagttcaaccagaccttggttgcccagcaaatgggcgtggtggggcagaagctggacatcgacttcgtca

SEQ ID NO: 295634 - DNA, 269 bp, Zea mays
gcatcggtcatcttatcaacaaggacatcactttcctcgcacctagcatgatcatgatgaaggtcgttgcaccgactgagaggatgtacatcacctggattggactgtctatcctaaacctgctgagcactttccaacagatggggatatcgtaggacgactaccacgagtctaacccgacgattgtgcaccggaagtgcttctaagttgtcacaagagactatacagtacctactgtgtaagcatgtgccctgcatttctctagatac

SEQ ID NO: 295635 - DNA, 406 bp, Zea mays
ccggttcggaattccagcgtcgacccacgcgtgctacgacgcgtgggccgagtgtgatatccatgatggctgaggcctatggtgacagcgctgcgaaggacgactgagaagcagaagaagatgacgagagtgccggggagagcagcatctctcttaaggtggtagtttccaaagactctggcccagagctcgagttcacatgcacagccttccgcgaggagatcaccatcgatgatatgctgatagtggagaaaacagacgacgacgaccgagaatagaagttcccctacgagggccccgagttcaccgagctccctgtgaatgttcagaaaggcctgttcaagtacctggagcaaagaggggtaacgctgtcggctaccaactatatgcacgattacatggtgac

SEQ ID NO: 295636 - DNA, 415 bp, Zea mays
  unsure (1)..(415): unsure at all n locations
cggaattcccgggtcgacgcacgcgtccgcccacgcgtccgcccacgcgtccggcgccttcgacccgctcggcttctccaaggaccgggccaaggtcgaggagtacaagctcaaggagatcaanaacggccgcctcgccatgctggccttcgtcggcttctgcgtccagcagtcggcgtaccccggcaccggcccgctggagaacctcgcctcccacctcgccgacccgtggcacaacaacatcggcgacatcatcatccccagatcaatctccccttgagctcagctcagctgctggttgctgtttcctgtgtacgactaggccctgcctgtacaacgagcgacgactgtgacttcccgcccggaaattaaaccctcgtaatgtaaagcttatgttattaagtagcggctactc

SEQ ID NO: 295637 - DNA, 255 bp, Zea mays
cccagcgttcgcctttccccttccctccctggctctccacacgggccgtcggaggcgatttcgccctcgattggaccccgattactccgaccgcgaccgggattccctgctccaagcgcggatctgaacgctgcgctccgtgtcgccgatcgaatgcgccatgaacgggggcaaatccaagggcgccgccaaggccgatgccaagctggcggggaagagcaagggggccgagaaccccaccaagggcacgaaaag

SEQ ID NO: 295638 - DNA, 220 bp, Zea mays
cgacccacgcgtacgcgtatggatggacttgctggagaccgttcggaccatcaagaacctgaggtcgtactcggtcaggatcagggccttggaggtcgagtaatgcctgtagaaagtcggtgaggacgccctaacctagaagatgacgacagccatcgcggagcttaccacagacattggtaacaaggtgctacatggaccgatgcagcacctgaggtgc

SEQ ID NO: 295639 - DNA, 284 bp, Zea mays
gtgtacccgcgcgcgcagcacttgagacgcgccaaggagtgcccgcaggaggcgactatgagggccaagtggaagaataagcgcatgaggaggctgaagaggaagcgccgaaagatgaggctgaatccaagtaggctgatggggattgtggatggtggtgtcggcatagttgtgtaacgtacttcgatgctggttcatggagagatgcacatcctagttcgtcgtcacgattgccatgggtgcaatggctcgtctaggaaacctgcacttcaataagccatgta

SEQ ID NO: 295640 - DNA, 353 bp, Zea mays
  unsure (1)..(353): unsure at all n locations
gagagacacatgtactgctgcttattatcccatggatggaatgatggatgcatctgatccgatcaccggccgtctgccgaggtgaaggactcggcgaagccggcggggcgggcggggatgctgcccttgctgtcgtccaggctcatgacgctcccgccgccgtccgtcaggccgccggcctccgcgtcctgccagctcttcaccatctgcagcagcggcaggtgcaggtcgatgcccaagtagtcctcggcctcgtccttgacttggcgctggaaagatgaagctcaacaancttatggagaaatggaagagaagcattccttcaggaatgtgctgtcccgatcttgagatgc

SEQ ID NO: 295641 - DNA, 297 bp, Zea mays
accgtccggattccaggtggcgtacgtcgtcccgttctactcctactcccgtgtgtgccttttcttaaccctgatcctgaaacggcgcgaggcctttaccgtgcgcaacagagtctcaattgtcccagactactacaagaccaagtacaccagcatcgggtccgccatcgagtacaccgtgtgcgccctcaaagaggaagtccttgtagtcatccaacacaactactgcctttgcattcgggctctggtattactacaggaccgtgcacccgacaactttcacttcggactgaaact

SEQ ID NO: 295642 - DNA, 334 bp, Zea mays
ctccgccgccgaccgacgctacggctcagtgcatagcccgccgagacctcatcgatcaccgttaacggtcaatcatggcggacgtcgatgcctaaccggatgttgcctgctgagctcccaagaagaggacgattctcaagtgcagctaccgttgcgacgacctagatgcgctaatcgacatgtccacagacgacctcgtacagtttttcactgctcgctccattagaagcgctcagaggggcctgaagaggaagcccatggcgcttatgcagaagctgcgcatggcgcttaatgatgctactgctggtgagaaaccatagccagtgaagacaca

SEQ ID NO: 295643 - DNA, 375 bp, Zea mays
  unsure (1)..(375): unsure at all n locations
cgacccacgcgtgcacccacgcgtncggccatctctcccagctgctgcagaacgtacgtaacaagcttaaccaaggcgcttggagctggtctcaggaggagaaggatcactgcctggaggagacggacaagtcattcgcctactcacgaagcctgctccggcacatattcacctgatttaacactgttggctgatccagtttcaaacgctgtacatacataaccttttgactgctaaaactttattactggtgaggcggatctccctaccccagatacgttttacctgcaaccaagttgccaagtgacgaataaacctacctgcatcgctggtgtagggtaaacgctgaacgatgcctctgactgtgaaaaattt

SEQ ID NO: 295644 - DNA, 266 bp, Zea mays
ccggccggacgcacgcgttctgccagaccaacaacgacattaatgagctttttctcaacgacatcaataacagcacacatcgccatgctctacatactggggtacttcatccaagtgctcctcacctgccttaatcctttccaaaacctcctcgaccacctcgacgatcccatacacaacaacgtactcaccagcctaaagttccactataacctagtacatcaacatacctgctgattcccacaccgccttcaatagtttgctct

SEQ ID NO: 295645 - DNA, 445 bp, Zea mays
tttccggtcgacccacgcgtgcggttaagaaggtgactaacaagcccgttgctgttggcttcggcatatccaagccagagcgcgtgaagcagattgcgcagtggggcgctgacggggtgatcatcggcagcgccatggtgaggcagctgggcgaagcggcttctcccaagcaaggcctgaggaggctggaggagtatgccaggggcatgaagaacgcgctgccatgagtccatgacaaagtaaaacgtacagagacacttgataatatctatctatcatctcggagaagacgaccgaccaataaaaataagccaagtggaagtgaagcttagctgtatatacaccgtacgtcgtcgtcgtcgttccggatcgatctcggccggctagctagcagaacgtgtacgtagtagtatgtaatgcaatgaatgtggagctactagctagc

SEQ ID NO: 295646 - DNA, 350 bp, Zea mays
acccacgctgcaccaccctccgctcaccaatcacactaactgcaatactactcacttatactatagcctctaggaacaaactacacacctaaaggcaacaatcgctcacctaccaaaacctccaccactactccacacaatccaataaaaccctcatctacaacacccctacaattatgctctagtaccaatacaccaacaagctcactatctaaccaaaatgcccagtcaccataaagaatatccaatgaattccacaccttataccttcttcatacaacaagtctatgatgacaactaacctcatgacttttaactctccatattataatcgttctgtcttgtacctc

SEQ ID NO: 295647 - DNA, 368 bp, Zea mays
tgtacttcgaagatatagctggagtgattgtgaatcccaatggtcagaagaaaggtcggtgtctgggtgtacctatggaccgggagggtgctgacctttgtcctactatcgatcgtggatcacatgctatcgttcgagaactagccgtaattgagctagacttgcatgtgcatcatgtcaaatgtgtgaagcagctgctgtcacggtgctctcggactcgttggattctttgacgtctagacacttaatttcggagagaacacaaatacggcttccgtgattaggatccgtgatgtagctcagatgggtgtagttgacgctgagtacgttgtggagtccaccggcgtcttcactgacaaggacaaggc

SEQ ID NO: 295648 - DNA, 327 bp, Zea mays
cctagttatcacccatgcacgttcaggaagcatatttgagactctgcgactcgggataccgctaatccttgttgtggatgaagacgtgatggacaatcaccacagcgaattaccagaagaattggctgccaggaagcatgtcttctgtgcacgcgcacggccattagcagagacaattcgggccatggacctatagacactgcttccttatcagccacgggatgccaacccagtcgtctccctgatcaacagagttcttggctatccagatgatcgacgaatctattcggatgctcttcaatccatgtggattagatagtcttgcgt

SEQ ID NO: 295649 - DNA, 283 bp, Zea mays
gacccacgcgttcgacgagaccttcaccaagaaccgcgagctgtaggtgatccactcccgctgttccatgctgagcgcgctcagctgcgtcttccccgagctgatctcccgcaacggtctcaacttcggcgaggccgtctgattcaaggccggcttccagatcttcaacgagggcgggctggactacctcagcaaccctagtctgatcgcacagctcagagcatgctcgtcatctgagcctgccaagtcgttctcatgggtactcgcgagggctaccggattg

SEQ ID NO: 295650 - DNA, 479 bp, Zea mays
  unsure (1)..(479): unsure at all n locations
gaccggcccgaattcccggtcgaccacgcgtccgcccacgcgtccgggaggatctacctgccggatgggctgttggaccggtcggaggtgccggagtaccgcaccggagaggtccctggagactatggctacgacccttttggcctgggcaagaagccagaggacttcgccaagtaccaggcctacgagctgatccatgccagatgggccatgctcggtgccgctggcgctgtcatcccagaggcctgcaacaagttcggcgctaactgtggccctgaggctgtctggttcaagaccggcgcgctgctcctggacggcaacacccttaactacttcggcaacagcatccccatcaacctggtggtggcccgtgatcgcngaggtcatcctcgtcggcgggcgccgagtactaccggatcaccaacggactggacctagagggacagctgcaccccggtgggccctttgaccccctgggc

SEQ ID NO: 295651 - DNA, 307 bp, Zea mays
atcgacccacgcatgcactcaagcgctcacgactgacttgtcaaagagctccgtgaggctgacaaggccatatacaagcatgcgcgtcacttttgcgtgcttactgatgactgtgaccagccatatgaccataagctggcgatggcactctgcgctgagcacaatgctcacctcgtcactgttcctggcgcgaaaactcttggcgagcagtccggactttgccagattgactctgacggcaaggcacggaaggatgtaagctgctcctgtgtcagggccaaggactacggtgaacaatctgacggcc

SEQ ID NO: 295652 - DNA, 340 bp, Zea mays
gtcgacccacgcgtgcgtgcccctaatattgctcttagcgcagtcattgactaatgctataatgcaagaatatttcggtccttggcgggccatgtcctaattgcggtactgaaaacctttccctttttgggactatactgccagtctacattggcggaccaccaaacaaagtgaattgtgcacattgccattcacatctggaatatgactcagaatctatgtagaccactcatctcaaacgcatcactcgcttacacatacgtcactatacatttacgcgagtaactataaacggacactatgcggtatatatgccaaatgtacgacaactcactcggtc

SEQ ID NO: 295653 - DNA, 296 bp, Zea mays
ctcgcggcagctgtcacccgctgggactggccgacgacctctacgccttctgcgagctgggggcgagggagctcaagaacggtcggcttgtcatgatctgcatgatcagcattgtttgtaaggacatcgccaccggctagggcccgatatggaacctagcttgccacataggtgacccatgcaacaacaacacgtgggcctacgacaccaacttcaggcctggcgactaagcgcaactgctatgctatgcaacctcattgtctgtcctatcacaaagggtgtacgtacttggattg

SEQ ID NO: 295654 - DNA, 316 bp, Zea mays
gagctgttgtgatcggacgaagcaatattgttggaacgcctgctgcattgttgttgcagaaagcaaatgcaactgtcagcattgttcattcacaaaccaagaaccctgagcaaataacgagacaggcagatatagtcatcgcagctgttggagtcgccaacttggtcagaggggattggataaagcctggagctactattattgatgttggcatcaatccagttgatgacccagagagcccccgcgggtacaggctcgtcggggacgtctgctacgaggaagccttcaaggtcgccggagccatcacgccggtccc

SEQ ID NO: 295655 - DNA, 349 bp, Zea mays
taccggtctcggaattcccgggtggacccacgcgtccgctcgagaacctcgccgaccacatcgccgaccccgtcaacaacaacgcctgggcttacgcgaccaacttcgtccccggcaagtgaacgaaggcatgatgcttgcatgcgtgtacccgagacgtacgtattcctacgtacttgaagttgcaccagtatttgggaaaggagctttgggagccagaaattggaccggtaggggatttggatgcatgctggggaacttaacaattaaatatgctggaaatataatatggcttcaattattcctaccgatgatcaaggtgggagccaaaaaaaaaaaaaagggccgg

SEQ ID NO: 295656 - DNA, 404 bp, Zea mays
  unsure (1)..(404): unsure at all n locations
cccacgcgtccgcccacgcgtccgcccacgcgtccgcgacgacgcgccgggggagacgtggcacatggtcttcagcaccgaaggcgagatcccgtatagagaggggcagtccatcggcatcatcgctgatggcgaagacaagaacggcaagccgcacaagctcaggctatactccatcgccagcagcgccctcggagatttcggcgactccaagacggtatcgctttgcgtgaagaggctagtctacaccaacgatcagggggagattgtcaaaggagtctgctcaaacttcctgtgtgacttgaaaccttgcgccgatgtgaagatcacagggccagtgggcaaggagatgctcatgcncaaagaccccaatgcaacagtcatcatgctcgcaacggggaccg

SEQ ID NO: 295657 - DNA, 335 bp, Zea mays
  unsure (1)..(335): unsure at all n locations
cccacgcgtccgcccacgcgtccgcggacgcgtgggcgcggtgtacctcgtcggctgggtcgccgcggagggcggcggcgtcggcgtggcggcctacagcctggttgccggcctggtgttcctcagcgtcttcggcaaggtctaccggttcttggcgtgggtggaggcgaggcaatcgcagtggaaatccagcctctgccatagcgccggttgattcatgaaagctaattctctcagaaaatctgtataaagaaagaaaggaatcngtgctttagttcatctccttcttggggtacaatctacacggtgggtaaagaaaaggtgcggattttttt

SEQ ID NO: 295658 - DNA, 352 bp, Zea mays
cccacgcgtccgcccacgcgtccgcccacgcgttcgcccacgcgtccgcccacgcgtccgtgtatgaggagttgaagaagcatgctactaaagcaattccttttgggtcaacacccaagaataatgatggcacatctgatgctgggacaaattggttaatgtttgagttgctgtggagagatttcttcaggttcatcacaaagaagtccagctctgtacagaagacatctgaagttgccactggctgaactccaaccccagggcttgcatgaacatacttagacaagctgattgccagctgcttttttggggggataaacctaatggccttttcaagggaggcttttttttt

SEQ ID NO: 295659 - DNA, 260 bp, Zea mays
ctgccgctctggtcttgcatctacttggtgttctataacagagctcgcatcgtgaccaatatgtatgtgatacatggcacgtcagacattacgatcataattgctgaataatctgtgcttgaagctcaagttgactaatttaaccaggacaaggatgttgctgaactgcatgtataaacacctaacgatagattctgacctatacctgcacacttgtctatagacctactggaatgactcaaagggtatgccattgtaaa

SEQ ID NO: 295660 - DNA, 434 bp, Zea mays
  unsure (1)..(434): unsure at all n locations
attcccgggttcgtacccagcgcgtctctgattctgcaaccgaactcttggcattacttgtattcttcagggcgcctgatgcacnnagctctgtgtgtggaccanatgacactctgtgaaaaaaagagaacagtctcgatacaaatgccagctggaaaaactccttcaggagatacacgggtccagtttagttctgatcaaagtcacttgctagtagtacatgagactcaactagccatatatgacgcatcaaaaatggagaggatctatcagtggataccccaggacacattgtcagcttccatatcgcatgcatcatactcatgtaacagccagctagtttttgctgccttcactgatggtaacttaggtgtttntgatgcggagaacttgagattaagatgtcgaattgcaccatcggtgataaacagcaa

SEQ ID NO: 295661 - DNA, 241 bp, Zea mays
cgacgactcggctcgctgacggaaccagtctcgggtctgcatcgacttccccttctttggcgctttcaggggtttctctggtactgaaacagttgttccaaggaaccaagatcctggcctagctgaccttccagcaactggggctgctgggaaaaatcctaaccctaagggggttaatgatgggtccaaccttgaaagtattcctccggggaatcccaccagggtggccttggataacttg

SEQ ID NO: 295662 - DNA, 431 bp, Zea mays
caatccggggtcgacccacgcgtgcgatccaatctagactctcccctcttcctccctccctctctctatctctcttcggggtccgaatctacggacccaagcgaatcgacacctcaccgacatgggccgcacgctcttcatccgtggcaactggaaatgcaatggaaccacagatcatgtcgcgaacatagtcaaaaccctgaatgaacgacaggttcccccttcagatcttgaccaggtcgttgccagccctacttatgtcttccttcctgtgctcaagagccagctgtgccaagagttccatgatgctgctcataactgctgggtgaagaaaggacgtgctttcactggtgaactcagatctgagatgctcctcaaccttggtgatccctgagtcattcttggacactctgaaacgagaactctgcttg

SEQ ID NO: 295663 - DNA, 353 bp, Zea mays
ccgacgcgtccggcacttacaactactgttccgactcctacacgctcttcgacttcaggatcgcgctcatgggcttcggcgcgcaccggtgactacagtactggttcaacccgggctccatgggcacgctagactctcttggagcttctaagatgctcaccagctccttaatctcatgctacaactgtggtcctctgatgtatatttatgactttcgccagacctaatatgttatataagtgcaatggcgccgtgcgctagataactactgataagattgattattgcaaatggattgcattgatcgtgcatgaataatcatgcaggacgatctttctataagatccaagctt

SEQ ID NO: 295664 - DNA, 385 bp, Zea mays
cccacgcgtccgcccacgcgtccgcggactcgtgggcgtgcgcgtagtccagccctcgggggagtacactctggtcagcggggatcatcgtgactccatatattgtagaactataatccctgctagtaatccatttgtgctgtttatgtatcgaaggcagcaaagatgtgtgaagcggcaatgggatgcttgctgtaaggtaatatgtttggcttgctaggcatgctacacgctatttggatgtagcaacgttatcaccagctgtatacgctttttaatcgacaacatttgaataatatgtacataacattatgttgtgctctgttctctgtctgtttgatgtgcttatgggttttgatctgtagcttaaaaaacaaaaaagatc

SEQ ID NO: 295665 - DNA, 436 bp, Zea mays
gaagaggccaacatcgaggatgtttatacagacgacgagttgaacgaagcagggcagtactagtcgcggaaaaacggacaaataccaaggattaagagggacagggaggaaagatatgcgaggttgaaggataaggacgagatcgagaaagtcaggaatatgaccgaggatgagcgtcgcgaatggcagcggaagaatccgaagccgcttcgtcagacgaaacagaagtggaagtttatgcagaagtattaccacaaaggcgccttcttccaggaaggtgctgatgatgttatccagtcagcgggtaaagaggatatctacacccgtgatttctctgagcccactggagaagatcagatggataagagcatgctgcccaaagtcatgcaagttaaacatttcgtgcgcaatggcaagacgaaatggacgcatcttg

SEQ ID NO: 295666 - DNA, 467 bp, Zea mays
  unsure (1)..(467): unsure at all n locations
cggttcggaactcgaggcacgcgtccgncggcgcctgagcttttatcccaggccatcgaatacatcaaatacattggtggcctttgcgactggggaatcttacccttgccaaggtgtcaatgaaatctgcaagtctaagactgagaatgtttgagtcaaggctttggactctcttaacatcacactgggcgctgaggatgaactgaaggatgctgctactctggttcgcccagttagcgttgccttcgaggtgatcactggtttcaggctgtacaagagcggagtttacactaacgaccattgcggaactacaccgattgatgtgaaccacgctgttctggctgattgctacggtgtctaagatggtagccactactggctcatcaagaactcatgtagcgctgactgaagcgatgatggttacttcacgattgcaatggtcaagaacatgttctgaattgctacgt

SEQ ID NO: 295667 - DNA, 368 bp, Zea mays
tcaaatcacaatgatggcctcggcgacttgtgaatcttaccctcgccaaggtgtcaatggaatctacaagtttaagcaatgagaatgtactagtcaaagttctggactcgattaacatcaccctgtctgctgcagattaactgaaggattctattacactggttcgcccacataatgctaccttccatgtgatcacttgattcaggctgtacattagcacaatttacactaacgaccattatggaactacacctatagatgtcaaccacgctattctcactattctctactgtatcgaacatcgtgatcactactggctcatctagaactcatggagcgctttcttgtgtgatgatacgatacttaat

SEQ ID NO: 295668 - DNA, 400 bp, Zea mays
gctagtcatcactagtcacgttcgtccaccagagacaacaatggccatggagacgtgcttcagagcgtgggcgctgcacgcccccgctggcagcaaggacaggctcctcgtctgcaacctggggctgccgtcgaagcgggcgctcgcgccgctgtccgtgggccgagttgacactcgccggccgcggcacgtctgccaatgcaagaacgcagtggaccaagttgaggcggctgactagctgatccgggactggttggtgatggcgtaccagacgccgatgctggaggagatcctggctcctcagagcaggccgtaccgcatgatcgcgccatatatcgacgagctaatcaaaggcttccccgtcatgatcacgtgctgcctggataacacggcctacagt

SEQ ID NO: 295669 - DNA, 342 bp, Zea mays
ttcccggtcgactccacgcgtccgcggacgcgtgggcggacgcgtgggcggactcgtgggcggacgcgtgaatcgaggcactggtacagttctagatcgagctggcgtgcattagacgtttcaaacttacctacttaacaattttacacaatagctagtctataaagacatgtctgattcatatatttgacgaatctttcaatacttatatttaatgaatggacttcttaaatgacttctattgtgtaacatcttatttgtttaattttagttactttttttacatctacttattttattatctcttttgtcttcattttttgcacatacaatgccttttat

SEQ ID NO: 295670 - DNA, 436 bp, Zea mays
gagcacttcaagagggtggagaaggagcttaagcacaaggagcgccttggcaaggtgggcgccgtgtaggacggcgcctatgctgtgtacgaggggcaccgtgcgaagacggacccggcgaacgctcagatgcacaagatcgaggccggcgttacatcagccgcggcactgggcgcctacggctacgcgtaccacgagcaccgagggcagaacgagggccactacgtgagcaagcatcacgagcacatggtgccgcacggtcacgagcacgggcacggttactcatactactgatactgagacgactgatcattcgatcgatcgagatatgcatgcagaactcggtatatatacagtcgctatcgccggacacttgcgtgcatgtgagttaatcagagcatacgtcgagacctatgagctgctcgatcactacttc

SEQ ID NO: 295671 - DNA, 331 bp, Zea mays
cccacgcgtccgcccacgcgtccgcccattcgtccgccccaaggaaccctttaaaagggggaaggttgcttaacaagaggccccagtcgtggttgaagcaccaaccccagttcttggggagcctatggacttgatgactgctctgcagctcgtgatgaagaagtcaagtgctcatgatggacttgtgaagggtctccgtgaggctgccaaggccatcgagaagcacgccgctcagctttgcgtgcttgctgaggactgtgaccagccagattatgtcaagctggtgaaggcactctgcgcggagcacaatgttcacctggtcactgttcct

SEQ ID NO: 295672 - DNA, 460 bp, Zea mays
cccacgcgtgcgcagacgcgtgggcgaagctcctactggcgattccaatcgcgcgcacgggatctgcgactgcgcgtgcgactcgcgcaggacatatattcagtgatggaacacaaggaggccggctgccagcagccggagggcccaatcctatgcatcaataactggggtttctttggaagcgctgccaccatgaacatgtgctccaagtgccacaaggagatgataatgaagcaggagcaggcccagttggctgcctactacatcgatagcattgtcaatggcggggataatgggaaaggacctgcaattgctgcaactgtaggtgtggcagttcctcaagtcgaggagaagactatcgccgtgcagcctatgcatgtcgctgaaaccagcgaggctgctgctgttatcgcgaaggccaaagaaggcccaaaccggtgcgcaacctgtaggaagcgtg

SEQ ID NO: 295673 - DNA, 423 bp, Zea mays
ccggttcggaattcccggctcgacgcacgcgtccgaagagtcctaatgaaactcgtaagccatggctgccgtggcattatgtgcatgatcaggactgttttacccaatgaaggataagaaatacaatcatgactgtgccagcgatgttatcaagacacttgcattgaacatccacaaaatcaacaagtatgttggcaaccctgaagccaatgaggaaaacgtaattttaaaggcagaacaagatgcccaaattggtcatggtaaaaggggagatgtcacaatactaccaacccttgtcatcaacaacaggcaatacatatgtaagctggacaaagttgctgtcctgaaagcgatttgttcatgattctaggaaacaactgatcctgctgtttgtttgatcgtaaaagctcaaacaaatgattg

SEQ ID NO: 295674 - DNA, 347 bp, Zea mays
cggacgcgtgcgctcatccgtcactgctgctctctctcgccgctgtgctgaacctatcgcaggctgtatatcatctacagcagtctgctactaaactgctgcaaacacactatctatatcacaaagttctaaaggtctgttcgaacaataacacctctcgtcatgtggatcactactattatcaacaggccatcgatttctccatcacagattggaaccatactacctctatctattgtacatactatggtcaaactcttcaccaacatgagcctatggcaaattacattaaaacatacgcacacaatcaatgcttaggagcctttcttttctgctattctttctat

SEQ ID NO: 295675 - DNA, 396 bp, Zea mays
cggattcccgctcgacccactcgtccggacagggaaagagaccgagaccgagattgggagagggacagagatagggagagggagagggagattgagaggtacagctagagccatatcgatgtcatagacggcctctctgtgccaaaaatcacaattgtacccttgcttgtcgatgctctgcgttcaatgactcatcttccgttggatgtacatcttattattgtggaaccttagcaccgagtccccgattttatcaaggcttgtgctcatattgatagtgtccactgttaacagacattttccattcattttcaccgaacagtctatcttatttaaagtctatgagcctagtcttgatttgtttttaattcatctacttccctcactgttatttat

SEQ ID NO: 295676 - DNA, 507 bp, Zea mays
  unsure (1)..(507): unsure at all n locations
ccggtcgacccacgcgtgcgctcctctccgcttccaagatgtcttatcgaggacgtggaggttctgctggtaacgagttccgtatgtcactggttctaccaatcccaaccactgtnaactgngctgataacacatgagccaagaacctttacatcatttctgtgatgggaatcaaggggcgctctatacagtcttatttttgtctttgtttgttacattgttatagtatcttttataatatgtaattttttctcttttttatatagttacttctctctttcttattttttttatcatactataatttttttctactcttttataattttattactatttattgttgtttgttgtattatttctatactatttttatttatttcttcttattcataataattattatttattttattattcatttttatactattttattcatcttcatctttatttctttataataatttttattgttatatatattctttaattatattatattat

SEQ ID NO: 295677 - DNA, 405 bp, Zea mays
  unsure (1)..(405): unsure at all n locations
ccgaggtcgcgnagaacgatcacagccatctggttctcaaagaggatgacgttataggtagcttagagactgatgacgtgaaagacatgaagcctctgaacgaccgtgttctaatcaaggttgctgaagctgaagacaaaactccaggaggcctactgcttacggaaactgccaaggagaagccatctatcggaacgtgtgtagcggatggcccaggctccctggaactggactgcactgagttcgagacgaaacttgccctattagtgttgtgcatgatcatgacccaacctgtaaggggtttttgatatcgatttggtcccatggcctaatcctttacatcttcgaaagccttaatgtgaacatatggtttactttcagaatcccttcgtgtgtccttttttt

SEQ ID NO: 295678 - DNA, 356 bp, Zea mays
ctggattatggctgtctccgattcttgccatcagtagttgctgcttcagttatgttcgttgctaggcgtgaccattgatccaaatgccaatccttgggtaaggaaccgaaggatcttattgatgcatgcaaaggactgccctgtttctcaaagttcatttatcctgcatttttatatataattattatagaacatgaagctgcagaagacgacaggctacaaagtttctgaactcaaggattgcatcgtaaccatacgtgacttgcagctcaacaggaaatttccatcattaatggcaattcgagacaagtacaagcaacacaagttcaaatgtgtgtcaacgcttcttccccctg

SEQ ID NO: 295679 - DNA, 388 bp, Zea mays
cacgcgcgcctcggcaaaccctccgcctcctcgcccatcctcccctccatcccggcccagccgcagggccatggactctgctgccggcgcaggccgccaccgcgttcgaatcgcagtcgtcggcgacgtgcacaatgattgggcccttgaggaagattcaaaggcgcttcgatttcttcagccggatttagtgctttttacaggcgattatggaaatgagaatgttgaacttgtcagaagcatttcagatcttcagttaccaaaggcggcaattcttggcaatcatgattgctggcacacacatcaattctcagagaagaaggtcgatcggtgtcggcttcagctcgcaagccttggtgagcagcatgttggatacaaatgtttggac

SEQ ID NO: 295680 - DNA, 284 bp, Zea mays
gactttgttggccaaggcaattgccaatgaatgccaagctaacttcattagtgtgaaggtcctgaactgcttaccatgtggtttggtgagagtgaggccaatgtcggagatttttgacaaggctaggcagctgctccatgtgtctcttttgatgagctcgactcattgctactaaaggaagcaggtggtgacccggggtctctgatgggtgtgaacactcttactgagatggatggctgatgccagaaacgtttatatcgggcactaaaccgacatatgaccac

SEQ ID NO: 295681 - DNA, 274 bp, Zea mays
gtacgcgtcccgttcataggaaggactttttctaagtctgtaaccgaagaggaaatgatgggatcgtggctattggaacctttctcaacattcttcttgtgaataacttctcgaatggtgaggtttgacccaagacaattcatgttccatctactgtgacgcttgcaactattgatcttgctatgaaactcaccaattaagtgcatgtcactattatcttatctggtactctgtacttatgtgctagctcccgtgattgcgctgcaatgccccc

SEQ ID NO: 295682 - DNA, 147 bp, Zea mays
ataacactgacgcagaaggaaggctaacactttctgatgctttggtctaagcctgccacccaggggtttgaaagattattggttttgccacccctacccgcccttgccttggcgcactccggccttacctttgcggaatttttacgc

SEQ ID NO: 295683 - DNA, 100 bp, Zea mays
gagcccttgaaaaccttgtatgatgctgttcaatccatcaaacctacagttctgatcgggacatctggagttggaaggaacattcacaaaagaaatcatt

SEQ ID NO: 295684 - DNA, 424 bp, Zea mays
  unsure (1)..(424): unsure at all n locations
tcgacccacgcggactnacgatgccttactgttctctgttcgacgttaccgccccttccttcgcctcaccgtcaccggtccactccgaggtgagaatgatgtccttcaccgtgcgcgcctctctccgcaaggccaccgaaggagatagacgaggagctgggagccccccttaacatcctagacaagatcatttgggacaaggagattgaagtagctgacgagcatgctaagaagcctcttgaggaggtgattcaggctgcaacgaaagcccctccttcaagagacttctatggcgctttagaagctgcctacaagcgtaatggggtgcctgcattgattgctgaggtcaagaaagcatccccgagtaagggtgtgctcagggagaactttaatcctgttgaaattgctcaagcttattaaaaag

SEQ ID NO: 295685 - DNA, 356 bp, Zea mays
gattcccggtcgacgcacgcgtccgtgtgaatgtaaagagcagcccgtttgttattcgtagcatcgaccgtgacgtgagatatcgtagtctaattattgcaactggagctactgctaagcacctacatctacctcgtcaagataaattctgcagtttcggcatcaactcatgtgcaatatgagatggaccttcaccacttttcaaggtccaggttcttgcaattgttattatttgtgcttcatatttataatgatctgttcttttatttatttaattattttatttttttctttttattttgctttttttttttctctttttattttttcttattatttttatatttttttttttt

SEQ ID NO: 295686 - DNA, 360 bp, Zea mays
gattcccggctcgacgcacgcgtccgcccgcgcgtccgaatggcacctcaaagaatctctctctttcgcgcaatgtcatctgctcgaagttgtatggcaagggctcgaagtctggtgcttcaatgaggtgccctgggtgccagggctcatgcatgaaagtcactattcttcagctgtgcccttccatgatacagcatatgcatcagtctttcaatgaattcaattgtactgtatagagcattatttttatttacctgtatgttttttgttttattgttttttaatctatattttttatattttatttctttctttttttttttttatatttttttttattttttttatttttatttttat

SEQ ID NO: 295687 - DNA, 295 bp, Zea mays
ggttatttacaacaaagagactggtcagattctaatgtttggctgggttaccattatcactattgatgaagctgataaagccattgatatgttcaaccgctatgacattagtgtcaggcttctgaatgtattcttgtcattttctatgttcactatcattgtaaggcctttcttacttatttttctctttttcttatctttattttttctatttttttttttagttttttttcttatattctttttcttttttttaatttattattttatattttttttatatttattttttttt

SEQ ID NO: 295688 - DNA, 318 bp, Zea mays
atcgaccttacaggtcccatcgttaaagttttcctaacattgaaagtttataatgctcgtgcaaactcttaagcatcacgagttcttctcaccttcacgcccacaaagtttcaacatctctctattgtcaaagccacaagaaccaaagctaaacccaagaataaagcattcctacccctcttggtccaaaccttttaactcaccaacacctctcccaactcccctcgcctctactcttgtctacttaacacttctcttaaacccgtctaatcaaccactttaaaagtgctattcattctcacttactttttaaaaccc

SEQ ID NO: 295689 - DNA, 399 bp, Zea mays
ttggctcctgctacccctgcggttcggcttcgtgttcgcgaggctctgcgcgctgcggtttcgtgagtgagcgaatcgagatggcgctcataagatgttgagtaccgatgcttcataggcggactcgtctgggccacggacgaccactgcctccacaacaccttgagtacctacggcgaggtactagagtccaagatcatactcgatcgggagactacatacgtgcctgcactccagcttcgtcaccttctccaaggacgacgccatgctgaacgccatcgagggcattaacggcaaggagccggacagacggcacatcacagtcaacgaggccaattctcgcggcggccgtgtaagcggatgcggtggatacggtggtggacttggaagcagtagata

SEQ ID NO: 295690 - DNA, 338 bp, Zea mays
attcccgggtcgacgcacgcgtccgcccgcgcgtccgcacggagcccaagaggctttcatacaagcccctgcgtctgcccctccggtatgtgtacaagattggtggcgtcggaactgacccggacgaacctcttcatactcggcttctggcggcgttcttctaagcctcgcctcggcttaatggggccttttggaactcatcgcgggatctgcttgagttgacaaagcatggcatctgccttctcgccattcttgtcatctttgtcgggacaatcatgcctatatcattgactggccttttaatcttcatgttctttctgctaattgccacttctaat

SEQ ID NO: 295691 - DNA, 270 bp, Zea mays
cccaacctggttcacgctcaaagcatcctggccatctatacgtgccgggtagaactcatggggttcgtcgagggctaccgcgtctgcggctgcccgctcggggaaaggctctacaaggtgtaccccggcggcgccttcgacccgctgggcctagccgacgacccggacaccgccttcgagctcaaggtgaaggagctcaagaacggccgccttgccatgttctccaagttcggcttcttcgtgcaagccattgtcaccggcaagggcccc

SEQ ID NO: 295692 - DNA, 365 bp, Zea mays
aaccaaaacaaaaacaatggcaatgttccaaaatacacattgcctttccaatttaccaacaatgacatcacaccacaaatcatctctactaatataacacctgatattgttcttgcttcttcctactctcattaattaccactatataatcttgaaattcatcttaccaactatacaccttcctactacactctccttctcttttctctccatattctcaaaacccattctttatataacgaatattacttcaattataataccactttttaagatttctcttcttacccatcttattataacaatccttaccctactctctttaattttaaccttattactactaccacttttaacccaatctt

SEQ ID NO: 295693 - DNA, 372 bp, Zea mays
  unsure (1)..(372): unsure at all n locations
aagaaaactagaaaaggctcctcccgaccgcaacgcccctcatctgcctcgaccccgacgtccccgagccgatggcgcccaaggcggagaagaagccagcggagaagaagccggcggccgaggagaaggcggagaagacgaccgcagggaagaagcccaaggccgagaagcggctgcccgcgtccaagtcctccggcaaggagggcggcgagaagaaggggaagaagaaggccaagaagagcgtggagacctacaagatctacatcttcaaggtgctgaagcaggtgcaccccgacatcggcatatcctncaaggccatgtccatcatgaactccttcatcaacgacatctttgagaagctggccggcgagg

SEQ ID NO: 295694 - DNA, 161 bp, Zea mays
ccgacgcgtgcgttgacccaaggactgaccatcagctaatcaatgaggctgctgtccagagcatggggaccattagcctatgtgacactgactatctaatgcagtacgtccatatcggcctacaaatgaacaacaagggcatgaacaccattagatgtctg

SEQ ID NO: 295695 - DNA, 216 bp, Zea mays
gttggcttctcctccccctccggttcgggttcgggttcgtgagggtctcccgcgttcggggtcgggggtgatcgcatctagatggcggcgtccgatgttgagtaccgctgctttttcggcggcctctcctgggccacagacgaccactccttccacaacacctttatcacctacggcgaggtcctctagtccaagatcatcctctatcgggagaca

SEQ ID NO: 295696 - DNA, 179 bp, Zea mays
acgggtatctgcctgacacaattgcctttttcttgttcaactctcatgttacaccatgagctattgtactaaccagacatggtcagagtttacataatgttagatgaagaatcgctagtaatacaattctaaattaaactgtataactttatgtacagatactatttaactttatataa

SEQ ID NO: 295697 - DNA, 408 bp, Zea mays
  unsure (1)..(408): unsure at all n locations
cccaccgtccgctttcccttcctgctgcgccgtggaaccctctaagcgatttggatttggatctcacctcgctccttcccgtggcgatacgactcgccgtgactttgatccgtggcggtggctctgcgggtgcaggaaggatgacgggctccatggatctcccggccaagggcgggttcagcttcgacctgtgccgccggaacaacatgctggagaagaacgggctcaaggtcccgggattcaggaagaccgggacaaccatcgtcggcctcgtctttcaggatggggctgttcttggggcagacacaagggcaactgagggccccatagttgctgataagaactgtgagaaaatccactttatggcaccgaatatatactgctgtggagcangaactgctgcggaca

SEQ ID NO: 295698 - DNA, 333 bp, Zea mays
cggacgcgtgggttgacacgcagccggtttcgccaccagtccttactggtgatctgagaggtgacatggcctgtgtggatgacgttagaaagctcaaggtactggttaacgccgatactaatgatgatgcattgactgctccaaacactggggcacacggaattgcattatgcctgacagaacacatgtcctatgctatatactataggattaacgatatcatgcagattattatggctaccacgcttgatctgacgcatcaggcgctggaccgtctgttgccgcatcagatgtctgactataaatgcattttccgagctatggatggactta

SEQ ID NO: 295699 - DNA, 247 bp, Zea mays
aattcccgagtcgacggcacgcgtcacgcttgagtacggccattacattcacgctcttatccttcccctatggttaagtactcacaggagccggtctaccctaccaaaggggccaacgccattggaagggacctgagggtccactttaagaacacaagggagacagcttttgcgcttcgcaagctgcctttgaccaaagctaagcgataccttgaagatgttatttctcacaagcaagcaattccct

SEQ ID NO: 295700 - DNA, 284 bp, Zea mays
cccacgcgtcagttccaagacacggagaaatgcccagatagatgtgttgatgagcgctgtgacccatgctacggtgccagacctttgcgagctgctataatgaggcttctgaaggatagtctggccaagaaaatcctgactgatgaggagaacgaaggagaatctgtcatcgctgatgagtattcacatggcaaggtaatagttactaatggtgagagcagtgttactgaacaactggaacctagtgtaactacctaaccgtggtcaaaatcatgatgggaccg

SEQ ID NO: 295701 - DNA, 307 bp, Zea mays
agctggagaaggtcttcgcggacgaggctttcgcctagttcttcgacaaccctaccttcgcgcgcgttgagaatgccgagctcatcgactagatccccaggtcgcccgagctacaccctcacatgcccaattcaataaacaacttcttatattccactcccacgaagatctctccgtttctcttgccaaatacacttccgagctgtctgaaaagttctcgggctaaaggggtgcctttaacgtcgtgctctttggccgatccctcatttatgcactcaataatcttactgatctctcctacctttat

SEQ ID NO: 295702 - DNA, 288 bp, Zea mays
cggaattcccgggtcgacgccacgcgtccgcgacgacgcactcgtacaccggctacctgaggctgctggacgcgtcccaccgcggccgcctgctgtcccgcgcgggggcgctgaacatcgtgccgacgagcacgggcgccgccaaggccgtggcgctggtgctgccgcatctgaaggtgaagctgaactgcatcgtgctgcgggtgccgaccgcgaacgtgtccgaggtggacctggtgatctacaccgtgaagactggcatgacggtcaaggacgtgaacgcggttt

SEQ ID NO: 295703 - DNA, 298 bp, Zea mays
ggaattcccgggtcgagccacgcgtccgcggacgcgtgggtgctttttcatgctatccatgtgcaggggacgcaaaataacacacgatggtgtgttgctgctctagtggtcggaggtccgtcagattcttcctttttttttgtcccattgttgagacagcaaccgaggatataagattggatggagatgaggtctctgtttggcttgtgctgatgcctgcatgatgtgctctgcgatgtgcatccagttttgggatcaagctgctccacttttccggagctgcccttgcatggatttt

SEQ ID NO: 295704 - DNA, 319 bp, Zea mays
cggaattcccgggtcgagccacgcgtccgcttcagcgagggctggctcgactacttcttcaacccgagccttgtccactctcagaggatccgggctatctggtcttgccatgaggtgctcatgggcgccatcaagggttaccgcgtctcctatattcttgtcgactagtacattcatcttactatgcgctcttctcaggacttgaatggtagacttactgtttatttttaaggagaagaatgaattgatgctgttgggctgacaagggaattgttccaatcatttttactagtcatttttttcaaaattgccctttttt

SEQ ID NO: 295705 - DNA, 281 bp, Zea mays
ggaattcccggctcgacgccacgcgtccgcccacgcgtccgcccacgcgtccgctttcttccacagcatgcaccaccatcacgtaggggggcgacactcctgtggttatgccgcacctgcccgttcacggccactccgtgccgcctgtcaccaagccgccgcccgtagacgttcctgagcacaaaccggcgccggtgcccgtgccggaccacaagcctccgtcgacaccgtctgtcgacgctcctgagcacataccggcacctgtgcccgagccagagcac

SEQ ID NO: 295706 - DNA, 340 bp, Zea mays
tttgcacggaggcatccgtcaaatttctcgaagggcaaccaggcgaggcctagtgtagggtttaacgagtgagaggggggaaatgctgcgccacgccgcccgccgtctcgtctcccgcaccgccgcggctcccaccgcccgccgcgcgctcgtcacggcagacgtgcctgcggaggccgacgatgactccacgtttgtggaggcgtgtaagaaggtcgccctcaacatcgagcccccaacgacgcccctctttctcatgcatcctttcccgtctacgctctctaccatcctcactaagctcaccgtcaacttcttacttccctacatgttctatatctcc

SEQ ID NO: 295707 - DNA, 336 bp, Zea mays
ggaattcccggctggagccactcgtccgctcaagcactataatagaagtacttgttattcttacataagactcataacaagagtagaaattattacgaaaacgggggtaacgtgtgcttcgacaactttggtgacaaggtgaagaattggttgacctttaatgagccctatacatttacttcattttcctatggaaccactgtctcatgccccatgacgatgctcacctgtactagactgtaccatctcaactgataattcactcgtctaaccttacattgctgaccacaacattcttctagcccacgcttaggctgttgatctttactacaagta

SEQ ID NO: 295708 - DNA, 409 bp, Zea mays
cccacgcgtccgcccacgcgtccgggttctccagcggatcggcgtcggcatggtcctggccgtggtggccatggtcgccgcggcgctcgtcgagtcgcggcggctccgcgcggagcccgccctgctgagcatcttctggctcctgccgcagtacgtcctgctgggggtctccgacgtgttcaccgtggtggggatgcatgagttcttctactcgcaggtgccggcctccatgaggaccaccggcatcgggctctacctcagcgtcttcggcgtcggcggattcctcggcgcgtacctcatcaccctgctcgagatggccacggcgaggcccggcaacgcccgcagatggttctctgacgacccgcgggaggcgcggatagataacttttactgggtcttggctctcctc

SEQ ID NO: 295709 - DNA, 199 bp, Zea mays
ggccttcgtcgtcatctgcgacggggacggccacttcgagctcggcgtcaaattcgggaagggggttgtcaccaccatccgtgtcgccatcatcctggccaagctttagctcatgcccgttaagatgggctactgcggaaacaagatccgtcatccgcacactattccctataagggcaccagctagtacatatccttt

SEQ ID NO: 295710 - DNA, 314 bp, Zea mays
cccgggtctgcccgcttctacgggccgcaaaccctagcggtgggaggaacactttcggaggaaatggcggcggcgatgcaaattggtctctttcgaagaaaatatgggccggctttctgccctctactctgactgaggatgggtttcggcagtatttccagaccttcggcatcttcactgatgttgttgtcatgtattaccagaacacgcatcgcccacgtggctcctgattcatcaccttttacttatacgactcgattatcatcttaccctttattacacctcatcatcttttttgacttcatatacagttt

SEQ ID NO: 295711 - DNA, 450 bp, Zea mays
gagggaggaggcctccgagcttgccctcttttatccaaccaagaaaaagaagaagaggaaggttttcatccaagagccttctgatgaagtggacatgcttgcagagaagacagaatcgctagcagatgcagaacctgcttaacttaacttcactggaatgaagactatattgaataatcagctggatcttgattcatctattgatgaccttgtagatgtgtaggacacttaaggttttcaagtcgtttagttaccagtatacatatttttttctcgtaatttttgtttttcttattttctgttattgtttattttcttttatctttattttattattttttttatcatttatttatttttttatttttaattctattattttttttttttttttttttatttttatttttttctattttcttattttttattttttttttttcttttttt

SEQ ID NO: 295712 - DNA, 152 bp, Zea mays
cgtcctaattcccggtcggccgatcttacccaggataaggctgattaaccaagacaaaaacaagtacaatacacccaaatacagatttgttgggcgatttaccaacaaggacattacaacacaaatcatctctgctaatatagcaagtgata

SEQ ID NO: 295713 - DNA, 404 bp, Zea mays
cggtctcgaattcccgggtcgactccacgcgtccgcaaacacatgttagggttttcatgaagttatctttcttcgcagctgagttattcgtgaacggtgaaatcgttcagcggtcgccagaaaggcagagaagggtggagccagtgcctcagagagctcaggatcggccacggtacagtgaccggacccgctatgtgaagcggagggagaaccaatcttaccagagatgatgtctccgtttctggagatggaaaatgccagggtttccacaggtgtgccatactggagatgcaggagcaacccccactacccacatgagaatgacatccgttgtgtttgctgcgctttctaagcttgacaagttgacattgcttatgcgtttgggcttgtacctctagttgata

SEQ ID NO: 295714 - DNA, 308 bp, Zea mays
cccacgcgtccgattagaatgcttcgccaaaatggccccttcttagttattcatttacgatgtgagatggatatgcttgccttctctggctgtactcaaggctgcactcctaaagaaaccgaggagcttacaaggatgaggtatgcttacccatggtggaaagagaaagtaataaactcttttgtgaaaagaaaagatggtctttgccctttgacgccagaggaggttgctattgttcttagagcattggatatcgacaaaagtatgcaaatctacattgcagcttgggagatatatggtggaaaacg

SEQ ID NO: 295715 - DNA, 336 bp, Zea mays
cggtctgaattcccggtccgtcgactctttagggcgcgtacgtgctgctgtccaacatctacgcttagaagggtgactggggcgcggtggcgattgttcggctgaagatgcgggggaggcgcgtcaagaaggaggtcgggttcagctgggtggacgcgggcggcgccaacgattccctgcacctgcacaagttctcgtcggacgactctacgcacccgcagagggaagagatataccgagtggcctaggggctaggctgggagatgaagtttttcaagaactgtcttcatgtctagatggaatttctcgattgatgtctcgatcaaattattcttg

SEQ ID NO: 295716 - DNA, 345 bp, Zea mays
ttttggtagggaatatatcgagtacttatttgtagtgagttgaacagcgcaacacatgtccatagtccatacataattggcagataacaaggaattacatgatagatccaaaccttcatggtcttctggaagccatgaggatctttttacacagcaacaaacccacaaatcaccaaagcagtctttcgcagcaccaagtctataatggcgtacaaatccacagtagtaggcgagtccatgatgcgtgaccccacgcgtccgcaggaagcttggaaggtaatgctggagcagttcaaggctgaggccctgcggatgcaggccctgtcaatgcaggcatatgatgtc

SEQ ID NO: 295717 - DNA, 223 bp, Zea mays
cggtggcgcaccggacagcgtccacttcttcaggctggctcaggctaactcactgcgatgtctatctccaaaacctcgtgcgggtcaactttcaccggactgttcggtatgcaccggactgaccggtgagccaacggttggtcgaacgatcctcacgagacacctgatctagccaacagccaaaatgatgcacctgactgtccggtgtgcacaagacattgtc

SEQ ID NO: 295718 - DNA, 328 bp, Zea mays
atgggtcgacgacgcgtccgaccacgcgtccggccacgcgtccgcccacgctttcgcactcgctcggggtcatgcaccgggaccggaagcccgagaacttcctgctcgccaacagggacgatgacctcttggctaaaggccatcgattttcggtctctgtggcttcttcaagcctggtcaagttttcaccgatgtagttggtagcccatattatgtagctccagaagttctgttgaaaagttatggactcgtagcttatgtatggacagccggtgatattctatacattctactgagtggtgtgcctacatggtgagcagcaccacaa

SEQ ID NO: 295719 - DNA, 187 bp, Zea mays
cccacgcgtccggttcgacggccgggacccggacctgttccgccactacgccgccgtcgggcagaggctcggcgtctacaccaccgtcgactacgccgacctcgtccagttcttcgtcgacaggtggggcgtggcggacctaggccccggcctcaccggcgaggggaggcaggcgcaggactacgtc

SEQ ID NO: 295720 - DNA, 304 bp, Zea mays
ggtccggaattaaccgggtgcgacccacgccgtccgcccacgccgtccgagcatggtgctcctgacactcggaagacaagtaagtactcttctagagcggggcagccgtgaaggaaacccagctgccccggattcagattacagacccgatagcaagatactatgggatgaagcgtgggcaggtcgtgaagatcacaagagccagtgagactgctggagatacatcacctaccgctacgttgtctgagctttgctacattctcatggcttaagcttccgcaccaagcgaaaatgacctctactt

SEQ ID NO: 295721 - DNA, 444 bp, Zea mays
cccacgcgtccgcccacgcgtccggttatatcctgatgactgcaatgcggatgcccaggtggaaattgtgaatgcatgagccaccaacaacgtgaggtatggtggcaccatgtacaccgagaagagcgtcctcttgaggcacggaactcagagagcatgtgcgagttgctcgtgcgccacagggcgacacgtatcagtgcacacacttagcacacagaataaacagcttctacacggcacctaagaagctgttggcatctgattcacggctgaggcctgatagatatgccctcgagaagggtgacatgtctaagtccggggcagagaagagcaggctcgaggaacaacagagagctgagaaacgaactccagaggccaagggcgagcaatttactcctagatggttcaacctgacagatgtggtcttctctacaccgtggggtg

SEQ ID NO: 295722 - DNA, 359 bp, Zea mays
ggtcgacgcacgcgtccgccgacgcgtccgctgacgcgtcggcgccttcttcctaccgagctaacagcgtacgttctcgcgtgaaaccatcagcagcagcggatcgtgctacagtgaccctagcattaaagactgcgcttgaaggagtatgacagtctgctacctcgatcatgactcaagaataaggctaactgcaagcctgacttgtaaaagcccaggctcgatacgccgtcatgcgttgccaacgggcaaggttaggaacgaaaatgcttgatacaggatcactggactccaacaactagtcgctccttttggaaagacggacacagcatcggtgctcaatgagaccatcgagtaca

SEQ ID NO: 295723 - DNA, 367 bp, Zea mays
ggtctcggaattcccgggtcgaccgactcgtccggagcggtacagcgagcagctgatggcgcttgcgtgcaggctcctgggcgtgctctcggaggccatggacctggacacggaggctctggccagggcctgcgtggacatggaccagaacggtggtggtcaacttgtacctgaggtgcccagcatccggacctcactctggggctcaagcgccacactgaccacggcaccatcacgctgctgctgcatgacctcgtcggctgactccaggccacgcgcgactgtggacggacctggatcaccgtgcagcccgtggagggcgccttcatcgtcaacctcagcgaccacggtcacttactgagcaacg

SEQ ID NO: 295724 - DNA, 380 bp, Zea mays
attcccgggtcgacccactcgtccgaggactcgtgggcggactcgtgggcggactgcccgcgcctggagtggacataccgtacggggctgaggaagacgagcccgacaagaagaagccccggatgatgctcatcgagcggggcaagacgcggaggctcgtgaacacgcctgacgttctactcgggcttggctggttcggcttcgaggtggtcagggcggatccaaggacccactctgacctcgaggagtttgcccgcctagtcgactcgtgtgacgcgatgatgggcgtccacggtgccggtttgaccaacatggtgttcctgaggtcgggcgcagcgctggtgcacgtcgtgccctacggtgtctagttcatggctgac

SEQ ID NO: 295725 - DNA, 437 bp, Zea mays
accgcgtcaagatcctcatgcagacgcatagcgtgcgggtggctggagagagtgccgaggagggtgttggatttctcgaggctatggcagacattggaaagaaggatgggcttaagggttactggaaaggaaaccttgcacaggtcattcgcattattccttacagtgcaatgcaactcttctcggatgaagtttacaagaaaattttacggacaaaggatggagagctttctgtatttgggagacttgccgctggtgcttgcgcgtgcatgacatctacacttggaacttacccactggatgttctgcggcttaagctaccagctcaatctggacacagcactctatgataggatgctcttaacatgctgagagaagaagggctggactccttctatggaagcattgggccatctattgtagcaattgcaccttac

SEQ ID NO: 295726 - DNA, 485 bp, Zea mays
ccggtctcggaattcccgggtcgaccgactcgtccggctcggaatacgacgcgaggggtgcacttactcgcggagctgatcccatgcttactgatgggcctgaacacagtcatgcagatcttactgcaccgtttcgcattcttgaactccaaacatacgaacatggcgaagcaagtgcccaagcacaactggaagactcacttacacgccagcaactagcgcgccaaggagttctagggcctgctaaagtacaacgaccccgagggcttcaacctcgtcgacgtcctcgactggggctcgctcggccacatcgtcgcctactacatgctcgccacctgcagcaacggatacgaccccaacttcttctgagcggccggctgcgggcatgttcttgagcctgcctgtattctactccgtgtgtgttgagccatatatctgatgctcaaagattggttaatttgaacaagtggtgcaactgcacgtgt

SEQ ID NO: 295727 - DNA, 399 bp, Zea mays
aattgccgggtcgaacgactcgtccggccacgcgtccgcccactcgtacgctctcgcgtgcggctgggcgaccaccgagaccagggcgggcattatcgcacttgctgaggatacactgacgaaccttgggtgtgctactgcgccagtgctagctctgacatgtactcctcattcactgaccaagtcattgtccaacttggactgtggaaggagtagagctctgacaagtatgagacgaacgtgtatgtactcccaatgcacattgatgagaatgacgctgctcttcaattgggcaagcttgatgccattctgaccaacctcaccaagtctcatgacgactacatcagcgtgcctatcgagggtacctacaagctctgcccactaccgagactaggcaca

SEQ ID NO: 295728 - DNA, 379 bp, Zea mays
tcggtctcggaattcccgggtcgacccactcgtccggacaatatacatggagactcatcagcttgttctccagatcgcttggctcaaggatatggttgaatgctatccattcctgaagcatgggctggtgctgcgcaacccttacatcaccacccttaacgtcttacaggcctacactctaaaacggataagggacctcaactttaatgtgacacttcagccgcctttgttcacggacttacccgactagatcgagcgcatctgactgctcaagctgcacccagcgatgcttgtcacgatcgcactgtaagacactctcatactcaccatgacaggtattgtcttctgcatgcagaacacttcataggatgcttcttct

SEQ ID NO: 295729 - DNA, 293 bp, Zea mays
cccactcgtccgcccactcgttcggactacttcgtgcaatggtcgactgcaaaagcgcgggtgcagagctacaatgatgaacagtgcgcgcagagtcagagccacctgtcagaggcgcaccggacactgaacagtgcctgtccggtgcggcaccggactgtcaggtgtcactagaagacaaagcctccaacggtcagaagctcccgaaccctaacggttgggtgatgtggctggcgcaccggactgtccggtgcgcccatcgacagcagcctgccccaacggtcctttggtgg

SEQ ID NO: 295730 - DNA, 427 bp, Zea mays
  unsure (1)..(427): unsure at all n locations
cggnccggaattcccgggtcgacccaagccttcccccaagccttccgttcgttgcagtggccttaacgaacaagagcctagtctctcggcgcgcgacgctacgggtctgctcgtcgaggcgctcgatccgtagcctggtcgttaaggctgcaactgtcgtcaccccaaagtacacttcactgaagcctctgggagatagggtgcttgtgaaagctggtgccgcagaggagaagacagttggtggcattttgcttccatctacttgccaaactaaaccacaaagaagggaaggtgttgctggtggaacaagaaagaccattctggacaagaaaatagctgtggatatagagactggagcacaagtagtatactcaaagtatgctgggactgaggttgaattcaatgactcaaagcatcttattctcaa

SEQ ID NO: 295731 - DNA, 446 bp, Zea mays
  unsure (1)..(446): unsure at all n locations
ccggnccggaatacccgggtcgagccaagccttccgaggaggtccaacttccgacgacaactactcaggcgccacacatggcatcccatctgtcggccgccgtaccccggttccacggcctccggggctacgccgcgcacaggtccgcggtggcagcgctgccgtccgtgagggtgggcaggaagaggtcgtcgtcgcagggcatccgctgcgactacatcggctccgccaccaacctgatcatggtgacgacgacgacgctgatgctgttcgcggggcggttcgggctggcgccgtccgcgaaccgcaaggcgactgcggggctgaagctggaagcgcgcgactccggcctgcagacgggtgaccccgccgggttcaccctcgccgacacgctggcctgcggcgccgtctgccacatccctcgcgtcggcatcgtgctcgggctc

SEQ ID NO: 295732 - DNA, 436 bp, Zea mays
  unsure (1)..(436): unsure at all n locations
gtccggaatnaccgggtcgacccaagccgtcggttggttcaattgatcctggaaaagatcgagcttctttggcaccacaaggtcgaggatgtcttgcaactgcggatcaagctgcggctgcggctcaagctgcaagtgcggcaagaagtaccctgacctggaggagacgagcaccgccgcgcatgccaccgtcgtcctcggcgtggccccggagaagaaggccgcgcccgagttcgtcgaggccgcggcggagtccggcgaggccgcccacggctgcagctgcggtggcaactgcaagtgcgacccctgcaactgctgatcacatcgatcgacgaccatggatatgattattatctatctagcttgtggtggtggttgaacaataataagcgaggccgagctggctgccatacatangtattgggtggtgtgtgtg

SEQ ID NO: 295733 - DNA, 328 bp, Zea mays
tgacaagccggcggcgtggcggtcggtggtggagcggtacatcgagcatctgatggcgctggcgtgcaggctcctgggcgtgctctcggaggccatgggcctggacacggaggcgctggccagggcctgcgtggacatggaccagaaggtggtggtcaacttctacccgaggtgcccgcagccggacctcacgctggggctcaagcgccacaccgacccgggcaccatcacgctgctgctgcaggacctcgtcggcggcctccaggccacgcgcgacggcggccggacctggatcaccgtgcagcccgtggagggcgccttcgtcgtc

SEQ ID NO: 295734 - DNA, 407 bp, Zea mays
cccacgcgtccgaccacgcgttcgtttacccacgcgtccgcgacgtcaggtgcgggggtggcctgtggtttgacccgctcggctggggctacggctcgtcggagaatatcaaggagctgcgcaccaaggagatcaagaacggactcctcgccatgctcgccgtcatgggcgcttggttgcaggccgtgtacaccggcaccgggcccatcgacaacctcttcgcccacctaggcgaccctggccacgccaccatcttccaggccttcacccccaaatgaggagctattatgaactttgcagttcgaggagtgctaccacacatgcatgcattgttaggtttgatggacgatatggaactctcttcttttggtgggggcggactactgagtcgactgtcaacgatgatg

SEQ ID NO: 295735 - DNA, 291 bp, Zea mays
cggttcggaattcccggctcgacgccacgcgtccgggatcctgatcgacggtgacgacgttttctatcccgacacccgctacccggtggctgtgcggttcaacaaggtgaactacgccggcgtgtccaccaacaactacgccttggacgaggtcttagaggtgaaatgagtggggccggccggctcaagggctccaagctagctaccgtgtgattgattagtagtatttgtgaaatgaggctgcgaagctgcatgctgtgctggctagcgtcaccacttcgaccctatgtg

SEQ ID NO: 295736 - DNA, 352 bp, Zea mays
gataccattgcgataaaacctaggcctgagctcatagcataatccacacacgcaggggctatgttgttcgttgggacgcacgagtacctgacccgcaagatcattataggcgaagtccatggaacctcattccactggtggaccttaccggcatacttgtaccagctgctgttcgggaagacgcctttcaagggatccagcaaccgagccacgctgatcaatgtcattggccatcagctgctcttacctgattaaccgggcgtcagattctatgcgacggatctgatcactggtatgcttgtgaaggatccccaacaacggttggcctacaagccatgatccacatggatca

SEQ ID NO: 295737 - DNA, 216 bp, Zea mays
gccacgcgtgtgcgtacgcgtgcgactaggcgtccggtcagcgtgattgccaacgagggcaatccctacgagcccatgatcaacaacgcatgctgcacgaccaactgcatcgcgccattcgtcaaggtgcatagaccagacgttcagcatcatcaacggcaccatgaccagccagtactcctacaccagcgacgagaggctgatggacgcgagcca

SEQ ID NO: 295738 - DNA, 406 bp, Zea mays
cttgggtctacttcttgccatcaagaaacttaccaaggaccaagtacaaacgattattgagaaaattgccaaccaactatcggggtggaaatctgatttgatgactaaggctggatggaaggtccatgtgcagtttgtcctcacagggatggtcatatatctcgcaatggctgtggatttacctccttgggctctcaaagctattgacaagatccgccgaggctttctttggcgatggcgcaaagaagcgagggggggacactgtcttgttgcttggggaaaagtttgtcggccgcttgagcttggtgggctagggatttccaatctcattgatcttgcttgggcacttcgtatgcgttggttttggttagcaaaaactgatccgggacggccatggggcctcctt

SEQ ID NO: 295739 - DNA, 398 bp, Zea mays
tcccgggtcgacccactcgtccgctgctcgtcatggacatcttctcgtatcacctcgatgatcgttacgcccaaaaccgtgaatgcctactacatctgtatgcactatccactgcagtacgtatcacatctggacgtgctaattatagacctctaaaacttgaactgcatgaccattatacgtactcagccgatgatatcatgagtgaagcacacatagatcttcagcctatgatcacatgctccatctcctttggagatacttcacgtcttgattacatgcatattggaaggtgtttcatgaccaaatacaactccctgattaaagatagcactgtaaatgttgcgacaaataaggtaaaacatgatgtgcacttaaagctacataacgtttaatca

SEQ ID NO: 295740 - DNA, 380 bp, Zea mays
  unsure (1)..(380): unsure at all n locations
gggctcccctctctaccgcagatcagttcacactcgtagagagaaggaaaaatatccgcagaccctagctcccgatctcgatggcgaaccctcgcgtcttcttcgacatgaccgtcggcggcgccccggcgggccggatcgtgatggagctgtacgccaacgaggtgcccaagaccgcggagaacttccgcgcgctgtgcacgggcgagaagggcgtgggcaagtccgggaagccgctccactacaagggctccaccttccaccgcgtcatccccgagttcatgtgccagggcggcgacttcacccgcggcaacggcaccggcggcgagtccatctacngcgagaagttccccgacgagaagntcgtgcgcaagcacacc

SEQ ID NO: 295741 - DNA, 262 bp, Zea mays
ctgcgtgttccctggagatcgctggtccaagaacgtgcgtcatagttacggcgaggtcggatgtggttcaagtgccggcgtcgcagatcttctcggaagggcgggcatggactactctgggcgaactcccaactctggttgcacgcacatgagcatcctgggccatcatgggcgtgccatggtggtgctcatgaggcttcgtcgagggctaccgcgtcggcggcagcccgctcggggaagggctcgacagggtgtaccccgg

SEQ ID NO: 295742 - DNA, 357 bp, Zea mays
attcccggctcgacccactcgtccggagctcacaaactatagtggcccgattttcaagcatactccattgaacctgagggtgtagttttccaacgactacgggttctacacctccggcctctcttccgacccggagacattttcgcgcaaccggcatctggacgtgatccactcccggttgtcgattctgcgctctctgggctgcgtgttccccgagatcctctccaagaacagcgtcaagttctgctagacaatgtggttcaaggccttctcgcaaatcttctcttaaggctggctatactacctgctgaacaccaacctggttcactcacacatcatccttaccatctattcttt

SEQ ID NO: 295743 - DNA, 337 bp, Zea mays
cgccacgcttggcatgtggagcgccggtggagtagtgtcggcaatcgataggctccccgtggttcctggtctgatgcaaggccgtggaaatggatacaactggtggttcgcgtaccgaaacctgctattcaagcctgacagggatgctttctttgcgaaagtcaaggagatctacgaggatattatcagcgcttaacagatgggagcaccaatgcaaagctcatccaaattaatggagtccactttaagacatccttctagtttgctgctgatcagatgtttctgctgtgatgtatttcagtgtagcatatggataagtaatctggatgtttaattt

SEQ ID NO: 295744 - DNA, 364 bp, Zea mays
ggcgtgcctattgagctcatgatggcgcttatgctgcggctcaaggtcttccagcccgtgctgctggccatgctcttcacgttcaacgacatcgacatggggatccacgtgcgaagccgcgtgcagacctcccagatctacgccatccgctacgccgtcggcaaggggctcgtcaactagtaccagaagtacttcgacaaggccgtcaacaaggacgtcaaggacgtcttcaccgacttcgaccgcacgcttgtcggcaccgacctcatgcgctacgagccgaactagtagcctggtcatggcgcccgtgccaggttccagaagtgctaccattgagcgctccgctgagcgctcttgtccgaca

SEQ ID NO: 295745 - DNA, 455 bp, Zea mays
tgctctactgtggcatcgcctcatggggaccaaagttctagcagtaacattcaacggcgcgaacaagatccgcgcgtacgcgcactgcgcgagagattcaccaggaatcactcttctgctgatcaacctgagcggcaacgccaccgcgcgggtctcggtgacggcccaaggggctgccgcggcgcacgcgcacaggcacaggcacggcgcgaggaagcacggcggcggcaggaagttccggcacgtgcacgtgcacgtccccggcttcgccggcggcggcgaggcggcggcgggcgccgtgagacacgagtaccacctcacccccaaagacggcgacctgacgagccaggtcgtgatgctcaacggcagggcgttggccaccgacgcggcggggaacatccccgccctggaggcggtcgaggtggacgcggcgcggcccatcgtcgtcacgccct

SEQ ID NO: 295746 - DNA, 319 bp, Zea mays
gtcagccacggcgggcggatacggcgcatgcacgtgtggccggcctacggcaacaagatgtgcgagacgcatttccacctggcgccgctgtcgaccgacgacctgctgaatcatgtgcactacctgttgcgcatcggctggatactctgccttgagttcagcaaggtctgcttgcagtaccgctagaacttcacctgcgcgtgctactaccacagtcgttactgtaccatgtgcaaactgcccatgatccgctaggacgacgctaaccacgtgtacaaggagctgcacgatgccatcaaatactagctggacacctttc

SEQ ID NO: 295747 - DNA, 439 bp, Zea mays
cccacgcgtccgccttcatcgcgcggcgcgtgctgaaccggcgcgtgaagccgtacctgccggacttccgcacggcgttcgagcacttctgcatccacgcggggggccgcgcggtgatcgacgagctgcagcgcagcctgggcctgtcggacgaggacgtggaggcgtcgcgcatggcgctgcaccggttcggcaacacgtcgagcagctcggtgtggtacgagctggcgtacatcgaggccaagggccggatgcgccgcggcgaccgcgtgtggatgatcggattcggctccgggttcaagtgcaacagcgcggcctgggagtgcatcgcgccggcgcgcaccgccgaggggccctgggcggagagcgtcagccgctaccccgtggacatccccgaggtgctcaagcactagccgctatcccgtggacatcaggccgg

SEQ ID NO: 295748 - DNA, 445 bp, Zea mays
cccacgcgtccggacgaggagcagcccgccggcgagtacgggtactccgagaccgaggtggtcaccgccaccggcgagggcgagtacgagaggtacaagaaggaggagaaggagcacaagcacaagcagcacctcggcgaggccggcgccatcgccgccggcgccttcgcactctacgagaagcacgaggcgaagaaggaccccgagcacgcgcacaggcacaagatcacggaagaagtcgctgccgcggcggccgtcggcgccggcggctacgtattccacgagcaccacgagaagaagaaggaccacaaggacgccgatgaggctagcggcgagaagaagcaccaccaccttttcggctgaccgtagtaccggccggcgcgcgaccgagctagctagcttcggcgcacacaaccacacacctgtttaattctgtactgcatgc

SEQ ID NO: 295749 - DNA, 381 bp, Zea mays
gccggcctcgtcgccacgctgcacgccttcacgttcggcgacccggacatgtcggggggcaacttctacctgccgaacgtcatttcagaggcggcgccactcaccaccgtgcgccacgtggccgcggacatgttcgcgtccatgccctccggggactcgattctcatgaaggcgatcctgcacgagtggagcgacgcccactgcgccacgctgctcaagaactgctacgacgctctcgccgcgaatggcaaggtcatagccgtcgagtgcgtgatgccggtcaacacggacgtcaccgacaaggcccacggcgtgttacacgtcgacatgatcatgctcgtgcacaacctaggcggcaacgagccatacgagcgcgagttc

SEQ ID NO: 295750 - DNA, 278 bp, Zea mays
ctggcgcgtgagctgcgaggccgtgtggttgaaggccacgtcgcagatcttcagcgagggtgagctggactaccgttgggacccgagcctgatccacgcgcagagcatggttgccatctgggcctgacaagtagtgctcatgggcgccatcgaggggtaccgcgtcgccggcggcccgctctgataggtcgtagacccggtctaccccaggagctgcttcgaaccgctaggcctggccgactacaccgatgccttctgggagctcaatgtgaaggagc

SEQ ID NO: 295751 - DNA, 343 bp, Zea mays
  unsure (1)..(343): unsure at all n locations
ctgccatctaccagcgactcagctagcgttagcagcacacacgcacctacctaggagcagcatctccggcnctggaaacggcggcctacatgatctcctcgtcagctctggccgtggcgcctcacggtctgccgcctctcagtcgccgcgcctcctgcttcgccgtcgtctgctccaagaataagatcaagaccgacaagccctactggattggaggtggactgaccgtcgacgtccacgcctaccgaagaaaggccaagggcaagggcgtgtaccagtttgtcgacaagtacggtgcgaacgtcgaccgatacagnccaatctacaacgatgatgactggtc

SEQ ID NO: 295752 - DNA, 340 bp, Zea mays
  unsure (1)..(340): unsure at all n locations
aattcccgggtcgacccactcgttcgcggactcgtggtctgactcgtgggcggactcgtgggatagactgcagatcgagggtctggcagcttgccgtggcagttgggtgattacgactaatagagatgggccttctcgacaagctgtgggacgacaccgtcgcatgcccgcgcccggacaccgggctcggtcgncttcgcaagcagcctgtgcgttccgccgccgtcaagatcagtgatccggccggggacgctgcggcgttcgtgccgccctcgccggcttcgggtagcgaggagacgccggtgaaggtgactcgcatcatcatgatcaagcgccccgc

SEQ ID NO: 295753 - DNA, 169 bp, Zea mays
aatacccgttccgacgccactcgtccgccagagctgacagacatttagatagatgaattcgaggagactactattcatgatgttaagatcatctaagaagagattcgcaggaagcaagctcacgctgcccacgaggcatacgagcaggacgactacatccaaaccacca

SEQ ID NO: 295754 - DNA, 243 bp, Zea mays
gcgcctcctccttcgccgtcgtctgctccaagaagaagatcaagaccgacaagccctacgggattgggggtggcctgaccgtcgacgtcgacgccaacgggagaaagggcaagggcaagggcgtgtaccagttcgtcgacaagtacggcgcgaacgtagacggatacagcccaatctacaacgaggatgactggtctcacaccggagacgtatacgtcggtggaaccactgggcttgtgatct

SEQ ID NO: 295755 - DNA, 457 bp, Zea mays
agccacgcgtccgcaggggttcgcttcatgccagttcgtgtccacctcgctcatcaaagcaaaagcggccgttggctcctcagttctaggtccactgaagatcatccaggatgctggcgagatggatttggtgtcatggggagtcgccatctctgcgttcgtgaagcatggcttgggtcaagaggcactgtctctcttcaactcgtgcagagttgactgcccagagaagcctgatgagttcatcctgggcaccatcctgaatgcatgtgcaaacgccgcgttgataaggcagtgcagatgcatccattcgctcgttgtcaggacaggacacagcaagcacttgtgcgtgtccagtgctttggttgatgcctatgcgaaatgcggtgacatcactgctgccaaaggcgctttcgctacgggttcgaccaaggacgccatagtgtacaacaccatgctg

SEQ ID NO: 295756 - DNA, 427 bp, Zea mays
ccggtttcggaattcccggctggacgcacgcgtccgcggacgcgtgggcggacgcgtgggcgcaacgctctatctctttcgccgagctccgtgggaccctatgagcgtgcttgaccggcggcggcgaggtgatggcgatggaccctgacgcggtagcgaaggccttcgtggagcattactaccgaacgttcgacaccaaccgcgcggcgctggttgggctgtaccaggagacctccatgctcaccttcgagggccagaagttccagggcccctccgccattgccggcaagctcggatctctccctttccaggcctgcgagcatcagatcgtcaccgtagactgccagccatcgggtccccagggaggcatgctcgtcttcgtctccggttccatacgcaccggccccgaggagcaccccatcaagtt

SEQ ID NO: 295757 - DNA, 419 bp, Zea mays
ttttgtcacgactttgttaatgagccagctcaagtcgagctcgagccagctcgttagctcgaacgagcaaaccatttgtctgcaaaacaaagcctgcacttgtgttggatgaactaataaatgataaactgtgttaatttggtgttgaattgacgtggtatgtgaaattatgagtattattactcttttctagtgtaagattggtctagaattaactagtaattgattatattgttatatatgtatattatttttttgttgtggctcgcgagctaaacgagccagctcgagctcgcaaacgagccgagctgattctctagctcggtttcttaacgaaccgagccatcttgttacattaatgagccagctcgccgagccggctcaatatctagccctatcaggcacacatggttaggatc

SEQ ID NO: 295758 - DNA, 408 bp, Zea mays
tttccttttcactgcagtggtcactgccgtatttggtttgcttagcgccttctcgcccgactgcgcatccttactcacccttcgctttgttgttggtctgggattgggtgctggccatgtgctatctacttggttcatagagtttgtccctgctgccaaaagaggtacctggatggttgttttccatgcttgttggactgtgggaacaatattggaggctcttcttgcgtgggctatcatgccagtacttggatggaggtggttgcttgcattgtcctcagcgccatgctttgttcttctcattttcttccctctaacacctgaatcaccaaggtatctttgctcgagaggtaagactatggatgctacagttatcttggaaagaatagcaaggatgaacaaagggac

SEQ ID NO: 295759 - DNA, 335 bp, Zea mays
gcccccggccctgcagcccggaagagcatatggagcagagggcagtgctgtggtgcatggttccatcagaacagtaggaagaagcgacctcgcagatcacgagatgggcctacgtcagtggcagctgtcatccagcggtgggctgagcgcaacaagcatttggagtatgaggaatctgaggaggcaaagcgaccaagaaaagcacctgcaaagggttcaaagaaaggctgtatgaagggaaaaggggggcctgacaatactcaatgtggataccgtggagtgaggcagcgtacttgggggaagtgggttgctgaaataagagagccaaatcgtgt

SEQ ID NO: 295760 - DNA, 452 bp, Zea mays
cccacgcgtccgcccacgcgtccgggcatttcggccagaggcaaggagctcagcaagtggtgcttgaaggggtaaaccgccgtgtttgggagaacacatggggtgacttctgcttggacctgcacctcatgtcatgtggtgcagctcaagcaatggtgcatgcatggctcctgaacgtgcgctctattgtttttgaaggtcgagctatgcctgagtttttaagcattctgacaggctggggaaagcatagcaagatagctggatcaagcacccttcgtcgagtcattgaagcgctgctcctttcaattggagcgccgtttcaggccgagcgcttcaacatcgggaggtttgtgtcacccagtgccttggtgtctgcctggctgagagagtccggcaccattaacatcctccttcttcgcaacgagcgagcgcaacatgcaaacacgttcaat

SEQ ID NO: 295761 - DNA, 271 bp, Zea mays
cccacgcgtccggcgccgccttcaagttcgccatcgacaaggacgtcaggaacttccaggtcgtaaaaaaaatgtccaacgagtggccattcttaagggtaaccttgaacctgctgaaaatggttttcgccaagggaaaccccggctttgccggtttgattaacaagctgcttgtggcggaggaactcaagccttttggaaagcagttcagggacaattacttgaagacacagcagcttttcctccaaatcgttgggcacaaggatattct

SEQ ID NO: 295762 - DNA, 395 bp, Zea mays
aacgccttcagcacctacggcgaggtcctcgagtccaagatcatcctcgatcgggaggggcataggtcccgcggcttcggcttcgtcaccttctccacggatgaggcgatgcggaacgccatcgagggcatgaacggcaaggagctggacggccgcaacatcaccgtcaacgaggcccagtcccgcggcggccgtggaggcggcggctgtgggtacagtggcggccgttgaagccgctgctacggcggtggctggcgccgtgatggcggtggcggctaccgcggtggcagcggctacagtggcggccgcggctacggaggtcgtggcggcagctacggcggtggcaaccgcggctgcggctacggcaactccgacgggaactggacgaactgaac

SEQ ID NO: 295763 - DNA, 405 bp, Zea mays
ggaattcccggctcgaccgcacgcgtccgacgactcgttcgacatgatcatggactgctgcactcgatctgaggcagcacgcgctcgggcctgtcttgacgtatcagagggcggacttctaaagcatcttccacactctgtatgcactcccggataccatgcgactcctggaccctactctccaccagttccttccacaagggaacatcgactacattgtaactgaatgatctgctgagaccgtagccaaccatgaggataccctcgcgcgaatcgacaaactttcaaaagtaaacccaacgcttggcatccgagactgcaggctcggtatatcgtgccctgcatcgacaaagacgcaaactccctccatctttgaagctgctatcgcaatgaccaaccaaagtg

SEQ ID NO: 295764 - DNA, 170 bp, Zea mays
  unsure (1)..(170): unsure at all n locations
attggagctggtcgcattggctccgnctatgcacgcatgatgattggcgggttcaagatggacctcatgtactacgacctggattaggccacacgtcttgagaatttcgtcacagcatatgggcaggtccttaaagccaacggtgaagaacctgtcacctggaaaaaggc

SEQ ID NO: 295765 - DNA, 289 bp, Zea mays
  unsure (1)..(289): unsure at all n locations
cccacgcgtccgnccacgcgtccggccactcgtccggccacgcgttcggccacgccttcggccacgcgggcgggttaatcgggccggcggcggcggcgaaacagcacatcgctcttttgatctcagccattgccgaagtggagcaaccccaggacgcggtgaagctcttcaaccggtggaccttcgacgatgtccaagtgaacgatatcttgctgaacgactacctggctgtgactgcggcgaaacacgcgacatttctggcggacttcgcggggcgctacttcaagaa

SEQ ID NO: 295766 - DNA, 436 bp, Zea mays
  unsure (1)..(436): unsure at all n locations
cccacgcgtccgcccacgcgtccgcccacgcgtccgcccacgcgtccgccggcatctgtgcctcgccatctgcagcgcccagcaccgctcggcgccgccatgacgcagcgccgcagcagctgagggtgaaggcggcggcgcggccacagctgctgcacgccggccgccggcgttcgagtgtcgggaggaggccgggcggcggcgcggtggtggtgagggccgggcctgggccgctgtcggagatcgagccggacctggaggaggacgccatcgacgtgtaccgcaccaacggcatcagcccggaggacttcgagtacgggaagtatgacggacaccacacctatttcgaaggccaagacaagaagggcttctgggaggatgtctccgagtggtaccaagaagctgagcctnctcagggctntcaagcactcatctc

SEQ ID NO: 295767 - DNA, 343 bp, Zea mays
cggacgcgtgcgcgcaggcactcacgatcaggttctgaagccgccccttacgacataggtgtggagccccatttgatcgagtgctgatggcgcccaagggcgagaagaagcccgcggagaagaagccggcggtggagaagggctataagaagccaacggcggtgaaacgcgtgtcgagctaggtgggcggcgagaagaagggaaagtagatggcgaagaagatcgtggagacgtacaagatctacatgattaaggtgctcaagcatgtgcacccggtcattggcatcttgatcaatgccatgtccatcatgaactgcttcatcaacgacatcttctagaagct

SEQ ID NO: 295768 - DNA, 365 bp, Zea mays
accggtctcgattcaccgcgtcgacccactcgtgcgcttgctttgtactgctttctccggtccatccggctcaatcgtcatgggtcatctttcgaaccttttgatacccctttcataatttggtatatttgccattcaaaaaatacttttgccttccaatgcaaagtttgaaaaggctcgtcgacagatttgggtggtcgtagccaaacgcacgccgacagactgttcaacaagtgcattcctttatttgttttactattctcgttgcatgcctgtatatgcattgtccggtgtctccttaaatttcacttgtactttgtgtgattttgtatcaaactattctctttttttgagattccattatt

SEQ ID NO: 295769 - DNA, 301 bp, Zea mays
accgtcgtcgctacgttccaggggctctaggacaccggcaggctccccgtcttccttcgctggtccataagcctcggcagcgtcagcaacgagatggaaggatccggtgcatgcatgtgtgtacgttctacggtaacaagaagttttagacgctgtcatacctgccggcgctttcgatagacgacctgctgaaccatgctgactacctgctgttcaacagttggataccctggcttgagttcaccaaggtcagcttcttgtaccgtcgagaacgttacctatattgagctactaccactgg

SEQ ID NO: 295770 - DNA, 348 bp, Zea mays
cccacgcgtccgcccacgcgtccggcacccttttgcggcttgcagctaaagtcgatgcgatcaaggatacactggagaacgatgagcagaaggttggagctgaaatagtaaggagggccctgagctacccacttaaattgattgctaaaaatgccggtgtcaatggcagcgtcgtcactgagaaggtcctttctaacgataacttcaagtatggttacaatgctgctactggacagtacgaggacttgatggctgctggtatcattgatcctacgaaggtttgtggccctaaagcttttcctatccttctgcttgaatactatagttagttggcttggaacttcggtc

SEQ ID NO: 295771 - DNA, 430 bp, Zea mays
cggacgcgtgggcggacgcgtgggcggacgcgtggggctagctggtcaccagttgttgacatatacatcagcaagctccacgaaagcaagaagaagaagaaacatgacgaccactgctgcggtcgtcaagctcctgacagccgtactcctcttcttcgccgtctctcttcggggtaccaagggcgagccatgcggcacgtccagcatccacgtgcagaccgtcaacacgggcgcgacggcggctgccggcgacacgctgttcgaggtccaggtgaaaaacctgtgcttatgcagcgtcaggaacgtgcgcgtggacggtggcggcttcgcgacgacggtggaggtcgacccggccctgttccgcccagtggacggcggtgtctacctagtgaacgccggcgagtccatcgcgagcatgggcatcgtgagc

SEQ ID NO: 295772 - DNA, 364 bp, Zea mays
tcccgggtcgaccacgcgtccgtgtatcgtgcgccgacactttagctttcacccaacggcatcaaattatgggaggccgtgtctttcaagaccgaatacgacatctttaatgattacttgctttactacctctggaacccaagcctcattcacacacagatcatcattaccatctgagcctaacaggttgttctgatgggatctggtgatcgctaccataatctactttgcccgtatcatgaggtcgtagacccgttctacctcctgctcagctacgacccgctcgggcttgatacgacctgaaggccttcttcgagctcaaagacaatgagctcaagaactgtctactctccatgatctccat

SEQ ID NO: 295773 - DNA, 232 bp, Zea mays
  unsure (1)..(232): unsure at all n locations
gccgtctacgaccagaaggtcgtcccgttcatcacggaggagttcggctacaccaatgtgcaccaggttcccaagatcgagaagattgtggtgaactgcngtctgggccccgaaggcagggacttccaagggcttgattgccgccttgaagaacctggccttaatcaccggccattggcccttaaggaccaaggccagaaattccgtggccagtttcaaaatccgtgaggga

SEQ ID NO: 295774 - DNA, 425 bp, Zea mays
cccacgcgtccgctcacgccttcgggcttcgacccgtacaccgcctgcgatctcaaggtgaaggatctcaagaacgggcggcttgccatgttctccatgttcggcttattcgtgcaagccatcttgaccggcaagggccctatcgagaacctattcgaccacgtcgccgaccccgtctgcaacaactcctgggcatacgccacgaactttgtgccctgcaactaactgactgagcaacgccacacatgtgcactaccatcagacccatgcattcgtccgtccgtccgttcgtccgtagagtgaacagtacggtcttggctgtactctatatgatcagatcgttggcgtatagtatgctcaccagccggcgtttgctcatgatctacgtgagtgcttatgaatcaatcgtaatggttgccttctgt

SEQ ID NO: 295775 - DNA, 445 bp, Zea mays
cccacgcgtccgacgaggcaaagatctcggacttcgggctcgccaagctgctgcagcaggaccaggacctgcacaccaccaccagggtgctgggcacgttcggctacttcgaccccgaatacgcgctgacagggaagctgacgctgcagagcgacgtgtacgcgttcggcgtggtgctgctggagctgctgacggggcggcgggccatcgacctgagccaggggccgcaggagcagaacctcatcgtcggcatccaccaggcggtgggcgaccgcaagaagctgcgcaaggtggtggaccgggacatgcccaggggctcctacacgctggagtcggtgtccatgttcgccgcgctcgccgcgcgctgcgtctgctttgacagcgccggcccgccgcccatgcaggactgcgtcaaggagctccagttcatcatgtacgctaacat

SEQ ID NO: 295776 - DNA, 395 bp, Zea mays
  unsure (1)..(395): unsure at all n locations
gacccacgcgtccggcgtgaagaggaccatcagagtgccggcgatcagctcgaaggtcgccgacatcccttcggacgagtactcgtggaggaagtacggccagaagcccatcaagggctccccttacccacggngctactacaagtgcagcactgtgcggngatgcccggcgaggaagcacgtggagcgggccaccgacgacccggccatgctggtggtgacgtacgagggcgagcaccgncacacgccgggcgcggtccaggggccgagccccctggcgaccgcgtcgccggtgcccgtcgccgtcttcgncggcaacgggctcgttgtctagtctactaaaagctaggattagcttctcgtcttctttggtttttttttggttgagctgatgt

SEQ ID NO: 295777 - DNA, 347 bp, Zea mays
cccacgcgtgcgcggacgcgtgggcgcttctgttatccgtgtcattgctcatacccagattaggaagatgaagggtttgaagcacaacacggctcacctgatggagattcaggtcaatggcggtaccattgctgacaaggtggactacggctataaatcttctgagaaagaggtgcctgctgatgctgtcttccagaaggatgagacgattgacatcattggtgtgaccaaaggcaaaggctatgaaggtgtggtcactcgttggggcgtcacccgccttgcccgcaaaacccacaggggtctacgcacggttgcttgtatcggcgcatggcatccggatagggtct

SEQ ID NO: 295778 - DNA, 444 bp, Zea mays
attttggatccttactagaaatatgttaagctattacttttgctggccagaatatgggtgtccagtgttccgttgctattattttgggggtctgaattcccagccaatttgccaactttgttgctgatggtttgtcttgccattgcaggagcataccagagctctaaaggaaattcttcagagaatgatcccaacaatacaacagtaagtggattcttctttctaaaaaaagatagacttaggaattcctgttaccttatctttcattattttgcaataggtctttgtaggtgggttagattccaatgtaaatgaggagtatctaaggcaaatttttactccgtatggagaaatttcctatgtgaagattcctgtaggcaagcattgtggatttgttcaatttaccagcaggttcatataaatgcttattaaagctctttaatt

SEQ ID NO: 295779 - DNA, 380 bp, Zea mays
gccacacgtcctgccgagataactatatcggctgtgctctgacagcttagacctgcgggctgattcaatcaagatgaaaccagatatctgacagaccgcatacagaatggtgccacagaagtcgtggaagcaaaagctgaatcacgctccgtgactgtttcaatggctgaagctgctactaaaggcgctgacgcatgcttgcgagctatgcaaagcgaacctggaagctatgaatgctcatatgctgcatgcaatgcagcagatctgccgatctaatcaacgaatgtcaagcttggacgctgttgacccgaggatattctaccgattggccataacaatgatatcgtaagagctagtctggtagcgacagaggaggaact

SEQ ID NO: 295780 - DNA, 241 bp, Zea mays
ctcatcgataaggtcagcagaagctatgataagtttttcttcggagatgctgctagagagaaatgtgattactttctgggggggattttgctgattggtatattgaagctagcaaaacacggctttaccactcgagtgacaagatcgctgctgctacagcccagagtgttctggtgtatgtgtttgaaaacatactgaagttattgcatcccttcatgccattcgtcactgaagaaattat

SEQ ID NO: 295781 - DNA, 442 bp, Zea mays
cggaattcccgggtcgacccacgcgtacgcggacgcgtgcggtggatctccgggagattcgtaggtgccaaagcagcacggagctgaggacacggaacctccctataagggcctggaaacggagatcgctctcaactgccagaccgatctcaggttccagtactccaccgactgtgttctgtatgaggccgtctaagcgtacctcgtggggctctttgatgacactaacctgtgcgccatccactccaagcgcgtcaccatcatgcctactgacatccaactcgcacgccgcatcaacggagacaaggcctgaacgatgcgagctcatctcactcaaggccccgtagttgctgatgcttacctgctagcaggacttgtgctcatcgcggttacctttgtgccatcaacgacatcttcgtgccactgtgcttgctcttagaat

SEQ ID NO: 295782 - DNA, 450 bp, Zea mays
cccacgcgtccgcccacgcgtccgcccacgcgtccgcccggcgcccgcgtacgggagcgccgccgccgtccgtgacccgtactacgcggcgccgccggtgtacggcgggcagccgccgtacgccgcgccgccggtggggtacccggtcgacgctcctcctccctacggcggtggttatggctatggagctgctgctccgacggcgtacggcgctgaggctgctccactacctgcccagcagcagaagagcagcaagatggggatggggacggagctggccgtgggcgccgcggcggtgctgctgggcggactcgcgctggcggaaggtgcgagctacgtggaggacaagttcgaggatcgcgtctgcgagagggtggaggaggagacgttcggcgacggagactacgacgacgattactagaatgaagcatgtgggataggagatcatga

SEQ ID NO: 295783 - DNA, 246 bp, Zea mays
cggacgcgtgggcggacgcgtgggcggacgcgtgggcggacgcgtgggttgcggctgacaaactcatatatgctcgtgagactattaagtcgattgctcgaaagcatggactggtagcaacatttcttccaaagcctgatttggatgattttggatctggttctcacgtgcatctgagcttgtgggagaacgatcagaatgtttttatggggtcaagtaaagatacctttcatggaatgtcaaaac

SEQ ID NO: 295784 - DNA, 442 bp, Zea mays
  unsure (1)..(442): unsure at all n locations
gttactagtcagatttatgtacatagcaagttaatgatagttgatgaccgcatcacattgattggctcagctaatattaatgatagaagcttgcttggatcaagagactccgagattgctgtggtcatcgaagataaagaggttgttaattcaaaaatggatggaagaccttgggaagctgggaagtcctctttaagcctacgcctctcgctgtgggtggaacaccttggccttcatccaggagaggttagccatatcatggatcctatagatgattcaacattcaaaaatatctggatggccactgccaagacaaataccatgatataccaagatgtcttcgggtgtgtacccaacgatctcattcactcaagggttcaatttcggcaaagctttgctcacttgagggacaaaattggccacactacaatngatttgggtg

SEQ ID NO: 295785 - DNA, 349 bp, Zea mays
ccgggtcgacccacgcgttcggttactctaactcttacgccaacttatcttattctttcaaggattcaaaaaagcttatgggggagctatgctccaaaataaaggtgggtgatagatgtgaagttatgcctgttgccaaaaggggcactgtaaaatttgttggtagagctcaagcccttggacgtggattttaggctgtaatgcagtatgatgagccacttgtgaagcatgaccgcatggtgaaaggcatccgcttctttgagtgccctcaaggtcatggggcattcgtaaggccacagaaagtaaaggttgtcgacttaccggatagagacccttttgaagacgacga

SEQ ID NO: 295786 - DNA, 414 bp, Zea mays
gaccgcgccctgctccgccgcggcgccgccgagcgcgtcgaggacgtcatgctgccgggctcccccgagcggatgcggcgcctgatgcagctcgcctaccaccgcccgcgccgcttcacgccgggcttcgtgctccgggatctcgcccagtatctgtacagcgacaaagtagaagagaagaaggagctaatcaaggggataacgctgggcaacaaagacaagttccagcttactcctctcccccaggaagtccttgtgttgtggggagagcacgaccagatattccccgtcgagaaggcatttcaagtggcaaggaaacttggagcgaatgctaagctggaggtcctcaaggacaccggccacatgcctcaagaagaggatccaaagcggttcaacgaggcaatcctcaacttc

SEQ ID NO: 295787 - DNA, 250 bp, Zea mays
cggacgcgtgggcggacgcgtgggtccggcgcgtgggcggacgcgtgggccaaggccatccagatgttcgatggcgccctgctgggagggaggacggctagggtgaactacccggaggtgccgcgtggcggggagaggagaacagtcaccatgagtggccgcaggcgtgacgatggcacttacaagatttatgccggcaacctggggtggggggtgcgtgccgacacgttgaggaacgtgttcgagggta

SEQ ID NO: 295788 - DNA, 425 bp, Zea mays
gttataatgccggcaggggggcccacttgacactcaaaaggactgaaaaagctggtagggtggttaacaggatcccaggactggtagatgttgtgaccacaaaaattgtagcttgggagacagaacgaagaaaggagttcacatatgatggtgtccacctgcggtctatgcttgtagactacataatcattctccatgagtgagagctatagaataagaagcacagggatcagaagaagatccaggatcaactgaaagctgagcacgaagcgctgtatggatgaaaaccaagtacatctaagactgaaagtgcgaacaaagtgcctagacaattcatgggtggtgcgaaccgaagactgtctattggtggaatcacaacgcaggcccccaaaactgatataatgcacttgaagacagcttgcgct

SEQ ID NO: 295789 - DNA, 230 bp, Zea mays
cccacgctttcgtttacgcttgggcgggaacctcccgggcggggttgcgtctgtcgacggcagggaggagagcatgaacgctctgcactgggcgctcgacaacctccgcctgcaccccaactgctagctcgtcgtgctgcacgtccagccgctgtccaacatcgacatgggactcaacccggcgcccatccccttacgcagcctcattcagttggaggttcctgcattca

SEQ ID NO: 295790 - DNA, 334 bp, Zea mays
gaggaatttaaagaagccttggctgattgttaagagaagccagaatttattcctggagagcaaggtgtaatacaagtagctggtcattcagatgcagttacagttgtgacacggatagtaggttgagcatgtctgaaaactacagtatgctgcattgtgaactggtcaagacatcaaattgtcaaacatcgagacactcattgcataatggtacttcttgagcttccccttgctcacaagcacaaaatgaccaatattccaggtgatgctaatcgctttgcgatatatcatattatacagagcttatactaaggtgcactatagactattatta

SEQ ID NO: 295791 - DNA, 312 bp, Zea mays
  unsure (1)..(312): unsure at all n locations
ccattattgccgtctcccttttgcgtgagcaaagaaagagagcgagaagaacaatcgccatgtctgggcatatncacaggatcgaggagaagctccacatggggggcgaccacaagaaggaggatgagcaccacaagaaggccgaggagcaccacatgaaagatgagggggagcaccacaagaaagactgctgggagcataaggaaagcatcgtggagaagatcaaggaccagatcaccggcgagcactgcgacaagtccggcgaccacaagggaaaaaaggacaagaaaaagaagaggagaagaagagcac

SEQ ID NO: 295792 - DNA, 239 bp, Zea mays
gtacacttttttttggttagtcgtctcaagttcagagcgttatgccatgttttgggacgtgattagtacactgttttctaaaagcgattgagctctagtccaatgtattgataatatctgctgttgtcctattgcggtgatgatgatttgccctgttcgctagctgcaatagttcctatttgttgatgaatttgtttgaagcataaacgcagaacatgtcgtaaagaaaacctttctgt

SEQ ID NO: 295793 - DNA, 320 bp, Zea mays
gttcgtgggtgagcggatcgagatggcggcgtaggatgttgagtaccgctgcttcgtcggcggtctcacctgggccacggacgaccactctctgcacaacgcctttagtacctacggcgaggatctcgagtacaagatcatgctcgatcgggagactcagaggtcccgagggttacgctatgtccccttctccacggaggaggcgatgcggaacgccattaagggcatgaacggtaaggagctgtacggctcgaacatgaccgtgaacgatgcccagtcctgaggcggacgtggatgcggaagcggcgggtacggtggtg

SEQ ID NO: 295794 - DNA, 337 bp, Zea mays
cccacgcgtccgcccacgcgtccgcccacgcgtccgcggacgcgtgggtcaaagccgtggaggagctcaaacttgcaagggacatttatgagcatgctgttgttttgagtgtgaaacttgaggaccaagatgcatttgaacgtgatttctgtcagctaaagccttattacatggatacatgtggcataattcccccctcaccagaggagtacccaattttgggactcaatcttctgaggctgttggttcagaatagaattgctgagttccatactgagctggagcttttacctgtcaaggcacttgagcacccttgcatcaagcatgctgtaaagct

SEQ ID NO: 295795 - DNA, 360 bp, Zea mays
gcacaaagtgtgctgctgctcccattagaaatataatagcgtatgttatggggatgcatatatatatgcatcatccatctacctgtgtggtgcaaaattctgaataaaacctgaataaaacctgattgagcaaaagaaaaataaaaaaaaagaacgcacaacagaaagcacaaaagacgacacagcagaaccacaaccagatgagaccgatgataacacttcatatggagatcacaaagttccgaagacatcccattctgaaagataataaatctctcttataggcgatgtgtcgcataagcctgcagtgcatgaagactgtccttagcatccagtacatggccacatcacaactcctac

SEQ ID NO: 295796 - DNA, 444 bp, Zea mays
gttcccagttcccaccgtgtagatggttctggtataaaatgtattgccatgggtgtaacagagattactatatacaggttcgtgatcaaactttgagcagaataaagagcaatattgaactcatagtagcgacaaatggtggaaatagggtggtggtgatcccacactccatgggggtcctctattttctgcattttacgaaatgggtcgaagcacctgctcccgtggggggcagtggtggtccgaactggtgtgagaaccatattaaagctgtaatgaatattggaggatctttcttaggagttcctaaggctgttgctgggcttttctcatctgaagccaaagatgttgccgttgctaggtataaggtaattgattcatttatttaaagcaaaagggaatagcaaaagaatggaatattattggatgctcgacaagcttggc

SEQ ID NO: 295797 - DNA, 439 bp, Zea mays
  unsure (1)..(439): unsure at all n locations
ctctacgcccggtaccactcgcaccaccacgcctccatcgtcaccgagcccatcacatgtacgttgcacacaccatcatatgcatgcatgcttgatgaccttcttctacctagctagcttcattagtgcactgcactgcacgcacgcagcggtgatccatccgttcgcggaggagctggtgtacttcaccctgttcgccatcccgctgctcaccatggtgggcaccggcaccgcctccgtggccgtggccaacggctacctcgcctacatcgacttcatgaactacctcggccactgcaacttcgagctcgtccccaggctgctcttcgacgtcttccctaccctcaagtacctcatgtacacgccatcgttccactcgctgcaccacacgcagttncgcagcaactactcgctcttcatgccgttctacgaccacctg

SEQ ID NO: 295798 - DNA, 303 bp, Zea mays
gctgctaggatgttacaataaacgctatccacagtaggcatacatgacagtctgagggatgtggatttcttgagtgcttagctcatgcatcatacatagaaagctctgtaaaattttactggtcaagtgatgcctaacactgaccggccatttaaattgaactggtcatcgtatagcatgtttgaaacgcgatctgaactggctactgatcactcgatatttgatgcccatctagctgctgatgtcactgatcaaatgctgcaggagctcttcttgagcaagtaccgatcggtgaaaggagct

SEQ ID NO: 295799 - DNA, 469 bp, Zea mays
ctttgtttttgtctttgatagctctgagaacgagcttgccatgctcgaccgcgtacaagtgtttgttgaaacattggacagatgcttcaagaatgtatgcgagcttgacatcgtatttaacttcaacaaggtaccatatgtccatatgatcctactttttttatccttttatactagaatagtgtgcctatcgaggatgcatggtttctatcctgctgaaaattccatttatgattcttcaggtgcatgttttatgcagcagaaaaggtgggacacagaagctgcatcaccatttttgacagcagttgggttatctgtatcaaattacgcctttttatgcacatgtcatatgcagtgctgtgcatatctgaaagtttgagtataacaaatgcctgaatccaagaatccctgttatgcagaatagctataccattatctatccatctaattaattatcgtgggtgtaata

SEQ ID NO: 295800 - DNA, 224 bp, Zea mays
aggcacgcgtccgacggatccaacactccatccgggatgggatgttaccttcattagcgctgttgctgcaacagtcatgagacctattacagtagctacctgcggtgcactgactggcactaatcatcagggcactacgtcttcaacaacttgtgctaacaaaacttgcagcctactctcagcaacagcagtttctttcattgaaccaactagctcgattgaac

SEQ ID NO: 295801 - DNA, 214 bp, Zea mays
cggaccagcagcggctgatcttcgccggcaagcagctggaggatggtcgcaccttggctgactacaacatccagaaggagagcaccctccacttggtgctccgcctaaggggtggcatgcaaatctttgggaaaccattgactggcagaaccataactttgaaggtgaagtctcttgcaccattcattatggccaaagccagaatccagaccag

SEQ ID NO: 295802 - DNA, 454 bp, Zea mays
  unsure (1)..(454): unsure at all n locations
gctggagcaggatcagcaactctttcaatggcctatgcagctgccaaatttgcagatgcttgcctgagaggattgcgtggtgatgctgggataatagagtgctcttatgtggcttctcaggtcacagagttgcctttctttgcatccaaagtgcggctagggcgatgtggcattgaggagatcctaccacttggaccattaaatgagttcgagaggtctgtattccatactcgaacttacaactactcaggttcttgttgtgaattgaaagtcgcatgctctgcattattcaacggccatttcacacatgctttccgtcgagttatatatctcagcaaattagtttgttcagctacttttcgtctacaacaacaggttcatcttgcccactcatctgacccaccatgatttggatccgncaggtngtagtagttattaggctatggtcaacata

SEQ ID NO: 295803 - DNA, 355 bp, Zea mays
cttactgagtgaccaggtcgtgggttcaaagcatttatctcttctctagaccccagtcatgtgggaatctccgatactagaaggttatagacaccatgaatacccctgaccaagtgtcaatgttagtgtccgccttaaatactggaatgatgtgtttaatgactgattcttatgggaatcatgttgtggaccactgcctgcagaaattgttacctgagcacaaggcattcattcttgaggctgctgcatcatgctatcttcaactagcaagagatcgtcatggttgctgtgtcctccagaaatgtattggtcattcaagtgatgaacagagaaacaacttggtgtgcaagataac

SEQ ID NO: 295804 - DNA, 374 bp, Zea mays
aaccaaataactaactaaatatataactataactaaactaaaatgaataaaagaaagggacaacacaagcatgagaaggaaaagaagaagacataacaactgagcgccaacaagttctcggaagcgccagcccatcggcacggcggcgcaaggcacggacgacaaggactacaaggagcccccgtcggagccgctcttcgagcccggcgagctcaagtcctgatccttctaccgcgccggcatcgccgagttcgtcgacaccttcctcttactctacatctccatactcaccgtcatgggcgtctccaagtccacctccaagttctccaccgtctgcatccaaggcatcggctgttccttcggcggcatgatct

SEQ ID NO: 295805 - DNA, 362 bp, Zea mays
aaggctcacactaacattgacatcaacgctggctgcacagccaactgcctagctaattgggctgatgctatcgatgacgagatcagtgtcaaggacggtctgatgaccactgtgcataccattactgatacccagactactgccgataggacctcatataaggactgaactaatgacaggactgctagaaggaacattattcccaacatcactggcactgctaatgctgctggcaaagcgcttgctgtactgaacggtgagcttaccggaatgtcgactcgagtgccaaccggcgatcgaaccgtcgatgattctactgttaagcttgcagagtcaccagcctatgatgagatcaatgatga

SEQ ID NO: 295806 - DNA, 404 bp, Zea mays
cccaggcgtacgtaaagttgaaatttcattactactggtatgaggactgattgcctgcggcataagatgaactgtaggtgaagtgggtcctgcaattggtcatcttcatgtctattcacattcctggtggacttccactcacatctacatgttgaaaaccattatgggactcttcatgtgtagactcgtgtagagactcttggacatccatattgacaacgatcattaaattaaccacttctggagcaaaaaaaaaaaaaaaataaaaaaaaaaaaaatgaaaaaaaaaaaaaaaaaaataaaaaagggctggccattagggcggcccctttataggatccaagtttatgtacccttgcatgccacctaaaaggtctcctaaattgaaacctaaggccaatttt

SEQ ID NO: 295807 - DNA, 435 bp, Zea mays
gtcatgcgtctgggcgctatggactcagttcagacgtcccgaggttacagctacaacgggccgctgtacaggctcgacagtacgagcttcaccacgcgagaggacctaactgaagcgggctccacgacgttcgacggactggcgtgaccggacacttatgcacagtgctttacatgctggcaaaatcaacctgcacaccactgacgctggtggaacatggccaccggccacaccatcaggctgctccattgaccgagcttcgagagccgcctgttgccgtaccaggacccgtccctgaacgagaccttgctcgggcacctgagccggaactgcccgcacaaggtcacctacctgcggacgccgaatgacatgcacacgcacgtcgccttctacaacaagtactacgaccacctggtgaaccacgacgggctcttc

SEQ ID NO: 295808 - DNA, 464 bp, Zea mays
cacaaacttagctgtgaacttgacactataagtggctcgttcctacccaattgtgctcgaatgcgctacttagaagcattgctagacagaggatcgaaagatgggttagtactgattaaaaaatggcttattgaagccttgcagcatgggaagctaacatctgcatccaaaggttggcaaggagccacttctgtttcagagattcgatctatggtgcaaatgctttcccgagaccagttgtcattgttaaaaaacaggggtgttatccagttagcactagctgctgaaatgactctacgggagcctcaaagttctcgctgggacgcctttacaagtgccgagagaatattaagtgtgacatctgcagagacacctcaaagtcttgccagtgagcttcgtgatttcatcaacactagcactttagttgaatcacacacacaaactacttcaatggagtcttcaca

SEQ ID NO: 295809 - DNA, 368 bp, Zea mays
  unsure (1)..(368): unsure at all n locations
ccaacccgaccgacgcattcgtacgtccgctcnatacatctctatctccttttgttaccgcaacctaaaccccccttcggggtgagtttctatacaatccgcgcagggtcctaaacatgtctactgtgctccagcgtccgacctcctgcacgtttcactgcttccatctcaagaacacctctgcacccaatccctacacctatcagcggcaccaacttatcatcgccaactgcgtccagattgagctcatcagaccgcacattctacatcttaatgacttcgaactcatccttctgccagagcactctacgttcaaggacatctacatgatgatacgtttacgacgccattttaagacatatcagatc

SEQ ID NO: 295810 - DNA, 409 bp, Zea mays
  unsure (1)..(409): unsure at all n locations
cctctccctccgctcgctctctccctccctcggtcaaagccagcacgacaacgcagcaggctgggtagctgtccccctcgccctcatccctcctcggcgccgctgccggcccgcctcccccctcgtgccgctctgccgcggcgcattccgcgcccgcctcgccaccgaatcgggcggaatctcagcgggaccaaaatggggtcgccgggtgcggggagcagcggcggccacgagtgctccttcaagatcctgctcatcggggactcgggcgtcggcaagagcagcctnctcgtcagcttcgtcgccgccttccacctcgacggcgacatcgcccccaccatcggtgtggattttaaaatcaaagtccttacagttggtggaaagaaactaaagttgacaatatgggata

SEQ ID NO: 295811 - DNA, 381 bp, Zea mays
  unsure (1)..(381): unsure at all n locations
atgcatactatcaggctagaccggtttagtatattaattctaaacagctcgtgtgatgtttgacccagtcatcgccgtcgacagcgcgaggaaggcgatggagttcctcggcctcaaggacggcggcgaggagcaggccgtcgacatggtgctcacggactactgcatgcccgagatgaccggctacgacctnctcaaagccatcaaggcactgaaccccctggagccgatcccggtcgtcgtcatgtcgtcagaagactagccccagaggatcaacccgtgagccagccggctctggtctttcctctttttgagcaccggttcctttggtccctatcccgtcccctgtgaatgcatgctgaatcattccgtgagatagaa

SEQ ID NO: 295812 - DNA, 396 bp, Zea mays
ccagcttgttaagccccttgatagaatcaccaggtatgtggatgctattcttgcgagcccaaagggcaccctcttccctatgtgtggaatgaaccttgcatttgaccgtgagctcattggtcctgcaatgtactttggtcttatgggtgatggccagcctattggtcgctacgatgatatgtgggcaggatggtgcacaaaggtgattacggaccatctgggcctgggtgtgaagactggcctgccctacatctggcacagcaaagcaagcaacccgtttgtgaacctgaagaaggaatacaacggcatcttctggcaagaagagctgatcccgttcttccagtcggtctcccttccaaaggaggccaccaccgttcaaaagtgctacctcgagct

SEQ ID NO: 295813 - DNA, 428 bp, Zea mays
cccacgcgtccggtcttttgctctcagtaatggccatactgtttatgacatggaacagccttgcagagcaaatgtggctgttcggcgagagcttcatacaccagcttctgaccgatcctgcattcatttagagtttgatattgctggaactggcctaaaatatgaaactggagatcatgttggtgtctatgctgaaaattgcatcgaaactgttgaagaggcagaaaaactgctaggttattcaccagatactttattctctatttatgctgaccaagaggatggtaccccgctctgtgggggttctttgccacctcctttcccgtccccttgcacagtgaggactgcgcttacgagatatgcagatctttttgaattcggctaagaagagtgctttactggcgctggctgctcatgcatctgattct

SEQ ID NO: 295814 - DNA, 385 bp, Zea mays
cccacgcgtccgcgagcccgccagagtagttgggaagcatgcccatgtcctggaaggggccgaggccgaggaatagcagcagcccgagaaccgcgcccgtatcgcccaaggagaagaaggacaggatcggcgagagagtcgcggcgctccagcagctagtgtcgccgttcgggaagacagacacggcttccgttctgcaggaggcctcggggtacatcaggttcctgcaccagcagctccaggtcggtgttccaccagtgaccgcgcgcatggtggccggcactacgtcctcagctccccttacatgcgtgctcctccggctgccggcgccgcgcctgaggatcccgagcactacagccttcggagccgctggctgtgcctggtg

SEQ ID NO: 295815 - DNA, 390 bp, Zea mays
aatacccacctagacccacgcgtccatgggcactatctacttcagacctcaattcaacccaagcgacaccatgaggaggaaaggtcaaaatccaaactctcctggctctcgcaacgagcgccacctccacgcatacaagcggcggctgcggctgccagccaccgccgccggttcatctaccgccgccggtgcatctgccacctccggttcacctgccacctccggtgcatctcccaccgccagtccacctgccgacgccggtccacctgccaccgtcggaccatgtgccgccgccggttcatctgcccccgccaccatgccactaccctactcaaccgtcccggcctcagcctcatccccagccacactcatgcccgtgccaacaaccgc

SEQ ID NO: 295816 - DNA, 399 bp, Zea mays
cccacgcgtccgaacctgagcagcgactttctgccattgttgagcagtattttagagttgggcctttcatgccctgttgaagtgttcatacgttctatataatagcagcctaaaaacagggagctaattagtactggaagaattctttatagcgtccagaagcattcatctgtagattcgtatggtcccttttattttcctggtacaatttatcttctggtggctgcagttgatggattatcgtgtatccttagcttgcaaaactgggtagtttccttaatccttcacatcatatctctggctcccgatgctgtttctgcatcctaaatggcagtagctttgggaaccaactgcatgtctggatcagctcaccatgttcagcattctttcgcttgtatc

SEQ ID NO: 295817 - DNA, 383 bp, Zea mays
tgcacgcatacaacaaccgcgactgtgacatcagcccatcctagccacccaccgtataatgagagcgataatgtatgggagagtgataatatggcttccatggacgatgtcagtaggcccgctcctataatacgcgctatggacaaactcatctgagcgtcctccgctcccgggactggctccgccctcaggccggtggcagtcgccggcggcctccgcggctacaacaccggcgctccgctccgacgctacgagggggccgagtcggaagacgatagcgtccgcgagtacgatgggcggcacaagcggccgggactacgctgtgcccagcctgttctcagatattttccgtgatccgcttagtgcgccgcacagcattggcc

SEQ ID NO: 295818 - DNA, 457 bp, Zea mays
gccagagccagacgccgtcggccgtcctccaccgccctccaggtacgccgccggccccctcctgcctcctccctccaccggcacccccaaagccgccaccgccgccagctactgcctctcccgtaccgccgccgccatcgtacgagcaggccgtaggggtgggtggtggccgaagggaggaggatgacgacgagggcgccggggcggtgatacgggcacacctgctctctgacttcaaggccgcggtgcgtgcaggaaaagtactggtgtccgacccgtcgtctggaaagttgaagggcaagctttgaaaatgtcatccactgtgccgaagtcatcaaatatcttctggcatgattgcctagttggcaagactgatcgccagaagctactcaaccagaaaggctgtgttgtctggatcacaggccttaagggctcaggtaaaagtaccttggcatgt

SEQ ID NO: 295819 - DNA, 263 bp, Zea mays
gctctaccggtccggaattcccggggaagatttgtcttatcaccatcagtttattctgcatgctgcattagatgttgttcaggatctagcatggagaacaaatgcaatgttcctgaagtcagttgatagattcaatgaccttgtggtgtctgtttatgtaactgctggtcataccagattcatgctgcttcatgactcgcgtatcgaggatggaataaaaagcttttttcaagaggtccatgaactttacatcaggatattcc

SEQ ID NO: 295820 - DNA, 295 bp, Zea mays
tatatatagccaagacacacactaatactttgcattccatttcatctcagaggatagagtgatgggcggaatctccactcatgcttatcgcggtcctcctcctgctcgtttgttacaccgggactcatggcggtccggtgactatggtgtcagccaagacttgcaactcgaatagctttcgctttaatgtaccttgctacagggacgccaactgtgcagacctttgtctgaccgaaggtttcaccgacggcgtgtgcaacggcctacacgaccgctgcttctgcaccaatgactg

SEQ ID NO: 295821 - DNA, 418 bp, Zea mays
ggggcggtccctttttgcaaaccaacacatacgccgaatcgagtcaatcggcattcgggcgtccccagtccaccggaaataattgccttgatcagcaacgatggcgggagatccggccgccggggtcggcggcaacgcccaccccgcgtcggggagcaagagctcccgctcgtcgacgcggcaccgtcagttccgcgaccgagccaaggtccgagtcgacgacctacaagagatgttctgcggcctccaatccgctcgcaaggagagccgctccgccgacgccgctgtcctcgaggagcaggtccaccagatgctccgcgagtggcgtgccgagctcagcgtcccatccccggcttcctctctccagaactcgcaggggaacaaccgggaggcttcggatccaccgtcggatacgctg

SEQ ID NO: 295822 - DNA, 420 bp, Zea mays
ggagctagaaattactgcattgcacattaatctccatgctactgatggaaacaagagcaaaacctatggccctggcgctcattctgatcttagagctctcgctcaatctggcattaaaataggacgtattgacgatgttactccagtcgcaacagacaacacacgcataagcgatatagaacagaaagatcttaatttcagtactgacttactgccctgtacagaagtagcagttacaagtctctatggatatcatatactgaattattatgcttattatcgattgaactattgactgaactcatgaatgattactaatactcattcttgacatggaatacaacataactgtacaattactagaaaagaccctggaacaacagctgcgccaactcctgacaacaatgggtgtgccaaaac

SEQ ID NO: 295823 - DNA, 401 bp, Zea mays
  unsure (1)..(401): unsure at all n locations
ccgcgctcgcctacatggaggacgagggccagtgggtcctggccttctggatcgccagcggcgcggcgctgctcggcttcctcctcttcgccgtcgggaccatcaggtacaggcacttccttcccagcggcaacgctgttgtcagcgtctgccaggtggtcgtcgctgccgtcaggaaccggcgcgtcagagctacggttcgagcgcaggatatgtacgaccccgataccgatggagatcgcggcaagaagggggtcaggaagatggtgcacacaccagagtacaggtgtctggacaaggcagcggtgatcaaagatccagcgtctgcgttccgagcaccggcaggtcaaccacagggccattcctnctncaagcccaacccatggaggctctgcacactg

SEQ ID NO: 295824 - DNA, 313 bp, Zea mays
gactggcaagactatcacccttgaggtcgagtcttctgataccattgacaatgtcagggccaagatccagaacagggagggcatccctccggaccagcaccggctcattttggccggcaagcagctcgaggactggcgcacgcttgccgactacaacattcacaaagagagcaccctgcacttggtgctgcgtctcaggggtggcatgcagatcttcgtgaagacacttactggcaagacgatcacccttgacgtcgagtcctacgacaccatcgacaatgtcaaggccaagatccaagacaaggagggcatt

SEQ ID NO: 295825 - DNA, 427 bp, Zea mays
gccatgggtccatggcccagcaatttattttctgaatttaccttcaccttgtgcttgtggcctttttgcaggtatgttgcaccggagtacgccatgacaggacacttgcttgtaaaaagtgatgtatatagctatggagttgttctacttgaactactaactgggaggaggcccgttgatatgtcacagccctctgggcaggaaaacctagtgacttgggtaacacttctttcttttaggagtatactatcttcagttcctgtgtgattttacagctaaattggaatattttaacgtgatgactctcagacactctggattgtgtgtgcatacgttgtttttatgtatgtgtgggcagctgacaactggaatttaaatctgaaattgctcgtatatatatatatatatatatatatatatatatata

SEQ ID NO: 295826 - DNA, 383 bp, Zea mays
gtcggcgcctacggtctcgccggctccagggccagggcgtgcggctgagaaggcagggctcgccggcttcggacgacgtgtgtgtgcggcagcaggccggccggcagagctcggattcccggccggtgctgcagcagtgcatgtgcctcctgatccaccgcgcctaacgccgagcaagatgagatcagttcttttcttcgtgtgcatttgcttcctgttcgtgtcgacggcgagggcggaaggcccctaccagttcttcgattgggagatcacgtacggcagtatcagccctattggatctctacaacagggaatcctcatcaacgggcagttccccgggccgaagatcgagtgccaaacaaacgagaacctgatcattaacg

SEQ ID NO: 295827 - DNA, 455 bp, Zea mays
ggaattgccggaccgacgcatgcgtccgctggtacgaccgagctcgctcgcttgtcttgacgatgagtgctgactgaccaaccagctgctatacaacctgggtggtctgagccagcaacacacgctgtcacgcaagggcgccaacgaggtgctactcgtcatcaaggcctacaagactctgcgcgaccgtgcgccctacccggtcagcttcatgctcgcccagctcaccggctgctacaccttcatcctcttcgacaagtccaccaactccctgctagtcgcatacgaccccgagggcacggtgccgctcttctgggggatcaccgccgacggctgcgtcgccttctgcgacgacatcgacatgctcaaaggctcatgcggcaagtcgatcgcgccgttcccgcaaggctgcttctactccaacgccctctggaggctcaagtgctacgagaacc

SEQ ID NO: 295828 - DNA, 432 bp, Zea mays
atctcgagcattcagaaacacaccaagtgaagcacattagcaacaacctaacaacaatgggtaccaagatattatcccttcttgcgcttcttgcgctttttgcgagcgcaacaaatgcgctcattattccacaatgctcactagctccaagttccattattacacagttcctcccaccagctacttcaatgggcttcgaacacacagctgtgcaagcctataggctacaacaagcaacttcggcgagcgtattacaacaaccaatttcccagtcgcaacaacaatgcttggcacatctaacaatacaaaccatctcatcgcaacagcaacaacaattactaccagcactgagccacctagccatggtgaaccctgccagctacttgcaacagcatgtgcttgcatcaaacccacttgctatggcaaacgtag

SEQ ID NO: 295829 - DNA, 429 bp, Zea mays
  unsure (1)..(429): unsure at all n locations
gagagccgaacgtgacctcccagccgccccatgctcaccctccccggtaccctccggcgggcgcgcgctcctcctggcctacctccccgccgacacctctcccgcctcctggaccgttacggcttcgtggccccggactccctcaccccggccccgcgagaacctcacagcgacaccgccgactccgccgccgctgcgaagaagcgccgcgcgaagaagccgccctaccgccctccgtcctcgctggaccgtggcggtcgcccgcccgcgcactccgacctccccttcgacttccgcttcagctacaccgagagcaccccggcctncaagcccatcgggctgcgcgagcccaggtactccccgttcgggcccgggcggctcgaccggccctggacggggctctgcgcgcgcgccgtcgacgctaccctg

SEQ ID NO: 295830 - DNA, 326 bp, Zea mays
gatgaggcaaaggtgcagaggttggagtatgatcactgtctttgtgacgagcggtgtagtgactattgaactgaccgtagcgctcctgttatgtggatgaagtggaatgctgatatggggaacggacttcatcacctgcaagtgcaaattgatatgcatggtatgagctagctcaaagtggatgggagtgatggtacattctacatgtgcaatgaaccctgttgaaaacgacagcattgttgctgagatgctgcggagatattacgactctgttgaactatttgatgtcactaatgaactaactgaattagtccgtcgtcctggac

SEQ ID NO: 295831 - DNA, 409 bp, Zea mays
  unsure (1)..(409): unsure at all n locations
caaggctgcccaggacattgctttggctgagcttgctccaactcaccctattaggcttggactggcactcaacttctcagtgttctactatgagattctcaactcacccgatcgcgcctgcagtcttgcaaagcaggcttttgacgaggccatctcggaactggacaccctgagcgaggagtcctacaaggacagcactttgatcatgcagctccttcgtgataacttgaccctatggacttctgacatctcggaggaccctgcggaagagatcagggaggcgcccaagcacgactcgagcgaggggcagtaaagccggctttttaacccgtgcccctaagaagctaagtanncctagtgttttgcatgcttgtctttaatgaccacttattngcaatgtntngatctg

SEQ ID NO: 295832 - DNA, 415 bp, Zea mays
  unsure (1)..(415): unsure at all n locations
ggtaaatggacagctgcagacaagcgacagctctgtgtatgccgttggcgatgtggccgggttccccatcaagctttttgacgatgatatccgacggctcgagcatgtggactcagctcgtagaactggtagacatgctgttgcctccatcttggatccttcaaagacgagggacatcgattacctgccgttcttctactccagagtgttcacgttgtcctggcaattctatggggataatgtcggggaagtggtccactttggagacttcacaagcagcagtccgaggttcggtgcatattgggtcaacaaagggcggatcgcgngnngttgccccgtttcttggaagggggcggaaagtcgggaagaaggtaccgaagggcccatatccgnaatcgctgtnntcgggcgggaa

SEQ ID NO: 295833 - DNA, 428 bp, Zea mays
agcgagaacgccaaacgagaaaagtaacctaagccttcgccatcaaaaaaaaaagagagagggaaaaaaaagagcagaaaaagtagagtagactacgacagcgtccggcgaggaggcggaggcgaagatgaggaagaagctcggcacccggttccccgcggctcgaatcaaaaagataatgcaagcagatgaggatgttggaaagattgcactagcagttcctgttttagtttcgaggtctcttgaattgtttttacaagatttaattgaccgtacttatgaaattactcttcaaagtggagcaaagacactgaattccttccacactttggaaagccaatgttggtgaaggaaggtacccagttctttttgaatttccttaaacctgaaagtttgttcaagcaaagggtaccatgattcttgggtgg

SEQ ID NO: 295834 - DNA, 318 bp, Zea mays
ggcgcggacggtccgcggcacagggccggacggtccgcgacctggcgcagggctagggggctcttgctggaatctagatctcgtcccctggggggaaaagatcttaaggtgctccgggtcgacaggtcacccggggcgtccccagacgacgtggagtcgcctaagaattaagagatcaaatcgaggaagaagtcttggatgaacaactagatcttgccccccgggaggggtgagatcctagggtcgtcttgggatcgacatgccacccaagacggatctagacgacgtaaagtcgaataggggtggatgtggatatgt

SEQ ID NO: 295835 - DNA, 389 bp, Zea mays
cttcatgtaaaatctgccatggcagaactttctagatatgaaagagtagatgatggagagagtgtcaagtactcagagttgttctatggtcgccacttcaatgttgtttttattggcacaacgctctttgctttacaacagttatccggcataaattctgtgttctatttctcatcaactgtattcagaagtgtgggggtgccctctaaccttgcaacatatgcatgggatctaatctatagacatgacatgctttaggacaagctagtaaaagtgctttttagagttctggatggcttttgcaatggggcttcaggctgttggagcaaaccgtcagtattcttggttctgcatgtgtatatctttcagttggtggccatttctgttgt

SEQ ID NO: 295836 - DNA, 359 bp, Zea mays
  unsure (1)..(359): unsure at all n locations
gtgaaaacccaattgttcaaccctacaggatccaacaggcaatcgcaacaggcagcttacgattatcacccttgttcctccaacaaccgtcagccctattacagcagtaccttggtccattggggccaacatcagcacacactcacactggctgcaacctgtgatactctacacatagtcttcatcccactggctgatgaactctgtgtattgcacacatacattcaccgctgtgctgctacccagcattcttcattcaaccactagcagncattggaactctgctgcttatttacagcagcaacaactactaccattcagccagctagctgatgtgagccctgctgcctttcttgaca

SEQ ID NO: 295837 - DNA, 373 bp, Zea mays
  unsure (1)..(373): unsure at all n locations
gcggcgtgccggtgctggcgtggccaaggttcgcggaccagcgagtgaacgcccgcgtggtggtccgttgcgggctcggcgtgtgggctgatcagtggagctgggagggggaagaggcgctggtgagagcggaggagatcacagcgctggtgatggaggctatggaagatgacgcgatggcagtgaaagcggcgaatgtccgcgaggctgcgtcgagagccgttgtggacggcggcacgagctaccgaagcctggcggcgttcgtgcgtcgttgcaccgcatgaagttatataaaaattacttatataacttaacttcaaccggggtccttatataaactttttaaaaaatatgccctnnattccagaacata

SEQ ID NO: 295838 - DNA, 320 bp, Zea mays
gcaactgccttgctccttgtagcataatgacagtcgttcgtgagtctgatacgactgccatgccatcactgtacccaaaactgtgatgggccctatctaagactgagggaagggctgtgttaacatcattcagacctgactgtaagctgtgcaaatgcttctgtcttaacgaagtgactgaatgcttcggtcaccgcatgtctgtgtgatgactgtagctgaagtacacctatgaggacaagctgcgcaagggccgaggcagaaggtagcctcaagggcatcctgggttacgttgaagaggaccttgtttccaccgattt

SEQ ID NO: 295839 - DNA, 412 bp, Zea mays
gcaacatataaagcacaatagtgttccaacaatggcagccaaaatatgatgcttgcttatgctcctaggtcttactgcaagtgctgctaccgcaaccattttattacaatgcttacaagctcctatagctgcctatcttactgcatacctctgaccagcggtgtctacagtatgtgaaaacctaattcttcaaccctacaggatccaacaggcaatcgcagcacgcattttacctgtatcacccttgttactccaacaactgtcagccctattacagcaggtacctatggtgcatttgatgacacatgacatcaaggtacaacaactacaacaacttgtgctaggaaaccttgctgcctactgtcagcaacagcacgattgttgcattcaaccgactggctgcatagaactc

SEQ ID NO: 295840 - DNA, 419 bp, Zea mays
  unsure (1)..(419): unsure at all n locations
gctaaacccccacgccgccgcggcgaccttctccgccggcgggatggacagcctcaggggagtcaagttgccgggcgtgccgaagggcgggagtgcgctcgtgaaggtggcgctgctcggcggcgcggggctctacgccgtcctcaacagcttctacaacgtcgagggcggacaccgcgccatcgtcttcaaccgcctcgaggggatcaaggacaaggtgtaccccgaaggaactcacctgatgatcccgtggatcgaaaggccgatcatctacgacgtccgcgcccgacccaacctcgtcgagagcacgtccggaagccgcgacnctttcncaagaatggggtgaagaattgggnntcttcgtggtcccttaactcgacncnncatgccaagaaccaagcttaccttaaaaatctaca

SEQ ID NO: 295841 - DNA, 421 bp, Zea mays
  unsure (1)..(421): unsure at all n locations
gccctggtcgcgcggggcacggtggtgctggccgagttcgccgccgtctcgggcgacgccggcgccgtggcccgtcggatcctcgagaagctgccgcccgacgccgagtccaggctgtgcttcgcgcaggaccggtacatcttccacgtcctccgatccgacgccgccggcatcaccttcctctgtatggccaacgacaccttcggaagaaggatcccctttctctacctggaggacatccaaatgaggttcatgaaaaactacggcagagtcgcccactctgcgctggcttacgccatgaacgatgagttctccagagtgcttcncnattcaagncgaaatgggagtnntcttctccaggccaacccaaagcgcnncgacacacttccaacccgtcttcnncgtgggagaaagtcaagcg

SEQ ID NO: 295842 - DNA, 322 bp, Zea mays
cgccatgcttctggaccagtaaccgctgcaaaaacaatatacgaggacagcaagggctacttgatcatcgttagcctgcctttcgctgattttcagaaggttggcggatcctgctcctgagcattgcccgccgggagagtttgtccgggagatcccactccctacccgaatccctgaagacgccactctggaagcgtactgcgatgaaacagggacagggctggagattattgtcccgaagttccgcgttggccctgaagaacacgaagtgcatgtgtccatgaggccaccctcgtcctggtgccaatgaaacctgtttcca

SEQ ID NO: 295843 - DNA, 370 bp, Zea mays
cggaattccagggtcgacccaagcgtcccgtctgatcaacattgtttaaagacgggggacgctttttagcaatcaaaggaatgaaaagggattgggtcatttgttatttgtcctatcaacaccctatattatggctacaacactatgtacaaagtgacatcatacaatatatatatagcatacgcctaatccactggaggataatgtacattcatcgtgcaagctatacgacatggataaaacatggttaattgaacagagagatgataatcggttgttcattgctcttctaagagaatcaaaaatgaggctatctgatgatatcattgagacaatcctggataagacattctctgatgctgatgcaaat

SEQ ID NO: 295844 - DNA, 356 bp, Zea mays
gttgacaggaggggtggagagggagtgggtcgaagtggttcgcttgtttttgaggaatggctagaacccgcatgctaaaggaatatttttactcaaaaccaacctaacatgtgaaccttttgaaccaaacacggattgatgcatgttcaacccgttccaacccgctaaccaaacacaccctctgtgacgcgagcaggttggggacttgggattggggttcggggagagctgaaagggaaatgtgcccttgggccatttctaagtattttggtgattgagtgccaacacaagtgattaaatgtgaatctatgcccatggatggacaaagtgcaaatcaagagtaaaggtatgtttct

SEQ ID NO: 295845 - DNA, 249 bp, Zea mays
cccacgcgttcgggaggaagcccgtggtgcatgacgagcgcgacaaccgcctggtgctggtggactgggtgctggaccgctggcgcgcttgctgcgtcacggacaaccgggacccgcgcctgcagggcgactttctcgagcgcgaggccagcctcgtgctgaggctcggcttgctgtgctcacacccgctgcccggcgcgcgcccggtcatgcgccagatcgtccagtacctcgacggcgatgcgccgc

SEQ ID NO: 295846 - DNA, 355 bp, Zea mays
ctttcaatatgcgtcccccaataactaatattcatggcaaaaccgttgacccttgtgttaggcctctccttagtgacagctatgtctgccataatctctcatgctgatggatactgcgagaatgaccttcaaagccttataagtgactgcactacatacgtgatgttcccatctaatccaaatgtccctacttccgatgcttgctgtcgtgtcattaaaaaggcaaacgtctcttgcttatactccaacgtcaccaaagatactgataaagctgtgtgcatagagaaagttgtgtatgttcctcagcactgtaagacgccatttgagcattgcttccaatgccgcagctacaaag

SEQ ID NO: 295847 - DNA, 421 bp, Zea mays
  unsure (1)..(421): unsure at all n locations
cccacccgtccgttcacacccacgaagcatcaaaccagtggactggactagcaaggtgggcaacatgaagcctgcggccaccggcagagttgctggcctcctattcttcctcgccctcctcctggcgctgacttacctccgagtctccatggctggatcagggttctgcgacggcaagtgcgcggtgaggtgctccaaggcgagccggcacgacgactgcctcaagtactgcgggatctgctgcgccacctgcaactgcgtgccgtccgggaccgcgggcaacaaggacgagtgcccatgctaccgcgacatgaccaccggacacggcaaccgcaccaggcccaaatgcccctgatgatattccttccttcgctcncgggagccaacttccagctggggctgtccngcatgcctatgtaat

SEQ ID NO: 295848 - DNA, 269 bp, Zea mays
gcagcatgatgaaacatattatggaacaaaatatatacctacggcagcacgcagcatgaggaaacatatttaaaaaatttgggtgctctaccacatgcccgtggaataaaacggatgtaaactcagtgcaaaaaaaaaaaaaaataaaaaataaaataaaaaaacaaaaaaaaaaataaaacaacacaaagaaaaaaaaactacaaaaaagcaagcacaaaaaaataaaaaaaaaggggcggccgttttaaaggatccaagcttactta

SEQ ID NO: 295849 - DNA, 411 bp, Zea mays
  unsure (1)..(411): unsure at all n locations
gtcggcgtcgggccccgcgaccacaacgacgaccacgacgacggccacgacagcgtcgggggtgagcacgagccggtcggacgactcgggcgcggcgcggccggcgagcaagtcggcggggtcggccggctcgtcgtcgcagtcgcaccggagcatctcctcgctgtacgaggagcggggccacggccagctgcgggtgttcggctacgaggagctccagggcgccacggccgacttcagccgcgcgcagaagctcggcgagggcggcttcggcagcgtctacaagggcttcatccgcggcgccgacggcaagggggaccgcgttcccgtcgccgtcaagaagctcaaccagcgcggtatgcanggacattaagcatggttggcggangtacagtttcttggtgttctgga

SEQ ID NO: 295850 - DNA, 390 bp, Zea mays
ttcccgttcgaccgacgcgtccgccaacgcttccgcccacgcgtccgtccactcttcctcaggaaatggtggaccatttccaggaacagtggtgtctttcagcccatggataactactgttgctgctgtagttgatgaccgcatatacaagaatcatttaacactacgaaatggaaaacttctctctgggcttggagtatcacctgcaacacatgggaatatgtcgttcagcttgatttctgcagctgatgctctattgggttcatctgcaaccaatttcagtgcattagattgccagaagcctgaactattgaataacaggaaagttcacgggagaattctcatgcgttgctattccttcaattacatttctggacaacttcaataaaa

SEQ ID NO: 295851 - DNA, 362 bp, Zea mays
ccggccgtgacatcctccgaaccatccgctccatggcctccaacatgctcagggtatacgactggcacatcaccgactgccagaccttccccatcgttctgccctcggtccccaatctcgccaacttcggctcctactccgacgacatgcgctacaccgaccaggacgtacgacgcatcgtccgatacgccgaggcctttggcattcgcgtcatccctgaaatcgacatgccccgagagtgagagctgattccacagtactgtactggatcctgcactatgctacagctgcaatcttcaatgcaaagacttcagggcacacggggtcgtgggcggacgcgtacccggagatcgtgacttgcg

SEQ ID NO: 295852 - DNA, 450 bp, Zea mays
ctatcaggtggcctaccaaacttctataagttaccacagaagatttgcctatcattgtagtagttatgtcagatattaatgttagagaatctggttcaagtgcagatcgtccttgcttgaacgcatgcctgtattagatgaagctaggtatctggtgaagcgggctactgctacacaatcaactatttcagcagataaaattgctccaacagtcactcctggaagccttaagcttccgaatggtgtagcaaaacccacctcagctcctttagctgatttgcttgatttcagttctgatggtgccccagcttccaccgttgcttctactacaacacctaatgattttttgcaagatcttctgggtattggtggagttagttcatcaacgacaggtgtaacttcaaccgcaagcacagatattcttatggatcttctgtccatgggatcatc

SEQ ID NO: 295853 - DNA, 356 bp, Zea mays
  unsure (1)..(356): unsure at all n locations
ctacactgaaccctgctgctgatttgcagcaacaactatcaccatttagccagcgtggctactgactactctcagcagcaacaactgcttccatctaaccaattggccgcactgaaccccgctgctcatttgcagcagcatatactactaccatggaaccagctggctgcagcagaccgagcttccttgttgacacagcaactgttagtgcctttctaccagcaatttgcggctaaccccagaaccctcttacaactacaacaattggtgccctttgtccaacttgctttgacagacccagcggcctnctaccaacaacacatcattggtggtgccctattttagattgcttatta

SEQ ID NO: 295854 - DNA, 131 bp, Zea mays
aacaaacataacaacaaaacacgttttcaatctaacacatatacaaaaggtccgcggctctagacgatccacgcttacgtacgcctccatgcgacgtcatacatcttctatactgtgacctaaattcaatt

SEQ ID NO: 295855 - DNA, 327 bp, Zea mays
aattcccgggtcgacccacgcgtacgcccacgcgtccgccaggtcatgtcatacctgacggctttcctgacgttcgatggggctctgaacgttgatgtgaacgagttccagaccatcctggtgccctaccggaggatccacttcatgctttcgtactacgctccactcatttctgctgagaaggcctagcacgagcagctgtccgtggctgaaatcacctacagcgccttcgagccattctacatgatggccaagtgctacccccgccatggcaaggacatggcatgcttgctcatgtaccgatgcgatgtggctcccaaggacgtg

SEQ ID NO: 295856 - DNA, 304 bp, Zea mays
cccacgcgtccgcccacgcgtccgcccacgcgtccgaaaaaaaaaaaaaaaggaaagaaaaaaaaaaaaaaaaaaaaaaaaaaaaaaaaaaaaaaaaaaaaaaaaaaaaaaaaaaaaaaaaaaaaaaaaaaaaaaaaaaaaagggggggccgttttaaaggatccaagtttacgtacgcgggcatgcaacgtaaaagctttttaataggggcaccaaaattaaatgaacgggccgtcgtttaaaaacgtcgggactggaaaaaccctggggttaccaaactaaatggcttagaagaaaatcccc

SEQ ID NO: 295857 - DNA, 369 bp, Zea mays
cccacgcgtccgcccacgcgtccggcccgtacgagattacctacgccgacgactcgtgcaccgtcggcaacctcgcgcgcgacacgctgactctttcgccgaccgacgcggtcccgggcttcgtcttcgggtgtggccacaacaacgccgggtccttcggcgagatcgacgggctcttgggcctcgggcgcgggaaggcgtcgttgtcgtcgcaggtggcggccaggtacggcgcgggcttctcctactgcctcccgtcgtcgccgagcgccacggggtacctgtccttcagcggagccgcagccgccgcccctaccaacgcgcagttcacggagatggtggccggtcagcacccgtcgttctactacc

SEQ ID NO: 295858 - DNA, 417 bp, Zea mays
accacgcgtacgagcagaacaacgacctttacaatcttactcaacttcgtcagatggggttcagggagccgatgtgctgattctagatctatcaacattgcgagacgctacagatgactttgctgaaagcaaaatgctcggtaaaggagggtatggtatggtttataagggagtcctgcctgatggccaagaaattgcggtaaagaggctttgccagagttctcgacaagggattggagagctgaagagtgagctagtactggtggctaagcttcaccacaagaaccttgtgaggcttattggtgatcgcctgcaagaacaggagaaaatacttgtgtatgagtatatgcccaatcgaagccttgacaccattctgattgactccgagaagaacagagagctggattggggaaagag

SEQ ID NO: 295859 - DNA, 187 bp, Zea mays
cccacgcgtccggtcttctgataccattgacaatgtcaaggccaagatccaagacaaggaaggcatccctccggaccagcagcggctcatttttgcccgcaagcaactcgaggaacggccccacgctggccaactccaccatcaaaaagagaaccaccttcaattggtgcttcgtcttaagggtggc

SEQ ID NO: 295860 - DNA, 378 bp, Zea mays
  unsure (1)..(378): unsure at all n locations
gcagttcaccacagataacggctttgaggacgctaacattccctttggtcctgtggaagcaaatggtagaacgatactgagcattgatgatcgtttggaggatgacaggcatcagcttcccttgacggctgctgatgcagttgcaaccaatggtgtgaacccgtggaattggagagacacctctactgatggtattaatctgcacatgtcacaacacacaagttaaatcaatacctctgaatgggtggcctttaacttctcagtgcttaaaattggtataatttgaattgttgctatctcactgtgttgtgtactccctccgtttcgttttagttgtcgctggatagtgcaaaattaaaccatncagcgacaactaaa

SEQ ID NO: 295861 - DNA, 400 bp, Zea mays
gcgacgcgtgcagccatgtttgtagtcgtcctggccctggtgacggcgatcgcaagggctagcacaggcggtggcagggccgaagccgagtgcgatcccaagtccctggtggtgtgcaatcccgcattcatggacggagcgaaatcctcgtcaacattctgttccaccctgcgttcccaggacgtatgcttgtgcgtgtacgccaaagacccctactttgccaaatacatcaacaaccacaacattgcctaaagctttatctcgatcggcatatgcttacccaaatgcttagcaagcgctctgcgtcgttgctgctcttgctcttgctatagtgagcaacatattcagcttatgaatacattatgtggatcagtttagaaaaaaaggccccccccttttt

SEQ ID NO: 295862 - DNA, 362 bp, Zea mays
tgctgccgttcacgacgatgagccggtcaccaagagtaacgccgaacacaccgttggaggagttatttagaatctcactagggccgtttaacggacgtcctaaatcttcggcgtaataagccatacgggacgtaccggaaaggataagcccggcgaggaaacgaagaaaaatgtctaagtcgtaggagccatcgtctaccatcatgaggacgagatcgtcttcatcggtatacgcgtcgcacgcgccgccggcggcgaaaggctaccgaccgtaaactcgctagtggtaaatcgccataaactcgagtactcaaagagattagagaatcgggtatcagccgaaaaggtaaaacatactcata

SEQ ID NO: 295863 - DNA, 378 bp, Zea mays
cagcagttacctttggtgcatttgttgtgcacaaaacatcaaggcacaacaagtacaagaacttgtgctaggaaaccttgctgcctactctcagcaacagcagtttcttccattcaaccaactggctgcattgaactctgctgcttatttgcaacaacaactaccattcagtcagctagctgctgcctacccccagcaatttcttccattcaaccaactggcagcattgaactctgctgcttatttacaacagcaacagctaccaccattcagccagctagctgatgtgagccctgttgccttcttgacacaacaacagttgttgccgatctacctgcacgctgcgcctaaagcttgcacccttttacaactgcaaca

SEQ ID NO: 295864 - DNA, 333 bp, Zea mays
gtgtactccctggactacgctagaacaaggttggctaatgacgcggaggctgccaagggaggaggtgaaaggcagttcaatgggcttgtcgatgtctaccgcaagacactcaagtctgatggtattgctgctgggattacaaaaaaaaaaaaaaaaaaaaaaaaaaacaaaaaaaaaaaaaaaaaaaaaaaaaaaaaataccaaaagcaaaatacaatacaaaaaaccactgtactgtaacatcaactacgcaactcaccaagcacaaatttgcgtgctcaactactccagtttgaaaaatcccaacaagaatgatatcggcgccttatatga

SEQ ID NO: 295865 - DNA, 423 bp, Zea mays
ggcggcggtgctgctgctgcagcacggtggagccgcgagcgccggcggcaacttctagcagacgtggacatcacctggcaccaccgcctcatcctgatagtcgacaacctgctcttcctgatcccggctatcaacaccagctccgggacctgctgcgtgcccgagtgggccatcccgcacagccgcttcgacatgcagctcaagctcgtgaccagggactccgccggcaccgtcgccaccttctatctttcgtcgcagggttcgcagcacgacgagatcgacttcgagttcctggggaacgcgagcggggagccgtacacggtgcacacgaacgtgtacagccaggggaaaggcgggcgggagcagcagttccggatgtggttcgaccccacggcggccttccacgcctactccgtgctgtgg

SEQ ID NO: 295866 - DNA, 414 bp, Zea mays
gtcccctattttacattacccactggtgacagtccgatgatgttcgtcttaatcttcgtttgggaccaaatcatccatgttcaattatccgccttcggcctaatttggatactcacatccatctggaatcctggaattttccctgggtgggtaatccatggggatgacattttagtctttataggggtttttgcatccctgggttttgcttacccttcttcgaaagtaggcattagtggccagagcgccaggccatgccaattttcttttttctgatgcatatgttcttttatcagtgatcgggttgcagctgggcgtgcacttgatctttcagtgtattttggtgattctggaagcagataggtactgcacaaaattggagctgaaagagcttgtgctgctgcaattactttg

SEQ ID NO: 295867 - DNA, 400 bp, Zea mays
  unsure (1)..(400): unsure at all n locations
ctttggccacagtataactatgggggctggccatcatgctgcagaccaaccagattcgacatatataagatcttaatgttgatgccgatactcgagaagtattggccgtccttgtactgtggttcttcttcaacctgctttggtggaagggggccattttgggtgcatgagtgggaaactcatgggacctgtgcttaccctgaaatacaggatgaatatgactacttctccacagcactgtatctctacagcaaatacaatgttacgaaagctctgagaaaagcacgtatccggcctacaagcggcagaaaatacgccgttggccatattgttgccgtcattgaatatgcgtntggtgcaatgccgtcactcgtctgtaagaacggctcagttcaagaac

SEQ ID NO: 295868 - DNA, 425 bp, Zea mays
ctgacaagtcccgcttcaccgctaagtgtgctgcctagagctgcccgtggcgcatacgtgcagcaaggctccccggtgtgcccaccttctccattagaaccatacatgacaaccacagctgtgtcgggatcaaccatcttggccatcagcaggcatctgttcagtgggttgcgaacactgtcgaagagaggctacgtgagaacccagaatacaagcctaaggaaattttggaagaaattcacaaggcccatggcatcaccctatactacaagcaagcttggagaggtaaggagcggatcatggctgcggttcgagggtcttttgaggaaggataccgtctcctgcctgagtactgtaggcaggtggaaagaacaaatgcaggaagtatagctcgagtgtatggaaacccagatgacaattgcttt

SEQ ID NO: 295869 - DNA, 411 bp, Zea mays
tccggatcgacccacgcgtgcgcggacgcgtgggcggacgcgtgggctgtctccagttgacagcaccatccagacgatggatgcgtgagcttatgggcgtaagacctggctcaaggctcctacataccagacagacaatgtgccgtatgtgtcagatgaacctcaaagcgataagtgggctagggttctatcagatgccacattcgacgtaccaacgaatcctgacatcctacttaatgcgttcgactcagctgcaaacgttcaacccgagaaggtaacagacatatggaatctcaggagaatactcaacacgtcttggcataccatcaaaatccagagatcttcgtgcgtcgaacgatctaagctgtgaaattaagtacgcacttgaccacttggataaagcacacttac

SEQ ID NO: 295870 - DNA, 255 bp, Zea mays
tccacacccacatgtgctactacaacttcaacgacatcatccactctatcatctacatgtacgcggacctaatcaccattgacaactcgctgttctacaagaagctgatctccaaattcctcgaggtcctcaagtacatcgctttcatcgaccttcgtgtttacgacattcactcccccactatcccgtccgctgaggagatcgtttaccacatctacaagatgctaacggtgcttgacaccaacattctctggg

SEQ ID NO: 295871 - DNA, 405 bp, Zea mays
cttttctacttgggaccatgttcttctaccagactgaagtgctaagactagactcctcggttatcggcttatcgaaggtgtttgggcaagtggctctattggcttggagcatgtcatacaacaagtacttcaagacaatgtccgcccggaagctcctgtcagttctgcagttcgtcacagcgctcgtaatgttgtcagatgtgttgttcgttcagggagtatacaggaaggtgggaattccagactccatatacacgattgtcttctccgggctgctcgagggccttatgtttttcaaggtcctgcccttcagtgttcatgttgcaaaactttgccctgctggctgtgagggatcagtgatggcctttgtcatgtctgcgcttgcccttgcgactatcgtcagtg

SEQ ID NO: 295872 - DNA, 347 bp, Zea mays
cccacgcgtccgcccacgcgtccgaacaacgccatgtccggtggctgtggctctgggtgctgtggtggatgcggcagcggcatgctcatcgaaggctccaaggccaacaaagccatgtccggcggctgtggctctggttgtggtggtggttgcggcagcggcatggtcatcgaatgctccaaggccaacaacaccatgtccggcggatgcggctacgggtgcggcggaggcggcggctgtggtagcggcatggctatcgaaggcttcaaggtcaaccacgccaagtctggtggctgcaactctggctgcggtggtggtggctgcagcaccctgtgcagctccagctc

SEQ ID NO: 295873 - DNA, 311 bp, Zea mays
gcaaaggctgaggatgattataagactggagataacgagaagatgatgaagcacatgcgtagaggtctctcatgagcgagcatgtgccaacgagctacagcccatatcgcatgggcacccagaacaaatcacacaagaacaatctgctgactgctataatatcttgaccaatgactgccaggaacatttggctatgaagcacttcgtcttaataaatcaactggactttaaaggttgactacatgatcctaacatgtgaccctttgatctctgtgacaccaaaaataagcttaacaacttcaaactatatg

SEQ ID NO: 295874 - DNA, 261 bp, Zea mays
ctcgtcttcttatccatacataacttgctaaaaaatgtaatgcgaggatggttgcatgggccaaaaatattaaggcttcagatccactctaagagggctgcaggcttgggccagttgttagtgaatgacaagctgagaagattcatatgttgatatcgaatgccaaaagccatggtgctactattctgactggaggtgttagacctgcacatctagtgaagggggtctctatcgagaccaactatgattactgatatcacc

SEQ ID NO: 295875 - DNA, 438 bp, Zea mays
catctattcagaacttgaagaaagaatcaaaatacactcttgacaaagtagctatcggtgaaagcgatgtgcagcgtgggcgaactgatctgagatctactgggaagcagatacaatctcttataggttccatttacaaagcagaatctacctgtgttcttgggcgtacgcggacacagccccgatccgaatcgtcgtccttgcgagcctcgccgatcccccactcccctcccctcgcttcaagatgcagatctttgtgaagaccctcaccggcaagactatcaccctcgaggtggagtcttctgacaccattgacaatgtcaaggctaagatccaggacaaggagggcatccctcctgaccagcagcggcttatcttcgccggcaagcagcttgaggacggacgcacacttgctgactacaacatccagaaggagtc

SEQ ID NO: 295876 - DNA, 456 bp, Zea mays
taccggtccggaattgccggggcgagccacgcgtccgctcagacccacagctacctacagccgagagagggaccgggcagaatcccacggctcggaacgacttcgagttggcatggttgctgcgcgcaggcatcggctgacatcacatagacaatgctgaaatgctgttgctagtgctctgtgctagcaacctgaatggtgaccaagtggcaaccatatgttttcacccaatagggagatggccctaccggtgtcaccggaagacgtctctggatctacaagcctggccttcatgggttacatgtacatgcactgggagacaccaccaatggatgcatgtcaacttgaccacactacactactgctagcaatgagcatccggcaccatacgatgagaaccgccatgctggtgatcatggcaacgagacagcttgagcatatggagctgcttgtatc

SEQ ID NO: 295877 - DNA, 390 bp, Zea mays
cggccgtcaccctctccggcatcgcaggaaacatcatctgcttcctggtgtgccttgcaccagtggcgacgttcctgcaggtgtaccggaagaagtcgacgggcgggttcagctcggtgccgtacgtggtggcgctcttcagctcggtgctgtggatcttctacgcgctggtgaagaccaacttgaggccgctgctgaccatcaacgccttcagctgcagcgtggaggcggcctacatagtcctctacctggcgtacgcgccgtgtcgggcgcgcctgctgactctggcctacttgttcctgctggacgtggcggccttcgcgctcgtcgtcggcgtcacgctcttcgccgttcgcgagccccaccgcgtcaagttcctcggcagcgtct

SEQ ID NO: 295878 - DNA, 392 bp, Zea mays
gtcattcgtacacatgaatcctgtcattgatagccgatctaactgaagacggccaaggttgatggcgactgtaggcagtggagggtcgtgctgcatttgcgaactggttaaaacgcccagattgttcagcacatatgctctcagatattgactggtgctgtcaggataaaccgtggcgctggtgctatatgatgtgacgtcgattctgtgaactatgtgaagctattgggactgaacccacacggggagacctgatgtgaacttgtgctggggttgtctatggcagaaaagctgacgtgccaataggatcttgtggaaaaggctcatgatgatgcttattattcagcacataacttggaaccgagcatatactgtcatgctgcaatggatta

SEQ ID NO: 295879 - DNA, 294 bp, Zea mays
taagtcctataggctcccagactcccttgcaacaaggactccagctccaatgagatgggtcagctccaaaacagaaggatccatcaaagccatcgaaggtgtcaaaggccataggattgttttctgcctccagccctgcaaagccacatacgtcaatcagaacttctcgcagcaggtgctgctccgcaatggtgagaaggtcacgttcgacgagcctaacccgtttgccactgaaggggaggaagctgcttccgttgcttaccgctaccgtcgctggaagcttgatgaggagac

SEQ ID NO: 295880 - DNA, 169 bp, Zea mays
tcgaaggggccaatcggtcttgactgtcagcacgctggacatagggataagattgttgacttccactggaattcgtcagatccttggactaacgtgacaccttgtcatgctagcgagagcactggtggaggtggaacactgcatattcggcgcatgagtgatttgatct

SEQ ID NO: 295881 - DNA, 241 bp, Zea mays
gccacgcgtccggccacgcgtccggccacgcgtccgtcttctctttgctttccaaggcggacatgggtcctgaagggcagtatatcacattgcaggttctagtgaatattttggagcatactgaatgccatgctgattataacttgacacctcggcaaactattgagccagtgataaccttactgaattcatctacaccagctgtacatgaattagctgcacaactactatcacatcttct

SEQ ID NO: 295882 - DNA, 186 bp, Zea mays
cccacgcgtccgcacacgcgtcctgcggcggaccacctgccgacgccggtccggatggcaccgtcggtccatgtgccgccggcggttcatcatgacgcctctaccataccactaccatactcaaccgcgacagcctcagcctcatatgcagggacacccatgcccgtaccaacagccgcatccaag

SEQ ID NO: 295883 - DNA, 249 bp, Zea mays
cagacgcttgcgcggacgcaccggctgctcaagagctgggtatgtcgtatggggggatggccagcatctgaccgatcaggcaggactgggaacccttatgttcgcgctagaaggcacccaccagaccagcctacaatgctgacaaagccttcaacagctcgcgacgagcctgtgcactaatcgataccatgaagaaactcaacactgttacgaccaaagctgcattcagcggtacattcctcaacacca

SEQ ID NO: 295884 - DNA, 330 bp, Zea mays
cgagaaggccatacttctcgtcctattccgaggaccaccagaactgccgcttgatctgtagctcgaagggtttcaaggacggtggctggtgtgacgaaagcgtggagcacaaagtgtgctgctgctcccattagaaatataatagcgtatgttatgttgatgcatatatatatgcatcatccatctacctgtgtggtgcaaaattctgaataaaacctgaataaacctgattgattaaaaaaaattaattttatctctcaagttgaaaatattatttttattttttaatgtatatattttttgttctttttttttgtgttttatattttt

SEQ ID NO: 295885 - DNA, 284 bp, Zea mays
cggtccggaattccagggtcgactcacgcgtcgcgtccacgcgtacgagagaccaggccgaaggaaaacaatcctgaaaccaagccatgggtctgggggaggaatttgaggagcatgctgagaaggcaaagaccttgcctgagagcacgagcaatgagaacaagctgatcctctacgggctctacaagcaagccacggttggagatgtgaataccgatcgtacgttcatattctaccataaggacatggccaaatgggatgcctttaatgctgttgaatgcaaa

SEQ ID NO: 295886 - DNA, 265 bp, Zea mays
tgccgtaccggtactgaattcccgacgcaacgccacgcgtccagcagcccgcgccggctccgatcttagatccactagagactaaaatcctggtcctgggggggcgccttcatcggggagaccctcaccacctcgatcttcctctacattgccattctcaccgccacagtcgtctccaagtccacctccaactgcgccaccgatggcatccatggcatcgcctggtccttcatctgcatgatcttcgaacttgtctactgcacca

SEQ ID NO: 295887 - DNA, 375 bp, Zea mays
cggacgcgtgggcggacgcgtgggcggacgcgtgggctaacgagtacaaagtacgaacgacacgcacacacaccagcaggcagccgcgcgcgggctcgatcgcaatggcgtccaaatcctccaatgggggccttttcctcttacgcgggttttctggttgtcctggtgcttgtggcgggttccacgcttgcccaagcgcaggcgacgccggcggcggcggccaacttcttgtggccctttaatgggttcgtgccggtattcaacattacaaaaggtcttggacttgttgcggagcttgaccttgacactgtgcgccaatggcttttgaacggtttggaaaggggtaatttccttggtcggcttcttcttcggttc

SEQ ID NO: 295888 - DNA, 391 bp, Zea mays
  unsure (1)..(391): unsure at all n locations
atcacaccggatccgctctggctccaacaacggtgatgggctccatggaagcgtcgggcgcgccggagaacggctcctccgctgccggtggcggagccggcggcacggcgtgcaacggggcgggcgccgcgtctaacggacgaggcatggagaggcagctgacgtcctcggccgcgttcgcgtcttgggcggcgcaccttcccctggacgtgggcacgcgcgtgatgtgcctgtggcgcgaccagaagctccacccggtcaaggtgatcgagcgccgcaagggctccgcgtgctattcccncgtcgactacgagtattacgttcactacaccgagttcaatagaagacttgaccagtgggttaagctcgatcagcttgatcttgacactgt

SEQ ID NO: 295889 - DNA, 424 bp, Zea mays
  unsure (1)..(424): unsure at all n locations
tgctcctccccatccgcctccgccgtcccggtcttccaccccaagaactcctcctcctgccgcctcgtgggctgccgcaacccctcctgccagtgggtccactctgccgcgaacctcgccaccaagtgccgccgcgccccctgctcccccggcgccgccaactgccccgccgccgccagcaacgtctgcccgccctacgccgtggtctacggctccggctccacagccggtctgctcatcgccgacaccctgcgcgcgccgggccgcgccgtccccggcttcgtcctcggatgcagcctcgtgtccgtgcaccagccgccgtcgggcctcgcgggctttggccgcggcgcgccgtccgtgcccgcgcagctcggcctnccgaagttctcctactgcctcctgtcccgccgcttcgacgacaacg

SEQ ID NO: 295890 - DNA, 432 bp, Zea mays
tggctttggacctttgggctgatttatgtgcttggctgtctctgtctctagatgatcgggttgttgttgtccggcgtcgaggtccctgccggctctcctggtggtgatgagtatttattagtagcctcgcagaaacggtcgacggcgaggatacttagttctccgctcgtgataacggtattggaacggctaaggtcggccccgtcggggatgacgtattaagggtggcccctttcagtaccgccggttgcttctgttatatcggcgctacggcagggacgggatagaaggacgtacacgccggtgacgaggtatagcttaagagaggcacctctatgtctaagcatttgaccgagtatggcaccgcgagtaatcgggacgatacggagaaaactcggtactacatccctcataatgagtcctgcgccgtat

SEQ ID NO: 295891 - DNA, 431 bp, Zea mays
cggacgcgtgggcggacgcgtgggcggacgcgtgggctaacgagtacaaagtacgaacgacgcacacacacaccagcaggcagccgcgcgcgggctcgatcgcaatggcgtccaaatcctccactgcggccctcttcctctacgcggctctcctgctggtcctggtgctggtggcggtttccacgctggcccaggcgcagccgacgccgccgccgccgcccagctcctcgtgccccttcaatggctccgtgccgctatccaacatcacagaggtccttggactgctcgcggagctggacctgaacactgccgcccagtgcctctgcaccgctgtggaaggtgtcacttccctcgtccgcctcctcctcggctccatcgggctcatgctgcccttcgacttcgagtgcaccagcacctaggcgcatgcatgc

SEQ ID NO: 295892 - DNA, 433 bp, Zea mays
cacactttgagcattcttgatcattctcactccgactttgcgcactcgtttgacagtcttagtgatttgagctccgttctagtggtgaactttgtgatactcatttgagctcaattcttggctgtgtgtgtgcgtatttgctgtggatttgagtgtgttgcttccctcccttactctagtgctttcactttgattcttattgtaagggtgagagactccaagttgtggagattcctcacaagcgggaaagagtaaagaaagaagaacaccgtggtattcaagtcgatcattggatcacttgataggggttgagtgcaaccctcgtccgttgggacgccacaacgtgtagtatgcaagttttgtacttggccgaaccacgggataaatcctcgtgtctcttgtgctagatctcactatgtctattgtatttcac

SEQ ID NO: 295893 - DNA, 356 bp, Zea mays
aattcccgggtggagccactcctccggaaccaacaaccctacgtccgcgttttttttcttcagccgtgccctccatccgatcagcactcattgcctgagctggcgcgggctctcaacctgtacaacgctacagctgcctttctcgccagctgcaaggccaactcttacgcttccctcggcacctacaacgttgatgctgccgcccacacctagagcctccacgtcatggactacaactactgactccctactctatgcgttcccatttcggaactcctgcctacgatctacgatctacgagtgaggcctgctccttatagcttattctccgacatccaaaacacatgcttcatatg

SEQ ID NO: 295894 - DNA, 326 bp, Zea mays
aattcccggctggacccactcgtccggtggaccacatccttgatcgcgctactatctaccatgacttcacaaacatccttccgaagaattactgacgattcgcgatctatcatatctactctgttactgcaaatgatgtccaaacaaccactatcttctatatcctatggtccccatcctccaccaaggtgaacagcaacatgctttatgcaagctcaaaccataaattcaatattgtcctcaatggcattcaccttgaactccaatccacatatgctagtgaaatcagcctcgatgagatcaaagatcttgcacactatgcacac

SEQ ID NO: 295895 - DNA, 420 bp, Zea mays
gcgtagcacagtccattattgccgtcttccttttgcgtgagcaaagaaagagagcgagaagagcagtcgccatgtctggcatcatccacaagatcgaggagaagctccacatggggggcgaccacaagaataaggaagaagagcaccacaagaaggccgaagagcaccacaagaaagaagaaggggagcaccacaagaaggaccgccgggagcacaaggaaagcatcgtggagaagatcaaggaccagatcaccggcgagcaccgcgacaagttcggcgaccaccaggaaaagaaagacaagaaaaagaagaagcacggcgagggccacgaccacgacggcggccacagtagcagcagcagcgacagcgactgagatctggtgtcgcagcacaagtgcaacacatgtattcttgctggat

SEQ ID NO: 295896 - DNA, 415 bp, Zea mays
agcacaaggtggaggttattgccgtcttccttttgcgtgagcaaagaaagagagcggggagagcactcgccatgtctggcatcatccacaagatcgaggagaagctccacatggggggcgaccacaagaataaggaggaggagcaccacaagaaggccgaggagcaccacaagaaggaggagggggagcaccacaagaaggacggcggagagcacaaggaaggcatcgtggagaagatcaaggacaagatcaccggcgagcacggcgacaagtccggcgaccacaaggaaaagaaggacaagaaaaagaagaagcacggcgagggccacgaccacgacggcggccacagtagcagcagcagcgacagcgactgagatctggtgtcgcaacacatgtgcaacacatgtatgcttgc

SEQ ID NO: 295897 - DNA, 335 bp, Zea mays
aagaaaaaaacataaaaaaaaaaaagaatacaaaaccaaaaaaagaaaaaaaaaaaagagaatgcactaacaaaacgggcagaaggcatggcgccccgcgcccgcgatagccacatacaacgtgtgctgtgtcggcgggtgcttcagctccgacatactcaaggccatggaggtcgacgtgacggacggcgtcaacgtgctctcgctctcccttgtcggcggctcggaggagtactaccgtgacagtatcgcagtgggcgctatcagcgccatggagaacgggatcttcatgtcctgctccgcgggcaatgccggcccgggcgccgcgacgctgt

SEQ ID NO: 295898 - DNA, 419 bp, Zea mays
gtgttggcaggaggatcccttacgccgtggcgctgaagcgcaaccacgaggcgtgcggggcgctgctgaacccgtcggcggcggagcccatggtgtggccgtccccgttcaagttcatcagcgagctggagccggaggccaaggcgctccttgaagcggcgctgacggaagccaacagggagagggaggagaagatcctcaggggcaccaagcactctccgcatcctcccacctgggaccacgcgagcgacgccgccgacgccgacgccatcgacgacgcgtcctcagatgtatgctttgtgaccgctgacaaatgtgggacctgatgcatcatcgcccattttgcgctcacttgactgttcactcacaggccagcgccagcgacgcggagctgtgctgcatctgcttcgaccaggcgg

SEQ ID NO: 295899 - DNA, 388 bp, Zea mays
cccacgcgtccgaagagagttgtgaaacactggaagtcatgtcttgatgtgtcttctgtggtcgtagcctacttaatattttgaatctggggttagtaacaagctcttgttgtttcattggattcctgaaaagttcagttgatctagttttctctgcaaagaacatgtgcatacctgtttcaggctaacaagttctttcgtcttctttggtaggttctccttgagctggcccgtagccggaacagaatgccgctgcccaaatcaatcgctcctcctggctcgattcccctcccacctgagcaggacacactgttggcccagaactaccaactcctgcctccgttgaagccgccacctcaatatgaggaaatagaggatgagactgaag

SEQ ID NO: 295900 - DNA, 278 bp, Zea mays
acttcgtcttaattcccggctggacgccactcctccgcagcactctgctcctaacgctggttctctcttacaactgcaacaattgctgtcattcgacctacttgctttgacaaacccattatcattctaccaacaacccatcattgattgtgccctcttttacatctcttatcatttataaatcattactaaacccaaccttactcatctttgagaatatccacatattacaaactacatttataacaaataatcctttacctatcacccttcccaac

SEQ ID NO: 295901 - DNA, 303 bp, Zea mays
tcccggctcgacccactcgtccgcacaaacatgcaataatgacaacatttttggtgatctacacactcacatttagaagaacaaatatacagctgctgtcgtagcaaacttataatcagatctttagacaacatttactgtctatgactttggaactccaaagctaataccaattatcaatttagttcttccagaccacactacatgtaatcttgaataccacctcctacatgaatatacttgtagttaatgcaatctattaccttaattccacccctatttttaacctttctgattcctttg

SEQ ID NO: 295902 - DNA, 397 bp, Zea mays
cgcatacgtcctactaatgctgtgtatctgttatctggatgtctgttctcgaaagcggggcctgcatggacgaataagagataggatgcatgtgcggaatgcgaccatgtctgaatgacagatgaggatgctgacgaagctgctactgatacctaagccaatggtgttctaaatgaatctgatcagcctttatgaacgtatgacttacgagatagatgagacatggcaaagcaccgaaccaaacatacctggtgctcctcatacaaccggaatgtacctttgtcgtatggaaaggacacagctgctatcctcagagaccaacagtttgaagaaatcgaacactgctgcattacaagcccatatgacaacgattgttgggagattcatgaacagatgc

SEQ ID NO: 295903 - DNA, 390 bp, Zea mays
tttatttattttttttttttttttttacttttattttttttttttatttaatcggtgggcattatttaactcttctacatatttacagcatcaacaactactaccattcatccaactatctgattttagccctgctaccttcttgatacaaccacagttgttacctttataacatcactcttaacctaacgctaccaccctcatacaactgcaacaattgctgccattcaacctaacttactttaaacaaacaccagtatcagttctaccaacatcccataattgaacatgccctcaattagaaatcttacaagttatagttcaataataaagttttttgacagatccttgtagcttcccacatataatacagtacatttctagattgtt

SEQ ID NO: 295904 - DNA, 436 bp, Zea mays
cccacgcgtccgcccacgcgtccgcccacgcgtccgcggacgcgtgggccccaacgtgccggcatattcgggtgggggcaatcctggctaccctggtggcagccctggctaccagggtcaaggaggcaactccaacttccagtgaacatgaccacgagtactaagttggcacccctgtttcagagtagccttctgcaagagatggtgcgccgtagcctagcataaatcgaacccttgttgctatcggattttcatggattgtcgctgtttgcacttaatgttctatatatagtactcaaaactatgcttggtgtctgagtgatgtacgtggaattctgaaactatggatcagctcttgtgtgcacttgctgaaccagatacccagcagtaagcttttgtttgttcgttttgagtggttggttaaccacatacttgg

SEQ ID NO: 295905 - DNA, 409 bp, Zea mays
cttgccatcaggatgttcagtgtgagatatgtggagaaaagcacctgaagaagggcatcaagcggcatctgcaatcacatgacaaggcgccctctgatggaaggatgaaatgcacttttgatggttgtgaacacttcttttgcaacaaatcaaatctgaccaagcatgtcaaggcatgccatgaccagctgaaacctttcaagtgcggaatcgttggatgtggcaaggcgttcacctacaagcatgtcagggataaccatgagacatctggtgctcatgtatacatggaagtgagttgtgctacctgatctatgttaattccgagtttgcgattgttggcctattaagtcaaactatcagctcctgattttcgtacgtatctctaatttaaacgtatgttcacatctgc

SEQ ID NO: 295906 - DNA, 293 bp, Zea mays
tctcactcgtccaaccaaacatacgtcttcagcataaacatttcattaaaggaccaagggtaccttaagtgagccacacatttgtctccttactactttcagaactgaaccttgatctaaggtcagaaactcaaacctactgtcccacttagtgaacaccaataccttatatagtgtattaggacattccctctccccaaatttcaaaaactctattatgctattgaatacgaccttcatgctgattataccataactattttcttaggaaacaattacaacacctacacttt

SEQ ID NO: 295907 - DNA, 379 bp, Zea mays
cggaattccggtgaccacgcgccgcgaaagtcacgacatcccattctgtatatccaacagtggcgaaagatacgagggtgaagaaaaggagtgggtggaatccactggtgtgtcaaatggtgattttgtttcttatgtgaacgagtggtgcaaagacggggctgtgcttatcggtggctgctgcaggacaactccaaacactatcagggccatacacagaactctgaacaaaagccccaacaagcagcagttacctgctgtagaataagagctgtgctctactctgatgcgcccgccttcctcctagcagtacctcgaggctataactccatgattccgtaaccgtacgtgttcgttctcttgcaaacgagatgtttgt

SEQ ID NO: 295908 - DNA, 388 bp, Zea mays
cccacgcgttcgcttctacttcatcagcagccgcccttctagatcaaaggggactagctactccttcatacgacataatatctctattatagcaccaactaaaaacaaactactggccgttttacaacaacgtgactactaaaaaaaccctgtcaccaaacaaattaatcttgtagcacatcatccttttttcagctgctgtcataacaaagaagacgccaccaatgatcgttcttaacaacagctgagcatgcttaatgaataatacgacccgcgctgcagcgcatcattaaccgcgggtgttgtggttactaccagcagaatcaccactatagtcagcagcgtactagcgcccgcttcttctgctttccttcccttctttgtcacc

SEQ ID NO: 295909 - DNA, 225 bp, Zea mays
cgccacgccttcggccaatcgttcggccacgcgttccgaaagaatgcattctttgcccggtttctgaataccctttgtactcaaccctcataactcttcatgggggaactcttgtcccctattaacttaatgaaaaaaccgggtgggggttggagaactctgatcttaaaaagcaactggaaaatgctcggtcaaaaagcattgatggtaaggccctggtgggta

SEQ ID NO: 295910 - DNA, 380 bp, Zea mays
gtcgggcttcagcgtggccatgcccaaggtgcccgcgttcgtggccgacatgcggcgggtgcgcgacctcaacccgagcgccttctgcgggatggactccaagatgggcgtgctgatgcgctacgtgcgggcggcgtcggcggacctgggcaaggaggaggactcgctcgactgtcgacgtcacctactaccggagctacaacgaaggcacaccccgcatgcacgccgacgtattcgacgagctggagcagatggcgctgcgcaagtacggtgcgctcccgcactggggcaagaaccgcaacttcgccttcgacggcgtcatcgccaggtaccccgcgtcagcgcggattctgtacgagaacgacaggtacgacccggac

SEQ ID NO: 295911 - DNA, 370 bp, Zea mays
gtactcggtccggaattcccggggcgagccacgcgtccgttcatgtttagggcaaaaggttcgggattgacaagccacttatacaactatgggcgggtcaatcactaatcccagttacttatgctggagcagtgtcaacaatcgatgacctatagaggataaaaaacgcaagcaaaagtcgattctatataactcttcggagtactctacatatatctgaaggacatttaccctacaaagatactgaccttaggcacaataagcaaagtattgatgcccaattgtcaaagaacatatggtaacgatcaatattgtcataatttattgcaaataccttgctcaaagcatatttattttcattaccaagtat

SEQ ID NO: 295912 - DNA, 397 bp, Zea mays
cccacgcgtccgcccacgcgtccgcccacgcgtccggaaaacacaaataaggttatttcgcctgagatgattccaactgaccatgaccgggttcacaagagttctgcaatttcagatgatccctttatagaggaaaaaatatattatcagctacaagatgctcttggcaagttggataccaaaactcgactatgcattcgagatagtttgcttcgtttggtccatagtgcaacagagagaaagattgatggtgataggagcactaacaagactaataaagatgaagatgaagcttcggaagacgcatctactaggaaaacaaggtctccaaacaaggaagcagaaacaaccactaatccaattgatcgtatagtggcccatttgctgttccacagac

SEQ ID NO: 295913 - DNA, 185 bp, Zea mays
actccacgcatgcgtctcgacataaccggactcactcatctggtttctctagcatgatgtggagcttctaggtagaaaaaatcgatgtattattaagcacctaactgatcttaatattaacaagcatttaaggctaggtgctgctttggctggctataccgcatgtgtcacttcattaatcagtc

SEQ ID NO: 295914 - DNA, 340 bp, Zea mays
aaaaaaaaaacaaacaaacaaatcaaaaaaaaaaaaaaccaacaattaaaaaaagagggggaaaaaaaaaaagaaaaaaacaacaaccaaaaaacatactactaaaaataaacaaaccacatactaaacatctacgccctcctttatgactcctttcttacaaagtctgacatctatcttaacaatgctattctaactgattagaaacacttgcctatgtatgactaatcgcctagcatgatcaaagttgaatatattgccagacgagccacccagaactctatcacggttgcccaatggatgcttcaaactcctggtgcaacaagctacatgagatgca

SEQ ID NO: 295915 - DNA, 371 bp, Zea mays
acgcatcgtgaggccaccttctacaagcgcagggactgtctcttcaagaaaggtggggagctctccggtctgtgcgacgtcaacctgctgctggtcctgtcttccacctgcggcaagctctaccactacctctcggccaccgttccctacgtcgaggacctggtcgagaggtacgagggcacgacgcacaccaagggctgtaccgacatccgtcaagagcggcgcgcgcagctggcgaaggcggagctgacgtgcgagctgatggagaaagagctgcgggtcatgacaggggacgacggatagcagtacactgtgcccactgttgagctgcttgaacacaaactggatgcagccgtgcacaaggtgcgctc

SEQ ID NO: 295916 - DNA, 344 bp, Zea mays
gcctttcacctatcacctcggctagccaacctcgcgcgatgtcaccaccactcgcggtgagctcgtcaccttctgtgcgtgacatgtgcctcatgcgctcgatggagatcggggccgactccctatacaaagccaagcttatacgtgggttctgccaactctactacggtcaggaggactgcagtcgtctgcatggaggccgacatcacccggtctgatttcattatcaccgtctaccgagaccactggacctacctcgcccgcggaggggacctagtctgcgacttctacgagctgatgtgccgctacgctggatgctaccgcaggaacggcagttccatgca

SEQ ID NO: 295917 - DNA, 165 bp, Zea mays
tgaaattccgggtccaaccaagccttccaaccgttggaagttaaattaaccggttaaggtgtggatctgtgaaccccatggcgcctctgctgtgagtcgtgtttcacctgttatgttctgagattcatgataatgctatgagaactgaaattcccgtttcatgct

SEQ ID NO: 295918 - DNA, 371 bp, Zea mays
ttctttatgttttttgaatctataaatgtactttcttatatctggaaagccacacacattagacgtaaaattttattatttaactataactcataataaatctaaaataagacaccaccaatgataagattttactaaaacacattcttatttttcaaatcaaattcatttaattgtaccaattgatgcaattttaagactgtgccaactatatgcacatcgtgctcgtataacggcaacaactatctatgtgttaacaatgtagcattacttacactagatatctcgctaaatcgtagtaattcatacttttgtcaatatgcattagacttcaattctttcaagagtttcaatcttacaaattactcctg

SEQ ID NO: 295919 - DNA, 403 bp, Zea mays
taaaacacaataaaacataaaaacaaaaacaaaaattaaacataaaaaaaaaaccaaacttacatacagaaacatatcaaccacataactctcatataatatactcctaaattcaattcacttcaccctccatatacaacctcttaatctaaaaaaacccttccattacccatcttaatcaccttgcatcacatccccctttcaccaccatacatactaactaccacgtcctcacctatcttccttcccaacaattgcacaccctcaattgctaatgcgactcccactgtactctcgcattaatcaccctcgccatagtggttacgctcaacctgaccattccactctccatctccctatcgactcatcctttccttttcttcccttcctttcttctcacgtt

SEQ ID NO: 295920 - DNA, 465 bp, Zea mays
  unsure (1)..(465): unsure at all n locations
tgcttggcaggttagcctacgaacaatctgggagaaatactatgaagaggcccatgccatagtgtacgttattgacgctgccacagcatcgtcatttgaagattccaaatctgctctggagaaggttattcgccatgaacatctgagaggagcaccactcttgatagttgcaaacaaacaggatttacctggagccattgatgaggaagaattggctaaatttctgcataaagaactggatgagaggccatatacatttcaggctgtatctgcatatgatggcagggggatcaaatctggcatagactggctggtggaacaaatggaaaaaagcagacgtaccgagacactgcaggctcgtgctggcgtagctggacaaatttagaatgaggtgaatttgttaaagaacanagcattggataggacggcttccttcgtatcgcgtaagcagccatttgctgcatt

SEQ ID NO: 295921 - DNA, 460 bp, Zea mays
cgcccggccgcatcggccgagccttctaacagctgactcgtcctcgtcgctccggcgcggcgacgaggcacgcagccaccgcgcgatggccgacggctccagcagcagcggcggggcgcagaacgggggtgagtcggtggtgattgactacggccggcgccgcactacctgcggctactgccgatccttcgggcccacgagcatctcccacggtatgtgggctaacagtctgaaagctgatgactatcaagctcttcttgatcgtggttggaggagatctgggtgttctctttaccaacctgagatggaacggacatgctgcccctcatatacgatacgcttgaaagcaaatgatttcatttgttccagagagcaagctcgggtacttaacaagatacaaaggttccttgatggcgagctcgatccacagattggaagcccttagtgtaaggcaagttca

SEQ ID NO: 295922 - DNA, 424 bp, Zea mays
attcccgggtcgaccgacgggtacggctccttgctctatctgcatgtgttgctagcgctacaattttgcctcaatgctcacaagctggtatagcttccctgcttactccataccttccatcaatgatagcttcagtatgtgaaaacccacctttatacccctatatgctccaacaagcaatccacagctagcaacatacctttatcaccctattcggttcaacaatcgccgaccctatctttggtgcagtcatacggtcacaccatcatggcacatcaactaccgcaactcatgctacctgtgatccaccaaactgctctagcaaaccttgctacctactctcagcatcaacactcactatcattcaaccaactgtatacacttaaccctgctgattattttcacaaacatctatatccattta

SEQ ID NO: 295923 - DNA, 405 bp, Zea mays
gcaattagctcatcgactccagattggagaactcgacaccatgaaggtgctgatcgttgccgttgctctcctggcgctcgctgcgagcgccgcctccagtacaagcggcggctgtggctgccagacaccaccgtttcatctaccgcctccgttctatatgccgcctccgttctatctgccgccgcagcagcagccgcagccatggcaataccccactcaaccaccgcagctaagcccgtgccagcagttcggatcctgcggcgtcggcagcgtcggcagcccgttcctgggccagtgcgtcgagttcctgaggcaccagtgcagcccggcggcgacgccccctacggctcgccacagtgccaggcgcttcagcagcaatgctgccaccagatcaggcaggttgag

SEQ ID NO: 295924 - DNA, 231 bp, Zea mays
gtccgaattccctgtggaccgacgcgttcgccatgcttcagataggcgctcttgatatcacgccgtggaagctggttaaagtcaagggtcggcttgcatacatagagagatgatgccccatgaccctcacaagcttctggaaggatgccttattgctggagttggtttgagggcattagctgcttacatctacattagaggtgaatacttgaatgagcgtgttaaccttga

SEQ ID NO: 295925 - DNA, 425 bp, Zea mays
gaccaatagctttatctacgccagagcgcagaagaacccgaacgacaccatgagggtgacactcgttgccctcgctctgctggctctcgctgcgagcgccacctacacgcatacaagcagccgatcgagctgccagccaccgtcaccagctcatgtacacgacgtcgctgcatctgccagctccgattcacctgccacctacagtgcatctcccaccgccagtccacctgccgccgaccgtccacctgccaacgacggtccatgtgccgccgcccgttcatctaccgccgacaccatgccactaccctactcaaccaccacagactcaggccttcattcccagccacactcatgcccgtgccaacaaccggattcagacccgtgccagctgcacggaacctgccgcgttggcaacaccccgatcc

SEQ ID NO: 295926 - DNA, 421 bp, Zea mays
ggaattcccgggtcgagccacgcgtccgcccactcgttcgcccactcgtccggtgattgttactggcatcatgtctggtcttgatgaacgggttgctggtatgggtgatgtggcagttgttaaccctccttatgtgccaactcctgtggaagaagtcggatgtagaggcattgcttcgtcctgggcaggcggtttgaatggccgccaagtgattgacaggatccttcctgctgtgcgtgagatgctatcagaaagggggtggctgtacatggtggccctcgaagataatgatccttcagacatatgccatctgatgagcgagatggggtatgcattccgcgttatcttgaagaggtgtactgaagaggagagcctttatgttctcaagttctggcgagacccacacgctgttacaagtgtg

SEQ ID NO: 295927 - DNA, 404 bp, Zea mays
ttttgatccagttttgtcttgcgtggaggtcctggtcttaaaggagacttttgtatgcgaaggtggactacctgatgtcgtacctgcatatgtgcttgtacttctttcatgtttagaagtgccaacctctgcattacctaacatcttcaagctaccttttttcggacggcatcttggacattgccacttcccagggggtagacgcttaagaggaggattgaggcattccaagtggtaaacactaggacagctatcacaacatagcagattgccaccaagatcacattctacacactcaaaaaaatacccatcgtgtcctcttatcttcttggctgatggagaaatgttagtgtcatgcttcaacttctttatggtggaaccatggctcattggagagtcaaatg

SEQ ID NO: 295928 - DNA, 399 bp, Zea mays
aattcccgttctagcacgggttcgtccacgcgttcgtccacgcgtccgcagaccagtttctttatctactccagagcgcacgggaacgcgatctacaccaggagggtggtgctcgttgccctctctctcctggctctctctgcgagcgccacctccacgcatacaagctgcggctgcggctgccagccaccgccaactgttcatctaccgccatctgtgcatctgccaccttctgatcacctgccacctgcagtgcatcttccaccgcctgtccacctgccgactccagtccacctgccacctgctgtccatgtgcctcctgctgttcatctgccggcgccaccatgctactaccctactcaaccggccctgcctcagactcatcctcagacacaccca

SEQ ID NO: 295929 - DNA, 420 bp, Zea mays
cggaattcccgggtcgagccacgcgtccggttttcatgcagaaaggaatgaagaaagctctgataccttattttgagctcacaaatgctgggggggttggggaccttgaactgttcagggctgttgcagacaaatttgcaagcacattcagcgcagacaggactcgtaatttgattgtgaggctgcgccataatgtcattcgaactggactgcgcaacatcagcatttcttactcaaggatctcccttgctgacattgctaagaagctaagactagactctgagaaccctattgctgatgcggagagcattgtagccaaggccataagagatggcgccattgacgccaccatagatcatgcaaatggctggatggtatccaaggaaactggtgatgtctactcaacaaatgagccacaaa

SEQ ID NO: 295930 - DNA, 323 bp, Zea mays
cacacatgtttcaaactatgtcagcatagcagagcaaaccccggactctctggatggtatcattgttgcaaagctgaaagcagctgcaggcttggccaacatggaaacaaagaaatacaaacttgctgcacgcaaggttagtcattaattcactacacctttaaagcacgggtttcttcatgcgtctcctccacctgaaatagcgagtggtttctaccactacaacgtgtctttttatgttgtattaagaagagatattgtgtatgtgtgtgtatatatacacactaataattggaaaacaaaaaatcgtgtttgaataaaaa

SEQ ID NO: 295931 - DNA, 425 bp, Zea mays
ctgtccggaattcccgggtcgagccacgcgtccgcccacgcgtccgggctatctgcagaactgctcaggatatcgcgaagccaattattgcgtgggaacactgcaaagtataagagagactctgttgagtttgaatcacttactttgggtagcttaccacccacctttcaagggatgaaagtctatgtcacagaggagcaagagctgataatggaaccatctcttaaatgggctgcaaacccaaatattactgttgctgtaaaagcctatggtttgaaagctactatccacattgtggatctacaagtctttgcatcacctcgcattactctgaagccattggtgcctacattttcttgctttgcaaaaatccttgtctcactcatggagaagccacatgttgactttgggctaaaactttttgg

SEQ ID NO: 295932 - DNA, 319 bp, Zea mays
cccacgcgtccgcccacgcgtccgcgactggcgatggcgtgcgtgctggcgtccgaggctgccactgtactcgccggcatgcgccgcaacgtccgctgggcggacgtccgctacggcggcgcgggggacgacgagcaccttgaccacccgctcgtcgcggggctcaaggctctccgccgccgcgctgccgcgtggggccacggtcgctggacgggcgtcgaaccgctcctctaccttcgacccttcctcgatgtcgtccgctccgacgagactggggcgcccatcacgggcgccgcgctctcgtcgttgcacaagatcc

SEQ ID NO: 295933 - DNA, 357 bp, Zea mays
gagggaggaggttggtgcaacaccacgcagagctgctccgagcgcaaaatgaccaacttcggttcatctaagtatatgggagcagtaaacttcactgggatactcagcaatgatcacacagaaaatcctgatttctacaactggaatacagttgtcataaggtactgcgacggagcatcatttgctggggatgcagaggggggagatctggatggaaccaaacttttcttcagaggattacgtatctggaaagcagttgtagatgaactcatgggaaaaggaatggacgctgctaaacaggccttgcttacaagctgttctgctggttctctagctgcgctactgcactgtgataat

SEQ ID NO: 295934 - DNA, 364 bp, Zea mays
gcgccgcaggaggacgttctgaaacacgaggcactgggctgctacgtcacgcactgcgggtggaactcggtgctggaagctgtgcggcaaggggtccgcatgatctgctaccctgtctccgcagaccatttcgtcaactgcgcctacgttgttaacgtgtggaaggtcggggtggagctggccaccagtggacagggtgatgtgaaagactgcatcgagagagtcatggaaggcgacgatggacggcgtctgcagcggaaggtgaatgcgttgcgagaaacagtcacggcgggtgaggcaatgcgtgctgccaagaggaacctcaccttattcatggacagaatcaatggcagttagcgccaga

SEQ ID NO: 295935 - DNA, 357 bp, Zea mays
atgagacctactcggaacattccaagcacaataatgcaccaaccatggcagatcaaatattctgcctccttatgctcctcggtctttctgcaagtgctgctacagcgaccattttcccacaatgctcacaagctgctatagcttaccttctttacccgtacctctcaccaacggtgtctaccgtatgtgaaaacccaattcttcaaccctacaagatccaacaggcaatcgcatgctggcatcttacctatatcacccttgatcctccaacaatcatcagccctattacagcagttacctttggagcatttattggcacagaacatcacggcacaacaactacgacaacttgtgcta

SEQ ID NO: 295936 - DNA, 313 bp, Zea mays
cccactcgtgcgccggagcacgcgacggctgtggaccctaagaatggcagtctgagcgccattgtctccatcggcatcggcttcatccagggggccaacatcatggtgggcggctccttctacggagctttcattaaccgctgcttgtccttctgccgagacgttgtcagatgggagtggggctaccagtgggcgtactgctttggaccactcatcggcggctgactggacgacgttatctaccagctgctactcatctgccacacccacgagcagcatccctgcagcgactactaaaagccgcagccgaccg

SEQ ID NO: 295937 - DNA, 246 bp, Zea mays
ccgtgatctctaattctcactatctcgagttaataacggaagcttgatcatcttgccttgcggtcttgataaagagcagggcattcgtctagcttctgtagtctgatatcattctgtactcgctgactccatgctactaagccttcggcttcatcaggaaacccaacaagtaaccgacttctactagaaagccatacctctcttactattatcaggaccaccaaaactgcctcttgatctgttgct

SEQ ID NO: 295938 - DNA, 322 bp, Zea mays
ctcacacgttcgctctacttcagctgctgaccgtgtgcaactcgacagggcaaggtgggaggctcgctcgagggtctgaagctagggtaagctagtgaagctacacgctgtagcgcagtgtctcctgcgagacagctaatgccttctgttaatgtacctacgctactaagtctgccggattatggatactgcgtgcatacgtctcatgtgtaactaagaatgtcgtgctttgaggcgctcgcaactgctgtgcctagatttatctttatggatgtcaagtaacatcatgtaccattgacattgttgaaaactttgctttttc

SEQ ID NO: 295939 - DNA, 416 bp, Zea mays
cccacgcgtccggcgatgcacgcggacgtgatgcgcaacgtgctgccgcaggtggagtcgctgctgcggagcacggcccgcgtgctgctgtaccagggcgtccgcgacctccgggacggcgtcgtgtccaccgaggcgtggctgggcggggtgcgctgggacggcctgcgcgcgttcctggacgcggagcgcgccgtgtggcggacggccgcggagggcggggagctcgcgggctacgtgcagcggtcgggctcgctgacgcacgtggtggtgtacgccgcggggcacctagtgccggcggacaacgggcgcgcggcgcatgagatgatcgagggatgggtgctggggacagggatgttcggccgcggttgtggtgatcgtggtcgctactgcttcaggagcgccgccacatgatg

SEQ ID NO: 295940 - DNA, 304 bp, Zea mays
cgttccggatcggaattgccgggtcgacgcacgcgttcgctccgggccggcggcggcgtttccggttagcgcatgaaggccgactcgagcgggctggtcaagctccctcgggtgcttgggcttcgtcttcatgtctgtatttaggcaggagtaccacgtgcatcactcttgcaacaatagcgttgctgcctttagcaagggagctggtgaaaagtcgctctttatgtctgagcatgagaagcaaccctatgtggaccaatctgggcagtataagcatgactatgatgaagactaccgcaaattt

SEQ ID NO: 295941 - DNA, 359 bp, Zea mays
cccacgcgtccgaactaacaacagcttaggctgaaacagcgatgacgacgacgacgacaacgctgccgacggggcgcgccgtggccctgctgctgctcctgctggccacgacggcgacggaggccgcgaacccgtgcaacccggcgcagctgacgccgtgcgcggggccggcgctgttcggcggcgcggtgccgccggcgtgctgcgcgcagctgcgggcgcagcaggggtgcctgtgcgggtacgcgcgcagccccaactacgggagctacatccgcagccccaacgcggcgaggctcttcgccatctgcaacctgcccatgccgcgcttgccgtattagcgggcaatagtatatata

SEQ ID NO: 295942 - DNA, 314 bp, Zea mays
gccacgcatgctgggcaccagactgtacggtggtgcaccgtacagcgtacgatggtgcacgggacagtgatctgagcgccagggcgtcttgtgccaagaggccgctctcgggactgtctactgcgacttcgggtaaaattcaccggactgtccggagtgcaccggactgtccggtgagccaactgtctgtcaggccaactgacggacgggtgatctgcgcgcgacacgtggccatgccaacggtcagagggaagcaccggactgttcagtgtgcaccggactggccggtgcgccagatctgcaacggtcgggaa

SEQ ID NO: 295943 - DNA, 391 bp, Zea mays
gaaaattcctggtatgccatcagattttatactcatcccttgtgtgccactgagtgacatataggtatattttttggtgtctatgacatgtggggccagtggcatacaaatggttatcttcctggctttacaggttacagacaaaccggtagctgttggtttcggtgtatcgactccagagcatgtgaaacagatcgtgggctggggagcgtacggtgtgattgctggcagtgcgattgtgaggcagttgtgtgaggctgctactcctgaagagggtctggaaaggctcgaggagtacgccaggagtatgaaggctgctatgccgtgagctgatctcacttctcgtcacaggcatcgtaaatagaacatggttttagcaatattctgggca

SEQ ID NO: 295944 - DNA, 399 bp, Zea mays
ccgggtagacctacgcgtacgcccacgcgtccgctgacgcgtgggcaggtgtagctcttttcttttctgtgcagctcaactttgctgtccctggtataattcatgttacttggtcatactcaagtaactcaactctccattttgattggaaacaggtttcttatttttatagttgaatataatactttggtctgttcttaaacaatagtcttattacaggtagaccccctaggcaaggttgaccctgaagtggaggatttacttctagaaatcgccgatgacttcattgactcggtgactgcatttgcgtgtaccttggcaaagcacaggaaatcatcaggtgtcgaagccaaggatgtgttgctgcacttagaaagaaattggcatttatctgtttct

SEQ ID NO: 295945 - DNA, 284 bp, Zea mays
gggaccatggccaacgaacgccaatccaggtccggaggtgttggcaccttgttgagggccaacgccatgggtggtgagggccatcaggcccattcagctggctgtagctacgactgtggtggtggctgctgcagcagcatggtcatcgaatgctccaatgttaacaacttttactccatgtcctgcagctgtggctctaattgtggtcttggacgcagcagtggcatggtcatcgaatgctccaaggccaacaacgccatgttcgctagctctagctctagttg

SEQ ID NO: 295946 - DNA, 399 bp, Zea mays
ctgccgtaccgaccggaattcccggcgtcaagccacgcgtccgaccacgcgtccggtaaaaccatcggctgctactacaagaataagagctcaagagtaggaaccatcaagcgtgagaccgtgaccttgcgattgcaagctgagatcaaccagatggtctcactcatgatcaacaccttctactccaacatggagatcttgctacaccagcttatctgcaactattacgatgcgctggacaatatcaggttcgagagtctcactgacaagagcaagctccatgcgcatcctgagctccaaatgcaccttgtcccagacaaggacacgaacacgctctgcatcatcgactgcggcatcggcatgaccatgtacgaccttgtgaacaacctctgtaccatc

SEQ ID NO: 295947 - DNA, 354 bp, Zea mays
cccacgcgtccgatcaaaccctagccttctcctgcaagtaacagagctcaggagatggctccattgagagttagacggggaccttcttatttcaagctgacatcaaccatctgatcttactcatcatcaacaccttctactccaacatcgagatcttcctacacgagcttatctccaactcttacgatgctctgtacaatatcacgttcgagagtctcactgactagagcaagctcgatgctcagtctgagcttttcatccaccttgtcccatacaatgccacgaacactctctccatcatcgacaacggcttcagcatgaccaagtactaccttgtcaacaacctcggtacca

SEQ ID NO: 295948 - DNA, 290 bp, Zea mays
agttgcttcgcacactaaccgaagtcccaatcccaatggcgccaacctgccgtcctgggccggatgcggcgctcctgctgctgctgctgacggcgagtagcgtcggcgtcgcacgggcggcgccgcgggtgccggcggtgatcgtgttcggggactcgacggtggacacgggcaacaacaaccagatccccaccccgctgcgcgccgacttcccgccctacggtcgcgacatgccgggcgggccgcgcgccaccggccggttcggcaacgggcggctgcccccggacctc

SEQ ID NO: 295949 - DNA, 274 bp, Zea mays
ctattggccgcactgaaccccgctgcttatttgcagcagcaaatactactacgaggtagccagctagctgcagcaaaccgtgcttgcttcttgacacagcaacagttgctggctttctaccagcattttgcggctaaccccgcaaccctattacaactactacaattgctgccatctgtccaacttgcttcgacagaccgagcgggctgctaccaacaacacatcattggtggtgccctctgttagattgcgtattgattgtaattcaatagta

SEQ ID NO: 295950 - DNA, 387 bp, Zea mays
acgcctgcagtaccggtctcggaattcccgggtacgactcacgcgtacgattttgagcattcataagcacacctagcgaagcgcactagcaacgacctaacaacaatggctaccaagatattatccctctttgcgcttcttgcccttgttgtgagcgcagcaaatgcgttgattattgcacaatgctcacttgctcctagtgccattattccacagttcctccttacagttacttcaatgggcttcgaacacccagctgtgcaagcctacaggctacaacaagcgcttgcggcgagcgtcttacaacaaccaattgcccaattacaacaacaatgcttggcacatctaaccatacaaaccatcgcaacgcaacatcaacaacaattt

SEQ ID NO: 295951 - DNA, 283 bp, Zea mays
tgcgtcctttatactagcacaggaatatttttttaataatttagaaatgaacttacttatatctgggtagccacctacatcattctaaaaacttgattattgcactataattcataacaaatctaaaagacggcactaccaatgatgggtagttactagaaagctggttgctttgtcaaattatgttagtataatagcaaccattgacgcagttgtaacagggttccaccgttacacgcatcttgctagtaaaacgggcacaactgtgctttttttaataacg

SEQ ID NO: 295952 - DNA, 314 bp, Zea mays
ggttcggtattcccggggcgagccacgcgtccgcggacgcgtgggggcgcgccgccccttcactgtcgacgaggacgcggccatcgcccgggcggacgcccgcctcggcaaccgctgggccgtcatcgcgcgcctgctccccggccgcaccgacaacgccgtcaagaaccactggaactgctccctcaagcgcaagctcggcgccgccgacgccgcgtccggttcggcggttgccgctgacgactgcgtcgccgacggcgagaccgaggcgcgccggggcaagatgatgatgatgagcatctcgcccgccgaca

SEQ ID NO: 295953 - DNA, 294 bp, Zea mays
gtgatctttacaatgtacctgccacatgctgatcacatgctgaattctatcttcaaacggattgctggcctgtccactatccccataatgaggctctatgcatatctcatcactgttagatgagcataccatacttcaccaacaaagactcaattcaattgccgcactgacccatctacattaactggtgtctcacactggattacaataccatattctcttcatgcgtgagctacctctatagatgcgattaaaccatttcccattatagcatcatcattacatactatcaaa

SEQ ID NO: 295954 - DNA, 368 bp, Zea mays
aacattctaaggatcagcagactggcaccacgcatatagctaatgaatcttcggcgtggactataaaaaaaaaacaaaaaaaaaccaaaaaaaaaaaaaaaaaaaaaaaaaaacaaaaataaaataaaaaaaaaaaaaacaaaaaaaaacaaaaagggcggcccttcaaaaggatccaaacataagtacgcctgcattcaacgacatatcctttatatagctatacttaaattaaattaattgacccctgttttacaaagtgagaactggcaaaaccctgattttacccaactaaatgtcatactactaaatccctatttcaccaacagacataaaaaccaaaaaccccatacagaccgcaattccaa

SEQ ID NO: 295955 - DNA, 292 bp, Zea mays
ccggaattcccgggtcgacccacgcgtacgcccacgcgtccgattgaatctggcgtgttccctcgccttgtggaacttctgatgcatcgttcaggctctgtactgattccagctcttgcgcacggtgggtaacatcgtaactggggacaacatgcagactcagtggtgtcattgacaatcaagcactttcatgccttttgaacctactgaccaccaaccacaagaaaagcatcaagaaagaagcatgctggacaatcttaaacatcacagctggtaacagggaacagattca

SEQ ID NO: 295956 - DNA, 241 bp, Zea mays
ggtacgactcacgcgttcggcatgctcaacttggtgctgcgttttagggtggcatgcagatcttcttgaacgctatgtctagcaagacgagtagtcttgacgtgtaatcttcagacaccattgacaacgttaaggccaagatccatgacaaggttggcattccaccaaaccaacagcaggtgatcatcttcggctagcagctagatgaaagtcgcaacttttctgactacaacatccataa

SEQ ID NO: 295957 - DNA, 436 bp, Zea mays
  unsure (1)..(436): unsure at all n locations
cggacgcgtgggcggacgcgtgggcggacgcgtgggcgcgacaaaggttacctttccggtanggtggaccaatacctgctgcagccaccctctgtaccgtgagtctgagcttatccaggagaactaccttggtgtgagaaatgcagcacagaggaagctactggatgagctgggcatcccagcagaagatgccccagttgaccaattcacccctctgggccgaatgctttacaaggcaccatctgacgggaaatggggggagcatgagcttgactacctgctgttcatcgtccgggacgtgaaggtgcagccgaacccagatgaagtcgctgacgtgaagtacgtgaaccgcgacgagctcaaggagctcatccggaaggctgacgctggcgaagacggggtgaagatctccccctggttcaagctggtggtggac

SEQ ID NO: 295958 - DNA, 412 bp, Zea mays
aaaactaatattttcagtgtcagtgtagaattgccagaatcgtatgaaaacgacgagacggcagctttacaggatccactcatacgcaatccaacatgctacgctatactttttgtatataatcacctatatactcttcactgtccaacaagttcacacctcatattacctgtaaaactgttccgtaacctaattctaccctcttactgcataaccctcttttgccagatcctgcaaatgacaatattcccgcaccaatcccacttcccaacatttgtgcagtcctacatgccaatgacaatctccatgctcaacatcattaagtgcccgaaatctgtcccttacatccacccttacctgttcatttagaacaccattaccgccaccatattcaactccatggccttccttc

SEQ ID NO: 295959 - DNA, 332 bp, Zea mays
cggacgtatctaatcgcacctgcttgtatgggccgcaagttcttcgtcggtgaggagctgttttatgcggtggaaccacagatcatgtcgagaagattgtcaaaaccctgaatgaacgacacgtttccccttcagatgtcgtcgaggtcgttgtcagccatgcttatgtcttccttgctgtggtcaagaaccatctgcaccaatacttccatgttgctgctcacaactgctgggtgaagaatggaggcgcttttactggtcaagtcattgctgatatgctcgttatcctttggtgttccctgtgtcattattgtacactatgaaatgagagc

SEQ ID NO: 295960 - DNA, 242 bp, Zea mays
aattcccgggtcgacccacgcgtacggcgacaccaactggcctgtccgttggccgctgggcggctaccctggccctcacggacctaactagtgcggggacagagcgcacaagtactactggccggacatcgcagacgcgcactacacaggctgtctctacggcggcatctacatcagtggcatcatacgggaaggtcatgccgtggcaatcggagttccaggtcggacctgccgtgctcgtc

SEQ ID NO: 295961 - DNA, 350 bp, Zea mays
ccggcctgaattcccgggtcgactcacgcgtccgcccacgcgtccgcccacgcgtccgaataaaacttagaactacaaatactactacaacaacgcaccgagaaagaaacaaggccaagacagcgtattcacgagacaaggaggaccacctggcgagaagctgctgcacgccgcgggccgtctgcgagagcagcagccagctgagcgagccaccaggaggagccagcatgagggccatgagcgtcgccgccgccgtcgctggagcgcccatggggttattccagaacgagcctggccacgaacactaccacgacgacagcttcatgagcctgatgctcaaggagcaacga

SEQ ID NO: 295962 - DNA, 342 bp, Zea mays
  unsure (1)..(342): unsure at all n locations
cggaattcccgggtcgacccacgcgtacggccgggactcgtcgggacgcgccgacagcttcacctcttacgaggccgacggcaacgtcgtgaccgccaacttcacctgctacgccggcggcgccacgggtggttcgggctccttcgccgcctacgccgacgagaccaacgtcccggactccaccttcaccaactacgacgccgncgccaacggccgcggccggagcttcgcgtcctactcccaggaggcgaaccatggggagaacggcttctccggctacggcaagaacggcaacggcgtgcgcgagacgttcaagtcctacggcaatgagtccaacgtgct

SEQ ID NO: 295963 - DNA, 434 bp, Zea mays
  unsure (1)..(434): unsure at all n locations
gaattcccgggtcgacctacgcgtacgcttgagaccaagtagcaacatacaaagcacaatactcgtccaacaatggcagccaaaatatttggcctacttatgctccttggtctttctgcatgcgctgattcagcgaccatcttcccgcaatgctcgcaagctactatagctttcattatttccccgaacctatcaccagccgcgtctaccgtatgtgaaaacccaattcttcaacactacaagatccaacaggcaatcgcagctggcatctcacctttatcacccttgctccttcaacaatcatcagccctattacaacaattaccttttgagcatttattggcacaaaacatcatggcacatcaactacaacaacgtgtgctagcaaacctagctgnctactctgagcatcagcaggttcattcattcaacca

SEQ ID NO: 295964 - DNA, 325 bp, Zea mays
aggccacgcgtccggcatctgatgataacaagactgtcaatgtgatcgcgacctgatgtgtctcaagtaatggcggctaacgaatttgagtccaaagatccaatggatggctctatgtccaagcaccacggcatacgctacctattcggagatggttcacgactggtgttccgtctatacataaccgtgcatgttgagtgccaccatccgtgtctacactcgacgatacgagaacgattccttcaagaccgtcagggattcacaggatgcccttgctccaatggatgatgttgcgcttaaacttctccaaaatccaagagtacac

SEQ ID NO: 295965 - DNA, 377 bp, Zea mays
cggaattcccggcggatgatgatcctcctatcattcgtgccgctcgtgcgtgcactcttgggttggtttctactgcccctccggatcgggatggggttcgtgaggttctacatggttcgtgttcctgggttagcggatctagatggctgcgtcagatgttgaataccgctgcttcgtcgtcggactcacctgggccactgacgaccactcccttcacaacgccttcagcacctaccgcgaggtcctcgagtccaagatcatcctcgatcgggagacgcagaagtcccgcggcttctgcttcgtcaccttctccacagaagaagcgatgcggaacgccatcgatggcatgaacggcaaggaacttgacggtcgcaaca

SEQ ID NO: 295966 - DNA, 434 bp, Zea mays
ccggaattcccgggtggacccacgcgtccgcccacgcgtgcgctcgtgaggctgagcggaattactgcagagggccaaggtgtgaagggtgagagcctcagcagttgcttcagccccaactccagatgttgctgaagcacaggccccagttgctgaggaggacgacgacgatgatgttgacctttttggtgaggagaccgaagatgagaagaaggctgctgaagagcgtgctgcagctgccaaggcttctggcaagaagaaagaatctgggaagtcatcagttttacttgatgtgaagccatgggacgatgagactgacatggccaagctcgaggaagctgttaggagtgtccagatggaagggctgctctggggcgcattcaagcttgtcccagttggatatggtatcaagaagctgcaaatcatgatgacca

SEQ ID NO: 295967 - DNA, 202 bp, Zea mays
cctacgcggtctgtgaaagacccatatcatggaccctatacgttccaaccagcaatggcaaattgggtcggtaccttttttaccttggtggctccaacaatcattagccctatttcaacaggtacctttggtgcatttattggcacaaaacatcaggggacaacaacttcaacaacttgtgctagcaaaccttgctgcctac

SEQ ID NO: 295968 - DNA, 285 bp, Zea mays
  unsure (1)..(285): unsure at all n locations
tcacttttgctcnnctagtgcnncattatactcactatgttccttccgacctagnnttacttcaatgggctatcgaacactctagcttgtgcaaagcctacatagctacaacatagcgcttgcggcgaagcgtcttacaacaaccaattaaccaattgcaacaacaatccttggcacatctaaccatacaaaccatcgcaacacaacagcaacaacagttcctaccagcactgagccaactagatgtggtgaaccctgtcgcctacttgcaacaacaggtgcttg

SEQ ID NO: 295969 - DNA, 194 bp, Zea mays
aggaatcctccgatggctcatcgcgttcttctactcctctgtctcgcgtcggccttggcggttggcgatcacgactactcgtaggaccaccttatccctcacgttgttaccggtggacatgacaacgatctggagctgaacgccgagtcccactacctgagcttcgtgcagcggttcggcaagttctacaatga

SEQ ID NO: 295970 - DNA, 217 bp, Zea mays
agcttgttcatggagatgaagtggactaaggtgcaccgattcgtggtgtggaggattgaccagcggtagcgcgccgtgctggtagacagggtgggcggtcccggtgagggttacaaagagctcttggctgatctgacaggtgacaactgacattactccggttataacatctacttgcatagcgaacacaaatgttagaaaacctagaagttattta

SEQ ID NO: 295971 - DNA, 341 bp, Zea mays
accgtaccggacttcccggatcgacccacgcgtacgcccacgcgtccggcgatgaagatcactgcgctcctggtgctgaagcctgggaccattggagcctggagctcctagtccggctgcgagtcatacccagatgcatgaaaactcgtgaacgcaatagacatcagacacttcggctactttcagcgcagagccatgcgtcagttcattgacttctaggctcgcaccatctgtcagctcacccagccatgccagcggcagtcccttcagcacgaaaaatacaaggtgcactcatacaatataaataggctgtgtactttgcattgatggatgatcattat

SEQ ID NO: 295972 - DNA, 354 bp, Zea mays
agcacactaagggtgtgctcgcagattttccattggttggtcctatagattgcaagtagatatggcactaccatcgactaaacccgactcagtacataatgtactgcatgaaagtgtatgacaaaatactgaacaataacaacgtttagtcatgcactcaaacaaagtcgacacttgactcacaaaaagtatagaaagagctatatcctgatgagccctacgaatcggacttcacaagaacctacgacactgacgctgatgtcaaccctgcatgatcagacgatgacattacctatgatctggtctcgactgttaagagacaatcctatttctatcatcaagctggaacaccaa

SEQ ID NO: 295973 - DNA, 439 bp, Zea mays
  unsure (1)..(439): unsure at all n locations
tgaccctctaggttttctgtgaaggatctggccactaggacccctcttgcccgctgtgacaggtcggggcccctctacaccttcggccttcatccaccggtgcgtctccattgtccgtcctggtctccaccacctgctccatcacttggcatcgccgacttggccatccacgacccgacgtcatgggcaaactcaccagtagcttagatttttaatgtagtaggggacattttgaggatctctgtcatacttgtcagctaggccgacatactcgtctcccattcactacttctagagctgagcaagtttttgatttggttcattgtgatctctggacctctcctgtacttagtttgtctgaatataaatactatctgatgattctggatgctntttccattttctatagacctttcctcttctgttgaagtttgacacg

SEQ ID NO: 295974 - DNA, 440 bp, Zea mays
cccacgcgtccgggctattgcctctgccagaatgaacggagaatatcctgagggagtgggacagacagagtgtcagtattatctgaagaccggaacatgcaagtttggtcctacatgcaaatttcaccatcccagggaaaaggccggaattgcagggagggtgcagctaaacacattaggatatccacttctcccggtttgtattatcttgccagttacatgtcctcttctacatatgtctgtttgttttgctgaaaaggagtctactttacttttgtagaatgaaaaggagtgtgcgtattatttaaaaacaggacaatgtaaatatgcaaatacttgtaaattccaccacccagaacttttcaatgtggtgccttcgtcacgtggttcacctatttatacttctgtacattcctctgcaagcgctggtccacagtcat

SEQ ID NO: 295975 - DNA, 367 bp, Zea mays
ttcagttctagcatctgaatctggtaccgcacatggaaagggcaacactaagaaggtgtccggaagagacttccatgctgtgtctatggaagccaacaaggggactagttcaacgccattccagaaatctcgtgtgtcaaatgattgccatgtgaaacttaaaattaagtcttttaaagcgcctgaacttcttgatgaaactctagaaagtgcaactgttgactcactaatgaaaactgttatcgaggcactgactgctattatcagaggtggtctccatgttggtgatcttcaccatggaaagcaagttatagatgataataaaacgtcgattcaggctggtatcgatcaggaagatatgctggac

SEQ ID NO: 295976 - DNA, 404 bp, Zea mays
taccggtctcggaattcccgggtcgtcgccacgcgtctcgcccacgctgtccggcccggcccaagggttgaagcacgtgactcaagaacagctctcgagcctgcggcggtactgactactacacgcgtgggctacgtacctacccgagggcacgagcggtactgtgccggacgtaccccgtcggcgacgagcaccgatctgcgctacgactacggcaacttctactcgtacaagacgttctacgacccggccaagcggcgccgcatcctgtggggctgggctaacgagtcctactccgccgacgacgatgtggccaaaggctggtctggaatccaggcgattccaaggacggtgtggctggaccccagcgggaagcagctgctgcagtggcctatctaggaggt

SEQ ID NO: 295977 - DNA, 416 bp, Zea mays
gtcttgaattcccgggtcgaccgactcgtacgattgtaatcgcacactatcaaaaccgggattttatctttcccctgcaatgtaaagagatcgacagagtcacaccactgtatacgctttatacttgactgtgcatatcactgtcccaatttcaggaggtctattatacatggaccacccattgacctctgcacccttcataatacgcaacataatcaaatttcatgtgttcctcacacacaagcacactttcctccacgtgtaccggaagaagacgacagatgatctcatctcgatgccgtatatctagactctattcagctgcacgctgaagatactgtactcactggtgaagaccaactccatcccgctgctgaccatcaacgccttctggtgcgtgataaaagcctgctaca

SEQ ID NO: 295978 - DNA, 460 bp, Zea mays
gaattcccgggtcgaccgacgcgtccgcctcccgcgtcagaagtcagaactagcctatcctattccgaaagccgaaaggactctgtggttgggtgcggcggatggcgacttcgtcgtcgttctctggccccggcgggtccccggcccactcgtctccgggaggcggaggcggcggctgcggcagcggtggcgtggggtcgtaccaccaccaccggtcgcggttcggcgacacgacgctgaccaaggtgttcgttggcgggctggcgtgggagacgccgtccgaggggctgcgccagcacttcgacgtctacggagagatactcgaggcggtcgtcatcaccgatcgcgagaccggccgctccaagggctacggtttcgtgattttccgggacccggacgcggcggctcgggcggtgcataacccgaacccggtgatcgccggccggcgcgccaactgcaa

SEQ ID NO: 295979 - DNA, 367 bp, Zea mays
gtacgcctccaattcgttctgaacaggcatgggttaaatcgagcaagcaatgacacgaggagagggatcatacgaagcatagcgccaacaagaccaccggaagctaggccgcacgcaagcacctgggcacgaaggtggccaggaagtcggcgccgacgaccgcacgcacgaacaagcccgacaagtacaggcacaggaccatggccctgaccgagatcctgaagtacaacaagagctcccagctgatcatccagctgttgatcttgcagcgcctgttccatgagatcgttcacgacatcaatacggatttgcagatgcagatgcacgcccagatggacgtccaagaagccgtcgaggaatacctcga

SEQ ID NO: 295980 - DNA, 359 bp, Zea mays
acgaaaaaaacaatgaacgcttggtttctttaaatactcaaaaacgatcagaaggtgaggctgctgtcgattcaagcttggcataagcacgtgttcgaagacgtgcatgtacatacatatactgcttaaaaaacaaaagaagcattagatgtagctcgtaacagcgtagaacttatatgaactcgcctttcctcttctcctgagcacgattctttacaagatgacttgacaaccactcttgtgcaacaatgctagcaatcttagcacactatccatatcattattgagaccgatggagacaattgatctgagctctctgatgccttgagcgttaacgacgagatccacaaagtgttatc

SEQ ID NO: 295981 - DNA, 489 bp, Zea mays
tccggtcttgaattcccgggtcgaccgactcgtccggtcgcagctagccttgagggcaagaagcttttatctttcactagaatatcatcaacagtcgagacagctatggaggatgcgcttcttcgtattttgaccccaaggcgctctattgacatactgagggacgtgcacgctgccaaggagcgtgggaggccatatgttattgtttttgttggggtgaatggagttggcaaatccaccaatcttgcaaaggttgcttattggcttcttcagcataacctcagtgttacacttgcagcatgtgacaccttcagatctggtgctgttgagcagctgagaactcatgcaaggaggcttcagatacctatatttgagaagggttatgagaaagatccggcagttgtagcgagggaggctattcaggaagcaacccggaacaaatcagatgttgttctggttgacactgctggacgtatgcaagacaacgag

SEQ ID NO: 295982 - DNA, 240 bp, Zea mays
aattcccgggtcgacccacgcgtacgaaaaaaaacataaaagaagcatgcaaaaatttagaatagaaccaagaatggcaagacaatcaggcttgaaagaggagtactgagacaccattgacaatgtcaaggctaagatccaggacaaggcgggcattccacctgaccagcaacgtctcatctttgccggcaagcagttggaggatgggaggacccttgctgcataccacccctaagacgc

SEQ ID NO: 295983 - DNA, 240 bp, Zea mays
gccttaggggaggcatgcagatctttgtcaagaccttgactggcaagacaatcacccttgaggtggagtcctcagacaccattgacaatgtcaaggcaaagatccaggacaaggagggcatcccacctgaccagcaacgtctcatctttgccggcaagcagttggaggatgggaggacccttgctgcataccacccctaagacgcagtaccaagtggatggtgctctccttctagatgtt

SEQ ID NO: 295984 - DNA, 442 bp, Zea mays
gcgagcagtctgacagctacacacacaggcagacgccgttccgcgggggaaaggtgcggacgcctgaatcctctccaactccggcaccgcattcgcacgcccgcgaagccccgaatcggagaggacagaggagtcatggacgcggcggcggcggcggctgcggctgcgagccccacgagcaagaggatcgcgctggtgacgggagggaacaagggcatcgggctcgagacgtgccggcagctggcgtccaggggcgtcagggtcgtcctgacggcgaggaacgaggcgaggggtttggaagcggtcgagcgcgtcaggtgcgcccgcggcgacgccgaggtttacttccaccagctcgacgtcaccgaccccttgcagcgccgccggctcgcggatttcgtcagggatcaattcggtaggctggacatcctgatcaacaatg

SEQ ID NO: 295985 - DNA, 444 bp, Zea mays
cctgaattcccgggtcgacccactcgtccgttaacgtcttcgaactctacctgcctaactttcgtttctgtccgcgacagctcgcttatagcttggtactttaccactgtgagccatgtcaacccccacgactccaacaaggtctactctgcccatctcaaacactacgtcatgatcgatcttaccaaatctgttcacattgacaacactgccatgttcaacgaactcactccttatgactatgtctgctactacatcatggctgcatctgtatcaaggaagatctacttgacacatgccattcgtgttgatcgcttccagaatactaatggtgcccatcacatgaattgctcacgctcacctcacttctgcaagaacatttgctccatctcacgcaacatccttcatcatctgcaggacatgaacatcattgatgtcgatccc

SEQ ID NO: 295986 - DNA, 365 bp, Zea mays
gcgcatggaggagggggagttctccgaggctcgcgtttacctgtccgccctgaaaaagggcgtcagtgaggtcgccgcaaagggcggcactaataacgttaacaagaagaaggattcctgacctgtttgcttaaatctgtttgcttgtcaacccaatttgtggtgttaaaaaaccttagtttgtgtcctgccccccttggataatgtttgggtgtttccttccatcataattgcttgacacggctatagtattcgcatttgaaataaaaatctctctcttaaaactctctaggttctaaaaaaaaaaatcattatttacaatttcccttctattaacaaaaaacataaatttataatatactttt

SEQ ID NO: 295987 - DNA, 370 bp, Zea mays
gcaaactcagagagggacccgatggcacccatggcggagaagaagccggcggcgaagaagcccgcagaggaggagcccgcggccccggcggagaaggcccccgctgggaagaagccgaaggcggagaagcggctcccggcgggaaaatccgccggcaaggaaggcggtgttgacaagaaggggcggaagaaggccaagaagagcgtggagacgtacaagatctacatcttcaaggtgctgaagcaggtgcacccggacatcggcatctcctccaaggccatgtccatcatgaactccttcatcaacgacatcttcgagaagctcgccggcgaagcggccaaagctcgccgctacaacaagaagcccacca

SEQ ID NO: 295988 - DNA, 419 bp, Zea mays
tccggtcaagctggctcatctactgctctgcagattgccatgaagacctgtggcactaccgagggggtgttcacaaatcgacggatcctagagctagcttaagagctggctatgcctcttgctgcatgtgaagtactcccgctagaccttcatatttactggcgcacacacagtccatgatctagctatctccgacaatttgctggactcaaccgatactgtgtgcacctgaaatctggtgtacaagattatgtgatagaggatgcatcatgaccaagacagacatgtgacatatactacaccgctaactacacagagcaactaatggtcaaaactcatatgcgcatcactggactggacacagaataaagctcagagtcattgttcaatactaatgctgatggcagcacagcatgtgc

SEQ ID NO: 295989 - DNA, 288 bp, Zea mays
aaaaaaaaaaaaactgataaaataacagatttaaattaaaccaataaaaataccacaaatggtaagggctaacatgatgacaccattgatgattcctatcatgatgtcaccaatggtattgccgagcatgatttctcatatgatgatgccacaattgtcactgctacttcttctttcagattattcttcaacagcagttactattcattttcaacccaattgccatgattatttcacccatgtttttacagaaaccctttgtttgtgcttcattcttgatataaatat

SEQ ID NO: 295990 - DNA, 467 bp, Zea mays
tccggaattcccgggtcgacccactcgtccgcagatattggtctatccgttcatgtccaatggctcactacaagatcgtctttacggtgaggcatgaaaaaggaaagttcttgattggcccacaagactatctgtttgcattggtgctgctagagggctagtatatctgcacaattttgcagggcgttgtatcatacacagagatattaaatcgagcaacatacttctggatcacagcatgtgtggcaaggtagccgactttgggttttccaagtacgcaccacaggaaggtgacagcaatccatcaatggaagtgaggggaactgctggatatttggaccctgaatactattccactcaggtgttatcaaccagaagcgatgtcttcagtttcggagtagtcctgttagaaattgtgacaggaagagaacctcttgatgtcaaaaggcctcgtcatgaatggagct

SEQ ID NO: 295991 - DNA, 289 bp, Zea mays
tcgttcgcttaaagctggcaacgcctaccatttttatttttgtgaataggaacagctggcccagggttgtttaagtggccatgaaccctgtggagcatacccacggaggaggtaaccaccaacatatctgtcacgcctttactgttcgccgcgatgctatccctgtccagaatgacggtctcattgatgctattaggactggctggctcataagtcatgctgctgacacaaccactaatgctaacaatgacacctatcatattgatagtcatgatttatttattcctct

SEQ ID NO: 295992 - DNA, 351 bp, Zea mays
gcagcaactgttggccttaccgagtttagattatgccagtgatgatgccacagatgatgaggcctaacatgatgtcaccattgatgataccacgcatgatttcactaatggtctttccgagcattatttaacaaatgatgatgccacaatgtcactgcgacgcctattcgcatataatgctgtatcaacagtaaccattcatgaacaacccaatggccatgacgaattcacctatgttcttacaacaactcattttttgagctacattctaaatataaatatgaaatttgtaccaaacaatgatttgacatgccatctttattaactcatgattattaactattactatta

SEQ ID NO: 295993 - DNA, 414 bp, Zea mays
gtccggaattcccgggtcgacccactcgtccgtatgaaatgactgtgaatcgttgttctgatttgtctttcaccacatgttttccttgcatggagtaatatacgatatttatgtaaaaaaaaaaaaaaaaaaaaaaaaaaaaaaaaaaaaaaaaaaaaaaaaaaaaaaaaaaaaaaaaaaaaaaaaaaaaaaaaaaaaaaaaaaaaaaaaaaaaaaaaaaaaaaaaagaaaacttaaaaaaaacataaaaacgataaaaataaggtgactaaaataaaatacagaaacacaaaattcaaaaaaaattaaaactagtaaaacaccagtagacacctaattaaatggccaaaccgaatattgatcataacaaatacttacgtcaaaacaaagagttcttcacaattggccttttcc

SEQ ID NO: 295994 - DNA, 378 bp, Zea mays
tacagatctactatagcaggctagctacgagtttctcatacaaatatcatgccacagctcgagggactatgtgggaaacgtgcatcaaaacctactgctcatccaacactgtgcctccgtgataggcaactagctgcgcaatttcaggaaatccctctggatcttacgatgatccgggcacataaggctggatttgagatcctgaaatctacgattgctgagaaactacccaatgatctgtaaggaatagagtgctcaatggagaagctctacattcttatcgatgagatctacaaatacacccatgatgtcgtgtaaggacgcgttgcacctgattacacaatctcacaagcggtctctgaatctgtagcttcaatg

SEQ ID NO: 295995 - DNA, 332 bp, Zea mays
  unsure (1)..(332): unsure at all n locations
ggtctgaatttccggtcgaccgcactcgttcgactgcnctcttaccaagtcctcctttggttatggttccttagggttttgtgggggggggatggctgcggctgatgtggagtaccgttgcttcgtctgctggcttgcctgggccaccagcaacgagtcgctggagaatgccttcgcctcctacggcgagatcctcgactccaaggtcatcaccgaccgggagacggggaggtcccgcggcttcggcttcgttaccttctcctccgagaactccatgctcgacgctatcgagaacatgaactgcaaggagctcgacggtcgtaacatcaccg

SEQ ID NO: 295996 - DNA, 306 bp, Zea mays
  unsure (1)..(306): unsure at all n locations
cttccttttgtggaccgtgcgtgtgtgtgttgtgcagggtcgaggcggcgtggcggtcggggccgggagcgatgatgggctggcggtgacggagcagcaggtggcgaagctgatggaggaggacatgggcaccgccatgcagtacctgcaagggaagggcctgtgcctcatgccggtctccctcgcctccgccatatcctccgcgacgtgccacatgcgacctccggtgggaggaccgggcctcggggtcgccgccgccgncgcgcaccacatggccgctatgcgngatgccgcccacgccatgaa

SEQ ID NO: 295997 - DNA, 422 bp, Zea mays
  unsure (1)..(422): unsure at all n locations
gcctgctcccctactccggccgcagccgccgacgtcgccattcgcattctgcggcgccaagcgataggggtcagcgagtggctgggatggcgtcgtcggcgtccgcgccagcgtccacgggcccgcgctacgccccgccggatccgacgctgcccaagccgtggagggggctaatcgacggcaacacggggtacctctacttctggaacccggagacaaaggttacgcagtacgagcgtnccgtcgctgccgtgcccgccccccaatcgcagccgcttgtctactccaggcccgatgatgtgccgagaagcagcgcacctgccgagcagcgctcggaagctgcggtgagcccgccgcaatttgtgccctcctccgataacaggacaaggattgatcactcagagtcaagctctgcatctgga

SEQ ID NO: 295998 - DNA, 338 bp, Zea mays
  unsure (1)..(338): unsure at all n locations
gcgcgagcttcttgatgatgaggaggccgaggaggttgcattcctcgtcagcggcgtacagcagcgacgacacggactcgatggcgccgggcacgcccgcgacgcgaagggcgttgcgcttcttgctggcgagcttggacacgacgagcgccgcggacgcccgcgcgccgcgctcggcggcgcccttccagctgagcatgtccacgaggcgctccacgacggcgggcgacgtgccgacgcggcgcagcgcgccgtccccgagccgcgggctcgcggccacgttgacgaggatgcccacgccgatgcgctgctcgtcgtgggacccgncgacgatgagc

SEQ ID NO: 295999 - DNA, 360 bp, Zea mays
tccggaattcccgggtcgaccgacgcgtccgcccacgcgtgcgagagatcctggtgctgaacacatgttcaaggaaatcagcaatgcttagtgatggtttgtctgatgatgagaagcgatcaatctatgataaatatggagaagcacgtctgaaaggtgctggcatgggcacaggagattactcaaacccgtttgatctattcgagtccctgtttgaaggattcggtgggatgggtggaatgggtggcggtcgtgctgcccgtaacagaccaatgcaaggtgatgatgagagctacaatcttgtactcaatttcaaggatgcagtgtttgatgtcgagaaagagattgagataaccagat

SEQ ID NO: 296000 - DNA, 255 bp, Zea mays
gcgccacatcacccgactcctggacgaggacggctaaccggccttcacgctcggcaacagggtcagctgctacgcgctgaagcactggacagagcatgtccaccccgtcaagctagagccctacaacccggactaccaatacgagtacatgctctggacctagagcctctacatccgcaactgctatcgctgcgtccgcatggtcaacaacatctaccttaactactacgccttacacggtgacgaggcccactg

SEQ ID NO: 296001 - DNA, 438 bp, Zea mays
gaccgccgtatcctctgctcgtatggcgtcgccacagcagggaaggcgtcgccatggcgttggaggttggcaaggcgggcgctgcgtctctacgcgcgcggaagacgagtgggggagcagcgcgcgggaagcgggaaatatgtcattgactgcgcgggaaatgagttagcgagcgcgcgacgagcagcatcgcgcagcagcaccttggaattcggcgcggttgaagagaatatagatgggcgtcagcgccatgctttcataggtttaggcttccgggaaagacctgaagcatatgacttccaagctgccctacatgatcatatgaaatatttaaacaagaagaaagcggctgaagagatgattcagcattatgagaagcaatcttcagtggattacaggctcaaagaaggtgagacattggttcttcagcttaaaaat

SEQ ID NO: 296002 - DNA, 429 bp, Zea mays
cacgcacgcgcggcaccacatctagtagagcctgcctaccgccccactgtcgtcgggattaattcaccaggctagagctagctagctggctctaccgccgttccccgatcgagcgtccgtcatggagattgatgagatggagagcggtgtcgtcaatggaagcggcggcggcgggtcgttccggcgggcgaggtgctgggagctgctgtgctcggcggcgggcatgctctggggcaaggtcgtcgggttcgcccgcaagctgggcaggatcgcgagggacgacccccggcgggtggcgcactccatcaaggtcggcctggcgctcacgctcgtgtccgtgctctactacgtcaggccgctcttcaacaactggggggtgtccaccatgtgggccgtgctcaccgtcgtcgtcgtcatggagtacaccgt

SEQ ID NO: 296003 - DNA, 356 bp, Zea mays
cccacgcgtccgacgagacctcggccttctgcaacttcaccaaggaaacggctgccactaaccccgcgttcgcgtggctgctctgcgacagggaggacgtggaggactgcgcgagcttcctgcgcggccacgggatcctgacgcgtagcgggagccagttcggctcggacccgaggtacgtccgggtcagcatgctcgaccgggacgatgcctacgacatcttcgtcaagcgcctctcctccctgcactgaacaggccgggtcggctacacgcatgcatggcatggagatgggaggaggatcgatgccatgccgcccggccggcgtcggcattgccggtccgtggaacagtgtgag

SEQ ID NO: 296004 - DNA, 144 bp, Zea mays
gtggtggtggcactggctctggccttgggtctctcctccttgagcgcccgtctgtggagtacggcaagaaatccaaactgggctttactgtgtacccatctccccaggtgtcaacacttgttgtggagccttacaacagagtgc

SEQ ID NO: 296005 - DNA, 207 bp, Zea mays
cacccttccgaaaaaacattccgaaaaaaatacatttttttcattcaaaaacctagaaacacaccacaagggaggttttctcaaagaggggggggcgctaaaaaaaaacaaaaaataatacgggggcggccgctctaaaggatccaagcttacttccgcgtgcatgcaacgttatagctcttttattgggccacctaaattcaatta

SEQ ID NO: 296006 - DNA, 368 bp, Zea mays
cttgactcgtggccagtacctgcacgactctcacaagggtgcaattctacaaaggctacctggcttagctgaggaaagccatcgatgacggcgccgacgtggctggctacttcgcttggtctatcctcgacaacttcgagtggcagtcaggttacacgtccaagtttggaatcgtctacgtcgacttcagcacgcccaagctcgaacgacaccccaaggcgtcagcctactggttcagagacatgctccagaaacacttatgagcgtctaacaaccaagcctgaaataggtaccattaaatttcttcagcgctgcctaagctagtggccatattattgtagcaaaagttgtaagctagcacagtgcaa

SEQ ID NO: 296007 - DNA, 396 bp, Zea mays
attgccgggtacgacaccacgcgctccggagagagaggagggaaaatgctgctttctacgccgcccgccgcctcgtttcccgcgccggcgctccgcccaccgcgcgcggggcgctagacacagcggagatgactccacaatgcccacttgctccaagatccattattacactggaaaaaggtcgccccccataaatgggcttcgaacacccagctgtgcaagcgcatacgcgcccacaaacaattgctgcgagcgttttacaacaaccaatcaacttagttgcttcaacaaagcttggcacatctaacaatacaaaccatcgcatcatagcaccaacaacaaatcctaccagcactgagccacctagccatggtgaaccctgacgcctacttgcaa

SEQ ID NO: 296008 - DNA, 292 bp, Zea mays
gcggaataagcgcgtaactgatgaagacttattatacgctattgtcagatgagatattccaggctaaggttatctggtcccttgctgatgtacatgcaacacgtggttcacttgctttatctactgcaacagtgaaatcggttgcaccagatggagaggagaaattagcatgtacagtcggagcacgttcagtcgatgcaagttacatggctgttgacaaaatagttcacattccaaccgttctacgagtatacagtttgacttcatggacagagcgcattgacgcaatctc

SEQ ID NO: 296009 - DNA, 439 bp, Zea mays
tttgattttagtggaaatggagaaagtgaaggtgaatgccagtacggcaactacgggaaggaggctgctgacttgcactctgttgtcttgtatcttcgccaggagaagtacgacgtagcagcaattgttggtcacagcaaaggtggagatgtggtcgttctatatgcctctatctacaaggatgtccccatggtggttaacctctctggccggtttcatttggagaaaggcattgaggagcgcctaggcaaagagtttatggatagaataaacaaggaaggctacatcgatgccaaagacaaatcacgaaatgttttgtacaaagtaaccaacgagagcttgatggaacggcttgaccatgatttgcacgcaacgagcctttccatcagcaaagagtgcaggttctatacaattcacggttcagctgacgagatcatac

SEQ ID NO: 296010 - DNA, 206 bp, Zea mays
cccacgcgtacaaagtccacctccaagttcgccaccgtccgcatacatggcatcgcctggtccttcttgggcatgatctgcgcgctcgtctactgcaccgtcggcatctacggcgggcacatcaacccggcagtgaccttcaggctgttcctggcgaggaagttgtgcctcaccaacgcggtgctgtacatgatcatgcagtgcct

SEQ ID NO: 296011 - DNA, 357 bp, Zea mays
tcacagtcatacttgaacagctaccttcttcttgaggagcttgccctggccatcgcggacatcactcaaacttttcaaggatggcacggttgtctgcaaaacatcctctctccattatctaaaaaatacttctattacatcaatgccccattcgtctttagcgcgcgcaacactgagtgcactgtcccgttcatgagacacgatgccagcattgtctacgaacgtgtgtaggcccaagcccctgatggtcgcctatctgatcttcaaggtgaccaagatcaagcttacaggaaaatcaagctccgtgcttaagatgtgcaaggcaggaatgtgctcacaaacttcttgggcatgaat

SEQ ID NO: 296012 - DNA, 198 bp, Zea mays
tttgaagatatgaaaaagcgttcccctatgattgatgcagcgggaccattaaatgaagttggggcatcattccgaagggtgatgggtggaacaggtggattcttgtttgccatactctgcaaggctgcgtttgcagccttaaagcaaagttcacttgtcattgcaattaaatgggctgttccttaaaaggcctccatt

SEQ ID NO: 296013 - DNA, 454 bp, Zea mays
cccacgcgtccgtatagcttcccttcttccctcataccttccatcaatgatagcttgagtatgtgaaaacccaggggttcaggcctataggctccaacaagcaatctcatcaagcaacatacctttatcacccttgttgtttcaacaatcgccagtcctatcttcggtgcagtcattggtacaaaccatcagggcacagcagctgcagcaactcttgctacctgtgatcaaccaagtagctctggcaaacctttctccctactctcagcaacaacaatttcttacattcaaccaactgtctacactgaaccctgctgattatttgcatcaacaactattaccatttaaccagctagctactgcctactctcagcaacaacaacttcttccatttaaccaattggccatactgaaccccgatgattatttgcagcatcaaatactactaccattt

SEQ ID NO: 296014 - DNA, 310 bp, Zea mays
aaaaaacaaaacaataacaaaaacaactaaatttatacctaacatcaatagataacaacagagggtaaacaccctaacggtacacggccatacgacaacaacaagccttctctcactgcaacataccttaatcacccttgccatctcaacaatcgtcatccctatctttcccgcacccattcttacataccatcacgtcacaacaactgcaacatctcgagctacctgcgatctaccaagtctctctggcaaatctctctacatactctgagcaacaacaaatttctaacattcacccaacttgctacac

SEQ ID NO: 296015 - DNA, 112 bp, Zea mays
tggttaatcaaggtaagacatctcgtctaggttaccgggatacaaacggcacatgctggcgtggaagtaagcttgggggtgtaagctgcggtcctagccggtgacgatactc

SEQ ID NO: 296016 - DNA, 332 bp, Zea mays
agcagatcttcgtccctggctcgtcgtccttcgaagattcctttctcagtgcaaacagcaccccttccagctcaaggttctcggtcgcagaccgatccttggattggagctcctctcgattctcagagacgagcggattggctcatcaggacgaccatgacagtgaccaggctaacgagaggcctttggttctctgcaacaaggagccaatgtggcacgagcagctgcagtgttggtgcctcaacttccatggtcgggtgacctgggctttctgggataaactgtcagtcgattgctgcaccactactagattcttgaccgttacagcaagc

SEQ ID NO: 296017 - DNA, 296 bp, Zea mays
accggacctgaattcccgggtcgacccacgcgttcgttgttcaaagataacgcatgtgacctaagatgagctcaacgagaacagaaatctggggtggaacatacaggttaaagctcgctggattatgatttacagctcgaatactaaccgggtacgcgtggcctatcgatcctttagacctcaagagttcgaagcttgaggagtacagaacagataccacactggataactgtgcttgtgtgcagccaatctgatcatagtcgacttaagcataactgatcctccagatgattagc

SEQ ID NO: 296018 - DNA, 202 bp, Zea mays
aaggagggcattcccccataccagcatcgtctgatctttgcggccaagcagctggaggatggccgcactctcgcggactacaacatccataacgagaccacccttcacctcgatctccgcctcaaaggctctatcccaatctcctgaaagaccttgtctctaaaaaccttaacccatcatgacatacagctactacactcaa

SEQ ID NO: 296019 - DNA, 173 bp, Zea mays
ggagttagagagagaggggatctgcgacgtgttttgctctgcggctgcttgtctgtgggccctattgaggctatgtgcacatttacaccgaggtcggtggttgatcatcagttaattattacatgttacagtagatatgaacagattgtgatgaggttgaatcgatgactaaa

SEQ ID NO: 296020 - DNA, 287 bp, Zea mays
gtcgtatgagcaaagttggtgtctgatcttttgactgcaagggaaagagatgaacagagacacaccagtgtatagggtatatgcttgcctgagcgtgttactgtcggaatggcaggaggtctgttgtccatggagtactcatggtcctctgtttttggcattataggcaacatcatctcatttctggtgttcctagcaccattgccgacgttgcttcgtgtgtacccgaagaagtcgaccgaggggttcagctcggtgtcagatgcggtggctctggatagctgtac

SEQ ID NO: 296021 - DNA, 249 bp, Zea mays
aatgaacatacatgacacaagcgtgtcttgactgcacaaactacatcctaggagctaagctacttcaagtcaaaagtctatgacattatgcgtacatgcatgtcactcgcatggactagtataaccgaatcatggctgacctttgtctacacaacaacaaggactacggcggccggtctacaggatccatgcttacctacgcgtacatgcgacggcatacctcttatatagcgtcaactaaattcaata

SEQ ID NO: 296022 - DNA, 332 bp, Zea mays
tcggctggaccgacgcatgcgtccaggcctacgagaaatcctggggctttttaaaagttcaaggaaatcaacactgctggggcagctttggctgatgatgcagaacgatcaatctatgataaatatggagaagcaggtctgaaaggtgctggcatgggcacaggagattactcaaacccgcttgatctattctagtccctggttgaaggattccgtggtatgggtggaatgggtggcggtcttgctgtccgtaacagaccaatgcaaggtgatgacgagagctacactctggtactcaatttcaaggatgcggtgtttggtgtggagaaaag

SEQ ID NO: 296023 - DNA, 346 bp, Zea mays
atgaacggctcgaccgacgcactccgtgcattcggcctcagctatcggggctgtgggctatgacaagcgcgttgagatcacagtctgtgaggaacctgactttgtggacctccatggcaggcttttgcatggcctgttcaggtcccagaacgactatgatctggatgttacacggtgcactatcatgtacgagctataccacaatgatgttgactactaagttctatgcgagtgaagcttgtgcatctatgctctgaagattgtcgtcagcacctgcggcagtaccaagctgctggtgacaatttcaaggatgctagaacttgcttaaaagcgtgctatgcctctt

SEQ ID NO: 296024 - DNA, 268 bp, Zea mays
cccacgcgttcgccgctggctagctagctagttgagtcatttagcggcgatgattgagtaataatgtgtcacgcatcaccatgggtggcagtgtcagtgtgagcaatgacctgaatgaacaattgaaatgaaaagaaaaaaagtactccatctgttccaaattaaaaaaaaaaaaaaaaaaaaaaaaaaaactggaaaaaccaagaaaaaacccaaataaataaacttgcaaaataataacccctttaaacagctggcgtaatcccaa

SEQ ID NO: 296025 - DNA, 398 bp, Zea mays
cggaattcctggcgcgacgacacgcgtccgcccacgcgtccgggctcaccccatcatcagcacgcgaaaatctcccgatcccagctagtcttcgccgagaagatgttcgctcaccgtaagggcgtgaagggcctgggcaagggcggaccgaaccgccaccggaaggcgctccgctacaacatcgagcggatcacgaagccggcgatccagctgctggcgcgcaggggctgcgtcaaccgcatctccgggctcatctacgacgagacccgcggcgtactcaagatcttcctggagaacgtgatccgcgacgccggcacctacaccgagcacgcgcgccgcaagaccgtcacagacatggacgtcgactacgcgctcaagcgtccaggccgcaccctcta

SEQ ID NO: 296026 - DNA, 328 bp, Zea mays
aacacgcgtccgcccacgcgtccgtcttaacccaagccctcaccatgacaagctggggctttccttgccgaaaggcgctcagcaagatcgctggcaatacgctgcagatggaactcgtcaagtggcaactcaacatccctgctggattcaagcacatggtctccaataacctacaaacgtgggtaattgaggtcactggagcagccggcacggtttacgccacccagacctaccagttgcatgtagacctgcctgagcattatcctatggaagcaccacacgtcatcttgctcaatccagtaccaatgcatccacacatttacagcaa

SEQ ID NO: 296027 - DNA, 390 bp, Zea mays
ttttcaaatgaagctacatttcaaggcccagcatttatcatggctttgtgaagtggctggccatgttttttttaaaatttaattaatattccttcttgcagtgcacagtcagtgagatggtatttatctaatatatcgtcttcctccacacccattctccctttgacaattgaagaaaactgcagccactggaggtccaagattatagagcgcagaaaagtctctcgtgttgaaattttgtctccatcctggtgcataaacggtttgctggacagactggcggaagagtacaaagacaaagcgatgtattccagcagatggctttgggttttcatagctgacaatttcatttcctgtaataaaatttgttcaaccatgtcacagtgaaaa

SEQ ID NO: 296028 - DNA, 407 bp, Zea mays
aatttttctaaacttgtaatcatggagcagatcagatcagacctatctacaaataaaaaatagcaacaaaaagttgacttcaggtttcgatatgacctgtaatctccagttaccaccaaagtgtggctcatggttccaatctaacaataaccatattaactataatgagatatttgtgtcgcaggggatataactataaattggaccttatagaaaaaaagagaaggtgcattacaatcaccaatcatacatatagattgcccttggtccaccaaaaatatacacaaatagaaagccataagattaaacacatcatcacccacgcgtccgcggacgcgtgggccaaagccaaagccaaagaatcctcttgacttgctgccaccaagcaagatggtccttgatgactg

SEQ ID NO: 296029 - DNA, 165 bp, Zea mays
cgctgatccgactcgtggacaacacctgcagcgacagctttgacctgtacaacggcctcttcatgtacaacaagaactccaccgaactgctcaaccgcctcgagtgggccatggactccgtcaagaagaggctcttagacagcctccacgacgtgctcccgaagc

SEQ ID NO: 296030 - DNA, 358 bp, Zea mays
agccagacaatatagcataagcagacgcggagactgaaagcaaagcaggaaaagacgccatggaggaataaggaggagctgagcaaaggacaccggatgccggcggtggggctgggcgtgtggcggatggagaaggcggacatccgcggcctcatgcacacagcgctccgagtcggctaccggcacctggactgcgccgctgactaccagaacgaagctgaagttggtgacgcgctcgcagaggcattccagaccggactcgtcaagcgggacgacctgttcatcacaaccaagctgtggaactcagaccatggacatgtgcttgaagcctgcaaggacagcctgaagaagctgcagc

SEQ ID NO: 296031 - DNA, 325 bp, Zea mays
cggcaaggagctcgacggccgtaacatcaccgctaaccaggcccaatcccgtggcggtggcggtggcggcggaggctacggcggcggtcgcatgcggcagcagcagctatggcggcaggcgccgtgaccgcggttatggcggctgcggcagctactgcgtgtcggcgcgaaggtggcggctgcggctactgacgcagaggcggatacgagggtcggcgcgagggtggcggcggcggctacgtgctgcagtgcatgctgcggctgcaggtactgatgtgtaggcccatgctggcttctgccgaggtatattatctatctatagtat

SEQ ID NO: 296032 - DNA, 399 bp, Zea mays
  unsure (1)..(399): unsure at all n locations
accggtccggaattcccggttcaaccaagccttccgcttacccaaaccccgcgccccaaaaggaaaaccacccagaagggaagaaaaccatcgatcgatccatcgaaataaaaggcttttcttaacatggagcaacagaactgggccttcacctttcgtatcctaggtaacataatctcgctgatggtgttcctttcgccgctgccgacgttctaccgcgtgtaccgcaagaagtcgacggaggggttccagtcgaccccgtacgtggtgacgctgttcagctgcatgctgtggatcttctacgcgctgctcaagtccggcgccgagctgctggtgaccatcaacggncgtcggtgcgtgatcgaagcggcgtaccttgccgcgtacctggtgtacgcg

SEQ ID NO: 296033 - DNA, 532 bp, Zea mays
gccacacgtccgtgcacacgtactgtgagacctacttgatgaaccattatgtcaacgctacgatcagcactcattacatggctacgatcggcccggatttgctcacccatgacgctctgctcgtggacaggatttttactctgcaaatgtgggacactgttggccatgaatggtaccagagtctagacggtgcattctaccgctgtgctgattgttgtgtgctattctatgacgtccatgctatgatgatcatatgacgacctgaataactgtcgagaatagtatctagttcatgctagctccatcatatcctgataacatacctgatgttcaggtgggtaacaaagctgatgtatatggtgacaacagcacacgcgttatctgctaacaaggcgaacgcttggtgcgcttacacagggaacatcgactgctctgacacgtctgataccgaccgaacgatcgtggaagacgctttgcagagtgtcccgaagaatgctctgaataatgaccatgccgaagaactgtatgtgcc

SEQ ID NO: 296034 - DNA, 245 bp, Zea mays
aaaaaaaaaaaaaaaaaaaaaaaaaaaaaaaaaaaaaaaaaaaaaaaggaaaaaaaaaaaaaaaaaaaaaaaaaaaaaaaaaaaaaaaaaaaaaaaaaaaaaaaaaaaaaaaacccacgctttcgcccacgcttccgcggacccctgggtttaaatcgcaagcggccgttttaaaggatccaagtttacgtacccttgcatgcaacttcatagcttttatatagggtaacctaaattcaattcat

SEQ ID NO: 296035 - DNA, 244 bp, Zea mays
cccacgcgtccgcccacgcgtccgcccacgcgtccgtgtcagttcagttcagttcagtgtcgaatgaagtagtagtagctgttgtttgcattggatctgacaatgcatgctaataattatggtggtgtgatggtcttggtcggtacgtgcgtagtcgtctacgtacgccgtgtcaacgtcgtagatctctacgggaagatgataagactgtaacatgcagggcatgcatctatttatacttaac

SEQ ID NO: 296036 - DNA, 246 bp, Zea mays
ccgattcgtccgaagagtatgaacaacaagcttcaactgctgatgaagagcgttcaagtacaccctgggctactagaccgttgttaaaactctgcgcaacttcaaggtaaagctgatcatcatcgcgaacatctgtccttcacttatgaagtctgagattgagtactacaccatgctggccaaagttagtgtgcaccattttcaccggaaacaatgttgatcttggcactgtctgctgcaagttct

SEQ ID NO: 296037 - DNA, 271 bp, Zea mays
ctgaattcccggatcgaccgcacgcgtcccgcgactgcgttgctcgtgaagttttcaacattgagagtgatcaaatccttagctgcttgcttttgtctctctattttctccttgtgtatttttaagcgtttatccatgaacaaagtatcggtactagggtactactaaaccaaggtatttaggctgtttggctcaggtttaaaaaaaagctggaagccatacaacgcccgatgctagccaccgagctgaacctcggctaccaactggcgcc

SEQ ID NO: 296038 - DNA, 404 bp, Zea mays
tttccgggtcgaaccgaggggtcggcccacgcttccgaaccctgcaagtggccccccaactcctaacccaacccctactcaacctagctcgcggggggggccatctgccatggccttccgcctgatcaacaacctgatcggggtcctaaacttcgtcaccttcctgctctccgtcccgatcctgtgcgcgggcatctggctgggccaccgcgcctacggcacctagtgctagcgctacctctcggcgcccgtcatctcgctggtggccttcctcctcgccgtcttcctggcggtcctcgtcggcgcctgctgccgcgtcacctggctgctctgggcctacctcctcgccatgttcgtcctcatcctcgtcctcttctgcttcaccgtcttcgccttcatcgtca

SEQ ID NO: 296039 - DNA, 319 bp, Zea mays
  unsure (1)..(319): unsure at all n locations
cacgtatattcatttcctggtcacatccccgaacaatgtgaaggcgttaatcagatagatgacgatgaagaagaacaactataataagatttgccctagcctgtgttctcagttatctctaanaaaaaaaaagaacactaaatacacaacaccataaaaacataaaagcaaagacctcaagtacaaaatcatactaaatcgggatacgcagaggtaccgccgattcggtttcgccaccttaattcacagaagatgcgatgcggaacaccatctatgtcatggacggccctgagctatacaaccgtaacatcaccgtaaa

SEQ ID NO: 296040 - DNA, 356 bp, Zea mays
  unsure (1)..(356): unsure at all n locations
cccacgcgtncgcccacgcgtccgcttcgtagcgccggcgctccatcttccgttccttccttaagtgggggtcggaacccggttaacggcggcagtgccgcaattaagaaccggcttttaacgacacggttaaccggtttcccttccggtttttttcaagtggcttgcgcccttggcttcggtgcttccacaccaagcggggacccttcatatagggtgtgagactaccaaaactcgaaaatgaacaagggaaagatttttaagctagccaagggattcagaggaagggcgaaaaattgcataaggatagcaagagagagggtggagaaagcgctgcaatattcatatagggatcg

SEQ ID NO: 296041 - DNA, 442 bp, Zea mays
gctatattttgccaccaacgctgcaactttctgttgttccatcaggtggttggcaatgcagtgatgctcggtgaaatcataaactacgtgcagtccctacaatgacaagttgagtttatgtccatgaaactggccaccgtgaatccccaggtggacttaaatagcctgcctaacgtcctccctaaagatgtacatcagtcttgtggtccgccacatttctcgctggagacctcatacgcttcgttgtcgtacctcagccagcctcaccatggaagccctcttggctgcatggacaaccagagttgtatgcatccacttgacacgacgttttgcctggcgataaatccgcagtattcatttccttaacggtgttagcgatgcatcggcttagttgcagctaatttgatgcttgtgtttatggaaaccaagaagtggcgctgat

SEQ ID NO: 296042 - DNA, 333 bp, Zea mays
aaaaatcttcccaaaccctagctcccgatcttgatggcgaaccctcgcgtcttcttggaggtgacctttggcggctcccctgcagtcctgatcgtgatggagctgtacgccaactaggtgcccaagaccgcggagaactttcgcgcgctgtgcacgggcgagaagggcgttgggcaagtcctgtaagccgttccactacaagggcttcacgttttaccgcttcatcccctatttcatgtgccatggcagcgacttcacccgctgcatctgctcctgctgcaagtccatctactgctagaagttcctcgactagaagttcgtgcgcatgcacat

SEQ ID NO: 296043 - DNA, 340 bp, Zea mays
ggccgaaccacgggataaatcctcgtgtctcttgtgcttgtccttattgtgtctattgtgcgtcacatgagttctcctctctactcacttgatttcattattcaactcataatcaagtttgtggtgttaagttttaagttttacaggatcacctattcaccccccctctaggtgctctcaattggtatcagagccgttctcttcaagaaagggactaatcgctcgaagagatggatcctatgggcaaggggatggtggtcaatgataatgagaaggagtccttcgtcaatgatccaaaagattacaagcctactgactcgggctcaagccacatatgaaa

SEQ ID NO: 296044 - DNA, 475 bp, Zea mays
ggttcggaattcccggggggagccacgcgtccgccgacgcgtccggtcgcatccgccgcctctgtcaccgcggcctcgccctcgccggcatggttgctcttacgacggcctgtgcgctacgccgtcctcggcgccggctttgcgggtctctccgtcgcgtggcacctcctcaagcatagcccgagggattcccgcgtgtcagtggacatctacgacgagaacggggtcggcggaggcgcgtcgggcgtctcgggtggacttctccatccctactcgcctaaagtgaaacttctctggaggggtgctgagttctggaaagaaagcatggatctccttcgcagcgccgagcaagcaaatggaacctcggtatcaaatacaactagtcaagatgataaccttatcttgagaagggggattgtacgaccgtctacaactgataaagcttgaaccatattgcttgagaatgttcaaaaat

SEQ ID NO: 296045 - DNA, 232 bp, Zea mays
ccggctcgagccacgcagtccgccgacgcgtcctcccacacgtccgggttcctccctgcgtgtatgcttgttaccgtcatgtcttttctttcactactaggctccatccaacatcgatggcttgcttctttatcagaacatgtttgaataaacgctatttggtaaaaaaaaaaaaaaaaaaatattataaaaaaaaaaatacaacaagaacaaataataaaataaaaacatt

SEQ ID NO: 296046 - DNA, 447 bp, Zea mays
ggttcggaattcccggcgcgagccacgcgtccgcggacgcgtgggctagccgcctgtctttctgtccggtctccactcgtccgggctactagactactactgagggtttctgcgggggatttgtttgtcgctgactcgccggcgaccaagatgaggccggttttcgtggggaacctagactatgatacccgccactcggagctcgaccacctcttctaccgctatggcagggtcgagcgcatcgacatgaagtcaggctttgcttttgtctactttgaggatgaacgtgatggcagtgatgccatacgtgctcttgatggttatccatttggcccttgcagacgcatgctttcagtagagtggtcacggggtgatcgaactgctagacgtgatggcaacaaaccagaagtaaatactaagccaactaaaacattgtttgtcattaac

SEQ ID NO: 296047 - DNA, 357 bp, Zea mays
cctgattcccggtcgaccgacgcgtccgaatccgttgaggcactgcaggccaatgtccatagtcttaagacatacaaggccaatctgatcagctttccaattcattctcacaacgttcacgctcatgtctctactccacatgaacttgtcaacgatacccagatccagggtgactacataccttatactcgtagttagaaacctccacttaaggcactataccatgcataccttactaatttatcacctacctttttcaatcaaatactagaattgatgatgtcacaacaacatttacaccctccattttttttatttttattttcactatatttttcattttaaccttttattctt

SEQ ID NO: 296048 - DNA, 244 bp, Zea mays
cctcaattccctgatcgacccagctcgtccgctaatgctggctatcatgcttcgacatcaatactcatcagagcttcgaagctttcaacccggtatcgttttctttcatgatctaccccacccacaccgtgaacatcaacgccattattgatgcattccacctcattaatcctcagaccatgattctctcccactacccacctcatacaacatcaaatgtatgccacctaaataatccatctat

SEQ ID NO: 296049 - DNA, 362 bp, Zea mays
cggccgtcatacacctcacgctccccctcgcttgcattctgtgaccccaaaagccttctcttgatgtgtttaatggatctggactacatcaactcactcattggtggaggcttctcttttcagaatccaaacgcatcaaaaacctgtatgtgcggcaaatctttcgcgactgcgaaggaattcgaggctgcatcaaacgcttgctacatctagagtagtcaaatattgatagcaaatcgtgatgtaacttgttatatatctttgttctgatcaaatcacgtagcttcaccacttatacttggttcgtttcaaaatagttggctttgtttttattaacatgtttacttttttaatatttttct

SEQ ID NO: 296050 - DNA, 385 bp, Zea mays
attctccgggtcgacccactcgtcctaggaggtctttaactactcatacatttcatttgcttgacatctgtactgattctcccgctcgtttcaattctgttgtttatatcacatatggaatcaaacttaaatattagctattacaagaaatcttgactcattaacttttatcgagttctgtactcataatttctatactctcacaattatgatcacgttacaaggactcttcgataacacaatcacccaattcatgtattactcctcatgcaataacctgctgttactggatcgtttctaactgcaataacaatcaaacttattcccatgattcaccaaagtgaaaagtatcacaagataatagcaatctgtactaataatcctt

SEQ ID NO: 296051 - DNA, 346 bp, Zea mays
cccactcgttctcccactcttcttctgatccggctgatccaccttctgagtggggttttttcctatcacaattccatacctcttgtgaattgcataatccctcgaaccatctagtttttgaactctatttgcgcccgaagccttctggcgaatgtcacgtctacctgtacgttacaccaaaagacattgtataataaaataaagatatctaaaactataaaattcaatacattataatctattaactcattcaaaaaaaaatggtcacatgttttataaaatccatttttacatccccttacatccgccttaataatttttttaatggttccctaaatttaattta

SEQ ID NO: 296052 - DNA, 284 bp, Zea mays
  unsure (1)..(284): unsure at all n locations
tctgactcttgttctgactcttggtctggggtagatatgggtctctcctttgggaagctgtgancgctttcttcgccaataaggagatgaggattctcatggtcgagctcgatgcctcctgtaagaccaccatcctctacaagctcaagctcgtctagatcgtcaccaccatcctcactatcggattcaatgttgaaactgtttaatataagaacattatcttcactgtttgctatttttgttgccatgacatgatcatgccccttttgaagcactacttttat

SEQ ID NO: 296053 - DNA, 453 bp, Zea mays
gtgcaagggggaaccaaacatatcatactatctgctcgcgatactatagggctccaggtctcatatttggtgccacgtgagtataccacagcgattgacatttggtctgctggttgtgttcttgctgagcttatgctagggcagcctttgtttccaggtgtaagtggtgtggaccaactcgtctaaatcatcaaggtccttggtacttcatcaaggtaagaaattaaatgcatgaactctatttacacatattttatgttcccacatttttatgcttatctatttctcatggttttctgcatttggtttccttcttttacttttttttttttttttatttttttttgttctttttttttttttttttctttttttattgattttttttttttttttttttttttattatttattttttattatttttttttattttttttttttttctatttt

SEQ ID NO: 296054 - DNA, 454 bp, Zea mays
ataaccgggtcgacggacgcgtccgacgaggcgttcggctcatggcatactatatcttgaccccttcgaggttctcgaccaggaaggacttttttagctggttaagcttgctacacagaggggccgcaaagctaggcctaacttgaaggtcggcatttgtcgagaacatggtagagagccttcatcggttgctttcttcgccaagactgggctggattacgtttcttgctcccctttcatggtcccgatcgctaggctagctgcagctcatgtgcttgtctgaggggctgcctcctcgttggcagcctgctgtaagtgcatctggtgattaataatactactatgacagatccatatgctctgtgaagagtattagtagcagcgctcataaaatctacaattacatctatattctcaactatgtaaaactttcaaactgttcatgcttaaaaac

SEQ ID NO: 296055 - DNA, 329 bp, Zea mays
tctcatggcatcctccagttataccccttcgaggttctctaccagagagggagttttctaactgtttaatcttcctacatataggggcctcaaagctaggcctaacttgaacgttggcatttgttgagaacatgatggatatccttcatctgttactttcttctccaatactgctcttgattacttttcttgctcccctttcaacttccctatcgctatgctagcttcatctcatgttcttgtcttatgtgcttccttactttattcaaaccttctttttgttcatctttttattaataatactactatcacatatccatattcctctt

SEQ ID NO: 296056 - DNA, 458 bp, Zea mays
ggatcctcatgatcctctgcgtttctttcactgttggtttccgtaacaccaatcagatttttttatcacatgtggcgtggccgtgatcacggtgatgctggtgaccacgtgcctcatgcccctggtgatcatgctgtgctgggaccgctccccctggctgtttctcgccttcttcctcttcttcggctccatcgaggctctctacttctcggcttctcttatcaagttcctggactgctcgtttttgcccatccttctggcccttattcttctctccataattttcttttatcaccatatcattattatcattttcgagtactacatttcacaacattttttccctttttttttcttcatttctcttttttacatatttatacatttttattcttttatatttattcttatttttttttatctcttttttaatcttttttatttcttttatctttttt

SEQ ID NO: 296057 - DNA, 415 bp, Zea mays
ttcccgggtcgacccactcgtccggtgctctaaccactcgcttaagctctctatataactccagcctgttgccttcttccaaagcggctgtctcccccataaataaagcagctcctccgggggcggcgaactactcctcgtcgccaaaaccctagccctgcttctttgccatggcgagcagcgctagccaggctagcctcctgctccagaagcagctcaaggatcttgcgaagaaccccgtggatgggttctccgccgggcttgtagactacagcaacatcttctagtggcatgtcaccatcatcggaccccctgacaccctatatgatggaggctacgttaatgcaataatgacctttccccagtactattccaacagcccgtcatcagtaagatttacttctgagatttggca

SEQ ID NO: 296058 - DNA, 426 bp, Zea mays
attggaagcaatcctgttcttcggtttattgctggaattgtatttatgcagtaccagtactacattgaggttctcaagcacacacactctgtaggaactctggatttgcatgcattgaatgtccagatcttcatcaagatgcatcgttcagactatgctgagaagcaattgaagatcatgcaacaaattgatgaagaccatacacttacacaacttgcaaactcatggcttgtcattgctgttgtttgctttaatatctctgtatcttattttatattccattacttttttgatgagttcttttttttctatttttttttttattttatattttatttttttctttttttttattttcttgtttttttttattattttttctttttttatttttaatatttctattttttattatttttttatttt

SEQ ID NO: 296059 - DNA, 440 bp, Zea mays
gtgttctttgatggacatcagcctggtatacatttccctatgctggtactacgactagatgttgatctttatacatgggggttccatgtgttacaatggctggtgctgttcatgctcataacgttggtgtcagcttgctcagcaaagtcgggttggggaggctggttgccaaaactgatgatgagtatgtgagcctagcgttgtatttggctttttattgttatgtccttcatgttctgtttatgtcttttttgtagctttttatttattttttttttttttatttttttttttttatttttttttgttttattttttttaattttttattttttatttttgtttttttttttttttttttttattttttttttttttttattttttttttttttttttatttttatttttttttttttttttttatattttattttttt

SEQ ID NO: 296060 - DNA, 431 bp, Zea mays
ctccaagacttccagcggcatgtgaattagcttctgggaaaggtcgatctctaatagattctgcttgttcataacttaaacggcatacacattttctccttttcttcactagtactacataaataacttgtgaacagtaccgagggtgtatatattgcagtgacaaataactaggacactgctaattctactgctggcttaccactgtcttggttagatttatccctacaagattgtttactgtgtatttcttatgtttatttagtcatactttgttttttatatatttttttttattttttttttttttttttttttttttatatttattttttttatttatttttttttttttattttttttatttttcttttttttttttattattttttttttttattttatttttttttttttttttttttttttt

SEQ ID NO: 296061 - DNA, 364 bp, Zea mays
  unsure (1)..(364): unsure at all n locations
cggaanncccannncgacccacacgtacgcttcaaacacatattactaataatgtttccctttcatcataatcccccctacaaaaggaaccgttctcttttatacaacaacatccttctcaanaactccaacatattctatccaaataatactctctatctacatttgacactttcaaacttaacctttcatttacataatattacccaaacaaaccaccaacttttctattttattctaagatattttatccaaatatatattcttatataaacaatctttttgatattctacaaaaccattttaatcctatatatgatttttctccaattttaactttttatttcattctattcttttatta

SEQ ID NO: 296062 - DNA, 235 bp, Zea mays
  unsure (1)..(235): unsure at all n locations
cgcttgaaaactactcctacaacatgctcaacacgatcaaggacgagaagagggctgtcaagctgccggcctatgacaacaagaagatcgaggacgccatcnacgcggccatcagctggctggacaccaaccagctcgccgaggcggacgagttcgaggacaagatgaacgagctggagagcctattcaaccccatcatctccaagatctaccatggcacttatgaacacatggt

SEQ ID NO: 296063 - DNA, 147 bp, Zea mays
  unsure (1)..(147): unsure at all n locations
tcccgggtcgacccacgttttcgctttaagtgcgccaccttcgagtanacaccgtatcttccgccccttcggcggcatgagcngggccctcatctactgcaccgccagcatctcctgcgggcacatcaacccggcggtgaccttcgg

SEQ ID NO: 296064 - DNA, 122 bp, Zea mays
agagcatgcacatccgagaagaggattctacaccatccacagtaacatgcatgatggctacttgacttcgtcggggcagcataagctgtaagagcccatatcccctggtggcggctcctctt

SEQ ID NO: 296065 - DNA, 141 bp, Zea mays
gctcgcgcctttcagccttgtctaggaggacgcgtcgatgctgaggaggaagagctagtacattggcaagggcttccacttcttcctcatggtcaacaacgcccgccttaacttcgacgccttccacggcgacaaggacca

SEQ ID NO: 296066 - DNA, 399 bp, Zea mays
tctgacacatcgcaaaaaaaaaaaaaaaaatttatttaaaacaaaataaaaaaactaaaaagaaaaaattaaataaaattacaccaataacctaattatatttaccaaaaaattttcaatactagcaaatcaatataatccactaattctttggactataccacaaatttctcacacatgctatattttcacgacccacaaatactctatctaatccggctctatataacaattcacactaatcatcatatcaccaatgtcagtgctcatactgttcatctggttggcacttctctgtcaaatccttatctttctttcgcatccactctaaatggtctaactgtaccactgcatgtcctttcaaatcatgaactgctcttatttatcaaatctgtaatt

SEQ ID NO: 296067 - DNA, 231 bp, Zea mays
gtctggaattcccgggtcgaccgacgcgtccggcatgttggcggagatatgttcaagtccattccctccggtgatgccattttcatgaagtagtttctgtcgacgtggaccgacgacgagtgcacggccatcctgaggaactgccacgccgctctgccggacggcggcaagctcgtggcctgcgagccggtggtgcctgtggagacggacagcagcaccaggacgagggct

SEQ ID NO: 296068 - DNA, 306 bp, Zea mays
  unsure (1)..(306): unsure at all n locations
attgccgggtcgacccacgcgtgcgcgcacgcgtccgcccacgcgtcttgtctccaccactgctccgcccgcgccggatcganggaggtgcaggcggacgaggaggagggatgagtctcttcgggcttggacgaaaccagaagacattccgccccaagaagagcgctccatcaggtagcaagggagcacagctccgaaagcacatagatgccactctcggcagtggaaaccttatggaagctgtgaggttgcctcctggataggatatcaatgaatggcttgcggtgaatactgttgatttcttta

SEQ ID NO: 296069 - DNA, 325 bp, Zea mays
ggaattccccgaccgacgcgtgcgtccacgcgtccgggacgccttccacggcgtctagttaccacggcggcgtccacgacggcacgaccgtcttcctctgggagtgggccaagggcgacaaccagcgctggaagatcctgccctggtgaacgtgaacagagacgagctagatgaatccaaggaaccttacctagctgctgccgccgtcgcctaattcgtcctgctccgctctaagctgtatctgtcttgggcttcgcgtactcggttcctgaaaggacgaataatatatagcatgcatgtaccggtagcgaccatgtctgaatga

SEQ ID NO: 296070 - DNA, 399 bp, Zea mays
acgagatagagctgctagaggctagagcagtttagctagaagaggaggacaacaacgatgggtgcagcggcggcggcggcggcgaggggagatacgaagaagaagaagatgcttgccaccctggtgggctgcaactacgccggcacgccgtacgagctgcagggctgcatcaacgacgtccacgccatgcgcgccgtcctgctcgcccgcttcggcttcacgcctgccgacgtcaccgtgctcaccgacgaccagcacgggcgcggcggcggcagcagcgtgctcccgaccggagcagccgtcaagcgcgcgctggatgacatggtggcgcacgcggcgcccggggacgtgctcttctttcacttcagcggccactgcacgctcgttccgaccgtcggc

SEQ ID NO: 296071 - DNA, 270 bp, Zea mays
ccggttgtatctggaaacccaataagtcacccgccgctccgataatgccatacttctcgtcctatacagaggaccaccataactgccgcttgatctgaatctccaagggtttcaaggactgttgatgatgtgaccaaagcctctagcacaaagcgtgctgctgctcccatttaaaatatactatcctacggtaccttgaatcatatatatattcgagcgactaactacatgtactgtagcacaaatcttaaataaaattggctttttttc

SEQ ID NO: 296072 - DNA, 372 bp, Zea mays
  unsure (1)..(372): unsure at all n locations
cgcacgcgtccgctcacagcctcagcttgcggcgtcggcgtgcgcggccggngatagcgcggtctaccagaggtcctcctccttcggggacgatgtcatcactgcctacaggaccccaatatgcaaggccaagcgaggaggcttcaaggacacctacctagaggacctcctcactgttgttctcaaggttcccttcccttcaaggtcaaccgccagtgttcatctaggctacaggcagtagccgatgtcgtagctgctataaaggttggttactatgacataggtacatagtatctgaatatacatgctactttcgctcttgtgctttagtttggctgctgaatcgctgctcttccggtttgttcggttagc

SEQ ID NO: 296073 - DNA, 426 bp, Zea mays
gggttttgctgctctccgaccccgagctccgaaggccgcagcatcaggcgcggcccgcctcgcgtgtgaccgagatggcgctgccgaatcaggggaccgttgattaccccagcttcaagctcgtcatcgtcggcgatggtggaactggtaaaactacatttgtgaagaggcatctcactggagagtttgagaagaaatatgaaccaaccattggtgtggaagttcatacgctggatttcaccacttactgtggtgagagcaaggtctactgttgggataccgcagggcaagagaagattggtggcctcagggatggagactctatacatgggcactgtgcgatcaccatgtgtgaggtgacctcaaggcgtacttacacgagatgtgcctacacggcatatggacctgtgcacggtgtgtgaaaac

SEQ ID NO: 296074 - DNA, 109 bp, Zea mays
cggatatctcggctctcgcatccattaagaacgtagcaaaatgagataccagtgcttaatgtgtactataaaaccacgggccccaacccctcaagtatcctcaaaagtc

SEQ ID NO: 296075 - DNA, 255 bp, Zea mays
  unsure (1)..(255): unsure at all n locations
ccggnacggaaaacccggggcgacgcacgcgtccgactcgccntctgccttctgcgcctctatttctgcctctgtcccttgcaagttcaatcgcatctccatccatgggtaaagagaacccccacatcaacattgtggttattggccatgtcgactctggcaagtcgaccaccacaggacaccttatctacaagcttggaggcattgacaagcgtgtgatcgagaagttcgagaaggaagctgcttaaattaaca

SEQ ID NO: 296076 - DNA, 317 bp, Zea mays
  unsure (1)..(317): unsure at all n locations
accggctgganacccgggcgggacgacgcgtcgggccgggttaaaaaacacacctagcttagctcactagcaacgacctaacaacaatggggngcatgatattatacgtcctcccacccctccccctacttganagtccaacaaattccttcattattccacaattctcacttnctcctactgccattattccacatttcctccctccanttacttcaatantcttctaacacccatctnttcaaacctatattctacaacaatctcttatcactatcatcttaaaacaaccatattcccaattacaacaacaattc

SEQ ID NO: 296077 - DNA, 359 bp, Zea mays
accggaccggaatacccgggtcgacgcacgcgtccggcagattcaacagccttgcaacgagtgcattgggactggggagagcatcaacgaggagggcctctttccatggtgcaagggtcacaacctcgttcaagagaagaaggttcttgaggttcatgttgagaagggaatgcaacacaaccagaagatcaccttccctggtgaagctgatgaagcgcctgataccgtcactggaaacattgtattcgtcctccaacaaaaagaccactccaagttcaaaaaaaaaggtgaagatctcttttattagcacaccctttctctgacctaaactttatgtgggttccaaattgttcttacac

SEQ ID NO: 296078 - DNA, 340 bp, Zea mays
  unsure (1)..(340): unsure at all n locations
accggnccggaatacccgggtcgacgcacgcgtccgctcgctttccccgagctctcgaaaccctatgtgcgtgccgaccggcggcggcggcnaggttatggctatggacccggacgcggtcgccaaagccttcgtggagcactactaccggacgttcgacaccaaccgcgcggcgctggtggggctgtatcaggagacctccatgctcaccttcgagggccagaagttccagggcccatccgccattgccggcaagctcggatctcttcccttccaggcctgcgagcaccagatcgtcaccgtcgactgccaaccgtcggggccctcaggaggcatgctc

SEQ ID NO: 296079 - DNA, 325 bp, Zea mays
  unsure (1)..(325): unsure at all n locations
ccggaccggaaaacccggggggacgggggcgtcgggaaggataacgcaagtgtcctaagatgagctcaacgagaacagaaatctcgtgtcccagcaaaggtnaaaagctcgtttcattctcatccccagtacnaataccaaccgtgaaagcgtggcctatcgatcctttagaccttcgggttgattaaaaaaataatttataaatattaatagttaaataatataatatttttatttattttagggtggactttttaatggttttcaagtttcttttttctttcattctctcttccttttcttctttattttttgttgttaatct

SEQ ID NO: 296080 - DNA, 99 bp, Zea mays
ccgttgataaagtttgcgtccttagctttggtatttctaccggtcttggtgcatcaatgaatgtttcaaaacctccgaagggttcgacagtggctgttt

SEQ ID NO: 296081 - DNA, 227 bp, Zea mays
gccacgcgtccggttggcttctcctccccttccggttcgggttcgggttcgtgaggggctgcggggttcgggttcgtgggtgagcggatcgagatggcggcgtctgatgttgagtaccgctgcttcttcggcggactcgcctgagccaccgacgaccactctctgtacaacgcctttagcacctacggcgaggtgctctagtccaagatcatactctatcgtgagac

SEQ ID NO: 296082 - DNA, 300 bp, Zea mays
gcagcgtggggatccgctggtggtgggccgcatcatcggcgacgtggtggacgcctgcgtgcgccgggtgccgctccgcgtcgcctacgccgcgcgcgaggtctccaacggctgcgagctcaggccctccgccatcgccgaccagccgcgcgtcgaggtcggcggacccgacatgcgcaccttctacaccctcgtgatggtagatcctgatgcgccgagccccagcgatcccaacctcagggagtacctgcactggctggtcactgatattccggcgacgactggagtatcttttgggac

SEQ ID NO: 296083 - DNA, 381 bp, Zea mays
cgtatatctctatagccaacacacacacaaatactctccattccattccatctgaaaggatagaataatgggcggtctctccaccaagcttttcgtggtcctcctcctgctcgtttgttacaccgggacgcaaggcgggccggtgactatggtgtcggcgaggaagtgcgagtcgcagagcttccgcttcaagggaccttgctcgagggacgccaactgcgcaaacgtctgcctgaccgaaggtttcaccggcggcgtgtgcaagggcctacgccaccgctgcttctgcaccagggactgctagtactgcctcgtctcgcctcgcctcggctcgtgtcctgcgtgtgcatagccgcagcggatcaagtaaacatgcatgca

SEQ ID NO: 296084 - DNA, 380 bp, Zea mays
ccggaattcccgcggcgagccacgcgtgcgcgcacacgtccgcactaacgaacgaattctagctccgatcacgagctagctggggtgaacgatttcagctgtgctcaacagcatgaagactccgcaggcggaggtggccatgctggtgacggcagcgctgatggcttcttccgcttcagcggcgatcacctgcctgcaggtggtgtcatcgctcgcgccgtgcataccgtacacgactgtgaggaccagcgcgctccccgcgtaatgctgcatcggccacaagagcctcaacagctcggtgcggaccagagcagaccgacaggcggagtgccgttgcctcaacagccttatcaacagcttcaaacagccacaacatggtc

SEQ ID NO: 296085 - DNA, 256 bp, Zea mays
caaattttcaacaagctaccccaatttctaaagcaataattactaaatattgcatgagcaaacatgtctgccttgtctcttataactaccaggaccattgaaagagcattagctcataaaccagacttgctatctagcatgatgtgaagaactttttggagaatgcatacagcaattctaataccagtttttcaaaacacaacataaagctccatgctttatcaacccactttttttgcatgagaacctctcatga

SEQ ID NO: 296086 - DNA, 391 bp, Zea mays
ttcccgggtcgagccacgggccacgcgtccgcttatacccagactgtagtttagaagctgcaatccttccctggggatctgtatacccttgagcaagtacaggtcaactatgaggttctgcctgggtggcaaagtgacatttcttctgttcgaagatacgatgaacttccccaagctgcccgcctttatgtggagaggatagaagaacttgttggtgttcccgtgcactacattggtgttggacctggcagagatgctctcatatacaagtaaaagcaactttatttggtccttggttgggcggaaaccaggctgggactcgggagcatttgcattttcttggcgtggtaacttttgatacggtgaagtcactgactcgtggagtgatgtt

SEQ ID NO: 296087 - DNA, 359 bp, Zea mays
accgacggatgcgttcgggagtacggcttaaccatggataacttgtattcccttatcatgaacgtgttcgtgggcggggtatctaccatagatctggtgctagagtacgtcatggcctagctcatgaaccacaggctcgtgatgaagaagctgcacgctgaggtacagacgtaccgagcgtagaataagctggacatgatcagggaggactacctgagcagcctgtcgtacctaaactcgttcatgaagtatgcgctgctgctgcaccgatctgtgaacatgctgatgccgtactactataccgatgactgcctgatcgacagtgaaaacatccctttcatcactcgcgttctcgtgaa

SEQ ID NO: 296088 - DNA, 365 bp, Zea mays
cccacgcgtccggcatgagtacacccttcttcagaaggacaccaagtggcctctcggttggccgctgggcggctaccctggccctcaggtagattagatggatctgcgtgcctccaggctccagccatatcgatggctttgatcagctgacggaatgatcctggcagggaccttactactgcgccgtcggagcggacaagtcctacgggcgggacatcgtggacgcgcactacaaggcctgcctctacgccagcatcgacatcagtggcatcaacggggaggtcatgccggggcagtgggagttccaggtcggtcctgccgtcggcgtctcggccggcgaccagctctgggtggctcgctacatt

SEQ ID NO: 296089 - DNA, 309 bp, Zea mays
gcattgcagatattcaatacatctagtgtttctctacacttcattgcatctaacaatgactggggtgtaagagagtatgatatgcatagctatcattcgtttaaccataatctatttaatctcccactgaatcctacgtcatctatccctgttggaaacctggtaatcatcgttgttgatctcacaaatcctcaactattgcttcctatttcaggaaatcctattcattccattaaaggtcacttgtatttctcctttgctccgacttggagcccaaatggcctaacattacccacatgcaaccaagac

SEQ ID NO: 296090 - DNA, 321 bp, Zea mays
cccactcgttcgaacaaaacaaatacttgctactaatcactgaaatgacaacaaaagcatggagtttctgacagggtatcaaaagcactgcatgatgcaattgctgctgagtatcatgtaacatgatcaattatcctgcctatgcatatgacatcttcattacatacacgtacaagctctgctgtccactatgatgatgcaattactgattatgcatgtgacagattgcattttgagcccaacttctcacttccctttgtactcaacctccattgctcctgatggtggaacttttgctttctactaacttaatgcaaaaac

SEQ ID NO: 296091 - DNA, 406 bp, Zea mays
  unsure (1)..(406): unsure at all n locations
ggttgcaccaatgtggatgagattctacatacgggcaaaagtgcttcagcccctggaatcgggctcttggctcaattagctgctgcgaaagttgtagcaacggcactttgcaaaggttctggtcttgttggtggcctttatgctccaagtttgatgattggcgctgctgttggtgctgtttttggaggctcagcagcagaattaataaactctgcgattccgggtaacactgctgttgcacatnctcaaagctatgcactgggtaagttcttattttttggcaatcaatttaaaccctgaactctatattgggctaacttttcataccatttaagtgggaatggctgctaccctggcttcaatgtgttctggttcactgacatctgtgctggtactctttgaattg

SEQ ID NO: 296092 - DNA, 434 bp, Zea mays
gctgaagtcagtgctaacatgacatatgatgctttgagcaaagatgtccatcatggtcaggcagtgacagacaagatgttacttgatccgatttcttgtgagataattcaggactctggaaaaccagaaggctgtctacaaggatttccatggccgaacaccattgcatcattgtgtccaaaagaaaaatgatgagctcaccaagcatctgctgaagaggggtgcgagaacgacaattaaagatggcggaagtctgactgctctggagagaagaatggaacttggagcgataactgatgaagacttattcatactatttgtgaagtgatgttgcaaacttgcaatacaagcctttggcaactagctggttgtacctgatagcattgtattgtacccacctaatttagcttctggaaagaacatgatttctacac

SEQ ID NO: 296093 - DNA, 330 bp, Zea mays
catccggctttcgaacaccagatcctcgctgggctctcaaaggcactgcatgccactcgccgtgcgggtgacagcctccgtcccctgctcccctacatgatcagggcttgccggccctacgctgtccactggttcgcgcgcgaaaccctatccaccacgtacgcgactggcacatgcaccagctacgccggtgagcacctcaacaagctactcaccatcatctaccaccgcacgcacatcgagccactcctctagtgccccaacgagcagaactgctcgcccctgacaatctcctgatcttagctgcacgcagctgctcctgacaaacaa

SEQ ID NO: 296094 - DNA, 305 bp, Zea mays
cccactcgtccgcccacgcgtccgtccactcgtccgcccacgcgtccgattggcaggcgagcatcatggggccttcggacagcccatttgcaggtggggtattcttggtgaacattcacttcccaccggattaccctttcaagccaccaaaggtgtctttccgcaccaaggttttccacccgaacatcaacagcaacggcagcatttgccttgacattcttaaagaacagtggagtcctgctttaactatctcaaaagttctcctgtcaatctgctcactgctcacggacccaaaccctgatgat

SEQ ID NO: 296095 - DNA, 349 bp, Zea mays
ggcagaattaagtcaaaatgaatttgtcttgacaaacgagaggttccttgtcccagagatgcttgttcatcccattgatcttggcataaatcaagctgggcttgctgagtgtatagttcgtgctgtacaagcttgccatccatatcttcaacctgtgctttttgagagcatcatcttgacaggtggaagcacactgttccccagattcaccgaaagattggagagggaacttcggcctcttgtccctgacgactacaaggttaagataactcgtcaagagaagtatgtctctcgcaccccctcttgcatgcccaaatttattggtggaaaatgctgaaaaatgaatcat

SEQ ID NO: 296096 - DNA, 296 bp, Zea mays
tccggcatgagggactggaaagaggtttatacactacgttgcctctccagggtgctctagcttcgactgtttagatctaagggttgggggggcccgccctgcctatgatgatggaaataggtctagagagaggattcagaactgcattgagtgactttgtacttatgcagctccagttagcatctgtgttcttcacattctctcttgggaccaaaactcactactactgaaccacactgctacattgaggagctgaatatagagctacagtgcgtggatttgtggtgtttcatgcc

SEQ ID NO: 296097 - DNA, 282 bp, Zea mays
aattcccggctggacgcacgcatgcggccggatgcactgtaaagaggtctatactttactatgcctgtccaggttgctctagctttggacgcatgtaaacagcggggggtcttgctggcgctgcctatgatgatggaaattggtctagagagaggattcagaactgcattgagtgactttgtacttatgcagctccagttagcatctgtgttcttcacattctctcttgggaccaaaactcactactacggaaccacactgctacatgtaggagctgaatat

SEQ ID NO: 296098 - DNA, 294 bp, Zea mays
  unsure (1)..(294): unsure at all n locations
tccctggtcgacccactcatcctcctgcgtcttcctctcgctacccctctctctcttctcctttcccgacaaacaactcccagtcgcccacctgnatgaagtttcctgctccctacctccttgctctcctctctggaaactccagcccctcttcccatgacttgacagccattctcaagtcagttcgctgtcaagttcacaattaaaacatgcaactccttctgtcccaacttatcagtaatcacattacctaactcattgcttctggcaatgaaaactttgcttcagtcccat

SEQ ID NO: 296099 - DNA, 384 bp, Zea mays
  unsure (1)..(384): unsure at all n locations
tcccggntcgaccgcacgcgtccgcaacataggcttgaggtattccggtcaagggagactgggtggggagttcggtctttggggctcgttaangctggcacattcatttgtgagttcagcgggattatccttactcaccagcagtcagaggttgtggcagcaaacggcgattgcttggtgcgtccaagtaggtttcctccaaggtggttggattggggtgatatatctgatgtctaccctgattatgtggcgccagaccatccttctattcctgagttaaaatttgcaattgatgtgtcaagggcaaggaatgtggcatgctatttcagccacagttgcagtccaaacgtgtttgtccaagttgtgcctgttgatcattacaat

SEQ ID NO: 296100 - DNA, 316 bp, Zea mays
  unsure (1)..(316): unsure at all n locations
gagaaaggctgcttccatatggacgaggattatctaggatccttccaagccatcgagcggtaccatgtactagagctaaatcgtcccnacacctacagttccacctacctagacctacacaaggactaacgcaagatgtaccttatgaagaagatccccctttgcaagcacaacgacaagttccatacgacctcttaccatgagatgtccctgatggcaaacctcagcaacccgtacatcgtcaaatacaaagacggatgggtataccaggggaccatcatctgcatcgtcacaagctactgctaaggaggggaca

SEQ ID NO: 296101 - DNA, 356 bp, Zea mays
gtccagcgcatatgatgatcagttcaagcagctcatttcggctggaaaagacccggggagggcttactgggaacttgttataaaagatatccaaaaatcctgccaacttttttaggccatctaccattaaacttattgggcttattggtattttttcctaaaagggtcttcttaggtggccaaagacacttaaaggacttgttaaaccggaaaatgggtacacaaaatggtcaaaccccccaaaggctacataaaaaacccaacttcctgaaaaaggggttctttcattcaagaaagtattcgttattgccttaaccgtcaacgcaaccctaattttttcaattgcaaaaaataag

SEQ ID NO: 296102 - DNA, 250 bp, Zea mays
  unsure (1)..(250): unsure at all n locations
gccacccccttccaannactacacnnaccctcccccggcgccgctgatcaacgcggcggagctggggtcctggtcgctgtaccgcgccgtgatcgccgagttcatcgccacgctgctgttcctgtacatcacgggggccaccgtgatcgggtacaagcaccagactgacgcgtcggcgtcgggcgccgacgcggcgtgcggcagcgtgggcgtgctgggcatcgcctgggcctttcgcggcatgatcttc

SEQ ID NO: 296103 - DNA, 255 bp, Zea mays
  unsure (1)..(255): unsure at all n locations
cgcgtccggaccaatatactatcttcttctagctctatctaggctcgtctgctgcaagaangtaacagggcgggcttggatgttaattatgaggacctccccctnngcgccaacaagttctcggagcgccagcccatcggcacggcggcgcagggcacggacgacaaggactacaaggagcccccgccggcgccgctcttcgagcccggngagctcaagtcctggtccttctaccgcgccggcatcgccgagttc

SEQ ID NO: 296104 - DNA, 397 bp, Zea mays
  unsure (1)..(397): unsure at all n locations
cggctgaattcccggtcgaccgacgcgtccggacctttttatctacctccaacacgatcttatcatctcgactgctgaaaaaacacaacagggcggtttggaggggagggtggaggaccttcttctgnnccccaacaagttctcggagcgccagcccatcagcacagcggcgcagggcacggacgacaaggactacaaggagcccccgccggcgccgctcttatagcctcccgagcccaagccctggtccttctaccgcgccggcatcgccgagttcgtcgccacctttctcttattatacatctccatcctcaccgncatgggcgtctccaagtccacctccaagtgcgccaccgtcggcatccagggcatcgcctggtccttcngcggcatgatc

SEQ ID NO: 296105 - DNA, 288 bp, Zea mays
aattcccacctacacctacgcttccgctacatcgcatacaattgattaactgcgttccacacttaaaaacactaatactaggatagggcctaataaaccatcacaaattaccatcaacactaaacactcaaaatctagctaactatgccatcatctgccaggaaaaataaactaatgccaattgtttaacctgacatccttgttgatggccctcatgacattgaatcgttcgcttacgtcactgacaccgtccatgctgtctgctacaatgcgctcaacgagcaccat

SEQ ID NO: 296106 - DNA, 349 bp, Zea mays
ggccgtccttacttatcttttcgaaagctcttaaaggttgaagagttatggagcgcgctggttaatgccaagggatgaactggcaatagacatatgggatgctgttgaggcacttgactatgtgctagagcctggatgcgactaggtgccataacgcatagggaaacaactggacgggtatataacactgcgtgtacaacaacttgatgtccgctgcgaaacaaagacaaaggataatggcttcgtaaatgatgtggcatctgtgcaatatcgtgcccttgccgataaggcatctgatgcttttacaagcttagtgacaccatggagcaaactcagtcatatggttttg

SEQ ID NO: 296107 - DNA, 270 bp, Zea mays
aacaaaaacaataacaattaaaagctatcaatctaatactctaaagataaaaaaaggggcaaggggcaaaacatacctgcagactatcaataaaaaggcttgaagagtggaggctgatgcaaagggacatggatgagtggatgagacaccatcaactcccatctcatcttcaagaacgtgtgccgcggttcgttcaagtcaaatggcttgctacaagaggagtagaagaagaatccatcttgcaagctttgcctgctgatattcgtcagg

SEQ ID NO: 296108 - DNA, 259 bp, Zea mays
cgagtacaccgtcgtggacgtgaaccaggtggtcaaggtcgaccccgccgtgccggccaagctcgcctgcctcctcagctgcggcgccggcaccggggtaggagcagcgtggaggtctgccaaggtggagccaggatccactgttgcaatctttggcctcggatctgtcggtttggcggtggtccaaggcgcgaaaatgtgtggcgcatccaagatcatcggcgttgatctcaaccctgacaaggaggaagtagggaga

SEQ ID NO: 296109 - DNA, 140 bp, Zea mays
ttcagattatggtctgtccaagactggcccatctatggaccatactcatgtgagcgcgggtgtcaaaagcaggtatgggtaccttgatccctaattcttccgcatgcaggagctttcagtgaaatccgatgtctactcat

SEQ ID NO: 296110 - DNA, 368 bp, Zea mays
cggacgcgtgggcggacgcgtgggatcgggaacgagacgttcgagaagctggggacgctaggcacgtcggcgaacctgctggtgtacctgacgcaggtgttccacatgcggagcgtggacgcggcgacgctactcaacgggctcaacggcaccaccagcctcgcccccatcatcggcgccttcctctccgacgcctacctcggccgctacctcgcgctcgccatcgcctccgtcgcctccctcatcgtaagcgcagcgatccatcttcagtccacccctctcgctcgttacctgcttaatttgagggacaccggggtcggaatcagttcgggggtagatggaatggaattcggcattgctgtgcttgc

SEQ ID NO: 296111 - DNA, 406 bp, Zea mays
cttaggagctggaatggtaaactcttaattttcaaccggctagttttcttgagcctacagatgcatgctacaagacaaatttttcatcagatttgcaccataatacttgtaatattttagatagcttgaagagatcataccttttgtttttattgtctttctacattcagacatctaggagctttacgaaggaagagatctctaaacataacacaaggaaggactgttggatcgtcatcaaggacaaggtctatgatgtcactccttatgtagaggagcatccaggcggagatgccattctaaataatgctggtggtgattccacagagggcttttttgggtctgtaacttatattgcttcctatacctcataacatgctctgtcattgcctgattagttcagcac

SEQ ID NO: 296112 - DNA, 408 bp, Zea mays
  unsure (1)..(408): unsure at all n locations
gttccattcgtccgttcggcgcgctcgcaccagatccgtccacgtttcatccagatctgtctgacctgccttttctccccccgcagatcatcctggatcgggagacgcagaggtcccgcggcttcggcttcgtcaccttctccacggaggacgcgatgcgcagcgccatcgagggcatgaacggcaaggagctcgacggccgcaacatcaccgttaacgaggcccagtcccgcggcggccgtggaggcggcggtggcggatacggtggcgggcgccgtgatggaggcggctacggcggtggcggtggaggctacggcggtggtcgtggaggctacngcggcggtggtggatactgtggtgcaaaccgcggcggctgctactgcaacaacgacgggaactggaagaact

SEQ ID NO: 296113 - DNA, 270 bp, Zea mays
ctcacgcgtgcgctgacgcgttggaactcgaagggttactatgcctaggaggctgcccgtttgaccgcccacgccatcatgatgaacaagtctgggcagattgtcaacgcctatgcctgagcgctagactgcgatacctccaacatcgtctgcaaggttgctgagctcattaccaacatcgacaggcgatctgtcacggagctcgcgaaggagtctaagtttctgaagaacggatatgctggtatggtgaagatgatttacaccaagcct

SEQ ID NO: 296114 - DNA, 324 bp, Zea mays
actcctccgaacccatctacgataccatctacaactctagcattaaatgtgacgtttattggggggagtacctgtacggggacattgactctaaattatgtacgaccatgttccctgtcatctctaacattatgagcatagatattactgtccttgctcctagcagcttgaatatcaatgtctatgcgccttctgaaataaaatacattctttgaattgtttactctatccttgtatcgctcatatcgttccattaaatgttaatattcaaggattgattactaatgattctgttccttttatattccacctaaaatgcttttt

SEQ ID NO: 296115 - DNA, 280 bp, Zea mays
ctgagagcgggcacagagtgccagccaccaggtacacacagacaggcgctgtctccaaaggagagagcgttcgttcgctgcttgctcccgggtccagcggcccttggaggctcgaaacccgatcgtggcgtctgcttcgctcgtgtgtgtgtgtgtggatgtgtttttggcgtcgatatgtgttgagaactacgttaccacggatcaccagatccgctccaaaaaaagcaataaataactagtcagactagacactagatcaccaatatctagcacctat

SEQ ID NO: 296116 - DNA, 334 bp, Zea mays
gctggcttgtcctccccctcttaccaaggcctcttcgggttaaggttacttagggggttgtggaagggcgatggcggcggctgatgtggagtaccgttgcttcgtcggcgggcttgcctgggccaccagcaacgagtcgctggagaatgccttcggcttctacggcgagatcctcgactccaaggtcatcaccgaccgggagacggggaggtctcgcggcttcagcttcgttaccttctcctccgagaactccatgctcgacgctatcgagaacatgaacggcaaggagctcgacggccgtaacattaccgttaaccaggcccagtcccgtggc

SEQ ID NO: 296117 - DNA, 425 bp, Zea mays
  unsure (1)..(425): unsure at all n locations
cggacgcgtgggcggacgcgtgggcggacgcgtgggcggacgcgtgggtgctgcagcagtgacaggtatggccgaggtagtgtcgtcctctcggtaacacgcggtgatctaggtgcctgccgcctaggtgacctttaccgctacttggaggactcacaattttgcttttccgattgtcgtgatctgggttcttactgcttgggggcagcttggaggagaccactcgccattttgcgttttcgatcatcggttactactggatcatggttcgccatcgatgctatgcacaaggccacgctagagctctctgcttgttgacgtgaatatngctctctccctcatgtttaagcctaagcagttgctttgcttggccnagacttttgagcactagcacacanaccacgctacacgcgctttgtgacacg

SEQ ID NO: 296118 - DNA, 451 bp, Zea mays
  unsure (1)..(451): unsure at all n locations
cccacgcgtccgcacgagcggatagcggcgtacagatcttttcgtgctcgtcttcgcgccggtacaacgacgaggacgtcgtcgtcggtgtgatactaggcactggctccaacgccgcgtacgtcgaagaggccagtgccatacccaagctcaagctggagggcggcgaattgcccaagtcagggaacatggtgataaacacagaatggggtaacttctactcgccctgcctccccatcacggagtatgaccaggccttggatgaggagagcttaaacccaggggagcagatcttcgagaagctggtttcgggcatgtatctcggcgagattgtgaggcgggtgctgcttanaatcgcgtcgcagtctttcatcttgggcgatgtcagccacacgaacctcaaaactcgctttagtcttaggactccggacatctccggaatgcaccatga

SEQ ID NO: 296119 - DNA, 163 bp, Zea mays
cccacgcgtccgcccacgcgtccgcccacgcgtccgcccacgcgtccggatcaaaccagcagccaaggggagcttattggctgttgaagcctgatgcaaaataaagtacgaaactatgttttttgtttaactaataactagcaaacatgcttccgttgcattg

SEQ ID NO: 296120 - DNA, 447 bp, Zea mays
  unsure (1)..(447): unsure at all n locations
aagaacttgaaagtacaggtctgtacttcgaggcggctttgaagtttctgcatgttgcgtttcttctagaaactcctagttttgacatttcaagacaaggtggtggaggtcggtcaatgaagatgtactctgaaactgcaaaattatgcaatttttgtgcttatgaatatgaacggtgcaaaaaaatggcttctgctgctttagcgtacaagtgtgtagaagttgcttacctcaaggctgcatactacaaacaccgtactgctacaaaagatcaacaggaacttcaggcagctgtacagataacccgaggtgaaccaccatcgccttctgccctagatattgataatttaaatagccatggatcatcaaatgcctnctcattaaagggtgacaattcacctcatgtgccaggcaatcatttgcctctagctattcacaaccaagccc

SEQ ID NO: 296121 - DNA, 294 bp, Zea mays
cccacgcgtccgcggacgcgtgggcggacgcgtgggaaaatttgcaccattcgggagtcgtagtattgcctgtatccatggacgccagctgagccggtagcatggggaagaagggtgcggtcgagctcatggcaagctgccccaggaagaagtctttgacgcggtccgttaaggccgagctgaaatttcgcttctgcttgatcgggcgctacctgaattatggccggttcgctcagtgcgtgggcactggcacacccgtctacttcgccgtcgttctggagtacctatgcgtct

SEQ ID NO: 296122 - DNA, 332 bp, Zea mays
cccacgcgtccggctttctgccgccgtcaaggcttctgctgccacctctgcttaagaatattcagtgttttgggatctttgtaaggtctatctcgttacagcgaaagtgcctctctacttagatttatgagtaattgttgcttttttgtatgaacatggtaatggcttgtcggagtaccagaggtttactatgttggtttatgctgtgaacgtaagcgagccatattctttggtatgcagtctgaactatatgttaaaaaagaaaaagaaatacaataacatcaaggattcctaagaaaaactgccaacatcatgtgacaactacttatgac

SEQ ID NO: 296123 - DNA, 291 bp, Zea mays
  unsure (1)..(291): unsure at all n locations
ccggtccggaattcccggttcgacgccacgcgtcacgcgtaccggtcacgcctacccgtgcacccaatgttcagaccacgcgtccgggtgctgaagcaggtgcagcccgacatcggcatatcctccaaggccatgtccatcatgaactccttcatcaacgacatctttgagaagctggccggcgaggccgccaagctggcgcggtacaacaagaagcccaccatcacgtnccgcgagatccagacctccgtgcgcctagtcctccccggagagctcgccaagcacgccgtc

SEQ ID NO: 296124 - DNA, 411 bp, Zea mays
  unsure (1)..(411): unsure at all n locations
cccactcttccgcaaccgccggccgattctagcagcgccccagcagcctctggcgggcgggggagcccgaggaggaggaggagggaagatctcgctcgatccaaggaggtgagtacaagatggtgagctcctcgtcgccggtggtcaacgtgtacccgctcgccaactacacgttcggcaccaaggagcccaagatggagaaggacacctccgtcgccgaccgcctcgcccgtatgaaggtcaactacatgaaagaaggaatgcgtacaagtgttgaagcaatcctattggtgcaagagcacaaccatgctcacatactgctcctgcaaatcggtaatacattctgcaaacttcctggtggacggttgaagcctggagaaaatgaaattganggtttgaaaagaaagtatg

SEQ ID NO: 296125 - DNA, 371 bp, Zea mays
  unsure (1)..(371): unsure at all n locations
tccggaattcccgggtcgacccacgcgtgcgccgtgttccgtgtcctcgtccagtgtgtcctctactccgctccccctaantcctcaattggtaggctagcgttaccttccccccggaaaacgtaattggcggtttcgaaggcggcagcggcggcggcaacaccggtgacgccgacagaggggacggtgatcgcgatccacagcctggaggagtggagcatccagatcgaggaggccaacagcgccaagaagctggtggtgattgacttcactgcaacatggtgtcctccgtgccgcgccatggctccaatttttgctgatatggccaagaagtccccaaatgttgtcttctgaaagtgatgtcgatgaaa

SEQ ID NO: 296126 - DNA, 364 bp, Zea mays
cccacgcgtccgcccacgcgtccgcccacgcgtccgcccacgcgtccgggaacaggagagcgatggaaataatggacattagaaacagagacatgttcctcgagagcatcatgtgatttattttgttgtaaatcactaccgatgcagctcggtttgcctactgtttcatctacactttctcttcctttttccttgatgttataggattaacatcactgggtgactttctggaattgcatcgatggttccttttggtgagaaaaggtcttgctgctggtcaagaatgtaacttgtagagcatgatgttgaatcgtgtgaaattagttcagtacttttgatctaacaaatagaaggtcgaattggg

SEQ ID NO: 296127 - DNA, 345 bp, Zea mays
cccacgcgtccgcccacgcgtccgatgcgagaatactgccgcactttgtgataatgggagggcaaacattgaatgcaagctgaaccatactattgacaagccagaagaggctaccattatagagatgcaggagccggtttccctgacctttgccctgcggtacatgaactccttcaccaaggcgtcttcactgtctgagcaagtcactatcagcctgtcgtccgagcttccagtggtggtcgagtacaagatcgctgagatgggttacattagattttacctggcccccaagatcgacgatgacgaggagatgaagccctgatggcctgtgacgacataatgctc

SEQ ID NO: 296128 - DNA, 164 bp, Zea mays
accccccccccccccaccaaaagaaagaaagagatcttggaattgatccagggtacaaattttgttgtgctggcaagatacatgcaaatcctctcagaaaacctgttaaaagcatatggtaaagacattatcaatattcatcatggccttcttccctcatttaa

SEQ ID NO: 296129 - DNA, 239 bp, Zea mays
  unsure (1)..(239): unsure at all n locations
ccgaatcncaattccgacccagccgacgcgtccgcggacgctatggccaagacgcgtatcttagttcgtctcgtgtttgttgttgcccagggggggttttgattgaaggtcgctctctcccanttctaattgctgtgttaatcctcggttccagcagacccatgcttaaaccagcttggactgcggatcgatgggtgctgttacccccgtcaggctttattctaagttaaatcctaagg

SEQ ID NO: 296130 - DNA, 391 bp, Zea mays
  unsure (1)..(391): unsure at all n locations
cccacgcgtccgcccacgcgtccgcccacgcgtccgtgcagtcgccacgccgaagcagatcagggagctgatgaaggtggacgggctcaccaacgacgaggtcaagagccacctgcagaaatacaggctgcacacgcggcgcgcgtcgtcggacggcggcgaccagcacgcgggcgggctgtggtcgtcggcgccggatcagcagtacacgacgtcgcagcacagcacgtcgcagtcgcagtcgcagtccgggtcgccgcaggggccgctgcagctggcggtgtcgagcagggccatgtcggccaccgncggggacagctgcgacgccggcgacgaggccccaggcggccggtcggagagctacggctgggagatgccgcaacacgggacg

SEQ ID NO: 296131 - DNA, 456 bp, Zea mays
  unsure (1)..(456): unsure at all n locations
gaattcccgggtcgacccacgcgtgcgctacaatactttgatggccggccaatgtctgggacagttcctcaacgagtgacttgcactgttgttgaagcacaaccaaatacaaaagggctaactgctcaaccacagtataaaagggtcttgctggataatggtcttacagtgcttgcaccaccttttattgaagcgggtgagaatattgtaatcagtacagccgatgattcttatatgacgagagcgtaaggggtatcgtggatgacgttttgttctaccaaatggggatcgattacaatgtggctaccagaataattttatttacactcagttgtggagttgccgtaaacagtgaaccttggcggacaccaaccaaaaacttttagttcttagctaataacccacacattttgtactcacatgtctnttcggtttgttcctcgcttcaaatattta

SEQ ID NO: 296132 - DNA, 325 bp, Zea mays
cggacgcgtgggcggacgcgtgggcagctagttgcttcgtcgttgtaacttgggtgtctacgtatatattatatgtaccagcggttcaaaaaaaaaaaaaaaaaaaaaaaaaaaaaagaaaaaaaaaaaaaaaaaaaaaaaaaaaaaaaaaaataaaaataaaaaaaaaaaaaaaaggggaggccgttttaaaggatccaagcttacttacgattacatgcaacgaaataactcttctatagggtcaactaaattaaattcaatgaccttggtttaaaaacgtgaggactggaaaaaccctgggatatccaaatttaataccttt

SEQ ID NO: 296133 - DNA, 337 bp, Zea mays
tcgacccacgcgtgcgtcgacgcatgcgctgacgcgtactccgcaagacactctaatctgacggcattgctagactgtgccgtggattcaacatatcttgtgttggaattattgtacatcgtggcctgtatttcggactttacgattctatcaagccagttctcctcactggcagcctccatgacaacttctttgccagttttgctctgggctggctgatcaccaacggtgctggtcttgcatcttaccccattgatactgtccgcagaaggatgatgatgacttctggtgaggctgtcaagtacaagagctccttggacgcattccagcagatcct

SEQ ID NO: 296134 - DNA, 400 bp, Zea mays
cccacgcgtccggcgccacaacgctagcagctgcccgccattgacgctctttggtctccggggagctcgctgagccctgcctccacctcgccggggctctccctccacctcaccgagtcgtcgtcctttacagcagaaggaatggagggaacagagggaggatttcaagaaaaaggttaggcgcatcgtgcggaaatcacaggaaatgttctgaaggaaatgggagtgctggtgaagttaaccatgccatgtcaggctgcaggattttgctgccaacctcaaaagtgctcatctgacaccagcgtcttgtgtatcttccatttatcgtctgttcattggtgacaattgcctccagaaatgcattgggacgtggtcggcttggaaggttctgtttgtgtcg

SEQ ID NO: 296135 - DNA, 365 bp, Zea mays
ccggtcctgaattcccgggtcgaccgacgcgtccgcccacgcgtccgctgacacgtgggtcgacgttgatgatcctgcaatgttgtaggtgattggggcatttgttggccctgctgctgaccacctatgtggctgctatacactgtacctgtctatgcatatatgagactggaacatttggcgcataaaaaaaaagtatacataataatggcaaggcacattatacatatataatataaagggctgccgttctaatggatccaagtttacatacccatccatgcatacttcttagctatcatatagtgacccctaacttcagttcactggccatgattttatagcgtctagacttgaaaaaccct

SEQ ID NO: 296136 - DNA, 416 bp, Zea mays
ggaattcccgggtcgacccacgcgtgcgcaagtgtgttcaaattgcacgactctatttataggatgatgatgcagtgaatgctgacggtgttatgaacaatgcttcatttttggtcaccaacagtcatcatgaggttctaaacttacagtacaaggtctgttatgcaaggattttggatctgaaaagaagatttctggaagctgcacttcgatattatgacatttctcaaattgaacaacgcaagattggagactaagagattgatgaaaatgcacttgagcaagctcttagtgctgctgtgacatgcacaatattggctggtgctggtccacaacgcttccgtgttcttgctactctgtacaaagatgaaaaatgctcgaaagtgaaaatattcccaatactgcaaaaagtttac

SEQ ID NO: 296137 - DNA, 284 bp, Zea mays
cggaattcccgggtcgacccacgcgtgcgctcgtatagagaaggagaaatatcctcagtccctagctacggatctggatggcgtaccgtggcctcgtcttctacatgaccgtcggcggcgccccggcgggccggatcgcgatggagctgtacgccaacgaggtgcccaagaccgcggagaacttacgggcgctgtgcacgggctagaagggcgtgtgcaaatacgggaagccgctccactacaaggactgcacattacaccgtgtcatcccctagttcatgtgc

SEQ ID NO: 296138 - DNA, 377 bp, Zea mays
cccacgcgtccgcggacgcgtgggtttacacgacctgtaatattttgcgagatggaccttagccatctcgcttcgcttacaggattagtctcacagatcatcactatccaaacagaactgagagcgattagcatttagtcaaactgtacaaatggtttcagagataccctgtttgggatagaagactctgatgtattgcaaacgatcttgaacgatcgatataatgggctctaatatgtcatatgtgacagaatcatgggccttcatagatgtgaaacgcccattcaatggaactgtttctatcagaggcagaattattgctgggacatgccacaatgctaagatgaacagaactatcattcgtcgcaggagctacc

SEQ ID NO: 296139 - DNA, 498 bp, Zea mays
cggaattcccgggtcgacccacgcgtgcgcggacgcgtgggcggacgcgtgggctggaccacagatgagataaaagcactaaggacgaggtttcaggtgtcaaaaagagtccaaaatgaggaagttcccatggcagaggaagctctggcgatgatatcacaatcatttaggcaggtcgttcttgatgtgaaagttggacccccttcatttgagaaaggtttagctgaggatattttgtctcttctcaggagaacaaattgcaagaattgtcttgtctgggcaaaaagtgatgatataggaagagagataattaaattgtctaaagatgttattgttggctatgttgtcatggtggataaatttaccaatagaagaacggagttagtgaggattgaaagggctaaagttgctggcatatatcatcctttgatccatgagaaagttatgaaggtcatgcgcatgcatgacaagagagtttttgcatggacttgtgatgat

SEQ ID NO: 296140 - DNA, 402 bp, Zea mays
ggaattcccgggtcgacccacgcgtgcggcaaaccctagccgacatatctcacgatccactcgagcaccaagccgagggaaggtgaagagcgatggggcgcggcgtggtgtcggcgaatggcggcacgcgtcgcgggcaagaagaaggggtcggattccttgacgatcgactgcacctagccagtggaggacatgatcatggaggtcgcctagctcgagaagtgcctgcaagagcgcatcactgtcgcctgcggctaagctggctacctcggtgactccgtcaccatctctcgcgagaagaccaatgtcaccgtcacctctgaccgacccttatcctagaggtacctgacgtactcgacccttaggtacttgtgtacacacaacgtgcgggattggcttctc

SEQ ID NO: 296141 - DNA, 289 bp, Zea mays
ctgtccacaacagggctttttgcagagattcagtacataaggattcttcaaattaaccataccacaccataacatgggacatttgcgaaactacgggtacaggtatcaaaatgcaacgagttcaatactaaaatataagcgtagtgcaatctaatcttctcagcaaatccccaattcctccgagttcgagcgaccatgtcggggcgtggcaagggcgggaagggtctgggcaaaggcggcgccaagcgtcaccgcaaggttctccgggacaacatccagggcatcacga

SEQ ID NO: 296142 - DNA, 456 bp, Zea mays
  unsure (1)..(456): unsure at all n locations
gcggatctacagccaccttggtcaccggcggcgatggcgagttccaagtccggcatccctatcaaggcagaacaagattcggatggctcggcacaaagcacagctgatatgacggcttttgtgcaaaaccttcttatgcagatgcaaaccaggttccaagctatgtcggagaacatcatttcaaagatagatgaaatgggtgcgagaattgatgaattggaacagagcctcaatgacctcaaggctgagataggcggtgaaggcatgtcgacgccatctaagatgaaggaagagtcaagaccttcggacagctccgcatgagtgcagcagaagcagcatgactcgtttcagaggccgttgctgtgtcttgcgtttattactaacaaatactcctncgttcttttttatttgttgcgttttagttcaaaaatgaactagcgagcgacaaatatttga

SEQ ID NO: 296143 - DNA, 451 bp, Zea mays
attctgggtcgacccacgcgtgcgcccacgcgtccgtataattgtaaggtttgcaggtacagtgcctgcaaaggttgttctgcgagcttacaggcgctttcagggaaggtgggctgtgcaaccgaaatggaaccttctcatacaaggatcatttgcgagagtgtcagactcctgtccttgcattggctggagataaagacctaatctgccctccagatgctgtttatgaaactgtgaaactcattccgaatcacaaggtggactatagagtgtttggaaagccacaaggcccgcattatgcacattatgacttggttggaagccgactggcgatcaatgaggtgtatccatgtatcatagagttcctctctcgtcatgatggttattgatttgattatatgatgctaatacagagtaacttacaacaccatgttcatcttaaaggtttttt

SEQ ID NO: 296144 - DNA, 336 bp, Zea mays
  unsure (1)..(336): unsure at all n locations
ggaattcccgggtcgaccgacgcgtccgcccacgcgtccgaagagaatttgttggagagctgaatattacagtcgtgaaaggtactaagtttnccgttagagacatgctggcaagtgatccatatgttgttttaacactcggagggcagaaagctcaatcgacagttaaaaaaagtgatcttaatccggtatggaatgaagtgcttaagatttctgntcctcgaaattacggacctctaaaacngaagtgtatgaccatgatacgttctcagccgatgatatcatgggtgaagcagagatagatctccaaccaatgatcacagccgccatggcctt

SEQ ID NO: 296145 - DNA, 430 bp, Zea mays
  unsure (1)..(430): unsure at all n locations
gaattcccgggtcgacccacgcgtgcgcccacgcgttcggttctgctccggtggctcaagaagcaagcgtcgcacccgccccgatttggattccgaggacgaatacaacattcccgccggactagcgatcaccgtacctnctgtgcctcgaggtggagcccgccgtctgcgactcgcgcagaccacatctaacgcgtgtggcgctcgtccggctcacgggcaaacacccctttaacttagaaccttcggtgtcgtggctgatggcgcacgacttcatcaccccggcaccgcaccactaccactactggaaaaatatcggctagaaaccgaagttcttactctaatagatcaacgttcttatgtaaagcttgtttcgataggtcttatctaatacctgtaatgtacaatgggcagtttgatgttcataatg

SEQ ID NO: 296146 - DNA, 316 bp, Zea mays
cccacgcgtccgtctacacatccgcggacctttacacgaactcgtcatacaaacacgcagggaagcgttatgagtgggtcgggcatctttaagctgttgcaagcattggtgccaacagtatcccagatgacgaacaacgtgaatgcgagaataaagctgttatactaactggggccatcgatcttgcagagacagattttgtagacaaagaataatgtgctatggttatcgtttagttcttgatcatgtttcttttacccacttgccgttaaaaaaagatgtcattaatggctggtgaaaagcaaatttactgttc

SEQ ID NO: 296147 - DNA, 435 bp, Zea mays
gaattcgagggacgactcacgcgaccggtcacgcgttcgttcaaagagcggtctgcatctgacgggtcctgcactaccaacgctatggtctctcacaactctgacttcaaggaacttctgaatggcgacaaggagggccttattaagctcccaagtgacaaagccctgctgagccaccctgtcttccgccctcttgtgcagaaatatgctgacgatgacaaggcattctttgatgactaccacgaggcgcacctcaggctctccctactggggtatcctgatgcttaaacgctccatatacaggagcgcgacacaaactgctgcctgtatggacacttgcgattcatgatgaaccatcagattgcctattgtcgcctttgtaataaaggcatatgctcttagaacttcgactatggctgaatctgaacccatttt

SEQ ID NO: 296148 - DNA, 355 bp, Zea mays
ggaattcccgggtcgaccgacgcgtccgcccacgcgtccgcccacgcgtccggcccacgcgtccggaccagaatcgcatttgcaatctagtagatgtcttctaccggcactatatatttccttttgtttgatgtgtaatgatgttactgttcaacgcttattaccctactatactgttggatgttctttggacctaaaaaaaaaacaattacaaattcaattattatatgtaataattcattaaaaatgcatacaaataagaaaaaatacagaatgtcttttggagcaacacaaaattttgtaaatgagtaaacaaaaaaaaaggggcggccctttttagggtccaacattttct

SEQ ID NO: 296149 - DNA, 392 bp, Zea mays
gagaaatcttacatctttggggaaggtggttcacagaggactgcagaggaaatggacatgaaattacttggtgatgtacctcttgaaatcagtatcagaacaggttcagatgaaggcaaccctattgttgtatcatcacccaactcagcatctgcgcaagcgtacgtaaatgttgcggagaaggtgactcaaaggctcaaggagttagcagaggagcgacggatgggcccagaaatcttactttgagaaattcaggctgcttttctcacacctttccctgtttgacgctacggcgccaaaacaatgtactgataagtagattgctgttggaagtaaactttaaatttcgtcactctgtctgaaaatttactcaaacaaacttctgctgcttc

SEQ ID NO: 296150 - DNA, 448 bp, Zea mays
cccacgcgtccgcccacgcgtccgcggacgcgtgggctccaatgcttgcaaggaaagaaagaacgtgtggaagttccggaacacagtctcggaggcccttgaggacatcacggctctgtactacgacgaggatcgcgacgagatctacactggcaaccggcacgtgcttgtccatgtgtggtcgagctgaaagctgaaactgcggggcggctttcaaccgtagcacggtgatctggtcttcacctgtgcgcgtattaacagctactagtgcctcacgtggcacgggggtggggggcacgaaagagggaccccccaagccactcaagtgacagttcttatttatctcagcatgccaagagcactgtccatcattctgaaatcagaggccccccagatctgttgtaacggacgtaccttgcaagtaatgaaatccattcgttgatctgaa

SEQ ID NO: 296151 - DNA, 398 bp, Zea mays
gcaaaggcgctaatgaggtcagcatcatcatcgaggcttacaggaccttgagggaccggggcccttatcctgcagatcaggttgtgagagacataagtgggaaatttgcatttgtcctgtatgattgctccactaagtcggtcttcatggctgctatgcagctgttcagttattccgaagacatctatctgatcaaaggctactgctacgacgtacaatggtacccactggtattgacagggcaactgataggtagctcgtgttcataaacctcataacaggaccccgatggaaatgttccgttctactggggcgttgacaccggcgggcgtcttgtggtctctgacgacgccgagctcgtgaagagtgcctgtgggaaatcctgtgccccgttcccc

SEQ ID NO: 296152 - DNA, 357 bp, Zea mays
cttacgcgtacggttgagtggactggggcttgcacgagtcaccaatcaccaacactgctagctctatctgaaagatgactctaccacaggctgtaccacatgttttaggtgtcggacaattgctggaatcagcactacatgtggctggcccggttgcatgagcatctgcttcaacctcacctattacatatggtacaatgactaggcaatgagaagcccttggattgggcaccacgaagaagctatcgagctggctcgtctatggacacgaatcaactatggacagtcctatgccaagccattacactgtccatcattacgtcattcccgaggtgaaccctgccacgtttcgcacat

SEQ ID NO: 296153 - DNA, 378 bp, Zea mays
cggacgcgtgggggcagttcttgtcgaggctcaaggagacatgatcaacaacatcgagacacatgtctcgaatgccagcaaccacatacaacaaggcgtgagcgcgctccagaacgcgaagaagctgcagaagaactcgaggaagtggatgtgctacgccatcatcctgctgctggtgatagtggcggtcattgtcgtcgcggtcatccagccatggaagaagtgagcctagggtggctctaaacaggggggagggcgtgggagatacttttttttggctgtctgtgtaatatctgtgcagttgttgggggtggttctgtgatttatggttgtacttatggtcggcaccagagaagctttggtatttccattctttct

SEQ ID NO: 296154 - DNA, 320 bp, Zea mays
cccacgcgttcgggggagaaagactcgatccaggcggcggccatgtccatgcgcggcaagggcggcaagggtctatgcaagggttgaaccaaaccccaccgaaaggtgctccgcgacaacatccagggcatcaccaagccggcgatcctgacgctggctcgtaagggcggtgtgaagcgcatctcggagctcatctactaagagacccgcggcgtgctcaagatcttactcgagaacgtcatactctactcctacacactacacctagcacgcgcgcacagaagaccgacaccgacatgagatgatctatactcgctcaa

SEQ ID NO: 296155 - DNA, 202 bp, Zea mays
cgagctcaaccagccagttcacgttccgcaggtctcgctctctttcttcattaggctcgaaggccggaggtgtagcgagtgcggtcaggttctgcccgagagctactagccgtccgtctactagtcctggaccaccgggatctttggatgcaccgatgacccaaaaacttgccgaactggattgttttgcccctgcgtgctg

SEQ ID NO: 296156 - DNA, 342 bp, Zea mays
cccacgcgtccgcccacgcgtccgtccacgcgtccgcccacgcgtccggcacggatgtggatgagcggtggtgtattgtaattgtaaagagggctgaaagaaaggtccctctggttgggcgtgtcaccaaagagtggccctagaggcaaaccttacgtttgctcgttgcccttggtgtgtacccagatgtgtatcgatgacataggctggctgctgtatcatcatcagggttgacgctgaaaaaaaaaaaaaaaaaaaagggcggtctctctagaggatccatgcttacttacgcgtgcatgctactatatagcttttttatagtttcacctaaatttaatt

SEQ ID NO: 296157 - DNA, 360 bp, Zea mays
cggacgcgtggggatttggagaaggcaagagaaatattaactgtgctgcatgagcagttaaatgctgtcattcatctagagtcaatttttccatgcgaaaagcgtattgattttttagactcacttgtggagaagtttgttacacctgaatcatctcagggagaggtggcaagtctagttgacaaagaggaaatatcttccatatttttagagtttttggatctctttggggctgttggaataagtgatattttagagtagttaatactagtagctagggtcaggatttacatgtttatttgcaatatgtcgacgccaaaggattcggtctttatactgataataaaccgctattgattt

SEQ ID NO: 296158 - DNA, 331 bp, Zea mays
cccggtcgaccacgcgtccgcacactcttatggagacgcccgggatcgcgagtaaccggcagctcatccttacacggcccgggcacaagctcctggtggggtggtactgtgacaccattaacatgaactccaacgcgcgccagatgcttgtcaacgcctgctgattcttagagaccaccgtctttctgtgcctagtcgcttatgagatgtcctcggtcatctacaacgagctggaacttcacagaggaggttttgcctgactacctaatcaagagagacatggccgtggaagacttcttgagcccgtacaaggtactgctgctggaggagg

SEQ ID NO: 296159 - DNA, 402 bp, Zea mays
caggactctcttcaagcttctcatctcgctcaaggggggtcatctgatatcagggagaggttgttgaaggccgttgctgcgctagccggatctaatgtcaatggcaccttatgcttttcacacgaagggtatagtgctaccaccgttactggaagaatcttttgcctcaagtgatgcttgcatgggttccatgtgcacgcgcttggcaacacctgcaacggctgcatagcaactgggccactcttcaatcctgctggcgatgatcattgtacactttaagatcttgaccgacatgccggataccactggaactggacagctttagaagaaacgcttgaatatgacgatatgactgtcaacttgatctcacatgctagaccctactagataattggccgagct

SEQ ID NO: 296160 - DNA, 421 bp, Zea mays
cacaatcctatggctaacccgaggccaatcagaatgcctggaaatctctttcagtggtggaactaacaaatagttgctcccgagaatccatgattttaaccattatgaactccataagagatttaccagacttggagttagagaatataaggagtcaactgctgcgtgatttctcccctgatgacgtgtgcccaagtagcgctcactttcttgaatcacctggcaagattgcaccgtcatgttctgatgatgacaccgactacgactatcaagaggctgaacttatcgatctgagaaatgacaacaatacttatttggaagcctctgcaactacactggcggctatagctattcctgtgcccacaacaaatcttctcagtatcgatgaacttctagaaacagtcgtgaatgatgtgtcatc

SEQ ID NO: 296161 - DNA, 382 bp, Zea mays
cggacgcgtgggcgcgggtctcctcgtagatgagccccgagatgcgcttcacgccgccgcttctcgccagccgtaagaccgtcaccgccatggacgtcgtctacgcgctcaagcggcagggccgcaccctctacggatttggcggctgaggggtcaggggtgtccgccagctgctgctggtcgtggcagaagtcttgggtcgcggtcacgaaatggagtgattcgagagtattcttgcccatgggcttagtttcgtaggcttatcactctagactctagtgccttggtccagtagtagcatacgacttgtactgcatttctttgttctgaacctctaaatatgatgaaatgtggattcactggatctcacagacaaccagtt

SEQ ID NO: 296162 - DNA, 358 bp, Zea mays
attttggtttttttgttacaaccataaagatcagcactaacattaatgactttgctaacataagagtgtcataccatgcgtgccatacaaactacaggtacattcatacatagcataacttacagcacatgatacaagctacagagcacggtcaatcttaaatatataaaaaagacaatattgaaggctctgatgatggagagaaaccagggcaggctttccccgcaaatacggagaagctacttccaaccagtgaccttgtgaccggacgcgtggggttacggacatgtacccaaacgtgatccagttttagttaatgtgctccatgcttgacgtttaaaaaaaaaatttttttttt

SEQ ID NO: 296163 - DNA, 373 bp, Zea mays
agggcggttaacatgccatacacatcttttactgcacgggccagccaaatctgcggccgcatgggctaggtgtgcacgcatcggcaagggcaacaagccgcgggtgagcctgcccaagggcaatggtatcaagctcagcatcgataaggagcagatgaggcacgactttgctgcccacgctgctgacaaagcataagtcttgtgaatgacgctgctagcagctatgtgctataacatagtatatgaggatctgcacggatataaaactacctgctcaagacggtttatcataatgttgaatgcgctttggataaaaataccaagacgtaggacatacgccccttcctttcttctatgctgaattatgggtgaa

SEQ ID NO: 296164 - DNA, 367 bp, Zea mays
ccagagttgaggtcccttttcaatggacgtactaggtgctgtggacgacatctgctatggtagataggcgcatacatgtctgcctataaatgctaactctgcaatcaccaacggaaaacacaagagtactcttggaggaaaggttatcattcactctaacaaaccttaccaacttatgccttgtttgaatgcaattatgcatgttcttgtaccctgctcttgcttggacacatgcttgacatggctaaaaaatatacctcgccgacgtcctggagtacctcgccgcccaggttctggagttggcagggaacgcggcgaaagacaacaagaagacgcgcatcatcctgcgccacgtgcttctggcgat

SEQ ID NO: 296165 - DNA, 293 bp, Zea mays
cacgggcgtaccgtcgacaatatctactctcactagccacgccctatcctgggcataaaggataccgattggtgctatcatggagtcgagacttacccagacgctgcacgcgaaacctgctgacgactgcatcaccttccatcagaccctcctacactaatacattgcaattcctaaatcctaaggactggtaccaacatctcattacattctacaattgactctatgctagttagcgatttaagatcttacgatctctagaaaacagtttagaatcttacataccaacgacc

SEQ ID NO: 296166 - DNA, 301 bp, Zea mays
ggtcattgtaatgttgcgcgtatattcagttcttgcccgcgatgaaaggacaagcgatagggggccacgcattctgtatgacgcacagacgatcctgacatatgcagatcttaactctgaagttcctacgaaagaaagcgctgaaatcatagactacctgaaggcaacatatacggtcggccgctgtataggatccatgtcttacgaactcgtgattgcaacgtcatatgtatattatagtgttacctaaattcaattgactggccgtagttttacaacgcattctacttggaaaaccctg

SEQ ID NO: 296167 - DNA, 427 bp, Zea mays
gaattcccgggtcgacccactcgtccgaaaaaaaaaaaaaaaaaaaaaaaaaaaaaataaaaaaaaaaaaaaaaaaaaaaaaaaaaaagaaaaaggaaaactactaaaataaaaaaaaaaggcctaacgctctactggatccaaccttacatccccttgattgcgacgtctaacctattattttgggccacctaatttcaattaactggccggcatttcacaacgtcttcactggtaaaaccctgggcttcccaaactcattcgccttgcagtacatccacctttaaccatctggcgtattatcgtacaggcccttaccgatagccctttcaaacatttgtccagccttattgtcgaatgtaactccccctgtagcggggcattacgcgcaacatgtctgctgcttacgcccagcttaaccgttaca

SEQ ID NO: 296168 - DNA, 333 bp, Zea mays
  unsure (1)..(333): unsure at all n locations
agactgtacagctgaactagactgggcctcacatgcggtaattgcctaattgctcaactgtccacaccttgcgtgataactctgcgagttacacatatataatgcatacggtcaatacaaactgtctacgaccccttcatcgacgccgacagcctgttccgcagctctggcaccaccagccaccagcagactcgcatgtcggagctagtcggcttattctgccagacttcccacgaaaccaccggtggatcggcgactgctccggatggaccgtntgcctgaggatactgccgagtgaaggaacagcaacggacggtcccaacgtactatgga

SEQ ID NO: 296169 - DNA, 347 bp, Zea mays
  unsure (1)..(347): unsure at all n locations
ttttatgctcgcccttcgcttttacctacagacttaactcacgaggaagcttttttaaaatggtgccggccacacccacctttccttaacttcctcaactactaccttctactccttttcttttaaaaaattacaatgcttaaattcaaaccattttttctttatacatttncaatcttaattaattttttagattccagtcctattgtttttgccttctatatcccaatatataattaatatttacattccttttcattcttattttcatattcacaaatcaaattctttgatttatgaaagacgaacaacttctaaaacattttccaaagatgttttcattaatc

SEQ ID NO: 296170 - DNA, 390 bp, Zea mays
cgtccgaattcccggtcgaccgcacgcgtccgcggacgcgtgggctcgacgtcaacgcccaggacgtacaggcgtacatggtcggcgagcgcggcgacagctcggtggcggtgtggtcgagcgtgagcgtggcggggatgccggtgctcaagtcgctgcaggagagccaccgctgcttcgacgaggaggcgctggagggcatccgccgcgccgtcgtcgacagcgcctacgaggtcatcagcctcaagggctacacctcctgggccatcggctactccgtcgccagcctcgccgcgtcgctgctccgggaccagcgccgcatccacccggtctccgtcctcgccagggggttccacggcatccccgacgggaacgacgtcttcctcagcc

SEQ ID NO: 296171 - DNA, 281 bp, Zea mays
  unsure (1)..(281): unsure at all n locations
gaccctgggaaaaaaaaaaaaaagattttaaaaaaaaaaaaaaaaaaaaaaaaaaaagaacggtttaaaaaaaaaaaaggaaaaaaaaaaaaaaaaaaannnaaatttaaaaaacgggccgccccttctaaaaaacccaaacttacttccccttccttgcgacgccttatcttttttttaatgtcacctaaatcaaattcactggccgtctttttacaacgtcttaacttaaaaaacctttcctttcccaaatttaatccccttgcaacaaataccccttt

SEQ ID NO: 296172 - DNA, 248 bp, Zea mays
accggttcggaattcccgggccgacgcacgcgtccgacttgacccagcagttaatggaacactctttgttctcggttcatgcatgaaagcggctagtaaaattgtggatgtggcatgctctatggctactacagcctacaacacgaggccaaggactcctgaagtcacactttacctgacatgggttgccgatccaactttctgtgctaccaacaagctatccaatatcatgatcgagaacccctcca

SEQ ID NO: 296173 - DNA, 407 bp, Zea mays
  unsure (1)..(407): unsure at all n locations
caccggnctcggaattcccggctcgacccactcgtccgaaaaaaaaaaaaaaaaaaaaaaaaaaaatttaaaaaaaaaaaaaaaaaaaaaaaaaggaagaaaaaataaaaaaaaaaaaaaagaaaaaaaaaaaaaaaaaaaaaaaaaaaaaaaagggccggccgttttaaaggatccaagcttacttacccttccttccaacgtattaccttttttatagtgccacctaaattaaattcactgcccgtctttttacaacttcttaactggaaaaaccctgcctttccccaacttaatccctttgcaacacatccccttttccccagttggcttaataccaaaaagccccgcacctatcccccttccaaacattttcccatccttattggctattggaaccccccctt

SEQ ID NO: 296174 - DNA, 362 bp, Zea mays
  unsure (1)..(362): unsure at all n locations
acactcactattccttttcactgttcctcacancanctaagtctagttcattttacaaagttgcctctcacattaaagctnttttacacgcttccaagaaaagcccgttgttttctcaattcataaaagacttgtcagttccaaaatctaccatggtgaaggctataaccaaaatatttgctgacgctcttttttcagatcttacaaataatttcttggctgtcctcgcggacaatggcaggcttaaatatattgaacgcattgcggaaagatttgtttattttactattgaacataagggggaaatgaacgttgttgtcaagacatttatttcactcaccaaggaggatgataaagaactc

SEQ ID NO: 296175 - DNA, 302 bp, Zea mays
  unsure (1)..(302): unsure at all n locations
cggaattnccgggccgacgaacgcgtccgccaacccgtccgaaacccattcctcccatctcccatgacctcctcagacccnataagcggagctgggtccatggacgccaccggcactgtatctggagggaaggcaaaaaanggagcggccggtcgcaaggccggcgggccgaggaagaagtcggtgacgaggtccgtgaatgccgggctccagttccccgtcggccgcatcgggcgctacctcaagaagggccgctacgcgcagcgcgtctgcagcggtgcccccgtctacctcgcggccgt

SEQ ID NO: 296176 - DNA, 290 bp, Zea mays
cggaattcccgggtcgaccgacgcgtccgtgccagttcatcatcaccaccgtggaaggaagcatgtgctaagtgcacatttccgggctggatgcaagcattggagaaactacagatggacatagcaacttccactgatttgcttggtgttgaaaccagaagcacatgcttcattttctccattggaaaagaacctctgaaaacccgtccttcagtggttgctctgggtgaacgaataaacattttgaagtgatacctcggttggcgtcgcacatgatgccttcaacacat

SEQ ID NO: 296177 - DNA, 395 bp, Zea mays
ccggccggaattcccgggtcgacgcacgcgtccggaacaaaccgcgcgagtcgacactgaaagggattgtcataggaaggcgcaacgctgggaggaatacaaccttcagattgcgtggattattggctggcgtggcactctagtctgtctttccactttactgacccaacatcaaacaaatcatggtcttggacaggaagaaagacaggaaagctaacctgtattacctgagggacaagatgaacacacttaaaagatgaggatttcaacttgtttctatgattacttttgaggcgagcggatcaccatggtttgtcaatatgcaatcacattgtttggggttgcatctttgaaaaaaatcatagcttggggttgtcaggtcgcatgctccgatc

SEQ ID NO: 296178 - DNA, 447 bp, Zea mays
  unsure (1)..(447): unsure at all n locations
cggaannncccgggtgcgacgcgcacgccgtccgnngttctgaagtcgagtacaatgccagagaaggtgaaatgttgagttgcagaatgaccaacttgtactggaaggagtctcgggttgatgagagatgagaagggcacaaaacagacagcgaacatgatgnggggcactcatcgacaatgtgagtatctagcagcacggttttactccttatgatccaataaggagcttcctgcagttcaacatcgtgcagcagcctcagttctattctcagcaggaggaccggaaagacttcaacgaccaaggtggaagataaatattggacctctcaagcttcagtacttatccgtgatgatgcatgactgccagtgagaaactgagctacattacttggggattatatgtaaagactagtactactgctttatatatgtgcatgtgcgcaca

SEQ ID NO: 296179 - DNA, 244 bp, Zea mays
  unsure (1)..(244): unsure at all n locations
ccggnccggaanncccgggtgcgacgcacgcgtccgcccacacgtccatccacacgtgcgtccactctttcgcaagaagacacactccatgggctggtcctctttccccccactcttagagcacaatacccagcaattctaccagcaagaatcctcaaaactgctcaaccagatccaaattctgcaaaacactaacatgcactttgtttttgactctatttgaaacttgttactcaaatagctc

SEQ ID NO: 296180 - DNA, 447 bp, Zea mays
  unsure (1)..(447): unsure at all n locations
accggtccggaattcccgggtgcgcgcacgcgtccgcgcagaactgggccaagatccgcagctgcctccaggacggcaaggtctgccagaagcttgcgtccagaaaggagacggccgcccagttcgtcaacagcaacctctccccgatccagtctggatgctgcaagccaccaacgggttgcaacttcacctaccagagcgaaactgtctgggccaagcccgctggtttcaacaccacaactgacgaccctgactgcaccacatggtcgaacgaccagaccgtgctctgctacgactgcatggcctgcaaggcaggcgtgctggccaacctgaagaacgactggaagaagatcgccaccgtcaacatcgtcttcctgatcttcctcgtcgtcgtctactccgtcgggtgctgcgcgttcaggaacaanccgcaggacaactcgtacc

SEQ ID NO: 296181 - DNA, 366 bp, Zea mays
aaaaaaaaaaaaaaaaaaaaaaaaataaattaaaaaaaaaaaaaaaaaaaaaaaaaggaaagaaaaaaaaaaaaaaaaaagaaggaaaaaaaaaaaaaaaaaaaaaaaaaaaaaaaaggggcgccccttttaaaggatccaagtttacttccccttccttccaacgtaataatttttttatagtgccacctaaattaaattaactgcccgccgtttaacaacgtcttgactggaaaaaccctggctttacccaactaaatccccttgcaaaacatccccttttccccagttggcttaaaaacaaaaaggcccgcaccaatcccccttccaaacattttcccacccttaatggcaaatggaaccccc

SEQ ID NO: 296182 - DNA, 298 bp, Zea mays
ggtcgacccacgcgtgcgcagacgcgtgggcaggcggcaaggccccttggaagcatctggcgaccaaagcggcgcgcgagtcggcccctgcgaccggcggcgtgaagaagccgcaccgattccgaccgggcaccagggcgctgcgcgagatccgcaagtaccagaagagcacggagcttctcatccgcaagctggccttgcagcgcctggtccgcgagatcgcgcatgacttcaagaccgacctccgcttgcagtcctacgccgtcgacgcgctgcacgaggcctaccaggcctacct

SEQ ID NO: 296183 - DNA, 397 bp, Zea mays
ccagcaccagccttggactggtgtgtgctgtatgacatagccctcggcactgcccatgggttagcatatctacatgatgactgccgccctgcgatcattcatcgcgacatcaagccaagtaatatactgctggacaaggacatggtgccacatatttcagattttggcattgcaaagctcttggagcagccttctactgctcctcagaccactggtgtcgttggcaccattggatatatggccccagagttagcgttctacaccaagagcagcatggagtccgacgtgtacagctacggcgtggtgctgctggagctgctcacgaggagggcggcggtagatccctcgttttccgacggcacggacatagtcagctgggcgtcgatcgccctgaacg

SEQ ID NO: 296184 - DNA, 399 bp, Zea mays
ggaattccaggctcgacgccacgcgtgtgcggcacgttcgaactggcattaggctcgcatactgggaccattactgacgaggctgttgagactgtaggacccgtatgttcgcattaagtgcttcgacacacacaggatcatatctgtcgaggaccatgcctatatccagatcaacattgacccattggatacgaatggcctgtatgaaggttggttcacaacatctgctttctctagatgttaaactgctcaaggcgaatcatacagctgctctgacagattgtcacggaataataatgctgatatcatgcattataaattacatctagtgtaccaagagatgcacactgacttaactatattttgaattcatgctactatatgccatgttgggaattc

SEQ ID NO: 296185 - DNA, 265 bp, Zea mays
aataaaaataaacataaaataaaaaaaagttaaaataaacaaaaaaacaacaaaaataaaagggaaaaaaaaaaggggcggccgttctacaggatccaatcttacgtccgcttccttgccacatcttagctttactatcgtttcacctaatttcatttcattgcccgtcttttaacaacgtcttaactggaaaaaccctgccgttacccaactaaatccccttgcatcaaatccccttttcgccatttgacttaatagcaaaaag

SEQ ID NO: 296186 - DNA, 250 bp, Zea mays
aattcccgggtcgaccgcacgcgtccgcccacgcgtccgcccacgcgtccggttgttttcttgttttatcgactaattgggtgactgccgaagagttggtttgtagtcaatgaggtatgctgccccctgtggtgctacgcagctgcagcaacataagatggtcaggctaaaatcatgttgtgggatctgattctaatgatgcttatttagtactattacaaatatctatcgttgcttatataaatttgtt

SEQ ID NO: 296187 - DNA, 411 bp, Zea mays
gaattcccgggtcgaccgcacgcgtccgcggacgcgtggggccgcgcggggtgtgaaatacgtagattgctacggagttgacaacgcgctggttcgagttgcagatccgacgttcttagggtacttcattgacaagggcgcatcttctgccgccaaagtggttaggaaggcttatccgcaagagaatgttggggtgttcgttcaacgaggccgtggtggaccgctctcggtggttgagtacagcgaaatggatgcggctatggctaccgaaatgaatcagtcgacagggcgacttcgttactgttggagcaacatctgcctgcacatgttcactctggacttcttgaaccaagtggcaaacagccttgagaaggacagtgtataccatctagctgagaagaagatcccttc

SEQ ID NO: 296188 - DNA, 426 bp, Zea mays
gtccgccaacgcgtccgcggacccgtggccccgccgtggctcggccctacccctagcgtgccgccggggtcatctcggagcagcggcagcagcacgtgctccgacagcggctgcggctccggctcccccgtcctgggaaagcactcgagggagtcgaggccgcagggcgacgagaaggcggaacgacggtgcctgtggatccccaagacgctccggatcgacgaccctgtcgaggccgccaagagctcgatctggacgacgctcgggatcgagcctggcgaccggggcatgttcaggccgttccagtcgaagcatggacggcagcaggagctgcaagcgtccggcgccgctcgcgccctgcaggccaacccggcggctctgtcgcgctcgcagtcttttcaggagacgacgtgattactacactac

SEQ ID NO: 296189 - DNA, 446 bp, Zea mays
aattccgtgtcgacccacgcgtgcgccacgcgtccgcccacgcgtccgcggacgcttggggactgggtaacacttaaatgtgcaagccaagctgttattgctgacaacgagactggaaaaaacgggtacactgttccattagaggtcctgccagcatgacaattcgaaccattgtacagaactccactaagcattcaggatggagaattgccagtcctgcccatgtccgtgtatggtgctgttgccatggcacatagtgtggattcagatgaatacaactcaccaactcagttctttttctatctttatgacaagagaaactctggcttaagaggaatatcgttcgacgaggggcaattttcagatttcgggtataccacggattggagagatgttctgtcacagattaagtcctgagataaaattcgatctgccaaacttgtaca

SEQ ID NO: 296190 - DNA, 463 bp, Zea mays
caacaattagtaaacaacctaaagctcgcatgactggtcatcagaagcttgtaaaccatgggtactttggccctgatggacaatggttggcaagtgcatcctttgataaatctgtcaagttgtggaatggtatcacaggtaaatttgttgcagcattcagagggcacgttgcagatgtctaccagatcagctggtctgccgacagtaggcttctactaagtggaagcaaggattccactctaaagatttgggatattcgaacacacaagttgaaaatggacttgccgggccacgcggatgaggtgtacaccgtggattggagccctgacggtgaaaaagtggcgtctggtggcaaggatcgggtcctcaagctatggatgaactgactgacgaatattctatggatgaactgattgattattatatatctatgcttgggcgaattatatattgtagtgatgat

SEQ ID NO: 296191 - DNA, 287 bp, Zea mays
cggaattcccgggtcgacccacgcgtacgctcatggccgtcgccgccttcctccgcgcgaccgatctaccctgcggcaccaccatgtcggtgatcgcgggcgaggacttgcatcatatgctgcgtatgctgaacaccaacttggatgggaagcaaaaaatcatgttcgccatgacctcaatcaaaggtgtccgacgccgattgtcaacatctgatgcaagaaggccgacatcgacatgaacaatatggtccgcaagctgacgcctgatgagctggagcgcctgatga

SEQ ID NO: 296192 - DNA, 453 bp, Zea mays
gcgcgccgcccggttccgcgccggccgcgccgtgctgcccaagtggctcatggaggacgtggcggcggaagggttccaggcggtgcgcgcggcggggagcagggccgtctgcgtcactgccatgcccagggtcatggtggacggcttcctccgggagtacctcggcgtgcacgccgtggttgccagggagatgaaggtggtctgggggttctacaccgggatcatggaggacgcgcggccggccgagggtgcagagatggtgaagaaggcggcggaagaacagacggtcgtcgtcgggtactctgcgtcaatggagtttcttaaccatcctctctcacgttgctgcaaggagctcatctcccccatcggccgcaccgtgccgcctgacgcggaccgggacagcgacggcgccgtcatggcgcgccttctggaccgggcaacctcgtcgtcgtc

SEQ ID NO: 296193 - DNA, 366 bp, Zea mays
ccggattggaattccgaggtagaccgacgcgtgcgcttgcttctaactgaatccagcctaccgctgatcgcacgtctacatggacgcgggctattctgacgagaaggcgctacgtgacttcgcaaggacagcgtccgcctcgacaagcgctgccagaagtcagaccgcacggagttgaccaaggttacggctcgtacggagatcgggttcgtctacatgggcttcatcggattcttcgggaagctcatcttgatttccatctacaacattaatagtcagttcctgctaggctcagggcgagacttgcatgggcgtagtacgatactatggagagcaacggatatccaggaacttgccctttggaat

SEQ ID NO: 296194 - DNA, 333 bp, Zea mays
tccggaattcccgggtcgaccgacgcgtccgggcatgtgctcgctcacttaccaagtcctcttctggttatggttacttatggttctgtggaggggctatggcggcggctgatgtggagtaccgttgcttcctcggcaggcttgcctgggccaccagcaacgagtcgctggagaatgcctacgacttctacggcgagatcctcgactccaaggtcatcaccgaccgggagacggagaggtctcgcggattcggctacgttaccttctccttcgagaacttcatgctctacgctatcgagaacatgaactgcaaggagctcgacggtcgtaaca

SEQ ID NO: 296195 - DNA, 177 bp, Zea mays
ggattcccgggtcgacgcacgcgtccgcccacgcgtccgcccacgcgtccgggatttggctgatagttagcgtgtgtatggcatggggctgaatcaaatgatgtgatcatcgcaaggtcacaaacagcctctttgtcatgtacatcgttttccatcatgctatagtgggtgtcagtt

SEQ ID NO: 296196 - DNA, 374 bp, Zea mays
gaattaccgggtcgaccgactcgtacgggcagcagccaaaccctacataggcgccgtttcatgcggccgccccgcatcgtcgccaaaggtgcggatctttgtgaagactgtgacggggaagaccatcactttggaggtggagtcctcggacaccatcgacaatgtgaaagccaagatccatgacaaggagggcattcccccggaccagcagcggctcatcttcatcggcaagcagctctaggacggtcgcaccctcgccgactacaacatccacaaggagtccacactacacctggtgctccggctacgcggcggcgccaagaagcgttagaagaagacgtacacctagcccaaagcagaaactttgatgaatc

SEQ ID NO: 296197 - DNA, 400 bp, Zea mays
ggccgctgcccagtgcccactgcgctccgctttaggaatctgacagagagactagagagggggaaagattcgaaggctggcatgggctccccttcctccctccccgccaacacgacactcatgctcctagccctgctctccagagcccaaagccgctaggcccaattctacacctcagacgccatcacggagaacttcaacaccatctaggccatcatgtactgggtccccttgcacaaggccctcaccacctgttacagacagcccaactgcgcctgcccttacgacaaccgtagtgcgtgcggcttcaagcacaccaaccagtaccccttcatgtccatagactcctactgaaaccatacattgttcaaggactgcaaggcatgctgctcctgctaca

SEQ ID NO: 296198 - DNA, 305 bp, Zea mays
  unsure (1)..(305): unsure at all n locations
gaattcccgggtcgaccgacgcgtccgcaccaacacgcgcgttctcgtgaacgggtgttccatcggcggacaccctacaggatccgagggcgctgcncagtggatgccggagaggttcatgctatacggctggcacaagtccaacaactacagcggccattacttcatgtacctgtcgatcaactctgggcgcccgatctgaatcggggtcaacttcatgctcgcttaccatggagatcatgctcgccaacctcatgtaccattttcactgttaagtacccaatcacaaggaatacggtgaatgg

SEQ ID NO: 296199 - DNA, 333 bp, Zea mays
cggaattcccgggtcgaccgacgcgtccgcccacgcgtccgcccacgcgtccgctagcttgagtcgaccgcacaccacattgaagtacaggttcaggaagctggtggggctgaagaaccagaaggaccagcatttctcggatctgatagtggagcagaaggaggagctgaagaatcgcgccaaccagttgatacagacactggagagctgtggctgggaagctgccatcggttgcggtggcatctcgatgctggcgaagcccaccgcgtacatggggaaagccttcaaagctgctggctttgacagcgagctggacgcgagcaacattcggga

SEQ ID NO: 296200 - DNA, 396 bp, Zea mays
tccggaattcccgggtcgaccgacgcgtacgagcgcatgctgtctgttgctactggcgtgttcacgggttcctccggcgttaagatctcggggtaggtgtgcccggtccactggcactaccgcacccggtcccactcgtgagaactgacagcggggcactacgacatcacgtcgcactacctgtacgcgcgcatcgtgcgcatgctgacgcgccactgcgccgtgctcaactttacctgcgtctagatgctcgaccacgagcagccgtatgacgcgcagtgccatcccgaggcgcttgtgcagcaagtggccgtcgcggcgcgggaagtcggcgtcggtctggacggtgagaacgcgctgacgcgctactacgacacggtgcacgaccagttgggg

SEQ ID NO: 296201 - DNA, 490 bp, Zea mays
tcggtcttgaattcccggggcgaccgacgcgtccggatgtgatgatatcatcaatctcattgcatttacgggtcaaggaccttatggaacggctgtcgtgcctggcaaggggggagggacgctggcctggctaccgctcggctctagtaacggaaacaggtatgtctcacatcattgctcgaagactggaaaaacatcaagttatctcagttgggtagagtgctggtctgtcactccataagtcgcgggttcgaaccccgttttccccgcacgatctgaaacttatagaatagaaggggccataaacaggatagtctataccaattcatttggtgtacttgaaataacttaattcgaaattgttccgtcaagtataagaaattaatataacaatgaataactcactcaatggattataccttgacacttatttatcttaatattcattccattcatgccattcttaagcaaacacgaaaaagcttatatt

SEQ ID NO: 296202 - DNA, 339 bp, Zea mays
tccggaattcccgggtcgaccgacgcgttcgcggacgcgtgggcggacgcgtgggcggacttcgtgtgtggagaagctcaagaagatggctggcgcgtgtacgcaccggagggaagggcagcatgcgcaggaagaagaaggcagttcacaagaccacgaccacagatgacaagcggcttcagagcaccttgaaaaggatcggggggaacaccattcctggtatcgaggaggtcaacatcttctaagacgatgttgttatccagtttcagaaccctaaagtgcaagcattcattcctgcaaatacatgggtggttagtggagtaccccagacaaaaagtc

SEQ ID NO: 296203 - DNA, 419 bp, Zea mays
  unsure (1)..(419): unsure at all n locations
cggaattcccgggtcgaccgacgcgtccgcggacgcgtgggtgccttgctgcgtactttgtctgcaatacaatattcagtgccatcagggcaatgatangcagtgaaggggattatgacatcaggaaaccatgcatcggaagcctatgctatgatttctctaatttggagaaatttctcaacctcaaatctgtcagagagagcctaggggttggagatatagagtttgtttcatgcagcccaactgtctatgaggccatgctattagattggatgaggaaccttgaagttggaatccctgaactccttgagagcgacatcaaagtgttgatttatgctggagagtatgacctcatatgtaactggcttgggaactcaaagtgggtaaactctattgaatggtctggaaaagaagctttt

SEQ ID NO: 296204 - DNA, 324 bp, Zea mays
aaaaaaaaaaaaaaaaaaaaaaaaagaaaaaaaaaaaaaaaaaaaaaaaaaaaaaaagggaggaaataaaggggcgccggtcgcgacctaggttcgtttgtccctctcctttcgaggtattaccagtcgaccggttcctcggagcacaataaagtttgttgctgcctacctgcttgctgtcctcgctggaaaccccagcccctccgctgacaatttgactgccattctggagtcagttgactgtgaagttgacaatgaaaagatggaactcctgctgtcccaacttagcggtaaggacataaccgagctcattgccggcggcag

SEQ ID NO: 296205 - DNA, 382 bp, Zea mays
gtccggatttcccgggtcgaccgacgcgtccgcggacgcgtggggtcgattcgaagatttgccatcctactgagtttgacttctacctgtgtagccatgctggcattcagggaacgagccgccctgctcactaccatgtcctgtgggacgagaacaagttcacagctgacgagctgcagaccctgacgaataacctgtgctacacgtacgcctaggggcacccgttcggtgtcatcggggccccgggcgtactatgctaatcttgcagccttcagagctcgcttctacatggagccagacacctctgacagcgggtcactggccagcggtgcccgtggccccccaccaggtgcggcacgcatcacgagaggggcggggagtg

SEQ ID NO: 296206 - DNA, 453 bp, Zea mays
cggaattcccgggtcgacgcaggcgtccgcccacgcgtccggagcgcatacatgcccgcggacctgttggagttgatggacttctaactacgcgctgcattttgcgcggtagtggacaagtggtgaatggtgacaagggagtggtttacacccacaaggatcttcctttgcaatgaggcaaataacctccgttgtggtcgtaacgaatggctggactccccttttaagtacccttttcttttattccatgctacaaagtttggtgtcgtaacaagcagaatgcctatttagtaggcattgatgtaatcagaccattttgtcgtggtgttccttgtcgtataaaacatccgagacatctgtattagaggcgcggtagctagttgatacgcgattgttctggatgaaatttggatctgttccaaatgcatgataatgcatgtgtgatgaggtcct

SEQ ID NO: 296207 - DNA, 271 bp, Zea mays
ccctctgcaccgtcttataagtaacttggatgacaaggttcctgagagggttctatatgaaattcttattcaggtaggtcgtgttgtagacctacacatacctcgtgacaaggaaactagccgaccaaaaggttatgcttttgctgagtatgaaacagaggagattgcccagtatgccattaagctattttctggccttgttcgacttcataataaaacacttagatttgcggtgcgtttccctttgctctctcattttacataagttata

SEQ ID NO: 296208 - DNA, 327 bp, Zea mays
  unsure (1)..(327): unsure at all n locations
cggaattcccgggtcgaccgcacgcgtccgcaccgcgctgcacattaagcttcgtgcaactggtaggcaacaagaccaagacccctggacctggtgctcagtctgctctcagggctcttgctcgttctgggatgaaaattggacgcattgaggatgttaccccggttcccactgacagcactctcgtttgtgaataccttgtggatccgacagtcaattttgtgccgtaaattaattgttaatttgctgcttcgagtanaaaaaaaaaataaaaaaaaaaaacattaaaaataaatacaaattgaacaacaatcaaaaaaaaacaaa

SEQ ID NO: 296209 - DNA, 287 bp, Zea mays
ttcccgggtcgacgcacgcgttcggaggccgaaggaaaacaatcctgaaacctagccatggggtcagcagatggaaaggggggggcttcttagaagggaaaaaccttggcttggaacaccagcaatgggaacaagctgatcctctacgggctctacaagcaagccacggttggagatgtgaataccgatcgtgcgggcatattctaccaaaagggcagagccaagtgggatgcctggaaagctgttgaaagcaaatcgaatgatgaagggatgaatgactacattac

SEQ ID NO: 296210 - DNA, 396 bp, Zea mays
cccacgcgtgcgcagacgagcggtggcgctgacggacaaggagcaggcggaagaggagttgtgccaaggcacactgggtatgtcgcgtgactcgatgcacaagcgccgagccaccggtggaaagcagaaggcctgaaggaagaagctaaagtatgagcttggtcgccagacagccaacaccaagttgacaagcaataagacagttatgagggtccgtgttcgtagaggtaatgcgaaatggatggctattggcctcgacactggtaactactcatgtggaactgaagctgctaccctcatgacccttatcctcgacgcggtctacaatgcatcagacaatgagcttgcgatgacacagaccgttgttaagagtgccattgctcacgttgatgctga

SEQ ID NO: 296211 - DNA, 335 bp, Zea mays
agcgaatccctcgaatcgtattctcagcctttgctgcatcgcacacccgcgcaaccccagcagccgcatccatggcgcccaaggcagcgaagacgcccgctgcgaaacagccagcgacggatgcaccagctgccgtgaatgcccgaacggcgaacaagcccatggccatcaagcgcctaccaacggccaagtcgatcagccaataatgcggctacatgaagggtaacaggattgcgaagaagtcggtggagacctacaagatctacatcttcaatgcgctaacgcatgtacatcccgacatgatcgtctctttcaaggccatgtacatcatgaac

SEQ ID NO: 296212 - DNA, 394 bp, Zea mays
ggaattcccgggtcgacgcacgcgtgcgcccacgcgtccgagcagatcaggccagtttgcaagagtgccgtgatcacggtcgatcaggataagtgggctggggcgaaggcaactgacaaggtaatgagcttccaccgcgacgccaaaaatgcaaactttttgatcaaggagggtgacaaggtgaggaagctcgcgctgcagtacgtcgaggcatctcagcagaagatcagttgagaccctttaccggatttgaaaaatgtgatcacaatagctgccattgtttcctcgtgctggagcaagcaatccatgtaaatgactgggtgtgcggatcacttggtcaacaaccgtgtacaggccaccctttccgtaaatacatctgcttatgcattttgac

SEQ ID NO: 296213 - DNA, 312 bp, Zea mays
attcccgggtcgacgcacgcgtgcgcggagccgttttcgcatcaattcctggcccgattatctcggctatatactgtcttctctgcgcttgggttgctgcgtagcgtgaagcagaatttaaagattgcatcttttttatatatatagaatcgctaaattatgaaaacgctatgtgtgttctcctgtgcaaacaggtaccgcgggtgttggtttcctgcagttctgcaacctgaacagcttccgaacaaaattcatcctgtggttctctttgtctatgggtttgtcggtgccacagtatttcaacgagtacac

SEQ ID NO: 296214 - DNA, 329 bp, Zea mays
cggaattcccgggtcgaccgacgcgtccggtgggtcggaacgattcgtaatcggattgcttctctaatttatataaactttgattaggtggaacgattccgggtgcaatgcgacacaaacgaacaagtccgacacaaacgaacaaggcctaagccttctgtttaacagtggtcagtgggggaggctgcctcggcgtcctttggagtggcatgtagactctggaagggctggcgctgtggggaatgacgtgttctgtggaaagccttagctctgctttggctggaatgctaccttgtgtataatggaaaagtaacatgctggattaagct

SEQ ID NO: 296215 - DNA, 355 bp, Zea mays
accggttcgaattcccgctcgacgcactcgtacgatgaatagtgtgaggactccattttggttttcacaatggacatgcttgcaaatgatggtgtccattctttcgcaatagggtttctgtaccattgctgatacatttttcttacacgatttcttcttttgcatcctttagcgttttaactaacaaagcagttcaatataatcaatcgcagccactgcatctaatccagaaacatcttaatcgcctcactgctgccgctacagattctccttttcgtaatcctcctaatctgacactcattataatgcacccctactacactctttcaattgcacaactacccaactataataa

SEQ ID NO: 296216 - DNA, 443 bp, Zea mays
  unsure (1)..(443): unsure at all n locations
cggttcgaattcgaggcagcggccgctgagctacaatatttgtactaccatgctgtagctgttgcaagcgtcgacctaaatgcgcaccgtggtcttaaccttgctggtcaatgccgaactcaagctctagctgatggcgctgatcctcaacatgcatactatactgaagacttaaccacatacactgctagaatgagctacacgacgcccaactctggtgttatatacactgtgaccaacagagtactcaacatcttcctctacatactacaacctcgacgagtgcaacctacacncgtcacacgagaactgagacacagattgtcatccaactggaacaccatctcattcgcgacgcaccatgcctttaacgctttgaccactatgaaggctcgctttatcgaccactgattggacagtgcactgatccaacacgagtagat

SEQ ID NO: 296217 - DNA, 365 bp, Zea mays
  unsure (1)..(365): unsure at all n locations
accggnccggaattcccgggtcgaccgacgcgtacgcccacgcgtccgcccacgcgtccgcccacgcgtccggaaaaaagagagaaaagaagccaacgggactcatattttttgcccatgcctgcaagcatctaggtttggtgtctgtttttttggcttcttttgttgtggatctgaatccctgtaagagctctctctctctttctctttttgcatgaaatgtgtgggttctgtctgacaaaatctgcttgtgttgtgtgaatctgaacgtgaacagatcatactggagaaaaaaaaaagcagcaaaactagaaatattatttaatttgcaagctcaatcaaataatatttctagttntgcttgc

SEQ ID NO: 296218 - DNA, 275 bp, Zea mays
  unsure (1)..(275): unsure at all n locations
gaattcccgggtcgaggacgcgtccggactgctgtgttattcttgaaggttatgattgggatgggccacaactttacatgaggcaaggcctcaaagtatcttataaatactatnaatctgcattatggaaagggaaacaagctgcaaaaactgagatataaaagatgaaactttcatagcttacgtgcccagaaggcatttggtaagactcaaaaataatttattgagtgcatgaccaaactaaagataaagcctttcagttggaattgaactgg

SEQ ID NO: 296219 - DNA, 402 bp, Zea mays
gtaccggttcggaattcccgggtggagccacgcgtccgcggacgcgtggggtaccttcgcatccagttgtactaggcatgatgatactttgactggggacgcatcgtccgtggacatggccaccaaggagaacatggagtctctgatatcgatcggccaggagctgctcaagaagccagtggcgagagtgaacatcgacacatggctgtacgagtcctgctactgtgagggcacaaatgcacagtcgctagctgacttcgccaagcaactctctgacgagcgcaagctacgcaagagcaatctcaactccaactaataaatacctctctcagtcacagcatgtgctctttccgcaaattcaccggttcttatttttaatttaattttaattctttgtgtgtg

SEQ ID NO: 296220 - DNA, 294 bp, Zea mays
cctttggaggcacgcattctaccactcgttcgctctctttcttccgtttcttatatccttcctcagattggcatttctggccatcttatcggcgaccagagctcccagttcaatgaagcattcatcctcttcgacaaggactgctactgcttcatcaccaccaatgaacttttaactgtgattctctcgtttgggcataaccctactgatgcttatcttcatgacatgatcaacgaggttgatgcttattgcaattgaaccatctacttccctgagtttcttaaccttattgca

SEQ ID NO: 296221 - DNA, 468 bp, Zea mays
cgcgtccgcccacgcgtgcgggtacaccgaccgagctcagcttacctccactccagctacaatcacagtcgttaccagagcgagagcgagctatatggccgtgaaaatgcccatcaataagatcgccctggggagccaccagtaggtgtaccacccggtcgccctcaatgcggcgttcgctgagttcatctgcaccctcatcttcgtcttcgccggccagggctccggcatggccttcagtgagtcctacgctgtccgctcctacccatgtgcatgcaacacaggctcgatcggccctcgtcctgccttcaacgagcagctagctagttagcctgccctgtacacggcacgccccatcaacagctttacgacttcttctaagctggtctttaaacattttgtttaaaacatgctctagtatctctttgagcttcacttggtctgtcatgctctagcactagcacaagg
